United States Patent Application Publication US 2022/0213167 A1 - sequence listing, part 30

SEQ ID NO: 633881 - protein, 17 aa, Homo sapiens
  CDR3 for alpha chain variable domain of TCR clone 316941 (TRAV1-1, TRAJ32)
CAVRVDELWWGYKQAHL

SEQ ID NO: 633882 - protein, 16 aa, Homo sapiens
  CDR3 for beta chain variable domain of TCR clone 316941 (TRBV5-4, TRBJ2-3)
CASQQPGAGGADTQYF

SEQ ID NO: 633883 - protein, 14 aa, Homo sapiens
  CDR3 for alpha chain variable domain of TCR clone 316942 (TRAV8-3, TRAJ39)
CAVGANTAGNILTF

SEQ ID NO: 633884 - protein, 15 aa, Homo sapiens
  CDR3 for beta chain variable domain of TCR clone 316942 (TRBV4-3, TRBJ1-1)
CASSQELGRGTEAFF

SEQ ID NO: 633885 - protein, 14 aa, Homo sapiens
  CDR3 for alpha chain variable domain of TCR clone 316943 (TRAV21, TRAJ37)
CPRPGSGNTGKLIF

SEQ ID NO: 633886 - protein, 16 aa, Homo sapiens
  CDR3 for beta chain variable domain of TCR clone 316943 (TRBV6-6, TRBJ2-3)
CASSYSHAGATDTQYF

SEQ ID NO: 633887 - protein, 14 aa, Homo sapiens
  CDR3 for alpha chain variable domain of TCR clone 316944 (TRAV16, TRAJ37)
CALDISGNTGKLIF

SEQ ID NO: 633888 - protein, 12 aa, Homo sapiens
  CDR3 for beta chain variable domain of TCR clone 316944 (TRBV11-2, TRBJ2-2)
CASSLPTGELFF

SEQ ID NO: 633889 - protein, 13 aa, Homo sapiens
  CDR3 for alpha chain variable domain of TCR clone 316945 (TRAV8-3, TRAJ44)
CAVVPGTASKLTC

SEQ ID NO: 633890 - protein, 13 aa, Homo sapiens
  CDR3 for beta chain variable domain of TCR clone 316945 (TRBV10-3, TRBJ2-7)
CASKLAVNYEQYF

SEQ ID NO: 633891 - protein, 12 aa, Homo sapiens
  CDR3 for alpha chain variable domain of TCR clone 316946 (TRAV8-3, TRAJ20)
CTVGGGDYKLSF

SEQ ID NO: 633892 - protein, 12 aa, Homo sapiens
  CDR3 for beta chain variable domain of TCR clone 316946 (TRBV3-1, TRBJ2-7)
CASSQVRYEQYF

SEQ ID NO: 633893 - protein, 15 aa, Homo sapiens
  CDR3 for alpha chain variable domain of TCR clone 316947 (TRAV1-2, TRAJ4)
CAVRDSSGGYSKLIF

SEQ ID NO: 633894 - protein, 12 aa, Homo sapiens
  CDR3 for beta chain variable domain of TCR clone 316947 (TRBV11-2, TRBJ2-1)
FASSPGNNEQFF

SEQ ID NO: 633895 - protein, 17 aa, Homo sapiens
  CDR3 for alpha chain variable domain of TCR clone 316948 (TRAV3, TRAJ13)
CAGRGMRRTGGYQKVTF

SEQ ID NO: 633896 - protein, 14 aa, Homo sapiens
  CDR3 for beta chain variable domain of TCR clone 316948 (TRBV5-1, TRBJ2-7)
CASSLTGSGYEQYF

SEQ ID NO: 633897 - protein, 14 aa, Homo sapiens
  CDR3 for alpha chain variable domain of TCR clone 316949 (TRAV12-3, TRAJ10)
SHLPLTGGGNKLTF

SEQ ID NO: 633898 - protein, 16 aa, Homo sapiens
  CDR3 for beta chain variable domain of TCR clone 316949 (TRBV19, TRBJ2-3)
CASSPEWDRGTDTQYF

SEQ ID NO: 633899 - protein, 16 aa, Homo sapiens
  CDR3 for alpha chain variable domain of TCR clone 316950 (TRAV26-1, TRAJ48)
IASSDLSNFGNEKLTF

SEQ ID NO: 633900 - protein, 14 aa, Homo sapiens
  CDR3 for beta chain variable domain of TCR clone 316950 (TRBV13, TRBJ2-7)
CASSLNGASYEQYF

SEQ ID NO: 633901 - protein, 17 aa, Homo sapiens
  CDR3 for alpha chain variable domain of TCR clone 316951 (TRAV26-1, TRAJ11)
CIVRVGQSNSGYSTLTF

SEQ ID NO: 633902 - protein, 13 aa, Homo sapiens
  CDR3 for beta chain variable domain of TCR clone 316951 (TRBV7-9, TRBJ1-2)
CASSLKQNYGYTF

SEQ ID NO: 633903 - protein, 19 aa, Homo sapiens
  CDR3 for alpha chain variable domain of TCR clone 316952 (TRAV1-2, TRAJ26)
CLLPLCCESPDNYGQNFVF

SEQ ID NO: 633904 - protein, 13 aa, Homo sapiens
  CDR3 for beta chain variable domain of TCR clone 316952 (TRBV19, TRBJ1-2)
CASSQGQVYGYTF

SEQ ID NO: 633905 - protein, 14 aa, Homo sapiens
  CDR3 for alpha chain variable domain of TCR clone 316953 (TRAV12-3, TRAJ4)
CAMSATGGYNKLIF

SEQ ID NO: 633906 - protein, 13 aa, Homo sapiens
  CDR3 for beta chain variable domain of TCR clone 316953 (TRBV7-2, TRBJ2-4)
CASSREHANIQYF

SEQ ID NO: 633907 - protein, 17 aa, Homo sapiens
  CDR3 for alpha chain variable domain of TCR clone 316954 (TRAV3, TRAJ42)
CAVRDRDYGGSQVNLIF

SEQ ID NO: 633908 - protein, 14 aa, Homo sapiens
  CDR3 for beta chain variable domain of TCR clone 316954 (TRBV7-2, TRBJ2-5)
CASSPRGSSETQYF

SEQ ID NO: 633909 - protein, 13 aa, Homo sapiens
  CDR3 for alpha chain variable domain of TCR clone 316955 (TRAV12-3, TRAJ13)
CAMSSGGYKEVTF

SEQ ID NO: 633910 - protein, 13 aa, Homo sapiens
  CDR3 for beta chain variable domain of TCR clone 316955 (TRBV20-1, TRBJ1-1)
CSAPPGGHTEAFF

SEQ ID NO: 633911 - protein, 13 aa, Homo sapiens
  CDR3 for alpha chain variable domain of TCR clone 316956 (TRAV2, TRAJ40)
FAFFTSGTYKYIF

SEQ ID NO: 633912 - protein, 14 aa, Homo sapiens
  CDR3 for beta chain variable domain of TCR clone 316956 (TRBV19, TRBJ2-1)
CASPTFVLSGEQFF

SEQ ID NO: 633913 - protein, 14 aa, Homo sapiens
  CDR3 for alpha chain variable domain of TCR clone 316957 (TRAV2, TRAJ23)
CAVGLRNQGGKLIF

SEQ ID NO: 633914 - protein, 14 aa, Homo sapiens
  CDR3 for beta chain variable domain of TCR clone 316957 (TRBV27, TRBJ2-3)
CASRKGGRTDTQYF

SEQ ID NO: 633915 - protein, 15 aa, Homo sapiens
  CDR3 for alpha chain variable domain of TCR clone 316958 (TRAV8-2, TRAJ40)
CVVLGTTSGTYKYIF

SEQ ID NO: 633916 - protein, 16 aa, Homo sapiens
  CDR3 for beta chain variable domain of TCR clone 316958 (TRBV7-3, TRBJ2-1)
CASSLEGYRSYNEHFF

SEQ ID NO: 633917 - protein, 11 aa, Homo sapiens
  CDR3 for alpha chain variable domain of TCR clone 316959 (TRAV1-2, TRAJ31)
CAVNNNARLMF

SEQ ID NO: 633918 - protein, 12 aa, Homo sapiens
  CDR3 for beta chain variable domain of TCR clone 316959 (TRBV11-3, TRBJ1-1)
CASSLRDSEAFF

SEQ ID NO: 633919 - protein, 14 aa, Homo sapiens
  CDR3 for alpha chain variable domain of TCR clone 316960 (TRAV13-1, TRAJ35)
CAASKGGFGNVLHC

SEQ ID NO: 633920 - protein, 14 aa, Homo sapiens
  CDR3 for beta chain variable domain of TCR clone 316960 (TRBV4-1, TRBJ2-2)
CASSQAVNTRELFF

SEQ ID NO: 633921 - protein, 16 aa, Homo sapiens
  CDR3 for alpha chain variable domain of TCR clone 316961 (TRAV3, TRAJ10)
CAVRDMRAGGGNKLTF

SEQ ID NO: 633922 - protein, 15 aa, Homo sapiens
  CDR3 for beta chain variable domain of TCR clone 316961 (TRBV10-3, TRBJ2-3)
CAISLTSGGTDTQYF

SEQ ID NO: 633923 - protein, 14 aa, Homo sapiens
  CDR3 for alpha chain variable domain of TCR clone 316962 (TRAV12-2, TRAJ13)
CAVTKTGGYQKVTF

SEQ ID NO: 633924 - protein, 14 aa, Homo sapiens
  CDR3 for beta chain variable domain of TCR clone 316962 (TRBV4-1, TRBJ1-1)
CASSPKAGNTEAFF

SEQ ID NO: 633925 - protein, 13 aa, Homo sapiens
  CDR3 for alpha chain variable domain of TCR clone 316963 (TRAV2, TRAJ36)
CAVDQTGAHNLFF

SEQ ID NO: 633926 - protein, 12 aa, Homo sapiens
  CDR3 for beta chain variable domain of TCR clone 316963 (TRBV19, TRBJ1-1)
CASMNRYTEAFF

SEQ ID NO: 633927 - protein, 17 aa, Homo sapiens
  CDR3 for alpha chain variable domain of TCR clone 316964 (TRAV4, TRAJ18)
CLVGERSVGSTLGRLYF

SEQ ID NO: 633928 - protein, 14 aa, Homo sapiens
  CDR3 for beta chain variable domain of TCR clone 316964 (TRBV6-5, TRBJ1-2)
CASSYDGTEGGYTF

SEQ ID NO: 633929 - protein, 10 aa, Homo sapiens
  CDR3 for alpha chain variable domain of TCR clone 316965 (TRAV35, TRAJ41)
DANSGYALNF

SEQ ID NO: 633930 - protein, 14 aa, Homo sapiens
  CDR3 for beta chain variable domain of TCR clone 316965 (TRBV6-1, TRBJ2-6)
CASQQGAGANVLTF

SEQ ID NO: 633931 - protein, 15 aa, Homo sapiens
  CDR3 for alpha chain variable domain of TCR clone 316966 (TRAV25, TRAJ53)
CAATGGGGINYKLTF

SEQ ID NO: 633932 - protein, 11 aa, Homo sapiens
  CDR3 for beta chain variable domain of TCR clone 316966 (TRBV11-3, TRBJ2-2)
CASSSGGELFF

SEQ ID NO: 633933 - protein, 17 aa, Homo sapiens
  CDR3 for alpha chain variable domain of TCR clone 316967 (TRAV23/DV6, TRAJ57)
CAASSTLSQGGSEKLVF

SEQ ID NO: 633934 - protein, 15 aa, Homo sapiens
  CDR3 for beta chain variable domain of TCR clone 316967 (TRBV6-1, TRBJ2-6)
CASSSRPSGANVLTF

SEQ ID NO: 633935 - protein, 17 aa, Homo sapiens
  CDR3 for alpha chain variable domain of TCR clone 316968 (TRAV3, TRAJ6)
CAVRDGPRAGGSYIPTF

SEQ ID NO: 633936 - protein, 13 aa, Homo sapiens
  CDR3 for beta chain variable domain of TCR clone 316968 (TRBV14, TRBJ1-2)
CASSQQGYYSYTF

SEQ ID NO: 633937 - protein, 14 aa, Homo sapiens
  CDR3 for alpha chain variable domain of TCR clone 316969 (TRAV4, TRAJ6)
CLVGEAGGSYIPTF

SEQ ID NO: 633938 - protein, 16 aa, Homo sapiens
  CDR3 for beta chain variable domain of TCR clone 316969 (TRBV7-6, TRBJ2-1)
CASSLDEGPSYNEQFF

SEQ ID NO: 633939 - protein, 17 aa, Homo sapiens
  CDR3 for alpha chain variable domain of TCR clone 316970 (TRAV3, TRAJ12)
CAVRDGGRMDSSYKLIF

SEQ ID NO: 633940 - protein, 14 aa, Homo sapiens
  CDR3 for beta chain variable domain of TCR clone 316970 (TRBV12-4, TRBJ1-3)
CGSTLTGAGNTMYF

SEQ ID NO: 633941 - protein, 12 aa, Homo sapiens
  CDR3 for alpha chain variable domain of TCR clone 316971 (TRAV12-3, TRAJ49)
CAMSGTGNQFYF

SEQ ID NO: 633942 - protein, 14 aa, Homo sapiens
  CDR3 for beta chain variable domain of TCR clone 316971 (TRBV19, TRBJ2-1)
CASPTFVLSGEQFF

SEQ ID NO: 633943 - protein, 15 aa, Homo sapiens
  CDR3 for alpha chain variable domain of TCR clone 316972 (TRAV21, TRAJ53)
CATLNSGGSNYKLTF

SEQ ID NO: 633944 - protein, 12 aa, Homo sapiens
  CDR3 for beta chain variable domain of TCR clone 316972 (TRBV2, TRBJ2-1)
CAYGPPGNEQFF

SEQ ID NO: 633945 - protein, 11 aa, Homo sapiens
  CDR3 for alpha chain variable domain of TCR clone 316973 (TRAV39, TRAJ49)
CAVDISTQFYF

SEQ ID NO: 633946 - protein, 17 aa, Homo sapiens
  CDR3 for beta chain variable domain of TCR clone 316973 (TRBV11-2, TRBJ2-1)
CASSLYPPGVEYNEQFF

SEQ ID NO: 633947 - protein, 13 aa, Homo sapiens
  CDR3 for alpha chain variable domain of TCR clone 316974 (TRAV12-1, TRAJ13)
CVVTSGGYQKVTF

SEQ ID NO: 633948 - protein, 15 aa, Homo sapiens
  CDR3 for beta chain variable domain of TCR clone 316974 (TRBV27, TRBJ2-5)
CASSLIPSGGETQYF

SEQ ID NO: 633949 - protein, 12 aa, Homo sapiens
  CDR3 for alpha chain variable domain of TCR clone 316975 (TRAV21, TRAJ39)
CAADNAGDMLTF

SEQ ID NO: 633950 - protein, 15 aa, Homo sapiens
  CDR3 for beta chain variable domain of TCR clone 316975 (TRBV27, TRBJ2-1)
CASSNGGGSSNEQFF

SEQ ID NO: 633951 - protein, 10 aa, Homo sapiens
  CDR3 for alpha chain variable domain of TCR clone 316976 (TRAV36/DV7, TRAJ48)
CAVGNEKLTF

SEQ ID NO: 633952 - protein, 13 aa, Homo sapiens
  CDR3 for beta chain variable domain of TCR clone 316976 (TRBV5-7, TRBJ1-2)
CASSLIRAPGYTF

SEQ ID NO: 633953 - protein, 14 aa, Homo sapiens
  CDR3 for alpha chain variable domain of TCR clone 316977 (TRAV16, TRAJ37)
CALDISGNTGKLTF

SEQ ID NO: 633954 - protein, 11 aa, Homo sapiens
  CDR3 for beta chain variable domain of TCR clone 316977 (TRBV6-1, TRBJ2-1)
CASISSNEQFF

SEQ ID NO: 633955 - protein, 11 aa, Homo sapiens
  CDR3 for alpha chain variable domain of TCR clone 316978 (TRAV2, TRAJ13)
CASGGYQKVTF

SEQ ID NO: 633956 - protein, 12 aa, Homo sapiens
  CDR3 for beta chain variable domain of TCR clone 316978 (TRBV5-1, TRBJ2-7)
CASSLDSYEQYF

SEQ ID NO: 633957 - protein, 17 aa, Homo sapiens
  CDR3 for alpha chain variable domain of TCR clone 316979 (TRAV12-3, TRAJ6)
CAMSARGGAGGSYIPTF

SEQ ID NO: 633958 - protein, 16 aa, Homo sapiens
  CDR3 for beta chain variable domain of TCR clone 316979 (TRBV9, TRBJ2-1)
CASSVGGGGNYNEQFF

SEQ ID NO: 633959 - protein, 16 aa, Homo sapiens
  CDR3 for alpha chain variable domain of TCR clone 316980 (TRAV30, TRAJ24)
CGTETVDADSWGKFQF

SEQ ID NO: 633960 - protein, 15 aa, Homo sapiens
  CDR3 for beta chain variable domain of TCR clone 316980 (TRBV7-2, TRBJ2-2)
CASRRPGQNTGELFF

SEQ ID NO: 633961 - protein, 14 aa, Homo sapiens
  CDR3 for alpha chain variable domain of TCR clone 316981 (TRAV12-2, TRAJ17)
CAVLFKAAGNKLTF

SEQ ID NO: 633962 - protein, 13 aa, Homo sapiens
  CDR3 for beta chain variable domain of TCR clone 316981 (TRBV29-1, TRBJ2-2)
CSTTGVNTGELFF

SEQ ID NO: 633963 - protein, 13 aa, Homo sapiens
  CDR3 for alpha chain variable domain of TCR clone 316982 (TRAV1-2, TRAJ9)
CAALNTGGFKTIF

SEQ ID NO: 633964 - protein, 18 aa, Homo sapiens
  CDR3 for beta chain variable domain of TCR clone 316982 (TRBV6-5, TRBJ2-1)
CASSYSSRRAGVYNEQFF

SEQ ID NO: 633965 - protein, 14 aa, Homo sapiens
  CDR3 for alpha chain variable domain of TCR clone 316983 (TRAV13-1, TRAJ35)
CAASKGGFGNVLNC

SEQ ID NO: 633966 - protein, 14 aa, Homo sapiens
  CDR3 for beta chain variable domain of TCR clone 316983 (TRBV7-9, TRBJ2-1)
CASSPRDSLYEQFF

SEQ ID NO: 633967 - protein, 14 aa, Homo sapiens
  CDR3 for alpha chain variable domain of TCR clone 316984 (TRAV1-2, TRAJ16)
CAVNRFSDGQKLLF

SEQ ID NO: 633968 - protein, 16 aa, Homo sapiens
  CDR3 for beta chain variable domain of TCR clone 316984 (TRBV19, TRBJ2-1)
CASSKAGPSYYNEQFF

SEQ ID NO: 633969 - protein, 14 aa, Homo sapiens
  CDR3 for alpha chain variable domain of TCR clone 316985 (TRAV38-1, TRAJ45)
CAYYSGGGADGLTF

SEQ ID NO: 633970 - protein, 13 aa, Homo sapiens
  CDR3 for beta chain variable domain of TCR clone 316985 (TRBV10-2, TRBJ2-3)
CASSESGDHTQYF

SEQ ID NO: 633971 - protein, 16 aa, Homo sapiens
  CDR3 for alpha chain variable domain of TCR clone 316986 (TRAV16, TRAJ42)
CALGGYYGGSQGNLIF

SEQ ID NO: 633972 - protein, 14 aa, Homo sapiens
  CDR3 for beta chain variable domain of TCR clone 316986 (TRBV3-1, TRBJ2-5)
CASSQAVRQETQYF

SEQ ID NO: 633973 - protein, 13 aa, Homo sapiens
  CDR3 for alpha chain variable domain of TCR clone 316987 (TRAV20, TRAJ42)
CAVQGGSQGNIIF

SEQ ID NO: 633974 - protein, 15 aa, Homo sapiens
  CDR3 for beta chain variable domain of TCR clone 316987 (TRBV10-1, TRBJ2-1)
CASSEWRGTYNEQFF

SEQ ID NO: 633975 - protein, 15 aa, Homo sapiens
  CDR3 for alpha chain variable domain of TCR clone 316988 (TRAV8-3, TRAJ45)
CASSYSGGGADGLTF

SEQ ID NO: 633976 - protein, 11 aa, Homo sapiens
  CDR3 for beta chain variable domain of TCR clone 316988 (TRBV12-4, TRBJ2-3)
CASTATETQYF

SEQ ID NO: 633977 - protein, 16 aa, Homo sapiens
  CDR3 for alpha chain variable domain of TCR clone 316989 (TRAV16, TRAJ4)
CALSRMFSGGYNKLIF

SEQ ID NO: 633978 - protein, 19 aa, Homo sapiens
  CDR3 for beta chain variable domain of TCR clone 316989 (TRBV28, TRBJ2-7)
CASSYSGTSRLGWVYEHYF

SEQ ID NO: 633979 - protein, 14 aa, Homo sapiens
  CDR3 for alpha chain variable domain of TCR clone 316990 (TRAV2, TRAJ9)
CAVEDRSGGFKTIF

SEQ ID NO: 633980 - protein, 13 aa, Homo sapiens
  CDR3 for beta chain variable domain of TCR clone 316990 (TRBV3-1, TRBJ1-1)
CASSPGVNTEAFF

SEQ ID NO: 633981 - protein, 14 aa, Homo sapiens
  CDR3 for alpha chain variable domain of TCR clone 316991 (TRAV8-4, TRAJ48)
CAVSETFGNKKLTF

SEQ ID NO: 633982 - protein, 12 aa, Homo sapiens
  CDR3 for beta chain variable domain of TCR clone 316991 (TRBV7-9, TRBJ2-7)
CASSLEGYEQYF

SEQ ID NO: 633983 - protein, 14 aa, Homo sapiens
  CDR3 for alpha chain variable domain of TCR clone 316992 (TRAV26-2, TRAJ31)
CILIPGNNNARLMF

SEQ ID NO: 633984 - protein, 12 aa, Homo sapiens
  CDR3 for beta chain variable domain of TCR clone 316992 (TRBV28, TRBJ2-3)
CASSLYRDTQYF

SEQ ID NO: 633985 - protein, 11 aa, Homo sapiens
  CDR3 for alpha chain variable domain of TCR clone 316993 (TRAV12-3, TRAJ16)
LTGGDGQTLLF

SEQ ID NO: 633986 - protein, 13 aa, Homo sapiens
  CDR3 for beta chain variable domain of TCR clone 316993 (TRBV12-4, TRBJ1-4)
CASAMGHNEKLFF

SEQ ID NO: 633987 - protein, 12 aa, Homo sapiens
  CDR3 for alpha chain variable domain of TCR clone 316994 (TRAV13-1, TRAJ21)
CAAKEGFNKFYF

SEQ ID NO: 633988 - protein, 20 aa, Homo sapiens
  CDR3 for beta chain variable domain of TCR clone 316994 (TRBV28, TRBJ2-1)
CASTPIGRSPGLAGGKEQFF

SEQ ID NO: 633989 - protein, 13 aa, Homo sapiens
  CDR3 for alpha chain variable domain of TCR clone 316995 (TRAV21, TRAJ20)
CAVGLRVDYKLSF

SEQ ID NO: 633990 - protein, 15 aa, Homo sapiens
  CDR3 for beta chain variable domain of TCR clone 316995 (TRBV4-1, TRBJ2-7)
CASSQQGQGFDEQYF

SEQ ID NO: 633991 - protein, 16 aa, Homo sapiens
  CDR3 for alpha chain variable domain of TCR clone 316996 (TRAV3, TRAJ37)
CAVRVRGSGNTGKLSC

SEQ ID NO: 633992 - protein, 11 aa, Homo sapiens
  CDR3 for beta chain variable domain of TCR clone 316996 (TRBV11-2, TRBJ2-2)
CASSLPGELFF

SEQ ID NO: 633993 - protein, 15 aa, Homo sapiens
  CDR3 for alpha chain variable domain of TCR clone 316997 (TRAV17, TRAJ57)
CATGPSQGGSEKLVF

SEQ ID NO: 633994 - protein, 17 aa, Homo sapiens
  CDR3 for beta chain variable domain of TCR clone 316997 (TRBV24-1, TRBJ2-5)
CATSDATSGDPQETQYF

SEQ ID NO: 633995 - protein, 13 aa, Homo sapiens
  CDR3 for alpha chain variable domain of TCR clone 316998 (TRAV1-2, TRAJ9)
CAALNTGGFKTIF

SEQ ID NO: 633996 - protein, 16 aa, Homo sapiens
  CDR3 for beta chain variable domain of TCR clone 316998 (TRBV7-2, TRBJ1-5)
CASSPWGPEGNQPQHF

SEQ ID NO: 633997 - protein, 13 aa, Homo sapiens
  CDR3 for alpha chain variable domain of TCR clone 316999 (TRAV12-1, TRAJ16)
CVVNGPDGQKLLF

SEQ ID NO: 633998 - protein, 14 aa, Homo sapiens
  CDR3 for beta chain variable domain of TCR clone 316999 (TRBV7-2, TRBJ1-2)
CASSRGGTNYGYTF

SEQ ID NO: 633999 - protein, 14 aa, Homo sapiens
  CDR3 for alpha chain variable domain of TCR clone 317000 (TRAV12-3, TRAJ29)
CAMSPYSGNTPLVF

SEQ ID NO: 634000 - protein, 15 aa, Homo sapiens
  CDR3 for beta chain variable domain of TCR clone 317000 (TRBV12-4, TRBJ2-1)
CASSNGGGSSNEQFF

SEQ ID NO: 634001 - protein, 12 aa, Homo sapiens
  CDR3 for alpha chain variable domain of TCR clone 317001 (TRAV20, TRAJ45)
CAVRGGADGLSF

SEQ ID NO: 634002 - protein, 14 aa, Homo sapiens
  CDR3 for beta chain variable domain of TCR clone 317001 (TRBV20-1, TRBJ2-7)
CSAKRGRSSYEQYF

SEQ ID NO: 634003 - protein, 14 aa, Homo sapiens
  CDR3 for alpha chain variable domain of TCR clone 317002 (TRAV12-2, TRAJ40)
CAVKIPSGTYKYLF

SEQ ID NO: 634004 - protein, 14 aa, Homo sapiens
  CDR3 for beta chain variable domain of TCR clone 317002 (TRBV7-8, TRBJ2-7)
CASSPRDRVYEQYF

SEQ ID NO: 634005 - protein, 20 aa, Homo sapiens
  CDR3 for alpha chain variable domain of TCR clone 317003 (TRAV12-1, TRAJ42)
SSVIQPPTSVKGGSQGNLIF

SEQ ID NO: 634006 - protein, 10 aa, Homo sapiens
  CDR3 for beta chain variable domain of TCR clone 317003 (TRBV11-2, TRBJ2-3)
CASSLGGPSG

SEQ ID NO: 634007 - protein, 12 aa, Homo sapiens
  CDR3 for alpha chain variable domain of TCR clone 317004 (TRAV20, TRAJ56)
CAVTGANSKLTF

SEQ ID NO: 634008 - protein, 16 aa, Homo sapiens
  CDR3 for beta chain variable domain of TCR clone 317004 (TRBV7-2, TRBJ1-2)
CASSSNQDRRGHGYTF

SEQ ID NO: 634009 - protein, 12 aa, Homo sapiens
  CDR3 for alpha chain variable domain of TCR clone 317005 (TRAV29/DV5, TRAJ34)
CAASGNTDKLIF

SEQ ID NO: 634010 - protein, 14 aa, Homo sapiens
  CDR3 for beta chain variable domain of TCR clone 317005 (TRBV12-5, TRBJ2-5)
CASGSRTHQETQYF

SEQ ID NO: 634011 - protein, 16 aa, Homo sapiens
  CDR3 for alpha chain variable domain of TCR clone 317006 (TRAV3, TRAJ10)
CAVRDMRAGGGKKLSF

SEQ ID NO: 634012 - protein, 15 aa, Homo sapiens
  CDR3 for beta chain variable domain of TCR clone 317006 (TRBV11-2, TRBJ1-6)
CASTGFGTAVSPLHF

SEQ ID NO: 634013 - protein, 12 aa, Homo sapiens
  CDR3 for alpha chain variable domain of TCR clone 317007 (TRAV16, TRAJ10)
CSRTGGGNKLTF

SEQ ID NO: 634014 - protein, 14 aa, Homo sapiens
  CDR3 for beta chain variable domain of TCR clone 317007 (TRBV7-3, TRBJ2-2)
CASSLNSNTGELFF

SEQ ID NO: 634015 - protein, 18 aa, Homo sapiens
  CDR3 for alpha chain variable domain of TCR clone 317008 (TRAV26-1, TRAJ52)
CIVRVEGAGGTSYGKLTL

SEQ ID NO: 634016 - protein, 13 aa, Homo sapiens
  CDR3 for beta chain variable domain of TCR clone 317008 (TRBV7-3, TRBJ1-2)
CASSLKRGYGYTF

SEQ ID NO: 634017 - protein, 13 aa, Homo sapiens
  CDR3 for alpha chain variable domain of TCR clone 317009 (TRAV8-3, TRAJ20)
CAVGRPNDHKLSF

SEQ ID NO: 634018 - protein, 14 aa, Homo sapiens
  CDR3 for beta chain variable domain of TCR clone 317009 (TRBV12-5, TRBJ2-5)
CASGSRTHQETQYF

SEQ ID NO: 634019 - protein, 13 aa, Homo sapiens
  CDR3 for alpha chain variable domain of TCR clone 317010 (TRAV12-2, TRAJ20)
CAVYPSNDYKLSF

SEQ ID NO: 634020 - protein, 14 aa, Homo sapiens
  CDR3 for beta chain variable domain of TCR clone 317010 (TRBV27, TRBJ2-5)
CRQFIPAGGETQYF

SEQ ID NO: 634021 - protein, 11 aa, Homo sapiens
  CDR3 for alpha chain variable domain of TCR clone 317011 (TRAV12-2, TRAJ33)
CAVGSNYQLIW

SEQ ID NO: 634022 - protein, 13 aa, Homo sapiens
  CDR3 for beta chain variable domain of TCR clone 317011 (TRBV7-6, TRBJ1-2)
CASSLVADYGYTF

SEQ ID NO: 634023 - protein, 17 aa, Homo sapiens
  CDR3 for alpha chain variable domain of TCR clone 317012 (TRAV3, TRAJ6)
CAVRDGPRAGGSYIPTC

SEQ ID NO: 634024 - protein, 12 aa, Homo sapiens
  CDR3 for beta chain variable domain of TCR clone 317012 (TRBV11-2, TRBJ2-2)
CASSLGGGELFF

SEQ ID NO: 634025 - protein, 14 aa, Homo sapiens
  CDR3 for alpha chain variable domain of TCR clone 317013 (TRAV12-2, TRAJ40)
CAVKIPSGTYKFIF

SEQ ID NO: 634026 - protein, 17 aa, Homo sapiens
  CDR3 for beta chain variable domain of TCR clone 317013 (TRBV13, TRBJ2-3)
CASSLSRVAGGRNTQYF

SEQ ID NO: 634027 - protein, 14 aa, Homo sapiens
  CDR3 for alpha chain variable domain of TCR clone 317014 (TRAV1-2, TRAJ8)
CAVREDTGFQKRVF

SEQ ID NO: 634028 - protein, 15 aa, Homo sapiens
  CDR3 for beta chain variable domain of TCR clone 317014 (TRBV7-9, TRBJ1-1)
CASSHRGTVNTEAFF

SEQ ID NO: 634029 - protein, 15 aa, Homo sapiens
  CDR3 for alpha chain variable domain of TCR clone 317015 (TRAV8-3, TRAJ45)
CASSYSGGGADGLTF

SEQ ID NO: 634030 - protein, 13 aa, Homo sapiens
  CDR3 for beta chain variable domain of TCR clone 317015 (TRBV10-3, TRBJ2-7)
CATKLAVKYEQYF

SEQ ID NO: 634031 - protein, 15 aa, Homo sapiens
  CDR3 for alpha chain variable domain of TCR clone 317016 (TRAV21, TRAJ10)
CAVRGLTGGGNKLTF

SEQ ID NO: 634032 - protein, 14 aa, Homo sapiens
  CDR3 for beta chain variable domain of TCR clone 317016 (TRBV19, TRBJ1-5)
CASGTEVYNQPQHF

SEQ ID NO: 634033 - protein, 15 aa, Homo sapiens
  CDR3 for alpha chain variable domain of TCR clone 317017 (TRAV23/DV6, TRAJ57)
CAASSTLSQGGSEKL

SEQ ID NO: 634034 - protein, 14 aa, Homo sapiens
  CDR3 for beta chain variable domain of TCR clone 317017 (TRBV19, TRBJ2-1)
CASPTFVLSGEQFF

SEQ ID NO: 634035 - protein, 15 aa, Homo sapiens
  CDR3 for alpha chain variable domain of TCR clone 317018 (TRAV26-1, TRAJ48)
CIVRVGDFGNEKLTF

SEQ ID NO: 634036 - protein, 16 aa, Homo sapiens
  CDR3 for beta chain variable domain of TCR clone 317018 (TRBV4-1, TRBJ2-3)
CASSHRAGGLTDTQYY

SEQ ID NO: 634037 - protein, 12 aa, Homo sapiens
  CDR3 for alpha chain variable domain of TCR clone 317019 (TRAV13-1, TRAJ21)
CAAKEGFNKFYF

SEQ ID NO: 634038 - protein, 17 aa, Homo sapiens
  CDR3 for beta chain variable domain of TCR clone 317019 (TRBV7-3, TRBJ2-3)
CASSPGGLAGFGDTQYF

SEQ ID NO: 634039 - protein, 15 aa, Homo sapiens
  CDR3 for alpha chain variable domain of TCR clone 317020 (TRAV17, TRAJ10)
CATDASGGGGNKPTF

SEQ ID NO: 634040 - protein, 14 aa, Homo sapiens
  CDR3 for beta chain variable domain of TCR clone 317020 (TRBV20-1, TRBJ2-5)
CSVPYRGRAETQYF

SEQ ID NO: 634041 - protein, 13 aa, Homo sapiens
  CDR3 for alpha chain variable domain of TCR clone 317021 (TRAV3, TRAJ20)
CCEAFCNDYKLSF

SEQ ID NO: 634042 - protein, 15 aa, Homo sapiens
  CDR3 for beta chain variable domain of TCR clone 317021 (TRBV20-1, TRBJ2-7)
CSARDRVSGMDEQYF

SEQ ID NO: 634043 - protein, 16 aa, Homo sapiens
  CDR3 for alpha chain variable domain of TCR clone 317022 (TRAV8-2, TRAJ7)
CVVSEGPYDGNNRLAF

SEQ ID NO: 634044 - protein, 15 aa, Homo sapiens
  CDR3 for beta chain variable domain of TCR clone 317022 (TRBV27, TRBJ2-3)
CASSLGLAATDTQYF

SEQ ID NO: 634045 - protein, 13 aa, Homo sapiens
  CDR3 for alpha chain variable domain of TCR clone 317023 (TRAV3, TRAJ21)
CAVREPDFTKFYF

SEQ ID NO: 634046 - protein, 16 aa, Homo sapiens
  CDR3 for beta chain variable domain of TCR clone 317023 (TRBV5-1, TRBJ2-3)
CASSLGLAVYTDTQYF

SEQ ID NO: 634047 - protein, 16 aa, Homo sapiens
  CDR3 for alpha chain variable domain of TCR clone 317024 (TRAV23/DV6, TRAJ9)
CAASIGGNTGGFKTIF

SEQ ID NO: 634048 - protein, 13 aa, Homo sapiens
  CDR3 for beta chain variable domain of TCR clone 317024 (TRBV2, TRBJ2-7)
CASSVGGSGEQYF

SEQ ID NO: 634049 - protein, 14 aa, Homo sapiens
  CDR3 for alpha chain variable domain of TCR clone 317025 (TRAV2, TRAJ37)
CAVDFTSNTGKLIF

SEQ ID NO: 634050 - protein, 15 aa, Homo sapiens
  CDR3 for beta chain variable domain of TCR clone 317025 (TRBV20-1, TRBJ1-1)
CSLSRGVTGNTEAFF

SEQ ID NO: 634051 - protein, 12 aa, Homo sapiens
  CDR3 for alpha chain variable domain of TCR clone 317026 (TRAV21, TRAJ56)
CAVGVNRSKLTF

SEQ ID NO: 634052 - protein, 20 aa, Homo sapiens
  CDR3 for beta chain variable domain of TCR clone 317026 (TRBV28, TRBJ2-1)
CASTPIGRSPGLAGGNEQFF

SEQ ID NO: 634053 - protein, 15 aa, Homo sapiens
  CDR3 for alpha chain variable domain of TCR clone 317027 (TRAV13-1, TRAJ3)
CAASKLPSSASKIIF

SEQ ID NO: 634054 - protein, 16 aa, Homo sapiens
  CDR3 for beta chain variable domain of TCR clone 317027 (TRBV25-1, TRBJ1-5)
CASGAPTVNSNQPQHF

SEQ ID NO: 634055 - protein, 16 aa, Homo sapiens
  CDR3 for alpha chain variable domain of TCR clone 317028 (TRAV4, TRAJ22)
CLVGDLYSGSARQLTF

SEQ ID NO: 634056 - protein, 16 aa, Homo sapiens
  CDR3 for beta chain variable domain of TCR clone 317028 (TRBV2, TRBJ2-3)
CASSTSVEGVTDTQYF

SEQ ID NO: 634057 - protein, 12 aa, Homo sapiens
  CDR3 for alpha chain variable domain of TCR clone 317029 (TRAV21, TRAJ45)
CAAGGGADGLTF

SEQ ID NO: 634058 - protein, 14 aa, Homo sapiens
  CDR3 for beta chain variable domain of TCR clone 317029 (TRBV7-2, TRBJ1-5)
CASSPRGGPQPQHF

SEQ ID NO: 634059 - protein, 13 aa, Homo sapiens
  CDR3 for alpha chain variable domain of TCR clone 317030 (TRAV12-3, TRAJ33)
CAMSVNSNYQLIW

SEQ ID NO: 634060 - protein, 16 aa, Homo sapiens
  CDR3 for beta chain variable domain of TCR clone 317030 (TRBV19, TRBJ1-1)
CASRVDVTGAAWGAFF

SEQ ID NO: 634061 - protein, 12 aa, Homo sapiens
  CDR3 for alpha chain variable domain of TCR clone 317031 (TRAV13-1, TRAJ48)
CAANFGNEKLTF

SEQ ID NO: 634062 - protein, 13 aa, Homo sapiens
  CDR3 for beta chain variable domain of TCR clone 317031 (TRBV7-3, TRBJ1-1)
CASSQAWGAEAFF

SEQ ID NO: 634063 - protein, 13 aa, Homo sapiens
  CDR3 for alpha chain variable domain of TCR clone 317032 (TRAV2, TRAJ23)
CAVMGNQGGKLIF

SEQ ID NO: 634064 - protein, 16 aa, Homo sapiens
  CDR3 for beta chain variable domain of TCR clone 317032 (TRBV11-2, TRBJ2-7)
CASSPVAGGTSSTSGR

SEQ ID NO: 634065 - protein, 17 aa, Homo sapiens
  CDR3 for alpha chain variable domain of TCR clone 317033 (TRAV29/DV5, TRAJ45)
CAADGPFSGGGADGLTF

SEQ ID NO: 634066 - protein, 12 aa, Homo sapiens
  CDR3 for beta chain variable domain of TCR clone 317033 (TRBV29-1, TRBJ2-3)
CSVTGGADTQYF

SEQ ID NO: 634067 - protein, 12 aa, Homo sapiens
  CDR3 for alpha chain variable domain of TCR clone 317034 (TRAV16, TRAJ9)
CALSSGGFQTIF

SEQ ID NO: 634068 - protein, 14 aa, Homo sapiens
  CDR3 for beta chain variable domain of TCR clone 317034 (TRBV7-9, TRBJ2-1)
CASSLAGPYNEQFF

SEQ ID NO: 634069 - protein, 19 aa, Homo sapiens
  CDR3 for alpha chain variable domain of TCR clone 317035 (TRAV1-2, TRAJ26)
CLLPLCCERPNNYGQNFVF

SEQ ID NO: 634070 - protein, 11 aa, Homo sapiens
  CDR3 for beta chain variable domain of TCR clone 317035 (TRBV12-4, TRBJ2-3)
CASTATDTQYF

SEQ ID NO: 634071 - protein, 10 aa, Homo sapiens
  CDR3 for alpha chain variable domain of TCR clone 317036 (TRAV23/DV6, TRAJ43)
CAAAAAALEQ

SEQ ID NO: 634072 - protein, 13 aa, Homo sapiens
  CDR3 for beta chain variable domain of TCR clone 317036 (TRBV12-4, TRBJ1-2)
CASSLRQGKGYTF

SEQ ID NO: 634073 - protein, 12 aa, Homo sapiens
  CDR3 for alpha chain variable domain of TCR clone 317037 (TRAV12-2, TRAJ10)
WGVTGGGNKLTF

SEQ ID NO: 634074 - protein, 14 aa, Homo sapiens
  CDR3 for beta chain variable domain of TCR clone 317037 (TRBV12-4, TRBJ1-6)
CASNLQGKGSPLHF

SEQ ID NO: 634075 - protein, 16 aa, Homo sapiens
  CDR3 for alpha chain variable domain of TCR clone 317038 (TRAV12-3, TRAJ45)
RAMGWGSGGGADGLTF

SEQ ID NO: 634076 - protein, 18 aa, Homo sapiens
  CDR3 for beta chain variable domain of TCR clone 317038 (TRBV12-4, TRBJ2-2)
CASSLVAGTRGRTGELFF

SEQ ID NO: 634077 - protein, 15 aa, Homo sapiens
  CDR3 for alpha chain variable domain of TCR clone 317039 (TRAV8-3, TRAJ37)
CAVGARASNTGKLIF

SEQ ID NO: 634078 - protein, 15 aa, Homo sapiens
  CDR3 for beta chain variable domain of TCR clone 317039 (TRBV5-4, TRBJ2-3)
CASSLAWRVTDTQYF

SEQ ID NO: 634079 - protein, 12 aa, Homo sapiens
  CDR3 for alpha chain variable domain of TCR clone 317040 (TRAV30, TRAJ9)
CGTEERGNDMRF

SEQ ID NO: 634080 - protein, 13 aa, Homo sapiens
  CDR3 for beta chain variable domain of TCR clone 317040 (TRBV12-4, TRBJ1-2)
CASSSGSKDGYTF

SEQ ID NO: 634081 - protein, 12 aa, Homo sapiens
  CDR3 for alpha chain variable domain of TCR clone 317041 (TRAV2, TRAJ36)
CAELTGANNLFF

SEQ ID NO: 634082 - protein, 14 aa, Homo sapiens
  CDR3 for beta chain variable domain of TCR clone 317041 (TRBV18, TRBJ2-7)
CASSPRRGAYEQYF

SEQ ID NO: 634083 - protein, 12 aa, Homo sapiens
  CDR3 for alpha chain variable domain of TCR clone 317042 (TRAV26-1, TRAJ36)
CIVRVRADNLFF

SEQ ID NO: 634084 - protein, 13 aa, Homo sapiens
  CDR3 for beta chain variable domain of TCR clone 317042 (TRBV11-2, TRBJ2-5)
CASSRGPSETQDF

SEQ ID NO: 634085 - protein, 15 aa, Homo sapiens
  CDR3 for alpha chain variable domain of TCR clone 317043 (TRAV13-2, TRAJ10)
CAGNRDTGGGNKLTF

SEQ ID NO: 634086 - protein, 16 aa, Homo sapiens
  CDR3 for beta chain variable domain of TCR clone 317043 (TRBV2, TRBJ1-3)
CASSRTGGSTGNTIYF

SEQ ID NO: 634087 - protein, 12 aa, Homo sapiens
  CDR3 for alpha chain variable domain of TCR clone 317044 (TRAV12-1, TRAJ6)
CVVNFRSYIPTF

SEQ ID NO: 634088 - protein, 17 aa, Homo sapiens
  CDR3 for beta chain variable domain of TCR clone 317044 (TRBV20-1, TRBJ2-1)
CSAPPRLAGTRYNEQFF

SEQ ID NO: 634089 - protein, 13 aa, Homo sapiens
  CDR3 for alpha chain variable domain of TCR clone 317045 (TRAV38-1, TRAJ42)
WARWGGSQGNPIF

SEQ ID NO: 634090 - protein, 17 aa, Homo sapiens
  CDR3 for beta chain variable domain of TCR clone 317045 (TRBV20-1, TRBJ2-1)
CSARDPLAGVWDNEQFF

SEQ ID NO: 634091 - protein, 14 aa, Homo sapiens
  CDR3 for alpha chain variable domain of TCR clone 317046 (TRAV12-2, TRAJ13)
CAVKKTGGYQKVTF

SEQ ID NO: 634092 - protein, 15 aa, Homo sapiens
  CDR3 for beta chain variable domain of TCR clone 317046 (TRBV12-4, TRBJ1-2)
CASSPITGGGYGYTF

SEQ ID NO: 634093 - protein, 11 aa, Homo sapiens
  CDR3 for alpha chain variable domain of TCR clone 317047 (TRAV3, TRAJ21)
CAVGNFNKFYL

SEQ ID NO: 634094 - protein, 16 aa, Homo sapiens
  CDR3 for beta chain variable domain of TCR clone 317047 (TRBV19, TRBJ2-1)
CASSKAGPSAYNEQFF

SEQ ID NO: 634095 - protein, 12 aa, Homo sapiens
  CDR3 for alpha chain variable domain of TCR clone 317048 (TRAV36/DV7, TRAJ54)
CAVVRVAQKLVF

SEQ ID NO: 634096 - protein, 14 aa, Homo sapiens
  CDR3 for beta chain variable domain of TCR clone 317048 (TRBV7-3, TRBJ1-1)
CASSLEGGNTEAFF

SEQ ID NO: 634097 - protein, 11 aa, Homo sapiens
  CDR3 for alpha chain variable domain of TCR clone 317049 (TRAV3, TRAJ21)
CAVGNFNKFYF

SEQ ID NO: 634098 - protein, 13 aa, Homo sapiens
  CDR3 for beta chain variable domain of TCR clone 317049 (TRBV4-2, TRBJ2-2)
CASEDRGTGELFF

SEQ ID NO: 634099 - protein, 12 aa, Homo sapiens
  CDR3 for alpha chain variable domain of TCR clone 317050 (TRAV13-1, TRAJ5)
CAAKAGRRALTF

SEQ ID NO: 634100 - protein, 14 aa, Homo sapiens
  CDR3 for beta chain variable domain of TCR clone 317050 (TRBV18, TRBJ2-5)
CASSPGVSQETQYF

SEQ ID NO: 634101 - protein, 14 aa, Homo sapiens
  CDR3 for alpha chain variable domain of TCR clone 317051 (TRAV1-2, TRAJ16)
CAVNRFSDGQKLLF

SEQ ID NO: 634102 - protein, 16 aa, Homo sapiens
  CDR3 for beta chain variable domain of TCR clone 317051 (TRBV19, TRBJ2-7)
CASSLAPSSTSSTSGR

SEQ ID NO: 634103 - protein, 14 aa, Homo sapiens
  CDR3 for alpha chain variable domain of TCR clone 317052 (TRAV29/DV5, TRAJ32)
CAAAYGGATNKLIF

SEQ ID NO: 634104 - protein, 13 aa, Homo sapiens
  CDR3 for beta chain variable domain of TCR clone 317052 (TRBV13, TRBJ2-1)
CASTPGSYNEQFF

SEQ ID NO: 634105 - protein, 14 aa, Homo sapiens
  CDR3 for alpha chain variable domain of TCR clone 317053 (TRAV14/DV4, TRAJ9)
CAMRESTGGFKTIF

SEQ ID NO: 634106 - protein, 12 aa, Homo sapiens
  CDR3 for beta chain variable domain of TCR clone 317053 (TRBV14, TRBJ1-1)
CASSQLKGLAFF

SEQ ID NO: 634107 - protein, 14 aa, Homo sapiens
  CDR3 for alpha chain variable domain of TCR clone 317054 (TRAV2, TRAJ23)
CAVVLRNQGGKLIF

SEQ ID NO: 634108 - protein, 13 aa, Homo sapiens
  CDR3 for beta chain variable domain of TCR clone 317054 (TRBV12-4, TRBJ2-5)
CASSPGTEETQYF

SEQ ID NO: 634109 - protein, 14 aa, Homo sapiens
  CDR3 for alpha chain variable domain of TCR clone 317055 (TRAV17, TRAJ54)
CATDANQGAQKLVF

SEQ ID NO: 634110 - protein, 15 aa, Homo sapiens
  CDR3 for beta chain variable domain of TCR clone 317055 (TRBV20-1, TRBJ2-1)
CSARSPGGPGNEQFF

SEQ ID NO: 634111 - protein, 13 aa, Homo sapiens
  CDR3 for alpha chain variable domain of TCR clone 317056 (TRAV23/DV6, TRAJ47)
CAASSQYGNKLVF

SEQ ID NO: 634112 - protein, 15 aa, Homo sapiens
  CDR3 for beta chain variable domain of TCR clone 317056 (TRBV7-3, TRBJ2-1)
CASSLYGNSYNEQFF

SEQ ID NO: 634113 - protein, 12 aa, Homo sapiens
  CDR3 for alpha chain variable domain of TCR clone 317057 (TRAV27, TRAJ34)
CAGAKNTGKLIF

SEQ ID NO: 634114 - protein, 13 aa, Homo sapiens
  CDR3 for beta chain variable domain of TCR clone 317057 (TRBV4-1, TRBJ2-1)
CASSQEVQYEQFF

SEQ ID NO: 634115 - protein, 17 aa, Homo sapiens
  CDR3 for alpha chain variable domain of TCR clone 317058 (TRAV17, TRAJ7)
CATLGRLAFGKGNQVVV

SEQ ID NO: 634116 - protein, 12 aa, Homo sapiens
  CDR3 for beta chain variable domain of TCR clone 317058 (TRBV19, TRBJ2-7)
CASTSGTYEQYF

SEQ ID NO: 634117 - protein, 12 aa, Homo sapiens
  CDR3 for alpha chain variable domain of TCR clone 317059 (TRAV2, TRAJ33)
CAVWGSNYQLTW

SEQ ID NO: 634118 - protein, 16 aa, Homo sapiens
  CDR3 for beta chain variable domain of TCR clone 317059 (TRBV20-1, TRBJ1-4)
CSAPGQGLLTNEKLFF

SEQ ID NO: 634119 - protein, 15 aa, Homo sapiens
  CDR3 for alpha chain variable domain of TCR clone 317060 (TRAV1-2, TRAJ28)
CAVQYSGAGSYQLTF

SEQ ID NO: 634120 - protein, 13 aa, Homo sapiens
  CDR3 for beta chain variable domain of TCR clone 317060 (TRBV7-3, TRBJ1-1)
CASSQDWGAEAFF

SEQ ID NO: 634121 - protein, 13 aa, Homo sapiens
  CDR3 for alpha chain variable domain of TCR clone 317061 (TRAV8-3, TRAJ44)
CAVVPGTACKLTF

SEQ ID NO: 634122 - protein, 16 aa, Homo sapiens
  CDR3 for beta chain variable domain of TCR clone 317061 (TRBV4-2, TRBJ1-1)
CASSQAGFGMNTEAFF

SEQ ID NO: 634123 - protein, 11 aa, Homo sapiens
  CDR3 for alpha chain variable domain of TCR clone 317062 (TRAV35, TRAJ30)
CAPGGDDKLIF

SEQ ID NO: 634124 - protein, 14 aa, Homo sapiens
  CDR3 for beta chain variable domain of TCR clone 317062 (TRBV25-1, TRBJ1-1)
CASTHLGGNTEAFF

SEQ ID NO: 634125 - protein, 15 aa, Homo sapiens
  CDR3 for alpha chain variable domain of TCR clone 317063 (TRAV12-3, TRAJ42)
CAMSGHGGSQGNLIF

SEQ ID NO: 634126 - protein, 16 aa, Homo sapiens
  CDR3 for beta chain variable domain of TCR clone 317063 (TRBV12-4, TRBJ1-5)
CASSRPVGGSNQPQHF

SEQ ID NO: 634127 - protein, 17 aa, Homo sapiens
  CDR3 for alpha chain variable domain of TCR clone 317064 (TRAV4, TRAJ10)
CLVGDITPTGGGNKPTF

SEQ ID NO: 634128 - protein, 17 aa, Homo sapiens
  CDR3 for beta chain variable domain of TCR clone 317064 (TRBV20-1, TRBJ2-2)
CSASGSGQGGLTGELFF

SEQ ID NO: 634129 - protein, 11 aa, Homo sapiens
  CDR3 for alpha chain variable domain of TCR clone 317065 (TRAV8-3, TRAJ36)
CAVVQLGQTTS

SEQ ID NO: 634130 - protein, 15 aa, Homo sapiens
  CDR3 for beta chain variable domain of TCR clone 317065 (TRBV7-2, TRBJ1-2)
CASSPRAGWNYGYTF

SEQ ID NO: 634131 - protein, 11 aa, Homo sapiens
  CDR3 for alpha chain variable domain of TCR clone 317066 (TRAV9-2, TRAJ11)
CVPAGYSTLTF

SEQ ID NO: 634132 - protein, 14 aa, Homo sapiens
  CDR3 for beta chain variable domain of TCR clone 317066 (TRBV29-1, TRBJ2-2)
CSGRGSGNTGELFF

SEQ ID NO: 634133 - protein, 13 aa, Homo sapiens
  CDR3 for alpha chain variable domain of TCR clone 317067 (TRAV13-2, TRAJ11)
CAENYSRYITLTF

SEQ ID NO: 634134 - protein, 13 aa, Homo sapiens
  CDR3 for beta chain variable domain of TCR clone 317067 (TRBV12-4, TRBJ1-4)
CASAMGHNEKLFF

SEQ ID NO: 634135 - protein, 13 aa, Homo sapiens
  CDR3 for alpha chain variable domain of TCR clone 317068 (TRAV13-1, TRAJ5)
CAALGTGRRALTF

SEQ ID NO: 634136 - protein, 16 aa, Homo sapiens
  CDR3 for beta chain variable domain of TCR clone 317068 (TRBV12-5, TRBJ2-5)
CASGPRTSGNQETQYF

SEQ ID NO: 634137 - protein, 16 aa, Homo sapiens
  CDR3 for alpha chain variable domain of TCR clone 317069 (TRAV14/DV4, TRAJ54)
CAMREGRIQGAQKLVF

SEQ ID NO: 634138 - protein, 15 aa, Homo sapiens
  CDR3 for beta chain variable domain of TCR clone 317069 (TRBV20-1, TRBJ2-7)
CSARYRVSGMDEQYF

SEQ ID NO: 634139 - protein, 14 aa, Homo sapiens
  CDR3 for alpha chain variable domain of TCR clone 317070 (TRAV1-2, TRAJ16)
CAVNRFSDGQKLLF

SEQ ID NO: 634140 - protein, 15 aa, Homo sapiens
  CDR3 for beta chain variable domain of TCR clone 317070 (TRBV7-6, TRBJ2-1)
CASSSLAGEGNEQFF

SEQ ID NO: 634141 - protein, 12 aa, Homo sapiens
  CDR3 for alpha chain variable domain of TCR clone 317071 (TRAV12-3, TRAJ17)
CAMTLTGDELTF

SEQ ID NO: 634142 - protein, 15 aa, Homo sapiens
  CDR3 for beta chain variable domain of TCR clone 317071 (TRBV20-1, TRBJ2-7)
CSARDRVSGMDEQYF

SEQ ID NO: 634143 - protein, 16 aa, Homo sapiens
  CDR3 for alpha chain variable domain of TCR clone 317072 (TRAV12-3, TRAJ53)
CAMSPGSGGSNYKLTF

SEQ ID NO: 634144 - protein, 16 aa, Homo sapiens
  CDR3 for beta chain variable domain of TCR clone 317072 (TRBV5-5, TRBJ2-2)
CASSGRREGATGELFF

SEQ ID NO: 634145 - protein, 14 aa, Homo sapiens
  CDR3 for alpha chain variable domain of TCR clone 317073 (TRAV8-3, TRAJ7)
CAAIELYGNNRLAF

SEQ ID NO: 634146 - protein, 14 aa, Homo sapiens
  CDR3 for beta chain variable domain of TCR clone 317073 (TRBV7-9, TRBJ2-2)
CASSGLADTGELFF

SEQ ID NO: 634147 - protein, 14 aa, Homo sapiens
  CDR3 for alpha chain variable domain of TCR clone 317074 (TRAV13-1, TRAJ44)
CAAKATGTASKLTF

SEQ ID NO: 634148 - protein, 16 aa, Homo sapiens
  CDR3 for beta chain variable domain of TCR clone 317074 (TRBV7-2, TRBJ1-4)
CASSLAPGRRDEKLFF

SEQ ID NO: 634149 - protein, 16 aa, Homo sapiens
  CDR3 for alpha chain variable domain of TCR clone 317075 (TRAV8-3, TRAJ13)
CAVGAYASGGYQKVTF

SEQ ID NO: 634150 - protein, 14 aa, Homo sapiens
  CDR3 for beta chain variable domain of TCR clone 317075 (TRBV18, TRBJ2-5)
CASSPRASSETQYF

SEQ ID NO: 634151 - protein, 14 aa, Homo sapiens
  CDR3 for alpha chain variable domain of TCR clone 317076 (TRAV1-1, TRAJ28)
CAAPSGAGSFQLPF

SEQ ID NO: 634152 - protein, 15 aa, Homo sapiens
  CDR3 for beta chain variable domain of TCR clone 317076 (TRBV7-2, TRBJ1-2)
CASSLVSGGDYGYTF

SEQ ID NO: 634153 - protein, 12 aa, Homo sapiens
  CDR3 for alpha chain variable domain of TCR clone 317077 (TRAV17, TRAJ39)
CATGAACNMLTF

SEQ ID NO: 634154 - protein, 14 aa, Homo sapiens
  CDR3 for beta chain variable domain of TCR clone 317077 (TRBV7-9, TRBJ1-2)
CASSRQGANYGYTF

SEQ ID NO: 634155 - protein, 14 aa, Homo sapiens
  CDR3 for alpha chain variable domain of TCR clone 317078 (TRAV12-2, TRAJ6)
CASKWGGGSYIPTF

SEQ ID NO: 634156 - protein, 15 aa, Homo sapiens
  CDR3 for beta chain variable domain of TCR clone 317078 (TRBV6-5, TRBJ1-2)
CASSYSQAFNYGYTF

SEQ ID NO: 634157 - protein, 18 aa, Homo sapiens
  CDR3 for alpha chain variable domain of TCR clone 317079 (TRAV29/DV5, TRAJ52)
CAAGFKGAGGTSYGKLTF

SEQ ID NO: 634158 - protein, 16 aa, Homo sapiens
  CDR3 for beta chain variable domain of TCR clone 317079 (TRBV7-3, TRBJ2-2)
CASSLKRGTLSGELFF

SEQ ID NO: 634159 - protein, 15 aa, Homo sapiens
  CDR3 for alpha chain variable domain of TCR clone 317080 (TRAV3, TRAJ20)
CAVRDIELSGYKLSF

SEQ ID NO: 634160 - protein, 15 aa, Homo sapiens
  CDR3 for beta chain variable domain of TCR clone 317080 (TRBV7-9, TRBJ1-6)
CASSSPGRGNSPLHF

SEQ ID NO: 634161 - protein, 14 aa, Homo sapiens
  CDR3 for alpha chain variable domain of TCR clone 317081 (TRAV38-1, TRAJ29)
CAFITPSGNTPLVF

SEQ ID NO: 634162 - protein, 14 aa, Homo sapiens
  CDR3 for beta chain variable domain of TCR clone 317081 (TRBV18, TRBJ2-7)
CASSPRGGAYVQYF

SEQ ID NO: 634163 - protein, 12 aa, Homo sapiens
  CDR3 for alpha chain variable domain of TCR clone 317082 (TRAV1-2, TRAJ24)
RAVGGSWGKFQF

SEQ ID NO: 634164 - protein, 15 aa, Homo sapiens
  CDR3 for beta chain variable domain of TCR clone 317082 (TRBV6-1, TRBJ2-7)
CASSEGVGNPYEQYF

SEQ ID NO: 634165 - protein, 16 aa, Homo sapiens
  CDR3 for alpha chain variable domain of TCR clone 317083 (TRAV12-3, TRAJ53)
CAMSPGSGGSKYKLTF

SEQ ID NO: 634166 - protein, 14 aa, Homo sapiens
  CDR3 for beta chain variable domain of TCR clone 317083 (TRBV2, TRBJ2-7)
CASSLTSGGYEQYF

SEQ ID NO: 634167 - protein, 16 aa, Homo sapiens
  CDR3 for alpha chain variable domain of TCR clone 317084 (TRAV30, TRAJ24)
CGTEIVDADSWCKFQF

SEQ ID NO: 634168 - protein, 14 aa, Homo sapiens
  CDR3 for beta chain variable domain of TCR clone 317084 (TRBV12-5, TRBJ2-5)
CASGSRTHQETQYF

SEQ ID NO: 634169 - protein, 15 aa, Homo sapiens
  CDR3 for alpha chain variable domain of TCR clone 317085 (TRAV3, TRAJ22)
CAVRDRGGSARQLTV

SEQ ID NO: 634170 - protein, 13 aa, Homo sapiens
  CDR3 for beta chain variable domain of TCR clone 317085 (TRBV12-4, TRBJ1-2)
CASSLRQGKGYTF

SEQ ID NO: 634171 - protein, 13 aa, Homo sapiens
  CDR3 for alpha chain variable domain of TCR clone 317086 (TRAV17, TRAJ54)
CAAGIQGAQKLVY

SEQ ID NO: 634172 - protein, 14 aa, Homo sapiens
  CDR3 for beta chain variable domain of TCR clone 317086 (TRBV11-2, TRBJ1-2)
CASSLGTANYGYTF

SEQ ID NO: 634173 - protein, 14 aa, Homo sapiens
  CDR3 for alpha chain variable domain of TCR clone 317087 (TRAV17, TRAJ11)
CATDTSRGYSTLTF

SEQ ID NO: 634174 - protein, 13 aa, Homo sapiens
  CDR3 for beta chain variable domain of TCR clone 317087 (TRBV19, TRBJ2-5)
CASRDSRRETQCF

SEQ ID NO: 634175 - protein, 11 aa, Homo sapiens
  CDR3 for alpha chain variable domain of TCR clone 317088 (TRAV12-3, TRAJ27)
CAMANAGKSTF

SEQ ID NO: 634176 - protein, 15 aa, Homo sapiens
  CDR3 for beta chain variable domain of TCR clone 317088 (TRBV6-3, TRBJ2-7)
CASSSTGTVFYEQYF

SEQ ID NO: 634177 - protein, 14 aa, Homo sapiens
  CDR3 for alpha chain variable domain of TCR clone 317089 (TRAV12-1, TRAJ17)
CVGNYKAAGNKLTF

SEQ ID NO: 634178 - protein, 14 aa, Homo sapiens
  CDR3 for beta chain variable domain of TCR clone 317089 (TRBV5-4, TRBJ2-2)
CASRLDGGTGELFF

SEQ ID NO: 634179 - protein, 16 aa, Homo sapiens
  CDR3 for alpha chain variable domain of TCR clone 317090 (TRAV30, TRAJ24)
CGTEIVDADSWGKFQF

SEQ ID NO: 634180 - protein, 16 aa, Homo sapiens
  CDR3 for beta chain variable domain of TCR clone 317090 (TRBV5-1, TRBJ2-5)
CASSLANHRGRETQYF

SEQ ID NO: 634181 - protein, 14 aa, Homo sapiens
  CDR3 for alpha chain variable domain of TCR clone 317091 (TRAV35, TRAJ50)
CAGHRRTSYDKVIF

SEQ ID NO: 634182 - protein, 15 aa, Homo sapiens
  CDR3 for beta chain variable domain of TCR clone 317091 (TRBV7-6, TRBJ2-5)
CASSKPTGPQETQYF

SEQ ID NO: 634183 - protein, 16 aa, Homo sapiens
  CDR3 for alpha chain variable domain of TCR clone 317092 (TRAV3, TRAJ10)
CAVRDLRAGGGNKLTF

SEQ ID NO: 634184 - protein, 14 aa, Homo sapiens
  CDR3 for beta chain variable domain of TCR clone 317092 (TRBV25-1, TRBJ1-1)
CASTHLGGNTEAFF

SEQ ID NO: 634185 - protein, 16 aa, Homo sapiens
  CDR3 for alpha chain variable domain of TCR clone 317093 (TRAV20, TRAJ10)
CAVLRGLTGGGNKHTF

SEQ ID NO: 634186 - protein, 14 aa, Homo sapiens
  CDR3 for beta chain variable domain of TCR clone 317093 (TRBV19, TRBJ1-5)
CASRAPDSFLSQHF

SEQ ID NO: 634187 - protein, 12 aa, Homo sapiens
  CDR3 for alpha chain variable domain of TCR clone 317094 (TRAV13-2, TRAJ23)
CAERHRGGKLIF

SEQ ID NO: 634188 - protein, 14 aa, Homo sapiens
  CDR3 for beta chain variable domain of TCR clone 317094 (TRBV5-1, TRBJ1-2)
CSSSPQGANYGYTF

SEQ ID NO: 634189 - protein, 13 aa, Homo sapiens
  CDR3 for alpha chain variable domain of TCR clone 317095 (TRAV1-2, TRAJ33)
CAVSDDSNYQLIW

SEQ ID NO: 634190 - protein, 16 aa, Homo sapiens
  CDR3 for beta chain variable domain of TCR clone 317095 (TRBV4-2, TRBJ2-7)
CASSQDGVERGYEQYF

SEQ ID NO: 634191 - protein, 17 aa, Homo sapiens
  CDR3 for alpha chain variable domain of TCR clone 317096 (TRAV13-1, TRAJ28)
CAASPPYSGAGSYQLTF

SEQ ID NO: 634192 - protein, 14 aa, Homo sapiens
  CDR3 for beta chain variable domain of TCR clone 317096 (TRBV7-8, TRBJ2-3)
CASSFPDGQDTQYF

SEQ ID NO: 634193 - protein, 21 aa, Homo sapiens
  CDR3 for alpha chain variable domain of TCR clone 317097 (TRAV21, TRAJ32)
SLVTQPPTSVLPGGATNKLIF

SEQ ID NO: 634194 - protein, 15 aa, Homo sapiens
  CDR3 for beta chain variable domain of TCR clone 317097 (TRBV27, TRBJ2-1)
CASSNGGGSSNEQFF

SEQ ID NO: 634195 - protein, 15 aa, Homo sapiens
  CDR3 for alpha chain variable domain of TCR clone 317098 (TRAV27, TRAJ50)
CAGRERGTSYDKVIF

SEQ ID NO: 634196 - protein, 17 aa, Homo sapiens
  CDR3 for beta chain variable domain of TCR clone 317098 (TRBV7-3, TRBJ2-3)
CASSLMKRMRGADTQYF

SEQ ID NO: 634197 - protein, 13 aa, Homo sapiens
  CDR3 for alpha chain variable domain of TCR clone 317099 (TRAV2, TRAJ29)
CAAGNSGNTPLVF

SEQ ID NO: 634198 - protein, 16 aa, Homo sapiens
  CDR3 for beta chain variable domain of TCR clone 317099 (TRBV7-9, TRBJ1-2)
CASIPGGGAIDYGYTF

SEQ ID NO: 634199 - protein, 14 aa, Homo sapiens
  CDR3 for alpha chain variable domain of TCR clone 317100 (TRAV1-2, TRAJ16)
CAVNRFSDGQKLLL

SEQ ID NO: 634200 - protein, 15 aa, Homo sapiens
  CDR3 for beta chain variable domain of TCR clone 317100 (TRBV5-1, TRBJ2-1)
CASSPPRAPYNEQFF

SEQ ID NO: 634201 - protein, 15 aa, Homo sapiens
  CDR3 for alpha chain variable domain of TCR clone 317101 (TRAV23/DV6, )
CAADIHNPAPAVYQL

SEQ ID NO: 634202 - protein, 14 aa, Homo sapiens
  CDR3 for beta chain variable domain of TCR clone 317101 (TRBV5-7, TRBJ1-6)
CASSFAGHNSPLHF

SEQ ID NO: 634203 - protein, 15 aa, Homo sapiens
  CDR3 for alpha chain variable domain of TCR clone 317102 (TRAV12-1, TRAJ44)
CVADLATGTASKLTF

SEQ ID NO: 634204 - protein, 13 aa, Homo sapiens
  CDR3 for beta chain variable domain of TCR clone 317102 (TRBV6-5, TRBJ2-5)
CASSPQGGETQYF

SEQ ID NO: 634205 - protein, 13 aa, Homo sapiens
  CDR3 for alpha chain variable domain of TCR clone 317103 (TRAV21, TRAJ27)
CAARPGNAGKSTF

SEQ ID NO: 634206 - protein, 14 aa, Homo sapiens
  CDR3 for beta chain variable domain of TCR clone 317103 (TRBV18, TRBJ2-7)
CDSSSRTLAYEQYF

SEQ ID NO: 634207 - protein, 11 aa, Homo sapiens
  CDR3 for alpha chain variable domain of TCR clone 317104 (TRAV17, TRAJ31)
CATSNNARLMF

SEQ ID NO: 634208 - protein, 16 aa, Homo sapiens
  CDR3 for beta chain variable domain of TCR clone 317104 (TRBV7-8, TRBJ2-4)
CASSDERTLAKNIQYF

SEQ ID NO: 634209 - protein, 17 aa, Homo sapiens
  CDR3 for alpha chain variable domain of TCR clone 317105 (TRAV8-6, TRAJ58)
CAVSSWVGETSGSRLTF

SEQ ID NO: 634210 - protein, 14 aa, Homo sapiens
  CDR3 for beta chain variable domain of TCR clone 317105 (TRBV20-1, TRBJ2-1)
CSAQIGGSANERFF

SEQ ID NO: 634211 - protein, 13 aa, Homo sapiens
  CDR3 for alpha chain variable domain of TCR clone 317106 (TRAV21, TRAJ36)
CAVIKTGAHNLFF

SEQ ID NO: 634212 - protein, 13 aa, Homo sapiens
  CDR3 for beta chain variable domain of TCR clone 317106 (TRBV29-1, TRBJ2-3)
CSATRGGRDTQYF

SEQ ID NO: 634213 - protein, 16 aa, Homo sapiens
  CDR3 for alpha chain variable domain of TCR clone 317107 (TRAV3, TRAJ10)
CAGRDMRAGGGNKLTF

SEQ ID NO: 634214 - protein, 14 aa, Homo sapiens
  CDR3 for beta chain variable domain of TCR clone 317107 (TRBV28, TRBJ2-2)
CASTRRSGDGELFF

SEQ ID NO: 634215 - protein, 18 aa, Homo sapiens
  CDR3 for alpha chain variable domain of TCR clone 317108 (TRAV21, TRAJ52)
CSVRPSPAGGTSYGKLTF

SEQ ID NO: 634216 - protein, 14 aa, Homo sapiens
  CDR3 for beta chain variable domain of TCR clone 317108 (TRBV4-2, TRBJ2-1)
CASGLDRAYNEQFF

SEQ ID NO: 634217 - protein, 10 aa, Homo sapiens
  CDR3 for alpha chain variable domain of TCR clone 317109 (TRAV12-1, TRAJ23)
CVVSGGKLIF

SEQ ID NO: 634218 - protein, 14 aa, Homo sapiens
  CDR3 for beta chain variable domain of TCR clone 317109 (TRBV7-2, TRBJ2-7)
CASRSQGAAYEQYF

SEQ ID NO: 634219 - protein, 14 aa, Homo sapiens
  CDR3 for alpha chain variable domain of TCR clone 317110 (TRAV8-4, TRAJ45)
CAVSEGGSEEVLTD

SEQ ID NO: 634220 - protein, 13 aa, Homo sapiens
  CDR3 for beta chain variable domain of TCR clone 317110 (TRBV20-1, TRBJ1-1)
CSASKRGLTEAFF

SEQ ID NO: 634221 - protein, 11 aa, Homo sapiens
  CDR3 for alpha chain variable domain of TCR clone 317111 (TRAV2, TRAJ33)
CAVDSNYQLIW

SEQ ID NO: 634222 - protein, 13 aa, Homo sapiens
  CDR3 for beta chain variable domain of TCR clone 317111 (TRBV11-2, TRBJ1-1)
CASSRKMNTEAFF

SEQ ID NO: 634223 - protein, 14 aa, Homo sapiens
  CDR3 for alpha chain variable domain of TCR clone 317112 (TRAV1-2, TRAJ8)
CAVREDTGFQKRVF

SEQ ID NO: 634224 - protein, 14 aa, Homo sapiens
  CDR3 for beta chain variable domain of TCR clone 317112 (TRBV7-2, TRBJ2-7)
CASRSQGAAYEQSF

SEQ ID NO: 634225 - protein, 12 aa, Homo sapiens
  CDR3 for alpha chain variable domain of TCR clone 317113 (TRAV20, TRAJ37)
CWCSSNTGKLIF

SEQ ID NO: 634226 - protein, 21 aa, Homo sapiens
  CDR3 for beta chain variable domain of TCR clone 317113 (TRBV4-2, TRBJ2-3)
PCSQKTRPCISVPAAPDTQYF

SEQ ID NO: 634227 - protein, 11 aa, Homo sapiens
  CDR3 for alpha chain variable domain of TCR clone 317114 (TRAV12-1, TRAJ31)
CVVNGDARLMF

SEQ ID NO: 634228 - protein, 14 aa, Homo sapiens
  CDR3 for beta chain variable domain of TCR clone 317114 (TRBV12-5, TRBJ2-5)
CASGSRTHQETQYF

SEQ ID NO: 634229 - protein, 16 aa, Homo sapiens
  CDR3 for alpha chain variable domain of TCR clone 317115 (TRAV22, TRAJ45)
CAVERGKRGGADGLTF

SEQ ID NO: 634230 - protein, 13 aa, Homo sapiens
  CDR3 for beta chain variable domain of TCR clone 317115 (TRBV27, TRBJ1-1)
CASSVSIGGEAFF

SEQ ID NO: 634231 - protein, 10 aa, Homo sapiens
  CDR3 for alpha chain variable domain of TCR clone 317116 (TRAV30, TRAJ48)
CGIGNEKLTF

SEQ ID NO: 634232 - protein, 14 aa, Homo sapiens
  CDR3 for beta chain variable domain of TCR clone 317116 (TRBV7-2, TRBJ1-2)
CASSQTGSTYGYTF

SEQ ID NO: 634233 - protein, 15 aa, Homo sapiens
  CDR3 for alpha chain variable domain of TCR clone 317117 (TRAV2, TRAJ11)
CAVGGRNSGYSTLTF

SEQ ID NO: 634234 - protein, 16 aa, Homo sapiens
  CDR3 for beta chain variable domain of TCR clone 317117 (TRBV7-7, TRBJ2-1)
CASSLASGTSYNEQFF

SEQ ID NO: 634235 - protein, 13 aa, Homo sapiens
  CDR3 for alpha chain variable domain of TCR clone 317118 (TRAV3, TRAJ21)
CAVREPDFNKFYF

SEQ ID NO: 634236 - protein, 13 aa, Homo sapiens
  CDR3 for beta chain variable domain of TCR clone 317118 (TRBV20-1, TRBJ2-7)
CSATHTSGYEQYF

SEQ ID NO: 634237 - protein, 18 aa, Homo sapiens
  CDR3 for alpha chain variable domain of TCR clone 317119 (TRAV12-3, TRAJ52)
CAMSVGGAGGTSYGKLTF

SEQ ID NO: 634238 - protein, 15 aa, Homo sapiens
  CDR3 for beta chain variable domain of TCR clone 317119 (TRBV27, TRBJ1-6)
CASSFDRGLGSTHHF

SEQ ID NO: 634239 - protein, 11 aa, Homo sapiens
  CDR3 for alpha chain variable domain of TCR clone 317120 (TRAV41, TRAJ49)
CAVRSRNQFYF

SEQ ID NO: 634240 - protein, 15 aa, Homo sapiens
  CDR3 for beta chain variable domain of TCR clone 317120 (TRBV12-4, TRBJ2-5)
CASSFSAGGGETQYF

SEQ ID NO: 634241 - protein, 11 aa, Homo sapiens
  CDR3 for alpha chain variable domain of TCR clone 317121 (TRAV17, TRAJ31)
CATSNNARLMF

SEQ ID NO: 634242 - protein, 16 aa, Homo sapiens
  CDR3 for beta chain variable domain of TCR clone 317121 (TRBV7-8, TRBJ2-4)
CASSTERTLAKNIQYF

SEQ ID NO: 634243 - protein, 15 aa, Homo sapiens
  CDR3 for alpha chain variable domain of TCR clone 317122 (TRAV17, TRAJ56)
CAADATTGVNSKLTF

SEQ ID NO: 634244 - protein, 14 aa, Homo sapiens
  CDR3 for beta chain variable domain of TCR clone 317122 (TRBV19, TRBJ1-5)
CASSLGTGGQPQHF

SEQ ID NO: 634245 - protein, 14 aa, Homo sapiens
  CDR3 for alpha chain variable domain of TCR clone 317123 (TRAV2, TRAJ3)
CAVDRYSSATKIIF

SEQ ID NO: 634246 - protein, 16 aa, Homo sapiens
  CDR3 for beta chain variable domain of TCR clone 317123 (TRBV20-1, TRBJ1-5)
CSAELPGQQTNQPQHF

SEQ ID NO: 634247 - protein, 12 aa, Homo sapiens
  CDR3 for alpha chain variable domain of TCR clone 317124 (TRAV2, TRAJ33)
CAVPDSNYQLIC

SEQ ID NO: 634248 - protein, 17 aa, Homo sapiens
  CDR3 for beta chain variable domain of TCR clone 317124 (TRBV6-5, TRBJ2-3)
RASSYGTSLYKSDTQYF

SEQ ID NO: 634249 - protein, 14 aa, Homo sapiens
  CDR3 for alpha chain variable domain of TCR clone 317125 (TRAV12-3, TRAJ9)
CAMSPNTGGFKPIF

SEQ ID NO: 634250 - protein, 15 aa, Homo sapiens
  CDR3 for beta chain variable domain of TCR clone 317125 (TRBV6-5, TRBJ1-2)
CASSYSQAFNYGYTF

SEQ ID NO: 634251 - protein, 13 aa, Homo sapiens
  CDR3 for alpha chain variable domain of TCR clone 317126 (TRAV13-2, TRAJ15)
CAESNQAGTALIF

SEQ ID NO: 634252 - protein, 14 aa, Homo sapiens
  CDR3 for beta chain variable domain of TCR clone 317126 (TRBV7-2, TRBJ2-7)
CASSPKTSFYEQYF

SEQ ID NO: 634253 - protein, 15 aa, Homo sapiens
  CDR3 for alpha chain variable domain of TCR clone 317127 (TRAV3, TRAJ22)
CAVRDRGGSARQLTL

SEQ ID NO: 634254 - protein, 16 aa, Homo sapiens
  CDR3 for beta chain variable domain of TCR clone 317127 (TRBV11-2, TRBJ2-1)
CASARGSYSHHNEQFF

SEQ ID NO: 634255 - protein, 14 aa, Homo sapiens
  CDR3 for alpha chain variable domain of TCR clone 317128 (TRAV12-3, TRAJ10)
SHLPLQGGGNKLTF

SEQ ID NO: 634256 - protein, 14 aa, Homo sapiens
  CDR3 for beta chain variable domain of TCR clone 317128 (TRBV6-1, TRBJ1-3)
CASVQGGGGNTIYF

SEQ ID NO: 634257 - protein, 13 aa, Homo sapiens
  CDR3 for alpha chain variable domain of TCR clone 317129 (TRAV3, TRAJ21)
CAVREPDFNKFYF

SEQ ID NO: 634258 - protein, 15 aa, Homo sapiens
  CDR3 for beta chain variable domain of TCR clone 317129 (TRBV6-1, TRBJ2-4)
CASSEAVWTINIQYF

SEQ ID NO: 634259 - protein, 16 aa, Homo sapiens
  CDR3 for alpha chain variable domain of TCR clone 317130 (TRAV30, TRAJ24)
CGTEIVDADSCGKFQF

SEQ ID NO: 634260 - protein, 15 aa, Homo sapiens
  CDR3 for beta chain variable domain of TCR clone 317130 (TRBV5-1, TRBJ1-1)
CASSSTTGTNTEAFF

SEQ ID NO: 634261 - protein, 17 aa, Homo sapiens
  CDR3 for alpha chain variable domain of TCR clone 317131 (TRAV3, TRAJ42)
CAVRDRDYGGSQGNLIF

SEQ ID NO: 634262 - protein, 15 aa, Homo sapiens
  CDR3 for beta chain variable domain of TCR clone 317131 (TRBV5-1, TRBJ2-1)
CASSPPRTPYNEQFF

SEQ ID NO: 634263 - protein, 10 aa, Homo sapiens
  CDR3 for alpha chain variable domain of TCR clone 317132 (TRAV23/DV6, TRAJ57)
CAASSTLSQG

SEQ ID NO: 634264 - protein, 17 aa, Homo sapiens
  CDR3 for beta chain variable domain of TCR clone 317132 (TRBV5-1, TRBJ2-3)
CASSLGASTSGTDTQYF

SEQ ID NO: 634265 - protein, 11 aa, Homo sapiens
  CDR3 for alpha chain variable domain of TCR clone 317133 (TRAV12-2, TRAJ33)
CAVGSNYQLIW

SEQ ID NO: 634266 - protein, 19 aa, Homo sapiens
  CDR3 for beta chain variable domain of TCR clone 317133 (TRBV25-1, TRBJ2-2)
CAILVYRVDRGRKTGELFS

SEQ ID NO: 634267 - protein, 11 aa, Homo sapiens
  CDR3 for alpha chain variable domain of TCR clone 317134 (TRAV12-3, TRAJ41)
CAMNAREALTF

SEQ ID NO: 634268 - protein, 16 aa, Homo sapiens
  CDR3 for beta chain variable domain of TCR clone 317134 (TRBV7-8, TRBJ2-3)
CASSTEGQRETDTQYF

SEQ ID NO: 634269 - protein, 15 aa, Homo sapiens
  CDR3 for alpha chain variable domain of TCR clone 317135 (TRAV35, TRAJ40)
CAGQLGTSGSYKYIF

SEQ ID NO: 634270 - protein, 11 aa, Homo sapiens
  CDR3 for beta chain variable domain of TCR clone 317135 (TRBV23-1, TRBJ2-7)
SSSGTGLEQYF

SEQ ID NO: 634271 - protein, 14 aa, Homo sapiens
  CDR3 for alpha chain variable domain of TCR clone 317136 (TRAV1-2, TRAJ16)
CAVNRFSDGQKLLF

SEQ ID NO: 634272 - protein, 16 aa, Homo sapiens
  CDR3 for beta chain variable domain of TCR clone 317136 (TRBV7-2, TRBJ2-5)
CASSSKWLSGQGTQYF

SEQ ID NO: 634273 - protein, 12 aa, Homo sapiens
  CDR3 for alpha chain variable domain of TCR clone 317137 (TRAV35, TRAJ30)
CAGLNRDDKIIF

SEQ ID NO: 634274 - protein, 15 aa, Homo sapiens
  CDR3 for beta chain variable domain of TCR clone 317137 (TRBV9, TRBJ1-6)
CASSVAGTGDSPLHI

SEQ ID NO: 634275 - protein, 12 aa, Homo sapiens
  CDR3 for alpha chain variable domain of TCR clone 317138 (TRAV13-1, TRAJ27)
CAAHTNAGKSTF

SEQ ID NO: 634276 - protein, 14 aa, Homo sapiens
  CDR3 for beta chain variable domain of TCR clone 317138 (TRBV12-5, TRBJ2-5)
CASGSRTHQETHYF

SEQ ID NO: 634277 - protein, 14 aa, Homo sapiens
  CDR3 for alpha chain variable domain of TCR clone 317139 (TRAV16, TRAJ42)
CALSGMGSQGDLIF

SEQ ID NO: 634278 - protein, 13 aa, Homo sapiens
  CDR3 for beta chain variable domain of TCR clone 317139 (TRBV7-9, TRBJ1-2)
CASSLKQNYGYTF

SEQ ID NO: 634279 - protein, 14 aa, Homo sapiens
  CDR3 for alpha chain variable domain of TCR clone 317140 (TRAV13-1, TRAJ44)
CAAKATGTASKLPF

SEQ ID NO: 634280 - protein, 15 aa, Homo sapiens
  CDR3 for beta chain variable domain of TCR clone 317140 (TRBV4-3, TRBJ1-1)
CASSQELGRGTEAFF

SEQ ID NO: 634281 - protein, 14 aa, Homo sapiens
  CDR3 for alpha chain variable domain of TCR clone 317141 (TRAV1-2, TRAJ8)
CAVRENTGFQKLVF

SEQ ID NO: 634282 - protein, 15 aa, Homo sapiens
  CDR3 for beta chain variable domain of TCR clone 317141 (TRBV27, TRBJ2-1)
CASSNGGGSSNEQFF

SEQ ID NO: 634283 - protein, 12 aa, Homo sapiens
  CDR3 for alpha chain variable domain of TCR clone 317142 (TRAV12-3, TRAJ17)
CAMTLTGNKITF

SEQ ID NO: 634284 - protein, 15 aa, Homo sapiens
  CDR3 for beta chain variable domain of TCR clone 317142 (TRBV5-1, TRBJ2-7)
CASSLDLTSSCEQYF

SEQ ID NO: 634285 - protein, 18 aa, Homo sapiens
  CDR3 for alpha chain variable domain of TCR clone 317143 (TRAV26-1, TRAJ38)
CCVLLHRRNAGNNRKLIW

SEQ ID NO: 634286 - protein, 13 aa, Homo sapiens
  CDR3 for beta chain variable domain of TCR clone 317143 (TRBV20-1, TRBJ1-1)
CSARGGGNTEAFF

SEQ ID NO: 634287 - protein, 15 aa, Homo sapiens
  CDR3 for alpha chain variable domain of TCR clone 317144 (TRAV2, TRAJ24)
CAVVRLKNSWGQLQF

SEQ ID NO: 634288 - protein, 15 aa, Homo sapiens
  CDR3 for beta chain variable domain of TCR clone 317144 (TRBV28, TRBJ2-1)
CASSIIAGGRSEQFF

SEQ ID NO: 634289 - protein, 12 aa, Homo sapiens
  CDR3 for alpha chain variable domain of TCR clone 317145 (TRAV12-2, TRAJ8)
CAVATGFQKLVF

SEQ ID NO: 634290 - protein, 13 aa, Homo sapiens
  CDR3 for beta chain variable domain of TCR clone 317145 (TRBV4-2, TRBJ1-1)
CASSQAGNTEAFF

SEQ ID NO: 634291 - protein, 18 aa, Homo sapiens
  CDR3 for alpha chain variable domain of TCR clone 317146 (TRAV12-3, TRAJ52)
CAMSVGGAGGTSYGKLTF

SEQ ID NO: 634292 - protein, 14 aa, Homo sapiens
  CDR3 for beta chain variable domain of TCR clone 317146 (TRBV28, TRBJ1-2)
CASRIQGANYGYTF

SEQ ID NO: 634293 - protein, 11 aa, Homo sapiens
  CDR3 for alpha chain variable domain of TCR clone 317147 (TRAV2, TRAJ33)
CAVDSNYQLIW

SEQ ID NO: 634294 - protein, 13 aa, Homo sapiens
  CDR3 for beta chain variable domain of TCR clone 317147 (TRBV7-2, TRBJ2-7)
CASSSPSGSGQYF

SEQ ID NO: 634295 - protein, 15 aa, Homo sapiens
  CDR3 for alpha chain variable domain of TCR clone 317148 (TRAV12-1, TRAJ45)
CVVLSGGGGADGLNF

SEQ ID NO: 634296 - protein, 16 aa, Homo sapiens
  CDR3 for beta chain variable domain of TCR clone 317148 (TRBV6-5, TRBJ2-1)
CASSETLAGHYNEQFF

SEQ ID NO: 634297 - protein, 12 aa, Homo sapiens
  CDR3 for alpha chain variable domain of TCR clone 317149 (TRAV26-1, TRAJ36)
CIVRVRADNFFF

SEQ ID NO: 634298 - protein, 13 aa, Homo sapiens
  CDR3 for beta chain variable domain of TCR clone 317149 (TRBV11-2, TRBJ2-5)
CASSRGPSETQYF

SEQ ID NO: 634299 - protein, 21 aa, Homo sapiens
  CDR3 for alpha chain variable domain of TCR clone 317150 (TRAV1-1, TRAJ6)
CLLLVRCERLERTGGSYIPTF

SEQ ID NO: 634300 - protein, 13 aa, Homo sapiens
  CDR3 for beta chain variable domain of TCR clone 317150 (TRBV10-2, TRBJ2-7)
CASGASGGYEQYF

SEQ ID NO: 634301 - protein, 11 aa, Homo sapiens
  CDR3 for alpha chain variable domain of TCR clone 317151 (TRAV4, TRAJ23)
CLVAPGGKLIF

SEQ ID NO: 634302 - protein, 16 aa, Homo sapiens
  CDR3 for beta chain variable domain of TCR clone 317151 (TRBV2, TRBJ2-1)
CASSVGGSLSYNEQFF

SEQ ID NO: 634303 - protein, 11 aa, Homo sapiens
  CDR3 for alpha chain variable domain of TCR clone 317152 (TRAV8-3, TRAJ15)
CAVGPGPALIF

SEQ ID NO: 634304 - protein, 15 aa, Homo sapiens
  CDR3 for beta chain variable domain of TCR clone 317152 (TRBV7-9, TRBJ2-7)
CASSLALAEAYEQYF

SEQ ID NO: 634305 - protein, 21 aa, Homo sapiens
  CDR3 for alpha chain variable domain of TCR clone 317153 (TRAV2, TRAJ26)
CAGSPGRLWSEFCLWSRNQIV

SEQ ID NO: 634306 - protein, 16 aa, Homo sapiens
  CDR3 for beta chain variable domain of TCR clone 317153 (TRBV13, TRBJ2-2)
CASSPRTGEHTGELFF

SEQ ID NO: 634307 - protein, 11 aa, Homo sapiens
  CDR3 for alpha chain variable domain of TCR clone 317154 (TRAV23/DV6, TRAJ58)
CAARLLRGETS

SEQ ID NO: 634308 - protein, 14 aa, Homo sapiens
  CDR3 for beta chain variable domain of TCR clone 317154 (TRBV13, TRBJ2-5)
CASSLGPRGETQYF

SEQ ID NO: 634309 - protein, 14 aa, Homo sapiens
  CDR3 for alpha chain variable domain of TCR clone 317155 (TRAV26-1, TRAJ38)
CIADNAGNNRKLIW

SEQ ID NO: 634310 - protein, 15 aa, Homo sapiens
  CDR3 for beta chain variable domain of TCR clone 317155 (TRBV7-6, TRBJ1-4)
CASSLGAGAGEELFF

SEQ ID NO: 634311 - protein, 12 aa, Homo sapiens
  CDR3 for alpha chain variable domain of TCR clone 317156 (TRAV17, )
CATDPHGAPILE

SEQ ID NO: 634312 - protein, 16 aa, Homo sapiens
  CDR3 for beta chain variable domain of TCR clone 317156 (TRBV4-1, TRBJ2-7)
CASSQEWTSGPLEQYF

SEQ ID NO: 634313 - protein, 11 aa, Homo sapiens
  CDR3 for alpha chain variable domain of TCR clone 317157 (TRAV17, TRAJ9)
CGFTGGYKTIF

SEQ ID NO: 634314 - protein, 14 aa, Homo sapiens
  CDR3 for beta chain variable domain of TCR clone 317157 (TRBV7-9, TRBJ2-2)
CASSLVQDTGELFF

SEQ ID NO: 634315 - protein, 11 aa, Homo sapiens
  CDR3 for alpha chain variable domain of TCR clone 317158 (TRAV3, TRAJ21)
CAVGNFNKFYF

SEQ ID NO: 634316 - protein, 16 aa, Homo sapiens
  CDR3 for beta chain variable domain of TCR clone 317158 (TRBV19, TRBJ2-1)
CASSKAGPTSYNEQFF

SEQ ID NO: 634317 - protein, 15 aa, Homo sapiens
  CDR3 for alpha chain variable domain of TCR clone 317159 (TRAV3, TRAJ22)
CAVRDRGGSARQLTF

SEQ ID NO: 634318 - protein, 15 aa, Homo sapiens
  CDR3 for beta chain variable domain of TCR clone 317159 (TRBV7-2, TRBJ2-1)
CASSLVGSSYNEQFF

SEQ ID NO: 634319 - protein, 14 aa, Homo sapiens
  CDR3 for alpha chain variable domain of TCR clone 317160 (TRAV1-2, TRAJ16)
CAVNRFSDGQKRLF

SEQ ID NO: 634320 - protein, 18 aa, Homo sapiens
  CDR3 for beta chain variable domain of TCR clone 317160 (TRBV20-1, TRBJ2-3)
CSASGLAGGPGTTDTQYF

SEQ ID NO: 634321 - protein, 13 aa, Homo sapiens
  CDR3 for alpha chain variable domain of TCR clone 317161 (TRAV2, TRAJ36)
CAVDQTGANNIFF

SEQ ID NO: 634322 - protein, 12 aa, Homo sapiens
  CDR3 for beta chain variable domain of TCR clone 317161 (TRBV19, TRBJ1-1)
CASMNRYTEAFF

SEQ ID NO: 634323 - protein, 15 aa, Homo sapiens
  CDR3 for alpha chain variable domain of TCR clone 317162 (TRAV17, TRAJ57)
CATGPSQGGSEKLVF

SEQ ID NO: 634324 - protein, 12 aa, Homo sapiens
  CDR3 for beta chain variable domain of TCR clone 317162 (TRBV12-5, TRBJ2-3)
CASGGAADTQYF

SEQ ID NO: 634325 - protein, 14 aa, Homo sapiens
  CDR3 for alpha chain variable domain of TCR clone 317163 (TRAV2, TRAJ9)
CAVEDRSGGFKTIF

SEQ ID NO: 634326 - protein, 12 aa, Homo sapiens
  CDR3 for beta chain variable domain of TCR clone 317163 (TRBV19, TRBJ2-1)
CASSMQDTEQFF

SEQ ID NO: 634327 - protein, 16 aa, Homo sapiens
  CDR3 for alpha chain variable domain of TCR clone 317164 (TRAV38-1, TRAJ32)
CAFMKGGGGATNKLIF

SEQ ID NO: 634328 - protein, 13 aa, Homo sapiens
  CDR3 for beta chain variable domain of TCR clone 317164 (TRBV20-1, TRBJ2-5)
CSAREAFQDTQYF

SEQ ID NO: 634329 - protein, 16 aa, Homo sapiens
  CDR3 for alpha chain variable domain of TCR clone 317165 (TRAV23/DV6, TRAJ9)
CAASIGGNTGGFKTNF

SEQ ID NO: 634330 - protein, 14 aa, Homo sapiens
  CDR3 for beta chain variable domain of TCR clone 317165 (TRBV6-1, TRBJ2-5)
CASSYAGGEETQYF

SEQ ID NO: 634331 - protein, 14 aa, Homo sapiens
  CDR3 for alpha chain variable domain of TCR clone 317166 (TRAV12-2, TRAJ13)
CAVKKTGCYQKVTF

SEQ ID NO: 634332 - protein, 13 aa, Homo sapiens
  CDR3 for beta chain variable domain of TCR clone 317166 (TRBV20-1, TRBJ1-1)
CSARLGQGTEAFF

SEQ ID NO: 634333 - protein, 14 aa, Homo sapiens
  CDR3 for alpha chain variable domain of TCR clone 317167 (TRAV12-2, TRAJ13)
CAVKKTGGYQKVTF

SEQ ID NO: 634334 - protein, 15 aa, Homo sapiens
  CDR3 for beta chain variable domain of TCR clone 317167 (TRBV7-2, TRBJ1-3)
CASSPQGGSGNTMYF

SEQ ID NO: 634335 - protein, 14 aa, Homo sapiens
  CDR3 for alpha chain variable domain of TCR clone 317168 (TRAV2, TRAJ9)
CAVEDRSGGFKTIF

SEQ ID NO: 634336 - protein, 15 aa, Homo sapiens
  CDR3 for beta chain variable domain of TCR clone 317168 (TRBV18, TRBJ2-1)
CASLPDRGRDNEQFF

SEQ ID NO: 634337 - protein, 11 aa, Homo sapiens
  CDR3 for alpha chain variable domain of TCR clone 317169 (TRAV27, TRAJ47)
CRSNQGNKLVF

SEQ ID NO: 634338 - protein, 16 aa, Homo sapiens
  CDR3 for beta chain variable domain of TCR clone 317169 (TRBV7-9, TRBJ2-1)
CASSDEAGGSYNEQFF

SEQ ID NO: 634339 - protein, 13 aa, Homo sapiens
  CDR3 for alpha chain variable domain of TCR clone 317170 (TRAV21, TRAJ15)
CAVANQAGIALIF

SEQ ID NO: 634340 - protein, 14 aa, Homo sapiens
  CDR3 for beta chain variable domain of TCR clone 317170 (TRBV27, TRBJ2-2)
CASSLGAATGELFF

SEQ ID NO: 634341 - protein, 15 aa, Homo sapiens
  CDR3 for alpha chain variable domain of TCR clone 317171 (TRAV21, TRAJ52)
CAVRGGGTRYGKVTF

SEQ ID NO: 634342 - protein, 15 aa, Homo sapiens
  CDR3 for beta chain variable domain of TCR clone 317171 (TRBV18, TRBJ1-5)
CASSPSDRSNQPQHF

SEQ ID NO: 634343 - protein, 14 aa, Homo sapiens
  CDR3 for alpha chain variable domain of TCR clone 317172 (TRAV17, TRAJ39)
CATDPVRAGNMLTF

SEQ ID NO: 634344 - protein, 17 aa, Homo sapiens
  CDR3 for beta chain variable domain of TCR clone 317172 (TRBV4-1, TRBJ1-4)
CASSQEGPRGVEEKLFF

SEQ ID NO: 634345 - protein, 15 aa, Homo sapiens
  CDR3 for alpha chain variable domain of TCR clone 317173 (TRAV3, TRAJ47)
CAVRDIGEYGNKLVF

SEQ ID NO: 634346 - protein, 13 aa, Homo sapiens
  CDR3 for beta chain variable domain of TCR clone 317173 (TRBV7-9, TRBJ2-1)
CASSLDVGNEQFF

SEQ ID NO: 634347 - protein, 17 aa, Homo sapiens
  CDR3 for alpha chain variable domain of TCR clone 317174 (TRAV4, TRAJ13)
CLVGVQGSSGGYQKVTF

SEQ ID NO: 634348 - protein, 18 aa, Homo sapiens
  CDR3 for beta chain variable domain of TCR clone 317174 (TRBV15, TRBJ2-3)
CATSRDGARSWDTHTQYF

SEQ ID NO: 634349 - protein, 13 aa, Homo sapiens
  CDR3 for alpha chain variable domain of TCR clone 317175 (TRAV20, TRAJ37)
CAGCSSNTGKLLF

SEQ ID NO: 634350 - protein, 21 aa, Homo sapiens
  CDR3 for beta chain variable domain of TCR clone 317175 (TRBV4-2, TRBJ2-3)
TCSQKTRPCISVPAAPDTQYF

SEQ ID NO: 634351 - protein, 13 aa, Homo sapiens
  CDR3 for alpha chain variable domain of TCR clone 317176 (TRAV21, TRAJ26)
CAVLDNYGQNFVF

SEQ ID NO: 634352 - protein, 16 aa, Homo sapiens
  CDR3 for beta chain variable domain of TCR clone 317176 (TRBV29-1, TRBJ2-2)
CSVETRARGNTGELFF

SEQ ID NO: 634353 - protein, 16 aa, Homo sapiens
  CDR3 for alpha chain variable domain of TCR clone 317177 (TRAV30, TRAJ24)
CGTEIVDADSWGKFQF

SEQ ID NO: 634354 - protein, 14 aa, Homo sapiens
  CDR3 for beta chain variable domain of TCR clone 317177 (TRBV7-2, TRBJ2-5)
CASSLVVGQETQYF

SEQ ID NO: 634355 - protein, 12 aa, Homo sapiens
  CDR3 for alpha chain variable domain of TCR clone 317178 (TRAV26-1, TRAJ48)
CIAVFGNETLTF

SEQ ID NO: 634356 - protein, 17 aa, Homo sapiens
  CDR3 for beta chain variable domain of TCR clone 317178 (TRBV7-6, TRBJ2-1)
CASSFGLAGGTYNEQFF

SEQ ID NO: 634357 - protein, 16 aa, Homo sapiens
  CDR3 for alpha chain variable domain of TCR clone 317179 (TRAV8-1, TRAJ4)
CAVKFSGGYNKLILEQ

SEQ ID NO: 634358 - protein, 14 aa, Homo sapiens
  CDR3 for beta chain variable domain of TCR clone 317179 (TRBV10-2, TRBJ1-5)
CASSSTGRNQHQHF

SEQ ID NO: 634359 - protein, 11 aa, Homo sapiens
  CDR3 for alpha chain variable domain of TCR clone 317180 (TRAV35, TRAJ30)
CAPGGDDKIIF

SEQ ID NO: 634360 - protein, 16 aa, Homo sapiens
  CDR3 for beta chain variable domain of TCR clone 317180 (TRBV7-6, TRBJ2-3)
CIAVPAAWGGADEQFF

SEQ ID NO: 634361 - protein, 11 aa, Homo sapiens
  CDR3 for alpha chain variable domain of TCR clone 317181 (TRAV3, TRAJ31)
CAALPGARLMF

SEQ ID NO: 634362 - protein, 18 aa, Homo sapiens
  CDR3 for beta chain variable domain of TCR clone 317181 (TRBV11-2, TRBJ2-3)
CASSLGGASRGAPNTQYF

SEQ ID NO: 634363 - protein, 14 aa, Homo sapiens
  CDR3 for alpha chain variable domain of TCR clone 317182 (TRAV9-2, TRAJ39)
CALYISNAGNILTF

SEQ ID NO: 634364 - protein, 17 aa, Homo sapiens
  CDR3 for beta chain variable domain of TCR clone 317182 (TRBV20-1, TRBJ2-2)
CSASGSGQGGLTGELFF

SEQ ID NO: 634365 - protein, 13 aa, Homo sapiens
  CDR3 for alpha chain variable domain of TCR clone 317183 (TRAV3, TRAJ21)
CAVREPDLNKFYF

SEQ ID NO: 634366 - protein, 12 aa, Homo sapiens
  CDR3 for beta chain variable domain of TCR clone 317183 (TRBV5-1, TRBJ2-4)
LAGEWTKNIQYF

SEQ ID NO: 634367 - protein, 12 aa, Homo sapiens
  CDR3 for alpha chain variable domain of TCR clone 317184 (TRAV12-3, TRAJ17)
CAMTLTGNKLTF

SEQ ID NO: 634368 - protein, 15 aa, Homo sapiens
  CDR3 for beta chain variable domain of TCR clone 317184 (TRBV7-9, TRBJ1-4)
CASSRTGGFNEKLFL

SEQ ID NO: 634369 - protein, 14 aa, Homo sapiens
  CDR3 for alpha chain variable domain of TCR clone 317185 (TRAV2, TRAJ37)
CAVDFTSNTGKLIF

SEQ ID NO: 634370 - protein, 13 aa, Homo sapiens
  CDR3 for beta chain variable domain of TCR clone 317185 (TRBV20-1, TRBJ1-1)
CSTPLGGGTEAFF

SEQ ID NO: 634371 - protein, 12 aa, Homo sapiens
  CDR3 for alpha chain variable domain of TCR clone 317186 (TRAV12-3, TRAJ39)
FAMTQAGNMLTF

SEQ ID NO: 634372 - protein, 12 aa, Homo sapiens
  CDR3 for beta chain variable domain of TCR clone 317186 (TRBV11-2, TRBJ2-1)
CASSPGNNEQFF

SEQ ID NO: 634373 - protein, 16 aa, Homo sapiens
  CDR3 for alpha chain variable domain of TCR clone 317187 (TRAV3, TRAJ37)
CAVRVRGSVNTVKLIF

SEQ ID NO: 634374 - protein, 16 aa, Homo sapiens
  CDR3 for beta chain variable domain of TCR clone 317187 (TRBV11-2, TRBJ2-7)
CASSPTTGGVSYEQYF

SEQ ID NO: 634375 - protein, 14 aa, Homo sapiens
  CDR3 for alpha chain variable domain of TCR clone 317188 (TRAV13-1, TRAJ35)
CAASKGGFGNVLHR

SEQ ID NO: 634376 - protein, 15 aa, Homo sapiens
  CDR3 for beta chain variable domain of TCR clone 317188 (TRBV4-1, TRBJ2-1)
CASSQVGLGSDEQFF

SEQ ID NO: 634377 - protein, 15 aa, Homo sapiens
  CDR3 for alpha chain variable domain of TCR clone 317189 (TRAV13-2, TRAJ45)
CAENNSGGGADGLTF

SEQ ID NO: 634378 - protein, 12 aa, Homo sapiens
  CDR3 for beta chain variable domain of TCR clone 317189 (TRBV25-1, TRBJ2-6)
CQPGAWANVLTF

SEQ ID NO: 634379 - protein, 14 aa, Homo sapiens
  CDR3 for alpha chain variable domain of TCR clone 317190 (TRAV13-1, TRAJ44)
CAANATGTASKLTF

SEQ ID NO: 634380 - protein, 13 aa, Homo sapiens
  CDR3 for beta chain variable domain of TCR clone 317190 (TRBV5-5, TRBJ1-2)
CASSFWRGEDYTF

SEQ ID NO: 634381 - protein, 17 aa, Homo sapiens
  CDR3 for alpha chain variable domain of TCR clone 317191 (TRAV3, TRAJ6)
CAVRDGPRAGGGYLTTF

SEQ ID NO: 634382 - protein, 14 aa, Homo sapiens
  CDR3 for beta chain variable domain of TCR clone 317191 (TRBV7-2, TRBJ2-7)
CASSPKTSFYEQYF

SEQ ID NO: 634383 - protein, 16 aa, Homo sapiens
  CDR3 for alpha chain variable domain of TCR clone 317192 (TRAV3, TRAJ37)
CAVRVGGSGNTGKLIF

SEQ ID NO: 634384 - protein, 13 aa, Homo sapiens
  CDR3 for beta chain variable domain of TCR clone 317192 (TRBV14, TRBJ2-1)
CASSQDRRNEQFF

SEQ ID NO: 634385 - protein, 15 aa, Homo sapiens
  CDR3 for alpha chain variable domain of TCR clone 317193 (TRAV8-2, TRAJ40)
CVVSDRGSGTYKSIF

SEQ ID NO: 634386 - protein, 17 aa, Homo sapiens
  CDR3 for beta chain variable domain of TCR clone 317193 (TRBV9, TRBJ2-1)
CASSVRSLSGGNNEQFF

SEQ ID NO: 634387 - protein, 14 aa, Homo sapiens
  CDR3 for alpha chain variable domain of TCR clone 317194 (TRAV12-2, TRAJ13)
CAVNPSGGYQKVTF

SEQ ID NO: 634388 - protein, 15 aa, Homo sapiens
  CDR3 for beta chain variable domain of TCR clone 317194 (TRBV4-1, TRBJ2-7)
CASSQNTGRLYEQYF

SEQ ID NO: 634389 - protein, 14 aa, Homo sapiens
  CDR3 for alpha chain variable domain of TCR clone 317195 (TRAV12-3, TRAJ10)
SHLPLTGGGNKLTF

SEQ ID NO: 634390 - protein, 14 aa, Homo sapiens
  CDR3 for beta chain variable domain of TCR clone 317195 (TRBV20-1, TRBJ1-1)
CSAMGGTANTEAFF

SEQ ID NO: 634391 - protein, 14 aa, Homo sapiens
  CDR3 for alpha chain variable domain of TCR clone 317196 (TRAV12-2, TRAJ53)
CAVKGGGSNYKLTV

SEQ ID NO: 634392 - protein, 15 aa, Homo sapiens
  CDR3 for beta chain variable domain of TCR clone 317196 (TRBV10-3, TRBJ2-3)
CAISLTSGGTDTQYF

SEQ ID NO: 634393 - protein, 14 aa, Homo sapiens
  CDR3 for alpha chain variable domain of TCR clone 317197 (TRAV1-2, TRAJ16)
CAVNRFSDGQKLLF

SEQ ID NO: 634394 - protein, 15 aa, Homo sapiens
  CDR3 for beta chain variable domain of TCR clone 317197 (TRBV5-1, TRBJ2-2)
CASSSQGGSTGELFF

SEQ ID NO: 634395 - protein, 17 aa, Homo sapiens
  CDR3 for alpha chain variable domain of TCR clone 317198 (TRAV14/DV4, TRAJ33)
CAMREGLGIDSNYQLIW

SEQ ID NO: 634396 - protein, 18 aa, Homo sapiens
  CDR3 for beta chain variable domain of TCR clone 317198 (TRBV20-1, TRBJ2-6)
CSARGSGTTRSGANVLTF

SEQ ID NO: 634397 - protein, 18 aa, Homo sapiens
  CDR3 for alpha chain variable domain of TCR clone 317199 (TRAV17, TRAJ22)
LLLCYGRDFFCSARQLTF

SEQ ID NO: 634398 - protein, 15 aa, Homo sapiens
  CDR3 for beta chain variable domain of TCR clone 317199 (TRBV5-1, TRBJ2-1)
CASSPPRAPYNEQFF

SEQ ID NO: 634399 - protein, 14 aa, Homo sapiens
  CDR3 for alpha chain variable domain of TCR clone 317200 (TRAV39, TRAJ54)
CAVVLIQGAQKLVF

SEQ ID NO: 634400 - protein, 15 aa, Homo sapiens
  CDR3 for beta chain variable domain of TCR clone 317200 (TRBV11-2, TRBJ2-2)
CASSSDRVNAGELFF

SEQ ID NO: 634401 - protein, 16 aa, Homo sapiens
  CDR3 for alpha chain variable domain of TCR clone 317201 (TRAV3, TRAJ21)
CAVRDIERGNFNKFYF

SEQ ID NO: 634402 - protein, 13 aa, Homo sapiens
  CDR3 for beta chain variable domain of TCR clone 317201 (TRBV29-1, TRBJ2-1)
CSVEGGRVNEQFF

SEQ ID NO: 634403 - protein, 15 aa, Homo sapiens
  CDR3 for alpha chain variable domain of TCR clone 317202 (TRAV20, TRAJ4)
CAVQVFSGGYNKLIF

SEQ ID NO: 634404 - protein, 14 aa, Homo sapiens
  CDR3 for beta chain variable domain of TCR clone 317202 (TRBV7-6, TRBJ2-3)
CASNSGGDANTQCF

SEQ ID NO: 634405 - protein, 14 aa, Homo sapiens
  CDR3 for alpha chain variable domain of TCR clone 317203 (TRAV12-1, TRAJ12)
CVVNGRDSSYKLIF

SEQ ID NO: 634406 - protein, 13 aa, Homo sapiens
  CDR3 for beta chain variable domain of TCR clone 317203 (TRBV28, TRBJ2-2)
CASIRESAGELFF

SEQ ID NO: 634407 - protein, 14 aa, Homo sapiens
  CDR3 for alpha chain variable domain of TCR clone 317204 (TRAV12-1, TRAJ9)
CVVNRRTGGFKTIF

SEQ ID NO: 634408 - protein, 16 aa, Homo sapiens
  CDR3 for beta chain variable domain of TCR clone 317204 (TRBV4-1, TRBJ2-3)
CASSRSTSGAEDTQYF

SEQ ID NO: 634409 - protein, 14 aa, Homo sapiens
  CDR3 for alpha chain variable domain of TCR clone 317205 (TRAV12-3, TRAJ54)
CAMRGIKGAQKLVF

SEQ ID NO: 634410 - protein, 13 aa, Homo sapiens
  CDR3 for beta chain variable domain of TCR clone 317205 (TRBV19, TRBJ1-1)
CASSPSNGGEAFF

SEQ ID NO: 634411 - protein, 13 aa, Homo sapiens
  CDR3 for alpha chain variable domain of TCR clone 317206 (TRAV16, TRAJ26)
CITVLCLGQNFIF

SEQ ID NO: 634412 - protein, 12 aa, Homo sapiens
  CDR3 for beta chain variable domain of TCR clone 317206 (TRBV11-2, TRBJ2-1)
CASSRGNNEQFF

SEQ ID NO: 634413 - protein, 16 aa, Homo sapiens
  CDR3 for alpha chain variable domain of TCR clone 317207 (TRAV3, TRAJ37)
CAVRGKGSGNTGKLIF

SEQ ID NO: 634414 - protein, 18 aa, Homo sapiens
  CDR3 for beta chain variable domain of TCR clone 317207 (TRBV25-1, TRBJ2-1)
CASSESRAGGPGYNEQFF

SEQ ID NO: 634415 - protein, 13 aa, Homo sapiens
  CDR3 for alpha chain variable domain of TCR clone 317208 (TRAV12-1, TRAJ40)
CVVNSSGTYKYIL

SEQ ID NO: 634416 - protein, 14 aa, Homo sapiens
  CDR3 for beta chain variable domain of TCR clone 317208 (TRBV2, TRBJ1-6)
CASEVSSYNSPLLF

SEQ ID NO: 634417 - protein, 15 aa, Homo sapiens
  CDR3 for alpha chain variable domain of TCR clone 317209 (TRAV8-3, TRAJ45)
CASSYSGGGAYGLTF

SEQ ID NO: 634418 - protein, 13 aa, Homo sapiens
  CDR3 for beta chain variable domain of TCR clone 317209 (TRBV10-3, TRBJ2-7)
CASKLAVNYKQYF

SEQ ID NO: 634419 - protein, 14 aa, Homo sapiens
  CDR3 for alpha chain variable domain of TCR clone 317210 (TRAV16, TRAJ33)
CALSPMDSNYQLIW

SEQ ID NO: 634420 - protein, 12 aa, Homo sapiens
  CDR3 for beta chain variable domain of TCR clone 317210 (TRBV5-1, TRBJ1-2)
CASSQDTYGYTF

SEQ ID NO: 634421 - protein, 17 aa, Homo sapiens
  CDR3 for alpha chain variable domain of TCR clone 317211 (TRAV26-2, TRAJ42)
CILRDVGYGGSQGNLIS

SEQ ID NO: 634422 - protein, 16 aa, Homo sapiens
  CDR3 for beta chain variable domain of TCR clone 317211 (TRBV12-4, TRBJ2-7)
CASSWIGGTGTYEQYF

SEQ ID NO: 634423 - protein, 15 aa, Homo sapiens
  CDR3 for alpha chain variable domain of TCR clone 317212 (TRAV3, TRAJ5)
CAVRDLDTGRRALTV

SEQ ID NO: 634424 - protein, 14 aa, Homo sapiens
  CDR3 for beta chain variable domain of TCR clone 317212 (TRBV25-1, TRBJ1-1)
CASTHLGGNTEAFF

SEQ ID NO: 634425 - protein, 13 aa, Homo sapiens
  CDR3 for alpha chain variable domain of TCR clone 317213 (TRAV2, TRAJ40)
CAVVTSGTYKYIF

SEQ ID NO: 634426 - protein, 14 aa, Homo sapiens
  CDR3 for beta chain variable domain of TCR clone 317213 (TRBV2, TRBJ2-2)
CATYRGSNTGELFF

SEQ ID NO: 634427 - protein, 14 aa, Homo sapiens
  CDR3 for alpha chain variable domain of TCR clone 317214 (TRAV8-3, TRAJ34)
CAVGPPHNTDKLIF

SEQ ID NO: 634428 - protein, 16 aa, Homo sapiens
  CDR3 for beta chain variable domain of TCR clone 317214 (TRBV20-1, TRBJ2-1)
CSARDLKQGMNNEQFF

SEQ ID NO: 634429 - protein, 15 aa, Homo sapiens
  CDR3 for alpha chain variable domain of TCR clone 317215 (TRAV5, TRAJ33)
CAEAPAMDSNYQLIW

SEQ ID NO: 634430 - protein, 17 aa, Homo sapiens
  CDR3 for beta chain variable domain of TCR clone 317215 (TRBV7-8, TRBJ2-6)
CASSAGTGGAGANVLTF

SEQ ID NO: 634431 - protein, 20 aa, Homo sapiens
  CDR3 for alpha chain variable domain of TCR clone 317216 (TRAV1-2, TRAJ34)
LLKELQMKDSASPNTDKLIF

SEQ ID NO: 634432 - protein, 18 aa, Homo sapiens
  CDR3 for beta chain variable domain of TCR clone 317216 (TRBV3-1, TRBJ2-5)
CASSHAGTSGGGREAQYF

SEQ ID NO: 634433 - protein, 11 aa, Homo sapiens
  CDR3 for alpha chain variable domain of TCR clone 317217 (TRAV2, TRAJ33)
CAVDSNYQLIW

SEQ ID NO: 634434 - protein, 13 aa, Homo sapiens
  CDR3 for beta chain variable domain of TCR clone 317217 (TRBV19, TRBJ2-1)
CATSRGVYNEQFF

SEQ ID NO: 634435 - protein, 14 aa, Homo sapiens
  CDR3 for alpha chain variable domain of TCR clone 317218 (TRAV12-3, TRAJ37)
CVSEGPSNTGKLIF

SEQ ID NO: 634436 - protein, 14 aa, Homo sapiens
  CDR3 for beta chain variable domain of TCR clone 317218 (TRBV20-1, TRBJ1-1)
CSAPTRIGGTEAFF

SEQ ID NO: 634437 - protein, 12 aa, Homo sapiens
  CDR3 for alpha chain variable domain of TCR clone 317219 (TRAV13-1, TRAJ39)
CAASNAGNMLTF

SEQ ID NO: 634438 - protein, 16 aa, Homo sapiens
  CDR3 for beta chain variable domain of TCR clone 317219 (TRBV19, TRBJ2-1)
CASSKAGPSSYNEQFF

SEQ ID NO: 634439 - protein, 16 aa, Homo sapiens
  CDR3 for alpha chain variable domain of TCR clone 317220 (TRAV12-3, TRAJ53)
CAMSPGSGGSNYKLTF

SEQ ID NO: 634440 - protein, 12 aa, Homo sapiens
  CDR3 for beta chain variable domain of TCR clone 317220 (TRBV11-2, TRBJ2-2)
CASSLGGGGLFF

SEQ ID NO: 634441 - protein, 14 aa, Homo sapiens
  CDR3 for alpha chain variable domain of TCR clone 317221 (TRAV2, TRAJ10)
CAVEDQRSREEETN

SEQ ID NO: 634442 - protein, 16 aa, Homo sapiens
  CDR3 for beta chain variable domain of TCR clone 317221 (TRBV18, TRBJ1-5)
CASSPSTGNSNQPQHF

SEQ ID NO: 634443 - protein, 15 aa, Homo sapiens
  CDR3 for alpha chain variable domain of TCR clone 317222 (TRAV17, TRAJ4)
CATGTWSGGYNKLIF

SEQ ID NO: 634444 - protein, 15 aa, Homo sapiens
  CDR3 for beta chain variable domain of TCR clone 317222 (TRBV20-1, TRBJ2-7)
CSARDRVSVMDEQYF

SEQ ID NO: 634445 - protein, 18 aa, Homo sapiens
  CDR3 for alpha chain variable domain of TCR clone 317223 (TRAV26-1, TRAJ5)
CIVRVVPPRDTGRRALPF

SEQ ID NO: 634446 - protein, 15 aa, Homo sapiens
  CDR3 for beta chain variable domain of TCR clone 317223 (TRBV7-9, TRBJ2-7)
CASSLPMGQANEQYL

SEQ ID NO: 634447 - protein, 15 aa, Homo sapiens
  CDR3 for alpha chain variable domain of TCR clone 317224 (TRAV12-1, TRAJ23)
CGERSRCNQGGKLIF

SEQ ID NO: 634448 - protein, 14 aa, Homo sapiens
  CDR3 for beta chain variable domain of TCR clone 317224 (TRBV7-2, TRBJ2-2)
CASRGQGAAGELFF

SEQ ID NO: 634449 - protein, 16 aa, Homo sapiens
  CDR3 for alpha chain variable domain of TCR clone 317225 (TRAV27, TRAJ52)
CAGAPAGGTSYGKLPF

SEQ ID NO: 634450 - protein, 12 aa, Homo sapiens
  CDR3 for beta chain variable domain of TCR clone 317225 (TRBV27, TRBJ2-1)
CASRGFYNEQLF

SEQ ID NO: 634451 - protein, 17 aa, Homo sapiens
  CDR3 for alpha chain variable domain of TCR clone 317226 (TRAV26-1, TRAJ28)
CIVRARYSGAGSYHLTF

SEQ ID NO: 634452 - protein, 10 aa, Homo sapiens
  CDR3 for beta chain variable domain of TCR clone 317226 (TRBV12-4, TRBJ2-7)
CASLTFEQYF

SEQ ID NO: 634453 - protein, 12 aa, Homo sapiens
  CDR3 for alpha chain variable domain of TCR clone 317227 (TRAV12-3, TRAJ17)
CAMTLTGNKLTF

SEQ ID NO: 634454 - protein, 15 aa, Homo sapiens
  CDR3 for beta chain variable domain of TCR clone 317227 (TRBV20-1, TRBJ2-7)
CSARDRVSGMDEQHV

SEQ ID NO: 634455 - protein, 14 aa, Homo sapiens
  CDR3 for alpha chain variable domain of TCR clone 317228 (TRAV38-1, TRAJ29)
CAFITPSGNTPLVF

SEQ ID NO: 634456 - protein, 19 aa, Homo sapiens
  CDR3 for beta chain variable domain of TCR clone 317228 (TRBV4-3, TRBJ2-7)
CISAPAAKQPSGTPYEQYF

SEQ ID NO: 634457 - protein, 13 aa, Homo sapiens
  CDR3 for alpha chain variable domain of TCR clone 317229 (TRAV12-2, TRAJ39)
CAVNNNAGNMLTF

SEQ ID NO: 634458 - protein, 17 aa, Homo sapiens
  CDR3 for beta chain variable domain of TCR clone 317229 (TRBV13, TRBJ2-3)
CASSLSRVAGGRNTQYF

SEQ ID NO: 634459 - protein, 17 aa, Homo sapiens
  CDR3 for alpha chain variable domain of TCR clone 317230 (TRAV14/DV4, TRAJ28)
CTMRGTSSGAGSYQLTF

SEQ ID NO: 634460 - protein, 13 aa, Homo sapiens
  CDR3 for beta chain variable domain of TCR clone 317230 (TRBV28, TRBJ2-5)
CASSFAGGETQYF

SEQ ID NO: 634461 - protein, 16 aa, Homo sapiens
  CDR3 for alpha chain variable domain of TCR clone 317231 (TRAV20, TRAJ28)
CAVRDPSGAGSYQLTF

SEQ ID NO: 634462 - protein, 17 aa, Homo sapiens
  CDR3 for beta chain variable domain of TCR clone 317231 (TRBV7-9, TRBJ2-3)
CASSLEEAGAYPDTQYF

SEQ ID NO: 634463 - protein, 16 aa, Homo sapiens
  CDR3 for alpha chain variable domain of TCR clone 317232 (TRAV29/DV5, TRAJ39)
CAASLLFNNAGNMLTF

SEQ ID NO: 634464 - protein, 16 aa, Homo sapiens
  CDR3 for beta chain variable domain of TCR clone 317232 (TRBV19, TRBJ2-6)
CASSRSGLSGANVLTF

SEQ ID NO: 634465 - protein, 14 aa, Homo sapiens
  CDR3 for alpha chain variable domain of TCR clone 317233 (TRAV13-1, TRAJ24)
CAASPADSWGKFQF

SEQ ID NO: 634466 - protein, 13 aa, Homo sapiens
  CDR3 for beta chain variable domain of TCR clone 317233 (TRBV14, TRBJ2-7)
CASSQDRRYEQYF

SEQ ID NO: 634467 - protein, 16 aa, Homo sapiens
  CDR3 for alpha chain variable domain of TCR clone 317234 (TRAV30, TRAJ24)
CGTEIVDADSWGKFQF

SEQ ID NO: 634468 - protein, 18 aa, Homo sapiens
  CDR3 for beta chain variable domain of TCR clone 317234 (TRBV6-1, TRBJ1-6)
CASSGSDGRRINNSPLHF

SEQ ID NO: 634469 - protein, 16 aa, Homo sapiens
  CDR3 for alpha chain variable domain of TCR clone 317235 (TRAV38-1, TRAJ32)
CAFMKGGGGATNKPIF

SEQ ID NO: 634470 - protein, 13 aa, Homo sapiens
  CDR3 for beta chain variable domain of TCR clone 317235 (TRBV20-1, TRBJ2-5)
CSAREAFQGTQYF

SEQ ID NO: 634471 - protein, 12 aa, Homo sapiens
  CDR3 for alpha chain variable domain of TCR clone 317236 (TRAV13-1, TRAJ21)
CAAKEGFNRFYF

SEQ ID NO: 634472 - protein, 15 aa, Homo sapiens
  CDR3 for beta chain variable domain of TCR clone 317236 (TRBV9, TRBJ2-1)
CASSVGSGFYNEQFF

SEQ ID NO: 634473 - protein, 17 aa, Homo sapiens
  CDR3 for alpha chain variable domain of TCR clone 317237 (TRAV8-6, TRAJ58)
CAVSSWVGETSGARLTF

SEQ ID NO: 634474 - protein, 14 aa, Homo sapiens
  CDR3 for beta chain variable domain of TCR clone 317237 (TRBV4-2, TRBJ2-1)
CASGLDRAYNGQFF

SEQ ID NO: 634475 - protein, 11 aa, Homo sapiens
  CDR3 for alpha chain variable domain of TCR clone 317238 (TRAV16, TRAJ29)
WAPSGNTPLVF

SEQ ID NO: 634476 - protein, 12 aa, Homo sapiens
  CDR3 for beta chain variable domain of TCR clone 317238 (TRBV11-2, TRBJ2-2)
CASSLGGGELFF

SEQ ID NO: 634477 - protein, 14 aa, Homo sapiens
  CDR3 for alpha chain variable domain of TCR clone 317239 (TRAV17, TRAJ53)
CATDAGGSNYKLTF

SEQ ID NO: 634478 - protein, 16 aa, Homo sapiens
  CDR3 for beta chain variable domain of TCR clone 317239 (TRBV4-1, TRBJ1-1)
CASSQDSGMGNTEAFF

SEQ ID NO: 634479 - protein, 15 aa, Homo sapiens
  CDR3 for alpha chain variable domain of TCR clone 317240 (TRAV8-6, TRAJ6)
CAVSGESGGSYIPTF

SEQ ID NO: 634480 - protein, 17 aa, Homo sapiens
  CDR3 for beta chain variable domain of TCR clone 317240 (TRBV7-9, TRBJ1-1)
CASSPELGGELKLSLDK

SEQ ID NO: 634481 - protein, 18 aa, Homo sapiens
  CDR3 for alpha chain variable domain of TCR clone 317241 (TRAV13-1, TRAJ52)
CAASKRSSGGTSYGKLTF

SEQ ID NO: 634482 - protein, 13 aa, Homo sapiens
  CDR3 for beta chain variable domain of TCR clone 317241 (TRBV12-4, TRBJ1-2)
CASSLRQGKGYAF

SEQ ID NO: 634483 - protein, 16 aa, Homo sapiens
  CDR3 for alpha chain variable domain of TCR clone 317242 (TRAV30, TRAJ24)
CGTEIVDADSWWKFQF

SEQ ID NO: 634484 - protein, 14 aa, Homo sapiens
  CDR3 for beta chain variable domain of TCR clone 317242 (TRBV7-2, TRBJ2-7)
CASSPKTSFYEQYF

SEQ ID NO: 634485 - protein, 23 aa, Homo sapiens
  CDR3 for alpha chain variable domain of TCR clone 317243 (TRAV13-2, TRAJ6)
CAEEGHQEVATYLHLEEEPALLF

SEQ ID NO: 634486 - protein, 17 aa, Homo sapiens
  CDR3 for beta chain variable domain of TCR clone 317243 (TRBV11-2, TRBJ2-1)
CASSLYPPGVEYNEQFF

SEQ ID NO: 634487 - protein, 12 aa, Homo sapiens
  CDR3 for alpha chain variable domain of TCR clone 317244 (TRAV8-3, TRAJ20)
CAVGANDYKLSF

SEQ ID NO: 634488 - protein, 16 aa, Homo sapiens
  CDR3 for beta chain variable domain of TCR clone 317244 (TRBV7-3, TRBJ2-1)
CASSLEGYRSYNEQFF

SEQ ID NO: 634489 - protein, 11 aa, Homo sapiens
  CDR3 for alpha chain variable domain of TCR clone 317245 (TRAV1-1, TRAJ16)
CAAGDGQKLLF

SEQ ID NO: 634490 - protein, 15 aa, Homo sapiens
  CDR3 for beta chain variable domain of TCR clone 317245 (TRBV28, TRBJ1-2)
CASIPQGSDDYGHTI

SEQ ID NO: 634491 - protein, 19 aa, Homo sapiens
  CDR3 for alpha chain variable domain of TCR clone 317246 (TRAV26-1, TRAJ42)
CVLLRRQTYYGGSQGNLIF

SEQ ID NO: 634492 - protein, 16 aa, Homo sapiens
  CDR3 for beta chain variable domain of TCR clone 317246 (TRBV7-3, TRBJ2-2)
CASSLKRWTLSGELFF

SEQ ID NO: 634493 - protein, 13 aa, Homo sapiens
  CDR3 for alpha chain variable domain of TCR clone 317247 (TRAV3, TRAJ33)
CAGRDRSNYQLIW

SEQ ID NO: 634494 - protein, 16 aa, Homo sapiens
  CDR3 for beta chain variable domain of TCR clone 317247 (TRBV4-2, TRBJ2-7)
CASSQDRGTSSYEQYF

SEQ ID NO: 634495 - protein, 14 aa, Homo sapiens
  CDR3 for alpha chain variable domain of TCR clone 317248 (TRAV9-2, TRAJ38)
CALSNAGKNRKLIW

SEQ ID NO: 634496 - protein, 15 aa, Homo sapiens
  CDR3 for beta chain variable domain of TCR clone 317248 (TRBV7-9, TRBJ1-4)
CASSATGGNNEKLFF

SEQ ID NO: 634497 - protein, 11 aa, Homo sapiens
  CDR3 for alpha chain variable domain of TCR clone 317249 (TRAV3, TRAJ21)
CAVCNFNKFSF

SEQ ID NO: 634498 - protein, 16 aa, Homo sapiens
  CDR3 for beta chain variable domain of TCR clone 317249 (TRBV19, TRBJ2-1)
CASSKAGPSSYNEQFF

SEQ ID NO: 634499 - protein, 10 aa, Homo sapiens
  CDR3 for alpha chain variable domain of TCR clone 317250 (TRAV23/DV6, TRAJ57)
CAASSTLSQG

SEQ ID NO: 634500 - protein, 15 aa, Homo sapiens
  CDR3 for beta chain variable domain of TCR clone 317250 (TRBV27, TRBJ1-4)
CASSAQQDLNGKLFF

SEQ ID NO: 634501 - protein, 14 aa, Homo sapiens
  CDR3 for alpha chain variable domain of TCR clone 317251 (TRAV12-2, TRAJ13)
CAVKKTGGYQKVTF

SEQ ID NO: 634502 - protein, 13 aa, Homo sapiens
  CDR3 for beta chain variable domain of TCR clone 317251 (TRBV10-3, TRBJ2-7)
CASKLAVSYEQYF

SEQ ID NO: 634503 - protein, 14 aa, Homo sapiens
  CDR3 for alpha chain variable domain of TCR clone 317252 (TRAV26-1, TRAJ5)
CIVRVRFNRRALTF

SEQ ID NO: 634504 - protein, 17 aa, Homo sapiens
  CDR3 for beta chain variable domain of TCR clone 317252 (TRBV29-1, TRBJ2-3)
CSVEVLAGETGTDTQYF

SEQ ID NO: 634505 - protein, 13 aa, Homo sapiens
  CDR3 for alpha chain variable domain of TCR clone 317253 (TRAV3, TRAJ21)
CAVREPDFNKFYF

SEQ ID NO: 634506 - protein, 16 aa, Homo sapiens
  CDR3 for beta chain variable domain of TCR clone 317253 (TRBV5-1, TRBJ2-4)
AASRLAGEWTKNMQYF

SEQ ID NO: 634507 - protein, 11 aa, Homo sapiens
  CDR3 for alpha chain variable domain of TCR clone 317254 (TRAV27, TRAJ47)
CRSNQGNKLGF

SEQ ID NO: 634508 - protein, 16 aa, Homo sapiens
  CDR3 for beta chain variable domain of TCR clone 317254 (TRBV12-4, TRBJ1-5)
CASSRPVGGSNQPQHF

SEQ ID NO: 634509 - protein, 12 aa, Homo sapiens
  CDR3 for alpha chain variable domain of TCR clone 317255 (TRAV13-1, TRAJ49)
CAASIRSNQFYF

SEQ ID NO: 634510 - protein, 14 aa, Homo sapiens
  CDR3 for beta chain variable domain of TCR clone 317255 (TRBV7-2, TRBJ2-1)
CASSPGLAGNQQFF

SEQ ID NO: 634511 - protein, 14 aa, Homo sapiens
  CDR3 for alpha chain variable domain of TCR clone 317256 (TRAV8-4, TRAJ13)
CAVTLSGGYQRVTF

SEQ ID NO: 634512 - protein, 12 aa, Homo sapiens
  CDR3 for beta chain variable domain of TCR clone 317256 (TRBV12-4, TRBJ2-7)
CASSLGGYEQYF

SEQ ID NO: 634513 - protein, 17 aa, Homo sapiens
  CDR3 for alpha chain variable domain of TCR clone 317257 (TRAV3, TRAJ42)
CAVRDRDYGGSQGNLIF

SEQ ID NO: 634514 - protein, 16 aa, Homo sapiens
  CDR3 for beta chain variable domain of TCR clone 317257 (TRBV5-1, TRBJ2-1)
CASSGAGASDYNEQFF

SEQ ID NO: 634515 - protein, 17 aa, Homo sapiens
  CDR3 for alpha chain variable domain of TCR clone 317258 (TRAV14/DV4, TRAJ28)
CAMREVSSGAGSYQLTF

SEQ ID NO: 634516 - protein, 15 aa, Homo sapiens
  CDR3 for beta chain variable domain of TCR clone 317258 (TRBV11-2, TRBJ1-6)
CASTRRETGNSPLHF

SEQ ID NO: 634517 - protein, 13 aa, Homo sapiens
  CDR3 for alpha chain variable domain of TCR clone 317259 (TRAV8-1, TRAJ23)
YAVTGGQGGKLIF

SEQ ID NO: 634518 - protein, 15 aa, Homo sapiens
  CDR3 for beta chain variable domain of TCR clone 317259 (TRBV20-1, TRBJ2-2)
RSAIPGHSNTGELFF

SEQ ID NO: 634519 - protein, 13 aa, Homo sapiens
  CDR3 for alpha chain variable domain of TCR clone 317260 (TRAV13-1, TRAJ6)
CAARRGGNYIPTF

SEQ ID NO: 634520 - protein, 13 aa, Homo sapiens
  CDR3 for beta chain variable domain of TCR clone 317260 (TRBV5-8, TRBJ1-2)
CASSLGGNYGYTF

SEQ ID NO: 634521 - protein, 15 aa, Homo sapiens
  CDR3 for alpha chain variable domain of TCR clone 317261 (TRAV21, TRAJ45)
CAVSYSGGGADGLTF

SEQ ID NO: 634522 - protein, 14 aa, Homo sapiens
  CDR3 for beta chain variable domain of TCR clone 317261 (TRBV2, TRBJ2-1)
CASSEALIYNEQFF

SEQ ID NO: 634523 - protein, 12 aa, Homo sapiens
  CDR3 for alpha chain variable domain of TCR clone 317262 (TRAV38-1, TRAJ57)
CAFMKLPPTLVF

SEQ ID NO: 634524 - protein, 13 aa, Homo sapiens
  CDR3 for beta chain variable domain of TCR clone 317262 (TRBV19, TRBJ1-2)
CASSVPGQDGYTF

SEQ ID NO: 634525 - protein, 14 aa, Homo sapiens
  CDR3 for alpha chain variable domain of TCR clone 317263 (TRAV8-4, TRAJ48)
CAVSETFGNEKLTF

SEQ ID NO: 634526 - protein, 14 aa, Homo sapiens
  CDR3 for beta chain variable domain of TCR clone 317263 (TRBV7-3, TRBJ2-1)
CASSLAGWTNEQFF

SEQ ID NO: 634527 - protein, 10 aa, Homo sapiens
  CDR3 for alpha chain variable domain of TCR clone 317264 (TRAV12-1, TRAJ33)
CVASNYQLIW

SEQ ID NO: 634528 - protein, 15 aa, Homo sapiens
  CDR3 for beta chain variable domain of TCR clone 317264 (TRBV5-4, TRBJ1-4)
CASSHGDGEHEKLFF

SEQ ID NO: 634529 - protein, 14 aa, Homo sapiens
  CDR3 for alpha chain variable domain of TCR clone 317265 (TRAV26-1, TRAJ34)
CIVRVAYNTDKLLF

SEQ ID NO: 634530 - protein, 14 aa, Homo sapiens
  CDR3 for beta chain variable domain of TCR clone 317265 (TRBV20-1, TRBJ2-7)
CSAWTALSSYEQYF

SEQ ID NO: 634531 - protein, 12 aa, Homo sapiens
  CDR3 for alpha chain variable domain of TCR clone 317266 (TRAV17, TRAJ12)
CAGGDSSYKLIF

SEQ ID NO: 634532 - protein, 14 aa, Homo sapiens
  CDR3 for beta chain variable domain of TCR clone 317266 (TRBV15, TRBJ2-3)
CATRSGTSTDTQYF

SEQ ID NO: 634533 - protein, 10 aa, Homo sapiens
  CDR3 for alpha chain variable domain of TCR clone 317267 (TRAV30, TRAJ16)
CGTGGQKLLF

SEQ ID NO: 634534 - protein, 13 aa, Homo sapiens
  CDR3 for beta chain variable domain of TCR clone 317267 (TRBV10-3, TRBJ2-7)
CASKLAVNYEQYF

SEQ ID NO: 634535 - protein, 16 aa, Homo sapiens
  CDR3 for alpha chain variable domain of TCR clone 317268 (TRAV26-1, TRAJ37)
CIVRGDGSDNTGKLIF

SEQ ID NO: 634536 - protein, 17 aa, Homo sapiens
  CDR3 for beta chain variable domain of TCR clone 317268 (TRBV4-1, TRBJ2-7)
CASSRDPLGVRGGEQYF

SEQ ID NO: 634537 - protein, 13 aa, Homo sapiens
  CDR3 for alpha chain variable domain of TCR clone 317269 (TRAV14/DV4, TRAJ23)
CAMRELKGGKLIF

SEQ ID NO: 634538 - protein, 15 aa, Homo sapiens
  CDR3 for beta chain variable domain of TCR clone 317269 (TRBV6-3, TRBJ2-1)
CASSYASDSYNEQFF

SEQ ID NO: 634539 - protein, 13 aa, Homo sapiens
  CDR3 for alpha chain variable domain of TCR clone 317270 (TRAV12-3, TRAJ7)
CAMTPYRNNRLAF

SEQ ID NO: 634540 - protein, 16 aa, Homo sapiens
  CDR3 for beta chain variable domain of TCR clone 317270 (TRBV20-1, TRBJ1-4)
CSARPYGGELNEKLFF

SEQ ID NO: 634541 - protein, 16 aa, Homo sapiens
  CDR3 for alpha chain variable domain of TCR clone 317271 (TRAV8-3, TRAJ13)
CAVGAYPSWGYEKVTF

SEQ ID NO: 634542 - protein, 15 aa, Homo sapiens
  CDR3 for beta chain variable domain of TCR clone 317271 (TRBV19, TRBJ1-5)
CASSIVWADNQPQHF

SEQ ID NO: 634543 - protein, 15 aa, Homo sapiens
  CDR3 for alpha chain variable domain of TCR clone 317272 (TRAV2, TRAJ9)
CAVEDRGTGGFETIF

SEQ ID NO: 634544 - protein, 14 aa, Homo sapiens
  CDR3 for beta chain variable domain of TCR clone 317272 (TRBV4-1, TRBJ2-2)
CASSQAVNTGEMFF

SEQ ID NO: 634545 - protein, 15 aa, Homo sapiens
  CDR3 for alpha chain variable domain of TCR clone 317273 (TRAV13-1, TRAJ49)
CAASTEGNTGNQFSF

SEQ ID NO: 634546 - protein, 12 aa, Homo sapiens
  CDR3 for beta chain variable domain of TCR clone 317273 (TRBV11-2, TRBJ2-2)
CASSLGGGELFF

SEQ ID NO: 634547 - protein, 14 aa, Homo sapiens
  CDR3 for alpha chain variable domain of TCR clone 317274 (TRAV26-1, TRAJ34)
CIVRVAYNTDKLIF

SEQ ID NO: 634548 - protein, 15 aa, Homo sapiens
  CDR3 for beta chain variable domain of TCR clone 317274 (TRBV20-1, TRBJ2-7)
CSARVPAAYFYEQDL

SEQ ID NO: 634549 - protein, 15 aa, Homo sapiens
  CDR3 for alpha chain variable domain of TCR clone 317275 (TRAV29/DV5, TRAJ24)
CAASGATDSWGKFQF

SEQ ID NO: 634550 - protein, 15 aa, Homo sapiens
  CDR3 for beta chain variable domain of TCR clone 317275 (TRBV11-2, TRBJ2-1)
CASSLGTSGLNEQFF

SEQ ID NO: 634551 - protein, 11 aa, Homo sapiens
  CDR3 for alpha chain variable domain of TCR clone 317276 (TRAV16, TRAJ33)
CALHSNYQLIW

SEQ ID NO: 634552 - protein, 13 aa, Homo sapiens
  CDR3 for beta chain variable domain of TCR clone 317276 (TRBV12-4, TRBJ2-5)
CASSPGTEETQYF

SEQ ID NO: 634553 - protein, 17 aa, Homo sapiens
  CDR3 for alpha chain variable domain of TCR clone 317277 (TRAV3, TRAJ42)
RAVRDRDYGGSQGNRIF

SEQ ID NO: 634554 - protein, 14 aa, Homo sapiens
  CDR3 for beta chain variable domain of TCR clone 317277 (TRBV7-2, TRBJ2-5)
CASSPRGSSETQYF

SEQ ID NO: 634555 - protein, 21 aa, Homo sapiens
  CDR3 for alpha chain variable domain of TCR clone 317278 (TRAV1-1, TRAJ6)
CLLLLRCERLERTGGSYIPTF

SEQ ID NO: 634556 - protein, 15 aa, Homo sapiens
  CDR3 for beta chain variable domain of TCR clone 317278 (TRBV7-8, TRBJ1-5)
CASSLERRGLEPQHF

SEQ ID NO: 634557 - protein, 16 aa, Homo sapiens
  CDR3 for alpha chain variable domain of TCR clone 317279 (TRAV29/DV5, TRAJ22)
CAASASTSGSARQLTF

SEQ ID NO: 634558 - protein, 15 aa, Homo sapiens
  CDR3 for beta chain variable domain of TCR clone 317279 (TRBV20-1, TRBJ2-7)
CSARDRVSGMDEQYF

SEQ ID NO: 634559 - protein, 11 aa, Homo sapiens
  CDR3 for alpha chain variable domain of TCR clone 317280 (TRAV21, TRAJ41)
CTVRSGYALNF

SEQ ID NO: 634560 - protein, 11 aa, Homo sapiens
  CDR3 for beta chain variable domain of TCR clone 317280 (TRBV12-4, TRBJ2-3)
CASTATDTQYF

SEQ ID NO: 634561 - protein, 14 aa, Homo sapiens
  CDR3 for alpha chain variable domain of TCR clone 317281 (TRAV13-2, TRAJ17)
CAENSKAAGNKRTF

SEQ ID NO: 634562 - protein, 20 aa, Homo sapiens
  CDR3 for beta chain variable domain of TCR clone 317281 (TRBV28, TRBJ2-1)
CASTPIGRSPGLAGGNEQFF

SEQ ID NO: 634563 - protein, 13 aa, Homo sapiens
  CDR3 for alpha chain variable domain of TCR clone 317282 (TRAV12-2, TRAJ13)
CAVTAGGYQKVTF

SEQ ID NO: 634564 - protein, 16 aa, Homo sapiens
  CDR3 for beta chain variable domain of TCR clone 317282 (TRBV12-5, TRBJ2-5)
CASGPRTSGNQETQYF

SEQ ID NO: 634565 - protein, 13 aa, Homo sapiens
  CDR3 for alpha chain variable domain of TCR clone 317283 (TRAV13-2, TRAJ48)
CAEMDFGNEKLTF

SEQ ID NO: 634566 - protein, 16 aa, Homo sapiens
  CDR3 for beta chain variable domain of TCR clone 317283 (TRBV4-1, TRBJ2-5)
CASSSGLAGVLGTQYF

SEQ ID NO: 634567 - protein, 14 aa, Homo sapiens
  CDR3 for alpha chain variable domain of TCR clone 317284 (TRAV16, TRAJ42)
CALLAGGSQGNLFF

SEQ ID NO: 634568 - protein, 15 aa, Homo sapiens
  CDR3 for beta chain variable domain of TCR clone 317284 (TRBV2, TRBJ2-7)
CASSEGLARSYEQYF

SEQ ID NO: 634569 - protein, 11 aa, Homo sapiens
  CDR3 for alpha chain variable domain of TCR clone 317285 (TRAV36/DV7, TRAJ45)
SGGGGADGFTF

SEQ ID NO: 634570 - protein, 13 aa, Homo sapiens
  CDR3 for beta chain variable domain of TCR clone 317285 (TRBV28, TRBJ2-7)
CASNPSGTYEQYF

SEQ ID NO: 634571 - protein, 12 aa, Homo sapiens
  CDR3 for alpha chain variable domain of TCR clone 317286 (TRAV12-3, TRAJ17)
CAMTLTGNKLTF

SEQ ID NO: 634572 - protein, 12 aa, Homo sapiens
  CDR3 for beta chain variable domain of TCR clone 317286 (TRBV12-4, TRBJ2-7)
CASSLGGNEQYF

SEQ ID NO: 634573 - protein, 15 aa, Homo sapiens
  CDR3 for alpha chain variable domain of TCR clone 317287 (TRAV8-1, TRAJ6)
CAVNAGAGRSYIPTF

SEQ ID NO: 634574 - protein, 14 aa, Homo sapiens
  CDR3 for beta chain variable domain of TCR clone 317287 (TRBV25-1, TRBJ1-6)
CASSLSADISPLHF

SEQ ID NO: 634575 - protein, 13 aa, Homo sapiens
  CDR3 for alpha chain variable domain of TCR clone 317288 (TRAV13-1, TRAJ28)
CAANEAGSYQLTF

SEQ ID NO: 634576 - protein, 15 aa, Homo sapiens
  CDR3 for beta chain variable domain of TCR clone 317288 (TRBV7-9, TRBJ1-6)
CASSSPGRGNSPLHC

SEQ ID NO: 634577 - protein, 16 aa, Homo sapiens
  CDR3 for alpha chain variable domain of TCR clone 317289 (TRAV2, TRAJ4)
CAVEDRFSGGYNKLMF

SEQ ID NO: 634578 - protein, 13 aa, Homo sapiens
  CDR3 for beta chain variable domain of TCR clone 317289 (TRBV7-7, TRBJ2-5)
CASRRSGQETQYF

SEQ ID NO: 634579 - protein, 14 aa, Homo sapiens
  CDR3 for alpha chain variable domain of TCR clone 317290 (TRAV23/DV6, TRAJ40)
CAARKNSGTYKYIF

SEQ ID NO: 634580 - protein, 14 aa, Homo sapiens
  CDR3 for beta chain variable domain of TCR clone 317290 (TRBV10-3, TRBJ2-5)
CDISERDYQETQYF

SEQ ID NO: 634581 - protein, 13 aa, Homo sapiens
  CDR3 for alpha chain variable domain of TCR clone 317291 (TRAV20, TRAJ56)
CAVQAVANSKLTF

SEQ ID NO: 634582 - protein, 14 aa, Homo sapiens
  CDR3 for beta chain variable domain of TCR clone 317291 (TRBV28, TRBJ1-1)
CASSPRTRWAEAFF

SEQ ID NO: 634583 - protein, 13 aa, Homo sapiens
  CDR3 for alpha chain variable domain of TCR clone 317292 (TRAV23/DV6, TRAJ22)
CAPYSGSASQLTF

SEQ ID NO: 634584 - protein, 15 aa, Homo sapiens
  CDR3 for beta chain variable domain of TCR clone 317292 (TRBV11-2, TRBJ1-6)
CASSLDHWAVSPLHF

SEQ ID NO: 634585 - protein, 13 aa, Homo sapiens
  CDR3 for alpha chain variable domain of TCR clone 317293 (TRAV21, TRAJ57)
CAVTQGGSAKLFF

SEQ ID NO: 634586 - protein, 16 aa, Homo sapiens
  CDR3 for beta chain variable domain of TCR clone 317293 (TRBV29-1, TRBJ2-7)
CSVEDAEDGTAYEQYF

SEQ ID NO: 634587 - protein, 14 aa, Homo sapiens
  CDR3 for alpha chain variable domain of TCR clone 317294 (TRAV8-2, TRAJ37)
CVVSISGNTGKLIF

SEQ ID NO: 634588 - protein, 12 aa, Homo sapiens
  CDR3 for beta chain variable domain of TCR clone 317294 (TRBV29-1, TRBJ2-3)
CSVTGGADTQYF

SEQ ID NO: 634589 - protein, 13 aa, Homo sapiens
  CDR3 for alpha chain variable domain of TCR clone 317295 (TRAV8-3, TRAJ28)
CAVGAVGSYQLTF

SEQ ID NO: 634590 - protein, 15 aa, Homo sapiens
  CDR3 for beta chain variable domain of TCR clone 317295 (TRBV7-9, TRBJ1-5)
CASSRGHQPNQTQHF

SEQ ID NO: 634591 - protein, 17 aa, Homo sapiens
  CDR3 for alpha chain variable domain of TCR clone 317296 (TRAV21, TRAJ52)
CAVGVNAGGTSYGKPTF

SEQ ID NO: 634592 - protein, 13 aa, Homo sapiens
  CDR3 for beta chain variable domain of TCR clone 317296 (TRBV5-1, TRBJ1-2)
CASSFQGNYGYTF

SEQ ID NO: 634593 - protein, 16 aa, Homo sapiens
  CDR3 for alpha chain variable domain of TCR clone 317297 (TRAV16, TRAJ42)
CALSGYYGGSQGNLIF

SEQ ID NO: 634594 - protein, 13 aa, Homo sapiens
  CDR3 for beta chain variable domain of TCR clone 317297 (TRBV7-9, TRBJ1-2)
CASSLKQNYGYTF

SEQ ID NO: 634595 - protein, 14 aa, Homo sapiens
  CDR3 for alpha chain variable domain of TCR clone 317298 (TRAV35, TRAJ50)
CAGQRKTSYDKVIF

SEQ ID NO: 634596 - protein, 15 aa, Homo sapiens
  CDR3 for beta chain variable domain of TCR clone 317298 (TRBV6-3, TRBJ2-7)
CASSSPGTVFYEQYF

SEQ ID NO: 634597 - protein, 11 aa, Homo sapiens
  CDR3 for alpha chain variable domain of TCR clone 317299 (TRAV3, TRAJ21)
CAVGNFNKFYF

SEQ ID NO: 634598 - protein, 15 aa, Homo sapiens
  CDR3 for beta chain variable domain of TCR clone 317299 (TRBV19, TRBJ2-1)
CASSINREPSHEQFF

SEQ ID NO: 634599 - protein, 13 aa, Homo sapiens
  CDR3 for alpha chain variable domain of TCR clone 317300 (TRAV27, TRAJ56)
CAGKPGANSKLTF

SEQ ID NO: 634600 - protein, 18 aa, Homo sapiens
  CDR3 for beta chain variable domain of TCR clone 317300 (TRBV11-2, TRBJ2-3)
CASSLGGASWGAPNTQYF

SEQ ID NO: 634601 - protein, 15 aa, Homo sapiens
  CDR3 for alpha chain variable domain of TCR clone 317301 (TRAV8-2, TRAJ40)
CVVLGTTSGTYKYIL

SEQ ID NO: 634602 - protein, 16 aa, Homo sapiens
  CDR3 for beta chain variable domain of TCR clone 317301 (TRBV7-3, TRBJ2-2)
CASSLKRGTLSGELFF

SEQ ID NO: 634603 - protein, 13 aa, Homo sapiens
  CDR3 for alpha chain variable domain of TCR clone 317302 (TRAV38-1, TRAJ42)
CARWGGSQGNLIF

SEQ ID NO: 634604 - protein, 12 aa, Homo sapiens
  CDR3 for beta chain variable domain of TCR clone 317302 (TRBV24-1, TRBJ1-1)
CATLCPDTEAFF

SEQ ID NO: 634605 - protein, 14 aa, Homo sapiens
  CDR3 for alpha chain variable domain of TCR clone 317303 (TRAV17, TRAJ40)
CATALTSGTYKYIF

SEQ ID NO: 634606 - protein, 14 aa, Homo sapiens
  CDR3 for beta chain variable domain of TCR clone 317303 (TRBV25-1, TRBJ1-1)
CASTHLGGNTEAFF

SEQ ID NO: 634607 - protein, 15 aa, Homo sapiens
  CDR3 for alpha chain variable domain of TCR clone 317304 (TRAV21, TRAJ21)
CAVRRRTSTNFTLDL

SEQ ID NO: 634608 - protein, 15 aa, Homo sapiens
  CDR3 for beta chain variable domain of TCR clone 317304 (TRBV28, TRBJ1-3)
CASSMGWASGNTIYF

SEQ ID NO: 634609 - protein, 21 aa, Homo sapiens
  CDR3 for alpha chain variable domain of TCR clone 317305 (TRAV25, TRAJ53)
TATQTTDVGTGSGGSNYKLTF

SEQ ID NO: 634610 - protein, 16 aa, Homo sapiens
  CDR3 for beta chain variable domain of TCR clone 317305 (TRBV4-2, TRBJ2-3)
CASSLSSRGHTDTQYF

SEQ ID NO: 634611 - protein, 14 aa, Homo sapiens
  CDR3 for alpha chain variable domain of TCR clone 317306 (TRAV12-2, TRAJ17)
CAVLFKAAGNKLTF

SEQ ID NO: 634612 - protein, 14 aa, Homo sapiens
  CDR3 for beta chain variable domain of TCR clone 317306 (TRBV7-2, TRBJ2-5)
CASSTGGELKTQYF

SEQ ID NO: 634613 - protein, 14 aa, Homo sapiens
  CDR3 for alpha chain variable domain of TCR clone 317307 (TRAV1-2, TRAJ8)
CAVREDTGFQKLVF

SEQ ID NO: 634614 - protein, 16 aa, Homo sapiens
  CDR3 for beta chain variable domain of TCR clone 317307 (TRBV4-3, TRBJ2-1)
CASSAALDRGVNEQFF

SEQ ID NO: 634615 - protein, 13 aa, Homo sapiens
  CDR3 for alpha chain variable domain of TCR clone 317308 (TRAV2, TRAJ40)
CAVVTSGTYKYIF

SEQ ID NO: 634616 - protein, 13 aa, Homo sapiens
  CDR3 for beta chain variable domain of TCR clone 317308 (TRBV25-1, TRBJ1-2)
CASSEAGASGYTF

SEQ ID NO: 634617 - protein, 14 aa, Homo sapiens
  CDR3 for alpha chain variable domain of TCR clone 317309 (TRAV2, TRAJ9)
CAAEDRSGGFKTIF

SEQ ID NO: 634618 - protein, 13 aa, Homo sapiens
  CDR3 for beta chain variable domain of TCR clone 317309 (TRBV7-3, TRBJ2-5)
CASSFRGGETQYF

SEQ ID NO: 634619 - protein, 14 aa, Homo sapiens
  CDR3 for alpha chain variable domain of TCR clone 317310 (TRAV13-2, TRAJ45)
CAEMQGGGADGLTF

SEQ ID NO: 634620 - protein, 11 aa, Homo sapiens
  CDR3 for beta chain variable domain of TCR clone 317310 (TRBV7-3, TRBJ2-5)
CASSLSETQYF

SEQ ID NO: 634621 - protein, 14 aa, Homo sapiens
  CDR3 for alpha chain variable domain of TCR clone 317311 (TRAV8-1, TRAJ5)
CAVSMDTGRRALTF

SEQ ID NO: 634622 - protein, 15 aa, Homo sapiens
  CDR3 for beta chain variable domain of TCR clone 317311 (TRBV19, TRBJ2-4)
CASRGPRRRENIQYF

SEQ ID NO: 634623 - protein, 11 aa, Homo sapiens
  CDR3 for alpha chain variable domain of TCR clone 317312 (TRAV23/DV6, TRAJ58)
CAARLLRGETS

SEQ ID NO: 634624 - protein, 12 aa, Homo sapiens
  CDR3 for beta chain variable domain of TCR clone 317312 (TRBV12-4, TRBJ2-7)
CASSLRGYEQYF

SEQ ID NO: 634625 - protein, 10 aa, Homo sapiens
  CDR3 for alpha chain variable domain of TCR clone 317313 (TRAV26-2, TRAJ49)
CLLLGNQLYF

SEQ ID NO: 634626 - protein, 13 aa, Homo sapiens
  CDR3 for beta chain variable domain of TCR clone 317313 (TRBV20-1, TRBJ2-7)
CSADPGATYEQYF

SEQ ID NO: 634627 - protein, 11 aa, Homo sapiens
  CDR3 for alpha chain variable domain of TCR clone 317314 (TRAV3, TRAJ21)
CAVGNFNKFYF

SEQ ID NO: 634628 - protein, 14 aa, Homo sapiens
  CDR3 for beta chain variable domain of TCR clone 317314 (TRBV19, TRBJ2-7)
CASSMGQGANEQYF

SEQ ID NO: 634629 - protein, 13 aa, Homo sapiens
  CDR3 for alpha chain variable domain of TCR clone 317315 (TRAV21, TRAJ27)
CAARPGTAGKSTF

SEQ ID NO: 634630 - protein, 14 aa, Homo sapiens
  CDR3 for beta chain variable domain of TCR clone 317315 (TRBV7-3, TRBJ2-1)
CASSLAGGTNEQFF

SEQ ID NO: 634631 - protein, 14 aa, Homo sapiens
  CDR3 for alpha chain variable domain of TCR clone 317316 (TRAV1-1, TRAJ27)
CAVIYNTNAGKTTF

SEQ ID NO: 634632 - protein, 13 aa, Homo sapiens
  CDR3 for beta chain variable domain of TCR clone 317316 (TRBV7-9, TRBJ1-2)
CASSLKQNYGYTF

SEQ ID NO: 634633 - protein, 16 aa, Homo sapiens
  CDR3 for alpha chain variable domain of TCR clone 317317 (TRAV13-1, TRAJ48)
CAASIFGNFGSEKLTF

SEQ ID NO: 634634 - protein, 16 aa, Homo sapiens
  CDR3 for beta chain variable domain of TCR clone 317317 (TRBV7-2, TRBJ2-6)
CASSERRASGANVLTF

SEQ ID NO: 634635 - protein, 15 aa, Homo sapiens
  CDR3 for alpha chain variable domain of TCR clone 317318 (TRAV8-3, TRAJ45)
CASSYSGGGADGLTF

SEQ ID NO: 634636 - protein, 19 aa, Homo sapiens
  CDR3 for beta chain variable domain of TCR clone 317318 (TRBV4-2, TRBJ2-6)
CASSQIRDRYISGANVLTF

SEQ ID NO: 634637 - protein, 16 aa, Homo sapiens
  CDR3 for alpha chain variable domain of TCR clone 317319 (TRAV3, TRAJ18)
CAVRDGRGSTLGRLYF

SEQ ID NO: 634638 - protein, 14 aa, Homo sapiens
  CDR3 for beta chain variable domain of TCR clone 317319 (TRBV5-1, TRBJ1-1)
CASSLERVGTEAFF

SEQ ID NO: 634639 - protein, 11 aa, Homo sapiens
  CDR3 for alpha chain variable domain of TCR clone 317320 (TRAV27, TRAJ45)
CAGAQDEVLTD

SEQ ID NO: 634640 - protein, 15 aa, Homo sapiens
  CDR3 for beta chain variable domain of TCR clone 317320 (TRBV9, TRBJ2-2)
CASSDFAGASGELFF

SEQ ID NO: 634641 - protein, 14 aa, Homo sapiens
  CDR3 for alpha chain variable domain of TCR clone 317321 (TRAV12-2, TRAJ45)
CAVNKGGGADGLTF

SEQ ID NO: 634642 - protein, 14 aa, Homo sapiens
  CDR3 for beta chain variable domain of TCR clone 317321 (TRBV11-3, TRBJ2-1)
CASSATTSGSIQFF

SEQ ID NO: 634643 - protein, 14 aa, Homo sapiens
  CDR3 for alpha chain variable domain of TCR clone 317322 (TRAV26-1, TRAJ40)
CIVRLLSGTYTYIF

SEQ ID NO: 634644 - protein, 10 aa, Homo sapiens
  CDR3 for beta chain variable domain of TCR clone 317322 (TRBV15, TRBJ2-7)
AETGGYEQYF

SEQ ID NO: 634645 - protein, 13 aa, Homo sapiens
  CDR3 for alpha chain variable domain of TCR clone 317323 (TRAV8-3, TRAJ47)
CAASMEYGNKLVF

SEQ ID NO: 634646 - protein, 14 aa, Homo sapiens
  CDR3 for beta chain variable domain of TCR clone 317323 (TRBV2, TRBJ1-5)
CASSGTGFNQPQHF

SEQ ID NO: 634647 - protein, 12 aa, Homo sapiens
  CDR3 for alpha chain variable domain of TCR clone 317324 (TRAV12-3, TRAJ29)
CAAREGNTPLVF

SEQ ID NO: 634648 - protein, 16 aa, Homo sapiens
  CDR3 for beta chain variable domain of TCR clone 317324 (TRBV18, TRBJ2-1)
CQLTISRGGRDNEQFF

SEQ ID NO: 634649 - protein, 12 aa, Homo sapiens
  CDR3 for alpha chain variable domain of TCR clone 317325 (TRAV12-3, TRAJ17)
CAMTLTGNELTF

SEQ ID NO: 634650 - protein, 15 aa, Homo sapiens
  CDR3 for beta chain variable domain of TCR clone 317325 (TRBV20-1, TRBJ2-7)
CSARDRVSGMDGQYF

SEQ ID NO: 634651 - protein, 16 aa, Homo sapiens
  CDR3 for alpha chain variable domain of TCR clone 317326 (TRAV30, TRAJ24)
CGTEIVDADRWGKFQF

SEQ ID NO: 634652 - protein, 14 aa, Homo sapiens
  CDR3 for beta chain variable domain of TCR clone 317326 (TRBV20-1, TRBJ1-1)
CSAQTRIGGTEAFF

SEQ ID NO: 634653 - protein, 15 aa, Homo sapiens
  CDR3 for alpha chain variable domain of TCR clone 317327 (TRAV17, TRAJ54)
CATEKLGQGAQKLVF

SEQ ID NO: 634654 - protein, 16 aa, Homo sapiens
  CDR3 for beta chain variable domain of TCR clone 317327 (TRBV9, TRBJ1-2)
CASSVEEKVSPYCYTF

SEQ ID NO: 634655 - protein, 11 aa, Homo sapiens
  CDR3 for alpha chain variable domain of TCR clone 317328 (TRAV17, TRAJ9)
CGFTGGFKTIF

SEQ ID NO: 634656 - protein, 19 aa, Homo sapiens
  CDR3 for beta chain variable domain of TCR clone 317328 (TRBV19, TRBJ2-2)
CASTRPGLAGGRVTGELFF

SEQ ID NO: 634657 - protein, 13 aa, Homo sapiens
  CDR3 for alpha chain variable domain of TCR clone 317329 (TRAV1-1, TRAJ31)
CASYLNNNARLMF

SEQ ID NO: 634658 - protein, 12 aa, Homo sapiens
  CDR3 for beta chain variable domain of TCR clone 317329 (TRBV15, TRBJ1-6)
CPSGGLNSPLHF

SEQ ID NO: 634659 - protein, 15 aa, Homo sapiens
  CDR3 for alpha chain variable domain of TCR clone 317330 (TRAV17, TRAJ57)
CATGPSQGGSEKLVF

SEQ ID NO: 634660 - protein, 16 aa, Homo sapiens
  CDR3 for beta chain variable domain of TCR clone 317330 (TRBV12-4, TRBJ1-5)
CASSRPVGASNQPQHF

SEQ ID NO: 634661 - protein, 16 aa, Homo sapiens
  CDR3 for alpha chain variable domain of TCR clone 317331 (TRAV16, TRAJ37)
CSKWPDGSSNTGKLIF

SEQ ID NO: 634662 - protein, 16 aa, Homo sapiens
  CDR3 for beta chain variable domain of TCR clone 317331 (TRBV5-1, TRBJ1-1)
CASSSGGNSLNTEAFF

SEQ ID NO: 634663 - protein, 23 aa, Homo sapiens
  CDR3 for alpha chain variable domain of TCR clone 317332 (TRAV26-1, )
CIADNAGHNHIQNPDPAVYQLRD

SEQ ID NO: 634664 - protein, 13 aa, Homo sapiens
  CDR3 for beta chain variable domain of TCR clone 317332 (TRBV20-1, TRBJ1-1)
CSARGGGNTEAFF

SEQ ID NO: 634665 - protein, 10 aa, Homo sapiens
  CDR3 for alpha chain variable domain of TCR clone 317333 (TRAV13-1, TRAJ34)
CADINRQAHL

SEQ ID NO: 634666 - protein, 14 aa, Homo sapiens
  CDR3 for beta chain variable domain of TCR clone 317333 (TRBV7-3, TRBJ2-1)
CASSLAGGTNEQFF

SEQ ID NO: 634667 - protein, 14 aa, Homo sapiens
  CDR3 for alpha chain variable domain of TCR clone 317334 (TRAV12-3, TRAJ12)
RAMSEVDSSYKLIF

SEQ ID NO: 634668 - protein, 12 aa, Homo sapiens
  CDR3 for beta chain variable domain of TCR clone 317334 (TRBV18, TRBJ1-4)
CASSPSREKLFF

SEQ ID NO: 634669 - protein, 16 aa, Homo sapiens
  CDR3 for alpha chain variable domain of TCR clone 317335 (TRAV3, TRAJ37)
CAVRGKGSGNTGKLIF

SEQ ID NO: 634670 - protein, 12 aa, Homo sapiens
  CDR3 for beta chain variable domain of TCR clone 317335 (TRBV14, TRBJ2-5)
CASSQLKETQYF

SEQ ID NO: 634671 - protein, 16 aa, Homo sapiens
  CDR3 for alpha chain variable domain of TCR clone 317336 (TRAV3, TRAJ10)
CAVRDMRAGGGNKLTF

SEQ ID NO: 634672 - protein, 16 aa, Homo sapiens
  CDR3 for beta chain variable domain of TCR clone 317336 (TRBV20-1, TRBJ1-4)
CSAPGHGLLTNEKLFF

SEQ ID NO: 634673 - protein, 16 aa, Homo sapiens
  CDR3 for alpha chain variable domain of TCR clone 317337 (TRAV4, TRAJ5)
CLVGPDHGHGQEITYF

SEQ ID NO: 634674 - protein, 17 aa, Homo sapiens
  CDR3 for beta chain variable domain of TCR clone 317337 (TRBV11-2, TRBJ2-1)
CASSLYPPGVEYNEQFF

SEQ ID NO: 634675 - protein, 16 aa, Homo sapiens
  CDR3 for alpha chain variable domain of TCR clone 317338 (TRAV30, TRAJ24)
CGTEIVDADSWGKFQF

SEQ ID NO: 634676 - protein, 15 aa, Homo sapiens
  CDR3 for beta chain variable domain of TCR clone 317338 (TRBV7-9, TRBJ2-3)
CASSPGAGTADTQYF

SEQ ID NO: 634677 - protein, 18 aa, Homo sapiens
  CDR3 for alpha chain variable domain of TCR clone 317339 (TRAV21, TRAJ52)
CAVRPSPAGGTSYGKLTF

SEQ ID NO: 634678 - protein, 15 aa, Homo sapiens
  CDR3 for beta chain variable domain of TCR clone 317339 (TRBV5-1, TRBJ2-2)
CASSSQGGNTGELFF

SEQ ID NO: 634679 - protein, 13 aa, Homo sapiens
  CDR3 for alpha chain variable domain of TCR clone 317340 (TRAV8-3, TRAJ36)
CAVGATGANNLFF

SEQ ID NO: 634680 - protein, 15 aa, Homo sapiens
  CDR3 for beta chain variable domain of TCR clone 317340 (TRBV7-2, TRBJ1-2)
SASSPRAGWNYGYTF

SEQ ID NO: 634681 - protein, 15 aa, Homo sapiens
  CDR3 for alpha chain variable domain of TCR clone 317341 (TRAV12-1, TRAJ53)
CVVNRSGGSNYKLTF

SEQ ID NO: 634682 - protein, 16 aa, Homo sapiens
  CDR3 for beta chain variable domain of TCR clone 317341 (TRBV7-9, TRBJ2-1)
CASSDVAGGSYNEQFF

SEQ ID NO: 634683 - protein, 11 aa, Homo sapiens
  CDR3 for alpha chain variable domain of TCR clone 317342 (TRAV12-1, TRAJ30)
CVVNGQDKIIF

SEQ ID NO: 634684 - protein, 11 aa, Homo sapiens
  CDR3 for beta chain variable domain of TCR clone 317342 (TRBV20-1, TRBJ2-7)
CSASDVGGQYF

SEQ ID NO: 634685 - protein, 12 aa, Homo sapiens
  CDR3 for alpha chain variable domain of TCR clone 317343 (TRAV12-2, TRAJ52)
ISGGTSYGKLTF

SEQ ID NO: 634686 - protein, 13 aa, Homo sapiens
  CDR3 for beta chain variable domain of TCR clone 317343 (TRBV12-4, TRBJ1-1)
CASSPGTGFEAFF

SEQ ID NO: 634687 - protein, 17 aa, Homo sapiens
  CDR3 for alpha chain variable domain of TCR clone 317344 (TRAV8-6, TRAJ58)
CAVSSWVGETSGARLTF

SEQ ID NO: 634688 - protein, 14 aa, Homo sapiens
  CDR3 for beta chain variable domain of TCR clone 317344 (TRBV4-2, TRBJ2-1)
CASGLNRAYNEQFF

SEQ ID NO: 634689 - protein, 11 aa, Homo sapiens
  CDR3 for alpha chain variable domain of TCR clone 317345 (TRAV13-1, TRAJ43)
CAAHNNNDMRF

SEQ ID NO: 634690 - protein, 12 aa, Homo sapiens
  CDR3 for beta chain variable domain of TCR clone 317345 (TRBV11-2, TRBJ2-2)
CASSLGGGELFF

SEQ ID NO: 634691 - protein, 23 aa, Homo sapiens
  CDR3 for alpha chain variable domain of TCR clone 317346 (TRAV8-3, TRAJ6)
CAVGAEHQEEATYLNLEEEPALL

SEQ ID NO: 634692 - protein, 14 aa, Homo sapiens
  CDR3 for beta chain variable domain of TCR clone 317346 (TRBV6-6, TRBJ2-7)
CASSDSGAGYEQYF

SEQ ID NO: 634693 - protein, 13 aa, Homo sapiens
  CDR3 for alpha chain variable domain of TCR clone 317347 (TRAV20, TRAJ40)
CAVPFSGTYKYIF

SEQ ID NO: 634694 - protein, 13 aa, Homo sapiens
  CDR3 for beta chain variable domain of TCR clone 317347 (TRBV15, TRBJ2-5)
CATSQIGVETQYF

SEQ ID NO: 634695 - protein, 13 aa, Homo sapiens
  CDR3 for alpha chain variable domain of TCR clone 317348 (TRAV8-4, TRAJ47)
FAVTALYGNKLVF

SEQ ID NO: 634696 - protein, 14 aa, Homo sapiens
  CDR3 for beta chain variable domain of TCR clone 317348 (TRBV19, TRBJ2-7)
CASSIGGAVAEQYF

SEQ ID NO: 634697 - protein, 16 aa, Homo sapiens
  CDR3 for alpha chain variable domain of TCR clone 317349 (TRAV3, TRAJ10)
CAVRDMRAGGGNKLTF

SEQ ID NO: 634698 - protein, 15 aa, Homo sapiens
  CDR3 for beta chain variable domain of TCR clone 317349 (TRBV10-1, TRBJ2-3)
CASSATSGGLDTQYF

SEQ ID NO: 634699 - protein, 15 aa, Homo sapiens
  CDR3 for alpha chain variable domain of TCR clone 317350 (TRAV3, TRAJ47)
CAVSDPEEYGNKLVF

SEQ ID NO: 634700 - protein, 15 aa, Homo sapiens
  CDR3 for beta chain variable domain of TCR clone 317350 (TRBV11-2, TRBJ2-1)
CASSLGPDSYNEQFF

SEQ ID NO: 634701 - protein, 10 aa, Homo sapiens
  CDR3 for alpha chain variable domain of TCR clone 317351 (TRAV23/DV6, TRAJ57)
CAASPTLSQG

SEQ ID NO: 634702 - protein, 17 aa, Homo sapiens
  CDR3 for beta chain variable domain of TCR clone 317351 (TRBV10-3, TRBJ2-6)
CAISESTAPSGANVLTF

SEQ ID NO: 634703 - protein, 11 aa, Homo sapiens
  CDR3 for alpha chain variable domain of TCR clone 317352 (TRAV2, TRAJ13)
CASGGYQKVTF

SEQ ID NO: 634704 - protein, 15 aa, Homo sapiens
  CDR3 for beta chain variable domain of TCR clone 317352 (TRBV6-5, TRBJ1-2)
CASSYSPPRFYGYTF

SEQ ID NO: 634705 - protein, 13 aa, Homo sapiens
  CDR3 for alpha chain variable domain of TCR clone 317353 (TRAV3, TRAJ20)
CCEASCNDYKLSF

SEQ ID NO: 634706 - protein, 15 aa, Homo sapiens
  CDR3 for beta chain variable domain of TCR clone 317353 (TRBV19, TRBJ2-6)
CASVRRDSGANVLTF

SEQ ID NO: 634707 - protein, 11 aa, Homo sapiens
  CDR3 for alpha chain variable domain of TCR clone 317354 (TRAV12-3, TRAJ49)
CAANTGNQFYF

SEQ ID NO: 634708 - protein, 15 aa, Homo sapiens
  CDR3 for beta chain variable domain of TCR clone 317354 (TRBV5-8, TRBJ2-3)
CASSPTVGGRDTQYF

SEQ ID NO: 634709 - protein, 11 aa, Homo sapiens
  CDR3 for alpha chain variable domain of TCR clone 317355 (TRAV13-1, TRAJ49)
CACVGGDQFYF

SEQ ID NO: 634710 - protein, 16 aa, Homo sapiens
  CDR3 for beta chain variable domain of TCR clone 317355 (TRBV11-2, TRBJ2-2)
CASSLRTGNLIGELFF

SEQ ID NO: 634711 - protein, 14 aa, Homo sapiens
  CDR3 for alpha chain variable domain of TCR clone 317356 (TRAV2, TRAJ3)
CTVDRYSSASKIIF

SEQ ID NO: 634712 - protein, 16 aa, Homo sapiens
  CDR3 for beta chain variable domain of TCR clone 317356 (TRBV20-1, TRBJ1-5)
CSAELPGQQTNQPQHF

SEQ ID NO: 634713 - protein, 23 aa, Homo sapiens
  CDR3 for alpha chain variable domain of TCR clone 317357 (TRAV8-1, TRAJ6)
CAVNTPPEEAPYLHLEEEPALLF

SEQ ID NO: 634714 - protein, 14 aa, Homo sapiens
  CDR3 for beta chain variable domain of TCR clone 317357 (TRBV12-4, TRBJ2-1)
CASSLGQGASEQFF

SEQ ID NO: 634715 - protein, 10 aa, Homo sapiens
  CDR3 for alpha chain variable domain of TCR clone 317358 (TRAV23/DV6, TRAJ23)
CAASMKGKKP

SEQ ID NO: 634716 - protein, 17 aa, Homo sapiens
  CDR3 for beta chain variable domain of TCR clone 317358 (TRBV7-3, TRBJ2-3)
CASSLRKRMRGADTQYF

SEQ ID NO: 634717 - protein, 18 aa, Homo sapiens
  CDR3 for alpha chain variable domain of TCR clone 317359 (TRAV17, TRAJ15)
CFLLLCYGRMQAGTALIF

SEQ ID NO: 634718 - protein, 14 aa, Homo sapiens
  CDR3 for beta chain variable domain of TCR clone 317359 (TRBV12-4, TRBJ1-6)
CASRPDGYNSPLHF

SEQ ID NO: 634719 - protein, 15 aa, Homo sapiens
  CDR3 for alpha chain variable domain of TCR clone 317360 (TRAV8-2, TRAJ15)
CVVTMGNQAGTALIF

SEQ ID NO: 634720 - protein, 17 aa, Homo sapiens
  CDR3 for beta chain variable domain of TCR clone 317360 (TRBV7-2, TRBJ2-1)
CASSLGPPWGGLDEQFF

SEQ ID NO: 634721 - protein, 14 aa, Homo sapiens
  CDR3 for alpha chain variable domain of TCR clone 317361 (TRAV12-1, TRAJ26)
CVVKGSNYGQNFVF

SEQ ID NO: 634722 - protein, 16 aa, Homo sapiens
  CDR3 for beta chain variable domain of TCR clone 317361 (TRBV11-2, TRBJ2-6)
CQQPKDIFSGANVLTF

SEQ ID NO: 634723 - protein, 12 aa, Homo sapiens
  CDR3 for alpha chain variable domain of TCR clone 317362 (TRAV3, TRAJ43)
CAVRDPNNDMRF

SEQ ID NO: 634724 - protein, 13 aa, Homo sapiens
  CDR3 for beta chain variable domain of TCR clone 317362 (TRBV19, TRBJ1-2)
CASSVPRQDGYTF

SEQ ID NO: 634725 - protein, 10 aa, Homo sapiens
  CDR3 for alpha chain variable domain of TCR clone 317363 (TRAV25, TRAJ20)
CAVNDYKLSF

SEQ ID NO: 634726 - protein, 18 aa, Homo sapiens
  CDR3 for beta chain variable domain of TCR clone 317363 (TRBV20-1, TRBJ2-6)
CSAETTPTHGAGANVLTF

SEQ ID NO: 634727 - protein, 12 aa, Homo sapiens
  CDR3 for alpha chain variable domain of TCR clone 317364 (TRAV1-1, TRAJ39)
CAVPVVGNMLTF

SEQ ID NO: 634728 - protein, 16 aa, Homo sapiens
  CDR3 for beta chain variable domain of TCR clone 317364 (TRBV13, TRBJ2-2)
CASSPRTGEHTGELFF

SEQ ID NO: 634729 - protein, 14 aa, Homo sapiens
  CDR3 for alpha chain variable domain of TCR clone 317365 (TRAV26-1, TRAJ38)
CIADNAGNNRKLIL

SEQ ID NO: 634730 - protein, 15 aa, Homo sapiens
  CDR3 for beta chain variable domain of TCR clone 317365 (TRBV27, TRBJ2-7)
CASSTAGTGSYEQYF

SEQ ID NO: 634731 - protein, 12 aa, Homo sapiens
  CDR3 for alpha chain variable domain of TCR clone 317366 (TRAV21, TRAJ37)
CAVRGNTGKLIF

SEQ ID NO: 634732 - protein, 14 aa, Homo sapiens
  CDR3 for beta chain variable domain of TCR clone 317366 (TRBV6-1, TRBJ1-3)
CASVQGGGGNTIYF

SEQ ID NO: 634733 - protein, 13 aa, Homo sapiens
  CDR3 for alpha chain variable domain of TCR clone 317367 (TRAV12-2, TRAJ47)
CAVFMEYGNKLVL

SEQ ID NO: 634734 - protein, 14 aa, Homo sapiens
  CDR3 for beta chain variable domain of TCR clone 317367 (TRBV4-1, TRBJ1-5)
CASSQGPTNQPQHF

SEQ ID NO: 634735 - protein, 16 aa, Homo sapiens
  CDR3 for alpha chain variable domain of TCR clone 317368 (TRAV12-3, TRAJ4)
CAMTRLFSGGYNKLIF

SEQ ID NO: 634736 - protein, 13 aa, Homo sapiens
  CDR3 for beta chain variable domain of TCR clone 317368 (TRBV18, TRBJ2-7)
CQLTERGAYEQYF

SEQ ID NO: 634737 - protein, 15 aa, Homo sapiens
  CDR3 for alpha chain variable domain of TCR clone 317369 (TRAV17, TRAJ37)
CATDHGSSNTGTLIF

SEQ ID NO: 634738 - protein, 14 aa, Homo sapiens
  CDR3 for beta chain variable domain of TCR clone 317369 (TRBV7-2, TRBJ2-3)
CASSRTSGADTQYF

SEQ ID NO: 634739 - protein, 15 aa, Homo sapiens
  CDR3 for alpha chain variable domain of TCR clone 317370 (TRAV34, TRAJ38)
CGSDFTPGNNRKLIW

SEQ ID NO: 634740 - protein, 16 aa, Homo sapiens
  CDR3 for beta chain variable domain of TCR clone 317370 (TRBV12-5, TRBJ2-5)
CASGPRTSGNQETQYF

SEQ ID NO: 634741 - protein, 16 aa, Homo sapiens
  CDR3 for alpha chain variable domain of TCR clone 317371 (TRAV30, TRAJ24)
CGTEIVDADSWGKFQF

SEQ ID NO: 634742 - protein, 15 aa, Homo sapiens
  CDR3 for beta chain variable domain of TCR clone 317371 (TRBV28, TRBJ2-7)
CASSVRQVSSYEQYF

SEQ ID NO: 634743 - protein, 16 aa, Homo sapiens
  CDR3 for alpha chain variable domain of TCR clone 317372 (TRAV38-1, TRAJ32)
CAFMPFLGCATNKLIF

SEQ ID NO: 634744 - protein, 13 aa, Homo sapiens
  CDR3 for beta chain variable domain of TCR clone 317372 (TRBV7-9, TRBJ2-7)
CASSFAGAYEQYF

SEQ ID NO: 634745 - protein, 14 aa, Homo sapiens
  CDR3 for alpha chain variable domain of TCR clone 317373 (TRAV12-2, TRAJ13)
CVVKQTGGYQKVTL

SEQ ID NO: 634746 - protein, 15 aa, Homo sapiens
  CDR3 for beta chain variable domain of TCR clone 317373 (TRBV27, TRBJ2-1)
CASSNGGGSSNEQFF

SEQ ID NO: 634747 - protein, 13 aa, Homo sapiens
  CDR3 for alpha chain variable domain of TCR clone 317374 (TRAV17, TRAJ15)
CATANQAGTALIF

SEQ ID NO: 634748 - protein, 14 aa, Homo sapiens
  CDR3 for beta chain variable domain of TCR clone 317374 (TRBV25-1, TRBJ1-1)
CASTHLGGNTEAFF

SEQ ID NO: 634749 - protein, 10 aa, Homo sapiens
  CDR3 for alpha chain variable domain of TCR clone 317375 (TRAV12-1, TRAJ22)
HSGSARQLTF

SEQ ID NO: 634750 - protein, 13 aa, Homo sapiens
  CDR3 for beta chain variable domain of TCR clone 317375 (TRBV15, TRBJ1-6)
CATSGGLNSPLHF

SEQ ID NO: 634751 - protein, 11 aa, Homo sapiens
  CDR3 for alpha chain variable domain of TCR clone 317376 (TRAV25, TRAJ5)
CRGGGRRALTF

SEQ ID NO: 634752 - protein, 14 aa, Homo sapiens
  CDR3 for beta chain variable domain of TCR clone 317376 (TRBV19, TRBJ2-1)
CASPTFVLSGEQFF

SEQ ID NO: 634753 - protein, 14 aa, Homo sapiens
  CDR3 for alpha chain variable domain of TCR clone 317377 (TRAV35, TRAJ33)
CAGSSQDSNSQLIW

SEQ ID NO: 634754 - protein, 15 aa, Homo sapiens
  CDR3 for beta chain variable domain of TCR clone 317377 (TRBV29-1, TRBJ2-7)
CSVEFFDRGSYEQYF

SEQ ID NO: 634755 - protein, 13 aa, Homo sapiens
  CDR3 for alpha chain variable domain of TCR clone 317378 (TRAV2, TRAJ15)
CAVASQAGTALIF

SEQ ID NO: 634756 - protein, 13 aa, Homo sapiens
  CDR3 for beta chain variable domain of TCR clone 317378 (TRBV20-1, TRBJ1-1)
CSAPLGGGPEAFF

SEQ ID NO: 634757 - protein, 15 aa, Homo sapiens
  CDR3 for alpha chain variable domain of TCR clone 317379 (TRAV12-3, TRAJ6)
CAMSATTGGSYITTF

SEQ ID NO: 634758 - protein, 15 aa, Homo sapiens
  CDR3 for beta chain variable domain of TCR clone 317379 (TRBV7-2, TRBJ2-5)
CASSGILAGAETQYF

SEQ ID NO: 634759 - protein, 16 aa, Homo sapiens
  CDR3 for alpha chain variable domain of TCR clone 317380 (TRAV26-1, TRAJ53)
CIVRVAMGGSNYKLTF

SEQ ID NO: 634760 - protein, 12 aa, Homo sapiens
  CDR3 for beta chain variable domain of TCR clone 317380 (TRBV7-8, TRBJ2-7)
CASSLGDREQYF

SEQ ID NO: 634761 - protein, 14 aa, Homo sapiens
  CDR3 for alpha chain variable domain of TCR clone 317381 (TRAV17, TRAJ57)
CATDPQGGSEKLVF

SEQ ID NO: 634762 - protein, 14 aa, Homo sapiens
  CDR3 for beta chain variable domain of TCR clone 317381 (TRBV19, TRBJ2-1)
CARGARSFQWEQFF

SEQ ID NO: 634763 - protein, 18 aa, Homo sapiens
  CDR3 for alpha chain variable domain of TCR clone 317382 (TRAV21, TRAJ52)
CAVRPSPAGGTSYGKLTF

SEQ ID NO: 634764 - protein, 14 aa, Homo sapiens
  CDR3 for beta chain variable domain of TCR clone 317382 (TRBV4-1, TRBJ2-3)
CASSQDWSTDTQYF

SEQ ID NO: 634765 - protein, 16 aa, Homo sapiens
  CDR3 for alpha chain variable domain of TCR clone 317383 (TRAV21, TRAJ37)
CAVRTAGSSNTGKLIF

SEQ ID NO: 634766 - protein, 13 aa, Homo sapiens
  CDR3 for beta chain variable domain of TCR clone 317383 (TRBV4-1, TRBJ2-1)
CASSQAGGDEQFF

SEQ ID NO: 634767 - protein, 13 aa, Homo sapiens
  CDR3 for alpha chain variable domain of TCR clone 317384 (TRAV13-1, TRAJ21)
CAASIYNFNKFYF

SEQ ID NO: 634768 - protein, 12 aa, Homo sapiens
  CDR3 for beta chain variable domain of TCR clone 317384 (TRBV19, TRBJ1-4)
CASKDWPGGLFF

SEQ ID NO: 634769 - protein, 12 aa, Homo sapiens
  CDR3 for alpha chain variable domain of TCR clone 317385 (TRAV4, TRAJ26)
CLVGDYGQNFVF

SEQ ID NO: 634770 - protein, 14 aa, Homo sapiens
  CDR3 for beta chain variable domain of TCR clone 317385 (TRBV2, TRBJ1-5)
CASSGTGFNQPQHF

SEQ ID NO: 634771 - protein, 15 aa, Homo sapiens
  CDR3 for alpha chain variable domain of TCR clone 317386 (TRAV8-6, TRAJ10)
CAVSDQAGGGNKLTF

SEQ ID NO: 634772 - protein, 15 aa, Homo sapiens
  CDR3 for beta chain variable domain of TCR clone 317386 (TRBV28, TRBJ2-3)
CASSPDRQGANTQYF

SEQ ID NO: 634773 - protein, 12 aa, Homo sapiens
  CDR3 for alpha chain variable domain of TCR clone 317387 (TRAV23/DV6, TRAJ30)
CAASKGDDKIIF

SEQ ID NO: 634774 - protein, 16 aa, Homo sapiens
  CDR3 for beta chain variable domain of TCR clone 317387 (TRBV6-1, TRBJ2-5)
CASSETLDRGAETQYF

SEQ ID NO: 634775 - protein, 13 aa, Homo sapiens
  CDR3 for alpha chain variable domain of TCR clone 317388 (TRAV1-1, TRAJ9)
CAAKNTGGFKTIF

SEQ ID NO: 634776 - protein, 18 aa, Homo sapiens
  CDR3 for beta chain variable domain of TCR clone 317388 (TRBV7-6, TRBJ2-1)
CASSPRTSGMSSYNEQFF

SEQ ID NO: 634777 - protein, 15 aa, Homo sapiens
  CDR3 for alpha chain variable domain of TCR clone 317389 (TRAV3, TRAJ4)
CAVRDGTGGYNKLIF

SEQ ID NO: 634778 - protein, 13 aa, Homo sapiens
  CDR3 for beta chain variable domain of TCR clone 317389 (TRBV24-1, TRBJ2-2)
CATSDWSTGELFF

SEQ ID NO: 634779 - protein, 12 aa, Homo sapiens
  CDR3 for alpha chain variable domain of TCR clone 317390 (TRAV30, TRAJ43)
CGTEERSNDMRF

SEQ ID NO: 634780 - protein, 14 aa, Homo sapiens
  CDR3 for beta chain variable domain of TCR clone 317390 (TRBV19, TRBJ2-1)
CASPTFVLSGEQFF

SEQ ID NO: 634781 - protein, 11 aa, Homo sapiens
  CDR3 for alpha chain variable domain of TCR clone 317391 (TRAV12-1, TRAJ26)
CVVAYGQNFVF

SEQ ID NO: 634782 - protein, 15 aa, Homo sapiens
  CDR3 for beta chain variable domain of TCR clone 317391 (TRBV12-4, TRBJ2-5)
CASSGTGQAQETQCF

SEQ ID NO: 634783 - protein, 14 aa, Homo sapiens
  CDR3 for alpha chain variable domain of TCR clone 317392 (TRAV1-2, TRAJ8)
CAVRGDTGFQKLVF

SEQ ID NO: 634784 - protein, 13 aa, Homo sapiens
  CDR3 for beta chain variable domain of TCR clone 317392 (TRBV27, TRBJ2-7)
CASSLTTGYEQYF

SEQ ID NO: 634785 - protein, 15 aa, Homo sapiens
  CDR3 for alpha chain variable domain of TCR clone 317393 (TRAV8-3, TRAJ45)
CASSYSGGGAADSPL

SEQ ID NO: 634786 - protein, 13 aa, Homo sapiens
  CDR3 for beta chain variable domain of TCR clone 317393 (TRBV10-3, TRBJ2-7)
CASKLAVNYEQYF

SEQ ID NO: 634787 - protein, 14 aa, Homo sapiens
  CDR3 for alpha chain variable domain of TCR clone 317394 (TRAV1-2, TRAJ8)
CAVREDTGFQKLVF

SEQ ID NO: 634788 - protein, 14 aa, Homo sapiens
  CDR3 for beta chain variable domain of TCR clone 317394 (TRBV19, TRBJ1-2)
CAGSVLGYNYGYTF

SEQ ID NO: 634789 - protein, 16 aa, Homo sapiens
  CDR3 for alpha chain variable domain of TCR clone 317395 (TRAV30, TRAJ42)
CGTSKNYGGRQGNLIF

SEQ ID NO: 634790 - protein, 14 aa, Homo sapiens
  CDR3 for beta chain variable domain of TCR clone 317395 (TRBV19, TRBJ1-5)
CASNSYGTHQPRHF

SEQ ID NO: 634791 - protein, 13 aa, Homo sapiens
  CDR3 for alpha chain variable domain of TCR clone 317396 (TRAV1-2, TRAJ9)
CAALNTGGFQTIF

SEQ ID NO: 634792 - protein, 14 aa, Homo sapiens
  CDR3 for beta chain variable domain of TCR clone 317396 (TRBV13, TRBJ2-5)
CASSLERVGETQYF

SEQ ID NO: 634793 - protein, 12 aa, Homo sapiens
  CDR3 for alpha chain variable domain of TCR clone 317397 (TRAV13-2, TRAJ23)
CAERHRGGKLIF

SEQ ID NO: 634794 - protein, 16 aa, Homo sapiens
  CDR3 for beta chain variable domain of TCR clone 317397 (TRBV20-1, TRBJ1-4)
CCAPGQGLLTNEKLFF

SEQ ID NO: 634795 - protein, 14 aa, Homo sapiens
  CDR3 for alpha chain variable domain of TCR clone 317398 (TRAV8-3, TRAJ39)
CAVGANNASNILTF

SEQ ID NO: 634796 - protein, 15 aa, Homo sapiens
  CDR3 for beta chain variable domain of TCR clone 317398 (TRBV4-3, TRBJ1-1)
CASSQELGRGTEAFF

SEQ ID NO: 634797 - protein, 11 aa, Homo sapiens
  CDR3 for alpha chain variable domain of TCR clone 317399 (TRAV12-3, TRAJ43)
CAMSVSNDMRF

SEQ ID NO: 634798 - protein, 14 aa, Homo sapiens
  CDR3 for beta chain variable domain of TCR clone 317399 (TRBV5-1, TRBJ2-7)
CASSLTQGLREQYF

SEQ ID NO: 634799 - protein, 11 aa, Homo sapiens
  CDR3 for alpha chain variable domain of TCR clone 317400 (TRAV21, TRAJ34)
CSHYNTDKLIF

SEQ ID NO: 634800 - protein, 15 aa, Homo sapiens
  CDR3 for beta chain variable domain of TCR clone 317400 (TRBV7-9, TRBJ1-4)
CASSRTGGFNEKLFF

SEQ ID NO: 634801 - protein, 11 aa, Homo sapiens
  CDR3 for alpha chain variable domain of TCR clone 317401 (TRAV13-1, TRAJ43)
CAAHNNIDMRF

SEQ ID NO: 634802 - protein, 15 aa, Homo sapiens
  CDR3 for beta chain variable domain of TCR clone 317401 (TRBV6-1, TRBJ2-2)
CASSRLRGDTGELFF

SEQ ID NO: 634803 - protein, 13 aa, Homo sapiens
  CDR3 for alpha chain variable domain of TCR clone 317402 (TRAV3, TRAJ27)
CAVRPLGAGKSTF

SEQ ID NO: 634804 - protein, 13 aa, Homo sapiens
  CDR3 for beta chain variable domain of TCR clone 317402 (TRBV19, TRBJ1-2)
CASSPGTGVGYTF

SEQ ID NO: 634805 - protein, 14 aa, Homo sapiens
  CDR3 for alpha chain variable domain of TCR clone 317403 (TRAV12-1, TRAJ23)
CVVIVYNQGGRLIF

SEQ ID NO: 634806 - protein, 16 aa, Homo sapiens
  CDR3 for beta chain variable domain of TCR clone 317403 (TRBV20-1, TRBJ1-5)
SAVPNLRDRGPQPQHF

SEQ ID NO: 634807 - protein, 17 aa, Homo sapiens
  CDR3 for alpha chain variable domain of TCR clone 317404 (TRAV3, TRAJ42)
CAVGDRDYGGSQGNRIF

SEQ ID NO: 634808 - protein, 18 aa, Homo sapiens
  CDR3 for beta chain variable domain of TCR clone 317404 (TRBV20-1, TRBJ2-3)
CSASGLAGGPGTTDTQYF

SEQ ID NO: 634809 - protein, 13 aa, Homo sapiens
  CDR3 for alpha chain variable domain of TCR clone 317405 (TRAV30, TRAJ6)
CGTEAGGSYIPTF

SEQ ID NO: 634810 - protein, 16 aa, Homo sapiens
  CDR3 for beta chain variable domain of TCR clone 317405 (TRBV19, TRBJ2-1)
CASSKAGPSSYNEQFF

SEQ ID NO: 634811 - protein, 16 aa, Homo sapiens
  CDR3 for alpha chain variable domain of TCR clone 317406 (TRAV3, TRAJ37)
CAVRGKGSGNPGKLIF

SEQ ID NO: 634812 - protein, 13 aa, Homo sapiens
  CDR3 for beta chain variable domain of TCR clone 317406 (TRBV19, TRBJ1-2)
RASSVPGQDGYTF

SEQ ID NO: 634813 - protein, 13 aa, Homo sapiens
  CDR3 for alpha chain variable domain of TCR clone 317407 (TRAV1-2, TRAJ9)
CAVLNTGGLKTIF

SEQ ID NO: 634814 - protein, 14 aa, Homo sapiens
  CDR3 for beta chain variable domain of TCR clone 317407 (TRBV19, TRBJ2-1)
CASPTFVLSGEQFF

SEQ ID NO: 634815 - protein, 14 aa, Homo sapiens
  CDR3 for alpha chain variable domain of TCR clone 317408 (TRAV8-4, TRAJ45)
CASGGGGGADRLTF

SEQ ID NO: 634816 - protein, 20 aa, Homo sapiens
  CDR3 for beta chain variable domain of TCR clone 317408 (TRBV4-3, TRBJ2-3)
CASSPRVEMRASGRPDTQYF

SEQ ID NO: 634817 - protein, 16 aa, Homo sapiens
  CDR3 for alpha chain variable domain of TCR clone 317409 (TRAV12-2, TRAJ18)
CAVTTDRSSTLGRLYF

SEQ ID NO: 634818 - protein, 13 aa, Homo sapiens
  CDR3 for beta chain variable domain of TCR clone 317409 (TRBV19, TRBJ2-3)
CATWDKITDTQYF

SEQ ID NO: 634819 - protein, 16 aa, Homo sapiens
  CDR3 for alpha chain variable domain of TCR clone 317410 (TRAV3, TRAJ23)
CAVKIGIYNQGGKLIF

SEQ ID NO: 634820 - protein, 17 aa, Homo sapiens
  CDR3 for beta chain variable domain of TCR clone 317410 (TRBV10-3, TRBJ2-6)
CAISESTAPTGANVLTF

SEQ ID NO: 634821 - protein, 13 aa, Homo sapiens
  CDR3 for alpha chain variable domain of TCR clone 317411 (TRAV12-2, TRAJ20)
CAVYPSNDYKLSF

SEQ ID NO: 634822 - protein, 15 aa, Homo sapiens
  CDR3 for beta chain variable domain of TCR clone 317411 (TRBV18, TRBJ1-2)
RASSPGNGLGYCYTF

SEQ ID NO: 634823 - protein, 18 aa, Homo sapiens
  CDR3 for alpha chain variable domain of TCR clone 317412 (TRAV9-2, TRAJ52)
CALSRHNAGGTSYGKLTF

SEQ ID NO: 634824 - protein, 13 aa, Homo sapiens
  CDR3 for beta chain variable domain of TCR clone 317412 (TRBV7-9, TRBJ1-2)
CASSLKQNYGYTV

SEQ ID NO: 634825 - protein, 14 aa, Homo sapiens
  CDR3 for alpha chain variable domain of TCR clone 317413 (TRAV12-2, TRAJ13)
CAVKKTGGYHKVTF

SEQ ID NO: 634826 - protein, 15 aa, Homo sapiens
  CDR3 for beta chain variable domain of TCR clone 317413 (TRBV27, TRBJ2-1)
CASSNGGGSSNEQVF

SEQ ID NO: 634827 - protein, 19 aa, Homo sapiens
  CDR3 for alpha chain variable domain of TCR clone 317414 (TRAV2, TRAJ20)
ILQVREADAAVYRDCKLSF

SEQ ID NO: 634828 - protein, 16 aa, Homo sapiens
  CDR3 for beta chain variable domain of TCR clone 317414 (TRBV4-1, TRBJ1-5)
CASSQGGHTTNQPQHF

SEQ ID NO: 634829 - protein, 15 aa, Homo sapiens
  CDR3 for alpha chain variable domain of TCR clone 317415 (TRAV4, TRAJ39)
CLVGPNNNAVNMLTF

SEQ ID NO: 634830 - protein, 14 aa, Homo sapiens
  CDR3 for beta chain variable domain of TCR clone 317415 (TRBV11-2, TRBJ2-5)
CASSRIGGIETQYF

SEQ ID NO: 634831 - protein, 13 aa, Homo sapiens
  CDR3 for alpha chain variable domain of TCR clone 317416 (TRAV13-2, TRAJ13)
CAERPGGYQKVTF

SEQ ID NO: 634832 - protein, 14 aa, Homo sapiens
  CDR3 for beta chain variable domain of TCR clone 317416 (TRBV23-1, TRBJ2-5)
CASSFLRSQETQYY

SEQ ID NO: 634833 - protein, 11 aa, Homo sapiens
  CDR3 for alpha chain variable domain of TCR clone 317417 (TRAV13-1, TRAJ39)
CASHAGNMLTF

SEQ ID NO: 634834 - protein, 16 aa, Homo sapiens
  CDR3 for beta chain variable domain of TCR clone 317417 (TRBV5-7, TRBJ1-5)
CASSLQQDREYQPQHF

SEQ ID NO: 634835 - protein, 13 aa, Homo sapiens
  CDR3 for alpha chain variable domain of TCR clone 317418 (TRAV2, TRAJ15)
CALASQAGTALIF

SEQ ID NO: 634836 - protein, 16 aa, Homo sapiens
  CDR3 for beta chain variable domain of TCR clone 317418 (TRBV18, TRBJ1-5)
CASSPYRVEGNQPQHF

SEQ ID NO: 634837 - protein, 14 aa, Homo sapiens
  CDR3 for alpha chain variable domain of TCR clone 317419 (TRAV26-1, TRAJ57)
CIRAGQGGSEKLVC

SEQ ID NO: 634838 - protein, 13 aa, Homo sapiens
  CDR3 for beta chain variable domain of TCR clone 317419 (TRBV19, TRBJ2-7)
CASSLTTSYEQYF

SEQ ID NO: 634839 - protein, 15 aa, Homo sapiens
  CDR3 for alpha chain variable domain of TCR clone 317420 (TRAV23/DV6, TRAJ13)
CAAWPGGGGYQKVTF

SEQ ID NO: 634840 - protein, 11 aa, Homo sapiens
  CDR3 for beta chain variable domain of TCR clone 317420 (TRBV2, TRBJ2-1)
CASSEERDVFF

SEQ ID NO: 634841 - protein, 14 aa, Homo sapiens
  CDR3 for alpha chain variable domain of TCR clone 317421 (TRAV1-2, TRAJ16)
CAVNRFSDGQKLLF

SEQ ID NO: 634842 - protein, 15 aa, Homo sapiens
  CDR3 for beta chain variable domain of TCR clone 317421 (TRBV19, TRBJ2-3)
CAAGDTSAPNDTQYF

SEQ ID NO: 634843 - protein, 13 aa, Homo sapiens
  CDR3 for alpha chain variable domain of TCR clone 317422 (TRAV1-1, TRAJ13)
CAVNSGGYQKVTF

SEQ ID NO: 634844 - protein, 15 aa, Homo sapiens
  CDR3 for beta chain variable domain of TCR clone 317422 (TRBV28, TRBJ2-5)
CASSADRGRGETQYF

SEQ ID NO: 634845 - protein, 13 aa, Homo sapiens
  CDR3 for alpha chain variable domain of TCR clone 317423 (TRAV2, TRAJ24)
CAVTTDSCGKLQF

SEQ ID NO: 634846 - protein, 14 aa, Homo sapiens
  CDR3 for beta chain variable domain of TCR clone 317423 (TRBV13, TRBJ2-5)
CASSLGRGQETQYF

SEQ ID NO: 634847 - protein, 16 aa, Homo sapiens
  CDR3 for alpha chain variable domain of TCR clone 317424 (TRAV12-3, TRAJ6)
CAMSGGGAGGSYIPTF

SEQ ID NO: 634848 - protein, 12 aa, Homo sapiens
  CDR3 for beta chain variable domain of TCR clone 317424 (TRBV12-4, TRBJ2-3)
CASSTLPDTQYF

SEQ ID NO: 634849 - protein, 13 aa, Homo sapiens
  CDR3 for alpha chain variable domain of TCR clone 317425 (TRAV23/DV6, TRAJ27)
CAASKQMQANQPL

SEQ ID NO: 634850 - protein, 14 aa, Homo sapiens
  CDR3 for beta chain variable domain of TCR clone 317425 (TRBV5-4, TRBJ1-1)
CASSLDSRRDEAFF

SEQ ID NO: 634851 - protein, 14 aa, Homo sapiens
  CDR3 for alpha chain variable domain of TCR clone 317426 (TRAV26-1, TRAJ45)
CIEVTGGGADGLTF

SEQ ID NO: 634852 - protein, 11 aa, Homo sapiens
  CDR3 for beta chain variable domain of TCR clone 317426 (TRBV6-3, TRBJ2-3)
CATGQADTQYF

SEQ ID NO: 634853 - protein, 14 aa, Homo sapiens
  CDR3 for alpha chain variable domain of TCR clone 317427 (TRAV1-2, TRAJ8)
CAVREDTGFQQLVF

SEQ ID NO: 634854 - protein, 16 aa, Homo sapiens
  CDR3 for beta chain variable domain of TCR clone 317427 (TRBV4-3, TRBJ2-1)
CASSPALDRGVNEQFF

SEQ ID NO: 634855 - protein, 16 aa, Homo sapiens
  CDR3 for alpha chain variable domain of TCR clone 317428 (TRAV26-1, TRAJ41)
CIVRVAVANSGYALNF

SEQ ID NO: 634856 - protein, 13 aa, Homo sapiens
  CDR3 for beta chain variable domain of TCR clone 317428 (TRBV19, TRBJ2-7)
CASSTSGSYEQYF

SEQ ID NO: 634857 - protein, 12 aa, Homo sapiens
  CDR3 for alpha chain variable domain of TCR clone 317429 (TRAV29/DV5, TRAJ34)
CAARHNTDKLIF

SEQ ID NO: 634858 - protein, 15 aa, Homo sapiens
  CDR3 for beta chain variable domain of TCR clone 317429 (TRBV7-3, TRBJ2-1)
CASSPTGGGEVEQFF

SEQ ID NO: 634859 - protein, 13 aa, Homo sapiens
  CDR3 for alpha chain variable domain of TCR clone 317430 (TRAV3, TRAJ15)
CAVRDQAGTALIF

SEQ ID NO: 634860 - protein, 14 aa, Homo sapiens
  CDR3 for beta chain variable domain of TCR clone 317430 (TRBV4-1, TRBJ2-3)
CASSQDWSTDTQYF

SEQ ID NO: 634861 - protein, 13 aa, Homo sapiens
  CDR3 for alpha chain variable domain of TCR clone 317431 (TRAV12-1, TRAJ7)
CVVNMRGNNRLAF

SEQ ID NO: 634862 - protein, 13 aa, Homo sapiens
  CDR3 for beta chain variable domain of TCR clone 317431 (TRBV7-9, TRBJ1-2)
CASSLKQNYGYTF

SEQ ID NO: 634863 - protein, 14 aa, Homo sapiens
  CDR3 for alpha chain variable domain of TCR clone 317432 (TRAV12-3, TRAJ10)
SHLPLTGGGNKLTF

SEQ ID NO: 634864 - protein, 14 aa, Homo sapiens
  CDR3 for beta chain variable domain of TCR clone 317432 (TRBV4-2, TRBJ2-7)
CASSHRTGEYEQYF

SEQ ID NO: 634865 - protein, 17 aa, Homo sapiens
  CDR3 for alpha chain variable domain of TCR clone 317433 (TRAV35, TRAJ52)
CAGQLAADGTSYGKLTF

SEQ ID NO: 634866 - protein, 12 aa, Homo sapiens
  CDR3 for beta chain variable domain of TCR clone 317433 (TRBV20-1, TRBJ2-7)
CSAGRRQSEQYF

SEQ ID NO: 634867 - protein, 13 aa, Homo sapiens
  CDR3 for alpha chain variable domain of TCR clone 317434 (TRAV8-1, TRAJ30)
CAVIMNRDDKIIF

SEQ ID NO: 634868 - protein, 14 aa, Homo sapiens
  CDR3 for beta chain variable domain of TCR clone 317434 (TRBV7-2, TRBJ1-6)
CASSLQGANSPLHC

SEQ ID NO: 634869 - protein, 12 aa, Homo sapiens
  CDR3 for alpha chain variable domain of TCR clone 317435 (TRAV2, TRAJ9)
CAVGAGGFKTIF

SEQ ID NO: 634870 - protein, 15 aa, Homo sapiens
  CDR3 for beta chain variable domain of TCR clone 317435 (TRBV19, TRBJ1-1)
CASSRGGALNTEAFF

SEQ ID NO: 634871 - protein, 14 aa, Homo sapiens
  CDR3 for alpha chain variable domain of TCR clone 317436 (TRAV13-1, TRAJ48)
CAAISNFGNEKLTF

SEQ ID NO: 634872 - protein, 12 aa, Homo sapiens
  CDR3 for beta chain variable domain of TCR clone 317436 (TRBV11-2, TRBJ2-1)
CASSPGNNERFF

SEQ ID NO: 634873 - protein, 16 aa, Homo sapiens
  CDR3 for alpha chain variable domain of TCR clone 317437 (TRAV30, TRAJ24)
CGTEIVDADSWGKFQF

SEQ ID NO: 634874 - protein, 18 aa, Homo sapiens
  CDR3 for beta chain variable domain of TCR clone 317437 (TRBV4-1, TRBJ2-3)
CASSLPPNRGPFTDTQYF

SEQ ID NO: 634875 - protein, 15 aa, Homo sapiens
  CDR3 for alpha chain variable domain of TCR clone 317438 (TRAV2, TRAJ11)
CAVGGRHSGYSTLTF

SEQ ID NO: 634876 - protein, 12 aa, Homo sapiens
  CDR3 for beta chain variable domain of TCR clone 317438 (TRBV5-4, TRBJ2-7)
CASSLEAYEQYF

SEQ ID NO: 634877 - protein, 13 aa, Homo sapiens
  CDR3 for alpha chain variable domain of TCR clone 317439 (TRAV12-3, TRAJ7)
CAMSASGNNRLAF

SEQ ID NO: 634878 - protein, 13 aa, Homo sapiens
  CDR3 for beta chain variable domain of TCR clone 317439 (TRBV12-4, TRBJ1-2)
CASSLRQGKGYTF

SEQ ID NO: 634879 - protein, 13 aa, Homo sapiens
  CDR3 for alpha chain variable domain of TCR clone 317440 (TRAV13-1, TRAJ6)
CAASKGGSYIPRF

SEQ ID NO: 634880 - protein, 14 aa, Homo sapiens
  CDR3 for beta chain variable domain of TCR clone 317440 (TRBV7-2, TRBJ2-1)
CASSLGVGYNEQFF

SEQ ID NO: 634881 - protein, 15 aa, Homo sapiens
  CDR3 for alpha chain variable domain of TCR clone 317441 (TRAV26-1, TRAJ29)
CIVRVEGSGNTPLVF

SEQ ID NO: 634882 - protein, 14 aa, Homo sapiens
  CDR3 for beta chain variable domain of TCR clone 317441 (TRBV27, TRBJ2-2)
CASSLSVVDGRMFF

SEQ ID NO: 634883 - protein, 19 aa, Homo sapiens
  CDR3 for alpha chain variable domain of TCR clone 317442 (TRAV12-1, TRAJ30)
CVVNVKTRSSLEKGHDFIF

SEQ ID NO: 634884 - protein, 12 aa, Homo sapiens
  CDR3 for beta chain variable domain of TCR clone 317442 (TRBV27, TRBJ2-2)
CASKLFTGELFF

SEQ ID NO: 634885 - protein, 17 aa, Homo sapiens
  CDR3 for alpha chain variable domain of TCR clone 317443 (TRAV35, TRAJ47)
GLLDCRTHTEHGNKLVF

SEQ ID NO: 634886 - protein, 11 aa, Homo sapiens
  CDR3 for beta chain variable domain of TCR clone 317443 (TRBV29-1, TRBJ1-1)
CSVEVGTRTFF

SEQ ID NO: 634887 - protein, 15 aa, Homo sapiens
  CDR3 for alpha chain variable domain of TCR clone 317444 (TRAV3, TRAJ17)
CAVRDTGAAGNQLTF

SEQ ID NO: 634888 - protein, 14 aa, Homo sapiens
  CDR3 for beta chain variable domain of TCR clone 317444 (TRBV6-3, TRBJ1-1)
CASSNLLLGAEAFF

SEQ ID NO: 634889 - protein, 11 aa, Homo sapiens
  CDR3 for alpha chain variable domain of TCR clone 317445 (TRAV12-2, TRAJ23)
CARGRGAKLIF

SEQ ID NO: 634890 - protein, 14 aa, Homo sapiens
  CDR3 for beta chain variable domain of TCR clone 317445 (TRBV28, TRBJ2-5)
CASSLGDRAETQYF

SEQ ID NO: 634891 - protein, 13 aa, Homo sapiens
  CDR3 for alpha chain variable domain of TCR clone 317446 (TRAV20, TRAJ48)
CAVQGVGNEKLTF

SEQ ID NO: 634892 - protein, 14 aa, Homo sapiens
  CDR3 for beta chain variable domain of TCR clone 317446 (TRBV27, TRBJ2-7)
CASSFRDGPYEQDF

SEQ ID NO: 634893 - protein, 15 aa, Homo sapiens
  CDR3 for alpha chain variable domain of TCR clone 317447 (TRAV1-2, TRAJ3)
CAVRDRGSSASKIIF

SEQ ID NO: 634894 - protein, 16 aa, Homo sapiens
  CDR3 for beta chain variable domain of TCR clone 317447 (TRBV19, TRBJ2-3)
CASSPGAASRTDTQYF

SEQ ID NO: 634895 - protein, 14 aa, Homo sapiens
  CDR3 for alpha chain variable domain of TCR clone 317448 (TRAV35, TRAJ33)
CAGSSQDSNYQLIW

SEQ ID NO: 634896 - protein, 15 aa, Homo sapiens
  CDR3 for beta chain variable domain of TCR clone 317448 (TRBV20-1, TRBJ2-7)
CSAESGTSVAYEQYF

SEQ ID NO: 634897 - protein, 18 aa, Homo sapiens
  CDR3 for alpha chain variable domain of TCR clone 317449 (TRAV26-1, TRAJ23)
CIVRVGLEVWNQGGKLIF

SEQ ID NO: 634898 - protein, 15 aa, Homo sapiens
  CDR3 for beta chain variable domain of TCR clone 317449 (TRBV19, TRBJ1-6)
CASSTQGAVGSPLHF

SEQ ID NO: 634899 - protein, 13 aa, Homo sapiens
  CDR3 for alpha chain variable domain of TCR clone 317450 (TRAV27, TRAJ6)
CAGGTRGSYIPTF

SEQ ID NO: 634900 - protein, 14 aa, Homo sapiens
  CDR3 for beta chain variable domain of TCR clone 317450 (TRBV7-9, TRBJ2-5)
CASSLDTAQETQYF

SEQ ID NO: 634901 - protein, 18 aa, Homo sapiens
  CDR3 for alpha chain variable domain of TCR clone 317451 (TRAV12-3, TRAJ52)
CAMSRTNAGGTSYGKLTF

SEQ ID NO: 634902 - protein, 16 aa, Homo sapiens
  CDR3 for beta chain variable domain of TCR clone 317451 (TRBV2, TRBJ2-3)
CASSTSVEGVTDTQYF

SEQ ID NO: 634903 - protein, 12 aa, Homo sapiens
  CDR3 for alpha chain variable domain of TCR clone 317452 (TRAV8-3, TRAJ20)
CAVGANDYKLGF

SEQ ID NO: 634904 - protein, 16 aa, Homo sapiens
  CDR3 for beta chain variable domain of TCR clone 317452 (TRBV19, TRBJ2-2)
CASRSPGTGATGELFL

SEQ ID NO: 634905 - protein, 13 aa, Homo sapiens
  CDR3 for alpha chain variable domain of TCR clone 317453 (TRAV35, TRAJ48)
CVGHEFGNEKLTF

SEQ ID NO: 634906 - protein, 16 aa, Homo sapiens
  CDR3 for beta chain variable domain of TCR clone 317453 (TRBV12-5, TRBJ2-5)
CASGPRTSGNQETQYF

SEQ ID NO: 634907 - protein, 12 aa, Homo sapiens
  CDR3 for alpha chain variable domain of TCR clone 317454 (TRAV17, TRAJ4)
CATDGGYNKLIF

SEQ ID NO: 634908 - protein, 13 aa, Homo sapiens
  CDR3 for beta chain variable domain of TCR clone 317454 (TRBV29-1, TRBJ2-2)
CSTTGVNTGALFF

SEQ ID NO: 634909 - protein, 13 aa, Homo sapiens
  CDR3 for alpha chain variable domain of TCR clone 317455 (TRAV21, TRAJ20)
CAVGLRVDYKLSF

SEQ ID NO: 634910 - protein, 13 aa, Homo sapiens
  CDR3 for beta chain variable domain of TCR clone 317455 (TRBV12-4, TRBJ2-7)
CASTAGARGEQYF

SEQ ID NO: 634911 - protein, 15 aa, Homo sapiens
  CDR3 for alpha chain variable domain of TCR clone 317456 (TRAV3, TRAJ5)
CSVRDLDTGRKALTF

SEQ ID NO: 634912 - protein, 13 aa, Homo sapiens
  CDR3 for beta chain variable domain of TCR clone 317456 (TRBV12-4, TRBJ2-7)
CASSPTETYEQYF

SEQ ID NO: 634913 - protein, 16 aa, Homo sapiens
  CDR3 for alpha chain variable domain of TCR clone 317457 (TRAV4, TRAJ9)
CLVGDPNRPGGVNTNI

SEQ ID NO: 634914 - protein, 16 aa, Homo sapiens
  CDR3 for beta chain variable domain of TCR clone 317457 (TRBV28, TRBJ1-4)
CASSPPYRGRSEKLFF

SEQ ID NO: 634915 - protein, 14 aa, Homo sapiens
  CDR3 for alpha chain variable domain of TCR clone 317458 (TRAV3, TRAJ9)
CAVRLNTGGFKTIF

SEQ ID NO: 634916 - protein, 15 aa, Homo sapiens
  CDR3 for beta chain variable domain of TCR clone 317458 (TRBV7-6, TRBJ1-5)
CASSQSSGINQPQHF

SEQ ID NO: 634917 - protein, 18 aa, Homo sapiens
  CDR3 for alpha chain variable domain of TCR clone 317459 (TRAV4, TRAJ20)
CCVQLPRGGQGNDYKLSF

SEQ ID NO: 634918 - protein, 15 aa, Homo sapiens
  CDR3 for beta chain variable domain of TCR clone 317459 (TRBV18, TRBJ2-7)
CASSPSSTGNYEQYF

SEQ ID NO: 634919 - protein, 13 aa, Homo sapiens
  CDR3 for alpha chain variable domain of TCR clone 317460 (TRAV2, TRAJ40)
CAVVTSGTYKYIF

SEQ ID NO: 634920 - protein, 17 aa, Homo sapiens
  CDR3 for beta chain variable domain of TCR clone 317460 (TRBV7-3, TRBJ2-3)
CASSLMQRMRGADTQYF

SEQ ID NO: 634921 - protein, 12 aa, Homo sapiens
  CDR3 for alpha chain variable domain of TCR clone 317461 (TRAV13-2, TRAJ23)
CAERPRVGKLIF

SEQ ID NO: 634922 - protein, 16 aa, Homo sapiens
  CDR3 for beta chain variable domain of TCR clone 317461 (TRBV20-1, TRBJ1-4)
CSAPGQGLLTNEKLFF

SEQ ID NO: 634923 - protein, 17 aa, Homo sapiens
  CDR3 for alpha chain variable domain of TCR clone 317462 (TRAV3, TRAJ42)
CAVRDRDYGGSQGNLIF

SEQ ID NO: 634924 - protein, 16 aa, Homo sapiens
  CDR3 for beta chain variable domain of TCR clone 317462 (TRBV25-1, TRBJ1-3)
CQQCSRDILSGNTIYF

SEQ ID NO: 634925 - protein, 14 aa, Homo sapiens
  CDR3 for alpha chain variable domain of TCR clone 317463 (TRAV8-3, TRAJ4)
CAVGASGGYNKLIF

SEQ ID NO: 634926 - protein, 18 aa, Homo sapiens
  CDR3 for beta chain variable domain of TCR clone 317463 (TRBV4-1, TRBJ1-5)
CASSQDPRGQGLNQPQHF

SEQ ID NO: 634927 - protein, 13 aa, Homo sapiens
  CDR3 for alpha chain variable domain of TCR clone 317464 (TRAV38-2/DV8, TRAJ34)
CAYRTWNTDKLIF

SEQ ID NO: 634928 - protein, 14 aa, Homo sapiens
  CDR3 for beta chain variable domain of TCR clone 317464 (TRBV25-1, TRBJ1-1)
CASTHLGGNTEAFF

SEQ ID NO: 634929 - protein, 14 aa, Homo sapiens
  CDR3 for alpha chain variable domain of TCR clone 317465 (TRAV14/DV4, TRAJ15)
CAMRRDQARTALIF

SEQ ID NO: 634930 - protein, 16 aa, Homo sapiens
  CDR3 for beta chain variable domain of TCR clone 317465 (TRBV15, TRBJ2-3)
CATSRDLGIVTDTQYF

SEQ ID NO: 634931 - protein, 14 aa, Homo sapiens
  CDR3 for alpha chain variable domain of TCR clone 317466 (TRAV12-3, TRAJ10)
SHLPLTGGGNKLTF

SEQ ID NO: 634932 - protein, 13 aa, Homo sapiens
  CDR3 for beta chain variable domain of TCR clone 317466 (TRBV19, TRBJ1-3)
CASRLSLGNTIYF

SEQ ID NO: 634933 - protein, 18 aa, Homo sapiens
  CDR3 for alpha chain variable domain of TCR clone 317467 (TRAV13-1, TRAJ52)
CAAKNPNAGGTSYGKLTF

SEQ ID NO: 634934 - protein, 16 aa, Homo sapiens
  CDR3 for beta chain variable domain of TCR clone 317467 (TRBV15, TRBJ1-2)
CATSRGPRTGGGGYTF

SEQ ID NO: 634935 - protein, 13 aa, Homo sapiens
  CDR3 for alpha chain variable domain of TCR clone 317468 (TRAV25, TRAJ30)
CAGRADRDDKIIF

SEQ ID NO: 634936 - protein, 14 aa, Homo sapiens
  CDR3 for beta chain variable domain of TCR clone 317468 (TRBV15, TRBJ2-5)
CATSMGGSGETQYF

SEQ ID NO: 634937 - protein, 13 aa, Homo sapiens
  CDR3 for alpha chain variable domain of TCR clone 317469 (TRAV3, TRAJ21)
CAVREPDFNKFYF

SEQ ID NO: 634938 - protein, 13 aa, Homo sapiens
  CDR3 for beta chain variable domain of TCR clone 317469 (TRBV3-1, TRBJ1-5)
CASSQDLDQPQHF

SEQ ID NO: 634939 - protein, 15 aa, Homo sapiens
  CDR3 for alpha chain variable domain of TCR clone 317470 (TRAV14/DV4, TRAJ12)
CAMREGRDSSYKLIF

SEQ ID NO: 634940 - protein, 15 aa, Homo sapiens
  CDR3 for beta chain variable domain of TCR clone 317470 (TRBV20-1, TRBJ2-7)
CSARGPLAGGREQYF

SEQ ID NO: 634941 - protein, 13 aa, Homo sapiens
  CDR3 for alpha chain variable domain of TCR clone 317471 (TRAV20, TRAJ37)
CAGCSSNTGKLIF

SEQ ID NO: 634942 - protein, 15 aa, Homo sapiens
  CDR3 for beta chain variable domain of TCR clone 317471 (TRBV7-9, TRBJ1-1)
CASSLLEQRGTEAFF

SEQ ID NO: 634943 - protein, 13 aa, Homo sapiens
  CDR3 for alpha chain variable domain of TCR clone 317472 (TRAV38-1, TRAJ30)
CAFMRARDDKIIF

SEQ ID NO: 634944 - protein, 16 aa, Homo sapiens
  CDR3 for beta chain variable domain of TCR clone 317472 (TRBV19, TRBJ1-2)
CASSIVQTGLADGYTF

SEQ ID NO: 634945 - protein, 15 aa, Homo sapiens
  CDR3 for alpha chain variable domain of TCR clone 317473 (TRAV13-2, TRAJ45)
CAEHHSGGGADGLTF

SEQ ID NO: 634946 - protein, 15 aa, Homo sapiens
  CDR3 for beta chain variable domain of TCR clone 317473 (TRBV6-3, TRBJ2-7)
CASSSPGTVFYEQYF

SEQ ID NO: 634947 - protein, 16 aa, Homo sapiens
  CDR3 for alpha chain variable domain of TCR clone 317474 (TRAV30, TRAJ24)
CGTEIVDADSWGNFQF

SEQ ID NO: 634948 - protein, 14 aa, Homo sapiens
  CDR3 for beta chain variable domain of TCR clone 317474 (TRBV12-5, TRBJ2-5)
CASGSRTDQETQYF

SEQ ID NO: 634949 - protein, 16 aa, Homo sapiens
  CDR3 for alpha chain variable domain of TCR clone 317475 (TRAV26-1, TRAJ23)
CIVRPRFCNQGGKLIF

SEQ ID NO: 634950 - protein, 13 aa, Homo sapiens
  CDR3 for beta chain variable domain of TCR clone 317475 (TRBV20-1, TRBJ1-1)
CSARGGGNTEAFF

SEQ ID NO: 634951 - protein, 16 aa, Homo sapiens
  CDR3 for alpha chain variable domain of TCR clone 317476 (TRAV12-2, TRAJ45)
CAVIFLSGGGADGLTF

SEQ ID NO: 634952 - protein, 19 aa, Homo sapiens
  CDR3 for beta chain variable domain of TCR clone 317476 (TRBV28, TRBJ2-4)
CASSFRTGGPAHSKNIQYF

SEQ ID NO: 634953 - protein, 14 aa, Homo sapiens
  CDR3 for alpha chain variable domain of TCR clone 317477 (TRAV13-1, TRAJ44)
CASKATGTASKLTF

SEQ ID NO: 634954 - protein, 17 aa, Homo sapiens
  CDR3 for beta chain variable domain of TCR clone 317477 (TRBV7-3, TRBJ2-3)
RASSLMKRMRGADTQYF

SEQ ID NO: 634955 - protein, 13 aa, Homo sapiens
  CDR3 for alpha chain variable domain of TCR clone 317478 (TRAV12-1, TRAJ7)
CLVNMRGNNRLAF

SEQ ID NO: 634956 - protein, 11 aa, Homo sapiens
  CDR3 for beta chain variable domain of TCR clone 317478 (TRBV10-3, TRBJ2-7)
CAISEGLEQYF

SEQ ID NO: 634957 - protein, 16 aa, Homo sapiens
  CDR3 for alpha chain variable domain of TCR clone 317479 (TRAV3, TRAJ37)
CAVRPHGSGTTGRLIF

SEQ ID NO: 634958 - protein, 16 aa, Homo sapiens
  CDR3 for beta chain variable domain of TCR clone 317479 (TRBV9, TRBJ1-2)
CASRVEEKVSPYGYTF

SEQ ID NO: 634959 - protein, 14 aa, Homo sapiens
  CDR3 for alpha chain variable domain of TCR clone 317480 (TRAV9-2, TRAJ39)
CALYIYNAGNMLTF

SEQ ID NO: 634960 - protein, 16 aa, Homo sapiens
  CDR3 for beta chain variable domain of TCR clone 317480 (TRBV6-1, TRBJ1-2)
CASSGAWQGRSHGYTF

SEQ ID NO: 634961 - protein, 14 aa, Homo sapiens
  CDR3 for alpha chain variable domain of TCR clone 317481 (TRAV13-2, TRAJ10)
CAERGTGGGNKLTF

SEQ ID NO: 634962 - protein, 15 aa, Homo sapiens
  CDR3 for beta chain variable domain of TCR clone 317481 (TRBV12-4, TRBJ2-1)
CASSNGGGSSNEQFF

SEQ ID NO: 634963 - protein, 14 aa, Homo sapiens
  CDR3 for alpha chain variable domain of TCR clone 317482 (TRAV16, TRAJ39)
CALSKYNAGNMLTF

SEQ ID NO: 634964 - protein, 16 aa, Homo sapiens
  CDR3 for beta chain variable domain of TCR clone 317482 (TRBV6-6, TRBJ2-1)
CASSYSFSGSYNEQFF

SEQ ID NO: 634965 - protein, 14 aa, Homo sapiens
  CDR3 for alpha chain variable domain of TCR clone 317483 (TRAV12-2, TRAJ13)
CAVKKTGGYQKVTF

SEQ ID NO: 634966 - protein, 13 aa, Homo sapiens
  CDR3 for beta chain variable domain of TCR clone 317483 (TRBV10-3, TRBJ2-7)
CASKLAANYEQYF

SEQ ID NO: 634967 - protein, 16 aa, Homo sapiens
  CDR3 for alpha chain variable domain of TCR clone 317484 (TRAV16, TRAJ57)
SAPYLITQGGSEKLVF

SEQ ID NO: 634968 - protein, 17 aa, Homo sapiens
  CDR3 for beta chain variable domain of TCR clone 317484 (TRBV24-1, TRBJ2-4)
CATSDAEARGVRNIQYF

SEQ ID NO: 634969 - protein, 10 aa, Homo sapiens
  CDR3 for alpha chain variable domain of TCR clone 317485 (TRAV29/DV5, TRAJ48)
CAAGGEKLTF

SEQ ID NO: 634970 - protein, 14 aa, Homo sapiens
  CDR3 for beta chain variable domain of TCR clone 317485 (TRBV7-9, TRBJ2-5)
CASSLAPDQETEYF

SEQ ID NO: 634971 - protein, 12 aa, Homo sapiens
  CDR3 for alpha chain variable domain of TCR clone 317486 (TRAV8-3, TRAJ26)
CAGDNYGQTFVF

SEQ ID NO: 634972 - protein, 14 aa, Homo sapiens
  CDR3 for beta chain variable domain of TCR clone 317486 (TRBV7-2, TRBJ2-7)
CASRSQGAAYEQYF

SEQ ID NO: 634973 - protein, 14 aa, Homo sapiens
  CDR3 for alpha chain variable domain of TCR clone 317487 (TRAV1-2, TRAJ16)
CSVNRFSDGQKLLF

SEQ ID NO: 634974 - protein, 14 aa, Homo sapiens
  CDR3 for beta chain variable domain of TCR clone 317487 (TRBV7-2, TRBJ2-7)
CASSLYPGRYEQYF

SEQ ID NO: 634975 - protein, 18 aa, Homo sapiens
  CDR3 for alpha chain variable domain of TCR clone 317488 (TRAV8-3, TRAJ4)
WVRDPTSNDPGGYNKLIF

SEQ ID NO: 634976 - protein, 13 aa, Homo sapiens
  CDR3 for beta chain variable domain of TCR clone 317488 (TRBV20-1, TRBJ1-2)
CSATGVQGSGCTF

SEQ ID NO: 634977 - protein, 13 aa, Homo sapiens
  CDR3 for alpha chain variable domain of TCR clone 317489 (TRAV8-6, TRAJ49)
CAVITSTGNQFYF

SEQ ID NO: 634978 - protein, 13 aa, Homo sapiens
  CDR3 for beta chain variable domain of TCR clone 317489 (TRBV4-2, TRBJ1-1)
CASSQAGNTEAFF

SEQ ID NO: 634979 - protein, 15 aa, Homo sapiens
  CDR3 for alpha chain variable domain of TCR clone 317490 (TRAV23/DV6, TRAJ18)
CAARYRGSTLGRLYF

SEQ ID NO: 634980 - protein, 15 aa, Homo sapiens
  CDR3 for beta chain variable domain of TCR clone 317490 (TRBV7-2, TRBJ2-3)
CASSLNLRDTDTQYF

SEQ ID NO: 634981 - protein, 11 aa, Homo sapiens
  CDR3 for alpha chain variable domain of TCR clone 317491 (TRAV3, TRAJ17)
PRGAAGIKLTF

SEQ ID NO: 634982 - protein, 16 aa, Homo sapiens
  CDR3 for beta chain variable domain of TCR clone 317491 (TRBV7-7, TRBJ2-1)
CASSAPGPSSYNEQFF

SEQ ID NO: 634983 - protein, 16 aa, Homo sapiens
  CDR3 for alpha chain variable domain of TCR clone 317492 (TRAV16, TRAJ57)
CAPYIITQGGSERLVF

SEQ ID NO: 634984 - protein, 17 aa, Homo sapiens
  CDR3 for beta chain variable domain of TCR clone 317492 (TRBV24-1, TRBJ2-4)
CATSDAEARGVRNIQYF

SEQ ID NO: 634985 - protein, 13 aa, Homo sapiens
  CDR3 for alpha chain variable domain of TCR clone 317493 (TRAV13-2, TRAJ48)
CAEMDFGNEKLTF

SEQ ID NO: 634986 - protein, 15 aa, Homo sapiens
  CDR3 for beta chain variable domain of TCR clone 317493 (TRBV25-1, TRBJ1-4)
CASSPGDSTNEKLFF

SEQ ID NO: 634987 - protein, 16 aa, Homo sapiens
  CDR3 for alpha chain variable domain of TCR clone 317494 (TRAV16, TRAJ4)
CARSRMFSGGYNKLIF

SEQ ID NO: 634988 - protein, 16 aa, Homo sapiens
  CDR3 for beta chain variable domain of TCR clone 317494 (TRBV24-1, TRBJ2-3)
CATSDPGTGETDTQYF

SEQ ID NO: 634989 - protein, 14 aa, Homo sapiens
  CDR3 for alpha chain variable domain of TCR clone 317495 (TRAV13-1, TRAJ44)
CAAKATGTASKLTF

SEQ ID NO: 634990 - protein, 17 aa, Homo sapiens
  CDR3 for beta chain variable domain of TCR clone 317495 (TRBV3-1, TRBJ2-2)
CASSQDSQGPNTGELFF

SEQ ID NO: 634991 - protein, 13 aa, Homo sapiens
  CDR3 for alpha chain variable domain of TCR clone 317496 (TRAV8-3, TRAJ21)
CAVGAYNFNKFYF

SEQ ID NO: 634992 - protein, 15 aa, Homo sapiens
  CDR3 for beta chain variable domain of TCR clone 317496 (TRBV7-2, TRBJ2-5)
CASSFGTGGEETQYF

SEQ ID NO: 634993 - protein, 14 aa, Homo sapiens
  CDR3 for alpha chain variable domain of TCR clone 317497 (TRAV12-1, TRAJ12)
CVVNPMDSSYKLIF

SEQ ID NO: 634994 - protein, 16 aa, Homo sapiens
  CDR3 for beta chain variable domain of TCR clone 317497 (TRBV28, TRBJ2-2)
CTSVPAFGRATGSCFF

SEQ ID NO: 634995 - protein, 13 aa, Homo sapiens
  CDR3 for alpha chain variable domain of TCR clone 317498 (TRAV8-3, TRAJ28)
CAVGAVGSYQLTF

SEQ ID NO: 634996 - protein, 13 aa, Homo sapiens
  CDR3 for beta chain variable domain of TCR clone 317498 (TRBV7-9, TRBJ2-1)
CASRPNLSDEQFF

SEQ ID NO: 634997 - protein, 14 aa, Homo sapiens
  CDR3 for alpha chain variable domain of TCR clone 317499 (TRAV41, TRAJ57)
CAVVLQGGSEKLVF

SEQ ID NO: 634998 - protein, 12 aa, Homo sapiens
  CDR3 for beta chain variable domain of TCR clone 317499 (TRBV10-3, TRBJ1-1)
CATMDRPPEAFF

SEQ ID NO: 634999 - protein, 14 aa, Homo sapiens
  CDR3 for alpha chain variable domain of TCR clone 317500 (TRAV13-1, TRAJ10)
CAALFTGGGNKLTF

SEQ ID NO: 635000 - protein, 15 aa, Homo sapiens
  CDR3 for beta chain variable domain of TCR clone 317500 (TRBV12-4, TRBJ2-5)
CASSPPTGLQETQYF

SEQ ID NO: 635001 - protein, 16 aa, Homo sapiens
  CDR3 for alpha chain variable domain of TCR clone 317501 (TRAV8-3, TRAJ28)
CAVPPQRGAGSYQLTF

SEQ ID NO: 635002 - protein, 15 aa, Homo sapiens
  CDR3 for beta chain variable domain of TCR clone 317501 (TRBV7-3, TRBJ2-1)
CASSLSSGSFDEQFF

SEQ ID NO: 635003 - protein, 19 aa, Homo sapiens
  CDR3 for alpha chain variable domain of TCR clone 317502 (TRAV17, TRAJ17)
CATDGRPGVIKAASNKLTF

SEQ ID NO: 635004 - protein, 17 aa, Homo sapiens
  CDR3 for beta chain variable domain of TCR clone 317502 (TRBV12-4, TRBJ1-1)
CASSLSGFRTMNTEAFF

SEQ ID NO: 635005 - protein, 11 aa, Homo sapiens
  CDR3 for alpha chain variable domain of TCR clone 317503 (TRAV2, TRAJ13)
CASGGYQKVTF

SEQ ID NO: 635006 - protein, 14 aa, Homo sapiens
  CDR3 for beta chain variable domain of TCR clone 317503 (TRBV4-2, TRBJ2-5)
CASSQERGPRTQYF

SEQ ID NO: 635007 - protein, 13 aa, Homo sapiens
  CDR3 for alpha chain variable domain of TCR clone 317504 (TRAV27, TRAJ42)
CAGSRGSQGNLIF

SEQ ID NO: 635008 - protein, 15 aa, Homo sapiens
  CDR3 for beta chain variable domain of TCR clone 317504 (TRBV10-3, TRBJ2-2)
CAIRTDREDTGELFF

SEQ ID NO: 635009 - protein, 14 aa, Homo sapiens
  CDR3 for alpha chain variable domain of TCR clone 317505 (TRAV29/DV5, TRAJ36)
CAARRKTGATNLFF

SEQ ID NO: 635010 - protein, 17 aa, Homo sapiens
  CDR3 for beta chain variable domain of TCR clone 317505 (TRBV20-1, TRBJ2-2)
CSASGSGQGGLTGELFF

SEQ ID NO: 635011 - protein, 13 aa, Homo sapiens
  CDR3 for alpha chain variable domain of TCR clone 317506 (TRAV13-1, TRAJ13)
CAASKGGYQKVTF

SEQ ID NO: 635012 - protein, 16 aa, Homo sapiens
  CDR3 for beta chain variable domain of TCR clone 317506 (TRBV18, TRBJ1-2)
CVSSPPERVTIYGYTF

SEQ ID NO: 635013 - protein, 14 aa, Homo sapiens
  CDR3 for alpha chain variable domain of TCR clone 317507 (TRAV12-2, TRAJ53)
CAVKGGGSNYKLIF

SEQ ID NO: 635014 - protein, 14 aa, Homo sapiens
  CDR3 for beta chain variable domain of TCR clone 317507 (TRBV7-7, TRBJ2-2)
CATRQDSDTGELFF

SEQ ID NO: 635015 - protein, 11 aa, Homo sapiens
  CDR3 for alpha chain variable domain of TCR clone 317508 (TRAV13-1, TRAJ52)
PGGTSYGKLTF

SEQ ID NO: 635016 - protein, 16 aa, Homo sapiens
  CDR3 for beta chain variable domain of TCR clone 317508 (TRBV20-1, TRBJ1-2)
CSASTGQGVANYGYTF

SEQ ID NO: 635017 - protein, 12 aa, Homo sapiens
  CDR3 for alpha chain variable domain of TCR clone 317509 (TRAV17, TRAJ57)
CATDGVSEKLVF

SEQ ID NO: 635018 - protein, 12 aa, Homo sapiens
  CDR3 for beta chain variable domain of TCR clone 317509 (TRBV29-1, TRBJ2-2)
CSVDKYTGELFF

SEQ ID NO: 635019 - protein, 10 aa, Homo sapiens
  CDR3 for alpha chain variable domain of TCR clone 317510 (TRAV16, TRAJ20)
CSKWGLQGSF

SEQ ID NO: 635020 - protein, 13 aa, Homo sapiens
  CDR3 for beta chain variable domain of TCR clone 317510 (TRBV7-3, TRBJ2-1)
CASSLDSYNEQFF

SEQ ID NO: 635021 - protein, 13 aa, Homo sapiens
  CDR3 for alpha chain variable domain of TCR clone 317511 (TRAV13-1, TRAJ8)
CAASVRGFQKLVF

SEQ ID NO: 635022 - protein, 14 aa, Homo sapiens
  CDR3 for beta chain variable domain of TCR clone 317511 (TRBV7-2, TRBJ2-1)
CASSLVQGGNEQFF

SEQ ID NO: 635023 - protein, 15 aa, Homo sapiens
  CDR3 for alpha chain variable domain of TCR clone 317512 (TRAV13-1, TRAJ10)
CSAEVVTGGGNKLTF

SEQ ID NO: 635024 - protein, 13 aa, Homo sapiens
  CDR3 for beta chain variable domain of TCR clone 317512 (TRBV28, TRBJ2-5)
CAGVSRGEETQYF

SEQ ID NO: 635025 - protein, 11 aa, Homo sapiens
  CDR3 for alpha chain variable domain of TCR clone 317513 (TRAV3, TRAJ17)
PRGAAGNKLTF

SEQ ID NO: 635026 - protein, 16 aa, Homo sapiens
  CDR3 for beta chain variable domain of TCR clone 317513 (TRBV7-6, TRBJ2-1)
GASSAPGPSSYNEQFF

SEQ ID NO: 635027 - protein, 13 aa, Homo sapiens
  CDR3 for alpha chain variable domain of TCR clone 317514 (TRAV35, TRAJ32)
CAGVGGATNKLIF

SEQ ID NO: 635028 - protein, 15 aa, Homo sapiens
  CDR3 for beta chain variable domain of TCR clone 317514 (TRBV11-2, TRBJ2-1)
CASSKNRGLIYEQFF

SEQ ID NO: 635029 - protein, 16 aa, Homo sapiens
  CDR3 for alpha chain variable domain of TCR clone 317515 (TRAV12-3, TRAJ53)
CAMSPGSGGSNYKLTF

SEQ ID NO: 635030 - protein, 14 aa, Homo sapiens
  CDR3 for beta chain variable domain of TCR clone 317515 (TRBV4-2, TRBJ2-1)
CASGLDRAYNDQFF

SEQ ID NO: 635031 - protein, 13 aa, Homo sapiens
  CDR3 for alpha chain variable domain of TCR clone 317516 (TRAV12-2, TRAJ10)
CVVPTGGGNKLTF

SEQ ID NO: 635032 - protein, 11 aa, Homo sapiens
  CDR3 for beta chain variable domain of TCR clone 317516 (TRBV6-1, TRBJ2-1)
CASISSNEQFF

SEQ ID NO: 635033 - protein, 14 aa, Homo sapiens
  CDR3 for alpha chain variable domain of TCR clone 317517 (TRAV12-2, TRAJ13)
CAVKKTGGYQKVTF

SEQ ID NO: 635034 - protein, 13 aa, Homo sapiens
  CDR3 for beta chain variable domain of TCR clone 317517 (TRBV20-1, TRBJ1-1)
CSARLGQGNEAFF

SEQ ID NO: 635035 - protein, 14 aa, Homo sapiens
  CDR3 for alpha chain variable domain of TCR clone 317518 (TRAV3, TRAJ9)
CAVRLNTGGFKTIF

SEQ ID NO: 635036 - protein, 15 aa, Homo sapiens
  CDR3 for beta chain variable domain of TCR clone 317518 (TRBV28, TRBJ2-1)
CASSIIAGGRSEQFF

SEQ ID NO: 635037 - protein, 12 aa, Homo sapiens
  CDR3 for alpha chain variable domain of TCR clone 317519 (TRAV26-1, TRAJ31)
CIVRNNNTRLMF

SEQ ID NO: 635038 - protein, 15 aa, Homo sapiens
  CDR3 for beta chain variable domain of TCR clone 317519 (TRBV20-1, TRBJ2-4)
CSARDLTGGPNIQYF

SEQ ID NO: 635039 - protein, 13 aa, Homo sapiens
  CDR3 for alpha chain variable domain of TCR clone 317520 (TRAV16, TRAJ22)
SAMLAGSARQLTF

SEQ ID NO: 635040 - protein, 15 aa, Homo sapiens
  CDR3 for beta chain variable domain of TCR clone 317520 (TRBV20-1, TRBJ2-7)
CSAESGTSGAYEQYF

SEQ ID NO: 635041 - protein, 15 aa, Homo sapiens
  CDR3 for alpha chain variable domain of TCR clone 317521 (TRAV8-2, TRAJ40)
CVVLGTTSGTYKYIF

SEQ ID NO: 635042 - protein, 15 aa, Homo sapiens
  CDR3 for beta chain variable domain of TCR clone 317521 (TRBV10-1, TRBJ2-3)
CASSATSGGFDTQYF

SEQ ID NO: 635043 - protein, 15 aa, Homo sapiens
  CDR3 for alpha chain variable domain of TCR clone 317522 (TRAV13-1, TRAJ44)
CAASLGAGTASKLTF

SEQ ID NO: 635044 - protein, 16 aa, Homo sapiens
  CDR3 for beta chain variable domain of TCR clone 317522 (TRBV7-9, TRBJ1-2)
CASGLGFSSGEDGYTF

SEQ ID NO: 635045 - protein, 13 aa, Homo sapiens
  CDR3 for alpha chain variable domain of TCR clone 317523 (TRAV20, TRAJ34)
CAVRSHNTDKLIF

SEQ ID NO: 635046 - protein, 15 aa, Homo sapiens
  CDR3 for beta chain variable domain of TCR clone 317523 (TRBV27, TRBJ1-3)
CASSPSPGSGNTIYF

SEQ ID NO: 635047 - protein, 13 aa, Homo sapiens
  CDR3 for alpha chain variable domain of TCR clone 317524 (TRAV29/DV5, TRAJ31)
CAASRNNNARLMF

SEQ ID NO: 635048 - protein, 18 aa, Homo sapiens
  CDR3 for beta chain variable domain of TCR clone 317524 (TRBV20-1, TRBJ2-3)
CSASGLAGGPGTTDTQYF

SEQ ID NO: 635049 - protein, 14 aa, Homo sapiens
  CDR3 for alpha chain variable domain of TCR clone 317525 (TRAV1-2, TRAJ16)
CAVNRFSDGQNLLF

SEQ ID NO: 635050 - protein, 13 aa, Homo sapiens
  CDR3 for beta chain variable domain of TCR clone 317525 (TRBV7-9, TRBJ1-2)
CASSLKQNYGYTF

SEQ ID NO: 635051 - protein, 12 aa, Homo sapiens
  CDR3 for alpha chain variable domain of TCR clone 317526 (TRAV13-1, TRAJ9)
CASHTGGFKTIF

SEQ ID NO: 635052 - protein, 13 aa, Homo sapiens
  CDR3 for beta chain variable domain of TCR clone 317526 (TRBV12-4, TRBJ1-2)
CASGSGSKDGYTF

SEQ ID NO: 635053 - protein, 14 aa, Homo sapiens
  CDR3 for alpha chain variable domain of TCR clone 317527 (TRAV16, TRAJ17)
CVLSGRAAGNKLTF

SEQ ID NO: 635054 - protein, 17 aa, Homo sapiens
  CDR3 for beta chain variable domain of TCR clone 317527 (TRBV18, TRBJ2-6)
CASSPRQGAVGANVLTF

SEQ ID NO: 635055 - protein, 21 aa, Homo sapiens
  CDR3 for alpha chain variable domain of TCR clone 317528 (TRAV8-4, TRAJ47)
HLTKPPAHMSDAAERGNKLVF

SEQ ID NO: 635056 - protein, 14 aa, Homo sapiens
  CDR3 for beta chain variable domain of TCR clone 317528 (TRBV7-9, TRBJ2-1)
CASSPRDSLYEQFF

SEQ ID NO: 635057 - protein, 13 aa, Homo sapiens
  CDR3 for alpha chain variable domain of TCR clone 317529 (TRAV13-1, TRAJ43)
CAASKNNNNDMRF

SEQ ID NO: 635058 - protein, 11 aa, Homo sapiens
  CDR3 for beta chain variable domain of TCR clone 317529 (TRBV11-2, TRBJ2-2)
CASSLPGELFF

SEQ ID NO: 635059 - protein, 16 aa, Homo sapiens
  CDR3 for alpha chain variable domain of TCR clone 317530 (TRAV25, TRAJ53)
CAGPKGSGGSNYKLTF

SEQ ID NO: 635060 - protein, 15 aa, Homo sapiens
  CDR3 for beta chain variable domain of TCR clone 317530 (TRBV4-3, TRBJ1-1)
CASSQELGRGTEAFF

SEQ ID NO: 635061 - protein, 15 aa, Homo sapiens
  CDR3 for alpha chain variable domain of TCR clone 317531 (TRAV26-1, TRAJ29)
CIVRVEGSGKTHLVF

SEQ ID NO: 635062 - protein, 13 aa, Homo sapiens
  CDR3 for beta chain variable domain of TCR clone 317531 (TRBV7-6, TRBJ2-3)
CASSLRSDNTQYF

SEQ ID NO: 635063 - protein, 17 aa, Homo sapiens
  CDR3 for alpha chain variable domain of TCR clone 317532 (TRAV3, )
CAISRTLTLPCSSGETL

SEQ ID NO: 635064 - protein, 15 aa, Homo sapiens
  CDR3 for beta chain variable domain of TCR clone 317532 (TRBV19, TRBJ1-5)
CASSDSGPRNQPQHF

SEQ ID NO: 635065 - protein, 16 aa, Homo sapiens
  CDR3 for alpha chain variable domain of TCR clone 317533 (TRAV30, TRAJ24)
CGTEIVDADSWGKFQF

SEQ ID NO: 635066 - protein, 15 aa, Homo sapiens
  CDR3 for beta chain variable domain of TCR clone 317533 (TRBV15, TRBJ1-5)
CATSRDPVSNQPQHF

SEQ ID NO: 635067 - protein, 17 aa, Homo sapiens
  CDR3 for alpha chain variable domain of TCR clone 317534 (TRAV3, TRAJ6)
CAVRDGPSAGGSYIPTS

SEQ ID NO: 635068 - protein, 13 aa, Homo sapiens
  CDR3 for beta chain variable domain of TCR clone 317534 (TRBV19, TRBJ2-7)
CASSIDRTYEQYF

SEQ ID NO: 635069 - protein, 18 aa, Homo sapiens
  CDR3 for alpha chain variable domain of TCR clone 317535 (TRAV17, TRAJ45)
CATSLDLYSGGGADGRTF

SEQ ID NO: 635070 - protein, 15 aa, Homo sapiens
  CDR3 for beta chain variable domain of TCR clone 317535 (TRBV7-2, TRBJ2-7)
CASSTPGLTRGEQYF

SEQ ID NO: 635071 - protein, 14 aa, Homo sapiens
  CDR3 for alpha chain variable domain of TCR clone 317536 (TRAV1-2, TRAJ16)
CAVNRFSDGQKLLF

SEQ ID NO: 635072 - protein, 11 aa, Homo sapiens
  CDR3 for beta chain variable domain of TCR clone 317536 (TRBV6-1, TRBJ2-1)
CHPGGGGHLFF

SEQ ID NO: 635073 - protein, 11 aa, Homo sapiens
  CDR3 for alpha chain variable domain of TCR clone 317537 (TRAV13-1, TRAJ6)
CATLGSYIPTF

SEQ ID NO: 635074 - protein, 12 aa, Homo sapiens
  CDR3 for beta chain variable domain of TCR clone 317537 (TRBV11-2, TRBJ2-1)
CASSPGNNVQFF

SEQ ID NO: 635075 - protein, 12 aa, Homo sapiens
  CDR3 for alpha chain variable domain of TCR clone 317538 (TRAV27, TRAJ9)
CAGESGGFQTIF

SEQ ID NO: 635076 - protein, 14 aa, Homo sapiens
  CDR3 for beta chain variable domain of TCR clone 317538 (TRBV6-1, TRBJ2-1)
CASAKDGFYNEQFF

SEQ ID NO: 635077 - protein, 14 aa, Homo sapiens
  CDR3 for alpha chain variable domain of TCR clone 317539 (TRAV1-2, TRAJ8)
CAVREDTGFQKLVF

SEQ ID NO: 635078 - protein, 14 aa, Homo sapiens
  CDR3 for beta chain variable domain of TCR clone 317539 (TRBV7-9, TRBJ1-1)
CASTPLQAYTEAFF

SEQ ID NO: 635079 - protein, 14 aa, Homo sapiens
  CDR3 for alpha chain variable domain of TCR clone 317540 (TRAV1-2, TRAJ16)
CAVNRFSDVQKLLF

SEQ ID NO: 635080 - protein, 16 aa, Homo sapiens
  CDR3 for beta chain variable domain of TCR clone 317540 (TRBV5-4, TRBJ2-3)
CASQQPGAGGADTQYF

SEQ ID NO: 635081 - protein, 14 aa, Homo sapiens
  CDR3 for alpha chain variable domain of TCR clone 317541 (TRAV2, TRAJ15)
CCGDRGQAGTALIF

SEQ ID NO: 635082 - protein, 15 aa, Homo sapiens
  CDR3 for beta chain variable domain of TCR clone 317541 (TRBV9, TRBJ1-6)
CASSVAGTGDSPLHF

SEQ ID NO: 635083 - protein, 13 aa, Homo sapiens
  CDR3 for alpha chain variable domain of TCR clone 317542 (TRAV21, TRAJ27)
CAARPGNAGKSTF

SEQ ID NO: 635084 - protein, 15 aa, Homo sapiens
  CDR3 for beta chain variable domain of TCR clone 317542 (TRBV19, TRBJ2-1)
CASSINREPSHEQFF

SEQ ID NO: 635085 - protein, 10 aa, Homo sapiens
  CDR3 for alpha chain variable domain of TCR clone 317543 (TRAV39, TRAJ44)
SAGTASKLTF

SEQ ID NO: 635086 - protein, 16 aa, Homo sapiens
  CDR3 for beta chain variable domain of TCR clone 317543 (TRBV2, TRBJ1-1)
CASSPPNRGMNTEAFF

SEQ ID NO: 635087 - protein, 14 aa, Homo sapiens
  CDR3 for alpha chain variable domain of TCR clone 317544 (TRAV1-2, TRAJ8)
CAVRDPPGFQKLVF

SEQ ID NO: 635088 - protein, 14 aa, Homo sapiens
  CDR3 for beta chain variable domain of TCR clone 317544 (TRBV4-2, TRBJ2-7)
CASSRRTGEYEQYF

SEQ ID NO: 635089 - protein, 15 aa, Homo sapiens
  CDR3 for alpha chain variable domain of TCR clone 317545 (TRAV23/DV6, TRAJ44)
CAARLLTGTASKLTF

SEQ ID NO: 635090 - protein, 15 aa, Homo sapiens
  CDR3 for beta chain variable domain of TCR clone 317545 (TRBV12-4, TRBJ1-5)
CASTLNRGSNQPQHF

SEQ ID NO: 635091 - protein, 14 aa, Homo sapiens
  CDR3 for alpha chain variable domain of TCR clone 317546 (TRAV1-2, TRAJ16)
CAVNRFSDGQKLLF

SEQ ID NO: 635092 - protein, 16 aa, Homo sapiens
  CDR3 for beta chain variable domain of TCR clone 317546 (TRBV12-4, TRBJ1-5)
CASSRPVGGSNQPQDF

SEQ ID NO: 635093 - protein, 15 aa, Homo sapiens
  CDR3 for alpha chain variable domain of TCR clone 317547 (TRAV34, TRAJ38)
CGADFTPGNDRKLIW

SEQ ID NO: 635094 - protein, 14 aa, Homo sapiens
  CDR3 for beta chain variable domain of TCR clone 317547 (TRBV11-2, TRBJ2-3)
CASSLGGGANTQYF

SEQ ID NO: 635095 - protein, 17 aa, Homo sapiens
  CDR3 for alpha chain variable domain of TCR clone 317548 (TRAV27, TRAJ26)
CAGARAPVDNYGQNFVF

SEQ ID NO: 635096 - protein, 15 aa, Homo sapiens
  CDR3 for beta chain variable domain of TCR clone 317548 (TRBV11-2, TRBJ2-5)
CASSPRSGGLETQYF

SEQ ID NO: 635097 - protein, 17 aa, Homo sapiens
  CDR3 for alpha chain variable domain of TCR clone 317549 (TRAV13-1, TRAJ52)
CAAGSGAGGTSYGKLTF

SEQ ID NO: 635098 - protein, 15 aa, Homo sapiens
  CDR3 for beta chain variable domain of TCR clone 317549 (TRBV28, TRBJ2-4)
CAAGSGTLLMGIQYF

SEQ ID NO: 635099 - protein, 13 aa, Homo sapiens
  CDR3 for alpha chain variable domain of TCR clone 317550 (TRAV30, TRAJ24)
CGTVTDSWGKLQF

SEQ ID NO: 635100 - protein, 14 aa, Homo sapiens
  CDR3 for beta chain variable domain of TCR clone 317550 (TRBV6-3, TRBJ2-2)
CASTYTTDTGELFF

SEQ ID NO: 635101 - protein, 14 aa, Homo sapiens
  CDR3 for alpha chain variable domain of TCR clone 317551 (TRAV17, TRAJ57)
CATDPQGGSDKLVF

SEQ ID NO: 635102 - protein, 14 aa, Homo sapiens
  CDR3 for beta chain variable domain of TCR clone 317551 (TRBV11-2, TRBJ2-3)
CASSLGGGANTQYF

SEQ ID NO: 635103 - protein, 17 aa, Homo sapiens
  CDR3 for alpha chain variable domain of TCR clone 317552 (TRAV3, TRAJ42)
CAVRDRDYGGSQGNLIF

SEQ ID NO: 635104 - protein, 15 aa, Homo sapiens
  CDR3 for beta chain variable domain of TCR clone 317552 (TRBV6-1, TRBJ2-1)
CASSEAAYSYNEQFF

SEQ ID NO: 635105 - protein, 15 aa, Homo sapiens
  CDR3 for alpha chain variable domain of TCR clone 317553 (TRAV20, TRAJ52)
CAVQAGGTSYGKLTF

SEQ ID NO: 635106 - protein, 16 aa, Homo sapiens
  CDR3 for beta chain variable domain of TCR clone 317553 (TRBV7-2, TRBJ1-3)
CASSSGRVLSGNTIYF

SEQ ID NO: 635107 - protein, 14 aa, Homo sapiens
  CDR3 for alpha chain variable domain of TCR clone 317554 (TRAV17, TRAJ57)
CAKDPQGGSEKLVF

SEQ ID NO: 635108 - protein, 18 aa, Homo sapiens
  CDR3 for beta chain variable domain of TCR clone 317554 (TRBV6-6, TRBJ1-3)
FASSYSKWDSISGNTIYF

SEQ ID NO: 635109 - protein, 15 aa, Homo sapiens
  CDR3 for alpha chain variable domain of TCR clone 317555 (TRAV8-1, TRAJ6)
FAVNTPPGGSYIPTF

SEQ ID NO: 635110 - protein, 14 aa, Homo sapiens
  CDR3 for beta chain variable domain of TCR clone 317555 (TRBV12-4, TRBJ2-1)
CASSLGQGASEQFF

SEQ ID NO: 635111 - protein, 14 aa, Homo sapiens
  CDR3 for alpha chain variable domain of TCR clone 317556 (TRAV1-2, TRAJ8)
CAVREDTGFQKIVF

SEQ ID NO: 635112 - protein, 16 aa, Homo sapiens
  CDR3 for beta chain variable domain of TCR clone 317556 (TRBV7-9, TRBJ2-1)
CASSDVAGGSYNEQFF

SEQ ID NO: 635113 - protein, 14 aa, Homo sapiens
  CDR3 for alpha chain variable domain of TCR clone 317557 (TRAV12-2, TRAJ13)
CAVKTTGGYQKVTF

SEQ ID NO: 635114 - protein, 13 aa, Homo sapiens
  CDR3 for beta chain variable domain of TCR clone 317557 (TRBV10-3, TRBJ2-7)
CASKLAVNYEQYF

SEQ ID NO: 635115 - protein, 13 aa, Homo sapiens
  CDR3 for alpha chain variable domain of TCR clone 317558 (TRAV21, TRAJ27)
CAARPGNAGKSPF

SEQ ID NO: 635116 - protein, 12 aa, Homo sapiens
  CDR3 for beta chain variable domain of TCR clone 317558 (TRBV11-2, TRBJ2-2)
CASSLGGGELFF

SEQ ID NO: 635117 - protein, 14 aa, Homo sapiens
  CDR3 for alpha chain variable domain of TCR clone 317559 (TRAV13-2, TRAJ23)
CAENTYNQGGKLIF

SEQ ID NO: 635118 - protein, 15 aa, Homo sapiens
  CDR3 for beta chain variable domain of TCR clone 317559 (TRBV18, TRBJ1-5)
CASSPSDRSNQPQHF

SEQ ID NO: 635119 - protein, 14 aa, Homo sapiens
  CDR3 for alpha chain variable domain of TCR clone 317560 (TRAV17, TRAJ16)
CATADFSDGQRLLF

SEQ ID NO: 635120 - protein, 15 aa, Homo sapiens
  CDR3 for beta chain variable domain of TCR clone 317560 (TRBV6-5, TRBJ2-1)
CASSYDAGAGNEQFF

SEQ ID NO: 635121 - protein, 16 aa, Homo sapiens
  CDR3 for alpha chain variable domain of TCR clone 317561 (TRAV30, TRAJ24)
CGTEIVDADSWGKFKF

SEQ ID NO: 635122 - protein, 13 aa, Homo sapiens
  CDR3 for beta chain variable domain of TCR clone 317561 (TRBV7-9, TRBJ1-2)
CASSLKQNYGYTF

SEQ ID NO: 635123 - protein, 13 aa, Homo sapiens
  CDR3 for alpha chain variable domain of TCR clone 317562 (TRAV21, TRAJ27)
CAARPGNAGKSTF

SEQ ID NO: 635124 - protein, 22 aa, Homo sapiens
  CDR3 for beta chain variable domain of TCR clone 317562 (TRBV4-2, TRBJ2-7)
CASSQASGGNLRAVLRAGHQAH

SEQ ID NO: 635125 - protein, 15 aa, Homo sapiens
  CDR3 for alpha chain variable domain of TCR clone 317563 (TRAV3, TRAJ22)
CAVRDRCGSARQLTF

SEQ ID NO: 635126 - protein, 14 aa, Homo sapiens
  CDR3 for beta chain variable domain of TCR clone 317563 (TRBV19, TRBJ1-5)
CASSLGLIGQPQHF

SEQ ID NO: 635127 - protein, 13 aa, Homo sapiens
  CDR3 for alpha chain variable domain of TCR clone 317564 (TRAV8-1, TRAJ28)
CAVSGAGSYQLTF

SEQ ID NO: 635128 - protein, 12 aa, Homo sapiens
  CDR3 for beta chain variable domain of TCR clone 317564 (TRBV2, TRBJ2-1)
CAKREGYNEQFF

SEQ ID NO: 635129 - protein, 13 aa, Homo sapiens
  CDR3 for alpha chain variable domain of TCR clone 317565 (TRAV21, TRAJ27)
CAARPGNAGKSTL

SEQ ID NO: 635130 - protein, 15 aa, Homo sapiens
  CDR3 for beta chain variable domain of TCR clone 317565 (TRBV9, TRBJ1-6)
CASSVAGTGDSPLHF

SEQ ID NO: 635131 - protein, 15 aa, Homo sapiens
  CDR3 for alpha chain variable domain of TCR clone 317566 (TRAV26-1, TRAJ3)
CIVRSGYSSASKTIF

SEQ ID NO: 635132 - protein, 14 aa, Homo sapiens
  CDR3 for beta chain variable domain of TCR clone 317566 (TRBV13, TRBJ2-5)
CASYRRLAEETQYF

SEQ ID NO: 635133 - protein, 13 aa, Homo sapiens
  CDR3 for alpha chain variable domain of TCR clone 317567 (TRAV21, TRAJ27)
CAASPGNAGKSTF

SEQ ID NO: 635134 - protein, 13 aa, Homo sapiens
  CDR3 for beta chain variable domain of TCR clone 317567 (TRBV13, TRBJ2-1)
CASILGGRGEQFF

SEQ ID NO: 635135 - protein, 14 aa, Homo sapiens
  CDR3 for alpha chain variable domain of TCR clone 317568 (TRAV13-1, TRAJ44)
CAAKATGTASKLTF

SEQ ID NO: 635136 - protein, 17 aa, Homo sapiens
  CDR3 for beta chain variable domain of TCR clone 317568 (TRBV7-3, TRBJ2-3)
CASSLMKRMRGAAKQYF

SEQ ID NO: 635137 - protein, 19 aa, Homo sapiens
  CDR3 for alpha chain variable domain of TCR clone 317569 (TRAV1-2, TRAJ26)
CLLPLCCERPDNYGQNFVF

SEQ ID NO: 635138 - protein, 16 aa, Homo sapiens
  CDR3 for beta chain variable domain of TCR clone 317569 (TRBV19, TRBJ2-1)
CASSRAGPSSYNEQFF

SEQ ID NO: 635139 - protein, 13 aa, Homo sapiens
  CDR3 for alpha chain variable domain of TCR clone 317570 (TRAV13-1, TRAJ11)
CAASIRGYSTLTF

SEQ ID NO: 635140 - protein, 17 aa, Homo sapiens
  CDR3 for beta chain variable domain of TCR clone 317570 (TRBV4-3, TRBJ1-2)
CAGSSRLQAGGSVGYTF

SEQ ID NO: 635141 - protein, 15 aa, Homo sapiens
  CDR3 for alpha chain variable domain of TCR clone 317571 (TRAV8-3, TRAJ27)
CAVGPSKTNAGKSTF

SEQ ID NO: 635142 - protein, 14 aa, Homo sapiens
  CDR3 for beta chain variable domain of TCR clone 317571 (TRBV11-2, TRBJ2-3)
CASSRLARTDKQYF

SEQ ID NO: 635143 - protein, 14 aa, Homo sapiens
  CDR3 for alpha chain variable domain of TCR clone 317572 (TRAV8-4, TRAJ9)
CAVRINTGGFKTIF

SEQ ID NO: 635144 - protein, 15 aa, Homo sapiens
  CDR3 for beta chain variable domain of TCR clone 317572 (TRBV10-2, TRBJ2-6)
CASSEQGAGANGLTF

SEQ ID NO: 635145 - protein, 16 aa, Homo sapiens
  CDR3 for alpha chain variable domain of TCR clone 317573 (TRAV30, TRAJ49)
SAAQRVGPNTGNQFYF

SEQ ID NO: 635146 - protein, 17 aa, Homo sapiens
  CDR3 for beta chain variable domain of TCR clone 317573 (TRBV7-9, TRBJ2-3)
CASSPTVAGDLTDTQYF

SEQ ID NO: 635147 - protein, 16 aa, Homo sapiens
  CDR3 for alpha chain variable domain of TCR clone 317574 (TRAV30, TRAJ24)
CGTEIVDADSWGKVKF

SEQ ID NO: 635148 - protein, 13 aa, Homo sapiens
  CDR3 for beta chain variable domain of TCR clone 317574 (TRBV18, TRBJ1-2)
CASSASATEGYTF

SEQ ID NO: 635149 - protein, 16 aa, Homo sapiens
  CDR3 for alpha chain variable domain of TCR clone 317575 (TRAV3, TRAJ37)
CAVRGKGSGNTGKIIF

SEQ ID NO: 635150 - protein, 16 aa, Homo sapiens
  CDR3 for beta chain variable domain of TCR clone 317575 (TRBV12-5, TRBJ2-5)
CASGPRTSGSQETQYF

SEQ ID NO: 635151 - protein, 14 aa, Homo sapiens
  CDR3 for alpha chain variable domain of TCR clone 317576 (TRAV38-1, TRAJ29)
CAFITPSGNTPLVF

SEQ ID NO: 635152 - protein, 15 aa, Homo sapiens
  CDR3 for beta chain variable domain of TCR clone 317576 (TRBV5-8, TRBJ2-7)
CASSYTGIGPREQYF

SEQ ID NO: 635153 - protein, 18 aa, Homo sapiens
  CDR3 for alpha chain variable domain of TCR clone 317577 (TRAV21, TRAJ13)
CAVPRSFWGLPESYLCNR

SEQ ID NO: 635154 - protein, 14 aa, Homo sapiens
  CDR3 for beta chain variable domain of TCR clone 317577 (TRBV20-1, TRBJ2-7)
CSAKDRKGAYEQYF

SEQ ID NO: 635155 - protein, 15 aa, Homo sapiens
  CDR3 for alpha chain variable domain of TCR clone 317578 (TRAV12-2, TRAJ8)
CAVREENTGFQKLVF

SEQ ID NO: 635156 - protein, 14 aa, Homo sapiens
  CDR3 for beta chain variable domain of TCR clone 317578 (TRBV19, TRBJ2-7)
CASNFRDTFTGMYF

SEQ ID NO: 635157 - protein, 17 aa, Homo sapiens
  CDR3 for alpha chain variable domain of TCR clone 317579 (TRAV3, TRAJ6)
CAVRDGPRAGGSYIPTF

SEQ ID NO: 635158 - protein, 13 aa, Homo sapiens
  CDR3 for beta chain variable domain of TCR clone 317579 (TRBV28, TRBJ2-2)
CASIRESTGELFF

SEQ ID NO: 635159 - protein, 15 aa, Homo sapiens
  CDR3 for alpha chain variable domain of TCR clone 317580 (TRAV12-2, TRAJ53)
CAVNGGGGSNYKQTF

SEQ ID NO: 635160 - protein, 17 aa, Homo sapiens
  CDR3 for beta chain variable domain of TCR clone 317580 (TRBV7-3, TRBJ2-3)
CASSLMKRMRGADTQYF

SEQ ID NO: 635161 - protein, 15 aa, Homo sapiens
  CDR3 for alpha chain variable domain of TCR clone 317581 (TRAV4, TRAJ26)
CLVGDMKNYGQNFVF

SEQ ID NO: 635162 - protein, 16 aa, Homo sapiens
  CDR3 for beta chain variable domain of TCR clone 317581 (TRBV28, TRBJ1-4)
CASSSRTGAANEKLFF

SEQ ID NO: 635163 - protein, 11 aa, Homo sapiens
  CDR3 for alpha chain variable domain of TCR clone 317582 (TRAV3, TRAJ21)
CAVGNFNKFYF

SEQ ID NO: 635164 - protein, 16 aa, Homo sapiens
  CDR3 for beta chain variable domain of TCR clone 317582 (TRBV7-3, TRBJ2-1)
CASSLVSGSSNNEQFF

SEQ ID NO: 635165 - protein, 14 aa, Homo sapiens
  CDR3 for alpha chain variable domain of TCR clone 317583 (TRAV17, TRAJ39)
CATDPVRAGNMLTF

SEQ ID NO: 635166 - protein, 14 aa, Homo sapiens
  CDR3 for beta chain variable domain of TCR clone 317583 (TRBV5-7, TRBJ1-1)
CASSLAGDWTEAFF

SEQ ID NO: 635167 - protein, 14 aa, Homo sapiens
  CDR3 for alpha chain variable domain of TCR clone 317584 (TRAV30, TRAJ33)
CGPVTPRSNYQLIW

SEQ ID NO: 635168 - protein, 16 aa, Homo sapiens
  CDR3 for beta chain variable domain of TCR clone 317584 (TRBV3-1, TRBJ2-5)
CASSPGQFNGFGTQYF

SEQ ID NO: 635169 - protein, 14 aa, Homo sapiens
  CDR3 for alpha chain variable domain of TCR clone 317585 (TRAV12-3, TRAJ10)
SHLPLPGGGNKLTF

SEQ ID NO: 635170 - protein, 17 aa, Homo sapiens
  CDR3 for beta chain variable domain of TCR clone 317585 (TRBV11-2, TRBJ2-1)
CASSLYPPGVEYNEQFF

SEQ ID NO: 635171 - protein, 13 aa, Homo sapiens
  CDR3 for alpha chain variable domain of TCR clone 317586 (TRAV13-1, TRAJ4)
SAVYSGGYNKLIF

SEQ ID NO: 635172 - protein, 13 aa, Homo sapiens
  CDR3 for beta chain variable domain of TCR clone 317586 (TRBV9, TRBJ1-2)
CASSVEHSYGYTF

SEQ ID NO: 635173 - protein, 11 aa, Homo sapiens
  CDR3 for alpha chain variable domain of TCR clone 317587 (TRAV3, TRAJ21)
CAVGNFNKFYF

SEQ ID NO: 635174 - protein, 16 aa, Homo sapiens
  CDR3 for beta chain variable domain of TCR clone 317587 (TRBV10-2, TRBJ1-5)
CASSVRDRASNQPQHF

SEQ ID NO: 635175 - protein, 12 aa, Homo sapiens
  CDR3 for alpha chain variable domain of TCR clone 317588 (TRAV25, TRAJ31)
CAGHLNNARLMF

SEQ ID NO: 635176 - protein, 15 aa, Homo sapiens
  CDR3 for beta chain variable domain of TCR clone 317588 (TRBV10-3, TRBJ2-1)
CHPGGRQGDYNEQFF

SEQ ID NO: 635177 - protein, 15 aa, Homo sapiens
  CDR3 for alpha chain variable domain of TCR clone 317589 (TRAV12-3, TRAJ42)
CAMITSVGSQGNLIF

SEQ ID NO: 635178 - protein, 14 aa, Homo sapiens
  CDR3 for beta chain variable domain of TCR clone 317589 (TRBV11-2, TRBJ2-7)
CASSSTGEGYEQYF

SEQ ID NO: 635179 - protein, 14 aa, Homo sapiens
  CDR3 for alpha chain variable domain of TCR clone 317590 (TRAV9-2, TRAJ39)
CALYIYNAGNMLTC

SEQ ID NO: 635180 - protein, 14 aa, Homo sapiens
  CDR3 for beta chain variable domain of TCR clone 317590 (TRBV6-1, TRBJ1-3)
CASVQGGGGNTIYF

SEQ ID NO: 635181 - protein, 17 aa, Homo sapiens
  CDR3 for alpha chain variable domain of TCR clone 317591 (TRAV8-6, TRAJ58)
CAVSSWVGETSDSRLTF

SEQ ID NO: 635182 - protein, 14 aa, Homo sapiens
  CDR3 for beta chain variable domain of TCR clone 317591 (TRBV19, TRBJ1-4)
CASSMGRNNEKLFF

SEQ ID NO: 635183 - protein, 14 aa, Homo sapiens
  CDR3 for alpha chain variable domain of TCR clone 317592 (TRAV1-2, TRAJ16)
CAVNRFSDGQKLLF

SEQ ID NO: 635184 - protein, 17 aa, Homo sapiens
  CDR3 for beta chain variable domain of TCR clone 317592 (TRBV7-8, TRBJ2-6)
WASSAGTGGAGANVLTF

SEQ ID NO: 635185 - protein, 11 aa, Homo sapiens
  CDR3 for alpha chain variable domain of TCR clone 317593 (TRAV12-1, TRAJ43)
CVEYDNNDMRL

SEQ ID NO: 635186 - protein, 17 aa, Homo sapiens
  CDR3 for beta chain variable domain of TCR clone 317593 (TRBV20-1, TRBJ2-1)
CSARDPLAGVWDNEQFF

SEQ ID NO: 635187 - protein, 15 aa, Homo sapiens
  CDR3 for alpha chain variable domain of TCR clone 317594 (TRAV17, TRAJ37)
CATDGGSSNTGKLIF

SEQ ID NO: 635188 - protein, 15 aa, Homo sapiens
  CDR3 for beta chain variable domain of TCR clone 317594 (TRBV7-9, TRBJ1-6)
CASSSPGRGNSPLHF

SEQ ID NO: 635189 - protein, 13 aa, Homo sapiens
  CDR3 for alpha chain variable domain of TCR clone 317595 (TRAV12-1, TRAJ26)
SATYLYYGQNFVF

SEQ ID NO: 635190 - protein, 15 aa, Homo sapiens
  CDR3 for beta chain variable domain of TCR clone 317595 (TRBV5-1, TRBJ2-6)
CASSLDPSGANVLTF

SEQ ID NO: 635191 - protein, 14 aa, Homo sapiens
  CDR3 for alpha chain variable domain of TCR clone 317596 (TRAV2, TRAJ37)
CAVDFTSNTRKLIF

SEQ ID NO: 635192 - protein, 14 aa, Homo sapiens
  CDR3 for beta chain variable domain of TCR clone 317596 (TRBV5-1, TRBJ2-5)
CASSFGGSQETQYF

SEQ ID NO: 635193 - protein, 13 aa, Homo sapiens
  CDR3 for alpha chain variable domain of TCR clone 317597 (TRAV12-3, TRAJ33)
CAMSVNSNYQLIW

SEQ ID NO: 635194 - protein, 16 aa, Homo sapiens
  CDR3 for beta chain variable domain of TCR clone 317597 (TRBV13, TRBJ2-5)
CASSLRTGGSWGTQYF

SEQ ID NO: 635195 - protein, 14 aa, Homo sapiens
  CDR3 for alpha chain variable domain of TCR clone 317598 (TRAV12-1, TRAJ30)
FVVNIGGRDDKIIF

SEQ ID NO: 635196 - protein, 15 aa, Homo sapiens
  CDR3 for beta chain variable domain of TCR clone 317598 (TRBV18, TRBJ1-2)
CASSPSNTPNYGYTF

SEQ ID NO: 635197 - protein, 10 aa, Homo sapiens
  CDR3 for alpha chain variable domain of TCR clone 317599 (TRAV12-2, TRAJ20)
CAVYLYKLSF

SEQ ID NO: 635198 - protein, 14 aa, Homo sapiens
  CDR3 for beta chain variable domain of TCR clone 317599 (TRBV10-3, TRBJ2-2)
CAISEVSHSGELLF

SEQ ID NO: 635199 - protein, 16 aa, Homo sapiens
  CDR3 for alpha chain variable domain of TCR clone 317600 (TRAV30, TRAJ24)
CGTEIVDADSWGNFQF

SEQ ID NO: 635200 - protein, 14 aa, Homo sapiens
  CDR3 for beta chain variable domain of TCR clone 317600 (TRBV12-5, TRBJ2-5)
CACGSRTHQETQYF

SEQ ID NO: 635201 - protein, 14 aa, Homo sapiens
  CDR3 for alpha chain variable domain of TCR clone 317601 (TRAV1-2, TRAJ8)
CAVREDTGFQRLVF

SEQ ID NO: 635202 - protein, 13 aa, Homo sapiens
  CDR3 for beta chain variable domain of TCR clone 317601 (TRBV5-1, TRBJ1-2)
CASSIDRPEGYSF

SEQ ID NO: 635203 - protein, 16 aa, Homo sapiens
  CDR3 for alpha chain variable domain of TCR clone 317602 (TRAV12-3, TRAJ53)
FAMSPGSGGSNYKLPF

SEQ ID NO: 635204 - protein, 16 aa, Homo sapiens
  CDR3 for beta chain variable domain of TCR clone 317602 (TRBV4-2, TRBJ1-1)
CASSQAGFGMNTEAFF

SEQ ID NO: 635205 - protein, 17 aa, Homo sapiens
  CDR3 for alpha chain variable domain of TCR clone 317603 (TRAV4, TRAJ18)
CLVLAAGRGSTLGRLYF

SEQ ID NO: 635206 - protein, 17 aa, Homo sapiens
  CDR3 for beta chain variable domain of TCR clone 317603 (TRBV28, TRBJ2-2)
CASSLATGMGDAGELFF

SEQ ID NO: 635207 - protein, 16 aa, Homo sapiens
  CDR3 for alpha chain variable domain of TCR clone 317604 (TRAV8-4, TRAJ45)
CAVSPQGGGGADGLTF

SEQ ID NO: 635208 - protein, 14 aa, Homo sapiens
  CDR3 for beta chain variable domain of TCR clone 317604 (TRBV7-2, TRBJ2-7)
CASSPKTSFYEQYF

SEQ ID NO: 635209 - protein, 13 aa, Homo sapiens
  CDR3 for alpha chain variable domain of TCR clone 317605 (TRAV13-2, TRAJ48)
WAEMDFGNEKLTF

SEQ ID NO: 635210 - protein, 13 aa, Homo sapiens
  CDR3 for beta chain variable domain of TCR clone 317605 (TRBV13, TRBJ2-5)
CASSPEVGETQYF

SEQ ID NO: 635211 - protein, 16 aa, Homo sapiens
  CDR3 for alpha chain variable domain of TCR clone 317606 (TRAV12-1, TRAJ53)
CVVTSVAGGSNYKLTF

SEQ ID NO: 635212 - protein, 12 aa, Homo sapiens
  CDR3 for beta chain variable domain of TCR clone 317606 (TRBV7-9, TRBJ2-7)
CASSLEGYEQYF

SEQ ID NO: 635213 - protein, 15 aa, Homo sapiens
  CDR3 for alpha chain variable domain of TCR clone 317607 (TRAV3, TRAJ13)
CAVRVYPGGYQKVTF

SEQ ID NO: 635214 - protein, 15 aa, Homo sapiens
  CDR3 for beta chain variable domain of TCR clone 317607 (TRBV7-9, TRBJ1-6)
CASSSPGRGNSPLLF

SEQ ID NO: 635215 - protein, 12 aa, Homo sapiens
  CDR3 for alpha chain variable domain of TCR clone 317608 (TRAV12-3, TRAJ17)
CAMTLTGTKLTF

SEQ ID NO: 635216 - protein, 15 aa, Homo sapiens
  CDR3 for beta chain variable domain of TCR clone 317608 (TRBV6-4, TRBJ2-7)
CASSDQGPPNYEQYF

SEQ ID NO: 635217 - protein, 14 aa, Homo sapiens
  CDR3 for alpha chain variable domain of TCR clone 317609 (TRAV16, TRAJ22)
CALRGQGSARQLTF

SEQ ID NO: 635218 - protein, 14 aa, Homo sapiens
  CDR3 for beta chain variable domain of TCR clone 317609 (TRBV7-3, TRBJ2-2)
CASSSGGYTGELFF

SEQ ID NO: 635219 - protein, 12 aa, Homo sapiens
  CDR3 for alpha chain variable domain of TCR clone 317610 (TRAV16, TRAJ10)
CSRTGGGNKLTF

SEQ ID NO: 635220 - protein, 13 aa, Homo sapiens
  CDR3 for beta chain variable domain of TCR clone 317610 (TRBV24-1, TRBJ2-1)
CATSAGPYNEQFF

SEQ ID NO: 635221 - protein, 16 aa, Homo sapiens
  CDR3 for alpha chain variable domain of TCR clone 317611 (TRAV3, TRAJ37)
CAVRPHGSGKTGKLIF

SEQ ID NO: 635222 - protein, 17 aa, Homo sapiens
  CDR3 for beta chain variable domain of TCR clone 317611 (TRBV5-1, TRBJ2-5)
CASSPVALGQNQETQYF

SEQ ID NO: 635223 - protein, 17 aa, Homo sapiens
  CDR3 for alpha chain variable domain of TCR clone 317612 (TRAV3, TRAJ6)
CAVRDGPRAGGSYIPTF

SEQ ID NO: 635224 - protein, 12 aa, Homo sapiens
  CDR3 for beta chain variable domain of TCR clone 317612 (TRBV5-1, TRBJ2-5)
CASSLGLETQYF

SEQ ID NO: 635225 - protein, 14 aa, Homo sapiens
  CDR3 for alpha chain variable domain of TCR clone 317613 (TRAV12-2, TRAJ44)
CAVNPAGTASKLTF

SEQ ID NO: 635226 - protein, 14 aa, Homo sapiens
  CDR3 for beta chain variable domain of TCR clone 317613 (TRBV20-1, TRBJ2-4)
CSARDRGQGGIQYF

SEQ ID NO: 635227 - protein, 13 aa, Homo sapiens
  CDR3 for alpha chain variable domain of TCR clone 317614 (TRAV26-2, TRAJ43)
CILRAVNNNDIRF

SEQ ID NO: 635228 - protein, 14 aa, Homo sapiens
  CDR3 for beta chain variable domain of TCR clone 317614 (TRBV5-1, TRBJ1-2)
CASSLEPVNYGYTF

SEQ ID NO: 635229 - protein, 12 aa, Homo sapiens
  CDR3 for alpha chain variable domain of TCR clone 317615 (TRAV12-3, TRAJ17)
CAMTLTGNKLTF

SEQ ID NO: 635230 - protein, 12 aa, Homo sapiens
  CDR3 for beta chain variable domain of TCR clone 317615 (TRBV11-2, TRBJ2-1)
CASSLPTYEQYF

SEQ ID NO: 635231 - protein, 14 aa, Homo sapiens
  CDR3 for alpha chain variable domain of TCR clone 317616 (TRAV4, TRAJ26)
CLVGPHNDGQNFVF

SEQ ID NO: 635232 - protein, 17 aa, Homo sapiens
  CDR3 for beta chain variable domain of TCR clone 317616 (TRBV20-1, TRBJ2-1)
CSASSSGLAGSYNEQFL

SEQ ID NO: 635233 - protein, 11 aa, Homo sapiens
  CDR3 for alpha chain variable domain of TCR clone 317617 (TRAV23/DV6, TRAJ49)
CAVAPVTSSIL

SEQ ID NO: 635234 - protein, 14 aa, Homo sapiens
  CDR3 for beta chain variable domain of TCR clone 317617 (TRBV11-2, TRBJ1-2)
CASSLGTANYGYTF

SEQ ID NO: 635235 - protein, 14 aa, Homo sapiens
  CDR3 for alpha chain variable domain of TCR clone 317618 (TRAV1-2, TRAJ16)
FAVNRFSDGQKLLF

SEQ ID NO: 635236 - protein, 15 aa, Homo sapiens
  CDR3 for beta chain variable domain of TCR clone 317618 (TRBV6-3, TRBJ2-7)
CASSSPGTVFYEQYF

SEQ ID NO: 635237 - protein, 14 aa, Homo sapiens
  CDR3 for alpha chain variable domain of TCR clone 317619 (TRAV36/DV7, TRAJ53)
CAVVDGGSKYKLTF

SEQ ID NO: 635238 - protein, 14 aa, Homo sapiens
  CDR3 for beta chain variable domain of TCR clone 317619 (TRBV19, TRBJ2-1)
CASPTFVLSGEQFF

SEQ ID NO: 635239 - protein, 15 aa, Homo sapiens
  CDR3 for alpha chain variable domain of TCR clone 317620 (TRAV1-2, TRAJ39)
RAVEGVDNAGNMLTF

SEQ ID NO: 635240 - protein, 13 aa, Homo sapiens
  CDR3 for beta chain variable domain of TCR clone 317620 (TRBV27, TRBJ1-6)
CASRWTGYSPLHF

SEQ ID NO: 635241 - protein, 19 aa, Homo sapiens
  CDR3 for alpha chain variable domain of TCR clone 317621 (TRAV26-1, TRAJ52)
CIVRAHRNAGGTSYGKLTF

SEQ ID NO: 635242 - protein, 15 aa, Homo sapiens
  CDR3 for beta chain variable domain of TCR clone 317621 (TRBV2, TRBJ2-7)
CASTLLGSGATEQYF

SEQ ID NO: 635243 - protein, 16 aa, Homo sapiens
  CDR3 for alpha chain variable domain of TCR clone 317622 (TRAV30, TRAJ24)
CGTEIVDADSWGKFQF

SEQ ID NO: 635244 - protein, 15 aa, Homo sapiens
  CDR3 for beta chain variable domain of TCR clone 317622 (TRBV18, TRBJ2-1)
CASLPDRGRDNEQFV

SEQ ID NO: 635245 - protein, 16 aa, Homo sapiens
  CDR3 for alpha chain variable domain of TCR clone 317623 (TRAV4, TRAJ18)
CCVLLIGGSTLGRLYF

SEQ ID NO: 635246 - protein, 12 aa, Homo sapiens
  CDR3 for beta chain variable domain of TCR clone 317623 (TRBV6-3, TRBJ2-7)
CTSSLTPYEQYF

SEQ ID NO: 635247 - protein, 13 aa, Homo sapiens
  CDR3 for alpha chain variable domain of TCR clone 317624 (TRAV36/DV7, TRAJ48)
CAVPNFGNEKLTF

SEQ ID NO: 635248 - protein, 16 aa, Homo sapiens
  CDR3 for beta chain variable domain of TCR clone 317624 (TRBV5-1, TRBJ2-3)
CASSLQGRVGADTQYF

SEQ ID NO: 635249 - protein, 18 aa, Homo sapiens
  CDR3 for alpha chain variable domain of TCR clone 317625 (TRAV26-2, TRAJ54)
CILRDVEVGIQGAQKLIF

SEQ ID NO: 635250 - protein, 16 aa, Homo sapiens
  CDR3 for beta chain variable domain of TCR clone 317625 (TRBV6-1, TRBJ2-5)
CASSETLDRGAETQYF

SEQ ID NO: 635251 - protein, 16 aa, Homo sapiens
  CDR3 for alpha chain variable domain of TCR clone 317626 (TRAV30, TRAJ24)
CGTEMVDADSWGKFQF

SEQ ID NO: 635252 - protein, 17 aa, Homo sapiens
  CDR3 for beta chain variable domain of TCR clone 317626 (TRBV3-1, TRBJ2-6)
CASSPSTGPAGANVLTF

SEQ ID NO: 635253 - protein, 17 aa, Homo sapiens
  CDR3 for alpha chain variable domain of TCR clone 317627 (TRAV3, TRAJ6)
CAVRDGPRAGGSYIPTF

SEQ ID NO: 635254 - protein, 13 aa, Homo sapiens
  CDR3 for beta chain variable domain of TCR clone 317627 (TRBV20-1, TRBJ1-5)
CSARARGLHTQHF

SEQ ID NO: 635255 - protein, 17 aa, Homo sapiens
  CDR3 for alpha chain variable domain of TCR clone 317628 (TRAV3, TRAJ6)
CAVRDGPGAGGSYIPTF

SEQ ID NO: 635256 - protein, 18 aa, Homo sapiens
  CDR3 for beta chain variable domain of TCR clone 317628 (TRBV7-9, TRBJ2-7)
CASSLTTSGSRTWYEQYF

SEQ ID NO: 635257 - protein, 11 aa, Homo sapiens
  CDR3 for alpha chain variable domain of TCR clone 317629 (TRAV2, TRAJ13)
CASGGYQKVTF

SEQ ID NO: 635258 - protein, 12 aa, Homo sapiens
  CDR3 for beta chain variable domain of TCR clone 317629 (TRBV11-2, TRBJ2-2)
CASSLVGGELFF

SEQ ID NO: 635259 - protein, 15 aa, Homo sapiens
  CDR3 for alpha chain variable domain of TCR clone 317630 (TRAV12-1, TRAJ44)
CVADLPTGTASKLTF

SEQ ID NO: 635260 - protein, 13 aa, Homo sapiens
  CDR3 for beta chain variable domain of TCR clone 317630 (TRBV7-9, TRBJ1-2)
CASSLKQNYGYTV

SEQ ID NO: 635261 - protein, 12 aa, Homo sapiens
  CDR3 for alpha chain variable domain of TCR clone 317631 (TRAV17, TRAJ4)
CATDGGYNKLIF

SEQ ID NO: 635262 - protein, 20 aa, Homo sapiens
  CDR3 for beta chain variable domain of TCR clone 317631 (TRBV7-8, TRBJ2-2)
CASSHLFPGPTIHITGELFF

SEQ ID NO: 635263 - protein, 13 aa, Homo sapiens
  CDR3 for alpha chain variable domain of TCR clone 317632 (TRAV12-3, TRAJ33)
CAMSVNSNYQLIW

SEQ ID NO: 635264 - protein, 15 aa, Homo sapiens
  CDR3 for beta chain variable domain of TCR clone 317632 (TRBV7-2, TRBJ2-3)
CASSLAGAFIDTQYF

SEQ ID NO: 635265 - protein, 14 aa, Homo sapiens
  CDR3 for alpha chain variable domain of TCR clone 317633 (TRAV17, TRAJ57)
CATDPQGGSEKLVF

SEQ ID NO: 635266 - protein, 15 aa, Homo sapiens
  CDR3 for beta chain variable domain of TCR clone 317633 (TRBV28, TRBJ2-5)
CASSPGQGSIETQYF

SEQ ID NO: 635267 - protein, 15 aa, Homo sapiens
  CDR3 for alpha chain variable domain of TCR clone 317634 (TRAV23/DV6, TRAJ18)
CAARDRGSTLGMLYF

SEQ ID NO: 635268 - protein, 13 aa, Homo sapiens
  CDR3 for beta chain variable domain of TCR clone 317634 (TRBV7-2, TRBJ2-7)
CASSSPSGSEQYF

SEQ ID NO: 635269 - protein, 15 aa, Homo sapiens
  CDR3 for alpha chain variable domain of TCR clone 317635 (TRAV3, TRAJ32)
CAVSSYGGATTKLIL

SEQ ID NO: 635270 - protein, 13 aa, Homo sapiens
  CDR3 for beta chain variable domain of TCR clone 317635 (TRBV20-1, TRBJ2-7)
CSARPSTNYEQYF

SEQ ID NO: 635271 - protein, 10 aa, Homo sapiens
  CDR3 for alpha chain variable domain of TCR clone 317636 (TRAV23/DV6, TRAJ57)
CAASPSLSQG

SEQ ID NO: 635272 - protein, 14 aa, Homo sapiens
  CDR3 for beta chain variable domain of TCR clone 317636 (TRBV25-1, TRBJ1-1)
CASTHLGGNTEAFF

SEQ ID NO: 635273 - protein, 15 aa, Homo sapiens
  CDR3 for alpha chain variable domain of TCR clone 317637 (TRAV29/DV5, TRAJ48)
FAPSLGGFGNEKLTF

SEQ ID NO: 635274 - protein, 11 aa, Homo sapiens
  CDR3 for beta chain variable domain of TCR clone 317637 (TRBV20-1, TRBJ2-3)
CSGTSSTTQYF

SEQ ID NO: 635275 - protein, 13 aa, Homo sapiens
  CDR3 for alpha chain variable domain of TCR clone 317638 (TRAV25, TRAJ10)
CAGRTGGGNKLTF

SEQ ID NO: 635276 - protein, 11 aa, Homo sapiens
  CDR3 for beta chain variable domain of TCR clone 317638 (TRBV5-1, TRBJ2-1)
CASSIGQEQFF

SEQ ID NO: 635277 - protein, 13 aa, Homo sapiens
  CDR3 for alpha chain variable domain of TCR clone 317639 (TRAV36/DV7, TRAJ37)
CAVFSSNTGKLIF

SEQ ID NO: 635278 - protein, 15 aa, Homo sapiens
  CDR3 for beta chain variable domain of TCR clone 317639 (TRBV12-4, TRBJ2-5)
CHHFFVRGRQETQYF

SEQ ID NO: 635279 - protein, 14 aa, Homo sapiens
  CDR3 for alpha chain variable domain of TCR clone 317640 (TRAV12-1, TRAJ17)
CVVNYIAAGNKLTF

SEQ ID NO: 635280 - protein, 14 aa, Homo sapiens
  CDR3 for beta chain variable domain of TCR clone 317640 (TRBV7-2, TRBJ2-7)
CASRSQGAAYEQYF

SEQ ID NO: 635281 - protein, 10 aa, Homo sapiens
  CDR3 for alpha chain variable domain of TCR clone 317641 (TRAV27, TRAJ37)
CAGGVGKRIF

SEQ ID NO: 635282 - protein, 13 aa, Homo sapiens
  CDR3 for beta chain variable domain of TCR clone 317641 (TRBV27, TRBJ1-2)
CASSRGLVYGYTF

SEQ ID NO: 635283 - protein, 14 aa, Homo sapiens
  CDR3 for alpha chain variable domain of TCR clone 317642 (TRAV26-1, TRAJ26)
CIVRATFLGQNSVF

SEQ ID NO: 635284 - protein, 16 aa, Homo sapiens
  CDR3 for beta chain variable domain of TCR clone 317642 (TRBV12-4, TRBJ2-7)
CASRSTGTGPSYEQYF

SEQ ID NO: 635285 - protein, 15 aa, Homo sapiens
  CDR3 for alpha chain variable domain of TCR clone 317643 (TRAV12-1, TRAJ44)
CVADLPTGTASKLTF

SEQ ID NO: 635286 - protein, 15 aa, Homo sapiens
  CDR3 for beta chain variable domain of TCR clone 317643 (TRBV27, TRBJ2-1)
CASSNGGGSSNEQFF

SEQ ID NO: 635287 - protein, 14 aa, Homo sapiens
  CDR3 for alpha chain variable domain of TCR clone 317644 (TRAV12-2, TRAJ5)
CAVNRSTGRRALTF

SEQ ID NO: 635288 - protein, 16 aa, Homo sapiens
  CDR3 for beta chain variable domain of TCR clone 317644 (TRBV20-1, TRBJ1-1)
CSARALTQGMNTEAFF

SEQ ID NO: 635289 - protein, 11 aa, Homo sapiens
  CDR3 for alpha chain variable domain of TCR clone 317645 (TRAV12-2, TRAJ39)
CAVNNMLTFGG

SEQ ID NO: 635290 - protein, 14 aa, Homo sapiens
  CDR3 for beta chain variable domain of TCR clone 317645 (TRBV7-3, TRBJ2-1)
CASSLAGGTNEQFF

SEQ ID NO: 635291 - protein, 14 aa, Homo sapiens
  CDR3 for alpha chain variable domain of TCR clone 317646 (TRAV3, TRAJ36)
CAVRDGTGANKLFF

SEQ ID NO: 635292 - protein, 16 aa, Homo sapiens
  CDR3 for beta chain variable domain of TCR clone 317646 (TRBV7-3, TRBJ2-5)
CASIQPGGSVQETQYF

SEQ ID NO: 635293 - protein, 13 aa, Homo sapiens
  CDR3 for alpha chain variable domain of TCR clone 317647 (TRAV20, TRAJ20)
CAVRWVRDYKLSF

SEQ ID NO: 635294 - protein, 14 aa, Homo sapiens
  CDR3 for beta chain variable domain of TCR clone 317647 (TRBV19, TRBJ2-2)
CASTVTANTGELFC

SEQ ID NO: 635295 - protein, 14 aa, Homo sapiens
  CDR3 for alpha chain variable domain of TCR clone 317648 (TRAV12-2, TRAJ17)
CAVLFKAAGNKLTF

SEQ ID NO: 635296 - protein, 15 aa, Homo sapiens
  CDR3 for beta chain variable domain of TCR clone 317648 (TRBV5-1, TRBJ2-1)
CASGPPRAPYNEQFF

SEQ ID NO: 635297 - protein, 13 aa, Homo sapiens
  CDR3 for alpha chain variable domain of TCR clone 317649 (TRAV1-2, TRAJ9)
CAVLNTGGFKTIF

SEQ ID NO: 635298 - protein, 15 aa, Homo sapiens
  CDR3 for beta chain variable domain of TCR clone 317649 (TRBV5-5, TRBJ1-5)
CASSSTPGSNQPQHF

SEQ ID NO: 635299 - protein, 15 aa, Homo sapiens
  CDR3 for alpha chain variable domain of TCR clone 317650 (TRAV8-3, TRAJ44)
CAVGAGASTASKLTF

SEQ ID NO: 635300 - protein, 12 aa, Homo sapiens
  CDR3 for beta chain variable domain of TCR clone 317650 (TRBV7-8, TRBJ2-4)
CASSLGGTIQYF

SEQ ID NO: 635301 - protein, 10 aa, Homo sapiens
  CDR3 for alpha chain variable domain of TCR clone 317651 (TRAV12-3, TRAJ34)
CAMSADKLVF

SEQ ID NO: 635302 - protein, 15 aa, Homo sapiens
  CDR3 for beta chain variable domain of TCR clone 317651 (TRBV27, TRBJ2-1)
CASSNGGGSSNEQFF

SEQ ID NO: 635303 - protein, 12 aa, Homo sapiens
  CDR3 for alpha chain variable domain of TCR clone 317652 (TRAV17, TRAJ57)
CATDGGSEKLVF

SEQ ID NO: 635304 - protein, 13 aa, Homo sapiens
  CDR3 for beta chain variable domain of TCR clone 317652 (TRBV7-9, TRBJ2-7)
CASSFAAAYEQYF

SEQ ID NO: 635305 - protein, 17 aa, Homo sapiens
  CDR3 for alpha chain variable domain of TCR clone 317653 (TRAV12-3, TRAJ26)
CAMSGGRWDNYGQNFVF

SEQ ID NO: 635306 - protein, 12 aa, Homo sapiens
  CDR3 for beta chain variable domain of TCR clone 317653 (TRBV19, TRBJ1-1)
CASSTTGIGAFF

SEQ ID NO: 635307 - protein, 17 aa, Homo sapiens
  CDR3 for alpha chain variable domain of TCR clone 317654 (TRAV35, TRAJ52)
CAGQLAAGGTSYGKLTF

SEQ ID NO: 635308 - protein, 12 aa, Homo sapiens
  CDR3 for beta chain variable domain of TCR clone 317654 (TRBV20-1, TRBJ2-7)
CSAGRCQSEQYF

SEQ ID NO: 635309 - protein, 15 aa, Homo sapiens
  CDR3 for alpha chain variable domain of TCR clone 317655 (TRAV3, TRAJ24)
CAVRDKMTAGGNGSL

SEQ ID NO: 635310 - protein, 14 aa, Homo sapiens
  CDR3 for beta chain variable domain of TCR clone 317655 (TRBV7-2, TRBJ2-3)
RASSQTGSSYTQYF

SEQ ID NO: 635311 - protein, 18 aa, Homo sapiens
  CDR3 for alpha chain variable domain of TCR clone 317656 (TRAV12-3, TRAJ52)
CAMSVGGAGGTSYGKLTF

SEQ ID NO: 635312 - protein, 15 aa, Homo sapiens
  CDR3 for beta chain variable domain of TCR clone 317656 (TRBV11-1, TRBJ2-2)
CASSYFSTGTGELFF

SEQ ID NO: 635313 - protein, 14 aa, Homo sapiens
  CDR3 for alpha chain variable domain of TCR clone 317657 (TRAV1-2, TRAJ16)
CAVNRFSDGQKLLF

SEQ ID NO: 635314 - protein, 18 aa, Homo sapiens
  CDR3 for beta chain variable domain of TCR clone 317657 (TRBV20-1, TRBJ2-6)
CSAETTPTHGCGANVLTF

SEQ ID NO: 635315 - protein, 13 aa, Homo sapiens
  CDR3 for alpha chain variable domain of TCR clone 317658 (TRAV1-1, TRAJ12)
CAVSMDSSYKLIF

SEQ ID NO: 635316 - protein, 14 aa, Homo sapiens
  CDR3 for beta chain variable domain of TCR clone 317658 (TRBV19, TRBJ2-1)
CASSSGRDYNEQFF

SEQ ID NO: 635317 - protein, 15 aa, Homo sapiens
  CDR3 for alpha chain variable domain of TCR clone 317659 (TRAV38-2/DV8, TRAJ57)
CAYKSGLGGSEKLVF

SEQ ID NO: 635318 - protein, 16 aa, Homo sapiens
  CDR3 for beta chain variable domain of TCR clone 317659 (TRBV28, TRBJ1-5)
FASSFRGGYSNQPQHF

SEQ ID NO: 635319 - protein, 16 aa, Homo sapiens
  CDR3 for alpha chain variable domain of TCR clone 317660 (TRAV20, TRAJ53)
CALQGNSGGSNYKLTF

SEQ ID NO: 635320 - protein, 16 aa, Homo sapiens
  CDR3 for beta chain variable domain of TCR clone 317660 (TRBV29-1, TRBJ2-6)
CSVEDITYSGANVLTF

SEQ ID NO: 635321 - protein, 16 aa, Homo sapiens
  CDR3 for alpha chain variable domain of TCR clone 317661 (TRAV12-1, TRAJ42)
CVVTPYYGGSQGYLIF

SEQ ID NO: 635322 - protein, 15 aa, Homo sapiens
  CDR3 for beta chain variable domain of TCR clone 317661 (TRBV4-3, TRBJ2-7)
CASSQGGRGIYEQYF

SEQ ID NO: 635323 - protein, 12 aa, Homo sapiens
  CDR3 for alpha chain variable domain of TCR clone 317662 (TRAV30, TRAJ43)
CGTEERGNDMRF

SEQ ID NO: 635324 - protein, 14 aa, Homo sapiens
  CDR3 for beta chain variable domain of TCR clone 317662 (TRBV5-1, TRBJ2-7)
CASSRGESLYEQYF

SEQ ID NO: 635325 - protein, 17 aa, Homo sapiens
  CDR3 for alpha chain variable domain of TCR clone 317663 (TRAV4, TRAJ13)
CLVGVQGSSRGYQKVTF

SEQ ID NO: 635326 - protein, 16 aa, Homo sapiens
  CDR3 for beta chain variable domain of TCR clone 317663 (TRBV28, TRBJ2-7)
CASSLFFETGGPEQDF

SEQ ID NO: 635327 - protein, 18 aa, Homo sapiens
  CDR3 for alpha chain variable domain of TCR clone 317664 (TRAV13-1, TRAJ52)
CAAKNPNAGGTSYGKLTF

SEQ ID NO: 635328 - protein, 15 aa, Homo sapiens
  CDR3 for beta chain variable domain of TCR clone 317664 (TRBV6-1, TRBJ2-3)
CASSERGGSTETQYF

SEQ ID NO: 635329 - protein, 14 aa, Homo sapiens
  CDR3 for alpha chain variable domain of TCR clone 317665 (TRAV29/DV5, TRAJ45)
CAASFRGGADGLTF

SEQ ID NO: 635330 - protein, 14 aa, Homo sapiens
  CDR3 for beta chain variable domain of TCR clone 317665 (TRBV12-4, TRBJ1-6)
CASRPDGYNSPLHF

SEQ ID NO: 635331 - protein, 15 aa, Homo sapiens
  CDR3 for alpha chain variable domain of TCR clone 317666 (TRAV23/DV6, TRAJ18)
CAARYRGSTLGRLYF

SEQ ID NO: 635332 - protein, 13 aa, Homo sapiens
  CDR3 for beta chain variable domain of TCR clone 317666 (TRBV7-2, TRBJ2-7)
CASSSPSGSEQCF

SEQ ID NO: 635333 - protein, 14 aa, Homo sapiens
  CDR3 for alpha chain variable domain of TCR clone 317667 (TRAV13-1, TRAJ35)
CAASKGGFGNVLHC

SEQ ID NO: 635334 - protein, 11 aa, Homo sapiens
  CDR3 for beta chain variable domain of TCR clone 317667 (TRBV27, TRBJ2-3)
CASSLGDTQYF

SEQ ID NO: 635335 - protein, 16 aa, Homo sapiens
  CDR3 for alpha chain variable domain of TCR clone 317668 (TRAV30, TRAJ24)
CGTEIVDADSWWKFQF

SEQ ID NO: 635336 - protein, 15 aa, Homo sapiens
  CDR3 for beta chain variable domain of TCR clone 317668 (TRBV5-1, TRBJ1-1)
CASSLAPRGNTEAFF

SEQ ID NO: 635337 - protein, 16 aa, Homo sapiens
  CDR3 for alpha chain variable domain of TCR clone 317669 (TRAV12-3, TRAJ53)
CAMSPGSGGSNYKLTF

SEQ ID NO: 635338 - protein, 15 aa, Homo sapiens
  CDR3 for beta chain variable domain of TCR clone 317669 (TRBV9, TRBJ2-1)
CASSLAGSSYNEQFF

SEQ ID NO: 635339 - protein, 15 aa, Homo sapiens
  CDR3 for alpha chain variable domain of TCR clone 317670 (TRAV8-6, TRAJ10)
CAVSDQAGGGNKLTF

SEQ ID NO: 635340 - protein, 13 aa, Homo sapiens
  CDR3 for beta chain variable domain of TCR clone 317670 (TRBV20-1, TRBJ1-1)
CSARGGGNTEAFF

SEQ ID NO: 635341 - protein, 14 aa, Homo sapiens
  CDR3 for alpha chain variable domain of TCR clone 317671 (TRAV12-2, TRAJ13)
CAVKKTGGYQKVTF

SEQ ID NO: 635342 - protein, 11 aa, Homo sapiens
  CDR3 for beta chain variable domain of TCR clone 317671 (TRBV4-1, TRBJ1-2)
CASSGRNGYTF

SEQ ID NO: 635343 - protein, 15 aa, Homo sapiens
  CDR3 for alpha chain variable domain of TCR clone 317672 (TRAV26-1, TRAJ29)
CVVRVEGSGNTPLVF

SEQ ID NO: 635344 - protein, 14 aa, Homo sapiens
  CDR3 for beta chain variable domain of TCR clone 317672 (TRBV18, TRBJ2-5)
CASSPGVAQETQYF

SEQ ID NO: 635345 - protein, 15 aa, Homo sapiens
  CDR3 for alpha chain variable domain of TCR clone 317673 (TRAV4, TRAJ39)
CLVGPNNNAGNILTF

SEQ ID NO: 635346 - protein, 16 aa, Homo sapiens
  CDR3 for beta chain variable domain of TCR clone 317673 (TRBV13, TRBJ2-2)
CASSTRTGEHTGELFF

SEQ ID NO: 635347 - protein, 13 aa, Homo sapiens
  CDR3 for alpha chain variable domain of TCR clone 317674 (TRAV3, TRAJ20)
CCEAFCNDYKLSF

SEQ ID NO: 635348 - protein, 18 aa, Homo sapiens
  CDR3 for beta chain variable domain of TCR clone 317674 (TRBV18, TRBJ1-3)
CASSPRGGAGPSGNTIYF

SEQ ID NO: 635349 - protein, 14 aa, Homo sapiens
  CDR3 for alpha chain variable domain of TCR clone 317675 (TRAV9-2, TRAJ48)
FALSSNFGNEKLTF

SEQ ID NO: 635350 - protein, 13 aa, Homo sapiens
  CDR3 for beta chain variable domain of TCR clone 317675 (TRBV7-2, TRBJ2-4)
CASSREHANIQYF

SEQ ID NO: 635351 - protein, 13 aa, Homo sapiens
  CDR3 for alpha chain variable domain of TCR clone 317676 (TRAV36/DV7, TRAJ37)
FAVFSSNTGKLIF

SEQ ID NO: 635352 - protein, 15 aa, Homo sapiens
  CDR3 for beta chain variable domain of TCR clone 317676 (TRBV20-1, TRBJ1-1)
CSARDPRGEYTEAFF

SEQ ID NO: 635353 - protein, 13 aa, Homo sapiens
  CDR3 for alpha chain variable domain of TCR clone 317677 (TRAV21, TRAJ27)
CAARPGNAGKSTF

SEQ ID NO: 635354 - protein, 13 aa, Homo sapiens
  CDR3 for beta chain variable domain of TCR clone 317677 (TRBV27, TRBJ2-3)
CASSLSQGDTQYF

SEQ ID NO: 635355 - protein, 13 aa, Homo sapiens
  CDR3 for alpha chain variable domain of TCR clone 317678 (TRAV38-2/DV8, TRAJ29)
CAYRTPGNTPLVF

SEQ ID NO: 635356 - protein, 13 aa, Homo sapiens
  CDR3 for beta chain variable domain of TCR clone 317678 (TRBV7-2, TRBJ1-6)
CASSLKFDSPLHF

SEQ ID NO: 635357 - protein, 15 aa, Homo sapiens
  CDR3 for alpha chain variable domain of TCR clone 317679 (TRAV8-6, TRAJ9)
CAVSDRGTGGFKTIF

SEQ ID NO: 635358 - protein, 16 aa, Homo sapiens
  CDR3 for beta chain variable domain of TCR clone 317679 (TRBV19, TRBJ2-3)
CASSPEWDRGTDTQYF

SEQ ID NO: 635359 - protein, 17 aa, Homo sapiens
  CDR3 for alpha chain variable domain of TCR clone 317680 (TRAV3, TRAJ4)
CAVRDIMFSGGYNQLIF

SEQ ID NO: 635360 - protein, 13 aa, Homo sapiens
  CDR3 for beta chain variable domain of TCR clone 317680 (TRBV28, TRBJ2-1)
CASSLIGRDEQFF

SEQ ID NO: 635361 - protein, 14 aa, Homo sapiens
  CDR3 for alpha chain variable domain of TCR clone 317681 (TRAV17, TRAJ11)
CAMDTSRGYSTLTF

SEQ ID NO: 635362 - protein, 13 aa, Homo sapiens
  CDR3 for beta chain variable domain of TCR clone 317681 (TRBV19, TRBJ2-5)
CASRDSRRETQYF

SEQ ID NO: 635363 - protein, 10 aa, Homo sapiens
  CDR3 for alpha chain variable domain of TCR clone 317682 (TRAV23/DV6, TRAJ43)
CAAAVAALEQ

SEQ ID NO: 635364 - protein, 16 aa, Homo sapiens
  CDR3 for beta chain variable domain of TCR clone 317682 (TRBV19, TRBJ2-1)
CASSKAGPSSYNEQFF

SEQ ID NO: 635365 - protein, 21 aa, Homo sapiens
  CDR3 for alpha chain variable domain of TCR clone 317683 (TRAV1-1, TRAJ6)
CLLLLRCERLERTGGSYIPTF

SEQ ID NO: 635366 - protein, 13 aa, Homo sapiens
  CDR3 for beta chain variable domain of TCR clone 317683 (TRBV10-2, TRBJ2-7)
CTSGASGGYEQYF

SEQ ID NO: 635367 - protein, 11 aa, Homo sapiens
  CDR3 for alpha chain variable domain of TCR clone 317684 (TRAV17, TRAJ9)
CGFTGGFKAIF

SEQ ID NO: 635368 - protein, 14 aa, Homo sapiens
  CDR3 for beta chain variable domain of TCR clone 317684 (TRBV7-9, TRBJ2-2)
CASSLVQDTGELLF

SEQ ID NO: 635369 - protein, 13 aa, Homo sapiens
  CDR3 for alpha chain variable domain of TCR clone 317685 (TRAV26-1, TRAJ33)
CIVRVDSNYQLIW

SEQ ID NO: 635370 - protein, 15 aa, Homo sapiens
  CDR3 for beta chain variable domain of TCR clone 317685 (TRBV7-2, TRBJ1-5)
CASSFSAGMNQPQHF

SEQ ID NO: 635371 - protein, 15 aa, Homo sapiens
  CDR3 for alpha chain variable domain of TCR clone 317686 (TRAV3, TRAJ10)
CAVRDGTGGGNKHTF

SEQ ID NO: 635372 - protein, 15 aa, Homo sapiens
  CDR3 for beta chain variable domain of TCR clone 317686 (TRBV4-2, TRBJ1-4)
CASSLVQREVEKLFC

SEQ ID NO: 635373 - protein, 14 aa, Homo sapiens
  CDR3 for alpha chain variable domain of TCR clone 317687 (TRAV17, TRAJ22)
CATSPSGSARQLTF

SEQ ID NO: 635374 - protein, 15 aa, Homo sapiens
  CDR3 for beta chain variable domain of TCR clone 317687 (TRBV19, TRBJ2-1)
CASSRPGQNYNEQFF

SEQ ID NO: 635375 - protein, 14 aa, Homo sapiens
  CDR3 for alpha chain variable domain of TCR clone 317688 (TRAV8-2, TRAJ4)
CVVSPSGCYNKLIL

SEQ ID NO: 635376 - protein, 15 aa, Homo sapiens
  CDR3 for beta chain variable domain of TCR clone 317688 (TRBV4-1, TRBJ1-4)
CASSDTGGTNEKLFF

SEQ ID NO: 635377 - protein, 13 aa, Homo sapiens
  CDR3 for alpha chain variable domain of TCR clone 317689 (TRAV13-1, TRAJ33)
CAASRAGNYQLIW

SEQ ID NO: 635378 - protein, 12 aa, Homo sapiens
  CDR3 for beta chain variable domain of TCR clone 317689 (TRBV11-2, TRBJ1-2)
CASSRGGDGYTF

SEQ ID NO: 635379 - protein, 13 aa, Homo sapiens
  CDR3 for alpha chain variable domain of TCR clone 317690 (TRAV21, TRAJ57)
CAVTQGGSEKLVF

SEQ ID NO: 635380 - protein, 15 aa, Homo sapiens
  CDR3 for beta chain variable domain of TCR clone 317690 (TRBV5-1, TRBJ1-1)
CASSSTTGMNTEAFF

SEQ ID NO: 635381 - protein, 13 aa, Homo sapiens
  CDR3 for alpha chain variable domain of TCR clone 317691 (TRAV21, TRAJ27)
CAARPGNAGKSTF

SEQ ID NO: 635382 - protein, 18 aa, Homo sapiens
  CDR3 for beta chain variable domain of TCR clone 317691 (TRBV7-2, TRBJ2-2)
CASSLASRGAGGPGELFF

SEQ ID NO: 635383 - protein, 12 aa, Homo sapiens
  CDR3 for alpha chain variable domain of TCR clone 317692 (TRAV3, TRAJ20)
CAVRDGDYKLSF

SEQ ID NO: 635384 - protein, 14 aa, Homo sapiens
  CDR3 for beta chain variable domain of TCR clone 317692 (TRBV7-6, TRBJ2-3)
CASSLGTVTDTQYF

SEQ ID NO: 635385 - protein, 12 aa, Homo sapiens
  CDR3 for alpha chain variable domain of TCR clone 317693 (TRAV2, TRAJ9)
CAVGAGGFKTIF

SEQ ID NO: 635386 - protein, 15 aa, Homo sapiens
  CDR3 for beta chain variable domain of TCR clone 317693 (TRBV6-6, TRBJ2-5)
CASSPGGGLEETQYF

SEQ ID NO: 635387 - protein, 16 aa, Homo sapiens
  CDR3 for alpha chain variable domain of TCR clone 317694 (TRAV27, TRAJ52)
CAGAPAGGTSYGKLTF

SEQ ID NO: 635388 - protein, 12 aa, Homo sapiens
  CDR3 for beta chain variable domain of TCR clone 317694 (TRBV27, TRBJ2-1)
CASRGFYNEQFS

SEQ ID NO: 635389 - protein, 13 aa, Homo sapiens
  CDR3 for alpha chain variable domain of TCR clone 317695 (TRAV3, TRAJ20)
CAVRSLNDYKLSF

SEQ ID NO: 635390 - protein, 16 aa, Homo sapiens
  CDR3 for beta chain variable domain of TCR clone 317695 (TRBV19, TRBJ2-1)
CASSKAGPSSYNEQFF

SEQ ID NO: 635391 - protein, 16 aa, Homo sapiens
  CDR3 for alpha chain variable domain of TCR clone 317696 (TRAV12-2, TRAJ28)
CAVITDSGAGSYQLTF

SEQ ID NO: 635392 - protein, 15 aa, Homo sapiens
  CDR3 for beta chain variable domain of TCR clone 317696 (TRBV19, TRBJ2-3)
CAAGDTNAPNDTQYF

SEQ ID NO: 635393 - protein, 14 aa, Homo sapiens
  CDR3 for alpha chain variable domain of TCR clone 317697 (TRAV1-2, TRAJ16)
FAVNRFSDGQKRLF

SEQ ID NO: 635394 - protein, 15 aa, Homo sapiens
  CDR3 for beta chain variable domain of TCR clone 317697 (TRBV7-9, TRBJ1-6)
CASSSPGRGNSPLHF

SEQ ID NO: 635395 - protein, 13 aa, Homo sapiens
  CDR3 for alpha chain variable domain of TCR clone 317698 (TRAV13-2, TRAJ48)
CAEMDFGNEKLTF

SEQ ID NO: 635396 - protein, 14 aa, Homo sapiens
  CDR3 for beta chain variable domain of TCR clone 317698 (TRBV12-5, TRBJ2-5)
CASCSRTHQETQYF

SEQ ID NO: 635397 - protein, 13 aa, Homo sapiens
  CDR3 for alpha chain variable domain of TCR clone 317699 (TRAV21, TRAJ20)
CAVGLRVDYNLSF

SEQ ID NO: 635398 - protein, 18 aa, Homo sapiens
  CDR3 for beta chain variable domain of TCR clone 317699 (TRBV7-6, TRBJ2-1)
CASSPRTSGMSSYNEQFF

SEQ ID NO: 635399 - protein, 16 aa, Homo sapiens
  CDR3 for alpha chain variable domain of TCR clone 317700 (TRAV17, TRAJ53)
CATDALSGGSNYKLTF

SEQ ID NO: 635400 - protein, 16 aa, Homo sapiens
  CDR3 for beta chain variable domain of TCR clone 317700 (TRBV2, TRBJ2-1)
FASSVGGSLSYNEQFF

SEQ ID NO: 635401 - protein, 15 aa, Homo sapiens
  CDR3 for alpha chain variable domain of TCR clone 317701 (TRAV29/DV5, TRAJ24)
CAASGATDSWGKFQF

SEQ ID NO: 635402 - protein, 15 aa, Homo sapiens
  CDR3 for beta chain variable domain of TCR clone 317701 (TRBV11-3, TRBJ2-1)
CASSSGGTVADEQFF

SEQ ID NO: 635403 - protein, 14 aa, Homo sapiens
  CDR3 for alpha chain variable domain of TCR clone 317702 (TRAV12-3, TRAJ9)
CAMSPNTGGFKTIF

SEQ ID NO: 635404 - protein, 12 aa, Homo sapiens
  CDR3 for beta chain variable domain of TCR clone 317702 (TRBV11-2, TRBJ2-1)
CASSPGNNEQFF

SEQ ID NO: 635405 - protein, 18 aa, Homo sapiens
  CDR3 for alpha chain variable domain of TCR clone 317703 (TRAV8-4, TRAJ52)
CAVTRANAGGTSYEKLTF

SEQ ID NO: 635406 - protein, 20 aa, Homo sapiens
  CDR3 for beta chain variable domain of TCR clone 317703 (TRBV19, TRBJ2-1)
CASSISRTVTSTRLNNEQFF

SEQ ID NO: 635407 - protein, 14 aa, Homo sapiens
  CDR3 for alpha chain variable domain of TCR clone 317704 (TRAV1-2, TRAJ29)
YAVRELTSATPLVF

SEQ ID NO: 635408 - protein, 14 aa, Homo sapiens
  CDR3 for beta chain variable domain of TCR clone 317704 (TRBV3-1, TRBJ2-5)
CASSQGPDQETQYF

SEQ ID NO: 635409 - protein, 15 aa, Homo sapiens
  CDR3 for alpha chain variable domain of TCR clone 317705 (TRAV12-2, TRAJ8)
CAVREENTGFQKLVF

SEQ ID NO: 635410 - protein, 12 aa, Homo sapiens
  CDR3 for beta chain variable domain of TCR clone 317705 (TRBV5-1, TRBJ2-7)
CASSWDSYEQYF

SEQ ID NO: 635411 - protein, 14 aa, Homo sapiens
  CDR3 for alpha chain variable domain of TCR clone 317706 (TRAV3, TRAJ7)
CAVREEEREQQTRF

SEQ ID NO: 635412 - protein, 16 aa, Homo sapiens
  CDR3 for beta chain variable domain of TCR clone 317706 (TRBV7-9, TRBJ2-1)
CASSDVAGGSYNEQFF

SEQ ID NO: 635413 - protein, 14 aa, Homo sapiens
  CDR3 for alpha chain variable domain of TCR clone 317707 (TRAV12-2, TRAJ13)
CAVKKNGGYQKVTF

SEQ ID NO: 635414 - protein, 15 aa, Homo sapiens
  CDR3 for beta chain variable domain of TCR clone 317707 (TRBV9, TRBJ1-6)
CASSVAGTGDSPLHF

SEQ ID NO: 635415 - protein, 16 aa, Homo sapiens
  CDR3 for alpha chain variable domain of TCR clone 317708 (TRAV3, TRAJ37)
CAVRGKGSGNTGKLIF

SEQ ID NO: 635416 - protein, 16 aa, Homo sapiens
  CDR3 for beta chain variable domain of TCR clone 317708 (TRBV12-4, TRBJ1-5)
CASIRPVGGSNQPQHF

SEQ ID NO: 635417 - protein, 14 aa, Homo sapiens
  CDR3 for alpha chain variable domain of TCR clone 317709 (TRAV38-2/DV8, TRAJ23)
CAYRKPNQGGKLIF

SEQ ID NO: 635418 - protein, 15 aa, Homo sapiens
  CDR3 for beta chain variable domain of TCR clone 317709 (TRBV5-7, TRBJ1-5)
CASSYGKLWDQPQHF

SEQ ID NO: 635419 - protein, 16 aa, Homo sapiens
  CDR3 for alpha chain variable domain of TCR clone 317710 (TRAV22, TRAJ45)
CAVERGKRGGADGLTF

SEQ ID NO: 635420 - protein, 16 aa, Homo sapiens
  CDR3 for beta chain variable domain of TCR clone 317710 (TRBV7-3, TRBJ2-1)
CASSLEGYRSYNEQFF

SEQ ID NO: 635421 - protein, 14 aa, Homo sapiens
  CDR3 for alpha chain variable domain of TCR clone 317711 (TRAV8-3, TRAJ9)
CAVVYNTGGFKTIF

SEQ ID NO: 635422 - protein, 15 aa, Homo sapiens
  CDR3 for beta chain variable domain of TCR clone 317711 (TRBV13, TRBJ1-5)
CASSFGQGGVQPQHF

SEQ ID NO: 635423 - protein, 14 aa, Homo sapiens
  CDR3 for alpha chain variable domain of TCR clone 317712 (TRAV29/DV5, TRAJ36)
CAARRKTGANNLFF

SEQ ID NO: 635424 - protein, 12 aa, Homo sapiens
  CDR3 for beta chain variable domain of TCR clone 317712 (TRBV11-2, TRBJ2-5)
CASSLGQETQYF

SEQ ID NO: 635425 - protein, 14 aa, Homo sapiens
  CDR3 for alpha chain variable domain of TCR clone 317713 (TRAV12-2, TRAJ13)
CAVKNTGGYQKVTF

SEQ ID NO: 635426 - protein, 15 aa, Homo sapiens
  CDR3 for beta chain variable domain of TCR clone 317713 (TRBV28, TRBJ2-1)
CASSIIAGGRSEQFF

SEQ ID NO: 635427 - protein, 15 aa, Homo sapiens
  CDR3 for alpha chain variable domain of TCR clone 317714 (TRAV20, TRAJ53)
CAVQASGGSNYKLTF

SEQ ID NO: 635428 - protein, 12 aa, Homo sapiens
  CDR3 for beta chain variable domain of TCR clone 317714 (TRBV7-6, TRBJ2-5)
WASSLSQETQYF

SEQ ID NO: 635429 - protein, 11 aa, Homo sapiens
  CDR3 for alpha chain variable domain of TCR clone 317715 (TRAV13-1, TRAJ49)
CACVGGNQFSF

SEQ ID NO: 635430 - protein, 16 aa, Homo sapiens
  CDR3 for beta chain variable domain of TCR clone 317715 (TRBV11-2, TRBJ2-2)
CASSLRTGNLIGELFF

SEQ ID NO: 635431 - protein, 19 aa, Homo sapiens
  CDR3 for alpha chain variable domain of TCR clone 317716 (TRAV27, TRAJ53)
ASTSVQSRNGGGSNYKLTF

SEQ ID NO: 635432 - protein, 14 aa, Homo sapiens
  CDR3 for beta chain variable domain of TCR clone 317716 (TRBV11-1, TRBJ2-7)
CASTFAVPSYEQYF

SEQ ID NO: 635433 - protein, 11 aa, Homo sapiens
  CDR3 for alpha chain variable domain of TCR clone 317717 (TRAV1-1, TRAJ5)
CAVRVRRALTF

SEQ ID NO: 635434 - protein, 13 aa, Homo sapiens
  CDR3 for beta chain variable domain of TCR clone 317717 (TRBV15, TRBJ1-6)
CATSGGLNSPLHF

SEQ ID NO: 635435 - protein, 13 aa, Homo sapiens
  CDR3 for alpha chain variable domain of TCR clone 317718 (TRAV12-3, TRAJ33)
CAMSVNSNYQLIW

SEQ ID NO: 635436 - protein, 14 aa, Homo sapiens
  CDR3 for beta chain variable domain of TCR clone 317718 (TRBV28, TRBJ2-5)
CASSFRGPQETQYF

SEQ ID NO: 635437 - protein, 14 aa, Homo sapiens
  CDR3 for alpha chain variable domain of TCR clone 317719 (TRAV1-2, TRAJ8)
YAVREDTGFQKLVF

SEQ ID NO: 635438 - protein, 14 aa, Homo sapiens
  CDR3 for beta chain variable domain of TCR clone 317719 (TRBV29-1, TRBJ1-4)
CSVTGTGGNEKLFF

SEQ ID NO: 635439 - protein, 10 aa, Homo sapiens
  CDR3 for alpha chain variable domain of TCR clone 317720 (TRAV12-3, TRAJ49)
CAMNDDQFYF

SEQ ID NO: 635440 - protein, 13 aa, Homo sapiens
  CDR3 for beta chain variable domain of TCR clone 317720 (TRBV12-4, TRBJ1-1)
CASSPGTGFEAFF

SEQ ID NO: 635441 - protein, 14 aa, Homo sapiens
  CDR3 for alpha chain variable domain of TCR clone 317721 (TRAV1-2, TRAJ8)
CAGREDTGFQKLVF

SEQ ID NO: 635442 - protein, 13 aa, Homo sapiens
  CDR3 for beta chain variable domain of TCR clone 317721 (TRBV15, TRBJ2-7)
CATSTAGHYEQYF

SEQ ID NO: 635443 - protein, 12 aa, Homo sapiens
  CDR3 for alpha chain variable domain of TCR clone 317722 (TRAV27, TRAJ9)
CAGESGGFKTIF

SEQ ID NO: 635444 - protein, 13 aa, Homo sapiens
  CDR3 for beta chain variable domain of TCR clone 317722 (TRBV7-7, TRBJ1-1)
CASSLGANTEAFF

SEQ ID NO: 635445 - protein, 14 aa, Homo sapiens
  CDR3 for alpha chain variable domain of TCR clone 317723 (TRAV25, TRAJ22)
CAVISSGSARQLTF

SEQ ID NO: 635446 - protein, 16 aa, Homo sapiens
  CDR3 for beta chain variable domain of TCR clone 317723 (TRBV4-2, TRBJ1-1)
CASSPSPGRAAPEAFF

SEQ ID NO: 635447 - protein, 13 aa, Homo sapiens
  CDR3 for alpha chain variable domain of TCR clone 317724 (TRAV23/DV6, TRAJ10)
ASVHTGGGNKLTF

SEQ ID NO: 635448 - protein, 13 aa, Homo sapiens
  CDR3 for beta chain variable domain of TCR clone 317724 (TRBV11-1, TRBJ1-2)
CASVGSWGYGYTF

SEQ ID NO: 635449 - protein, 16 aa, Homo sapiens
  CDR3 for alpha chain variable domain of TCR clone 317725 (TRAV21, TRAJ17)
CAVRPGEEAAGNKLTF

SEQ ID NO: 635450 - protein, 16 aa, Homo sapiens
  CDR3 for beta chain variable domain of TCR clone 317725 (TRBV2, TRBJ2-7)
CASSEPWTGPSYEQCF

SEQ ID NO: 635451 - protein, 13 aa, Homo sapiens
  CDR3 for alpha chain variable domain of TCR clone 317726 (TRAV24, TRAJ23)
CAPHWNQGGKLIF

SEQ ID NO: 635452 - protein, 13 aa, Homo sapiens
  CDR3 for beta chain variable domain of TCR clone 317726 (TRBV18, TRBJ2-7)
CQLTERGAYEQYF

SEQ ID NO: 635453 - protein, 13 aa, Homo sapiens
  CDR3 for alpha chain variable domain of TCR clone 317727 (TRAV12-1, TRAJ34)
CVVTGYNTDKLIF

SEQ ID NO: 635454 - protein, 13 aa, Homo sapiens
  CDR3 for beta chain variable domain of TCR clone 317727 (TRBV7-3, TRBJ1-2)
CASSLKRGYGYTF

SEQ ID NO: 635455 - protein, 14 aa, Homo sapiens
  CDR3 for alpha chain variable domain of TCR clone 317728 (TRAV2, TRAJ37)
TTVPGSSNTGKLIF

SEQ ID NO: 635456 - protein, 13 aa, Homo sapiens
  CDR3 for beta chain variable domain of TCR clone 317728 (TRBV10-3, TRBJ2-7)
CASKLAVNYEQYF

SEQ ID NO: 635457 - protein, 14 aa, Homo sapiens
  CDR3 for alpha chain variable domain of TCR clone 317729 (TRAV12-1, TRAJ3)
CVVNPGSSASKIIF

SEQ ID NO: 635458 - protein, 18 aa, Homo sapiens
  CDR3 for beta chain variable domain of TCR clone 317729 (TRBV4-2, TRBJ1-2)
CASSQDKVGHTVNYGYNF

SEQ ID NO: 635459 - protein, 14 aa, Homo sapiens
  CDR3 for alpha chain variable domain of TCR clone 317730 (TRAV12-1, TRAJ30)
CVVNIGGRDDKIIF

SEQ ID NO: 635460 - protein, 13 aa, Homo sapiens
  CDR3 for beta chain variable domain of TCR clone 317730 (TRBV12-5, TRBJ2-1)
CDSGLGRGNEQFF

SEQ ID NO: 635461 - protein, 11 aa, Homo sapiens
  CDR3 for alpha chain variable domain of TCR clone 317731 (TRAV1-1, TRAJ23)
CAVRQGGKLIF

SEQ ID NO: 635462 - protein, 14 aa, Homo sapiens
  CDR3 for beta chain variable domain of TCR clone 317731 (TRBV11-2, TRBJ2-3)
CASRRLARTDTQYF

SEQ ID NO: 635463 - protein, 14 aa, Homo sapiens
  CDR3 for alpha chain variable domain of TCR clone 317732 (TRAV1-2, TRAJ16)
CAVNRFSDGQKRLF

SEQ ID NO: 635464 - protein, 16 aa, Homo sapiens
  CDR3 for beta chain variable domain of TCR clone 317732 (TRBV7-2, TRBJ2-7)
CASSLDLSGGAYEQYF

SEQ ID NO: 635465 - protein, 11 aa, Homo sapiens
  CDR3 for alpha chain variable domain of TCR clone 317733 (TRAV9-2, TRAJ11)
CVPAGYSPLTF

SEQ ID NO: 635466 - protein, 14 aa, Homo sapiens
  CDR3 for beta chain variable domain of TCR clone 317733 (TRBV2, TRBJ2-7)
CASSLTSGGYEQYF

SEQ ID NO: 635467 - protein, 16 aa, Homo sapiens
  CDR3 for alpha chain variable domain of TCR clone 317734 (TRAV12-1, TRAJ45)
CVVIRYSGGGADGLTF

SEQ ID NO: 635468 - protein, 12 aa, Homo sapiens
  CDR3 for beta chain variable domain of TCR clone 317734 (TRBV7-9, TRBJ2-7)
CASSIKREEQYF

SEQ ID NO: 635469 - protein, 16 aa, Homo sapiens
  CDR3 for alpha chain variable domain of TCR clone 317735 (TRAV3, TRAJ18)
CAVRDGRGSTLGRLYF

SEQ ID NO: 635470 - protein, 15 aa, Homo sapiens
  CDR3 for beta chain variable domain of TCR clone 317735 (TRBV7-9, TRBJ1-6)
CASSSPGRGNSPLQF

SEQ ID NO: 635471 - protein, 14 aa, Homo sapiens
  CDR3 for alpha chain variable domain of TCR clone 317736 (TRAV35, TRAJ22)
CAGLRPGSARQLTF

SEQ ID NO: 635472 - protein, 13 aa, Homo sapiens
  CDR3 for beta chain variable domain of TCR clone 317736 (TRBV20-1, TRBJ1-1)
CSARGGGNTEAVF

SEQ ID NO: 635473 - protein, 14 aa, Homo sapiens
  CDR3 for alpha chain variable domain of TCR clone 317737 (TRAV21, TRAJ23)
CAIMIYNQGGKLIF

SEQ ID NO: 635474 - protein, 18 aa, Homo sapiens
  CDR3 for beta chain variable domain of TCR clone 317737 (TRBV20-1, TRBJ2-6)
CSAETTRTHGSGANVLTF

SEQ ID NO: 635475 - protein, 10 aa, Homo sapiens
  CDR3 for alpha chain variable domain of TCR clone 317738 (TRAV13-1, TRAJ30)
CAARDDKIIF

SEQ ID NO: 635476 - protein, 15 aa, Homo sapiens
  CDR3 for beta chain variable domain of TCR clone 317738 (TRBV7-9, TRBJ1-2)
CASSLDREPNYGYSF

SEQ ID NO: 635477 - protein, 18 aa, Homo sapiens
  CDR3 for alpha chain variable domain of TCR clone 317739 (TRAV12-3, TRAJ52)
CAMSVGGAGGTSYGKLTF

SEQ ID NO: 635478 - protein, 14 aa, Homo sapiens
  CDR3 for beta chain variable domain of TCR clone 317739 (TRBV4-1, TRBJ2-5)
CASSQYRDQETQYF

SEQ ID NO: 635479 - protein, 11 aa, Homo sapiens
  CDR3 for alpha chain variable domain of TCR clone 317740 (TRAV21, TRAJ11)
CAVNGYSTLTF

SEQ ID NO: 635480 - protein, 16 aa, Homo sapiens
  CDR3 for beta chain variable domain of TCR clone 317740 (TRBV5-1, TRBJ2-2)
CASSSRTGGRTGELFF

SEQ ID NO: 635481 - protein, 13 aa, Homo sapiens
  CDR3 for alpha chain variable domain of TCR clone 317741 (TRAV12-2, TRAJ20)
CAVCPSNDYKLSF

SEQ ID NO: 635482 - protein, 14 aa, Homo sapiens
  CDR3 for beta chain variable domain of TCR clone 317741 (TRBV27, TRBJ2-5)
CQQFIPAGGETQYF

SEQ ID NO: 635483 - protein, 14 aa, Homo sapiens
  CDR3 for alpha chain variable domain of TCR clone 317742 (TRAV13-1, TRAJ35)
CAASKGGFGNVLHC

SEQ ID NO: 635484 - protein, 14 aa, Homo sapiens
  CDR3 for beta chain variable domain of TCR clone 317742 (TRBV7-6, TRBJ2-3)
CASSLGTVTDTQYF

SEQ ID NO: 635485 - protein, 13 aa, Homo sapiens
  CDR3 for alpha chain variable domain of TCR clone 317743 (TRAV13-1, TRAJ39)
CSKYSNAGNMLTF

SEQ ID NO: 635486 - protein, 16 aa, Homo sapiens
  CDR3 for beta chain variable domain of TCR clone 317743 (TRBV20-1, TRBJ1-4)
CSAPGQGLLANEELFF

SEQ ID NO: 635487 - protein, 14 aa, Homo sapiens
  CDR3 for alpha chain variable domain of TCR clone 317744 (TRAV17, TRAJ12)
CATDGVDSSYKLIF

SEQ ID NO: 635488 - protein, 14 aa, Homo sapiens
  CDR3 for beta chain variable domain of TCR clone 317744 (TRBV2, TRBJ2-1)
CASSEARQGVSEFF

SEQ ID NO: 635489 - protein, 11 aa, Homo sapiens
  CDR3 for alpha chain variable domain of TCR clone 317745 (TRAV21, TRAJ11)
CAGNGYSTLTF

SEQ ID NO: 635490 - protein, 15 aa, Homo sapiens
  CDR3 for beta chain variable domain of TCR clone 317745 (TRBV7-9, TRBJ1-6)
CASSSPGRGNSPLHF

SEQ ID NO: 635491 - protein, 14 aa, Homo sapiens
  CDR3 for alpha chain variable domain of TCR clone 317746 (TRAV17, TRAJ34)
CATVPTYNTDKLIF

SEQ ID NO: 635492 - protein, 14 aa, Homo sapiens
  CDR3 for beta chain variable domain of TCR clone 317746 (TRBV9, TRBJ2-7)
CASSVGVGSYEQYF

SEQ ID NO: 635493 - protein, 13 aa, Homo sapiens
  CDR3 for alpha chain variable domain of TCR clone 317747 (TRAV13-2, TRAJ8)
CAFMNTGFQKLVF

SEQ ID NO: 635494 - protein, 17 aa, Homo sapiens
  CDR3 for beta chain variable domain of TCR clone 317747 (TRBV28, TRBJ2-1)
CASSSARQALTHNEQFF

SEQ ID NO: 635495 - protein, 15 aa, Homo sapiens
  CDR3 for alpha chain variable domain of TCR clone 317748 (TRAV26-1, TRAJ24)
RIVPLTTDSWGKFQF

SEQ ID NO: 635496 - protein, 14 aa, Homo sapiens
  CDR3 for beta chain variable domain of TCR clone 317748 (TRBV10-3, TRBJ2-3)
CAISEKGLGDTQYF

SEQ ID NO: 635497 - protein, 13 aa, Homo sapiens
  CDR3 for alpha chain variable domain of TCR clone 317749 (TRAV35, TRAJ49)
CAGRLNTGNQFYF

SEQ ID NO: 635498 - protein, 16 aa, Homo sapiens
  CDR3 for beta chain variable domain of TCR clone 317749 (TRBV2, TRBJ2-1)
CASSVGGSLSYNEQFF

SEQ ID NO: 635499 - protein, 14 aa, Homo sapiens
  CDR3 for alpha chain variable domain of TCR clone 317750 (TRAV3, TRAJ27)
CAVRDDTNAGKSTF

SEQ ID NO: 635500 - protein, 13 aa, Homo sapiens
  CDR3 for beta chain variable domain of TCR clone 317750 (TRBV7-9, TRBJ1-2)
CASSLKQNYGYTF

SEQ ID NO: 635501 - protein, 15 aa, Homo sapiens
  CDR3 for alpha chain variable domain of TCR clone 317751 (TRAV12-3, TRAJ27)
CAMRAYNTNAGKSTF

SEQ ID NO: 635502 - protein, 13 aa, Homo sapiens
  CDR3 for beta chain variable domain of TCR clone 317751 (TRBV11-2, TRBJ2-5)
CASSRWPSETQYF

SEQ ID NO: 635503 - protein, 13 aa, Homo sapiens
  CDR3 for alpha chain variable domain of TCR clone 317752 (TRAV35, TRAJ44)
CSGLSGTAGKLTF

SEQ ID NO: 635504 - protein, 17 aa, Homo sapiens
  CDR3 for beta chain variable domain of TCR clone 317752 (TRBV7-8, TRBJ1-2)
CASSLRPLQGHLYGYTF

SEQ ID NO: 635505 - protein, 14 aa, Homo sapiens
  CDR3 for alpha chain variable domain of TCR clone 317753 (TRAV20, TRAJ20)
CAARRGYNDYKLSF

SEQ ID NO: 635506 - protein, 13 aa, Homo sapiens
  CDR3 for beta chain variable domain of TCR clone 317753 (TRBV19, TRBJ2-5)
CASSETAPETQYF

SEQ ID NO: 635507 - protein, 14 aa, Homo sapiens
  CDR3 for alpha chain variable domain of TCR clone 317754 (TRAV12-2, TRAJ24)
CAVTPADSWGKLQF

SEQ ID NO: 635508 - protein, 15 aa, Homo sapiens
  CDR3 for beta chain variable domain of TCR clone 317754 (TRBV6-4, TRBJ1-5)
CASSADLNQPRHLVM

SEQ ID NO: 635509 - protein, 11 aa, Homo sapiens
  CDR3 for alpha chain variable domain of TCR clone 317755 (TRAV3, TRAJ21)
CVVGNFTKFYF

SEQ ID NO: 635510 - protein, 16 aa, Homo sapiens
  CDR3 for beta chain variable domain of TCR clone 317755 (TRBV19, TRBJ2-1)
CASSKAGPSSYNEQFF

SEQ ID NO: 635511 - protein, 14 aa, Homo sapiens
  CDR3 for alpha chain variable domain of TCR clone 317756 (TRAV34, TRAJ44)
CGADGTGTASKLTF

SEQ ID NO: 635512 - protein, 12 aa, Homo sapiens
  CDR3 for beta chain variable domain of TCR clone 317756 (TRBV7-9, TRBJ2-7)
CASSLEGYEQYF

SEQ ID NO: 635513 - protein, 13 aa, Homo sapiens
  CDR3 for alpha chain variable domain of TCR clone 317757 (TRAV1-2, TRAJ9)
CAALNTGGFKTIF

SEQ ID NO: 635514 - protein, 16 aa, Homo sapiens
  CDR3 for beta chain variable domain of TCR clone 317757 (TRBV20-1, TRBJ2-7)
CSASTSGRLSSYEQYF

SEQ ID NO: 635515 - protein, 14 aa, Homo sapiens
  CDR3 for alpha chain variable domain of TCR clone 317758 (TRAV8-3, TRAJ4)
CAVGASGGYNKLIF

SEQ ID NO: 635516 - protein, 13 aa, Homo sapiens
  CDR3 for beta chain variable domain of TCR clone 317758 (TRBV18, TRBJ2-5)
CGSSLQGQETQYF

SEQ ID NO: 635517 - protein, 19 aa, Homo sapiens
  CDR3 for alpha chain variable domain of TCR clone 317759 (TRAV3, TRAJ42)
CTSVLRDRDYGGSQGNLIF

SEQ ID NO: 635518 - protein, 15 aa, Homo sapiens
  CDR3 for beta chain variable domain of TCR clone 317759 (TRBV6-3, TRBJ2-7)
CASSSPGTVFYEQYF

SEQ ID NO: 635519 - protein, 13 aa, Homo sapiens
  CDR3 for alpha chain variable domain of TCR clone 317760 (TRAV27, TRAJ41)
CAGEGNSGYALNF

SEQ ID NO: 635520 - protein, 16 aa, Homo sapiens
  CDR3 for beta chain variable domain of TCR clone 317760 (TRBV12-4, TRBJ1-5)
CASSRPVGGSNQPQHF

SEQ ID NO: 635521 - protein, 20 aa, Homo sapiens
  CDR3 for alpha chain variable domain of TCR clone 317761 (TRAV8-3, TRAJ45)
LSTSVLWGSYSGGGADGLTF

SEQ ID NO: 635522 - protein, 11 aa, Homo sapiens
  CDR3 for beta chain variable domain of TCR clone 317761 (TRBV20-1, TRBJ2-5)
CSADRAETQFF

SEQ ID NO: 635523 - protein, 12 aa, Homo sapiens
  CDR3 for alpha chain variable domain of TCR clone 317762 (TRAV12-1, TRAJ40)
CVVYSGTYKYIF

SEQ ID NO: 635524 - protein, 15 aa, Homo sapiens
  CDR3 for beta chain variable domain of TCR clone 317762 (TRBV7-9, TRBJ2-7)
CASSLALAEAYEQYF

SEQ ID NO: 635525 - protein, 13 aa, Homo sapiens
  CDR3 for alpha chain variable domain of TCR clone 317763 (TRAV3, TRAJ21)
CAVREPDFNKFYF

SEQ ID NO: 635526 - protein, 18 aa, Homo sapiens
  CDR3 for beta chain variable domain of TCR clone 317763 (TRBV11-2, TRBJ2-3)
WASSLGGASRGAPNTQYF

SEQ ID NO: 635527 - protein, 14 aa, Homo sapiens
  CDR3 for alpha chain variable domain of TCR clone 317764 (TRAV2, TRAJ24)
CAPSQLGEIAGWSR

SEQ ID NO: 635528 - protein, 17 aa, Homo sapiens
  CDR3 for beta chain variable domain of TCR clone 317764 (TRBV5-1, TRBJ2-1)
CASSTGTSGYSYNEQFF

SEQ ID NO: 635529 - protein, 14 aa, Homo sapiens
  CDR3 for alpha chain variable domain of TCR clone 317765 (TRAV12-2, TRAJ13)
CSVKKTGGYQKVTF

SEQ ID NO: 635530 - protein, 13 aa, Homo sapiens
  CDR3 for beta chain variable domain of TCR clone 317765 (TRBV10-3, TRBJ2-7)
CASKLAVNYEQYF

SEQ ID NO: 635531 - protein, 13 aa, Homo sapiens
  CDR3 for alpha chain variable domain of TCR clone 317766 (TRAV12-2, TRAJ10)
CAVPTGGRNKLTF

SEQ ID NO: 635532 - protein, 11 aa, Homo sapiens
  CDR3 for beta chain variable domain of TCR clone 317766 (TRBV6-1, TRBJ2-1)
CASISSNEQFF

SEQ ID NO: 635533 - protein, 14 aa, Homo sapiens
  CDR3 for alpha chain variable domain of TCR clone 317767 (TRAV26-1, TRAJ38)
CIADNAGNNRKLIW

SEQ ID NO: 635534 - protein, 17 aa, Homo sapiens
  CDR3 for beta chain variable domain of TCR clone 317767 (TRBV11-2, TRBJ2-1)
CASSLCPPGVEYNEQFF

SEQ ID NO: 635535 - protein, 13 aa, Homo sapiens
  CDR3 for alpha chain variable domain of TCR clone 317768 (TRAV12-3, TRAJ43)
CAMIRPNNNDMRF

SEQ ID NO: 635536 - protein, 12 aa, Homo sapiens
  CDR3 for beta chain variable domain of TCR clone 317768 (TRBV11-2, TRBJ2-5)
CTSSLGQETQYF

SEQ ID NO: 635537 - protein, 12 aa, Homo sapiens
  CDR3 for alpha chain variable domain of TCR clone 317769 (TRAV13-2, TRAJ23)
CAERHRGGKLIF

SEQ ID NO: 635538 - protein, 13 aa, Homo sapiens
  CDR3 for beta chain variable domain of TCR clone 317769 (TRBV11-3, TRBJ2-1)
CASSSRRVDDQFF

SEQ ID NO: 635539 - protein, 12 aa, Homo sapiens
  CDR3 for alpha chain variable domain of TCR clone 317770 (TRAV12-1, TRAJ6)
CVVSERSYIPTF

SEQ ID NO: 635540 - protein, 21 aa, Homo sapiens
  CDR3 for beta chain variable domain of TCR clone 317770 (TRBV7-3, TRBJ2-1)
CASSLGPRGSPVLRARDTAHR

SEQ ID NO: 635541 - protein, 12 aa, Homo sapiens
  CDR3 for alpha chain variable domain of TCR clone 317771 (TRAV8-6, TRAJ8)
CAVTPGFQKLVF

SEQ ID NO: 635542 - protein, 16 aa, Homo sapiens
  CDR3 for beta chain variable domain of TCR clone 317771 (TRBV7-3, TRBJ2-2)
CASILKRGTLSGELFF

SEQ ID NO: 635543 - protein, 12 aa, Homo sapiens
  CDR3 for alpha chain variable domain of TCR clone 317772 (TRAV8-3, TRAJ26)
CAGDNYGQNFVF

SEQ ID NO: 635544 - protein, 13 aa, Homo sapiens
  CDR3 for beta chain variable domain of TCR clone 317772 (TRBV4-2, TRBJ1-1)
CVSSQAGNTEAFF

SEQ ID NO: 635545 - protein, 10 aa, Homo sapiens
  CDR3 for alpha chain variable domain of TCR clone 317773 (TRAV36/DV7, TRAJ48)
CAVGNEKLTF

SEQ ID NO: 635546 - protein, 16 aa, Homo sapiens
  CDR3 for beta chain variable domain of TCR clone 317773 (TRBV11-2, TRBJ2-2)
CASSLRTGNLIGELFF

SEQ ID NO: 635547 - protein, 15 aa, Homo sapiens
  CDR3 for alpha chain variable domain of TCR clone 317774 (TRAV4, TRAJ39)
CLVGPNNNAGNMLTS

SEQ ID NO: 635548 - protein, 16 aa, Homo sapiens
  CDR3 for beta chain variable domain of TCR clone 317774 (TRBV13, TRBJ2-2)
CASSPRTGEHTGELFF

SEQ ID NO: 635549 - protein, 12 aa, Homo sapiens
  CDR3 for alpha chain variable domain of TCR clone 317775 (TRAV12-3, TRAJ17)
CAMTLTGNKLTF

SEQ ID NO: 635550 - protein, 13 aa, Homo sapiens
  CDR3 for beta chain variable domain of TCR clone 317775 (TRBV7-3, TRBJ1-1)
CASSQDWAAEAFF

SEQ ID NO: 635551 - protein, 15 aa, Homo sapiens
  CDR3 for alpha chain variable domain of TCR clone 317776 (TRAV3, TRAJ22)
CAVRYRGGSARQLTF

SEQ ID NO: 635552 - protein, 13 aa, Homo sapiens
  CDR3 for beta chain variable domain of TCR clone 317776 (TRBV7-3, TRBJ2-1)
CASSPVAYNEQFF

SEQ ID NO: 635553 - protein, 16 aa, Homo sapiens
  CDR3 for alpha chain variable domain of TCR clone 317777 (TRAV8-3, TRAJ13)
CAVGAYPSGGYQKVTL

SEQ ID NO: 635554 - protein, 15 aa, Homo sapiens
  CDR3 for beta chain variable domain of TCR clone 317777 (TRBV19, TRBJ1-5)
CASSIVWADNQAQHF

SEQ ID NO: 635555 - protein, 13 aa, Homo sapiens
  CDR3 for alpha chain variable domain of TCR clone 317778 (TRAV13-1, TRAJ6)
CAASSGGSYIPTF

SEQ ID NO: 635556 - protein, 15 aa, Homo sapiens
  CDR3 for beta chain variable domain of TCR clone 317778 (TRBV12-4, TRBJ2-5)
CASSPPTGLRETQYF

SEQ ID NO: 635557 - protein, 21 aa, Homo sapiens
  CDR3 for alpha chain variable domain of TCR clone 317779 (TRAV12-1, TRAJ37)
CVVNGGLWQHSQTNLWARDNF

SEQ ID NO: 635558 - protein, 12 aa, Homo sapiens
  CDR3 for beta chain variable domain of TCR clone 317779 (TRBV20-1, TRBJ1-2)
CSAPGFNYGYTF

SEQ ID NO: 635559 - protein, 12 aa, Homo sapiens
  CDR3 for alpha chain variable domain of TCR clone 317780 (TRAV12-1, TRAJ40)
CVVYSGTYKYIF

SEQ ID NO: 635560 - protein, 14 aa, Homo sapiens
  CDR3 for beta chain variable domain of TCR clone 317780 (TRBV7-6, TRBJ2-1)
CANSLGGGADEQFF

SEQ ID NO: 635561 - protein, 17 aa, Homo sapiens
  CDR3 for alpha chain variable domain of TCR clone 317781 (TRAV8-6, TRAJ58)
CAVSSWVGETSGSRLTF

SEQ ID NO: 635562 - protein, 14 aa, Homo sapiens
  CDR3 for beta chain variable domain of TCR clone 317781 (TRBV20-1, TRBJ2-1)
CSPNDEASYNEQFF

SEQ ID NO: 635563 - protein, 14 aa, Homo sapiens
  CDR3 for alpha chain variable domain of TCR clone 317782 (TRAV3, TRAJ34)
CAVRDINNTGKLIF

SEQ ID NO: 635564 - protein, 14 aa, Homo sapiens
  CDR3 for beta chain variable domain of TCR clone 317782 (TRBV7-2, TRBJ2-2)
CASSVGQNTGELFF

SEQ ID NO: 635565 - protein, 15 aa, Homo sapiens
  CDR3 for alpha chain variable domain of TCR clone 317783 (TRAV8-3, TRAJ45)
CASSYSGGGADGLTF

SEQ ID NO: 635566 - protein, 14 aa, Homo sapiens
  CDR3 for beta chain variable domain of TCR clone 317783 (TRBV29-1, TRBJ2-2)
CSVLAETNTGELFF

SEQ ID NO: 635567 - protein, 11 aa, Homo sapiens
  CDR3 for alpha chain variable domain of TCR clone 317784 (TRAV1-1, TRAJ23)
CAVRQGGKLIF

SEQ ID NO: 635568 - protein, 16 aa, Homo sapiens
  CDR3 for beta chain variable domain of TCR clone 317784 (TRBV11-2, TRBJ2-3)
CASSFQGRGALDTQYF

SEQ ID NO: 635569 - protein, 19 aa, Homo sapiens
  CDR3 for alpha chain variable domain of TCR clone 317785 (TRAV17, TRAJ54)
CFLLLCYGRGVQGAQKLVL

SEQ ID NO: 635570 - protein, 14 aa, Homo sapiens
  CDR3 for beta chain variable domain of TCR clone 317785 (TRBV4-1, TRBJ2-5)
CASSRSGSGETQYF

SEQ ID NO: 635571 - protein, 18 aa, Homo sapiens
  CDR3 for alpha chain variable domain of TCR clone 317786 (TRAV27, TRAJ3)
SLVIQASLRGSSASKIIF

SEQ ID NO: 635572 - protein, 15 aa, Homo sapiens
  CDR3 for beta chain variable domain of TCR clone 317786 (TRBV28, TRBJ1-3)
CASSMGWASGKHLYF

SEQ ID NO: 635573 - protein, 16 aa, Homo sapiens
  CDR3 for alpha chain variable domain of TCR clone 317787 (TRAV23/DV6, TRAJ48)
CAASGVVNFGNEKLTF

SEQ ID NO: 635574 - protein, 14 aa, Homo sapiens
  CDR3 for beta chain variable domain of TCR clone 317787 (TRBV5-1, TRBJ2-3)
CASSVGTGTDTQYF

SEQ ID NO: 635575 - protein, 14 aa, Homo sapiens
  CDR3 for alpha chain variable domain of TCR clone 317788 (TRAV17, TRAJ12)
CATDEKDSSYKLIF

SEQ ID NO: 635576 - protein, 16 aa, Homo sapiens
  CDR3 for beta chain variable domain of TCR clone 317788 (TRBV10-3, TRBJ2-1)
CAISGVGDGGGGEQFF

SEQ ID NO: 635577 - protein, 15 aa, Homo sapiens
  CDR3 for alpha chain variable domain of TCR clone 317789 (TRAV26-1, TRAJ23)
CIVRVAGYQGGKLIF

SEQ ID NO: 635578 - protein, 12 aa, Homo sapiens
  CDR3 for beta chain variable domain of TCR clone 317789 (TRBV19, TRBJ2-3)
CASAGGADTQYF

SEQ ID NO: 635579 - protein, 13 aa, Homo sapiens
  CDR3 for alpha chain variable domain of TCR clone 317790 (TRAV27, TRAJ6)
WAGGTRGSYIPTF

SEQ ID NO: 635580 - protein, 15 aa, Homo sapiens
  CDR3 for beta chain variable domain of TCR clone 317790 (TRBV5-5, TRBJ2-7)
CASSLAAPLSYEQYF

SEQ ID NO: 635581 - protein, 15 aa, Homo sapiens
  CDR3 for alpha chain variable domain of TCR clone 317791 (TRAV2, TRAJ9)
CAVDDRGTGGFKTIS

SEQ ID NO: 635582 - protein, 16 aa, Homo sapiens
  CDR3 for beta chain variable domain of TCR clone 317791 (TRBV24-1, TRBJ2-3)
CATSDPGTGATDTQYF

SEQ ID NO: 635583 - protein, 13 aa, Homo sapiens
  CDR3 for alpha chain variable domain of TCR clone 317792 (TRAV26-2, TRAJ43)
CILRAVNNNDMRF

SEQ ID NO: 635584 - protein, 15 aa, Homo sapiens
  CDR3 for beta chain variable domain of TCR clone 317792 (TRBV7-2, TRBJ2-1)
CASTHGTWIYNEQLF

SEQ ID NO: 635585 - protein, 13 aa, Homo sapiens
  CDR3 for alpha chain variable domain of TCR clone 317793 (TRAV39, TRAJ58)
CAGEETSGSRFTF

SEQ ID NO: 635586 - protein, 15 aa, Homo sapiens
  CDR3 for beta chain variable domain of TCR clone 317793 (TRBV4-1, TRBJ2-7)
CASSQNTGRLYEQYF

SEQ ID NO: 635587 - protein, 11 aa, Homo sapiens
  CDR3 for alpha chain variable domain of TCR clone 317794 (TRAV23/DV6, TRAJ58)
CAARLLRGETS

SEQ ID NO: 635588 - protein, 16 aa, Homo sapiens
  CDR3 for beta chain variable domain of TCR clone 317794 (TRBV7-2, TRBJ2-3)
CASSLAGAGSGDTQYF

SEQ ID NO: 635589 - protein, 15 aa, Homo sapiens
  CDR3 for alpha chain variable domain of TCR clone 317795 (TRAV8-6, TRAJ6)
CAVRDASGGSYIPPF

SEQ ID NO: 635590 - protein, 13 aa, Homo sapiens
  CDR3 for beta chain variable domain of TCR clone 317795 (TRBV2, TRBJ2-2)
CASRAWRTGELFF

SEQ ID NO: 635591 - protein, 15 aa, Homo sapiens
  CDR3 for alpha chain variable domain of TCR clone 317796 (TRAV12-3, TRAJ6)
CAMSATTGGSYMPTF

SEQ ID NO: 635592 - protein, 15 aa, Homo sapiens
  CDR3 for beta chain variable domain of TCR clone 317796 (TRBV7-2, TRBJ2-5)
CASSGILAGAETQYF

SEQ ID NO: 635593 - protein, 14 aa, Homo sapiens
  CDR3 for alpha chain variable domain of TCR clone 317797 (TRAV8-4, TRAJ45)
CGSGGGGGADGLTF

SEQ ID NO: 635594 - protein, 20 aa, Homo sapiens
  CDR3 for beta chain variable domain of TCR clone 317797 (TRBV4-3, TRBJ2-3)
CASSPRVEMRASGRPDTQYF

SEQ ID NO: 635595 - protein, 16 aa, Homo sapiens
  CDR3 for alpha chain variable domain of TCR clone 317798 (TRAV12-3, TRAJ53)
CAMSPGSGCSNYKLTF

SEQ ID NO: 635596 - protein, 14 aa, Homo sapiens
  CDR3 for beta chain variable domain of TCR clone 317798 (TRBV4-1, TRBJ2-7)
CASSPVAGGDEQYF

SEQ ID NO: 635597 - protein, 12 aa, Homo sapiens
  CDR3 for alpha chain variable domain of TCR clone 317799 (TRAV26-1, TRAJ35)
CIGLSFGNVLHC

SEQ ID NO: 635598 - protein, 14 aa, Homo sapiens
  CDR3 for beta chain variable domain of TCR clone 317799 (TRBV19, TRBJ2-1)
CASPTFVLSGEQFF

SEQ ID NO: 635599 - protein, 13 aa, Homo sapiens
  CDR3 for alpha chain variable domain of TCR clone 317800 (TRAV29/DV5, TRAJ49)
CAASTNTGNKFYF

SEQ ID NO: 635600 - protein, 11 aa, Homo sapiens
  CDR3 for beta chain variable domain of TCR clone 317800 (TRBV6-1, TRBJ2-1)
CASISSNEQFF

SEQ ID NO: 635601 - protein, 18 aa, Homo sapiens
  CDR3 for alpha chain variable domain of TCR clone 317801 (TRAV13-1, TRAJ52)
CAAKNPNAGVTRYGKLTF

SEQ ID NO: 635602 - protein, 14 aa, Homo sapiens
  CDR3 for beta chain variable domain of TCR clone 317801 (TRBV7-3, TRBJ2-1)
CASSLAGGTNEQFF

SEQ ID NO: 635603 - protein, 13 aa, Homo sapiens
  CDR3 for alpha chain variable domain of TCR clone 317802 (TRAV22, TRAJ58)
CAVTETSGSRLTF

SEQ ID NO: 635604 - protein, 14 aa, Homo sapiens
  CDR3 for beta chain variable domain of TCR clone 317802 (TRBV7-9, TRBJ2-1)
CASSSMVGFGEQFF

SEQ ID NO: 635605 - protein, 12 aa, Homo sapiens
  CDR3 for alpha chain variable domain of TCR clone 317803 (TRAV29/DV5, TRAJ49)
CAATDTGNQFYF

SEQ ID NO: 635606 - protein, 13 aa, Homo sapiens
  CDR3 for beta chain variable domain of TCR clone 317803 (TRBV24-1, TRBJ2-1)
CATSAGPYNEQFF

SEQ ID NO: 635607 - protein, 15 aa, Homo sapiens
  CDR3 for alpha chain variable domain of TCR clone 317804 (TRAV3, TRAJ5)
CAVRDLDTGRRALTF

SEQ ID NO: 635608 - protein, 16 aa, Homo sapiens
  CDR3 for beta chain variable domain of TCR clone 317804 (TRBV4-2, TRBJ1-1)
CASSQAGFGMNTEAFF

SEQ ID NO: 635609 - protein, 16 aa, Homo sapiens
  CDR3 for alpha chain variable domain of TCR clone 317805 (TRAV3, TRAJ10)
CAVRDMRAGGGNKLTF

SEQ ID NO: 635610 - protein, 19 aa, Homo sapiens
  CDR3 for beta chain variable domain of TCR clone 317805 (TRBV6-3, TRBJ1-2)
CASSYSKGRSGPPNYGYTF

SEQ ID NO: 635611 - protein, 12 aa, Homo sapiens
  CDR3 for alpha chain variable domain of TCR clone 317806 (TRAV12-1, TRAJ31)
CVVNRSNARLMF

SEQ ID NO: 635612 - protein, 15 aa, Homo sapiens
  CDR3 for beta chain variable domain of TCR clone 317806 (TRBV10-3, TRBJ2-3)
CAISEALSSTDTQYF

SEQ ID NO: 635613 - protein, 14 aa, Homo sapiens
  CDR3 for alpha chain variable domain of TCR clone 317807 (TRAV3, TRAJ22)
CAVRDYGSARQLTF

SEQ ID NO: 635614 - protein, 13 aa, Homo sapiens
  CDR3 for beta chain variable domain of TCR clone 317807 (TRBV11-2, TRBJ2-5)
CASGHGAKETQDF

SEQ ID NO: 635615 - protein, 12 aa, Homo sapiens
  CDR3 for alpha chain variable domain of TCR clone 317808 (TRAV16, TRAJ10)
CSRTGGGNKLTF

SEQ ID NO: 635616 - protein, 15 aa, Homo sapiens
  CDR3 for beta chain variable domain of TCR clone 317808 (TRBV18, TRBJ2-7)
CASSPSSTGNYEQYF

SEQ ID NO: 635617 - protein, 14 aa, Homo sapiens
  CDR3 for alpha chain variable domain of TCR clone 317809 (TRAV26-1, TRAJ22)
CIVRVYGSARQLTF

SEQ ID NO: 635618 - protein, 17 aa, Homo sapiens
  CDR3 for beta chain variable domain of TCR clone 317809 (TRBV7-3, TRBJ2-3)
CASSPGGLAGFGGTKYF

SEQ ID NO: 635619 - protein, 13 aa, Homo sapiens
  CDR3 for alpha chain variable domain of TCR clone 317810 (TRAV9-2, TRAJ39)
CALQNNAGNMLTF

SEQ ID NO: 635620 - protein, 16 aa, Homo sapiens
  CDR3 for beta chain variable domain of TCR clone 317810 (TRBV5-1, TRBJ1-1)
CASSSGGNSLNTKAFF

SEQ ID NO: 635621 - protein, 12 aa, Homo sapiens
  CDR3 for alpha chain variable domain of TCR clone 317811 (TRAV17, TRAJ4)
CATRGGYNKLIF

SEQ ID NO: 635622 - protein, 12 aa, Homo sapiens
  CDR3 for beta chain variable domain of TCR clone 317811 (TRBV7-8, TRBJ2-7)
CASSLGDREQYF

SEQ ID NO: 635623 - protein, 15 aa, Homo sapiens
  CDR3 for alpha chain variable domain of TCR clone 317812 (TRAV12-3, TRAJ27)
CAIRAYNTNAGKSTF

SEQ ID NO: 635624 - protein, 14 aa, Homo sapiens
  CDR3 for beta chain variable domain of TCR clone 317812 (TRBV2, TRBJ2-2)
CASRGISGGGELFF

SEQ ID NO: 635625 - protein, 16 aa, Homo sapiens
  CDR3 for alpha chain variable domain of TCR clone 317813 (TRAV12-2, TRAJ50)
CAVGPATKTSYDKEIF

SEQ ID NO: 635626 - protein, 12 aa, Homo sapiens
  CDR3 for beta chain variable domain of TCR clone 317813 (TRBV12-4, TRBJ1-5)
CASSLGRQPQHF

SEQ ID NO: 635627 - protein, 14 aa, Homo sapiens
  CDR3 for alpha chain variable domain of TCR clone 317814 (TRAV17, TRAJ16)
CATADFSDGQKLLF

SEQ ID NO: 635628 - protein, 15 aa, Homo sapiens
  CDR3 for beta chain variable domain of TCR clone 317814 (TRBV18, TRBJ2-1)
CASSPPSPSYNEHFF

SEQ ID NO: 635629 - protein, 15 aa, Homo sapiens
  CDR3 for alpha chain variable domain of TCR clone 317815 (TRAV27, TRAJ38)
CAARRTAGNNRKLVW

SEQ ID NO: 635630 - protein, 13 aa, Homo sapiens
  CDR3 for beta chain variable domain of TCR clone 317815 (TRBV12-5, TRBJ2-3)
CASGDRQSDTQYF

SEQ ID NO: 635631 - protein, 13 aa, Homo sapiens
  CDR3 for alpha chain variable domain of TCR clone 317816 (TRAV21, TRAJ27)
CAARPGNAGKSTF

SEQ ID NO: 635632 - protein, 12 aa, Homo sapiens
  CDR3 for beta chain variable domain of TCR clone 317816 (TRBV27, TRBJ2-2)
CASKLFTGELFF

SEQ ID NO: 635633 - protein, 14 aa, Homo sapiens
  CDR3 for alpha chain variable domain of TCR clone 317817 (TRAV13-1, TRAJ35)
CAASKGGFGNVLHC

SEQ ID NO: 635634 - protein, 16 aa, Homo sapiens
  CDR3 for beta chain variable domain of TCR clone 317817 (TRBV24-1, TRBJ2-3)
CATSDAISGITDTQYF

SEQ ID NO: 635635 - protein, 12 aa, Homo sapiens
  CDR3 for alpha chain variable domain of TCR clone 317818 (TRAV8-4, TRAJ43)
CAMSVNNNDMRF

SEQ ID NO: 635636 - protein, 13 aa, Homo sapiens
  CDR3 for beta chain variable domain of TCR clone 317818 (TRBV7-9, TRBJ1-2)
CASSLKQNYGYTF

SEQ ID NO: 635637 - protein, 14 aa, Homo sapiens
  CDR3 for alpha chain variable domain of TCR clone 317819 (TRAV12-2, TRAJ11)
CAVEGGSGYSTPTF

SEQ ID NO: 635638 - protein, 14 aa, Homo sapiens
  CDR3 for beta chain variable domain of TCR clone 317819 (TRBV2, TRBJ2-1)
CASSEPSSYNEQFF

SEQ ID NO: 635639 - protein, 12 aa, Homo sapiens
  CDR3 for alpha chain variable domain of TCR clone 317820 (TRAV2, TRAJ10)
CASTGGVNRLTF

SEQ ID NO: 635640 - protein, 14 aa, Homo sapiens
  CDR3 for beta chain variable domain of TCR clone 317820 (TRBV7-2, TRBJ2-2)
CASRGQGAAGELFF

SEQ ID NO: 635641 - protein, 12 aa, Homo sapiens
  CDR3 for alpha chain variable domain of TCR clone 317821 (TRAV35, TRAJ53)
CAGLGSNYKLTF

SEQ ID NO: 635642 - protein, 15 aa, Homo sapiens
  CDR3 for beta chain variable domain of TCR clone 317821 (TRBV13, TRBJ2-5)
CASSLRPGGGETQYF

SEQ ID NO: 635643 - protein, 18 aa, Homo sapiens
  CDR3 for alpha chain variable domain of TCR clone 317822 (TRAV21, TRAJ52)
CAVRPSPAGGTSYGKLTF

SEQ ID NO: 635644 - protein, 15 aa, Homo sapiens
  CDR3 for beta chain variable domain of TCR clone 317822 (TRBV7-6, TRBJ1-5)
CASSQSSGINQPQHF

SEQ ID NO: 635645 - protein, 10 aa, Homo sapiens
  CDR3 for alpha chain variable domain of TCR clone 317823 (TRAV12-1, TRAJ20)
CVVNPRKLSF

SEQ ID NO: 635646 - protein, 13 aa, Homo sapiens
  CDR3 for beta chain variable domain of TCR clone 317823 (TRBV12-4, TRBJ1-1)
CASSPGTGFEAFF

SEQ ID NO: 635647 - protein, 15 aa, Homo sapiens
  CDR3 for alpha chain variable domain of TCR clone 317824 (TRAV9-2, TRAJ9)
CALSLTNTGGFKTIF

SEQ ID NO: 635648 - protein, 17 aa, Homo sapiens
  CDR3 for beta chain variable domain of TCR clone 317824 (TRBV7-8, TRBJ2-6)
CASSAGTGGAGANVLTF

SEQ ID NO: 635649 - protein, 17 aa, Homo sapiens
  CDR3 for alpha chain variable domain of TCR clone 317825 (TRAV20, TRAJ28)
CAVQGGYYGAGSYQLTF

SEQ ID NO: 635650 - protein, 13 aa, Homo sapiens
  CDR3 for beta chain variable domain of TCR clone 317825 (TRBV4-1, TRBJ2-2)
CASSQENTGELFF

SEQ ID NO: 635651 - protein, 15 aa, Homo sapiens
  CDR3 for alpha chain variable domain of TCR clone 317826 (TRAV8-4, TRAJ37)
CAVTYGSSNTGKLIF

SEQ ID NO: 635652 - protein, 14 aa, Homo sapiens
  CDR3 for beta chain variable domain of TCR clone 317826 (TRBV7-9, TRBJ2-2)
CASSLVQDTGELFF

SEQ ID NO: 635653 - protein, 13 aa, Homo sapiens
  CDR3 for alpha chain variable domain of TCR clone 317827 (TRAV2, TRAJ24)
CAVSTDSWGELQF

SEQ ID NO: 635654 - protein, 14 aa, Homo sapiens
  CDR3 for beta chain variable domain of TCR clone 317827 (TRBV13, TRBJ2-5)
CASSLGTAQETQYF

SEQ ID NO: 635655 - protein, 13 aa, Homo sapiens
  CDR3 for alpha chain variable domain of TCR clone 317828 (TRAV21, TRAJ20)
CAVGVFADYKLSF

SEQ ID NO: 635656 - protein, 15 aa, Homo sapiens
  CDR3 for beta chain variable domain of TCR clone 317828 (TRBV28, TRBJ2-1)
CASSIIAGGRSEQFF

SEQ ID NO: 635657 - protein, 15 aa, Homo sapiens
  CDR3 for alpha chain variable domain of TCR clone 317829 (TRAV4, TRAJ10)
CLVGDGSGGGNKLTF

SEQ ID NO: 635658 - protein, 15 aa, Homo sapiens
  CDR3 for beta chain variable domain of TCR clone 317829 (TRBV5-1, TRBJ2-5)
CASSFKGGDQETQYF

SEQ ID NO: 635659 - protein, 13 aa, Homo sapiens
  CDR3 for alpha chain variable domain of TCR clone 317830 (TRAV8-3, TRAJ43)
CAVGPDNNNDMRF

SEQ ID NO: 635660 - protein, 12 aa, Homo sapiens
  CDR3 for beta chain variable domain of TCR clone 317830 (TRBV7-9, TRBJ2-7)
CASSIKREEQYF

SEQ ID NO: 635661 - protein, 14 aa, Homo sapiens
  CDR3 for alpha chain variable domain of TCR clone 317831 (TRAV3, TRAJ30)
CAVRDIGRDDKIIF

SEQ ID NO: 635662 - protein, 16 aa, Homo sapiens
  CDR3 for beta chain variable domain of TCR clone 317831 (TRBV19, TRBJ2-1)
CASSKAGPSSYNEQFF

SEQ ID NO: 635663 - protein, 15 aa, Homo sapiens
  CDR3 for alpha chain variable domain of TCR clone 317832 (TRAV17, TRAJ37)
CATDHGSSNTGKLIF

SEQ ID NO: 635664 - protein, 12 aa, Homo sapiens
  CDR3 for beta chain variable domain of TCR clone 317832 (TRBV11-2, TRBJ2-1)
CASSPGNNEQFF

SEQ ID NO: 635665 - protein, 16 aa, Homo sapiens
  CDR3 for alpha chain variable domain of TCR clone 317833 (TRAV12-3, TRAJ53)
CAMRPGSGGSNHKLTF

SEQ ID NO: 635666 - protein, 11 aa, Homo sapiens
  CDR3 for beta chain variable domain of TCR clone 317833 (TRBV29-1, TRBJ2-5)
CSEDRTGTQYF

SEQ ID NO: 635667 - protein, 13 aa, Homo sapiens
  CDR3 for alpha chain variable domain of TCR clone 317834 (TRAV8-4, TRAJ29)
CAVSATGNTPLVF

SEQ ID NO: 635668 - protein, 13 aa, Homo sapiens
  CDR3 for beta chain variable domain of TCR clone 317834 (TRBV7-7, TRBJ1-1)
CASSLGANTEAFF

SEQ ID NO: 635669 - protein, 11 aa, Homo sapiens
  CDR3 for alpha chain variable domain of TCR clone 317835 (TRAV12-1, TRAJ30)
CVVNGQDKIIF

SEQ ID NO: 635670 - protein, 13 aa, Homo sapiens
  CDR3 for beta chain variable domain of TCR clone 317835 (TRBV20-1, TRBJ2-5)
CSARGDYQETQYF

SEQ ID NO: 635671 - protein, 15 aa, Homo sapiens
  CDR3 for alpha chain variable domain of TCR clone 317836 (TRAV25, TRAJ52)
CAGTSGGTSYGKLTF

SEQ ID NO: 635672 - protein, 16 aa, Homo sapiens
  CDR3 for beta chain variable domain of TCR clone 317836 (TRBV27, TRBJ2-2)
CASSFRGLVRTGELFF

SEQ ID NO: 635673 - protein, 13 aa, Homo sapiens
  CDR3 for alpha chain variable domain of TCR clone 317837 (TRAV16, TRAJ34)
CALAGYNTDKLIF

SEQ ID NO: 635674 - protein, 13 aa, Homo sapiens
  CDR3 for beta chain variable domain of TCR clone 317837 (TRBV6-1, TRBJ2-1)
CASREDGGHEQFF

SEQ ID NO: 635675 - protein, 15 aa, Homo sapiens
  CDR3 for alpha chain variable domain of TCR clone 317838 (TRAV17, TRAJ35)
CATAFVIGFGNVLHF

SEQ ID NO: 635676 - protein, 15 aa, Homo sapiens
  CDR3 for beta chain variable domain of TCR clone 317838 (TRBV11-3, TRBJ2-1)
CASSLGDSSHNEQFF

SEQ ID NO: 635677 - protein, 15 aa, Homo sapiens
  CDR3 for alpha chain variable domain of TCR clone 317839 (TRAV4, TRAJ39)
CLVGPNNNAGNMLTF

SEQ ID NO: 635678 - protein, 18 aa, Homo sapiens
  CDR3 for beta chain variable domain of TCR clone 317839 (TRBV20-1, TRBJ2-3)
CSASGLAGGPGTTDTQYF

SEQ ID NO: 635679 - protein, 11 aa, Homo sapiens
  CDR3 for alpha chain variable domain of TCR clone 317840 (TRAV12-1, TRAJ26)
CVVAYGQNFVF

SEQ ID NO: 635680 - protein, 13 aa, Homo sapiens
  CDR3 for beta chain variable domain of TCR clone 317840 (TRBV7-2, TRBJ2-4)
CASSREHANIQDF

SEQ ID NO: 635681 - protein, 14 aa, Homo sapiens
  CDR3 for alpha chain variable domain of TCR clone 317841 (TRAV17, TRAJ57)
CATDPQGGSEKLVF

SEQ ID NO: 635682 - protein, 17 aa, Homo sapiens
  CDR3 for beta chain variable domain of TCR clone 317841 (TRBV4-3, TRBJ2-3)
CASSQDPLAGAVDTQYF

SEQ ID NO: 635683 - protein, 13 aa, Homo sapiens
  CDR3 for alpha chain variable domain of TCR clone 317842 (TRAV8-3, TRAJ48)
CAVVPFGNEKLTF

SEQ ID NO: 635684 - protein, 15 aa, Homo sapiens
  CDR3 for beta chain variable domain of TCR clone 317842 (TRBV11-2, TRBJ2-1)
YASSSPSTRYNEQFF

SEQ ID NO: 635685 - protein, 13 aa, Homo sapiens
  CDR3 for alpha chain variable domain of TCR clone 317843 (TRAV26-2, TRAJ43)
CILRAVNKKDMRF

SEQ ID NO: 635686 - protein, 15 aa, Homo sapiens
  CDR3 for beta chain variable domain of TCR clone 317843 (TRBV7-2, TRBJ2-1)
CASTHGTGIYNEQFF

SEQ ID NO: 635687 - protein, 13 aa, Homo sapiens
  CDR3 for alpha chain variable domain of TCR clone 317844 (TRAV16, TRAJ58)
CALSIPSGSRLTF

SEQ ID NO: 635688 - protein, 15 aa, Homo sapiens
  CDR3 for beta chain variable domain of TCR clone 317844 (TRBV15, TRBJ1-5)
CATSRDPVSNQPQHF

SEQ ID NO: 635689 - protein, 11 aa, Homo sapiens
  CDR3 for alpha chain variable domain of TCR clone 317845 (TRAV2, TRAJ20)
CAVLNDYKLSF

SEQ ID NO: 635690 - protein, 12 aa, Homo sapiens
  CDR3 for beta chain variable domain of TCR clone 317845 (TRBV11-2, TRBJ2-2)
CASSLGGGELFF

SEQ ID NO: 635691 - protein, 16 aa, Homo sapiens
  CDR3 for alpha chain variable domain of TCR clone 317846 (TRAV3, TRAJ27)
CAVRDPQGTNAGKSTF

SEQ ID NO: 635692 - protein, 15 aa, Homo sapiens
  CDR3 for beta chain variable domain of TCR clone 317846 (TRBV20-1, TRBJ2-7)
SAVLDRVSGMDEQYF

SEQ ID NO: 635693 - protein, 18 aa, Homo sapiens
  CDR3 for alpha chain variable domain of TCR clone 317847 (TRAV13-1, TRAJ52)
CAAKNPNAGGTSYGKLTF

SEQ ID NO: 635694 - protein, 14 aa, Homo sapiens
  CDR3 for beta chain variable domain of TCR clone 317847 (TRBV19, TRBJ2-5)
CSSSITGQQETQYF

SEQ ID NO: 635695 - protein, 14 aa, Homo sapiens
  CDR3 for alpha chain variable domain of TCR clone 317848 (TRAV1-2, TRAJ8)
CAGREDTGFQKLVF

SEQ ID NO: 635696 - protein, 14 aa, Homo sapiens
  CDR3 for beta chain variable domain of TCR clone 317848 (TRBV7-2, TRBJ2-5)
CASSPRGSSETQYF

SEQ ID NO: 635697 - protein, 16 aa, Homo sapiens
  CDR3 for alpha chain variable domain of TCR clone 317849 (TRAV21, TRAJ52)
CAVTNAGGTSYGKLTF

SEQ ID NO: 635698 - protein, 11 aa, Homo sapiens
  CDR3 for beta chain variable domain of TCR clone 317849 (TRBV2, TRBJ1-1)
CASTEGTEAFF

SEQ ID NO: 635699 - protein, 11 aa, Homo sapiens
  CDR3 for alpha chain variable domain of TCR clone 317850 (TRAV2, TRAJ33)
CAVDSNYQLIW

SEQ ID NO: 635700 - protein, 14 aa, Homo sapiens
  CDR3 for beta chain variable domain of TCR clone 317850 (TRBV7-9, TRBJ2-7)
CASSLQQGGYEQYF

SEQ ID NO: 635701 - protein, 18 aa, Homo sapiens
  CDR3 for alpha chain variable domain of TCR clone 317851 (TRAV13-1, TRAJ52)
CAAKNPNAGGTSYGTLTF

SEQ ID NO: 635702 - protein, 15 aa, Homo sapiens
  CDR3 for beta chain variable domain of TCR clone 317851 (TRBV28, TRBJ2-1)
CASSIIAGGRSEQFF

SEQ ID NO: 635703 - protein, 12 aa, Homo sapiens
  CDR3 for alpha chain variable domain of TCR clone 317852 (TRAV13-2, TRAJ8)
CAPWLGFQKLVF

SEQ ID NO: 635704 - protein, 14 aa, Homo sapiens
  CDR3 for beta chain variable domain of TCR clone 317852 (TRBV7-9, TRBJ2-3)
CASSLEQGTNTQYF

SEQ ID NO: 635705 - protein, 14 aa, Homo sapiens
  CDR3 for alpha chain variable domain of TCR clone 317853 (TRAV1-2, TRAJ16)
CAVNRVSDGQKLLF

SEQ ID NO: 635706 - protein, 14 aa, Homo sapiens
  CDR3 for beta chain variable domain of TCR clone 317853 (TRBV7-8, TRBJ2-3)
CASSLEAGTDTQYF

SEQ ID NO: 635707 - protein, 13 aa, Homo sapiens
  CDR3 for alpha chain variable domain of TCR clone 317854 (TRAV21, TRAJ10)
CAAPTGGGNKLTF

SEQ ID NO: 635708 - protein, 13 aa, Homo sapiens
  CDR3 for beta chain variable domain of TCR clone 317854 (TRBV27, TRBJ2-7)
CASSFSQGYEQYF

SEQ ID NO: 635709 - protein, 15 aa, Homo sapiens
  CDR3 for alpha chain variable domain of TCR clone 317855 (TRAV27, TRAJ38)
CAARRNAGNNRKLNW

SEQ ID NO: 635710 - protein, 15 aa, Homo sapiens
  CDR3 for beta chain variable domain of TCR clone 317855 (TRBV5-1, TRBJ2-1)
CASSPPRAPYNEQFF

SEQ ID NO: 635711 - protein, 14 aa, Homo sapiens
  CDR3 for alpha chain variable domain of TCR clone 317856 (TRAV1-2, TRAJ8)
CAVREVTGFQKLVF

SEQ ID NO: 635712 - protein, 13 aa, Homo sapiens
  CDR3 for beta chain variable domain of TCR clone 317856 (TRBV4-2, TRBJ2-2)
CASEDRGTGELFF

SEQ ID NO: 635713 - protein, 14 aa, Homo sapiens
  CDR3 for alpha chain variable domain of TCR clone 317857 (TRAV1-2, TRAJ8)
CAVREDTGFQKLVF

SEQ ID NO: 635714 - protein, 12 aa, Homo sapiens
  CDR3 for beta chain variable domain of TCR clone 317857 (TRBV7-8, TRBJ2-7)
CASSLGDRQQYF

SEQ ID NO: 635715 - protein, 13 aa, Homo sapiens
  CDR3 for alpha chain variable domain of TCR clone 317858 (TRAV16, TRAJ48)
CSPLNFGNVKLTF

SEQ ID NO: 635716 - protein, 11 aa, Homo sapiens
  CDR3 for beta chain variable domain of TCR clone 317858 (TRBV7-9, TRBJ2-3)
CASSPTDTQYF

SEQ ID NO: 635717 - protein, 12 aa, Homo sapiens
  CDR3 for alpha chain variable domain of TCR clone 317859 (TRAV25, TRAJ35)
CAGIGFGNVLHC

SEQ ID NO: 635718 - protein, 12 aa, Homo sapiens
  CDR3 for beta chain variable domain of TCR clone 317859 (TRBV6-3, TRBJ2-7)
CTSSRQGYEQYF

SEQ ID NO: 635719 - protein, 15 aa, Homo sapiens
  CDR3 for alpha chain variable domain of TCR clone 317860 (TRAV8-6, TRAJ57)
CAVSLTQGGSEKLVF

SEQ ID NO: 635720 - protein, 15 aa, Homo sapiens
  CDR3 for beta chain variable domain of TCR clone 317860 (TRBV6-3, TRBJ2-2)
CASSFLATLTGELFF

SEQ ID NO: 635721 - protein, 17 aa, Homo sapiens
  CDR3 for alpha chain variable domain of TCR clone 317861 (TRAV3, TRAJ13)
CAVRVYSGVTRKLPLEL

SEQ ID NO: 635722 - protein, 15 aa, Homo sapiens
  CDR3 for beta chain variable domain of TCR clone 317861 (TRBV5-7, TRBJ1-2)
CASSLGVAANYGYTF

SEQ ID NO: 635723 - protein, 16 aa, Homo sapiens
  CDR3 for alpha chain variable domain of TCR clone 317862 (TRAV13-1, TRAJ22)
CAAKGGRAGSARQLTF

SEQ ID NO: 635724 - protein, 15 aa, Homo sapiens
  CDR3 for beta chain variable domain of TCR clone 317862 (TRBV9, TRBJ1-6)
CASSVAGTGDSPLHL

SEQ ID NO: 635725 - protein, 10 aa, Homo sapiens
  CDR3 for alpha chain variable domain of TCR clone 317863 (TRAV8-4, TRAJ43)
CAGSADDMRL

SEQ ID NO: 635726 - protein, 15 aa, Homo sapiens
  CDR3 for beta chain variable domain of TCR clone 317863 (TRBV5-1, TRBJ2-3)
CASSVTSGSTDTQYF

SEQ ID NO: 635727 - protein, 14 aa, Homo sapiens
  CDR3 for alpha chain variable domain of TCR clone 317864 (TRAV1-2, TRAJ8)
CAVREDTGFQKLVF

SEQ ID NO: 635728 - protein, 16 aa, Homo sapiens
  CDR3 for beta chain variable domain of TCR clone 317864 (TRBV7-3, TRBJ2-2)
CVSSLKRGTLSGELFF

SEQ ID NO: 635729 - protein, 15 aa, Homo sapiens
  CDR3 for alpha chain variable domain of TCR clone 317865 (TRAV29/DV5, TRAJ44)
CAASAGTGNASKLTF

SEQ ID NO: 635730 - protein, 12 aa, Homo sapiens
  CDR3 for beta chain variable domain of TCR clone 317865 (TRBV11-2, TRBJ2-2)
CASSLGGGELFF

SEQ ID NO: 635731 - protein, 12 aa, Homo sapiens
  CDR3 for alpha chain variable domain of TCR clone 317866 (TRAV17, TRAJ29)
CYASSGNTPLVF

SEQ ID NO: 635732 - protein, 12 aa, Homo sapiens
  CDR3 for beta chain variable domain of TCR clone 317866 (TRBV20-1, TRBJ2-7)
CSAITPTKEQYF

SEQ ID NO: 635733 - protein, 14 aa, Homo sapiens
  CDR3 for alpha chain variable domain of TCR clone 317867 (TRAV12-2, TRAJ13)
CAVKKTGGYQKVTF

SEQ ID NO: 635734 - protein, 17 aa, Homo sapiens
  CDR3 for beta chain variable domain of TCR clone 317867 (TRBV20-1, TRBJ2-2)
CSASGSGLGGLTGELFF

SEQ ID NO: 635735 - protein, 13 aa, Homo sapiens
  CDR3 for alpha chain variable domain of TCR clone 317868 (TRAV27, TRAJ29)
CAGAHSGNTPLVF

SEQ ID NO: 635736 - protein, 12 aa, Homo sapiens
  CDR3 for beta chain variable domain of TCR clone 317868 (TRBV6-1, TRBJ2-7)
CASSDYSYEQYF

SEQ ID NO: 635737 - protein, 14 aa, Homo sapiens
  CDR3 for alpha chain variable domain of TCR clone 317869 (TRAV35, TRAJ50)
CAGHRKTSYDKVIF

SEQ ID NO: 635738 - protein, 13 aa, Homo sapiens
  CDR3 for beta chain variable domain of TCR clone 317869 (TRBV7-7, TRBJ2-3)
FASSLSRADTQYF

SEQ ID NO: 635739 - protein, 18 aa, Homo sapiens
  CDR3 for alpha chain variable domain of TCR clone 317870 (TRAV1-2, TRAJ8)
CLLPLCCREDTGFQKLVF

SEQ ID NO: 635740 - protein, 15 aa, Homo sapiens
  CDR3 for beta chain variable domain of TCR clone 317870 (TRBV6-3, TRBJ2-7)
CASSSPGTVFYEQYF

SEQ ID NO: 635741 - protein, 14 aa, Homo sapiens
  CDR3 for alpha chain variable domain of TCR clone 317871 (TRAV13-1, TRAJ6)
CAASITGGSYIPTF

SEQ ID NO: 635742 - protein, 14 aa, Homo sapiens
  CDR3 for beta chain variable domain of TCR clone 317871 (TRBV6-3, TRBJ2-1)
CASLHYAYYNEQFF

SEQ ID NO: 635743 - protein, 13 aa, Homo sapiens
  CDR3 for alpha chain variable domain of TCR clone 317872 (TRAV12-1, TRAJ6)
CVVFPGGSYIPTF

SEQ ID NO: 635744 - protein, 14 aa, Homo sapiens
  CDR3 for beta chain variable domain of TCR clone 317872 (TRBV20-1, TRBJ1-3)
CSASPTGAANTIYF

SEQ ID NO: 635745 - protein, 14 aa, Homo sapiens
  CDR3 for alpha chain variable domain of TCR clone 317873 (TRAV12-3, TRAJ58)
CAMSTETSGSRLTF

SEQ ID NO: 635746 - protein, 14 aa, Homo sapiens
  CDR3 for beta chain variable domain of TCR clone 317873 (TRBV7-2, TRBJ2-5)
CASSPRGSSETQYF

SEQ ID NO: 635747 - protein, 16 aa, Homo sapiens
  CDR3 for alpha chain variable domain of TCR clone 317874 (TRAV3, TRAJ5)
CAVRNLMDTGRGALTF

SEQ ID NO: 635748 - protein, 16 aa, Homo sapiens
  CDR3 for beta chain variable domain of TCR clone 317874 (TRBV4-2, TRBJ2-7)
CASSQEGLANSYEQYF

SEQ ID NO: 635749 - protein, 14 aa, Homo sapiens
  CDR3 for alpha chain variable domain of TCR clone 317875 (TRAV2, TRAJ9)
CAVEDRSGGFRTIF

SEQ ID NO: 635750 - protein, 14 aa, Homo sapiens
  CDR3 for beta chain variable domain of TCR clone 317875 (TRBV7-2, TRBJ2-3)
CASRRGLAADTQYF

SEQ ID NO: 635751 - protein, 15 aa, Homo sapiens
  CDR3 for alpha chain variable domain of TCR clone 317876 (TRAV8-3, TRAJ27)
CAVGPSKTNAGKSTF

SEQ ID NO: 635752 - protein, 15 aa, Homo sapiens
  CDR3 for beta chain variable domain of TCR clone 317876 (TRBV7-2, TRBJ2-1)
CASSSGLAGGNEQFF

SEQ ID NO: 635753 - protein, 13 aa, Homo sapiens
  CDR3 for alpha chain variable domain of TCR clone 317877 (TRAV8-2, TRAJ29)
CALPGAGNTPLGF

SEQ ID NO: 635754 - protein, 15 aa, Homo sapiens
  CDR3 for beta chain variable domain of TCR clone 317877 (TRBV12-4, TRBJ2-5)
CASSPPTGLQETQYF

SEQ ID NO: 635755 - protein, 13 aa, Homo sapiens
  CDR3 for alpha chain variable domain of TCR clone 317878 (TRAV35, TRAJ58)
CAGLETSGSRLIF

SEQ ID NO: 635756 - protein, 15 aa, Homo sapiens
  CDR3 for beta chain variable domain of TCR clone 317878 (TRBV20-1, TRBJ2-1)
CSARFSAGGLNEQFF

SEQ ID NO: 635757 - protein, 14 aa, Homo sapiens
  CDR3 for alpha chain variable domain of TCR clone 317879 (TRAV29/DV5, TRAJ44)
CAAFLVGTASKLTF

SEQ ID NO: 635758 - protein, 16 aa, Homo sapiens
  CDR3 for beta chain variable domain of TCR clone 317879 (TRBV12-5, TRBJ2-5)
CGSGPRTSGNQETQYF

SEQ ID NO: 635759 - protein, 14 aa, Homo sapiens
  CDR3 for alpha chain variable domain of TCR clone 317880 (TRAV17, TRAJ57)
CATDPQGGSEKLVC

SEQ ID NO: 635760 - protein, 14 aa, Homo sapiens
  CDR3 for beta chain variable domain of TCR clone 317880 (TRBV7-8, TRBJ2-7)
CASSPRDRVYEQYF

SEQ ID NO: 635761 - protein, 14 aa, Homo sapiens
  CDR3 for alpha chain variable domain of TCR clone 317881 (TRAV1-2, TRAJ16)
CAVNRFSGGQKLLF

SEQ ID NO: 635762 - protein, 15 aa, Homo sapiens
  CDR3 for beta chain variable domain of TCR clone 317881 (TRBV27, TRBJ1-6)
CASSFDRGLGSPLHF

SEQ ID NO: 635763 - protein, 10 aa, Homo sapiens
  CDR3 for alpha chain variable domain of TCR clone 317882 (TRAV12-1, TRAJ43)
CVARNNDMRF

SEQ ID NO: 635764 - protein, 13 aa, Homo sapiens
  CDR3 for beta chain variable domain of TCR clone 317882 (TRBV12-4, TRBJ1-2)
CASSSGLTVISTF

SEQ ID NO: 635765 - protein, 16 aa, Homo sapiens
  CDR3 for alpha chain variable domain of TCR clone 317883 (TRAV20, TRAJ53)
CAVQAESGGSNYKLTF

SEQ ID NO: 635766 - protein, 11 aa, Homo sapiens
  CDR3 for beta chain variable domain of TCR clone 317883 (TRBV12-4, TRBJ2-3)
CASSSVRGRYF

SEQ ID NO: 635767 - protein, 10 aa, Homo sapiens
  CDR3 for alpha chain variable domain of TCR clone 317884 (TRAV13-1, TRAJ7)
LIGVNNRLAF

SEQ ID NO: 635768 - protein, 16 aa, Homo sapiens
  CDR3 for beta chain variable domain of TCR clone 317884 (TRBV7-8, TRBJ2-6)
CHSEGTGESGANVLTF

SEQ ID NO: 635769 - protein, 14 aa, Homo sapiens
  CDR3 for alpha chain variable domain of TCR clone 317885 (TRAV12-1, TRAJ12)
GVVTRMDSSYKLIF

SEQ ID NO: 635770 - protein, 13 aa, Homo sapiens
  CDR3 for beta chain variable domain of TCR clone 317885 (TRBV20-1, TRBJ1-1)
CSARGGGNTEAFF

SEQ ID NO: 635771 - protein, 14 aa, Homo sapiens
  CDR3 for alpha chain variable domain of TCR clone 317886 (TRAV8-2, TRAJ11)
CVVSEKSGYSTLTF

SEQ ID NO: 635772 - protein, 16 aa, Homo sapiens
  CDR3 for beta chain variable domain of TCR clone 317886 (TRBV28, TRBJ2-1)
WASSSPEYPRDNEQFF

SEQ ID NO: 635773 - protein, 15 aa, Homo sapiens
  CDR3 for alpha chain variable domain of TCR clone 317887 (TRAV20, TRAJ50)
CAVRQMKTSYDKVIF

SEQ ID NO: 635774 - protein, 17 aa, Homo sapiens
  CDR3 for beta chain variable domain of TCR clone 317887 (TRBV28, TRBJ2-7)
CASSPLHRASGLYEQYF

SEQ ID NO: 635775 - protein, 14 aa, Homo sapiens
  CDR3 for alpha chain variable domain of TCR clone 317888 (TRAV1-2, TRAJ6)
CAVSLSGGSYIPTF

SEQ ID NO: 635776 - protein, 15 aa, Homo sapiens
  CDR3 for beta chain variable domain of TCR clone 317888 (TRBV28, TRBJ2-1)
CASSPGGRGFYEQFF

SEQ ID NO: 635777 - protein, 14 aa, Homo sapiens
  CDR3 for alpha chain variable domain of TCR clone 317889 (TRAV8-6, TRAJ9)
CAVSSYTGRFKTIF

SEQ ID NO: 635778 - protein, 15 aa, Homo sapiens
  CDR3 for beta chain variable domain of TCR clone 317889 (TRBV2, TRBJ1-2)
CASSESRTVNYGYTF

SEQ ID NO: 635779 - protein, 12 aa, Homo sapiens
  CDR3 for alpha chain variable domain of TCR clone 317890 (TRAV8-3, TRAJ20)
CAVGGGDYKLSF

SEQ ID NO: 635780 - protein, 14 aa, Homo sapiens
  CDR3 for beta chain variable domain of TCR clone 317890 (TRBV7-9, TRBJ2-5)
CASSLDTAQETQYF

SEQ ID NO: 635781 - protein, 13 aa, Homo sapiens
  CDR3 for alpha chain variable domain of TCR clone 317891 (TRAV1-2, TRAJ9)
CPALNTVGFKTIF

SEQ ID NO: 635782 - protein, 13 aa, Homo sapiens
  CDR3 for beta chain variable domain of TCR clone 317891 (TRBV19, TRBJ1-2)
CASSVPGQDGYTF

SEQ ID NO: 635783 - protein, 16 aa, Homo sapiens
  CDR3 for alpha chain variable domain of TCR clone 317892 (TRAV30, TRAJ24)
CGTEIVDAASWGKFQF

SEQ ID NO: 635784 - protein, 14 aa, Homo sapiens
  CDR3 for beta chain variable domain of TCR clone 317892 (TRBV5-1, TRBJ2-7)
CASSRGESLYEQYF

SEQ ID NO: 635785 - protein, 16 aa, Homo sapiens
  CDR3 for alpha chain variable domain of TCR clone 317893 (TRAV14/DV4, TRAJ21)
CAMREGQENNFNKFYF

SEQ ID NO: 635786 - protein, 13 aa, Homo sapiens
  CDR3 for beta chain variable domain of TCR clone 317893 (TRBV20-1, TRBJ2-7)
CSATHTSGYEQYF

SEQ ID NO: 635787 - protein, 11 aa, Homo sapiens
  CDR3 for alpha chain variable domain of TCR clone 317894 (TRAV1-2, TRAJ40)
CAVPGTSKYIF

SEQ ID NO: 635788 - protein, 13 aa, Homo sapiens
  CDR3 for beta chain variable domain of TCR clone 317894 (TRBV27, TRBJ1-4)
CASSLMGDEKLFF

SEQ ID NO: 635789 - protein, 11 aa, Homo sapiens
  CDR3 for alpha chain variable domain of TCR clone 317895 (TRAV12-1, TRAJ30)
CVVNGQDKIIF

SEQ ID NO: 635790 - protein, 15 aa, Homo sapiens
  CDR3 for beta chain variable domain of TCR clone 317895 (TRBV7-9, TRBJ1-2)
CASSLDREPNYGYTF

SEQ ID NO: 635791 - protein, 21 aa, Homo sapiens
  CDR3 for alpha chain variable domain of TCR clone 317896 (TRAV26-1, )
CIADTGVSQNPDRLAIPMARH

SEQ ID NO: 635792 - protein, 15 aa, Homo sapiens
  CDR3 for beta chain variable domain of TCR clone 317896 (TRBV7-9, TRBJ1-4)
CASSARTGGNEKLFF

SEQ ID NO: 635793 - protein, 14 aa, Homo sapiens
  CDR3 for alpha chain variable domain of TCR clone 317897 (TRAV12-3, TRAJ42)
CAMNYGGSQGNLIF

SEQ ID NO: 635794 - protein, 15 aa, Homo sapiens
  CDR3 for beta chain variable domain of TCR clone 317897 (TRBV7-3, TRBJ2-7)
CASSPPVALNYEQYF

SEQ ID NO: 635795 - protein, 12 aa, Homo sapiens
  CDR3 for alpha chain variable domain of TCR clone 317898 (TRAV16, TRAJ10)
CSRTGGGNKLTF

SEQ ID NO: 635796 - protein, 14 aa, Homo sapiens
  CDR3 for beta chain variable domain of TCR clone 317898 (TRBV7-2, TRBJ2-7)
CASRSQGAAYEQFF

SEQ ID NO: 635797 - protein, 13 aa, Homo sapiens
  CDR3 for alpha chain variable domain of TCR clone 317899 (TRAV38-2/DV8, TRAJ34)
CAYRTWNTDKLIF

SEQ ID NO: 635798 - protein, 13 aa, Homo sapiens
  CDR3 for beta chain variable domain of TCR clone 317899 (TRBV7-3, TRBJ2-1)
CASSPVAYNEQFF

SEQ ID NO: 635799 - protein, 12 aa, Homo sapiens
  CDR3 for alpha chain variable domain of TCR clone 317900 (TRAV17, TRAJ20)
CATDSNEYELSF

SEQ ID NO: 635800 - protein, 16 aa, Homo sapiens
  CDR3 for beta chain variable domain of TCR clone 317900 (TRBV7-2, TRBJ1-2)
CASSSNQDRRGHGYTF

SEQ ID NO: 635801 - protein, 13 aa, Homo sapiens
  CDR3 for alpha chain variable domain of TCR clone 317901 (TRAV27, TRAJ54)
CAGAGQGAQKLVF

SEQ ID NO: 635802 - protein, 15 aa, Homo sapiens
  CDR3 for beta chain variable domain of TCR clone 317901 (TRBV18, TRBJ2-6)
CVSSPSYAGANVLTF

SEQ ID NO: 635803 - protein, 16 aa, Homo sapiens
  CDR3 for alpha chain variable domain of TCR clone 317902 (TRAV17, TRAJ22)
CATGPISSGSARQLTF

SEQ ID NO: 635804 - protein, 13 aa, Homo sapiens
  CDR3 for beta chain variable domain of TCR clone 317902 (TRBV11-2, TRBJ2-1)
CASSLGLAGGRLF

SEQ ID NO: 635805 - protein, 13 aa, Homo sapiens
  CDR3 for alpha chain variable domain of TCR clone 317903 (TRAV12-3, TRAJ9)
CAMRNTGGFKTIF

SEQ ID NO: 635806 - protein, 12 aa, Homo sapiens
  CDR3 for beta chain variable domain of TCR clone 317903 (TRBV5-1, TRBJ1-2)
CASSQDTYGYTF

SEQ ID NO: 635807 - protein, 23 aa, Homo sapiens
  CDR3 for alpha chain variable domain of TCR clone 317904 (TRAV26-1, TRAJ38)
CIADNAGNNHIQNPDPAVDQLRA

SEQ ID NO: 635808 - protein, 13 aa, Homo sapiens
  CDR3 for beta chain variable domain of TCR clone 317904 (TRBV20-1, TRBJ1-1)
CSARGGGNTEAFF

SEQ ID NO: 635809 - protein, 15 aa, Homo sapiens
  CDR3 for alpha chain variable domain of TCR clone 317905 (TRAV2, TRAJ9)
CAVEDRGTGGFKTIF

SEQ ID NO: 635810 - protein, 13 aa, Homo sapiens
  CDR3 for beta chain variable domain of TCR clone 317905 (TRBV7-9, TRBJ1-1)
CASSRRDTRRAFF

SEQ ID NO: 635811 - protein, 16 aa, Homo sapiens
  CDR3 for alpha chain variable domain of TCR clone 317906 (TRAV16, TRAJ4)
CITVLPFSGGYNKLIF

SEQ ID NO: 635812 - protein, 14 aa, Homo sapiens
  CDR3 for beta chain variable domain of TCR clone 317906 (TRBV19, TRBJ2-7)
CASSMGKGAIEQYF

SEQ ID NO: 635813 - protein, 15 aa, Homo sapiens
  CDR3 for alpha chain variable domain of TCR clone 317907 (TRAV26-1, TRAJ29)
CIVRVEGSGNTPLVF

SEQ ID NO: 635814 - protein, 16 aa, Homo sapiens
  CDR3 for beta chain variable domain of TCR clone 317907 (TRBV5-4, TRBJ2-3)
CASQQPGAGGADTQYF

SEQ ID NO: 635815 - protein, 14 aa, Homo sapiens
  CDR3 for alpha chain variable domain of TCR clone 317908 (TRAV1-2, TRAJ16)
CAVNRFSDGKKLLF

SEQ ID NO: 635816 - protein, 16 aa, Homo sapiens
  CDR3 for beta chain variable domain of TCR clone 317908 (TRBV29-1, TRBJ2-7)
CSVEVVGTSGSYEQYF

SEQ ID NO: 635817 - protein, 11 aa, Homo sapiens
  CDR3 for alpha chain variable domain of TCR clone 317909 (TRAV3, TRAJ21)
CAVVNFHKFYF

SEQ ID NO: 635818 - protein, 17 aa, Homo sapiens
  CDR3 for beta chain variable domain of TCR clone 317909 (TRBV24-1, TRBJ2-1)
CATSDVSTSGTYNEQFF

SEQ ID NO: 635819 - protein, 15 aa, Homo sapiens
  CDR3 for alpha chain variable domain of TCR clone 317910 (TRAV35, TRAJ41)
CAGQLFSNSGYALNF

SEQ ID NO: 635820 - protein, 18 aa, Homo sapiens
  CDR3 for beta chain variable domain of TCR clone 317910 (TRBV7-3, TRBJ2-3)
CASSSTGTYPGSTDTQYF

SEQ ID NO: 635821 - protein, 16 aa, Homo sapiens
  CDR3 for alpha chain variable domain of TCR clone 317911 (TRAV27, TRAJ56)
CAGVSRKDGANSKLTF

SEQ ID NO: 635822 - protein, 11 aa, Homo sapiens
  CDR3 for beta chain variable domain of TCR clone 317911 (TRBV11-2, TRBJ2-2)
CASSLPGELFF

SEQ ID NO: 635823 - protein, 15 aa, Homo sapiens
  CDR3 for alpha chain variable domain of TCR clone 317912 (TRAV20, TRAJ53)
CAVQASGGSNHKLTF

SEQ ID NO: 635824 - protein, 12 aa, Homo sapiens
  CDR3 for beta chain variable domain of TCR clone 317912 (TRBV7-2, TRBJ2-1)
CASSPQDIEQFF

SEQ ID NO: 635825 - protein, 16 aa, Homo sapiens
  CDR3 for alpha chain variable domain of TCR clone 317913 (TRAV16, TRAJ24)
CSLSGGSTDSWGKLQF

SEQ ID NO: 635826 - protein, 15 aa, Homo sapiens
  CDR3 for beta chain variable domain of TCR clone 317913 (TRBV27, TRBJ2-1)
CASSNGGGSSNEQFF

SEQ ID NO: 635827 - protein, 17 aa, Homo sapiens
  CDR3 for alpha chain variable domain of TCR clone 317914 (TRAV17, TRAJ28)
CATDPRRGGAGRYQLTF

SEQ ID NO: 635828 - protein, 16 aa, Homo sapiens
  CDR3 for beta chain variable domain of TCR clone 317914 (TRBV19, TRBJ2-2)
CASRSPGTGATGELFF

SEQ ID NO: 635829 - protein, 16 aa, Homo sapiens
  CDR3 for alpha chain variable domain of TCR clone 317915 (TRAV3, TRAJ37)
CAVRVRGSGNTGKLIL

SEQ ID NO: 635830 - protein, 16 aa, Homo sapiens
  CDR3 for beta chain variable domain of TCR clone 317915 (TRBV11-2, TRBJ2-7)
CASSPTTGGVSYEQYF

SEQ ID NO: 635831 - protein, 13 aa, Homo sapiens
  CDR3 for alpha chain variable domain of TCR clone 317916 (TRAV12-1, TRAJ22)
CVVSSGSARQLTF

SEQ ID NO: 635832 - protein, 10 aa, Homo sapiens
  CDR3 for beta chain variable domain of TCR clone 317916 (TRBV6-3, TRBJ2-2)
CASRDGELFF

SEQ ID NO: 635833 - protein, 14 aa, Homo sapiens
  CDR3 for alpha chain variable domain of TCR clone 317917 (TRAV13-1, TRAJ45)
CAAIGGRGADGLTF

SEQ ID NO: 635834 - protein, 16 aa, Homo sapiens
  CDR3 for beta chain variable domain of TCR clone 317917 (TRBV7-2, TRBJ1-1)
CASSLGAGWTNTEAFF

SEQ ID NO: 635835 - protein, 14 aa, Homo sapiens
  CDR3 for alpha chain variable domain of TCR clone 317918 (TRAV1-2, TRAJ8)
CAVREATGFQKLAF

SEQ ID NO: 635836 - protein, 15 aa, Homo sapiens
  CDR3 for beta chain variable domain of TCR clone 317918 (TRBV6-3, TRBJ2-7)
CASSSPGTVFYEQYF

SEQ ID NO: 635837 - protein, 15 aa, Homo sapiens
  CDR3 for alpha chain variable domain of TCR clone 317919 (TRAV21, TRAJ45)
CAVSYSGGGADGLTI

SEQ ID NO: 635838 - protein, 13 aa, Homo sapiens
  CDR3 for beta chain variable domain of TCR clone 317919 (TRBV20-1, TRBJ2-5)
CSAATELQETQYF

SEQ ID NO: 635839 - protein, 10 aa, Homo sapiens
  CDR3 for alpha chain variable domain of TCR clone 317920 (TRAV12-1, TRAJ21)
CVVNPIKFYF

SEQ ID NO: 635840 - protein, 11 aa, Homo sapiens
  CDR3 for beta chain variable domain of TCR clone 317920 (TRBV11-2, TRBJ2-2)
CASSLPGELFF

SEQ ID NO: 635841 - protein, 15 aa, Homo sapiens
  CDR3 for alpha chain variable domain of TCR clone 317921 (TRAV16, TRAJ17)
CVLSGNKAAGNKLTF

SEQ ID NO: 635842 - protein, 16 aa, Homo sapiens
  CDR3 for beta chain variable domain of TCR clone 317921 (TRBV7-6, TRBJ1-6)
CASSSLPAGEYSPLHF

SEQ ID NO: 635843 - protein, 11 aa, Homo sapiens
  CDR3 for alpha chain variable domain of TCR clone 317922 (TRAV2, TRAJ13)
CASGGYQKVTF

SEQ ID NO: 635844 - protein, 13 aa, Homo sapiens
  CDR3 for beta chain variable domain of TCR clone 317922 (TRBV5-1, TRBJ2-1)
CASRPFGYNEQFF

SEQ ID NO: 635845 - protein, 23 aa, Homo sapiens
  CDR3 for alpha chain variable domain of TCR clone 317923 (TRAV8-6, TRAJ4)
RKPSVHISDTAEYFWAVSEKMVF

SEQ ID NO: 635846 - protein, 14 aa, Homo sapiens
  CDR3 for beta chain variable domain of TCR clone 317923 (TRBV20-1, TRBJ1-1)
CSAQTRIGGTEAFF

SEQ ID NO: 635847 - protein, 12 aa, Homo sapiens
  CDR3 for alpha chain variable domain of TCR clone 317924 (TRAV17, TRAJ20)
CATQSNDYKLSC

SEQ ID NO: 635848 - protein, 13 aa, Homo sapiens
  CDR3 for beta chain variable domain of TCR clone 317924 (TRBV10-3, TRBJ1-1)
CAIIPEGGTEAFF

SEQ ID NO: 635849 - protein, 16 aa, Homo sapiens
  CDR3 for alpha chain variable domain of TCR clone 317925 (TRAV30, TRAJ24)
CGTEIVDADSWGKFQF

SEQ ID NO: 635850 - protein, 14 aa, Homo sapiens
  CDR3 for beta chain variable domain of TCR clone 317925 (TRBV20-1, TRBJ2-1)
CSPNDEASYNEQFF

SEQ ID NO: 635851 - protein, 13 aa, Homo sapiens
  CDR3 for alpha chain variable domain of TCR clone 317926 (TRAV2, TRAJ15)
CAVASQAGTALIF

SEQ ID NO: 635852 - protein, 15 aa, Homo sapiens
  CDR3 for beta chain variable domain of TCR clone 317926 (TRBV25-1, TRBJ1-4)
CASSGSGTGIEKLFF

SEQ ID NO: 635853 - protein, 13 aa, Homo sapiens
  CDR3 for alpha chain variable domain of TCR clone 317927 (TRAV1-1, TRAJ9)
CAAKNTGGFKTIF

SEQ ID NO: 635854 - protein, 14 aa, Homo sapiens
  CDR3 for beta chain variable domain of TCR clone 317927 (TRBV11-2, TRBJ2-7)
CASSSTGEGYEQYF

SEQ ID NO: 635855 - protein, 12 aa, Homo sapiens
  CDR3 for alpha chain variable domain of TCR clone 317928 (TRAV17, TRAJ20)
CATLANDYKLSF

SEQ ID NO: 635856 - protein, 11 aa, Homo sapiens
  CDR3 for beta chain variable domain of TCR clone 317928 (TRBV10-3, TRBJ1-2)
CAISEETPTMA

SEQ ID NO: 635857 - protein, 16 aa, Homo sapiens
  CDR3 for alpha chain variable domain of TCR clone 317929 (TRAV30, TRAJ24)
CGTEIVDADGWGKFQV

SEQ ID NO: 635858 - protein, 14 aa, Homo sapiens
  CDR3 for beta chain variable domain of TCR clone 317929 (TRBV12-5, TRBJ2-5)
CASGSRTHQETQYF

SEQ ID NO: 635859 - protein, 15 aa, Homo sapiens
  CDR3 for alpha chain variable domain of TCR clone 317930 (TRAV23/DV6, TRAJ18)
CAERYRGSTLGRLYF

SEQ ID NO: 635860 - protein, 13 aa, Homo sapiens
  CDR3 for beta chain variable domain of TCR clone 317930 (TRBV7-2, TRBJ2-7)
CASSSPSGSEQYF

SEQ ID NO: 635861 - protein, 16 aa, Homo sapiens
  CDR3 for alpha chain variable domain of TCR clone 317931 (TRAV14/DV4, TRAJ20)
CAMREGRSRDDYKLSF

SEQ ID NO: 635862 - protein, 15 aa, Homo sapiens
  CDR3 for beta chain variable domain of TCR clone 317931 (TRBV27, TRBJ2-1)
CASSLARGAYNEQFF

SEQ ID NO: 635863 - protein, 13 aa, Homo sapiens
  CDR3 for alpha chain variable domain of TCR clone 317932 (TRAV2, TRAJ40)
CAVVTSGTYKYIF

SEQ ID NO: 635864 - protein, 14 aa, Homo sapiens
  CDR3 for beta chain variable domain of TCR clone 317932 (TRBV19, TRBJ2-1)
CASPTFVVSGEQFL

SEQ ID NO: 635865 - protein, 16 aa, Homo sapiens
  CDR3 for alpha chain variable domain of TCR clone 317933 (TRAV12-1, TRAJ45)
CVVIRYSGGGADGLTF

SEQ ID NO: 635866 - protein, 14 aa, Homo sapiens
  CDR3 for beta chain variable domain of TCR clone 317933 (TRBV20-1, TRBJ2-1)
CSAHPGLPYNEQFF

SEQ ID NO: 635867 - protein, 13 aa, Homo sapiens
  CDR3 for alpha chain variable domain of TCR clone 317934 (TRAV12-2, TRAJ37)
CAGGSGNTGKLIF

SEQ ID NO: 635868 - protein, 14 aa, Homo sapiens
  CDR3 for beta chain variable domain of TCR clone 317934 (TRBV6-1, TRBJ2-6)
CASQQGAGTNVLTF

SEQ ID NO: 635869 - protein, 16 aa, Homo sapiens
  CDR3 for alpha chain variable domain of TCR clone 317935 (TRAV16, TRAJ4)
CARSRMFSGGYNKLIF

SEQ ID NO: 635870 - protein, 12 aa, Homo sapiens
  CDR3 for beta chain variable domain of TCR clone 317935 (TRBV11-3, TRBJ2-1)
CASSPGNNEQFF

SEQ ID NO: 635871 - protein, 16 aa, Homo sapiens
  CDR3 for alpha chain variable domain of TCR clone 317936 (TRAV3, TRAJ10)
CAVRYMNAGGGNKLTF

SEQ ID NO: 635872 - protein, 16 aa, Homo sapiens
  CDR3 for beta chain variable domain of TCR clone 317936 (TRBV6-3, TRBJ1-2)
CASSYSRRASNYGYTF

SEQ ID NO: 635873 - protein, 12 aa, Homo sapiens
  CDR3 for alpha chain variable domain of TCR clone 317937 (TRAV13-1, TRAJ15)
CAARQAGTALIF

SEQ ID NO: 635874 - protein, 18 aa, Homo sapiens
  CDR3 for beta chain variable domain of TCR clone 317937 (TRBV7-9, TRBJ2-3)
CASSLPINGQISTDTQYF

SEQ ID NO: 635875 - protein, 12 aa, Homo sapiens
  CDR3 for alpha chain variable domain of TCR clone 317938 (TRAV17, TRAJ12)
CAGGDSSYKLIF

SEQ ID NO: 635876 - protein, 12 aa, Homo sapiens
  CDR3 for beta chain variable domain of TCR clone 317938 (TRBV29-1, TRBJ1-1)
CSESYGNTEAFF

SEQ ID NO: 635877 - protein, 12 aa, Homo sapiens
  CDR3 for alpha chain variable domain of TCR clone 317939 (TRAV27, TRAJ35)
CAGADFGNVLHC

SEQ ID NO: 635878 - protein, 16 aa, Homo sapiens
  CDR3 for beta chain variable domain of TCR clone 317939 (TRBV6-1, TRBJ2-1)
CASIVRQGSSYNKQFF

SEQ ID NO: 635879 - protein, 12 aa, Homo sapiens
  CDR3 for alpha chain variable domain of TCR clone 317940 (TRAV8-3, TRAJ27)
CAVGAEVGKSTF

SEQ ID NO: 635880 - protein, 14 aa, Homo sapiens
  CDR3 for beta chain variable domain of TCR clone 317940 (TRBV2, TRBJ2-1)
CASRLIVGHDEQFF

SEQ ID NO: 635881 - protein, 14 aa, Homo sapiens
  CDR3 for alpha chain variable domain of TCR clone 317941 (TRAV12-2, TRAJ24)
CAVTPADSRGKLQF

SEQ ID NO: 635882 - protein, 15 aa, Homo sapiens
  CDR3 for beta chain variable domain of TCR clone 317941 (TRBV9, TRBJ1-6)
CASSVAGTGDSPLHF

SEQ ID NO: 635883 - protein, 11 aa, Homo sapiens
  CDR3 for alpha chain variable domain of TCR clone 317942 (TRAV2, TRAJ13)
CASGGYQKVTF

SEQ ID NO: 635884 - protein, 16 aa, Homo sapiens
  CDR3 for beta chain variable domain of TCR clone 317942 (TRBV13, TRBJ2-2)
CASSPRKGEHTGELFF

SEQ ID NO: 635885 - protein, 14 aa, Homo sapiens
  CDR3 for alpha chain variable domain of TCR clone 317943 (TRAV9-2, TRAJ36)
CALPWRTGANNRFF

SEQ ID NO: 635886 - protein, 14 aa, Homo sapiens
  CDR3 for beta chain variable domain of TCR clone 317943 (TRBV2, TRBJ1-2)
CASSELQVNYGYTF

SEQ ID NO: 635887 - protein, 12 aa, Homo sapiens
  CDR3 for alpha chain variable domain of TCR clone 317944 (TRAV8-3, TRAJ41)
CAVALSGYALNF

SEQ ID NO: 635888 - protein, 16 aa, Homo sapiens
  CDR3 for beta chain variable domain of TCR clone 317944 (TRBV27, TRBJ2-7)
CASSSERRDRAYEQYF

SEQ ID NO: 635889 - protein, 16 aa, Homo sapiens
  CDR3 for alpha chain variable domain of TCR clone 317945 (TRAV30, TRAJ24)
CGTEIVDADRWGKFQF

SEQ ID NO: 635890 - protein, 12 aa, Homo sapiens
  CDR3 for beta chain variable domain of TCR clone 317945 (TRBV11-2, TRBJ2-1)
CASSPGNNEQFF

SEQ ID NO: 635891 - protein, 14 aa, Homo sapiens
  CDR3 for alpha chain variable domain of TCR clone 317946 (TRAV12-1, TRAJ4)
CVVPLKSGYNKLIF

SEQ ID NO: 635892 - protein, 15 aa, Homo sapiens
  CDR3 for beta chain variable domain of TCR clone 317946 (TRBV18, TRBJ2-7)
CAISPRSGTAYEQYF

SEQ ID NO: 635893 - protein, 12 aa, Homo sapiens
  CDR3 for alpha chain variable domain of TCR clone 317947 (TRAV8-6, TRAJ43)
CAVSHNNNDMSF

SEQ ID NO: 635894 - protein, 14 aa, Homo sapiens
  CDR3 for beta chain variable domain of TCR clone 317947 (TRBV10-3, TRBJ1-1)
CAISDGSGVTEAFF

SEQ ID NO: 635895 - protein, 14 aa, Homo sapiens
  CDR3 for alpha chain variable domain of TCR clone 317948 (TRAV14/DV4, TRAJ54)
CAMREAPGDQKLVF

SEQ ID NO: 635896 - protein, 15 aa, Homo sapiens
  CDR3 for beta chain variable domain of TCR clone 317948 (TRBV5-1, TRBJ2-7)
CASSLNGGPAREQYF

SEQ ID NO: 635897 - protein, 15 aa, Homo sapiens
  CDR3 for alpha chain variable domain of TCR clone 317949 (TRAV8-4, TRAJ47)
CAVSDPEEYGNKLVF

SEQ ID NO: 635898 - protein, 15 aa, Homo sapiens
  CDR3 for beta chain variable domain of TCR clone 317949 (TRBV11-2, TRBJ2-1)
CASSLGPDSYDEQFF

SEQ ID NO: 635899 - protein, 13 aa, Homo sapiens
  CDR3 for alpha chain variable domain of TCR clone 317950 (TRAV13-1, TRAJ39)
CSKYSNAGNMLTF

SEQ ID NO: 635900 - protein, 16 aa, Homo sapiens
  CDR3 for beta chain variable domain of TCR clone 317950 (TRBV7-2, TRBJ2-3)
FASSLVALYSTDTQYF

SEQ ID NO: 635901 - protein, 14 aa, Homo sapiens
  CDR3 for alpha chain variable domain of TCR clone 317951 (TRAV12-2, TRAJ17)
CAVLFKAAGNKLTF

SEQ ID NO: 635902 - protein, 11 aa, Homo sapiens
  CDR3 for beta chain variable domain of TCR clone 317951 (TRBV2, TRBJ1-2)
CASSPGNGYTF

SEQ ID NO: 635903 - protein, 13 aa, Homo sapiens
  CDR3 for alpha chain variable domain of TCR clone 317952 (TRAV38-1, TRAJ34)
CAFMKFNTDKLIF

SEQ ID NO: 635904 - protein, 17 aa, Homo sapiens
  CDR3 for beta chain variable domain of TCR clone 317952 (TRBV19, TRBJ2-1)
WASSSPARGSSYNEQFF

SEQ ID NO: 635905 - protein, 11 aa, Homo sapiens
  CDR3 for alpha chain variable domain of TCR clone 317953 (TRAV21, TRAJ34)
CAHYNTDKLIF

SEQ ID NO: 635906 - protein, 16 aa, Homo sapiens
  CDR3 for beta chain variable domain of TCR clone 317953 (TRBV4-1, TRBJ1-1)
CASSQDAGMGNTEAFF

SEQ ID NO: 635907 - protein, 14 aa, Homo sapiens
  CDR3 for alpha chain variable domain of TCR clone 317954 (TRAV1-2, TRAJ16)
CAFNRFSDGQKLLF

SEQ ID NO: 635908 - protein, 16 aa, Homo sapiens
  CDR3 for beta chain variable domain of TCR clone 317954 (TRBV20-1, TRBJ1-4)
CSAPGQCLLTNEKLFF

SEQ ID NO: 635909 - protein, 12 aa, Homo sapiens
  CDR3 for alpha chain variable domain of TCR clone 317955 (TRAV21, TRAJ13)
PSPSGGYQQVTF

SEQ ID NO: 635910 - protein, 15 aa, Homo sapiens
  CDR3 for beta chain variable domain of TCR clone 317955 (TRBV7-9, TRBJ1-6)
CASSSPGRGNSPLHF

SEQ ID NO: 635911 - protein, 14 aa, Homo sapiens
  CDR3 for alpha chain variable domain of TCR clone 317956 (TRAV1-2, TRAJ8)
CAVREDKGFQKLVF

SEQ ID NO: 635912 - protein, 15 aa, Homo sapiens
  CDR3 for beta chain variable domain of TCR clone 317956 (TRBV3-1, TRBJ2-7)
CASSQVRQGAYEQYF

SEQ ID NO: 635913 - protein, 15 aa, Homo sapiens
  CDR3 for alpha chain variable domain of TCR clone 317957 (TRAV2, TRAJ24)
CAVVRLKNSWGKLQF

SEQ ID NO: 635914 - protein, 14 aa, Homo sapiens
  CDR3 for beta chain variable domain of TCR clone 317957 (TRBV7-8, TRBJ2-7)
CASSPRDRVYEQYF

SEQ ID NO: 635915 - protein, 13 aa, Homo sapiens
  CDR3 for alpha chain variable domain of TCR clone 317958 (TRAV12-3, TRAJ13)
CAMEFWGLPESYL

SEQ ID NO: 635916 - protein, 14 aa, Homo sapiens
  CDR3 for beta chain variable domain of TCR clone 317958 (TRBV4-1, TRBJ1-6)
CANSPGSDSSPLHF

SEQ ID NO: 635917 - protein, 13 aa, Homo sapiens
  CDR3 for alpha chain variable domain of TCR clone 317959 (TRAV16, TRAJ30)
CALAQNRDDKIIF

SEQ ID NO: 635918 - protein, 20 aa, Homo sapiens
  CDR3 for beta chain variable domain of TCR clone 317959 (TRBV19, TRBJ1-6)
CASSVRPSTGVVIRPSTLGM

SEQ ID NO: 635919 - protein, 11 aa, Homo sapiens
  CDR3 for alpha chain variable domain of TCR clone 317960 (TRAV2, TRAJ13)
CASGGYQKVTF

SEQ ID NO: 635920 - protein, 14 aa, Homo sapiens
  CDR3 for beta chain variable domain of TCR clone 317960 (TRBV12-5, TRBJ2-5)
CASGSRTDQETQYF

SEQ ID NO: 635921 - protein, 14 aa, Homo sapiens
  CDR3 for alpha chain variable domain of TCR clone 317961 (TRAV17, TRAJ33)
CARTWGDSNYQLIW

SEQ ID NO: 635922 - protein, 16 aa, Homo sapiens
  CDR3 for beta chain variable domain of TCR clone 317961 (TRBV2, TRBJ2-1)
CASSVGGSLSYNEQFF

SEQ ID NO: 635923 - protein, 12 aa, Homo sapiens
  CDR3 for alpha chain variable domain of TCR clone 317962 (TRAV4, TRAJ6)
CLAPGGSYIPTF

SEQ ID NO: 635924 - protein, 18 aa, Homo sapiens
  CDR3 for beta chain variable domain of TCR clone 317962 (TRBV20-1, TRBJ2-3)
CSASGLAGGTGTTDTQYF

SEQ ID NO: 635925 - protein, 16 aa, Homo sapiens
  CDR3 for alpha chain variable domain of TCR clone 317963 (TRAV12-1, TRAJ48)
CVVNNKANFGNEKLTF

SEQ ID NO: 635926 - protein, 14 aa, Homo sapiens
  CDR3 for beta chain variable domain of TCR clone 317963 (TRBV4-1, TRBJ1-2)
CASSQDGQVRGYTF

SEQ ID NO: 635927 - protein, 17 aa, Homo sapiens
  CDR3 for alpha chain variable domain of TCR clone 317964 (TRAV26-1, TRAJ53)
CIVRVDDSGGRNYKLTF

SEQ ID NO: 635928 - protein, 12 aa, Homo sapiens
  CDR3 for beta chain variable domain of TCR clone 317964 (TRBV12-4, TRBJ2-7)
CASSLGGYEQYF

SEQ ID NO: 635929 - protein, 11 aa, Homo sapiens
  CDR3 for alpha chain variable domain of TCR clone 317965 (TRAV12-2, TRAJ49)
CALQGGNQCYF

SEQ ID NO: 635930 - protein, 14 aa, Homo sapiens
  CDR3 for beta chain variable domain of TCR clone 317965 (TRBV7-2, TRBJ2-7)
CASSPKTSFYEQYF

SEQ ID NO: 635931 - protein, 13 aa, Homo sapiens
  CDR3 for alpha chain variable domain of TCR clone 317966 (TRAV26-1, TRAJ20)
CIVSMTNDYKLSF

SEQ ID NO: 635932 - protein, 14 aa, Homo sapiens
  CDR3 for beta chain variable domain of TCR clone 317966 (TRBV5-5, TRBJ1-5)
CASSGQGVDQPQHF

SEQ ID NO: 635933 - protein, 21 aa, Homo sapiens
  CDR3 for alpha chain variable domain of TCR clone 317967 (TRAV8-3, TRAJ32)
CAVEVVLQTSSSLELALCLLC

SEQ ID NO: 635934 - protein, 12 aa, Homo sapiens
  CDR3 for beta chain variable domain of TCR clone 317967 (TRBV7-8, TRBJ2-7)
CASSLGDREQYF

SEQ ID NO: 635935 - protein, 14 aa, Homo sapiens
  CDR3 for alpha chain variable domain of TCR clone 317968 (TRAV12-2, TRAJ17)
CAALFKAAGNKLTF

SEQ ID NO: 635936 - protein, 14 aa, Homo sapiens
  CDR3 for beta chain variable domain of TCR clone 317968 (TRBV24-1, TRBJ1-1)
CATSIPRGDTEAFF

SEQ ID NO: 635937 - protein, 16 aa, Homo sapiens
  CDR3 for alpha chain variable domain of TCR clone 317969 (TRAV30, TRAJ24)
CGTEIVDADSWGKFQF

SEQ ID NO: 635938 - protein, 18 aa, Homo sapiens
  CDR3 for beta chain variable domain of TCR clone 317969 (TRBV7-9, TRBJ2-7)
CASSLTTSGSRTWYEEYF

SEQ ID NO: 635939 - protein, 16 aa, Homo sapiens
  CDR3 for alpha chain variable domain of TCR clone 317970 (TRAV13-1, TRAJ18)
CAASRMRGSTLGRLYF

SEQ ID NO: 635940 - protein, 15 aa, Homo sapiens
  CDR3 for beta chain variable domain of TCR clone 317970 (TRBV29-1, TRBJ2-1)
CSVGRHALFYNEQFF

SEQ ID NO: 635941 - protein, 10 aa, Homo sapiens
  CDR3 for alpha chain variable domain of TCR clone 317971 (TRAV12-3, TRAJ49)
CAMNDDQFYF

SEQ ID NO: 635942 - protein, 13 aa, Homo sapiens
  CDR3 for beta chain variable domain of TCR clone 317971 (TRBV11-2, TRBJ1-3)
CASSLEPVNTIYF

SEQ ID NO: 635943 - protein, 12 aa, Homo sapiens
  CDR3 for alpha chain variable domain of TCR clone 317972 (TRAV30, TRAJ39)
CGRGNAGNMLTF

SEQ ID NO: 635944 - protein, 14 aa, Homo sapiens
  CDR3 for beta chain variable domain of TCR clone 317972 (TRBV7-2, TRBJ2-2)
CASRGQGAAGELFF

SEQ ID NO: 635945 - protein, 15 aa, Homo sapiens
  CDR3 for alpha chain variable domain of TCR clone 317973 (TRAV23/DV6, TRAJ21)
CSKQRGRDNFNKFYF

SEQ ID NO: 635946 - protein, 12 aa, Homo sapiens
  CDR3 for beta chain variable domain of TCR clone 317973 (TRBV24-1, TRBJ1-4)
CATSDPNEKLFF

SEQ ID NO: 635947 - protein, 15 aa, Homo sapiens
  CDR3 for alpha chain variable domain of TCR clone 317974 (TRAV26-1, TRAJ29)
CIVRVEGSGNTPLVF

SEQ ID NO: 635948 - protein, 14 aa, Homo sapiens
  CDR3 for beta chain variable domain of TCR clone 317974 (TRBV25-1, TRBJ1-1)
CASTPLGGNTEALF

SEQ ID NO: 635949 - protein, 12 aa, Homo sapiens
  CDR3 for alpha chain variable domain of TCR clone 317975 (TRAV26-1, TRAJ38)
CIADNAGNNHIQ

SEQ ID NO: 635950 - protein, 17 aa, Homo sapiens
  CDR3 for beta chain variable domain of TCR clone 317975 (TRBV11-2, TRBJ2-6)
CASSQRDIFSGANVLTF

SEQ ID NO: 635951 - protein, 14 aa, Homo sapiens
  CDR3 for alpha chain variable domain of TCR clone 317976 (TRAV13-1, TRAJ23)
SAASRLGRGGKLIF

SEQ ID NO: 635952 - protein, 15 aa, Homo sapiens
  CDR3 for beta chain variable domain of TCR clone 317976 (TRBV7-2, TRBJ2-1)
CASSLVAGRYNEQFF

SEQ ID NO: 635953 - protein, 14 aa, Homo sapiens
  CDR3 for alpha chain variable domain of TCR clone 317977 (TRAV8-3, TRAJ23)
CAVITYNQGGKLIF

SEQ ID NO: 635954 - protein, 15 aa, Homo sapiens
  CDR3 for beta chain variable domain of TCR clone 317977 (TRBV18, TRBJ2-1)
CASSPPSASYNEQFF

SEQ ID NO: 635955 - protein, 17 aa, Homo sapiens
  CDR3 for alpha chain variable domain of TCR clone 317978 (TRAV3, TRAJ42)
CAVRDRDYRGSQGNLIF

SEQ ID NO: 635956 - protein, 14 aa, Homo sapiens
  CDR3 for beta chain variable domain of TCR clone 317978 (TRBV7-2, TRBJ2-5)
CASSPRGSSDTQYF

SEQ ID NO: 635957 - protein, 14 aa, Homo sapiens
  CDR3 for alpha chain variable domain of TCR clone 317979 (TRAV13-1, TRAJ44)
CAAKATGTASKLTF

SEQ ID NO: 635958 - protein, 16 aa, Homo sapiens
  CDR3 for beta chain variable domain of TCR clone 317979 (TRBV15, TRBJ1-2)
CATSRGPRAGGGGYTF

SEQ ID NO: 635959 - protein, 12 aa, Homo sapiens
  CDR3 for alpha chain variable domain of TCR clone 317980 (TRAV12-2, TRAJ10)
WGVTGGGNKLTF

SEQ ID NO: 635960 - protein, 12 aa, Homo sapiens
  CDR3 for beta chain variable domain of TCR clone 317980 (TRBV12-5, TRBJ2-5)
CASGQGVETQYF

SEQ ID NO: 635961 - protein, 19 aa, Homo sapiens
  CDR3 for alpha chain variable domain of TCR clone 317981 (TRAV2, TRAJ32)
TTVLSTPPSQGGATNKLIF

SEQ ID NO: 635962 - protein, 12 aa, Homo sapiens
  CDR3 for beta chain variable domain of TCR clone 317981 (TRBV20-1, TRBJ2-7)
CSAITPTKEQYF

SEQ ID NO: 635963 - protein, 20 aa, Homo sapiens
  CDR3 for alpha chain variable domain of TCR clone 317982 (TRAV1-1, TRAJ4)
CLLLLRCEGFLSGGYNKLIF

SEQ ID NO: 635964 - protein, 15 aa, Homo sapiens
  CDR3 for beta chain variable domain of TCR clone 317982 (TRBV20-1, TRBJ2-7)
CSARDRVSGMDEQYF

SEQ ID NO: 635965 - protein, 16 aa, Homo sapiens
  CDR3 for alpha chain variable domain of TCR clone 317983 (TRAV30, TRAJ24)
CGTEIVDADSWGKFQF

SEQ ID NO: 635966 - protein, 16 aa, Homo sapiens
  CDR3 for beta chain variable domain of TCR clone 317983 (TRBV28, TRBJ2-7)
CASSPWVATVDLSQYF

SEQ ID NO: 635967 - protein, 15 aa, Homo sapiens
  CDR3 for alpha chain variable domain of TCR clone 317984 (TRAV3, TRAJ20)
CAVRDIKLSDYKLSF

SEQ ID NO: 635968 - protein, 15 aa, Homo sapiens
  CDR3 for beta chain variable domain of TCR clone 317984 (TRBV7-9, TRBJ1-6)
CARSAPGRGNSPLHF

SEQ ID NO: 635969 - protein, 14 aa, Homo sapiens
  CDR3 for alpha chain variable domain of TCR clone 317985 (TRAV12-2, TRAJ17)
CAVSIKAAGNKLTF

SEQ ID NO: 635970 - protein, 16 aa, Homo sapiens
  CDR3 for beta chain variable domain of TCR clone 317985 (TRBV20-1, TRBJ2-6)
CSASSQGYDGANVLTF

SEQ ID NO: 635971 - protein, 16 aa, Homo sapiens
  CDR3 for alpha chain variable domain of TCR clone 317986 (TRAV13-1, TRAJ52)
CAAFARAGTSYGKLTF

SEQ ID NO: 635972 - protein, 13 aa, Homo sapiens
  CDR3 for beta chain variable domain of TCR clone 317986 (TRBV7-3, TRBJ1-1)
CASSQDWGAEAFF

SEQ ID NO: 635973 - protein, 14 aa, Homo sapiens
  CDR3 for alpha chain variable domain of TCR clone 317987 (TRAV17, TRAJ53)
CATDAGGSNYKLTF

SEQ ID NO: 635974 - protein, 15 aa, Homo sapiens
  CDR3 for beta chain variable domain of TCR clone 317987 (TRBV7-9, TRBJ1-5)
CASSQGHQPNQPQHF

SEQ ID NO: 635975 - protein, 15 aa, Homo sapiens
  CDR3 for alpha chain variable domain of TCR clone 317988 (TRAV8-6, TRAJ10)
CAVSDQAGGGNKLTF

SEQ ID NO: 635976 - protein, 14 aa, Homo sapiens
  CDR3 for beta chain variable domain of TCR clone 317988 (TRBV25-1, TRBJ1-1)
CASTHLGGNTEAFF

SEQ ID NO: 635977 - protein, 14 aa, Homo sapiens
  CDR3 for alpha chain variable domain of TCR clone 317989 (TRAV12-2, TRAJ17)
CAVLFKAAGNKLPF

SEQ ID NO: 635978 - protein, 14 aa, Homo sapiens
  CDR3 for beta chain variable domain of TCR clone 317989 (TRBV15, TRBJ1-2)
CATSRDFDRVGYTF

SEQ ID NO: 635979 - protein, 15 aa, Homo sapiens
  CDR3 for alpha chain variable domain of TCR clone 317990 (TRAV8-3, TRAJ45)
RASSYSGGGADGLTF

SEQ ID NO: 635980 - protein, 13 aa, Homo sapiens
  CDR3 for beta chain variable domain of TCR clone 317990 (TRBV10-3, TRBJ2-7)
CASKLAVNYEQYL

SEQ ID NO: 635981 - protein, 15 aa, Homo sapiens
  CDR3 for alpha chain variable domain of TCR clone 317991 (TRAV21, TRAJ10)
CAVTLLTGGGNKLTF

SEQ ID NO: 635982 - protein, 14 aa, Homo sapiens
  CDR3 for beta chain variable domain of TCR clone 317991 (TRBV12-4, TRBJ1-1)
CASSLGTGGTEAFF

SEQ ID NO: 635983 - protein, 14 aa, Homo sapiens
  CDR3 for alpha chain variable domain of TCR clone 317992 (TRAV26-1, TRAJ38)
CIADNAGNNRKLIW

SEQ ID NO: 635984 - protein, 13 aa, Homo sapiens
  CDR3 for beta chain variable domain of TCR clone 317992 (TRBV20-1, TRBJ2-2)
CSASAAGSGELFF

SEQ ID NO: 635985 - protein, 15 aa, Homo sapiens
  CDR3 for alpha chain variable domain of TCR clone 317993 (TRAV8-3, TRAJ40)
CAAPSLGSGTYKYIF

SEQ ID NO: 635986 - protein, 16 aa, Homo sapiens
  CDR3 for beta chain variable domain of TCR clone 317993 (TRBV7-3, TRBJ2-3)
CASGLSGYRPEDTQYF

SEQ ID NO: 635987 - protein, 13 aa, Homo sapiens
  CDR3 for alpha chain variable domain of TCR clone 317994 (TRAV14/DV4, TRAJ4)
CAMNAGGYNKLIF

SEQ ID NO: 635988 - protein, 15 aa, Homo sapiens
  CDR3 for beta chain variable domain of TCR clone 317994 (TRBV11-3, TRBJ1-1)
CASSLGGPGDTEAFF

SEQ ID NO: 635989 - protein, 15 aa, Homo sapiens
  CDR3 for alpha chain variable domain of TCR clone 317995 (TRAV17, TRAJ10)
CATVLLTGGGNKLTF

SEQ ID NO: 635990 - protein, 12 aa, Homo sapiens
  CDR3 for beta chain variable domain of TCR clone 317995 (TRBV2, TRBJ1-5)
CASARAGQPQHF

SEQ ID NO: 635991 - protein, 14 aa, Homo sapiens
  CDR3 for alpha chain variable domain of TCR clone 317996 (TRAV3, TRAJ34)
CAVRAPGNTDKLIF

SEQ ID NO: 635992 - protein, 17 aa, Homo sapiens
  CDR3 for beta chain variable domain of TCR clone 317996 (TRBV20-1, TRBJ2-7)
CSAAPGLARGISYEQDF

SEQ ID NO: 635993 - protein, 15 aa, Homo sapiens
  CDR3 for alpha chain variable domain of TCR clone 317997 (TRAV8-4, TRAJ6)
CAVSAPSGGSYIPTF

SEQ ID NO: 635994 - protein, 16 aa, Homo sapiens
  CDR3 for beta chain variable domain of TCR clone 317997 (TRBV2, TRBJ1-1)
CASSPPNRGMNTEAFF

SEQ ID NO: 635995 - protein, 13 aa, Homo sapiens
  CDR3 for alpha chain variable domain of TCR clone 317998 (TRAV20, TRAJ37)
CAGCSSNTRKLIF

SEQ ID NO: 635996 - protein, 21 aa, Homo sapiens
  CDR3 for beta chain variable domain of TCR clone 317998 (TRBV9, TRBJ2-5)
CASRGRLAGGPEDPVLRARHA

SEQ ID NO: 635997 - protein, 12 aa, Homo sapiens
  CDR3 for alpha chain variable domain of TCR clone 317999 (TRAV12-3, TRAJ17)
CAMTLTGNKLTF

SEQ ID NO: 635998 - protein, 15 aa, Homo sapiens
  CDR3 for beta chain variable domain of TCR clone 317999 (TRBV11-2, TRBJ2-7)
CASSLAGGVATEQYF

SEQ ID NO: 635999 - protein, 12 aa, Homo sapiens
  CDR3 for alpha chain variable domain of TCR clone 318000 (TRAV24, TRAJ5)
CALDTGSRALTF

SEQ ID NO: 636000 - protein, 15 aa, Homo sapiens
  CDR3 for beta chain variable domain of TCR clone 318000 (TRBV29-1, TRBJ2-3)
CSVEVTTGDTDTQYF

SEQ ID NO: 636001 - protein, 12 aa, Homo sapiens
  CDR3 for alpha chain variable domain of TCR clone 318001 (TRAV2, TRAJ10)
CASTGGGNKLTF

SEQ ID NO: 636002 - protein, 14 aa, Homo sapiens
  CDR3 for beta chain variable domain of TCR clone 318001 (TRBV7-9, TRBJ2-5)
CASSLAPDQETQYF

SEQ ID NO: 636003 - protein, 16 aa, Homo sapiens
  CDR3 for alpha chain variable domain of TCR clone 318002 (TRAV12-2, TRAJ28)
CAVLTDSGDGSYQLTF

SEQ ID NO: 636004 - protein, 14 aa, Homo sapiens
  CDR3 for beta chain variable domain of TCR clone 318002 (TRBV25-1, TRBJ1-1)
CASTHLGGNTEAFF

SEQ ID NO: 636005 - protein, 15 aa, Homo sapiens
  CDR3 for alpha chain variable domain of TCR clone 318003 (TRAV2, TRAJ28)
CAVPYSGAGSYQLTF

SEQ ID NO: 636006 - protein, 17 aa, Homo sapiens
  CDR3 for beta chain variable domain of TCR clone 318003 (TRBV20-1, TRBJ2-4)
CSARDWASGGRENIQYC

SEQ ID NO: 636007 - protein, 13 aa, Homo sapiens
  CDR3 for alpha chain variable domain of TCR clone 318004 (TRAV2, TRAJ29)
CAAGNSGNTPLVF

SEQ ID NO: 636008 - protein, 14 aa, Homo sapiens
  CDR3 for beta chain variable domain of TCR clone 318004 (TRBV7-9, TRBJ2-7)
CASSLDRPTDEQYF

SEQ ID NO: 636009 - protein, 15 aa, Homo sapiens
  CDR3 for alpha chain variable domain of TCR clone 318005 (TRAV12-3, TRAJ6)
CAMSATTGGSYIPKF

SEQ ID NO: 636010 - protein, 16 aa, Homo sapiens
  CDR3 for beta chain variable domain of TCR clone 318005 (TRBV20-1, TRBJ1-2)
CSASMGQGVANYGDTF

SEQ ID NO: 636011 - protein, 13 aa, Homo sapiens
  CDR3 for alpha chain variable domain of TCR clone 318006 (TRAV21, TRAJ27)
CAARPGNAGKSTF

SEQ ID NO: 636012 - protein, 14 aa, Homo sapiens
  CDR3 for beta chain variable domain of TCR clone 318006 (TRBV6-1, TRBJ1-3)
CASVQGGGGNTMYF

SEQ ID NO: 636013 - protein, 13 aa, Homo sapiens
  CDR3 for alpha chain variable domain of TCR clone 318007 (TRAV3, TRAJ15)
CAVRDQAGTALIF

SEQ ID NO: 636014 - protein, 12 aa, Homo sapiens
  CDR3 for beta chain variable domain of TCR clone 318007 (TRBV11-3, TRBJ2-2)
CASSLPTGELFF

SEQ ID NO: 636015 - protein, 14 aa, Homo sapiens
  CDR3 for alpha chain variable domain of TCR clone 318008 (TRAV12-3, TRAJ33)
CAMSVPGSNYQLIW

SEQ ID NO: 636016 - protein, 16 aa, Homo sapiens
  CDR3 for beta chain variable domain of TCR clone 318008 (TRBV7-3, TRBJ2-2)
CASSLKRGTLSGELFF

SEQ ID NO: 636017 - protein, 13 aa, Homo sapiens
  CDR3 for alpha chain variable domain of TCR clone 318009 (TRAV30, TRAJ24)
CGTVTDSWGKSQF

SEQ ID NO: 636018 - protein, 16 aa, Homo sapiens
  CDR3 for beta chain variable domain of TCR clone 318009 (TRBV7-3, TRBJ2-2)
CASSLKRGTLSGELFF

SEQ ID NO: 636019 - protein, 13 aa, Homo sapiens
  CDR3 for alpha chain variable domain of TCR clone 318010 (TRAV27, TRAJ45)
CRSPGGGADGLTF

SEQ ID NO: 636020 - protein, 13 aa, Homo sapiens
  CDR3 for beta chain variable domain of TCR clone 318010 (TRBV4-1, TRBJ2-1)
CASSQAGGDEQFF

SEQ ID NO: 636021 - protein, 16 aa, Homo sapiens
  CDR3 for alpha chain variable domain of TCR clone 318011 (TRAV30, TRAJ24)
CGTEIVDADSWGKFQF

SEQ ID NO: 636022 - protein, 12 aa, Homo sapiens
  CDR3 for beta chain variable domain of TCR clone 318011 (TRBV7-9, TRBJ1-1)
CASSLEGTEAFF

SEQ ID NO: 636023 - protein, 14 aa, Homo sapiens
  CDR3 for alpha chain variable domain of TCR clone 318012 (TRAV1-2, TRAJ8)
CAVREDTGFQKLVF

SEQ ID NO: 636024 - protein, 15 aa, Homo sapiens
  CDR3 for beta chain variable domain of TCR clone 318012 (TRBV11-3, TRBJ2-3)
CASLKDGREGDRQYF

SEQ ID NO: 636025 - protein, 13 aa, Homo sapiens
  CDR3 for alpha chain variable domain of TCR clone 318013 (TRAV36/DV7, TRAJ37)
CAVFSSNTGKLIF

SEQ ID NO: 636026 - protein, 18 aa, Homo sapiens
  CDR3 for beta chain variable domain of TCR clone 318013 (TRBV11-2, TRBJ2-3)
RASSLGGASRGAPNTQYF

SEQ ID NO: 636027 - protein, 16 aa, Homo sapiens
  CDR3 for alpha chain variable domain of TCR clone 318014 (TRAV12-3, TRAJ45)
CAMGWGSGGGSDGLTF

SEQ ID NO: 636028 - protein, 15 aa, Homo sapiens
  CDR3 for beta chain variable domain of TCR clone 318014 (TRBV3-1, TRBJ1-2)
CASSHPGTPGYGYTF

SEQ ID NO: 636029 - protein, 13 aa, Homo sapiens
  CDR3 for alpha chain variable domain of TCR clone 318015 (TRAV1-1, TRAJ31)
CASYLNNNDRLMF

SEQ ID NO: 636030 - protein, 13 aa, Homo sapiens
  CDR3 for beta chain variable domain of TCR clone 318015 (TRBV15, TRBJ1-6)
CATSGGLNSPLHF

SEQ ID NO: 636031 - protein, 15 aa, Homo sapiens
  CDR3 for alpha chain variable domain of TCR clone 318016 (TRAV12-3, TRAJ52)
CNGGAGGTSYGKLTF

SEQ ID NO: 636032 - protein, 13 aa, Homo sapiens
  CDR3 for beta chain variable domain of TCR clone 318016 (TRBV20-1, TRBJ2-5)
CSARGDDQETQYF

SEQ ID NO: 636033 - protein, 15 aa, Homo sapiens
  CDR3 for alpha chain variable domain of TCR clone 318017 (TRAV12-3, TRAJ6)
CAMSATSGGSYIPTF

SEQ ID NO: 636034 - protein, 15 aa, Homo sapiens
  CDR3 for beta chain variable domain of TCR clone 318017 (TRBV18, TRBJ2-7)
CASSPSATGNYEQYF

SEQ ID NO: 636035 - protein, 15 aa, Homo sapiens
  CDR3 for alpha chain variable domain of TCR clone 318018 (TRAV26-1, TRAJ22)
CIVRVSFWFCKATDL

SEQ ID NO: 636036 - protein, 14 aa, Homo sapiens
  CDR3 for beta chain variable domain of TCR clone 318018 (TRBV6-1, TRBJ1-1)
CASSATGVNTEAFF

SEQ ID NO: 636037 - protein, 13 aa, Homo sapiens
  CDR3 for alpha chain variable domain of TCR clone 318019 (TRAV8-3, TRAJ48)
CAGVPLGNEKLTF

SEQ ID NO: 636038 - protein, 15 aa, Homo sapiens
  CDR3 for beta chain variable domain of TCR clone 318019 (TRBV11-2, TRBJ2-1)
CASSSPSTRYNEQFF

SEQ ID NO: 636039 - protein, 14 aa, Homo sapiens
  CDR3 for alpha chain variable domain of TCR clone 318020 (TRAV35, TRAJ33)
CAGSSQDSNYQLIW

SEQ ID NO: 636040 - protein, 14 aa, Homo sapiens
  CDR3 for beta chain variable domain of TCR clone 318020 (TRBV19, TRBJ2-1)
CASGKSTQYNEQFF

SEQ ID NO: 636041 - protein, 14 aa, Homo sapiens
  CDR3 for alpha chain variable domain of TCR clone 318021 (TRAV25, TRAJ44)
CAVFPTGTASKLTL

SEQ ID NO: 636042 - protein, 14 aa, Homo sapiens
  CDR3 for beta chain variable domain of TCR clone 318021 (TRBV19, TRBJ1-1)
CASTGHRLNTDAFF

SEQ ID NO: 636043 - protein, 13 aa, Homo sapiens
  CDR3 for alpha chain variable domain of TCR clone 318022 (TRAV27, TRAJ6)
CAGGTRGSYIPTF

SEQ ID NO: 636044 - protein, 14 aa, Homo sapiens
  CDR3 for beta chain variable domain of TCR clone 318022 (TRBV20-1, TRBJ2-4)
CSVSGRVGENIQYF

SEQ ID NO: 636045 - protein, 14 aa, Homo sapiens
  CDR3 for alpha chain variable domain of TCR clone 318023 (TRAV4, TRAJ30)
CLVGDMNRDNKIIF

SEQ ID NO: 636046 - protein, 14 aa, Homo sapiens
  CDR3 for beta chain variable domain of TCR clone 318023 (TRBV19, TRBJ2-7)
CASSIQEWSYEQYF

SEQ ID NO: 636047 - protein, 15 aa, Homo sapiens
  CDR3 for alpha chain variable domain of TCR clone 318024 (TRAV8-2, TRAJ23)
CVVSAFYNQGGKLIF

SEQ ID NO: 636048 - protein, 13 aa, Homo sapiens
  CDR3 for beta chain variable domain of TCR clone 318024 (TRBV4-1, TRBJ2-1)
CASSQAGGDEQVF

SEQ ID NO: 636049 - protein, 11 aa, Homo sapiens
  CDR3 for alpha chain variable domain of TCR clone 318025 (TRAV17, TRAJ21)
CATGNFNKFYF

SEQ ID NO: 636050 - protein, 14 aa, Homo sapiens
  CDR3 for beta chain variable domain of TCR clone 318025 (TRBV4-1, TRBJ2-2)
CASSQAVNTGELFF

SEQ ID NO: 636051 - protein, 14 aa, Homo sapiens
  CDR3 for alpha chain variable domain of TCR clone 318026 (TRAV27, TRAJ58)
CAGDGETSGSRLTF

SEQ ID NO: 636052 - protein, 15 aa, Homo sapiens
  CDR3 for beta chain variable domain of TCR clone 318026 (TRBV4-3, TRBJ2-7)
CASSQGGRGIYEQYF

SEQ ID NO: 636053 - protein, 18 aa, Homo sapiens
  CDR3 for alpha chain variable domain of TCR clone 318027 (TRAV21, TRAJ52)
CAVRPSPAGGTSYGKLTF

SEQ ID NO: 636054 - protein, 13 aa, Homo sapiens
  CDR3 for beta chain variable domain of TCR clone 318027 (TRBV7-3, TRBJ1-1)
CASSKDWGAEAFF

SEQ ID NO: 636055 - protein, 16 aa, Homo sapiens
  CDR3 for alpha chain variable domain of TCR clone 318028 (TRAV12-3, TRAJ53)
CAMSPGSEGSNYRLTF

SEQ ID NO: 636056 - protein, 11 aa, Homo sapiens
  CDR3 for beta chain variable domain of TCR clone 318028 (TRBV29-1, TRBJ2-5)
CSEDRTGTQYF

SEQ ID NO: 636057 - protein, 13 aa, Homo sapiens
  CDR3 for alpha chain variable domain of TCR clone 318029 (TRAV12-1, TRAJ40)
CVVNSSGTYKYIL

SEQ ID NO: 636058 - protein, 14 aa, Homo sapiens
  CDR3 for beta chain variable domain of TCR clone 318029 (TRBV2, TRBJ1-6)
CASEVSSYNSPPHF

SEQ ID NO: 636059 - protein, 17 aa, Homo sapiens
  CDR3 for alpha chain variable domain of TCR clone 318030 (TRAV3, TRAJ28)
CAVREAYSGAGSYKLTF

SEQ ID NO: 636060 - protein, 18 aa, Homo sapiens
  CDR3 for beta chain variable domain of TCR clone 318030 (TRBV27, TRBJ2-1)
CASGNRAVGVGSKNEQFF

SEQ ID NO: 636061 - protein, 15 aa, Homo sapiens
  CDR3 for alpha chain variable domain of TCR clone 318031 (TRAV23/DV6, TRAJ18)
CAARYRGSTRGRLYF

SEQ ID NO: 636062 - protein, 15 aa, Homo sapiens
  CDR3 for beta chain variable domain of TCR clone 318031 (TRBV7-2, TRBJ2-7)
CASSSPRGASSTSGR

SEQ ID NO: 636063 - protein, 14 aa, Homo sapiens
  CDR3 for alpha chain variable domain of TCR clone 318032 (TRAV12-2, TRAJ13)
CAVRKTGGYQKVTF

SEQ ID NO: 636064 - protein, 13 aa, Homo sapiens
  CDR3 for beta chain variable domain of TCR clone 318032 (TRBV7-3, TRBJ1-1)
CQQLGTGYTEAFF

SEQ ID NO: 636065 - protein, 20 aa, Homo sapiens
  CDR3 for alpha chain variable domain of TCR clone 318033 (TRAV8-3, TRAJ44)
LSTSVLWVRLYTGTASKLTF

SEQ ID NO: 636066 - protein, 12 aa, Homo sapiens
  CDR3 for beta chain variable domain of TCR clone 318033 (TRBV11-2, TRBJ2-2)
CASSLPTGELFF

SEQ ID NO: 636067 - protein, 14 aa, Homo sapiens
  CDR3 for alpha chain variable domain of TCR clone 318034 (TRAV2, TRAJ37)
CAVDFSSNTGKLIF

SEQ ID NO: 636068 - protein, 15 aa, Homo sapiens
  CDR3 for beta chain variable domain of TCR clone 318034 (TRBV20-1, TRBJ1-1)
CSASRGVTGNTEAFL

SEQ ID NO: 636069 - protein, 12 aa, Homo sapiens
  CDR3 for alpha chain variable domain of TCR clone 318035 (TRAV1-2, TRAJ26)
CSVRYYGQNFVF

SEQ ID NO: 636070 - protein, 14 aa, Homo sapiens
  CDR3 for beta chain variable domain of TCR clone 318035 (TRBV11-1, TRBJ2-7)
RASSFRQGSYEQYF

SEQ ID NO: 636071 - protein, 16 aa, Homo sapiens
  CDR3 for alpha chain variable domain of TCR clone 318036 (TRAV3, TRAJ5)
CAVRNLMDTGRRALTF

SEQ ID NO: 636072 - protein, 18 aa, Homo sapiens
  CDR3 for beta chain variable domain of TCR clone 318036 (TRBV7-9, TRBJ2-7)
CASSLTTSGSRTWYEQYF

SEQ ID NO: 636073 - protein, 16 aa, Homo sapiens
  CDR3 for alpha chain variable domain of TCR clone 318037 (TRAV30, TRAJ24)
CGTEIVDADSWGKFQF

SEQ ID NO: 636074 - protein, 15 aa, Homo sapiens
  CDR3 for beta chain variable domain of TCR clone 318037 (TRBV4-1, TRBJ2-1)
CASSQDPGNYNEQFF

SEQ ID NO: 636075 - protein, 10 aa, Homo sapiens
  CDR3 for alpha chain variable domain of TCR clone 318038 (TRAV38-1, TRAJ34)
CAFMDDKLIF

SEQ ID NO: 636076 - protein, 17 aa, Homo sapiens
  CDR3 for beta chain variable domain of TCR clone 318038 (TRBV11-3, TRBJ2-3)
CACSLGLTGGGTDTQYF

SEQ ID NO: 636077 - protein, 14 aa, Homo sapiens
  CDR3 for alpha chain variable domain of TCR clone 318039 (TRAV38-1, TRAJ27)
CAFIHNTNAGKSTF

SEQ ID NO: 636078 - protein, 12 aa, Homo sapiens
  CDR3 for beta chain variable domain of TCR clone 318039 (TRBV12-5, TRBJ2-5)
CASGQGVETQYF

SEQ ID NO: 636079 - protein, 15 aa, Homo sapiens
  CDR3 for alpha chain variable domain of TCR clone 318040 (TRAV21, TRAJ53)
CATLNSGGSNYKLTF

SEQ ID NO: 636080 - protein, 13 aa, Homo sapiens
  CDR3 for beta chain variable domain of TCR clone 318040 (TRBV7-9, TRBJ2-3)
CASSPRSTDTQYF

SEQ ID NO: 636081 - protein, 14 aa, Homo sapiens
  CDR3 for alpha chain variable domain of TCR clone 318041 (TRAV8-4, TRAJ9)
CAVSDRTGGFKTIF

SEQ ID NO: 636082 - protein, 13 aa, Homo sapiens
  CDR3 for beta chain variable domain of TCR clone 318041 (TRBV11-2, TRBJ2-7)
CASSVGDSYEQYF

SEQ ID NO: 636083 - protein, 12 aa, Homo sapiens
  CDR3 for alpha chain variable domain of TCR clone 318042 (TRAV12-3, TRAJ48)
CAMRIGNEKLTF

SEQ ID NO: 636084 - protein, 12 aa, Homo sapiens
  CDR3 for beta chain variable domain of TCR clone 318042 (TRBV13, TRBJ2-7)
GASSLQAYEQYF

SEQ ID NO: 636085 - protein, 15 aa, Homo sapiens
  CDR3 for alpha chain variable domain of TCR clone 318043 (TRAV8-3, TRAJ45)
CASSYSGGGADGLTF

SEQ ID NO: 636086 - protein, 17 aa, Homo sapiens
  CDR3 for beta chain variable domain of TCR clone 318043 (TRBV7-8, TRBJ1-2)
CASSLRPLQGHLYAYTF

SEQ ID NO: 636087 - protein, 13 aa, Homo sapiens
  CDR3 for alpha chain variable domain of TCR clone 318044 (TRAV1-2, TRAJ9)
CAALNTGGFKTIF

SEQ ID NO: 636088 - protein, 15 aa, Homo sapiens
  CDR3 for beta chain variable domain of TCR clone 318044 (TRBV28, TRBJ2-1)
CASSLGTRLYNEQFF

SEQ ID NO: 636089 - protein, 13 aa, Homo sapiens
  CDR3 for alpha chain variable domain of TCR clone 318045 (TRAV35, TRAJ37)
CAGSSCNTGKLIF

SEQ ID NO: 636090 - protein, 16 aa, Homo sapiens
  CDR3 for beta chain variable domain of TCR clone 318045 (TRBV10-3, TRBJ2-1)
CAISLTSGNSYNEQFF

SEQ ID NO: 636091 - protein, 15 aa, Homo sapiens
  CDR3 for alpha chain variable domain of TCR clone 318046 (TRAV23/DV6, TRAJ13)
CAAWPGGGGYQKVTF

SEQ ID NO: 636092 - protein, 17 aa, Homo sapiens
  CDR3 for beta chain variable domain of TCR clone 318046 (TRBV19, TRBJ2-7)
CASSISFYDSYPYEKYF

SEQ ID NO: 636093 - protein, 16 aa, Homo sapiens
  CDR3 for alpha chain variable domain of TCR clone 318047 (TRAV2, TRAJ4)
CAVEDRFSGGYNKLIF

SEQ ID NO: 636094 - protein, 13 aa, Homo sapiens
  CDR3 for beta chain variable domain of TCR clone 318047 (TRBV7-7, TRBJ2-5)
CASSRSGQETQFF

SEQ ID NO: 636095 - protein, 13 aa, Homo sapiens
  CDR3 for alpha chain variable domain of TCR clone 318048 (TRAV36/DV7, TRAJ54)
CAVDIQGAQKLVF

SEQ ID NO: 636096 - protein, 14 aa, Homo sapiens
  CDR3 for beta chain variable domain of TCR clone 318048 (TRBV19, TRBJ2-1)
CASPTFVLSGEQFF

SEQ ID NO: 636097 - protein, 16 aa, Homo sapiens
  CDR3 for alpha chain variable domain of TCR clone 318049 (TRAV3, TRAJ37)
CAVRGKGSGNTGKLIF

SEQ ID NO: 636098 - protein, 17 aa, Homo sapiens
  CDR3 for beta chain variable domain of TCR clone 318049 (TRBV28, TRBJ2-5)
GASSFGGEWGGQETQYF

SEQ ID NO: 636099 - protein, 13 aa, Homo sapiens
  CDR3 for alpha chain variable domain of TCR clone 318050 (TRAV8-3, TRAJ21)
CAVGAYNFNKFYF

SEQ ID NO: 636100 - protein, 14 aa, Homo sapiens
  CDR3 for beta chain variable domain of TCR clone 318050 (TRBV2, TRBJ2-7)
CASSLTSGGYEQYF

SEQ ID NO: 636101 - protein, 17 aa, Homo sapiens
  CDR3 for alpha chain variable domain of TCR clone 318051 (TRAV13-1, TRAJ52)
CAAGRNAGGTSYGKLTF

SEQ ID NO: 636102 - protein, 13 aa, Homo sapiens
  CDR3 for beta chain variable domain of TCR clone 318051 (TRBV7-2, TRBJ1-1)
CASYLKGAKVAFF

SEQ ID NO: 636103 - protein, 12 aa, Homo sapiens
  CDR3 for alpha chain variable domain of TCR clone 318052 (TRAV9-2, TRAJ30)
CSERFLDDKIIF

SEQ ID NO: 636104 - protein, 13 aa, Homo sapiens
  CDR3 for beta chain variable domain of TCR clone 318052 (TRBV12-4, TRBJ2-5)
CASSPGTVETQYF

SEQ ID NO: 636105 - protein, 16 aa, Homo sapiens
  CDR3 for alpha chain variable domain of TCR clone 318053 (TRAV4, TRAJ9)
CLVGDPNRPVGFKTIF

SEQ ID NO: 636106 - protein, 14 aa, Homo sapiens
  CDR3 for beta chain variable domain of TCR clone 318053 (TRBV20-1, TRBJ1-1)
CSAQTRIGGTEAFF

SEQ ID NO: 636107 - protein, 14 aa, Homo sapiens
  CDR3 for alpha chain variable domain of TCR clone 318054 (TRAV12-1, TRAJ4)
CGEQRSGGYKKLIF

SEQ ID NO: 636108 - protein, 16 aa, Homo sapiens
  CDR3 for beta chain variable domain of TCR clone 318054 (TRBV11-3, TRBJ2-5)
CASSSVVAGSTETQYF

SEQ ID NO: 636109 - protein, 15 aa, Homo sapiens
  CDR3 for alpha chain variable domain of TCR clone 318055 (TRAV8-2, TRAJ40)
CVVLGTTSGTDKYIF

SEQ ID NO: 636110 - protein, 14 aa, Homo sapiens
  CDR3 for beta chain variable domain of TCR clone 318055 (TRBV11-2, TRBJ2-5)
CASSRTGGIETQYF

SEQ ID NO: 636111 - protein, 16 aa, Homo sapiens
  CDR3 for alpha chain variable domain of TCR clone 318056 (TRAV13-1, TRAJ45)
CAASWESGGGADGLTF

SEQ ID NO: 636112 - protein, 17 aa, Homo sapiens
  CDR3 for beta chain variable domain of TCR clone 318056 (TRBV11-2, TRBJ2-1)
CASSLYPPGVEYNEQFF

SEQ ID NO: 636113 - protein, 14 aa, Homo sapiens
  CDR3 for alpha chain variable domain of TCR clone 318057 (TRAV26-1, TRAJ48)
CIVRVGFGNEKLTF

SEQ ID NO: 636114 - protein, 14 aa, Homo sapiens
  CDR3 for beta chain variable domain of TCR clone 318057 (TRBV7-9, TRBJ2-3)
CASSLEDGTDTQYF

SEQ ID NO: 636115 - protein, 15 aa, Homo sapiens
  CDR3 for alpha chain variable domain of TCR clone 318058 (TRAV12-2, TRAJ53)
CAVNGVGGSNYKLTF

SEQ ID NO: 636116 - protein, 14 aa, Homo sapiens
  CDR3 for beta chain variable domain of TCR clone 318058 (TRBV19, TRBJ2-2)
CASSTLHRSGELFF

SEQ ID NO: 636117 - protein, 18 aa, Homo sapiens
  CDR3 for alpha chain variable domain of TCR clone 318059 (TRAV21, TRAJ52)
CAVRPSPAGGTSYGKLTF

SEQ ID NO: 636118 - protein, 15 aa, Homo sapiens
  CDR3 for beta chain variable domain of TCR clone 318059 (TRBV7-3, TRBJ2-2)
CASKANGANTGELFF

SEQ ID NO: 636119 - protein, 14 aa, Homo sapiens
  CDR3 for alpha chain variable domain of TCR clone 318060 (TRAV8-6, TRAJ38)
CAAYNAGNNRKLIW

SEQ ID NO: 636120 - protein, 13 aa, Homo sapiens
  CDR3 for beta chain variable domain of TCR clone 318060 (TRBV19, TRBJ2-7)
CASQSYGAGEQYF

SEQ ID NO: 636121 - protein, 17 aa, Homo sapiens
  CDR3 for alpha chain variable domain of TCR clone 318061 (TRAV8-6, TRAJ22)
CAVSLYPSSGSARQLTF

SEQ ID NO: 636122 - protein, 14 aa, Homo sapiens
  CDR3 for beta chain variable domain of TCR clone 318061 (TRBV25-1, TRBJ1-1)
CASTHLGGNTEAFF

SEQ ID NO: 636123 - protein, 14 aa, Homo sapiens
  CDR3 for alpha chain variable domain of TCR clone 318062 (TRAV1-2, TRAJ16)
CAVRSASDGQKLLF

SEQ ID NO: 636124 - protein, 16 aa, Homo sapiens
  CDR3 for beta chain variable domain of TCR clone 318062 (TRBV24-1, TRBJ2-3)
CATSDPGTGATDTQYF

SEQ ID NO: 636125 - protein, 17 aa, Homo sapiens
  CDR3 for alpha chain variable domain of TCR clone 318063 (TRAV12-2, TRAJ52)
CAVNPNAGGTSYGKLTF

SEQ ID NO: 636126 - protein, 16 aa, Homo sapiens
  CDR3 for beta chain variable domain of TCR clone 318063 (TRBV5-5, TRBJ2-2)
CASSGRREGATGELFF

SEQ ID NO: 636127 - protein, 15 aa, Homo sapiens
  CDR3 for alpha chain variable domain of TCR clone 318064 (TRAV8-3, TRAJ45)
CASSYSGGGAEVLTF

SEQ ID NO: 636128 - protein, 13 aa, Homo sapiens
  CDR3 for beta chain variable domain of TCR clone 318064 (TRBV10-3, TRBJ2-7)
CASKLAVNYEQYF

SEQ ID NO: 636129 - protein, 15 aa, Homo sapiens
  CDR3 for alpha chain variable domain of TCR clone 318065 (TRAV4, TRAJ39)
CLVGPNNNAGNMLTL

SEQ ID NO: 636130 - protein, 14 aa, Homo sapiens
  CDR3 for beta chain variable domain of TCR clone 318065 (TRBV11-2, TRBJ2-5)
CASSRTGGIETQYF

SEQ ID NO: 636131 - protein, 15 aa, Homo sapiens
  CDR3 for alpha chain variable domain of TCR clone 318066 (TRAV25, TRAJ52)
CAGRPGGTSYGKLTF

SEQ ID NO: 636132 - protein, 18 aa, Homo sapiens
  CDR3 for beta chain variable domain of TCR clone 318066 (TRBV4-3, TRBJ1-2)
CASSQDGQSAPSDYGYTF

SEQ ID NO: 636133 - protein, 11 aa, Homo sapiens
  CDR3 for alpha chain variable domain of TCR clone 318067 (TRAV1-2, TRAJ31)
RAVNNNAILMF

SEQ ID NO: 636134 - protein, 15 aa, Homo sapiens
  CDR3 for beta chain variable domain of TCR clone 318067 (TRBV28, TRBJ2-1)
CASSIIAGGRSEQFF

SEQ ID NO: 636135 - protein, 14 aa, Homo sapiens
  CDR3 for alpha chain variable domain of TCR clone 318068 (TRAV1-1, TRAJ23)
CAVSIYNQGGKLIF

SEQ ID NO: 636136 - protein, 14 aa, Homo sapiens
  CDR3 for beta chain variable domain of TCR clone 318068 (TRBV7-2, TRBJ1-3)
CASSLGTAGNTIYF

SEQ ID NO: 636137 - protein, 13 aa, Homo sapiens
  CDR3 for alpha chain variable domain of TCR clone 318069 (TRAV26-2, TRAJ57)
CILHQGGSEKLVF

SEQ ID NO: 636138 - protein, 12 aa, Homo sapiens
  CDR3 for beta chain variable domain of TCR clone 318069 (TRBV2, TRBJ1-5)
CAFGEYDQPQHF

SEQ ID NO: 636139 - protein, 11 aa, Homo sapiens
  CDR3 for alpha chain variable domain of TCR clone 318070 (TRAV12-3, TRAJ27)
VAMANAGKSTF

SEQ ID NO: 636140 - protein, 13 aa, Homo sapiens
  CDR3 for beta chain variable domain of TCR clone 318070 (TRBV20-1, TRBJ1-1)
CSARVGGNTEAFF

SEQ ID NO: 636141 - protein, 17 aa, Homo sapiens
  CDR3 for alpha chain variable domain of TCR clone 318071 (TRAV26-1, TRAJ37)
CIVRVITVSSNTGKLIL

SEQ ID NO: 636142 - protein, 11 aa, Homo sapiens
  CDR3 for beta chain variable domain of TCR clone 318071 (TRBV29-1, TRBJ2-5)
CSEDRTGTQYF

SEQ ID NO: 636143 - protein, 14 aa, Homo sapiens
  CDR3 for alpha chain variable domain of TCR clone 318072 (TRAV6, TRAJ10)
CALDFTGGGNKLTF

SEQ ID NO: 636144 - protein, 16 aa, Homo sapiens
  CDR3 for beta chain variable domain of TCR clone 318072 (TRBV7-9, TRBJ2-1)
CASSRKNFSSPREQFF

SEQ ID NO: 636145 - protein, 16 aa, Homo sapiens
  CDR3 for alpha chain variable domain of TCR clone 318073 (TRAV26-1, TRAJ23)
CIVRVPPYNQGGKLIF

SEQ ID NO: 636146 - protein, 15 aa, Homo sapiens
  CDR3 for beta chain variable domain of TCR clone 318073 (TRBV5-7, TRBJ2-7)
CASSPYFEGSYEQYF

SEQ ID NO: 636147 - protein, 15 aa, Homo sapiens
  CDR3 for alpha chain variable domain of TCR clone 318074 (TRAV4, TRAJ32)
CLVGEDGGATNKHIF

SEQ ID NO: 636148 - protein, 16 aa, Homo sapiens
  CDR3 for beta chain variable domain of TCR clone 318074 (TRBV13, TRBJ2-2)
CASSPRTGEHTGELFF

SEQ ID NO: 636149 - protein, 15 aa, Homo sapiens
  CDR3 for alpha chain variable domain of TCR clone 318075 (TRAV8-3, TRAJ11)
CAVGLLNSGYSTLTF

SEQ ID NO: 636150 - protein, 11 aa, Homo sapiens
  CDR3 for beta chain variable domain of TCR clone 318075 (TRBV12-4, TRBJ2-2)
CASSSAGELFF

SEQ ID NO: 636151 - protein, 13 aa, Homo sapiens
  CDR3 for alpha chain variable domain of TCR clone 318076 (TRAV38-2/DV8, TRAJ34)
CAYRTWNTDKLTF

SEQ ID NO: 636152 - protein, 19 aa, Homo sapiens
  CDR3 for beta chain variable domain of TCR clone 318076 (TRBV25-1, TRBJ2-2)
CAILVYRVDRGRKTGELFV

SEQ ID NO: 636153 - protein, 13 aa, Homo sapiens
  CDR3 for alpha chain variable domain of TCR clone 318077 (TRAV6, TRAJ20)
CALAVSNDYKLSF

SEQ ID NO: 636154 - protein, 16 aa, Homo sapiens
  CDR3 for beta chain variable domain of TCR clone 318077 (TRBV7-9, TRBJ2-1)
CASSDEAGGSYNEQFF

SEQ ID NO: 636155 - protein, 13 aa, Homo sapiens
  CDR3 for alpha chain variable domain of TCR clone 318078 (TRAV12-1, TRAJ22)
CVASGGSARQLTF

SEQ ID NO: 636156 - protein, 17 aa, Homo sapiens
  CDR3 for beta chain variable domain of TCR clone 318078 (TRBV4-1, TRBJ2-7)
CARSRDPLGVRGGEQYF

SEQ ID NO: 636157 - protein, 10 aa, Homo sapiens
  CDR3 for alpha chain variable domain of TCR clone 318079 (TRAV8-2, )
CVVSELRRIQ

SEQ ID NO: 636158 - protein, 14 aa, Homo sapiens
  CDR3 for beta chain variable domain of TCR clone 318079 (TRBV28, TRBJ1-5)
CASSLFPGVQPQHF

SEQ ID NO: 636159 - protein, 13 aa, Homo sapiens
  CDR3 for alpha chain variable domain of TCR clone 318080 (TRAV8-3, TRAJ4)
WVFYSGGYTRLIF

SEQ ID NO: 636160 - protein, 16 aa, Homo sapiens
  CDR3 for beta chain variable domain of TCR clone 318080 (TRBV7-8, TRBJ2-3)
CASSTEGQRETDTQYF

SEQ ID NO: 636161 - protein, 13 aa, Homo sapiens
  CDR3 for alpha chain variable domain of TCR clone 318081 (TRAV27, TRAJ41)
CAGEGNSGYALNF

SEQ ID NO: 636162 - protein, 16 aa, Homo sapiens
  CDR3 for beta chain variable domain of TCR clone 318081 (TRBV12-4, TRBJ2-5)
CASSFFVRGRQETQYF

SEQ ID NO: 636163 - protein, 17 aa, Homo sapiens
  CDR3 for alpha chain variable domain of TCR clone 318082 (TRAV3, TRAJ6)
CAVRDGPRAGGSYIPTF

SEQ ID NO: 636164 - protein, 12 aa, Homo sapiens
  CDR3 for beta chain variable domain of TCR clone 318082 (TRBV2, TRBJ2-1)
CAYGPPGNEQCF

SEQ ID NO: 636165 - protein, 16 aa, Homo sapiens
  CDR3 for alpha chain variable domain of TCR clone 318083 (TRAV8-3, TRAJ13)
CAVGAYPSGGYQKVTF

SEQ ID NO: 636166 - protein, 15 aa, Homo sapiens
  CDR3 for beta chain variable domain of TCR clone 318083 (TRBV19, TRBJ1-5)
CASSIVWAVNQTQHF

SEQ ID NO: 636167 - protein, 13 aa, Homo sapiens
  CDR3 for alpha chain variable domain of TCR clone 318084 (TRAV8-3, TRAJ48)
CAVVRFGNEKLTF

SEQ ID NO: 636168 - protein, 16 aa, Homo sapiens
  CDR3 for beta chain variable domain of TCR clone 318084 (TRBV20-1, TRBJ2-5)
CRARDFASGIRETQYF

SEQ ID NO: 636169 - protein, 16 aa, Homo sapiens
  CDR3 for alpha chain variable domain of TCR clone 318085 (TRAV3, TRAJ37)
CAVRGKGSGNTGKLIF

SEQ ID NO: 636170 - protein, 15 aa, Homo sapiens
  CDR3 for beta chain variable domain of TCR clone 318085 (TRBV7-9, TRBJ1-6)
CASSSPGRGNSPLHV

SEQ ID NO: 636171 - protein, 14 aa, Homo sapiens
  CDR3 for alpha chain variable domain of TCR clone 318086 (TRAV2, TRAJ9)
CAVEDRSGGFKTIF

SEQ ID NO: 636172 - protein, 18 aa, Homo sapiens
  CDR3 for beta chain variable domain of TCR clone 318086 (TRBV11-2, TRBJ2-3)
CTSSLGGASRGAPNTQYF

SEQ ID NO: 636173 - protein, 17 aa, Homo sapiens
  CDR3 for alpha chain variable domain of TCR clone 318087 (TRAV3, TRAJ6)
CAVRDCPRAGGSYIPTF

SEQ ID NO: 636174 - protein, 14 aa, Homo sapiens
  CDR3 for beta chain variable domain of TCR clone 318087 (TRBV4-1, TRBJ2-2)
CASSQAVNTGELFF

SEQ ID NO: 636175 - protein, 13 aa, Homo sapiens
  CDR3 for alpha chain variable domain of TCR clone 318088 (TRAV12-2, TRAJ7)
CAVSLYGNNRLAF

SEQ ID NO: 636176 - protein, 18 aa, Homo sapiens
  CDR3 for beta chain variable domain of TCR clone 318088 (TRBV4-2, TRBJ2-1)
CASSQQGLAASSYNEHFF

SEQ ID NO: 636177 - protein, 11 aa, Homo sapiens
  CDR3 for alpha chain variable domain of TCR clone 318089 (TRAV27, TRAJ47)
CAGAYGNKLVF

SEQ ID NO: 636178 - protein, 13 aa, Homo sapiens
  CDR3 for beta chain variable domain of TCR clone 318089 (TRBV19, TRBJ1-2)
CASSVPGQDGYTV

SEQ ID NO: 636179 - protein, 15 aa, Homo sapiens
  CDR3 for alpha chain variable domain of TCR clone 318090 (TRAV14/DV4, TRAJ22)
CNERGPPGSERQLTF

SEQ ID NO: 636180 - protein, 16 aa, Homo sapiens
  CDR3 for beta chain variable domain of TCR clone 318090 (TRBV19, TRBJ1-6)
CASSVAPVAGNSPLHF

SEQ ID NO: 636181 - protein, 15 aa, Homo sapiens
  CDR3 for alpha chain variable domain of TCR clone 318091 (TRAV8-3, TRAJ45)
CASSYSGGGADGLTF

SEQ ID NO: 636182 - protein, 14 aa, Homo sapiens
  CDR3 for beta chain variable domain of TCR clone 318091 (TRBV7-9, TRBJ2-1)
CASSPRDSLYEQFF

SEQ ID NO: 636183 - protein, 14 aa, Homo sapiens
  CDR3 for alpha chain variable domain of TCR clone 318092 (TRAV20, TRAJ42)
CAVQAGGSQGNLIF

SEQ ID NO: 636184 - protein, 14 aa, Homo sapiens
  CDR3 for beta chain variable domain of TCR clone 318092 (TRBV4-2, TRBJ1-5)
CASSRDRGNQPQHF

SEQ ID NO: 636185 - protein, 13 aa, Homo sapiens
  CDR3 for alpha chain variable domain of TCR clone 318093 (TRAV36/DV7, TRAJ49)
CAGDSNTGNQFYF

SEQ ID NO: 636186 - protein, 13 aa, Homo sapiens
  CDR3 for beta chain variable domain of TCR clone 318093 (TRBV4-2, TRBJ1-1)
CASSQAGNTEAFF

SEQ ID NO: 636187 - protein, 14 aa, Homo sapiens
  CDR3 for alpha chain variable domain of TCR clone 318094 (TRAV1-2, TRAJ8)
CAVREDTGFQKLVF

SEQ ID NO: 636188 - protein, 16 aa, Homo sapiens
  CDR3 for beta chain variable domain of TCR clone 318094 (TRBV5-7, TRBJ2-5)
CASTLAPAGGRKTQYF

SEQ ID NO: 636189 - protein, 17 aa, Homo sapiens
  CDR3 for alpha chain variable domain of TCR clone 318095 (TRAV1-1, TRAJ32)
CAVRVDELWWCYRQAHL

SEQ ID NO: 636190 - protein, 17 aa, Homo sapiens
  CDR3 for beta chain variable domain of TCR clone 318095 (TRBV13, TRBJ2-3)
CASSLSRVAGGRNTQYF

SEQ ID NO: 636191 - protein, 15 aa, Homo sapiens
  CDR3 for alpha chain variable domain of TCR clone 318096 (TRAV3, TRAJ5)
CAVRDLDTGRRAFTF

SEQ ID NO: 636192 - protein, 13 aa, Homo sapiens
  CDR3 for beta chain variable domain of TCR clone 318096 (TRBV12-4, TRBJ2-7)
CASSPTETYEKYF

SEQ ID NO: 636193 - protein, 15 aa, Homo sapiens
  CDR3 for alpha chain variable domain of TCR clone 318097 (TRAV30, TRAJ57)
CGTAIPQGGSEKLVF

SEQ ID NO: 636194 - protein, 17 aa, Homo sapiens
  CDR3 for beta chain variable domain of TCR clone 318097 (TRBV11-2, TRBJ2-1)
CASSLYPPGVEYNEQFL

SEQ ID NO: 636195 - protein, 17 aa, Homo sapiens
  CDR3 for alpha chain variable domain of TCR clone 318098 (TRAV26-2, TRAJ42)
CILRDVGYGGSQGNLIF

SEQ ID NO: 636196 - protein, 16 aa, Homo sapiens
  CDR3 for beta chain variable domain of TCR clone 318098 (TRBV6-5, TRBJ2-1)
CASSETLAEHYNEQFF

SEQ ID NO: 636197 - protein, 15 aa, Homo sapiens
  CDR3 for alpha chain variable domain of TCR clone 318099 (TRAV26-1, TRAJ42)
CIVRVKGGSQGILIF

SEQ ID NO: 636198 - protein, 14 aa, Homo sapiens
  CDR3 for beta chain variable domain of TCR clone 318099 (TRBV19, TRBJ2-2)
CATTGHANTGELFF

SEQ ID NO: 636199 - protein, 15 aa, Homo sapiens
  CDR3 for alpha chain variable domain of TCR clone 318100 (TRAV8-3, TRAJ11)
CAVGLLHSGYSTLPF

SEQ ID NO: 636200 - protein, 16 aa, Homo sapiens
  CDR3 for beta chain variable domain of TCR clone 318100 (TRBV7-9, TRBJ1-2)
CASSLGFSSGEDGYTF

SEQ ID NO: 636201 - protein, 12 aa, Homo sapiens
  CDR3 for alpha chain variable domain of TCR clone 318101 (TRAV27, TRAJ33)
CAGDGSNYQLIW

SEQ ID NO: 636202 - protein, 16 aa, Homo sapiens
  CDR3 for beta chain variable domain of TCR clone 318101 (TRBV7-9, TRBJ2-1)
CASSDVAGGSYNEQFF

SEQ ID NO: 636203 - protein, 13 aa, Homo sapiens
  CDR3 for alpha chain variable domain of TCR clone 318102 (TRAV21, TRAJ27)
CAARPGKAGKSTF

SEQ ID NO: 636204 - protein, 13 aa, Homo sapiens
  CDR3 for beta chain variable domain of TCR clone 318102 (TRBV7-6, TRBJ2-3)
CSSLGTVTDTQYF

SEQ ID NO: 636205 - protein, 13 aa, Homo sapiens
  CDR3 for alpha chain variable domain of TCR clone 318103 (TRAV8-6, TRAJ48)
CAGVNVGNEKVTF

SEQ ID NO: 636206 - protein, 16 aa, Homo sapiens
  CDR3 for beta chain variable domain of TCR clone 318103 (TRBV4-2, TRBJ2-6)
CASSQARSSGANVLTF

SEQ ID NO: 636207 - protein, 13 aa, Homo sapiens
  CDR3 for alpha chain variable domain of TCR clone 318104 (TRAV8-6, TRAJ32)
CAVSDRATNKLIF

SEQ ID NO: 636208 - protein, 13 aa, Homo sapiens
  CDR3 for beta chain variable domain of TCR clone 318104 (TRBV11-2, TRBJ2-7)
CACSLDLGYEQYF

SEQ ID NO: 636209 - protein, 17 aa, Homo sapiens
  CDR3 for alpha chain variable domain of TCR clone 318105 (TRAV3, TRAJ6)
CAVRDGPRAGGSYIPTF

SEQ ID NO: 636210 - protein, 14 aa, Homo sapiens
  CDR3 for beta chain variable domain of TCR clone 318105 (TRBV7-8, TRBJ1-5)
CQQLERRGLEPQHF

SEQ ID NO: 636211 - protein, 15 aa, Homo sapiens
  CDR3 for alpha chain variable domain of TCR clone 318106 (TRAV8-3, TRAJ11)
CAVGLLNSGYSTLTF

SEQ ID NO: 636212 - protein, 16 aa, Homo sapiens
  CDR3 for beta chain variable domain of TCR clone 318106 (TRBV7-9, TRBJ1-2)
CASSLAPLRAAYGYTF

SEQ ID NO: 636213 - protein, 14 aa, Homo sapiens
  CDR3 for alpha chain variable domain of TCR clone 318107 (TRAV14/DV4, TRAJ15)
CAMRRDQAGTALIF

SEQ ID NO: 636214 - protein, 11 aa, Homo sapiens
  CDR3 for beta chain variable domain of TCR clone 318107 (TRBV7-2, TRBJ2-7)
CASSSGRWQYF

SEQ ID NO: 636215 - protein, 12 aa, Homo sapiens
  CDR3 for alpha chain variable domain of TCR clone 318108 (TRAV16, TRAJ10)
CSRTVGGNKLTF

SEQ ID NO: 636216 - protein, 14 aa, Homo sapiens
  CDR3 for beta chain variable domain of TCR clone 318108 (TRBV7-2, TRBJ2-7)
CASRSQGAAYEQYF

SEQ ID NO: 636217 - protein, 14 aa, Homo sapiens
  CDR3 for alpha chain variable domain of TCR clone 318109 (TRAV1-2, TRAJ8)
CAVREDTGFQKLVF

SEQ ID NO: 636218 - protein, 16 aa, Homo sapiens
  CDR3 for beta chain variable domain of TCR clone 318109 (TRBV28, TRBJ1-4)
CASSPPYRGRSEKLFF

SEQ ID NO: 636219 - protein, 10 aa, Homo sapiens
  CDR3 for alpha chain variable domain of TCR clone 318110 (TRAV12-3, TRAJ49)
CAMNDDQFYF

SEQ ID NO: 636220 - protein, 16 aa, Homo sapiens
  CDR3 for beta chain variable domain of TCR clone 318110 (TRBV2, TRBJ2-1)
CASSVGGSLSYNEQFF

SEQ ID NO: 636221 - protein, 14 aa, Homo sapiens
  CDR3 for alpha chain variable domain of TCR clone 318111 (TRAV17, TRAJ31)
CATVLRNYNARLMF

SEQ ID NO: 636222 - protein, 14 aa, Homo sapiens
  CDR3 for beta chain variable domain of TCR clone 318111 (TRBV12-4, TRBJ2-5)
CASSLWQKQETQYF

SEQ ID NO: 636223 - protein, 14 aa, Homo sapiens
  CDR3 for alpha chain variable domain of TCR clone 318112 (TRAV12-2, TRAJ13)
CAVKKTGGYQKVTF

SEQ ID NO: 636224 - protein, 14 aa, Homo sapiens
  CDR3 for beta chain variable domain of TCR clone 318112 (TRBV7-9, TRBJ2-2)
CASSLVQDTGELFF

SEQ ID NO: 636225 - protein, 14 aa, Homo sapiens
  CDR3 for alpha chain variable domain of TCR clone 318113 (TRAV17, TRAJ35)
CATDRPGFGNVLHC

SEQ ID NO: 636226 - protein, 15 aa, Homo sapiens
  CDR3 for beta chain variable domain of TCR clone 318113 (TRBV7-8, TRBJ1-5)
CASSLALGGQQPQHF

SEQ ID NO: 636227 - protein, 12 aa, Homo sapiens
  CDR3 for alpha chain variable domain of TCR clone 318114 (TRAV13-1, TRAJ21)
CAAKEGFNKFYF

SEQ ID NO: 636228 - protein, 15 aa, Homo sapiens
  CDR3 for beta chain variable domain of TCR clone 318114 (TRBV27, TRBJ2-1)
CASRNGGGSSNEQFF

SEQ ID NO: 636229 - protein, 12 aa, Homo sapiens
  CDR3 for alpha chain variable domain of TCR clone 318115 (TRAV17, TRAJ12)
CATLRSSYKLIF

SEQ ID NO: 636230 - protein, 14 aa, Homo sapiens
  CDR3 for beta chain variable domain of TCR clone 318115 (TRBV19, TRBJ2-1)
CTRGARSFQWEQFF

SEQ ID NO: 636231 - protein, 14 aa, Homo sapiens
  CDR3 for alpha chain variable domain of TCR clone 318116 (TRAV12-1, TRAJ9)
CVVNGRTGGVKTIF

SEQ ID NO: 636232 - protein, 15 aa, Homo sapiens
  CDR3 for beta chain variable domain of TCR clone 318116 (TRBV28, TRBJ2-7)
CASSLISGGSYEQYF

SEQ ID NO: 636233 - protein, 11 aa, Homo sapiens
  CDR3 for alpha chain variable domain of TCR clone 318117 (TRAV21, TRAJ34)
CAVTNTDKLIF

SEQ ID NO: 636234 - protein, 12 aa, Homo sapiens
  CDR3 for beta chain variable domain of TCR clone 318117 (TRBV12-4, TRBJ2-7)
CASSLGGYEQYF

SEQ ID NO: 636235 - protein, 14 aa, Homo sapiens
  CDR3 for alpha chain variable domain of TCR clone 318118 (TRAV8-3, TRAJ15)
CAVGHHQAGTALIF

SEQ ID NO: 636236 - protein, 13 aa, Homo sapiens
  CDR3 for beta chain variable domain of TCR clone 318118 (TRBV9, TRBJ2-7)
CASSASDSYEQYF

SEQ ID NO: 636237 - protein, 12 aa, Homo sapiens
  CDR3 for alpha chain variable domain of TCR clone 318119 (TRAV21, TRAJ42)
CAVVGSQGNLIF

SEQ ID NO: 636238 - protein, 14 aa, Homo sapiens
  CDR3 for beta chain variable domain of TCR clone 318119 (TRBV12-4, TRBJ1-1)
CASSLGTGGTEAFF

SEQ ID NO: 636239 - protein, 13 aa, Homo sapiens
  CDR3 for alpha chain variable domain of TCR clone 318120 (TRAV13-1, TRAJ39)
CSKYSNAGNMLTF

SEQ ID NO: 636240 - protein, 15 aa, Homo sapiens
  CDR3 for beta chain variable domain of TCR clone 318120 (TRBV4-1, TRBJ1-2)
CASSQGQGAAYGYTF

SEQ ID NO: 636241 - protein, 14 aa, Homo sapiens
  CDR3 for alpha chain variable domain of TCR clone 318121 (TRAV12-2, TRAJ4)
CAVLIGGGYNKLIF

SEQ ID NO: 636242 - protein, 20 aa, Homo sapiens
  CDR3 for beta chain variable domain of TCR clone 318121 (TRBV7-8, TRBJ2-2)
CASSHLFPGPTIHITGELFF

SEQ ID NO: 636243 - protein, 11 aa, Homo sapiens
  CDR3 for alpha chain variable domain of TCR clone 318122 (TRAV8-4, TRAJ20)
CAVTNVLTTTS

SEQ ID NO: 636244 - protein, 16 aa, Homo sapiens
  CDR3 for beta chain variable domain of TCR clone 318122 (TRBV6-1, TRBJ1-2)
CASSGASQGRSHGYTF

SEQ ID NO: 636245 - protein, 19 aa, Homo sapiens
  CDR3 for alpha chain variable domain of TCR clone 318123 (TRAV26-1, TRAJ22)
CCVLLHRWVFSGSARQLTF

SEQ ID NO: 636246 - protein, 19 aa, Homo sapiens
  CDR3 for beta chain variable domain of TCR clone 318123 (TRBV19, TRBJ2-5)
CASSIGQVTDFFLGDTQYF

SEQ ID NO: 636247 - protein, 16 aa, Homo sapiens
  CDR3 for alpha chain variable domain of TCR clone 318124 (TRAV36/DV7, TRAJ28)
CAGTLYSGAGSYQLTF

SEQ ID NO: 636248 - protein, 16 aa, Homo sapiens
  CDR3 for beta chain variable domain of TCR clone 318124 (TRBV18, TRBJ1-1)
CASSPGVGGRGGEAFF

SEQ ID NO: 636249 - protein, 14 aa, Homo sapiens
  CDR3 for alpha chain variable domain of TCR clone 318125 (TRAV20, TRAJ20)
CAVRRGYNDYNLSF

SEQ ID NO: 636250 - protein, 13 aa, Homo sapiens
  CDR3 for beta chain variable domain of TCR clone 318125 (TRBV19, TRBJ2-5)
CASSETAPETQYF

SEQ ID NO: 636251 - protein, 10 aa, Homo sapiens
  CDR3 for alpha chain variable domain of TCR clone 318126 (TRAV12-2, TRAJ48)
FAVTSEKLTF

SEQ ID NO: 636252 - protein, 17 aa, Homo sapiens
  CDR3 for beta chain variable domain of TCR clone 318126 (TRBV11-1, TRBJ2-7)
CASSLTGSFGLDYEQYF

SEQ ID NO: 636253 - protein, 17 aa, Homo sapiens
  CDR3 for alpha chain variable domain of TCR clone 318127 (TRAV16, TRAJ58)
CITVLSNGETRGSRLTF

SEQ ID NO: 636254 - protein, 16 aa, Homo sapiens
  CDR3 for beta chain variable domain of TCR clone 318127 (TRBV19, TRBJ2-5)
CASSIDGTGLEETQYF

SEQ ID NO: 636255 - protein, 14 aa, Homo sapiens
  CDR3 for alpha chain variable domain of TCR clone 318128 (TRAV20, TRAJ22)
CAVALGGSARQLTF

SEQ ID NO: 636256 - protein, 16 aa, Homo sapiens
  CDR3 for beta chain variable domain of TCR clone 318128 (TRBV12-4, TRBJ1-5)
CASSRPVGGSNQPQHF

SEQ ID NO: 636257 - protein, 16 aa, Homo sapiens
  CDR3 for alpha chain variable domain of TCR clone 318129 (TRAV1-2, TRAJ10)
CAVRGVLTGGGNKRTF

SEQ ID NO: 636258 - protein, 16 aa, Homo sapiens
  CDR3 for beta chain variable domain of TCR clone 318129 (TRBV9, TRBJ2-1)
CASSVGGGGNYNEQFF

SEQ ID NO: 636259 - protein, 18 aa, Homo sapiens
  CDR3 for alpha chain variable domain of TCR clone 318130 (TRAV12-3, TRAJ52)
CAMSVGGAGGTSYGKLTF

SEQ ID NO: 636260 - protein, 16 aa, Homo sapiens
  CDR3 for beta chain variable domain of TCR clone 318130 (TRBV13, TRBJ2-3)
CQQPLQGSGGRNTQYF

SEQ ID NO: 636261 - protein, 12 aa, Homo sapiens
  CDR3 for alpha chain variable domain of TCR clone 318131 (TRAV12-1, TRAJ23)
CVVHWGGGKLIF

SEQ ID NO: 636262 - protein, 14 aa, Homo sapiens
  CDR3 for beta chain variable domain of TCR clone 318131 (TRBV27, TRBJ2-7)
CASSPQRGTYEQYF

SEQ ID NO: 636263 - protein, 15 aa, Homo sapiens
  CDR3 for alpha chain variable domain of TCR clone 318132 (TRAV3, TRAJ3)
CAVSDGHSSASKIIF

SEQ ID NO: 636264 - protein, 15 aa, Homo sapiens
  CDR3 for beta chain variable domain of TCR clone 318132 (TRBV7-3, TRBJ2-1)
CASSPTGGGEVEQFF

SEQ ID NO: 636265 - protein, 11 aa, Homo sapiens
  CDR3 for alpha chain variable domain of TCR clone 318133 (TRAV12-2, TRAJ43)
CASPIGNDMRF

SEQ ID NO: 636266 - protein, 12 aa, Homo sapiens
  CDR3 for beta chain variable domain of TCR clone 318133 (TRBV7-3, TRBJ1-2)
CQQLKAGYGYTF

SEQ ID NO: 636267 - protein, 11 aa, Homo sapiens
  CDR3 for alpha chain variable domain of TCR clone 318134 (TRAV1-2, TRAJ40)
CAVSGTYKYIF

SEQ ID NO: 636268 - protein, 16 aa, Homo sapiens
  CDR3 for beta chain variable domain of TCR clone 318134 (TRBV29-1, TRBJ2-7)
CSVEVVGTSGSYEQYF

SEQ ID NO: 636269 - protein, 15 aa, Homo sapiens
  CDR3 for alpha chain variable domain of TCR clone 318135 (TRAV17, TRAJ57)
CATGPSQGGSEKLVF

SEQ ID NO: 636270 - protein, 16 aa, Homo sapiens
  CDR3 for beta chain variable domain of TCR clone 318135 (TRBV12-4, TRBJ1-5)
CASSRRVGGSNQPQHF

SEQ ID NO: 636271 - protein, 15 aa, Homo sapiens
  CDR3 for alpha chain variable domain of TCR clone 318136 (TRAV8-3, TRAJ27)
CAVGPSKTNAGKSTF

SEQ ID NO: 636272 - protein, 15 aa, Homo sapiens
  CDR3 for beta chain variable domain of TCR clone 318136 (TRBV7-2, TRBJ2-1)
CDSSYGLAGGNEQFF

SEQ ID NO: 636273 - protein, 10 aa, Homo sapiens
  CDR3 for alpha chain variable domain of TCR clone 318137 (TRAV1-2, TRAJ18)
CAVRGEAQPW

SEQ ID NO: 636274 - protein, 12 aa, Homo sapiens
  CDR3 for beta chain variable domain of TCR clone 318137 (TRBV3-1, TRBJ2-7)
CASSQVRYEQYF

SEQ ID NO: 636275 - protein, 17 aa, Homo sapiens
  CDR3 for alpha chain variable domain of TCR clone 318138 (TRAV3, TRAJ42)
CAVRDRDYGGSQGNVIF

SEQ ID NO: 636276 - protein, 14 aa, Homo sapiens
  CDR3 for beta chain variable domain of TCR clone 318138 (TRBV19, TRBJ2-2)
CASSGQGVAGELFF

SEQ ID NO: 636277 - protein, 15 aa, Homo sapiens
  CDR3 for alpha chain variable domain of TCR clone 318139 (TRAV25, TRAJ52)
CAGRPGGTSYGKLTF

SEQ ID NO: 636278 - protein, 10 aa, Homo sapiens
  CDR3 for beta chain variable domain of TCR clone 318139 (TRBV7-9, TRBJ1-1)
CASSFTEAFF

SEQ ID NO: 636279 - protein, 11 aa, Homo sapiens
  CDR3 for alpha chain variable domain of TCR clone 318140 (TRAV2, TRAJ33)
CAVDSNYQLTW

SEQ ID NO: 636280 - protein, 14 aa, Homo sapiens
  CDR3 for beta chain variable domain of TCR clone 318140 (TRBV11-2, TRBJ2-3)
CASSRLARTDTQYF

SEQ ID NO: 636281 - protein, 14 aa, Homo sapiens
  CDR3 for alpha chain variable domain of TCR clone 318141 (TRAV20, TRAJ42)
CAMQAGGSQGNLIF

SEQ ID NO: 636282 - protein, 14 aa, Homo sapiens
  CDR3 for beta chain variable domain of TCR clone 318141 (TRBV28, TRBJ1-2)
CAGRIQGANYGYTF

SEQ ID NO: 636283 - protein, 17 aa, Homo sapiens
  CDR3 for alpha chain variable domain of TCR clone 318142 (TRAV35, TRAJ28)
CAGLQVYSGAGSYQFTF

SEQ ID NO: 636284 - protein, 15 aa, Homo sapiens
  CDR3 for beta chain variable domain of TCR clone 318142 (TRBV2, TRBJ1-2)
CASSEIGGANYGYTF

SEQ ID NO: 636285 - protein, 13 aa, Homo sapiens
  CDR3 for alpha chain variable domain of TCR clone 318143 (TRAV12-1, TRAJ49)
CVVNTNTGNQFYF

SEQ ID NO: 636286 - protein, 14 aa, Homo sapiens
  CDR3 for beta chain variable domain of TCR clone 318143 (TRBV12-5, TRBJ2-5)
CASGSRTHQETQYF

SEQ ID NO: 636287 - protein, 13 aa, Homo sapiens
  CDR3 for alpha chain variable domain of TCR clone 318144 (TRAV17, TRAJ22)
CATSPWFCKATDL

SEQ ID NO: 636288 - protein, 15 aa, Homo sapiens
  CDR3 for beta chain variable domain of TCR clone 318144 (TRBV4-1, TRBJ2-5)
CASSQWDLYQETQYF

SEQ ID NO: 636289 - protein, 14 aa, Homo sapiens
  CDR3 for alpha chain variable domain of TCR clone 318145 (TRAV17, TRAJ16)
CATADFSDGQKLLF

SEQ ID NO: 636290 - protein, 18 aa, Homo sapiens
  CDR3 for beta chain variable domain of TCR clone 318145 (TRBV12-4, TRBJ2-2)
CASSLVAGTRGRTGELFF

SEQ ID NO: 636291 - protein, 14 aa, Homo sapiens
  CDR3 for alpha chain variable domain of TCR clone 318146 (TRAV35, TRAJ42)
CAGRYGGSQGNLIF

SEQ ID NO: 636292 - protein, 15 aa, Homo sapiens
  CDR3 for beta chain variable domain of TCR clone 318146 (TRBV7-9, TRBJ2-1)
CASSLGWGRANGQFF

SEQ ID NO: 636293 - protein, 13 aa, Homo sapiens
  CDR3 for alpha chain variable domain of TCR clone 318147 (TRAV13-2, TRAJ48)
CAEMDFGNEKLTF

SEQ ID NO: 636294 - protein, 18 aa, Homo sapiens
  CDR3 for beta chain variable domain of TCR clone 318147 (TRBV4-1, TRBJ1-5)
CASSQDPRGQGLNQPQHF

SEQ ID NO: 636295 - protein, 14 aa, Homo sapiens
  CDR3 for alpha chain variable domain of TCR clone 318148 (TRAV3, TRAJ40)
CGVRDRRGTYKYIF

SEQ ID NO: 636296 - protein, 15 aa, Homo sapiens
  CDR3 for beta chain variable domain of TCR clone 318148 (TRBV11-1, TRBJ1-3)
CASTDPRAFGNTIYF

SEQ ID NO: 636297 - protein, 18 aa, Homo sapiens
  CDR3 for alpha chain variable domain of TCR clone 318149 (TRAV21, TRAJ52)
CAVRPSPAGGTSYGKLTF

SEQ ID NO: 636298 - protein, 13 aa, Homo sapiens
  CDR3 for beta chain variable domain of TCR clone 318149 (TRBV27, TRBJ1-1)
CASSLSIGAEAFC

SEQ ID NO: 636299 - protein, 13 aa, Homo sapiens
  CDR3 for alpha chain variable domain of TCR clone 318150 (TRAV3, TRAJ29)
CAVRDIIDTPLVF

SEQ ID NO: 636300 - protein, 14 aa, Homo sapiens
  CDR3 for beta chain variable domain of TCR clone 318150 (TRBV27, TRBJ2-1)
CASSATGGYNEQVF

SEQ ID NO: 636301 - protein, 13 aa, Homo sapiens
  CDR3 for alpha chain variable domain of TCR clone 318151 (TRAV25, TRAJ30)
CTGRVDRDDKIIF

SEQ ID NO: 636302 - protein, 17 aa, Homo sapiens
  CDR3 for beta chain variable domain of TCR clone 318151 (TRBV7-9, TRBJ2-6)
CASSFGAGYSGANVLTF

SEQ ID NO: 636303 - protein, 14 aa, Homo sapiens
  CDR3 for alpha chain variable domain of TCR clone 318152 (TRAV2, TRAJ37)
CAVDFTSNTVKLIF

SEQ ID NO: 636304 - protein, 14 aa, Homo sapiens
  CDR3 for beta chain variable domain of TCR clone 318152 (TRBV6-1, TRBJ1-3)
CASVQGGGGNTIYF

SEQ ID NO: 636305 - protein, 14 aa, Homo sapiens
  CDR3 for alpha chain variable domain of TCR clone 318153 (TRAV12-2, TRAJ13)
RAVKKTGGYQKVAF

SEQ ID NO: 636306 - protein, 14 aa, Homo sapiens
  CDR3 for beta chain variable domain of TCR clone 318153 (TRBV7-2, TRBJ2-7)
CASSPKTSFYEQYF

SEQ ID NO: 636307 - protein, 15 aa, Homo sapiens
  CDR3 for alpha chain variable domain of TCR clone 318154 (TRAV8-4, TRAJ40)
FALSSITSGTYKYIF

SEQ ID NO: 636308 - protein, 13 aa, Homo sapiens
  CDR3 for beta chain variable domain of TCR clone 318154 (TRBV2, TRBJ2-1)
CATSRGTDNEQFF

SEQ ID NO: 636309 - protein, 12 aa, Homo sapiens
  CDR3 for alpha chain variable domain of TCR clone 318155 (TRAV24, TRAJ26)
CALDNYGQNFVF

SEQ ID NO: 636310 - protein, 16 aa, Homo sapiens
  CDR3 for beta chain variable domain of TCR clone 318155 (TRBV18, TRBJ1-2)
CASSPPERVTIYGYTF

SEQ ID NO: 636311 - protein, 16 aa, Homo sapiens
  CDR3 for alpha chain variable domain of TCR clone 318156 (TRAV12-2, TRAJ32)
CAVNLGQGGATNKLSF

SEQ ID NO: 636312 - protein, 15 aa, Homo sapiens
  CDR3 for beta chain variable domain of TCR clone 318156 (TRBV20-1, TRBJ2-7)
CSARGPLAGGRERYF

SEQ ID NO: 636313 - protein, 14 aa, Homo sapiens
  CDR3 for alpha chain variable domain of TCR clone 318157 (TRAV12-1, TRAJ46)
CVGTAKSSGDKLTF

SEQ ID NO: 636314 - protein, 17 aa, Homo sapiens
  CDR3 for beta chain variable domain of TCR clone 318157 (TRBV4-1, TRBJ2-3)
CASSQDPAGGPLDTQYF

SEQ ID NO: 636315 - protein, 10 aa, Homo sapiens
  CDR3 for alpha chain variable domain of TCR clone 318158 (TRAV1-2, TRAJ31)
CVSEDARLMF

SEQ ID NO: 636316 - protein, 17 aa, Homo sapiens
  CDR3 for beta chain variable domain of TCR clone 318158 (TRBV11-2, TRBJ2-1)
CASSLYPPGVEYNEQFF

SEQ ID NO: 636317 - protein, 12 aa, Homo sapiens
  CDR3 for alpha chain variable domain of TCR clone 318159 (TRAV12-3, TRAJ20)
CAMVRGDYKLSF

SEQ ID NO: 636318 - protein, 14 aa, Homo sapiens
  CDR3 for beta chain variable domain of TCR clone 318159 (TRBV2, TRBJ2-7)
CASSLTSGGYEQYF

SEQ ID NO: 636319 - protein, 14 aa, Homo sapiens
  CDR3 for alpha chain variable domain of TCR clone 318160 (TRAV17, TRAJ57)
CATDASGGSEKLVF

SEQ ID NO: 636320 - protein, 15 aa, Homo sapiens
  CDR3 for beta chain variable domain of TCR clone 318160 (TRBV4-1, TRBJ1-4)
CASSDTGGTNEKLFF

SEQ ID NO: 636321 - protein, 12 aa, Homo sapiens
  CDR3 for alpha chain variable domain of TCR clone 318161 (TRAV12-1, TRAJ9)
CVVNPASFKTIF

SEQ ID NO: 636322 - protein, 15 aa, Homo sapiens
  CDR3 for beta chain variable domain of TCR clone 318161 (TRBV4-3, TRBJ2-2)
CASSQGTGGAGELFF

SEQ ID NO: 636323 - protein, 13 aa, Homo sapiens
  CDR3 for alpha chain variable domain of TCR clone 318162 (TRAV17, TRAJ20)
CATGRSNDYKLSF

SEQ ID NO: 636324 - protein, 16 aa, Homo sapiens
  CDR3 for beta chain variable domain of TCR clone 318162 (TRBV7-9, TRBJ2-1)
CASSDVAGGSYNEQFF

SEQ ID NO: 636325 - protein, 12 aa, Homo sapiens
  CDR3 for alpha chain variable domain of TCR clone 318163 (TRAV21, TRAJ42)
CAVGGSKGNLIF

SEQ ID NO: 636326 - protein, 14 aa, Homo sapiens
  CDR3 for beta chain variable domain of TCR clone 318163 (TRBV12-4, TRBJ1-1)
CASSLGTGGTEAFF

SEQ ID NO: 636327 - protein, 14 aa, Homo sapiens
  CDR3 for alpha chain variable domain of TCR clone 318164 (TRAV12-2, TRAJ17)
CAVLFKAAGNKLTF

SEQ ID NO: 636328 - protein, 14 aa, Homo sapiens
  CDR3 for beta chain variable domain of TCR clone 318164 (TRBV11-1, TRBJ2-7)
CASSFRQGSYEQYF

SEQ ID NO: 636329 - protein, 12 aa, Homo sapiens
  CDR3 for alpha chain variable domain of TCR clone 318165 (TRAV30, TRAJ49)
CGTLGVSNQFYF

SEQ ID NO: 636330 - protein, 15 aa, Homo sapiens
  CDR3 for beta chain variable domain of TCR clone 318165 (TRBV9, TRBJ1-6)
CASSVAGTGDSPLHF

SEQ ID NO: 636331 - protein, 13 aa, Homo sapiens
  CDR3 for alpha chain variable domain of TCR clone 318166 (TRAV12-2, TRAJ24)
CAGSTDSWGKLQF

SEQ ID NO: 636332 - protein, 12 aa, Homo sapiens
  CDR3 for beta chain variable domain of TCR clone 318166 (TRBV7-6, TRBJ2-7)
CASSLADSEQYF

SEQ ID NO: 636333 - protein, 13 aa, Homo sapiens
  CDR3 for alpha chain variable domain of TCR clone 318167 (TRAV27, TRAJ45)
CRSSGGGADGLTF

SEQ ID NO: 636334 - protein, 14 aa, Homo sapiens
  CDR3 for beta chain variable domain of TCR clone 318167 (TRBV5-4, TRBJ1-1)
CASSLDSRRDEAFF

SEQ ID NO: 636335 - protein, 15 aa, Homo sapiens
  CDR3 for alpha chain variable domain of TCR clone 318168 (TRAV26-1, TRAJ47)
CIVRVGWGYGNKLVF

SEQ ID NO: 636336 - protein, 13 aa, Homo sapiens
  CDR3 for beta chain variable domain of TCR clone 318168 (TRBV7-3, TRBJ1-1)
CASSQDWGAEAFF

SEQ ID NO: 636337 - protein, 18 aa, Homo sapiens
  CDR3 for alpha chain variable domain of TCR clone 318169 (TRAV17, TRAJ45)
CATSLDLYSGGGAAGRTF

SEQ ID NO: 636338 - protein, 15 aa, Homo sapiens
  CDR3 for beta chain variable domain of TCR clone 318169 (TRBV11-2, TRBJ2-1)
CASSKNRGLIYEQFF

SEQ ID NO: 636339 - protein, 14 aa, Homo sapiens
  CDR3 for alpha chain variable domain of TCR clone 318170 (TRAV27, TRAJ52)
CAGAGGTSYGKPTF

SEQ ID NO: 636340 - protein, 17 aa, Homo sapiens
  CDR3 for beta chain variable domain of TCR clone 318170 (TRBV7-8, TRBJ2-6)
CASSAGTGGAGANVLTF

SEQ ID NO: 636341 - protein, 14 aa, Homo sapiens
  CDR3 for alpha chain variable domain of TCR clone 318171 (TRAV38-1, TRAJ27)
CAFIHNTNAGKSAF

SEQ ID NO: 636342 - protein, 12 aa, Homo sapiens
  CDR3 for beta chain variable domain of TCR clone 318171 (TRBV7-8, TRBJ2-7)
CASSLGDREQYF

SEQ ID NO: 636343 - protein, 14 aa, Homo sapiens
  CDR3 for alpha chain variable domain of TCR clone 318172 (TRAV8-2, TRAJ44)
CVVSLTGTASKLTF

SEQ ID NO: 636344 - protein, 14 aa, Homo sapiens
  CDR3 for beta chain variable domain of TCR clone 318172 (TRBV7-2, TRBJ2-1)
CQQLWRGIYNEQFF

SEQ ID NO: 636345 - protein, 14 aa, Homo sapiens
  CDR3 for alpha chain variable domain of TCR clone 318173 (TRAV1-2, TRAJ8)
CAVREDTGFQKLAF

SEQ ID NO: 636346 - protein, 17 aa, Homo sapiens
  CDR3 for beta chain variable domain of TCR clone 318173 (TRBV20-1, TRBJ2-1)
CSASSSGLAGSYNEQFF

SEQ ID NO: 636347 - protein, 15 aa, Homo sapiens
  CDR3 for alpha chain variable domain of TCR clone 318174 (TRAV12-3, TRAJ6)
CAMSATTGGSYIPTF

SEQ ID NO: 636348 - protein, 14 aa, Homo sapiens
  CDR3 for beta chain variable domain of TCR clone 318174 (TRBV19, TRBJ2-5)
CASSMTGQQETQYF

SEQ ID NO: 636349 - protein, 13 aa, Homo sapiens
  CDR3 for alpha chain variable domain of TCR clone 318175 (TRAV12-3, TRAJ54)
CALVPQGAQKLVF

SEQ ID NO: 636350 - protein, 14 aa, Homo sapiens
  CDR3 for beta chain variable domain of TCR clone 318175 (TRBV4-1, TRBJ2-2)
RQQQDSRGTGELFF

SEQ ID NO: 636351 - protein, 21 aa, Homo sapiens
  CDR3 for alpha chain variable domain of TCR clone 318176 (TRAV6, TRAJ36)
CARQTTSSLGLERDSPLFPIF

SEQ ID NO: 636352 - protein, 14 aa, Homo sapiens
  CDR3 for beta chain variable domain of TCR clone 318176 (TRBV10-2, TRBJ1-5)
CASSSTGRNQPKHF

SEQ ID NO: 636353 - protein, 16 aa, Homo sapiens
  CDR3 for alpha chain variable domain of TCR clone 318177 (TRAV13-1, TRAJ48)
CAASIFGNFGNEKLTF

SEQ ID NO: 636354 - protein, 15 aa, Homo sapiens
  CDR3 for beta chain variable domain of TCR clone 318177 (TRBV10-2, TRBJ2-6)
CASSEQGTGANDLTF

SEQ ID NO: 636355 - protein, 14 aa, Homo sapiens
  CDR3 for alpha chain variable domain of TCR clone 318178 (TRAV23/DV6, TRAJ22)
CAASVSGSARQLTF

SEQ ID NO: 636356 - protein, 14 aa, Homo sapiens
  CDR3 for beta chain variable domain of TCR clone 318178 (TRBV25-1, TRBJ1-1)
CASTHLGGNTEAFF

SEQ ID NO: 636357 - protein, 13 aa, Homo sapiens
  CDR3 for alpha chain variable domain of TCR clone 318179 (TRAV26-2, TRAJ57)
GILSRGGSEKLVF

SEQ ID NO: 636358 - protein, 16 aa, Homo sapiens
  CDR3 for beta chain variable domain of TCR clone 318179 (TRBV18, TRBJ1-5)
CASSPRTGGGNQPQHF

SEQ ID NO: 636359 - protein, 16 aa, Homo sapiens
  CDR3 for alpha chain variable domain of TCR clone 318180 (TRAV30, TRAJ24)
CGTEIVDADSWGKFQF

SEQ ID NO: 636360 - protein, 13 aa, Homo sapiens
  CDR3 for beta chain variable domain of TCR clone 318180 (TRBV4-2, TRBJ1-1)
CASSQAGNTEDFF

SEQ ID NO: 636361 - protein, 10 aa, Homo sapiens
  CDR3 for alpha chain variable domain of TCR clone 318181 (TRAV30, TRAJ34)
CGTNPDKLIF

SEQ ID NO: 636362 - protein, 15 aa, Homo sapiens
  CDR3 for beta chain variable domain of TCR clone 318181 (TRBV5-1, TRBJ2-7)
CASSLNGGPAREQYF

SEQ ID NO: 636363 - protein, 12 aa, Homo sapiens
  CDR3 for alpha chain variable domain of TCR clone 318182 (TRAV12-1, TRAJ34)
CVVAGATDKLIF

SEQ ID NO: 636364 - protein, 16 aa, Homo sapiens
  CDR3 for beta chain variable domain of TCR clone 318182 (TRBV28, TRBJ2-1)
CASSSPEYPRDNEQFF

SEQ ID NO: 636365 - protein, 12 aa, Homo sapiens
  CDR3 for alpha chain variable domain of TCR clone 318183 (TRAV1-2, TRAJ17)
CAVRAAGTKLTF

SEQ ID NO: 636366 - protein, 16 aa, Homo sapiens
  CDR3 for beta chain variable domain of TCR clone 318183 (TRBV20-1, TRBJ2-1)
CSAPGLAGSYSDEQFF

SEQ ID NO: 636367 - protein, 15 aa, Homo sapiens
  CDR3 for alpha chain variable domain of TCR clone 318184 (TRAV3, TRAJ45)
CAVRTPWGGADGLTF

SEQ ID NO: 636368 - protein, 14 aa, Homo sapiens
  CDR3 for beta chain variable domain of TCR clone 318184 (TRBV19, TRBJ2-1)
CASPTFVLSGEQFF

SEQ ID NO: 636369 - protein, 15 aa, Homo sapiens
  CDR3 for alpha chain variable domain of TCR clone 318185 (TRAV27, TRAJ38)
CAARRNAGNNRKLIW

SEQ ID NO: 636370 - protein, 13 aa, Homo sapiens
  CDR3 for beta chain variable domain of TCR clone 318185 (TRBV28, TRBJ1-2)
CAGRDRGNYGYTF

SEQ ID NO: 636371 - protein, 14 aa, Homo sapiens
  CDR3 for alpha chain variable domain of TCR clone 318186 (TRAV21, TRAJ22)
CAVFFSGSARQLTF

SEQ ID NO: 636372 - protein, 16 aa, Homo sapiens
  CDR3 for beta chain variable domain of TCR clone 318186 (TRBV19, TRBJ1-1)
CASSIREMNTEAFLDK

SEQ ID NO: 636373 - protein, 14 aa, Homo sapiens
  CDR3 for alpha chain variable domain of TCR clone 318187 (TRAV20, TRAJ22)
CAVQVSGSARQPTF

SEQ ID NO: 636374 - protein, 13 aa, Homo sapiens
  CDR3 for beta chain variable domain of TCR clone 318187 (TRBV20-1, TRBJ2-5)
CSAREGGKETQYF

SEQ ID NO: 636375 - protein, 13 aa, Homo sapiens
  CDR3 for alpha chain variable domain of TCR clone 318188 (TRAV21, TRAJ27)
CAALNTHAGKSTF

SEQ ID NO: 636376 - protein, 14 aa, Homo sapiens
  CDR3 for beta chain variable domain of TCR clone 318188 (TRBV27, TRBJ1-1)
CASSLLSGLSEAFF

SEQ ID NO: 636377 - protein, 16 aa, Homo sapiens
  CDR3 for alpha chain variable domain of TCR clone 318189 (TRAV1-2, TRAJ10)
CAVRVVLTGGGNKLTF

SEQ ID NO: 636378 - protein, 13 aa, Homo sapiens
  CDR3 for beta chain variable domain of TCR clone 318189 (TRBV20-1, TRBJ1-6)
CSDPLGVGSPLHF

SEQ ID NO: 636379 - protein, 13 aa, Homo sapiens
  CDR3 for alpha chain variable domain of TCR clone 318190 (TRAV19, TRAJ26)
CALTFDYGQNFVF

SEQ ID NO: 636380 - protein, 14 aa, Homo sapiens
  CDR3 for beta chain variable domain of TCR clone 318190 (TRBV7-8, TRBJ2-3)
YASSLEAGTDTQYF

SEQ ID NO: 636381 - protein, 14 aa, Homo sapiens
  CDR3 for alpha chain variable domain of TCR clone 318191 (TRAV12-1, TRAJ33)
CVVNPEDSNYQLFW

SEQ ID NO: 636382 - protein, 11 aa, Homo sapiens
  CDR3 for beta chain variable domain of TCR clone 318191 (TRBV7-6, TRBJ2-1)
CASSNYGEQFF

SEQ ID NO: 636383 - protein, 13 aa, Homo sapiens
  CDR3 for alpha chain variable domain of TCR clone 318192 (TRAV2, TRAJ40)
CAVVTSGTYKYIF

SEQ ID NO: 636384 - protein, 14 aa, Homo sapiens
  CDR3 for beta chain variable domain of TCR clone 318192 (TRBV19, TRBJ2-1)
CASPTFVLSGEQVV

SEQ ID NO: 636385 - protein, 12 aa, Homo sapiens
  CDR3 for alpha chain variable domain of TCR clone 318193 (TRAV13-1, TRAJ42)
VNYGGSQGNLIF

SEQ ID NO: 636386 - protein, 15 aa, Homo sapiens
  CDR3 for beta chain variable domain of TCR clone 318193 (TRBV20-1, TRBJ2-1)
CSGSSAGSSYNEQFF

SEQ ID NO: 636387 - protein, 14 aa, Homo sapiens
  CDR3 for alpha chain variable domain of TCR clone 318194 (TRAV1-2, TRAJ8)
CAVREDTGFEKLVF

SEQ ID NO: 636388 - protein, 13 aa, Homo sapiens
  CDR3 for beta chain variable domain of TCR clone 318194 (TRBV15, TRBJ2-7)
CATSTTGHYEQYF

SEQ ID NO: 636389 - protein, 13 aa, Homo sapiens
  CDR3 for alpha chain variable domain of TCR clone 318195 (TRAV27, TRAJ45)
CRSSGGGADGLTF

SEQ ID NO: 636390 - protein, 14 aa, Homo sapiens
  CDR3 for beta chain variable domain of TCR clone 318195 (TRBV12-4, TRBJ2-3)
CSSTIAGWGDTQYF

SEQ ID NO: 636391 - protein, 14 aa, Homo sapiens
  CDR3 for alpha chain variable domain of TCR clone 318196 (TRAV1-2, TRAJ16)
CAANRFSDGQKLLF

SEQ ID NO: 636392 - protein, 14 aa, Homo sapiens
  CDR3 for beta chain variable domain of TCR clone 318196 (TRBV7-3, TRBJ2-1)
CASSLTGGANEQFF

SEQ ID NO: 636393 - protein, 15 aa, Homo sapiens
  CDR3 for alpha chain variable domain of TCR clone 318197 (TRAV17, TRAJ57)
CATGPSQGGSAKLVF

SEQ ID NO: 636394 - protein, 11 aa, Homo sapiens
  CDR3 for beta chain variable domain of TCR clone 318197 (TRBV29-1, TRBJ2-5)
CSEDRTGTQYF

SEQ ID NO: 636395 - protein, 18 aa, Homo sapiens
  CDR3 for alpha chain variable domain of TCR clone 318198 (TRAV21, TRAJ52)
CAVMPSPAGGTSYGKLTF

SEQ ID NO: 636396 - protein, 14 aa, Homo sapiens
  CDR3 for beta chain variable domain of TCR clone 318198 (TRBV4-2, TRBJ2-1)
CASGLDRAYNEQFL

SEQ ID NO: 636397 - protein, 11 aa, Homo sapiens
  CDR3 for alpha chain variable domain of TCR clone 318199 (TRAV12-1, TRAJ8)
CVVTGFQKLVF

SEQ ID NO: 636398 - protein, 14 aa, Homo sapiens
  CDR3 for beta chain variable domain of TCR clone 318199 (TRBV19, TRBJ2-1)
CASGKSTRYNEQFF

SEQ ID NO: 636399 - protein, 14 aa, Homo sapiens
  CDR3 for alpha chain variable domain of TCR clone 318200 (TRAV12-2, TRAJ13)
CAVKKTGGYQQVTF

SEQ ID NO: 636400 - protein, 12 aa, Homo sapiens
  CDR3 for beta chain variable domain of TCR clone 318200 (TRBV11-2, TRBJ2-1)
CASSPGNNEQFF

SEQ ID NO: 636401 - protein, 16 aa, Homo sapiens
  CDR3 for alpha chain variable domain of TCR clone 318201 (TRAV23/DV6, TRAJ52)
CAARPSGGTSYGKMTF

SEQ ID NO: 636402 - protein, 13 aa, Homo sapiens
  CDR3 for beta chain variable domain of TCR clone 318201 (TRBV7-9, TRBJ1-1)
CASSLSGETEAFF

SEQ ID NO: 636403 - protein, 16 aa, Homo sapiens
  CDR3 for alpha chain variable domain of TCR clone 318202 (TRAV8-6, TRAJ58)
CCELLGRRNQWLRLTF

SEQ ID NO: 636404 - protein, 17 aa, Homo sapiens
  CDR3 for beta chain variable domain of TCR clone 318202 (TRBV4-3, TRBJ1-2)
CASSSRLQAGGSVGYTF

SEQ ID NO: 636405 - protein, 11 aa, Homo sapiens
  CDR3 for alpha chain variable domain of TCR clone 318203 (TRAV21, TRAJ48)
CAVDGNEKLTF

SEQ ID NO: 636406 - protein, 14 aa, Homo sapiens
  CDR3 for beta chain variable domain of TCR clone 318203 (TRBV18, TRBJ2-7)
CASSPRGGAYEQYF

SEQ ID NO: 636407 - protein, 15 aa, Homo sapiens
  CDR3 for alpha chain variable domain of TCR clone 318204 (TRAV23/DV6, TRAJ18)
CAARYRGSTLGRLYF

SEQ ID NO: 636408 - protein, 18 aa, Homo sapiens
  CDR3 for beta chain variable domain of TCR clone 318204 (TRBV6-6, TRBJ1-3)
CASSYSKWDSISGNTIYF

SEQ ID NO: 636409 - protein, 13 aa, Homo sapiens
  CDR3 for alpha chain variable domain of TCR clone 318205 (TRAV8-6, TRAJ49)
CAVITNTGNQFYF

SEQ ID NO: 636410 - protein, 15 aa, Homo sapiens
  CDR3 for beta chain variable domain of TCR clone 318205 (TRBV7-9, TRBJ2-7)
CASSLALAEAYEQYF

SEQ ID NO: 636411 - protein, 15 aa, Homo sapiens
  CDR3 for alpha chain variable domain of TCR clone 318206 (TRAV8-3, TRAJ11)
CAVGLLNSGYSTLTF

SEQ ID NO: 636412 - protein, 15 aa, Homo sapiens
  CDR3 for beta chain variable domain of TCR clone 318206 (TRBV20-1, TRBJ1-1)
CSASRGVTGNTEAFF

SEQ ID NO: 636413 - protein, 14 aa, Homo sapiens
  CDR3 for alpha chain variable domain of TCR clone 318207 (TRAV17, TRAJ53)
CATDAGGSNFKLTF

SEQ ID NO: 636414 - protein, 16 aa, Homo sapiens
  CDR3 for beta chain variable domain of TCR clone 318207 (TRBV4-1, TRBJ1-1)
CASSQDAGMGNTEAFF

SEQ ID NO: 636415 - protein, 15 aa, Homo sapiens
  CDR3 for alpha chain variable domain of TCR clone 318208 (TRAV21, TRAJ32)
CAAAPYGGATNKIIF

SEQ ID NO: 636416 - protein, 17 aa, Homo sapiens
  CDR3 for beta chain variable domain of TCR clone 318208 (TRBV18, TRBJ2-3)
CASSPFGDGGFTDTQYF

SEQ ID NO: 636417 - protein, 14 aa, Homo sapiens
  CDR3 for alpha chain variable domain of TCR clone 318209 (TRAV1-2, TRAJ16)
CAVNRFSDGQKLLF

SEQ ID NO: 636418 - protein, 16 aa, Homo sapiens
  CDR3 for beta chain variable domain of TCR clone 318209 (TRBV12-4, TRBJ2-5)
CASGFFVRGRQETQYF

SEQ ID NO: 636419 - protein, 15 aa, Homo sapiens
  CDR3 for alpha chain variable domain of TCR clone 318210 (TRAV1-2, TRAJ24)
CAVRGSTDSWGKFQF

SEQ ID NO: 636420 - protein, 16 aa, Homo sapiens
  CDR3 for beta chain variable domain of TCR clone 318210 (TRBV12-5, TRBJ2-5)
CASGPRTSGNQETQYF

SEQ ID NO: 636421 - protein, 12 aa, Homo sapiens
  CDR3 for alpha chain variable domain of TCR clone 318211 (TRAV12-2, TRAJ10)
WGVTGGGNKLTF

SEQ ID NO: 636422 - protein, 16 aa, Homo sapiens
  CDR3 for beta chain variable domain of TCR clone 318211 (TRBV6-4, TRBJ1-2)
CASIEAVGDPNYGYTF

SEQ ID NO: 636423 - protein, 18 aa, Homo sapiens
  CDR3 for alpha chain variable domain of TCR clone 318212 (TRAV21, TRAJ52)
CDVRPSPAGGTSYGKLTF

SEQ ID NO: 636424 - protein, 13 aa, Homo sapiens
  CDR3 for beta chain variable domain of TCR clone 318212 (TRBV10-3, TRBJ2-1)
CAISEFSGREQFF

SEQ ID NO: 636425 - protein, 18 aa, Homo sapiens
  CDR3 for alpha chain variable domain of TCR clone 318213 (TRAV13-1, TRAJ52)
CAADFPNAGGTIDGKLTF

SEQ ID NO: 636426 - protein, 14 aa, Homo sapiens
  CDR3 for beta chain variable domain of TCR clone 318213 (TRBV11-2, TRBJ2-3)
CASSLYAGRDTQYF

SEQ ID NO: 636427 - protein, 13 aa, Homo sapiens
  CDR3 for alpha chain variable domain of TCR clone 318214 (TRAV35, TRAJ42)
CAGFPGSQGNLIF

SEQ ID NO: 636428 - protein, 12 aa, Homo sapiens
  CDR3 for beta chain variable domain of TCR clone 318214 (TRBV29-1, TRBJ2-3)
CSVTGGADTQYF

SEQ ID NO: 636429 - protein, 10 aa, Homo sapiens
  CDR3 for alpha chain variable domain of TCR clone 318215 (TRAV12-1, TRAJ37)
ARGNTGKLIF

SEQ ID NO: 636430 - protein, 14 aa, Homo sapiens
  CDR3 for beta chain variable domain of TCR clone 318215 (TRBV11-1, TRBJ1-1)
CASSLEHPNTEAFF

SEQ ID NO: 636431 - protein, 15 aa, Homo sapiens
  CDR3 for alpha chain variable domain of TCR clone 318216 (TRAV2, TRAJ15)
CAVEDRGQAGTALIF

SEQ ID NO: 636432 - protein, 12 aa, Homo sapiens
  CDR3 for beta chain variable domain of TCR clone 318216 (TRBV11-2, TRBJ2-2)
CASSLPTGELFF

SEQ ID NO: 636433 - protein, 14 aa, Homo sapiens
  CDR3 for alpha chain variable domain of TCR clone 318217 (TRAV8-4, TRAJ13)
CALTLSGGYQKVTF

SEQ ID NO: 636434 - protein, 16 aa, Homo sapiens
  CDR3 for beta chain variable domain of TCR clone 318217 (TRBV5-7, TRBJ1-4)
CASSPSVGLKTEKLFF

SEQ ID NO: 636435 - protein, 13 aa, Homo sapiens
  CDR3 for alpha chain variable domain of TCR clone 318218 (TRAV12-3, TRAJ13)
CAMSSGGYQKVTF

SEQ ID NO: 636436 - protein, 14 aa, Homo sapiens
  CDR3 for beta chain variable domain of TCR clone 318218 (TRBV2, TRBJ2-1)
CASRTGSSYNEQFV

SEQ ID NO: 636437 - protein, 13 aa, Homo sapiens
  CDR3 for alpha chain variable domain of TCR clone 318219 (TRAV21, TRAJ57)
CAVIEGGSEKLVF

SEQ ID NO: 636438 - protein, 15 aa, Homo sapiens
  CDR3 for beta chain variable domain of TCR clone 318219 (TRBV10-3, TRBJ2-5)
CAISEFGMGQETQYF

SEQ ID NO: 636439 - protein, 17 aa, Homo sapiens
  CDR3 for alpha chain variable domain of TCR clone 318220 (TRAV3, TRAJ6)
CAVRDGPRAGGRYIPTF

SEQ ID NO: 636440 - protein, 15 aa, Homo sapiens
  CDR3 for beta chain variable domain of TCR clone 318220 (TRBV20-1, TRBJ2-7)
CSARVPAAYFYEQYF

SEQ ID NO: 636441 - protein, 12 aa, Homo sapiens
  CDR3 for alpha chain variable domain of TCR clone 318221 (TRAV12-3, TRAJ17)
CAMTLTGNKLTF

SEQ ID NO: 636442 - protein, 15 aa, Homo sapiens
  CDR3 for beta chain variable domain of TCR clone 318221 (TRBV7-9, TRBJ1-6)
CASSFPGRGNSPLHF

SEQ ID NO: 636443 - protein, 14 aa, Homo sapiens
  CDR3 for alpha chain variable domain of TCR clone 318222 (TRAV27, TRAJ44)
CAASFTGTASKLTF

SEQ ID NO: 636444 - protein, 13 aa, Homo sapiens
  CDR3 for beta chain variable domain of TCR clone 318222 (TRBV7-9, TRBJ1-2)
CASSLKQNYGYTF

SEQ ID NO: 636445 - protein, 13 aa, Homo sapiens
  CDR3 for alpha chain variable domain of TCR clone 318223 (TRAV2, TRAJ16)
CAVERSDGQKLLF

SEQ ID NO: 636446 - protein, 15 aa, Homo sapiens
  CDR3 for beta chain variable domain of TCR clone 318223 (TRBV20-1, TRBJ2-5)
CSAIKGQGGQETQYF

SEQ ID NO: 636447 - protein, 15 aa, Homo sapiens
  CDR3 for alpha chain variable domain of TCR clone 318224 (TRAV8-6, TRAJ10)
CAVSDQAGGGNKLTF

SEQ ID NO: 636448 - protein, 14 aa, Homo sapiens
  CDR3 for beta chain variable domain of TCR clone 318224 (TRBV11-2, TRBJ1-2)
CASSLYRGNYGYTF

SEQ ID NO: 636449 - protein, 12 aa, Homo sapiens
  CDR3 for alpha chain variable domain of TCR clone 318225 (TRAV21, TRAJ31)
CVLAGNNARIMF

SEQ ID NO: 636450 - protein, 16 aa, Homo sapiens
  CDR3 for beta chain variable domain of TCR clone 318225 (TRBV27, TRBJ2-5)
CASSFGPGGTKETQYF

SEQ ID NO: 636451 - protein, 13 aa, Homo sapiens
  CDR3 for alpha chain variable domain of TCR clone 318226 (TRAV8-3, TRAJ44)
CAVVPGTASKLTF

SEQ ID NO: 636452 - protein, 14 aa, Homo sapiens
  CDR3 for beta chain variable domain of TCR clone 318226 (TRBV11-3, TRBJ2-3)
CASSRLARTDTQHF

SEQ ID NO: 636453 - protein, 11 aa, Homo sapiens
  CDR3 for alpha chain variable domain of TCR clone 318227 (TRAV21, TRAJ4)
HVSGGYNKLIF

SEQ ID NO: 636454 - protein, 12 aa, Homo sapiens
  CDR3 for beta chain variable domain of TCR clone 318227 (TRBV11-2, TRBJ2-2)
CASSLGGGELFF

SEQ ID NO: 636455 - protein, 14 aa, Homo sapiens
  CDR3 for alpha chain variable domain of TCR clone 318228 (TRAV21, TRAJ45)
CAVVSGGGADVLTF

SEQ ID NO: 636456 - protein, 14 aa, Homo sapiens
  CDR3 for beta chain variable domain of TCR clone 318228 (TRBV20-1, TRBJ2-3)
CSALGLEGADTQYF

SEQ ID NO: 636457 - protein, 12 aa, Homo sapiens
  CDR3 for alpha chain variable domain of TCR clone 318229 (TRAV1-1, TRAJ8)
CAGGTGFQKLVF

SEQ ID NO: 636458 - protein, 15 aa, Homo sapiens
  CDR3 for beta chain variable domain of TCR clone 318229 (TRBV7-9, TRBJ1-4)
CAGSLTGGFNEKLFF

SEQ ID NO: 636459 - protein, 11 aa, Homo sapiens
  CDR3 for alpha chain variable domain of TCR clone 318230 (TRAV12-3, TRAJ43)
CAMSVSNDMRF

SEQ ID NO: 636460 - protein, 16 aa, Homo sapiens
  CDR3 for beta chain variable domain of TCR clone 318230 (TRBV20-1, TRBJ2-1)
RSARDSLGAVYNEQFF

SEQ ID NO: 636461 - protein, 11 aa, Homo sapiens
  CDR3 for alpha chain variable domain of TCR clone 318231 (TRAV3, TRAJ21)
CAVGNFNKFYF

SEQ ID NO: 636462 - protein, 12 aa, Homo sapiens
  CDR3 for beta chain variable domain of TCR clone 318231 (TRBV11-2, TRBJ2-7)
CASSLPTYEQYF

SEQ ID NO: 636463 - protein, 14 aa, Homo sapiens
  CDR3 for alpha chain variable domain of TCR clone 318232 (TRAV1-2, TRAJ29)
CAVRELTSATPLVF

SEQ ID NO: 636464 - protein, 14 aa, Homo sapiens
  CDR3 for beta chain variable domain of TCR clone 318232 (TRBV3-1, TRBJ2-5)
CASSQGPDQETQYC

SEQ ID NO: 636465 - protein, 14 aa, Homo sapiens
  CDR3 for alpha chain variable domain of TCR clone 318233 (TRAV1-2, TRAJ37)
CAVRSKSNTGKLIF

SEQ ID NO: 636466 - protein, 14 aa, Homo sapiens
  CDR3 for beta chain variable domain of TCR clone 318233 (TRBV6-3, TRBJ1-2)
CANSEGGGSYGDTF

SEQ ID NO: 636467 - protein, 14 aa, Homo sapiens
  CDR3 for alpha chain variable domain of TCR clone 318234 (TRAV1-2, TRAJ16)
CAFNRFSDGQKLLF

SEQ ID NO: 636468 - protein, 14 aa, Homo sapiens
  CDR3 for beta chain variable domain of TCR clone 318234 (TRBV6-1, TRBJ1-3)
CASVQRGGGNTIYF

SEQ ID NO: 636469 - protein, 15 aa, Homo sapiens
  CDR3 for alpha chain variable domain of TCR clone 318235 (TRAV12-1, TRAJ9)
CVVSFGDTGGFKTIF

SEQ ID NO: 636470 - protein, 15 aa, Homo sapiens
  CDR3 for beta chain variable domain of TCR clone 318235 (TRBV9, TRBJ1-6)
CASSVAGTGDSPLHF

SEQ ID NO: 636471 - protein, 12 aa, Homo sapiens
  CDR3 for alpha chain variable domain of TCR clone 318236 (TRAV23/DV6, TRAJ32)
CSMPGATNKLIF

SEQ ID NO: 636472 - protein, 17 aa, Homo sapiens
  CDR3 for beta chain variable domain of TCR clone 318236 (TRBV13, TRBJ2-3)
CASSSLGTSGLTDMQYF

SEQ ID NO: 636473 - protein, 14 aa, Homo sapiens
  CDR3 for alpha chain variable domain of TCR clone 318237 (TRAV8-3, TRAJ4)
CAVGAAGGYNKLIF

SEQ ID NO: 636474 - protein, 11 aa, Homo sapiens
  CDR3 for beta chain variable domain of TCR clone 318237 (TRBV4-1, TRBJ2-2)
CASEHTGELFF

SEQ ID NO: 636475 - protein, 16 aa, Homo sapiens
  CDR3 for alpha chain variable domain of TCR clone 318238 (TRAV21, TRAJ37)
CAVRTAGSSNTGKIIF

SEQ ID NO: 636476 - protein, 13 aa, Homo sapiens
  CDR3 for beta chain variable domain of TCR clone 318238 (TRBV7-9, TRBJ2-5)
CASLPSGRETQYV

SEQ ID NO: 636477 - protein, 14 aa, Homo sapiens
  CDR3 for alpha chain variable domain of TCR clone 318239 (TRAV21, TRAJ38)
CAGMGAGNNRKLIW

SEQ ID NO: 636478 - protein, 13 aa, Homo sapiens
  CDR3 for beta chain variable domain of TCR clone 318239 (TRBV7-3, TRBJ2-5)
CASSIGFFEAQYF

SEQ ID NO: 636479 - protein, 16 aa, Homo sapiens
  CDR3 for alpha chain variable domain of TCR clone 318240 (TRAV8-3, )
CAVGAVGSYPDTRLQR

SEQ ID NO: 636480 - protein, 15 aa, Homo sapiens
  CDR3 for beta chain variable domain of TCR clone 318240 (TRBV3-1, TRBJ2-1)
CASSQVVDDGEEQFF

SEQ ID NO: 636481 - protein, 13 aa, Homo sapiens
  CDR3 for alpha chain variable domain of TCR clone 318241 (TRAV13-1, TRAJ29)
CAASIGLNTHLVF

SEQ ID NO: 636482 - protein, 14 aa, Homo sapiens
  CDR3 for beta chain variable domain of TCR clone 318241 (TRBV20-1, TRBJ2-5)
CSASDSGSGETQYF

SEQ ID NO: 636483 - protein, 16 aa, Homo sapiens
  CDR3 for alpha chain variable domain of TCR clone 318242 (TRAV4, TRAJ22)
CLVGDLYSGSARQLTF

SEQ ID NO: 636484 - protein, 13 aa, Homo sapiens
  CDR3 for beta chain variable domain of TCR clone 318242 (TRBV7-9, TRBJ1-1)
CASSLSGETEAFF

SEQ ID NO: 636485 - protein, 17 aa, Homo sapiens
  CDR3 for alpha chain variable domain of TCR clone 318243 (TRAV3, TRAJ6)
CAVRDGPRAGGSYIPTI

SEQ ID NO: 636486 - protein, 17 aa, Homo sapiens
  CDR3 for beta chain variable domain of TCR clone 318243 (TRBV20-1, TRBJ1-5)
CSASLSPGQGGNQPQHF

SEQ ID NO: 636487 - protein, 14 aa, Homo sapiens
  CDR3 for alpha chain variable domain of TCR clone 318244 (TRAV3, TRAJ17)
CAVRDAAAGNKPTF

SEQ ID NO: 636488 - protein, 15 aa, Homo sapiens
  CDR3 for beta chain variable domain of TCR clone 318244 (TRBV9, TRBJ1-6)
CASSVAGTGDSHLHF

SEQ ID NO: 636489 - protein, 11 aa, Homo sapiens
  CDR3 for alpha chain variable domain of TCR clone 318245 (TRAV23/DV6, TRAJ47)
CAAGYGNKLVF

SEQ ID NO: 636490 - protein, 14 aa, Homo sapiens
  CDR3 for beta chain variable domain of TCR clone 318245 (TRBV7-9, TRBJ2-1)
CASSPRDSLYEQFF

SEQ ID NO: 636491 - protein, 12 aa, Homo sapiens
  CDR3 for alpha chain variable domain of TCR clone 318246 (TRAV13-2, TRAJ23)
CAERHRGGKLIY

SEQ ID NO: 636492 - protein, 15 aa, Homo sapiens
  CDR3 for beta chain variable domain of TCR clone 318246 (TRBV12-4, TRBJ2-5)
CASSPPTGLQETQYF

SEQ ID NO: 636493 - protein, 14 aa, Homo sapiens
  CDR3 for alpha chain variable domain of TCR clone 318247 (TRAV8-1, TRAJ4)
CAVKFSGGYNKLIF

SEQ ID NO: 636494 - protein, 22 aa, Homo sapiens
  CDR3 for beta chain variable domain of TCR clone 318247 (TRBV7-3, TRBJ2-5)
CASARDRAILRPRDPVLRARHA

SEQ ID NO: 636495 - protein, 13 aa, Homo sapiens
  CDR3 for alpha chain variable domain of TCR clone 318248 (TRAV29/DV5, TRAJ31)
CAASRNNNARLML

SEQ ID NO: 636496 - protein, 14 aa, Homo sapiens
  CDR3 for beta chain variable domain of TCR clone 318248 (TRBV7-2, TRBJ1-1)
CASSFLTGTTEAFF

SEQ ID NO: 636497 - protein, 13 aa, Homo sapiens
  CDR3 for alpha chain variable domain of TCR clone 318249 (TRAV8-1, TRAJ30)
CAVIMNRDDKIIC

SEQ ID NO: 636498 - protein, 14 aa, Homo sapiens
  CDR3 for beta chain variable domain of TCR clone 318249 (TRBV7-2, TRBJ1-6)
CASSLQGANSPLHF

SEQ ID NO: 636499 - protein, 12 aa, Homo sapiens
  CDR3 for alpha chain variable domain of TCR clone 318250 (TRAV25, TRAJ11)
CAGASGYSTLTF

SEQ ID NO: 636500 - protein, 16 aa, Homo sapiens
  CDR3 for beta chain variable domain of TCR clone 318250 (TRBV15, TRBJ1-2)
CATGRGPRTGGGGYTF

SEQ ID NO: 636501 - protein, 15 aa, Homo sapiens
  CDR3 for alpha chain variable domain of TCR clone 318251 (TRAV8-3, TRAJ40)
CAAPSLGSGTYNYIF

SEQ ID NO: 636502 - protein, 12 aa, Homo sapiens
  CDR3 for beta chain variable domain of TCR clone 318251 (TRBV11-2, TRBJ2-2)
CASSLGGGELFF

SEQ ID NO: 636503 - protein, 11 aa, Homo sapiens
  CDR3 for alpha chain variable domain of TCR clone 318252 (TRAV29/DV5, TRAJ49)
CAAVPGNQFYF

SEQ ID NO: 636504 - protein, 19 aa, Homo sapiens
  CDR3 for beta chain variable domain of TCR clone 318252 (TRBV2, TRBJ2-2)
CASSQPGLAGGGNTGELFF

SEQ ID NO: 636505 - protein, 15 aa, Homo sapiens
  CDR3 for alpha chain variable domain of TCR clone 318253 (TRAV30, TRAJ24)
CTEIVDADSWGKFQF

SEQ ID NO: 636506 - protein, 14 aa, Homo sapiens
  CDR3 for beta chain variable domain of TCR clone 318253 (TRBV12-5, TRBJ2-5)
CASGSRTHQETQYF

SEQ ID NO: 636507 - protein, 16 aa, Homo sapiens
  CDR3 for alpha chain variable domain of TCR clone 318254 (TRAV8-3, TRAJ8)
CAVPRDGNTGFQKLVV

SEQ ID NO: 636508 - protein, 15 aa, Homo sapiens
  CDR3 for beta chain variable domain of TCR clone 318254 (TRBV19, TRBJ1-1)
CASRETGGVNTEAFF

SEQ ID NO: 636509 - protein, 13 aa, Homo sapiens
  CDR3 for alpha chain variable domain of TCR clone 318255 (TRAV39, TRAJ33)
CAVDRDSNYHLIW

SEQ ID NO: 636510 - protein, 16 aa, Homo sapiens
  CDR3 for beta chain variable domain of TCR clone 318255 (TRBV6-1, TRBJ2-3)
CASSEVIGQGTDTQYF

SEQ ID NO: 636511 - protein, 13 aa, Homo sapiens
  CDR3 for alpha chain variable domain of TCR clone 318256 (TRAV8-1, TRAJ39)
CAGLNNAGNMLTF

SEQ ID NO: 636512 - protein, 17 aa, Homo sapiens
  CDR3 for beta chain variable domain of TCR clone 318256 (TRBV19, TRBJ2-3)
CASSIDPAGGGTDAQYF

SEQ ID NO: 636513 - protein, 14 aa, Homo sapiens
  CDR3 for alpha chain variable domain of TCR clone 318257 (TRAV35, TRAJ38)
CAGSNAGNNRKLIW

SEQ ID NO: 636514 - protein, 12 aa, Homo sapiens
  CDR3 for beta chain variable domain of TCR clone 318257 (TRBV19, TRBJ2-7)
CASTARGYEQYF

SEQ ID NO: 636515 - protein, 12 aa, Homo sapiens
  CDR3 for alpha chain variable domain of TCR clone 318258 (TRAV13-2, TRAJ23)
CAERHRGGMLIF

SEQ ID NO: 636516 - protein, 16 aa, Homo sapiens
  CDR3 for beta chain variable domain of TCR clone 318258 (TRBV20-1, TRBJ1-4)
CSAPGQGLLTNEKLFF

SEQ ID NO: 636517 - protein, 11 aa, Homo sapiens
  CDR3 for alpha chain variable domain of TCR clone 318259 (TRAV12-3, TRAJ16)
LTRGDGQKLLF

SEQ ID NO: 636518 - protein, 13 aa, Homo sapiens
  CDR3 for beta chain variable domain of TCR clone 318259 (TRBV12-4, TRBJ1-4)
CASAMGHNEKLFF

SEQ ID NO: 636519 - protein, 15 aa, Homo sapiens
  CDR3 for alpha chain variable domain of TCR clone 318260 (TRAV17, TRAJ37)
CATDHGSSNTGKLNF

SEQ ID NO: 636520 - protein, 14 aa, Homo sapiens
  CDR3 for beta chain variable domain of TCR clone 318260 (TRBV7-2, TRBJ2-3)
CASSRTSGADTQYF

SEQ ID NO: 636521 - protein, 14 aa, Homo sapiens
  CDR3 for alpha chain variable domain of TCR clone 318261 (TRAV12-3, TRAJ10)
SHLPLTGGGNKLTF

SEQ ID NO: 636522 - protein, 14 aa, Homo sapiens
  CDR3 for beta chain variable domain of TCR clone 318261 (TRBV6-1, TRBJ1-3)
CASVPGGGGNTMYF

SEQ ID NO: 636523 - protein, 13 aa, Homo sapiens
  CDR3 for alpha chain variable domain of TCR clone 318262 (TRAV12-3, TRAJ13)
CAIGTGGYQKVTF

SEQ ID NO: 636524 - protein, 16 aa, Homo sapiens
  CDR3 for beta chain variable domain of TCR clone 318262 (TRBV9, TRBJ2-1)
CASSVGGGGNYNEQFF

SEQ ID NO: 636525 - protein, 19 aa, Homo sapiens
  CDR3 for alpha chain variable domain of TCR clone 318263 (TRAV27, TRAJ53)
ASTSGQSRNSGGSNYKLTF

SEQ ID NO: 636526 - protein, 14 aa, Homo sapiens
  CDR3 for beta chain variable domain of TCR clone 318263 (TRBV11-1, TRBJ2-7)
CASTFAVPSYEQYF

SEQ ID NO: 636527 - protein, 14 aa, Homo sapiens
  CDR3 for alpha chain variable domain of TCR clone 318264 (TRAV12-3, TRAJ53)
CAVSGGGSNYKLTF

SEQ ID NO: 636528 - protein, 14 aa, Homo sapiens
  CDR3 for beta chain variable domain of TCR clone 318264 (TRBV4-2, TRBJ2-1)
CASGLDRAYNEQFF

SEQ ID NO: 636529 - protein, 15 aa, Homo sapiens
  CDR3 for alpha chain variable domain of TCR clone 318265 (TRAV27, TRAJ38)
CAARRNAGNNRKLIW

SEQ ID NO: 636530 - protein, 20 aa, Homo sapiens
  CDR3 for beta chain variable domain of TCR clone 318265 (TRBV19, TRBJ2-1)
CASSISRTVTSTRLNNEQFF

SEQ ID NO: 636531 - protein, 14 aa, Homo sapiens
  CDR3 for alpha chain variable domain of TCR clone 318266 (TRAV1-1, TRAJ27)
CAVIYNTNAGKSTF

SEQ ID NO: 636532 - protein, 14 aa, Homo sapiens
  CDR3 for beta chain variable domain of TCR clone 318266 (TRBV25-1, TRBJ1-1)
CASTHLGGNTEALF

SEQ ID NO: 636533 - protein, 13 aa, Homo sapiens
  CDR3 for alpha chain variable domain of TCR clone 318267 (TRAV21, TRAJ27)
CAARPGNAGKSTY

SEQ ID NO: 636534 - protein, 15 aa, Homo sapiens
  CDR3 for beta chain variable domain of TCR clone 318267 (TRBV20-1, TRBJ2-7)
CSARDRVSGMDEQYF

SEQ ID NO: 636535 - protein, 15 aa, Homo sapiens
  CDR3 for alpha chain variable domain of TCR clone 318268 (TRAV3, TRAJ29)
CAVRAPLSGNTPLVL

SEQ ID NO: 636536 - protein, 15 aa, Homo sapiens
  CDR3 for beta chain variable domain of TCR clone 318268 (TRBV28, TRBJ1-1)
CASRIKGGLNTEAFF

SEQ ID NO: 636537 - protein, 11 aa, Homo sapiens
  CDR3 for alpha chain variable domain of TCR clone 318269 (TRAV2, TRAJ33)
CAMESNYQLIW

SEQ ID NO: 636538 - protein, 15 aa, Homo sapiens
  CDR3 for beta chain variable domain of TCR clone 318269 (TRBV19, TRBJ1-1)
CASTSGQIQNTEAFF

SEQ ID NO: 636539 - protein, 12 aa, Homo sapiens
  CDR3 for alpha chain variable domain of TCR clone 318270 (TRAV13-1, TRAJ42)
SVLRGSQGNLIF

SEQ ID NO: 636540 - protein, 13 aa, Homo sapiens
  CDR3 for beta chain variable domain of TCR clone 318270 (TRBV2, TRBJ1-4)
CASSELGVEKLFV

SEQ ID NO: 636541 - protein, 13 aa, Homo sapiens
  CDR3 for alpha chain variable domain of TCR clone 318271 (TRAV35, TRAJ48)
CAGHEFGNEKLTF

SEQ ID NO: 636542 - protein, 14 aa, Homo sapiens
  CDR3 for beta chain variable domain of TCR clone 318271 (TRBV19, TRBJ2-1)
CASPTFVLSGEQCF

SEQ ID NO: 636543 - protein, 13 aa, Homo sapiens
  CDR3 for alpha chain variable domain of TCR clone 318272 (TRAV8-3, TRAJ48)
CAVVPFGNEKLTF

SEQ ID NO: 636544 - protein, 12 aa, Homo sapiens
  CDR3 for beta chain variable domain of TCR clone 318272 (TRBV11-2, TRBJ2-2)
CASGLGGGELFF

SEQ ID NO: 636545 - protein, 12 aa, Homo sapiens
  CDR3 for alpha chain variable domain of TCR clone 318273 (TRAV12-1, TRAJ6)
CVVSERSYIPTF

SEQ ID NO: 636546 - protein, 13 aa, Homo sapiens
  CDR3 for beta chain variable domain of TCR clone 318273 (TRBV14, TRBJ1-2)
CASIQQGYYGYTF

SEQ ID NO: 636547 - protein, 15 aa, Homo sapiens
  CDR3 for alpha chain variable domain of TCR clone 318274 (TRAV8-3, TRAJ23)
CAVGDRYNQGGKLIF

SEQ ID NO: 636548 - protein, 17 aa, Homo sapiens
  CDR3 for beta chain variable domain of TCR clone 318274 (TRBV4-1, IGHJ2)
CASSQEGPRGVEEKLFF

SEQ ID NO: 636549 - protein, 14 aa, Homo sapiens
  CDR3 for alpha chain variable domain of TCR clone 318275 (TRAV12-1, TRAJ3)
CVVILYSSASKIIF

SEQ ID NO: 636550 - protein, 16 aa, Homo sapiens
  CDR3 for beta chain variable domain of TCR clone 318275 (TRBV12-5, TRBJ2-5)
CASGPRTSGNQETQYF

SEQ ID NO: 636551 - protein, 17 aa, Homo sapiens
  CDR3 for alpha chain variable domain of TCR clone 318276 (TRAV8-3, TRAJ45)
LSTSVLHRIRGADGLTF

SEQ ID NO: 636552 - protein, 12 aa, Homo sapiens
  CDR3 for beta chain variable domain of TCR clone 318276 (TRBV12-4, TRBJ2-7)
CASSLGGYEQYF

SEQ ID NO: 636553 - protein, 14 aa, Homo sapiens
  CDR3 for alpha chain variable domain of TCR clone 318277 (TRAV27, TRAJ23)
PHLGAKDQGGKLIF

SEQ ID NO: 636554 - protein, 14 aa, Homo sapiens
  CDR3 for beta chain variable domain of TCR clone 318277 (TRBV11-2, TRBJ2-3)
CASSRLARTDTQYF

SEQ ID NO: 636555 - protein, 14 aa, Homo sapiens
  CDR3 for alpha chain variable domain of TCR clone 318278 (TRAV27, TRAJ15)
CAGFVNQAGTALIF

SEQ ID NO: 636556 - protein, 11 aa, Homo sapiens
  CDR3 for beta chain variable domain of TCR clone 318278 (TRBV29-1, TRBJ1-1)
CSVEVGTRTFF

SEQ ID NO: 636557 - protein, 13 aa, Homo sapiens
  CDR3 for alpha chain variable domain of TCR clone 318279 (TRAV6, TRAJ23)
CALDQNQGGKLSF

SEQ ID NO: 636558 - protein, 15 aa, Homo sapiens
  CDR3 for beta chain variable domain of TCR clone 318279 (TRBV28, TRBJ1-2)
CASSGSEQRAFGYTF

SEQ ID NO: 636559 - protein, 13 aa, Homo sapiens
  CDR3 for alpha chain variable domain of TCR clone 318280 (TRAV8-3, TRAJ28)
CAVGAVGSYQLTF

SEQ ID NO: 636560 - protein, 15 aa, Homo sapiens
  CDR3 for beta chain variable domain of TCR clone 318280 (TRBV20-1, TRBJ1-1)
CSASRGVTGNTEAFF

SEQ ID NO: 636561 - protein, 13 aa, Homo sapiens
  CDR3 for alpha chain variable domain of TCR clone 318281 (TRAV12-2, TRAJ39)
CAVNNNAGNMLTF

SEQ ID NO: 636562 - protein, 15 aa, Homo sapiens
  CDR3 for beta chain variable domain of TCR clone 318281 (TRBV11-3, TRBJ2-3)
CASLKDGREGDTQYF

SEQ ID NO: 636563 - protein, 17 aa, Homo sapiens
  CDR3 for alpha chain variable domain of TCR clone 318282 (TRAV3, TRAJ42)
CAVRDRDYGGSQGNPIF

SEQ ID NO: 636564 - protein, 15 aa, Homo sapiens
  CDR3 for beta chain variable domain of TCR clone 318282 (TRBV7-2, TRBJ2-7)
CASSWGQGAIYEQYF

SEQ ID NO: 636565 - protein, 12 aa, Homo sapiens
  CDR3 for alpha chain variable domain of TCR clone 318283 (TRAV13-1, TRAJ21)
CSAKEGFNKFYF

SEQ ID NO: 636566 - protein, 14 aa, Homo sapiens
  CDR3 for beta chain variable domain of TCR clone 318283 (TRBV23-1, TRBJ2-5)
CASSFLRSQETQYF

SEQ ID NO: 636567 - protein, 11 aa, Homo sapiens
  CDR3 for alpha chain variable domain of TCR clone 318284 (TRAV26-2, TRAJ8)
CILTGFQKLVF

SEQ ID NO: 636568 - protein, 19 aa, Homo sapiens
  CDR3 for beta chain variable domain of TCR clone 318284 (TRBV20-1, TRBJ2-1)
CSARGETSGNSPQVDEQFF

SEQ ID NO: 636569 - protein, 12 aa, Homo sapiens
  CDR3 for alpha chain variable domain of TCR clone 318285 (TRAV3, TRAJ43)
CAVRDPNNDMRF

SEQ ID NO: 636570 - protein, 15 aa, Homo sapiens
  CDR3 for beta chain variable domain of TCR clone 318285 (TRBV27, TRBJ1-5)
CASSLGTGFDQPRHF

SEQ ID NO: 636571 - protein, 15 aa, Homo sapiens
  CDR3 for alpha chain variable domain of TCR clone 318286 (TRAV8-1, TRAJ6)
CAVNTPHGGSYIPTF

SEQ ID NO: 636572 - protein, 15 aa, Homo sapiens
  CDR3 for beta chain variable domain of TCR clone 318286 (TRBV11-2, TRBJ2-2)
CASSPDRVNAGELFF

SEQ ID NO: 636573 - protein, 16 aa, Homo sapiens
  CDR3 for alpha chain variable domain of TCR clone 318287 (TRAV3, TRAJ37)
CAVRGKGSGNTGKLIF

SEQ ID NO: 636574 - protein, 17 aa, Homo sapiens
  CDR3 for beta chain variable domain of TCR clone 318287 (TRBV5-1, TRBJ2-7)
CASSLNGGLRGSSTSGR

SEQ ID NO: 636575 - protein, 12 aa, Homo sapiens
  CDR3 for alpha chain variable domain of TCR clone 318288 (TRAV3, TRAJ43)
CAVRDPNNDMRF

SEQ ID NO: 636576 - protein, 17 aa, Homo sapiens
  CDR3 for beta chain variable domain of TCR clone 318288 (TRBV7-8, TRBJ2-6)
CASSAGTGGAGGNVLTF

SEQ ID NO: 636577 - protein, 14 aa, Homo sapiens
  CDR3 for alpha chain variable domain of TCR clone 318289 (TRAV1-1, TRAJ28)
CAAPSGAGSYQLTF

SEQ ID NO: 636578 - protein, 15 aa, Homo sapiens
  CDR3 for beta chain variable domain of TCR clone 318289 (TRBV7-2, TRBJ1-2)
CASSLVSGGDYGDTF

SEQ ID NO: 636579 - protein, 13 aa, Homo sapiens
  CDR3 for alpha chain variable domain of TCR clone 318290 (TRAV20, TRAJ37)
CAGCSSNTGKLIF

SEQ ID NO: 636580 - protein, 11 aa, Homo sapiens
  CDR3 for beta chain variable domain of TCR clone 318290 (TRBV12-4, TRBJ2-3)
GATTATDTQYF

SEQ ID NO: 636581 - protein, 14 aa, Homo sapiens
  CDR3 for alpha chain variable domain of TCR clone 318291 (TRAV1-2, TRAJ8)
CAVREDTGFQKLVF

SEQ ID NO: 636582 - protein, 22 aa, Homo sapiens
  CDR3 for beta chain variable domain of TCR clone 318291 (TRBV7-3, TRBJ2-2)
GGTQPCISVPAAQEDTPGSGFF

SEQ ID NO: 636583 - protein, 17 aa, Homo sapiens
  CDR3 for alpha chain variable domain of TCR clone 318292 (TRAV2, TRAJ22)
ILQVREADAAEQRQLTV

SEQ ID NO: 636584 - protein, 12 aa, Homo sapiens
  CDR3 for beta chain variable domain of TCR clone 318292 (TRBV11-2, TRBJ2-2)
CASSLGGGELFF

SEQ ID NO: 636585 - protein, 14 aa, Homo sapiens
  CDR3 for alpha chain variable domain of TCR clone 318293 (TRAV8-3, TRAJ9)
CAVVHNTGGFKTIF

SEQ ID NO: 636586 - protein, 14 aa, Homo sapiens
  CDR3 for beta chain variable domain of TCR clone 318293 (TRBV7-3, TRBJ2-2)
CASSSGGYTEELFF

SEQ ID NO: 636587 - protein, 10 aa, Homo sapiens
  CDR3 for alpha chain variable domain of TCR clone 318294 (TRAV12-1, TRAJ37)
ARGNTGEPIF

SEQ ID NO: 636588 - protein, 15 aa, Homo sapiens
  CDR3 for beta chain variable domain of TCR clone 318294 (TRBV7-2, TRBJ2-3)
CASSLEQGGTDTQYF

SEQ ID NO: 636589 - protein, 13 aa, Homo sapiens
  CDR3 for alpha chain variable domain of TCR clone 318295 (TRAV22, TRAJ29)
CAVGGSGNTLLVF

SEQ ID NO: 636590 - protein, 13 aa, Homo sapiens
  CDR3 for beta chain variable domain of TCR clone 318295 (TRBV4-2, TRBJ1-1)
CASSQAGNTEAFF

SEQ ID NO: 636591 - protein, 10 aa, Homo sapiens
  CDR3 for alpha chain variable domain of TCR clone 318296 (TRAV23/DV6, TRAJ57)
CSASSTLSQG

SEQ ID NO: 636592 - protein, 13 aa, Homo sapiens
  CDR3 for beta chain variable domain of TCR clone 318296 (TRBV19, TRBJ1-2)
CASSQGQVYGYTF

SEQ ID NO: 636593 - protein, 14 aa, Homo sapiens
  CDR3 for alpha chain variable domain of TCR clone 318297 (TRAV30, TRAJ33)
CGTVAPRSNYQLIW

SEQ ID NO: 636594 - protein, 14 aa, Homo sapiens
  CDR3 for beta chain variable domain of TCR clone 318297 (TRBV19, TRBJ1-5)
CASRAPDSFLSQHF

SEQ ID NO: 636595 - protein, 11 aa, Homo sapiens
  CDR3 for alpha chain variable domain of TCR clone 318298 (TRAV22, TRAJ30)
CAGNRDDKIIF

SEQ ID NO: 636596 - protein, 14 aa, Homo sapiens
  CDR3 for beta chain variable domain of TCR clone 318298 (TRBV11-2, TRBJ1-5)
CASSLDRGRQPQHF

SEQ ID NO: 636597 - protein, 17 aa, Homo sapiens
  CDR3 for alpha chain variable domain of TCR clone 318299 (TRAV26-1, TRAJ53)
CIVRVDDSGGSNYKLTF

SEQ ID NO: 636598 - protein, 15 aa, Homo sapiens
  CDR3 for beta chain variable domain of TCR clone 318299 (TRBV20-1, TRBJ2-7)
CSARVPAAYFYEKYF

SEQ ID NO: 636599 - protein, 12 aa, Homo sapiens
  CDR3 for alpha chain variable domain of TCR clone 318300 (TRAV35, TRAJ30)
CAGLNRDDKIIF

SEQ ID NO: 636600 - protein, 15 aa, Homo sapiens
  CDR3 for beta chain variable domain of TCR clone 318300 (TRBV9, TRBJ1-6)
CASSVAGTGDSPRHF

SEQ ID NO: 636601 - protein, 16 aa, Homo sapiens
  CDR3 for alpha chain variable domain of TCR clone 318301 (TRAV30, TRAJ24)
CVTEIVDADSWGKFQF

SEQ ID NO: 636602 - protein, 14 aa, Homo sapiens
  CDR3 for beta chain variable domain of TCR clone 318301 (TRBV9, TRBJ2-7)
CASSVGVGSYEQYF

SEQ ID NO: 636603 - protein, 13 aa, Homo sapiens
  CDR3 for alpha chain variable domain of TCR clone 318302 (TRAV17, TRAJ9)
CATDYTGCFKTIF

SEQ ID NO: 636604 - protein, 15 aa, Homo sapiens
  CDR3 for beta chain variable domain of TCR clone 318302 (TRBV6-3, TRBJ2-7)
CASSSPGTVFYEQYF

SEQ ID NO: 636605 - protein, 12 aa, Homo sapiens
  CDR3 for alpha chain variable domain of TCR clone 318303 (TRAV12-1, TRAJ23)
CVVNIPGGKPIF

SEQ ID NO: 636606 - protein, 15 aa, Homo sapiens
  CDR3 for beta chain variable domain of TCR clone 318303 (TRBV7-2, TRBJ2-7)
CASSLVSSGSYEQYF

SEQ ID NO: 636607 - protein, 14 aa, Homo sapiens
  CDR3 for alpha chain variable domain of TCR clone 318304 (TRAV13-1, TRAJ44)
CAAKATGTASKLTF

SEQ ID NO: 636608 - protein, 15 aa, Homo sapiens
  CDR3 for beta chain variable domain of TCR clone 318304 (TRBV3-1, TRBJ1-2)
CASSHPGTPGYGYTF

SEQ ID NO: 636609 - protein, 11 aa, Homo sapiens
  CDR3 for alpha chain variable domain of TCR clone 318305 (TRAV35, TRAJ13)
CSVWYNQKVTF

SEQ ID NO: 636610 - protein, 13 aa, Homo sapiens
  CDR3 for beta chain variable domain of TCR clone 318305 (TRBV7-9, TRBJ1-2)
CASSLKQNYGYTF

SEQ ID NO: 636611 - protein, 12 aa, Homo sapiens
  CDR3 for alpha chain variable domain of TCR clone 318306 (TRAV13-2, TRAJ23)
CAERHRGGKLIF

SEQ ID NO: 636612 - protein, 15 aa, Homo sapiens
  CDR3 for beta chain variable domain of TCR clone 318306 (TRBV12-4, TRBJ2-7)
CASSQVISTGVEQYF

SEQ ID NO: 636613 - protein, 14 aa, Homo sapiens
  CDR3 for alpha chain variable domain of TCR clone 318307 (TRAV1-2, TRAJ16)
CAVNRFSDGQKLLF

SEQ ID NO: 636614 - protein, 11 aa, Homo sapiens
  CDR3 for beta chain variable domain of TCR clone 318307 (TRBV10-3, TRBJ1-5)
CAIGSGQPQHF

SEQ ID NO: 636615 - protein, 14 aa, Homo sapiens
  CDR3 for alpha chain variable domain of TCR clone 318308 (TRAV12-2, TRAJ45)
CAVSIGGGADGLTF

SEQ ID NO: 636616 - protein, 17 aa, Homo sapiens
  CDR3 for beta chain variable domain of TCR clone 318308 (TRBV7-8, TRBJ2-6)
CARSAGTGGAGANVLTF

SEQ ID NO: 636617 - protein, 11 aa, Homo sapiens
  CDR3 for alpha chain variable domain of TCR clone 318309 (TRAV3, TRAJ17)
PRGAAGNKLTF

SEQ ID NO: 636618 - protein, 13 aa, Homo sapiens
  CDR3 for beta chain variable domain of TCR clone 318309 (TRBV7-9, TRBJ2-7)
CASSFAGAYEQYF

SEQ ID NO: 636619 - protein, 17 aa, Homo sapiens
  CDR3 for alpha chain variable domain of TCR clone 318310 (TRAV3, TRAJ42)
CAVRDRDYGGSQGTLIF

SEQ ID NO: 636620 - protein, 12 aa, Homo sapiens
  CDR3 for beta chain variable domain of TCR clone 318310 (TRBV29-1, TRBJ2-2)
CSVDKYTGELFF

SEQ ID NO: 636621 - protein, 14 aa, Homo sapiens
  CDR3 for alpha chain variable domain of TCR clone 318311 (TRAV17, TRAJ56)
CATVPAGANSKLTF

SEQ ID NO: 636622 - protein, 13 aa, Homo sapiens
  CDR3 for beta chain variable domain of TCR clone 318311 (TRBV12-4, TRBJ2-2)
CASSITGSGQLFF

SEQ ID NO: 636623 - protein, 18 aa, Homo sapiens
  CDR3 for alpha chain variable domain of TCR clone 318312 (TRAV21, TRAJ52)
CAVRSSPAGGTSYGKLTF

SEQ ID NO: 636624 - protein, 15 aa, Homo sapiens
  CDR3 for beta chain variable domain of TCR clone 318312 (TRBV19, TRBJ1-1)
CASTSGQIQNTEAFF

SEQ ID NO: 636625 - protein, 14 aa, Homo sapiens
  CDR3 for alpha chain variable domain of TCR clone 318313 (TRAV38-1, TRAJ45)
CAYYSGGGADGLTF

SEQ ID NO: 636626 - protein, 13 aa, Homo sapiens
  CDR3 for beta chain variable domain of TCR clone 318313 (TRBV6-6, TRBJ1-5)
CASSTGGLQPQHF

SEQ ID NO: 636627 - protein, 12 aa, Homo sapiens
  CDR3 for alpha chain variable domain of TCR clone 318314 (TRAV16, TRAJ22)
CALEVSARQLTF

SEQ ID NO: 636628 - protein, 14 aa, Homo sapiens
  CDR3 for beta chain variable domain of TCR clone 318314 (TRBV11-2, TRBJ2-3)
CASSSVASTDTQYF

SEQ ID NO: 636629 - protein, 14 aa, Homo sapiens
  CDR3 for alpha chain variable domain of TCR clone 318315 (TRAV23/DV6, TRAJ8)
CAASKNTRFQKLVF

SEQ ID NO: 636630 - protein, 16 aa, Homo sapiens
  CDR3 for beta chain variable domain of TCR clone 318315 (TRBV4-1, TRBJ2-6)
CASSQVGDPGANVLTF

SEQ ID NO: 636631 - protein, 14 aa, Homo sapiens
  CDR3 for alpha chain variable domain of TCR clone 318316 (TRAV35, TRAJ50)
CAGHRKTSYDKVIF

SEQ ID NO: 636632 - protein, 14 aa, Homo sapiens
  CDR3 for beta chain variable domain of TCR clone 318316 (TRBV7-7, TRBJ2-2)
CATRQDSDTGELFF

SEQ ID NO: 636633 - protein, 11 aa, Homo sapiens
  CDR3 for alpha chain variable domain of TCR clone 318317 (TRAV3, TRAJ21)
CAVCNFNKFYF

SEQ ID NO: 636634 - protein, 13 aa, Homo sapiens
  CDR3 for beta chain variable domain of TCR clone 318317 (TRBV12-4, TRBJ2-7)
CASSPTETYEQYF

SEQ ID NO: 636635 - protein, 16 aa, Homo sapiens
  CDR3 for alpha chain variable domain of TCR clone 318318 (TRAV26-1, TRAJ45)
CIVEKYSGGGADGRTF

SEQ ID NO: 636636 - protein, 14 aa, Homo sapiens
  CDR3 for beta chain variable domain of TCR clone 318318 (TRBV7-3, TRBJ1-1)
CASSLKGGNTEAFF

SEQ ID NO: 636637 - protein, 14 aa, Homo sapiens
  CDR3 for alpha chain variable domain of TCR clone 318319 (TRAV1-2, TRAJ16)
CAVNRFSDGQKLLF

SEQ ID NO: 636638 - protein, 11 aa, Homo sapiens
  CDR3 for beta chain variable domain of TCR clone 318319 (TRBV4-1, TRBJ2-2)
CASEHAGELFF

SEQ ID NO: 636639 - protein, 12 aa, Homo sapiens
  CDR3 for alpha chain variable domain of TCR clone 318320 (TRAV30, TRAJ43)
CGTEERGHDMRF

SEQ ID NO: 636640 - protein, 13 aa, Homo sapiens
  CDR3 for beta chain variable domain of TCR clone 318320 (TRBV27, TRBJ2-7)
CASSFSQGYEQYF

SEQ ID NO: 636641 - protein, 14 aa, Homo sapiens
  CDR3 for alpha chain variable domain of TCR clone 318321 (TRAV12-2, TRAJ17)
CAALFKAAGNKLTF

SEQ ID NO: 636642 - protein, 16 aa, Homo sapiens
  CDR3 for beta chain variable domain of TCR clone 318321 (TRBV20-1, TRBJ2-2)
CSASASGSPGAGELFF

SEQ ID NO: 636643 - protein, 14 aa, Homo sapiens
  CDR3 for alpha chain variable domain of TCR clone 318322 (TRAV2, TRAJ9)
CAVDDRSGGFKTIF

SEQ ID NO: 636644 - protein, 19 aa, Homo sapiens
  CDR3 for beta chain variable domain of TCR clone 318322 (TRBV25-1, TRBJ2-2)
CAILVYRVDRGRKTGELFF

SEQ ID NO: 636645 - protein, 15 aa, Homo sapiens
  CDR3 for alpha chain variable domain of TCR clone 318323 (TRAV8-3, TRAJ27)
CAVGPSKTNAGKSNI

SEQ ID NO: 636646 - protein, 15 aa, Homo sapiens
  CDR3 for beta chain variable domain of TCR clone 318323 (TRBV27, TRBJ2-1)
CASSNGGGSSNEQFF

SEQ ID NO: 636647 - protein, 12 aa, Homo sapiens
  CDR3 for alpha chain variable domain of TCR clone 318324 (TRAV12-1, TRAJ40)
CVFYSGTYKYIF

SEQ ID NO: 636648 - protein, 18 aa, Homo sapiens
  CDR3 for beta chain variable domain of TCR clone 318324 (TRBV12-4, TRBJ2-2)
CASSWVAGTRGRTGELFF

SEQ ID NO: 636649 - protein, 14 aa, Homo sapiens
  CDR3 for alpha chain variable domain of TCR clone 318325 (TRAV3, TRAJ34)
CAVRHINNTDKLIF

SEQ ID NO: 636650 - protein, 14 aa, Homo sapiens
  CDR3 for beta chain variable domain of TCR clone 318325 (TRBV4-1, TRBJ2-2)
CASSQAVNTGELFF

SEQ ID NO: 636651 - protein, 17 aa, Homo sapiens
  CDR3 for alpha chain variable domain of TCR clone 318326 (TRAV4, TRAJ13)
CLVGVQGTSGGYQKVTF

SEQ ID NO: 636652 - protein, 18 aa, Homo sapiens
  CDR3 for beta chain variable domain of TCR clone 318326 (TRBV15, TRBJ2-3)
CATSRDGARSWDTDTQYF

SEQ ID NO: 636653 - protein, 13 aa, Homo sapiens
  CDR3 for alpha chain variable domain of TCR clone 318327 (TRAV8-6, TRAJ21)
CAVSPSSLNKFYF

SEQ ID NO: 636654 - protein, 14 aa, Homo sapiens
  CDR3 for beta chain variable domain of TCR clone 318327 (TRBV7-9, TRBJ2-5)
CASSLDTAQETRYF

SEQ ID NO: 636655 - protein, 14 aa, Homo sapiens
  CDR3 for alpha chain variable domain of TCR clone 318328 (TRAV16, TRAJ33)
CALSAMDSNYQLIW

SEQ ID NO: 636656 - protein, 12 aa, Homo sapiens
  CDR3 for beta chain variable domain of TCR clone 318328 (TRBV12-4, TRBJ2-3)
CASSTLPDTQYF

SEQ ID NO: 636657 - protein, 16 aa, Homo sapiens
  CDR3 for alpha chain variable domain of TCR clone 318329 (TRAV4, TRAJ22)
CLVGDLYSGSARRLTF

SEQ ID NO: 636658 - protein, 20 aa, Homo sapiens
  CDR3 for beta chain variable domain of TCR clone 318329 (TRBV7-8, TRBJ2-2)
CASSHLFPGPTIHITGELFF

SEQ ID NO: 636659 - protein, 10 aa, Homo sapiens
  CDR3 for alpha chain variable domain of TCR clone 318330 (TRAV1-2, TRAJ31)
CAFFDARLMF

SEQ ID NO: 636660 - protein, 16 aa, Homo sapiens
  CDR3 for beta chain variable domain of TCR clone 318330 (TRBV13, TRBJ2-2)
CASSLGRGYGTGELFF

SEQ ID NO: 636661 - protein, 13 aa, Homo sapiens
  CDR3 for alpha chain variable domain of TCR clone 318331 (TRAV8-3, TRAJ21)
WAVGAYDFNKFYF

SEQ ID NO: 636662 - protein, 16 aa, Homo sapiens
  CDR3 for beta chain variable domain of TCR clone 318331 (TRBV19, TRBJ2-1)
CASSMGGGSSYNEQFF

SEQ ID NO: 636663 - protein, 13 aa, Homo sapiens
  CDR3 for alpha chain variable domain of TCR clone 318332 (TRAV1-2, TRAJ9)
CAALDTGGFKTIF

SEQ ID NO: 636664 - protein, 13 aa, Homo sapiens
  CDR3 for beta chain variable domain of TCR clone 318332 (TRBV4-1, TRBJ2-1)
CASSQAGGDEQFF

SEQ ID NO: 636665 - protein, 12 aa, Homo sapiens
  CDR3 for alpha chain variable domain of TCR clone 318333 (TRAV17, TRAJ47)
CATDFDGNKLVF

SEQ ID NO: 636666 - protein, 16 aa, Homo sapiens
  CDR3 for beta chain variable domain of TCR clone 318333 (TRBV5-4, TRBJ2-3)
CASQQPGAGGADTQYF

SEQ ID NO: 636667 - protein, 15 aa, Homo sapiens
  CDR3 for alpha chain variable domain of TCR clone 318334 (TRAV12-2, TRAJ53)
CAVNGGGGSNYKLPF

SEQ ID NO: 636668 - protein, 14 aa, Homo sapiens
  CDR3 for beta chain variable domain of TCR clone 318334 (TRBV12-5, TRBJ2-5)
CASGSRTHQETQYF

SEQ ID NO: 636669 - protein, 13 aa, Homo sapiens
  CDR3 for alpha chain variable domain of TCR clone 318335 (TRAV8-6, TRAJ33)
CAVSEGSNYQLIW

SEQ ID NO: 636670 - protein, 14 aa, Homo sapiens
  CDR3 for beta chain variable domain of TCR clone 318335 (TRBV7-8, TRBJ2-5)
CASSATGGQETQYF

SEQ ID NO: 636671 - protein, 16 aa, Homo sapiens
  CDR3 for alpha chain variable domain of TCR clone 318336 (TRAV26-2, TRAJ52)
CIRGPAGGTSYGKLTF

SEQ ID NO: 636672 - protein, 15 aa, Homo sapiens
  CDR3 for beta chain variable domain of TCR clone 318336 (TRBV20-1, TRBJ1-1)
CSASRVVTGNTEAFF

SEQ ID NO: 636673 - protein, 13 aa, Homo sapiens
  CDR3 for alpha chain variable domain of TCR clone 318337 (TRAV1-2, TRAJ9)
CAVLKTGGFKTIF

SEQ ID NO: 636674 - protein, 13 aa, Homo sapiens
  CDR3 for beta chain variable domain of TCR clone 318337 (TRBV19, TRBJ2-7)
CASRKAGGSEQYF

SEQ ID NO: 636675 - protein, 15 aa, Homo sapiens
  CDR3 for alpha chain variable domain of TCR clone 318338 (TRAV13-1, TRAJ52)
SYYNAGGTSYGKLTF

SEQ ID NO: 636676 - protein, 14 aa, Homo sapiens
  CDR3 for beta chain variable domain of TCR clone 318338 (TRBV15, TRBJ2-3)
CATRSGTSTGTQYF

SEQ ID NO: 636677 - protein, 16 aa, Homo sapiens
  CDR3 for alpha chain variable domain of TCR clone 318339 (TRAV30, TRAJ24)
CGTEIVDADSWGKFQF

SEQ ID NO: 636678 - protein, 15 aa, Homo sapiens
  CDR3 for beta chain variable domain of TCR clone 318339 (TRBV11-2, TRBJ1-2)
CASSLEGVQRNGYSF

SEQ ID NO: 636679 - protein, 14 aa, Homo sapiens
  CDR3 for alpha chain variable domain of TCR clone 318340 (TRAV23/DV6, TRAJ13)
CAASETGGYQKVTF

SEQ ID NO: 636680 - protein, 16 aa, Homo sapiens
  CDR3 for beta chain variable domain of TCR clone 318340 (TRBV5-1, TRBJ1-3)
CASSPWDPSSGNTIYF

SEQ ID NO: 636681 - protein, 13 aa, Homo sapiens
  CDR3 for alpha chain variable domain of TCR clone 318341 (TRAV13-1, TRAJ39)
CAASIWAGDMLIF

SEQ ID NO: 636682 - protein, 15 aa, Homo sapiens
  CDR3 for beta chain variable domain of TCR clone 318341 (TRBV7-9, TRBJ1-1)
CASSLLEQGGTEAFF

SEQ ID NO: 636683 - protein, 16 aa, Homo sapiens
  CDR3 for alpha chain variable domain of TCR clone 318342 (TRAV23/DV6, TRAJ21)
CAASSGGGTTSTNFTL

SEQ ID NO: 636684 - protein, 11 aa, Homo sapiens
  CDR3 for beta chain variable domain of TCR clone 318342 (TRBV7-8, TRBJ2-7)
CASSLSLDQYF

SEQ ID NO: 636685 - protein, 15 aa, Homo sapiens
  CDR3 for alpha chain variable domain of TCR clone 318343 (TRAV26-2, TRAJ57)
CILRDIRGGSEKLGF

SEQ ID NO: 636686 - protein, 15 aa, Homo sapiens
  CDR3 for beta chain variable domain of TCR clone 318343 (TRBV2, TRBJ2-1)
CASDVGLAGEGEQFF

SEQ ID NO: 636687 - protein, 14 aa, Homo sapiens
  CDR3 for alpha chain variable domain of TCR clone 318344 (TRAV12-3, TRAJ10)
SHLPLTGGGNKLTF

SEQ ID NO: 636688 - protein, 15 aa, Homo sapiens
  CDR3 for beta chain variable domain of TCR clone 318344 (TRBV19, TRBJ2-1)
CASSSPGVPLDEKFF

SEQ ID NO: 636689 - protein, 13 aa, Homo sapiens
  CDR3 for alpha chain variable domain of TCR clone 318345 (TRAV13-1, TRAJ5)
CAASDTGRRALTF

SEQ ID NO: 636690 - protein, 14 aa, Homo sapiens
  CDR3 for beta chain variable domain of TCR clone 318345 (TRBV18, TRBJ2-5)
CASSPGVSQETQYF

SEQ ID NO: 636691 - protein, 13 aa, Homo sapiens
  CDR3 for alpha chain variable domain of TCR clone 318346 (TRAV2, TRAJ40)
CAVVTSGTYKYIF

SEQ ID NO: 636692 - protein, 14 aa, Homo sapiens
  CDR3 for beta chain variable domain of TCR clone 318346 (TRBV19, TRBJ2-1)
CASPTFVLSGEQCV

SEQ ID NO: 636693 - protein, 14 aa, Homo sapiens
  CDR3 for alpha chain variable domain of TCR clone 318347 (TRAV12-2, TRAJ24)
CAVTPADSWGKLQF

SEQ ID NO: 636694 - protein, 15 aa, Homo sapiens
  CDR3 for beta chain variable domain of TCR clone 318347 (TRBV12-4, TRBJ2-5)
CASSPPTGLQETQYF

SEQ ID NO: 636695 - protein, 19 aa, Homo sapiens
  CDR3 for alpha chain variable domain of TCR clone 318348 (TRAV26-1, TRAJ22)
CCVLLHRWVFSGFARQLTF

SEQ ID NO: 636696 - protein, 19 aa, Homo sapiens
  CDR3 for beta chain variable domain of TCR clone 318348 (TRBV19, TRBJ2-5)
CASSIGQVTDFFLGETQYF

SEQ ID NO: 636697 - protein, 18 aa, Homo sapiens
  CDR3 for alpha chain variable domain of TCR clone 318349 (TRAV26-1, TRAJ39)
CCVLLLVRGSRAGNMLTF

SEQ ID NO: 636698 - protein, 15 aa, Homo sapiens
  CDR3 for beta chain variable domain of TCR clone 318349 (TRBV7-9, TRBJ1-5)
CASSQGHQPNQPQHF

SEQ ID NO: 636699 - protein, 15 aa, Homo sapiens
  CDR3 for alpha chain variable domain of TCR clone 318350 (TRAV8-3, TRAJ27)
CAVGPSKTNAGKSTF

SEQ ID NO: 636700 - protein, 12 aa, Homo sapiens
  CDR3 for beta chain variable domain of TCR clone 318350 (TRBV5-5, TRBJ2-5)
CASSYFGETQYF

SEQ ID NO: 636701 - protein, 14 aa, Homo sapiens
  CDR3 for alpha chain variable domain of TCR clone 318351 (TRAV38-1, TRAJ30)
CAFMPMNRDDKIIF

SEQ ID NO: 636702 - protein, 15 aa, Homo sapiens
  CDR3 for beta chain variable domain of TCR clone 318351 (TRBV7-9, TRBJ2-7)
CASSLDRQGPYEQYF

SEQ ID NO: 636703 - protein, 15 aa, Homo sapiens
  CDR3 for alpha chain variable domain of TCR clone 318352 (TRAV12-3, TRAJ49)
CAIAFTPNTVNQFSF

SEQ ID NO: 636704 - protein, 14 aa, Homo sapiens
  CDR3 for beta chain variable domain of TCR clone 318352 (TRBV7-2, TRBJ2-7)
CASSPKTSFYEQYF

SEQ ID NO: 636705 - protein, 13 aa, Homo sapiens
  CDR3 for alpha chain variable domain of TCR clone 318353 (TRAV12-1, TRAJ40)
CVVPTSGTYKYIF

SEQ ID NO: 636706 - protein, 15 aa, Homo sapiens
  CDR3 for beta chain variable domain of TCR clone 318353 (TRBV11-3, TRBJ2-3)
CASLKDGREGDTQYF

SEQ ID NO: 636707 - protein, 15 aa, Homo sapiens
  CDR3 for alpha chain variable domain of TCR clone 318354 (TRAV3, TRAJ20)
CAVRDIKLSDYKLSF

SEQ ID NO: 636708 - protein, 15 aa, Homo sapiens
  CDR3 for beta chain variable domain of TCR clone 318354 (TRBV7-9, TRBJ1-4)
CASSRTGGFNEKLFF

SEQ ID NO: 636709 - protein, 15 aa, Homo sapiens
  CDR3 for alpha chain variable domain of TCR clone 318355 (TRAV14/DV4, TRAJ49)
CAMREGRDTGNQCYF

SEQ ID NO: 636710 - protein, 17 aa, Homo sapiens
  CDR3 for beta chain variable domain of TCR clone 318355 (TRBV12-4, TRBJ1-5)
CASSLRGDRGPNQPQHF

SEQ ID NO: 636711 - protein, 13 aa, Homo sapiens
  CDR3 for alpha chain variable domain of TCR clone 318356 (TRAV13-1, TRAJ5)
CAARVPGRRALTF

SEQ ID NO: 636712 - protein, 15 aa, Homo sapiens
  CDR3 for beta chain variable domain of TCR clone 318356 (TRBV7-9, TRBJ2-7)
CASSPGGGLTYEQYF

SEQ ID NO: 636713 - protein, 20 aa, Homo sapiens
  CDR3 for alpha chain variable domain of TCR clone 318357 (TRAV8-3, TRAJ44)
LSTSVLWVRLYTGTASKLTF

SEQ ID NO: 636714 - protein, 15 aa, Homo sapiens
  CDR3 for beta chain variable domain of TCR clone 318357 (TRBV29-1, TRBJ2-1)
CSVEAPRGSPNEQFF

SEQ ID NO: 636715 - protein, 14 aa, Homo sapiens
  CDR3 for alpha chain variable domain of TCR clone 318358 (TRAV12-3, TRAJ42)
CAMNYGGSQGNLIF

SEQ ID NO: 636716 - protein, 16 aa, Homo sapiens
  CDR3 for beta chain variable domain of TCR clone 318358 (TRBV6-5, TRBJ2-5)
CASSQREGPDRKTQYF

SEQ ID NO: 636717 - protein, 13 aa, Homo sapiens
  CDR3 for alpha chain variable domain of TCR clone 318359 (TRAV36/DV7, TRAJ53)
CALSGGSNYKLTF

SEQ ID NO: 636718 - protein, 13 aa, Homo sapiens
  CDR3 for beta chain variable domain of TCR clone 318359 (TRBV28, TRBJ2-7)
CASSLPSSYEQYF

SEQ ID NO: 636719 - protein, 11 aa, Homo sapiens
  CDR3 for alpha chain variable domain of TCR clone 318360 (TRAV21, TRAJ11)
CAVNGYSTLTF

SEQ ID NO: 636720 - protein, 16 aa, Homo sapiens
  CDR3 for beta chain variable domain of TCR clone 318360 (TRBV19, TRBJ2-1)
CASSKAGPGSYNEQFF

SEQ ID NO: 636721 - protein, 14 aa, Homo sapiens
  CDR3 for alpha chain variable domain of TCR clone 318361 (TRAV14/DV4, TRAJ32)
SNVLPLTPTNKLIF

SEQ ID NO: 636722 - protein, 17 aa, Homo sapiens
  CDR3 for beta chain variable domain of TCR clone 318361 (TRBV13, TRBJ2-3)
CASGLSRVAGGRNTQYF

SEQ ID NO: 636723 - protein, 12 aa, Homo sapiens
  CDR3 for alpha chain variable domain of TCR clone 318362 (TRAV12-1, TRAJ23)
CVVNWGGGKPIF

SEQ ID NO: 636724 - protein, 14 aa, Homo sapiens
  CDR3 for beta chain variable domain of TCR clone 318362 (TRBV27, TRBJ2-7)
CASSPQRGTYEQYF

SEQ ID NO: 636725 - protein, 13 aa, Homo sapiens
  CDR3 for alpha chain variable domain of TCR clone 318363 (TRAV30, TRAJ24)
CGTVTDSWGKLQF

SEQ ID NO: 636726 - protein, 13 aa, Homo sapiens
  CDR3 for beta chain variable domain of TCR clone 318363 (TRBV27, TRBJ2-7)
CASSLTTGYEQYF

SEQ ID NO: 636727 - protein, 12 aa, Homo sapiens
  CDR3 for alpha chain variable domain of TCR clone 318364 (TRAV21, TRAJ23)
CAVMLQGGKLIF

SEQ ID NO: 636728 - protein, 14 aa, Homo sapiens
  CDR3 for beta chain variable domain of TCR clone 318364 (TRBV7-9, TRBJ1-4)
YAITEGEANEKLFF

SEQ ID NO: 636729 - protein, 12 aa, Homo sapiens
  CDR3 for alpha chain variable domain of TCR clone 318365 (TRAV12-3, TRAJ17)
CAMTLTGNKLTF

SEQ ID NO: 636730 - protein, 15 aa, Homo sapiens
  CDR3 for beta chain variable domain of TCR clone 318365 (TRBV4-2, TRBJ1-1)
CASSQRSSGRTEAFF

SEQ ID NO: 636731 - protein, 12 aa, Homo sapiens
  CDR3 for alpha chain variable domain of TCR clone 318366 (TRAV12-3, TRAJ17)
RAMTLTGNKLTL

SEQ ID NO: 636732 - protein, 15 aa, Homo sapiens
  CDR3 for beta chain variable domain of TCR clone 318366 (TRBV20-1, TRBJ2-7)
CSARDRVSGMDEQYF

SEQ ID NO: 636733 - protein, 11 aa, Homo sapiens
  CDR3 for alpha chain variable domain of TCR clone 318367 (TRAV27, TRAJ45)
CAGAQEEVLTD

SEQ ID NO: 636734 - protein, 16 aa, Homo sapiens
  CDR3 for beta chain variable domain of TCR clone 318367 (TRBV9, TRBJ2-2)
CASSAMGKGNTGELFF

SEQ ID NO: 636735 - protein, 14 aa, Homo sapiens
  CDR3 for alpha chain variable domain of TCR clone 318368 (TRAV27, TRAJ42)
CAGAGGGSQGNLIF

SEQ ID NO: 636736 - protein, 15 aa, Homo sapiens
  CDR3 for beta chain variable domain of TCR clone 318368 (TRBV12-4, TRBJ1-2)
CASSVSKLQIYGYTF

SEQ ID NO: 636737 - protein, 15 aa, Homo sapiens
  CDR3 for alpha chain variable domain of TCR clone 318369 (TRAV26-1, TRAJ37)
CIVKTGSSNKGKLIF

SEQ ID NO: 636738 - protein, 14 aa, Homo sapiens
  CDR3 for beta chain variable domain of TCR clone 318369 (TRBV20-1, TRBJ1-1)
CSARATGVGTEAFF

SEQ ID NO: 636739 - protein, 14 aa, Homo sapiens
  CDR3 for alpha chain variable domain of TCR clone 318370 (TRAV1-2, TRAJ8)
CAVRGDTGFQKLVF

SEQ ID NO: 636740 - protein, 15 aa, Homo sapiens
  CDR3 for beta chain variable domain of TCR clone 318370 (TRBV7-9, TRBJ1-6)
CASSSPGRGNSPLHF

SEQ ID NO: 636741 - protein, 19 aa, Homo sapiens
  CDR3 for alpha chain variable domain of TCR clone 318371 (TRAV26-1, TRAJ28)
CIVRVAHAYSGAGSYQITF

SEQ ID NO: 636742 - protein, 15 aa, Homo sapiens
  CDR3 for beta chain variable domain of TCR clone 318371 (TRBV20-1, TRBJ1-1)
CSASRGVTGNTEAFF

SEQ ID NO: 636743 - protein, 16 aa, Homo sapiens
  CDR3 for alpha chain variable domain of TCR clone 318372 (TRAV16, TRAJ42)
CALSGLLGGSHGNLIF

SEQ ID NO: 636744 - protein, 15 aa, Homo sapiens
  CDR3 for beta chain variable domain of TCR clone 318372 (TRBV5-1, TRBJ2-1)
CASSPGGLAGNEQFF

SEQ ID NO: 636745 - protein, 14 aa, Homo sapiens
  CDR3 for alpha chain variable domain of TCR clone 318373 (TRAV12-2, TRAJ17)
CAVLFKAAGKKLTF

SEQ ID NO: 636746 - protein, 14 aa, Homo sapiens
  CDR3 for beta chain variable domain of TCR clone 318373 (TRBV25-1, TRBJ1-1)
CASTHLGGNTEAFF

SEQ ID NO: 636747 - protein, 16 aa, Homo sapiens
  CDR3 for alpha chain variable domain of TCR clone 318374 (TRAV17, TRAJ28)
CATASVSGSGSYQLTF

SEQ ID NO: 636748 - protein, 11 aa, Homo sapiens
  CDR3 for beta chain variable domain of TCR clone 318374 (TRBV7-9, TRBJ2-5)
CASSLGETQYF

SEQ ID NO: 636749 - protein, 15 aa, Homo sapiens
  CDR3 for alpha chain variable domain of TCR clone 318375 (TRAV21, TRAJ13)
CAVPRSFWWLPESYL

SEQ ID NO: 636750 - protein, 15 aa, Homo sapiens
  CDR3 for beta chain variable domain of TCR clone 318375 (TRBV7-9, TRBJ1-6)
CASSSPGRGNSPLHF

SEQ ID NO: 636751 - protein, 17 aa, Homo sapiens
  CDR3 for alpha chain variable domain of TCR clone 318376 (TRAV38-2/DV8, TRAJ23)
CALSRKLIFGQGTELSV

SEQ ID NO: 636752 - protein, 13 aa, Homo sapiens
  CDR3 for beta chain variable domain of TCR clone 318376 (TRBV7-3, TRBJ1-2)
CASSLKRGYGYTF

SEQ ID NO: 636753 - protein, 18 aa, Homo sapiens
  CDR3 for alpha chain variable domain of TCR clone 318377 (TRAV13-1, TRAJ52)
RAASKRSAGGTSYGKLTF

SEQ ID NO: 636754 - protein, 13 aa, Homo sapiens
  CDR3 for beta chain variable domain of TCR clone 318377 (TRBV12-4, TRBJ1-2)
CASSLRRGKGYTF

SEQ ID NO: 636755 - protein, 17 aa, Homo sapiens
  CDR3 for alpha chain variable domain of TCR clone 318378 (TRAV9-2, TRAJ45)
CALSGYYSGGGADGLTF

SEQ ID NO: 636756 - protein, 18 aa, Homo sapiens
  CDR3 for beta chain variable domain of TCR clone 318378 (TRBV11-2, TRBJ2-3)
CASSLGGASRGAPNTQYF

SEQ ID NO: 636757 - protein, 11 aa, Homo sapiens
  CDR3 for alpha chain variable domain of TCR clone 318379 (TRAV12-2, TRAJ6)
CAVEGSYLPTF

SEQ ID NO: 636758 - protein, 14 aa, Homo sapiens
  CDR3 for beta chain variable domain of TCR clone 318379 (TRBV10-3, TRBJ2-2)
CAISETLNTGELFF

SEQ ID NO: 636759 - protein, 11 aa, Homo sapiens
  CDR3 for alpha chain variable domain of TCR clone 318380 (TRAV3, TRAJ13)
CAVTSYQKVTF

SEQ ID NO: 636760 - protein, 15 aa, Homo sapiens
  CDR3 for beta chain variable domain of TCR clone 318380 (TRBV7-9, TRBJ2-7)
CASSSYGLAVYEQYF

SEQ ID NO: 636761 - protein, 17 aa, Homo sapiens
  CDR3 for alpha chain variable domain of TCR clone 318381 (TRAV27, TRAJ42)
CAERVIYYGGIQGNLIF

SEQ ID NO: 636762 - protein, 14 aa, Homo sapiens
  CDR3 for beta chain variable domain of TCR clone 318381 (TRBV20-1, TRBJ2-1)
CSAQIGGSANEQFF

SEQ ID NO: 636763 - protein, 13 aa, Homo sapiens
  CDR3 for alpha chain variable domain of TCR clone 318382 (TRAV3, TRAJ34)
CAVRDIGSDKLIF

SEQ ID NO: 636764 - protein, 15 aa, Homo sapiens
  CDR3 for beta chain variable domain of TCR clone 318382 (TRBV4-1, TRBJ1-4)
CASSDTGGTNEKLFF

SEQ ID NO: 636765 - protein, 15 aa, Homo sapiens
  CDR3 for alpha chain variable domain of TCR clone 318383 (TRAV2, TRAJ10)
CGGSTVTGGGNKLTF

SEQ ID NO: 636766 - protein, 16 aa, Homo sapiens
  CDR3 for beta chain variable domain of TCR clone 318383 (TRBV18, TRBJ1-5)
CASSPSTGNSNQPQHF

SEQ ID NO: 636767 - protein, 18 aa, Homo sapiens
  CDR3 for alpha chain variable domain of TCR clone 318384 (TRAV26-1, TRAJ52)
CIVRVEGAGGTSNGKLTF

SEQ ID NO: 636768 - protein, 13 aa, Homo sapiens
  CDR3 for beta chain variable domain of TCR clone 318384 (TRBV7-3, TRBJ1-2)
CASSLKRGYGDTF

SEQ ID NO: 636769 - protein, 15 aa, Homo sapiens
  CDR3 for alpha chain variable domain of TCR clone 318385 (TRAV3, TRAJ22)
CAVRDRGGSARQLTF

SEQ ID NO: 636770 - protein, 15 aa, Homo sapiens
  CDR3 for beta chain variable domain of TCR clone 318385 (TRBV12-4, TRBJ2-5)
CASSPPTGLLETQYF

SEQ ID NO: 636771 - protein, 17 aa, Homo sapiens
  CDR3 for alpha chain variable domain of TCR clone 318386 (TRAV23/DV6, TRAJ12)
CAAIDLGAMDSSYNLLF

SEQ ID NO: 636772 - protein, 12 aa, Homo sapiens
  CDR3 for beta chain variable domain of TCR clone 318386 (TRBV10-3, TRBJ2-2)
CAIRENTGELFF

SEQ ID NO: 636773 - protein, 14 aa, Homo sapiens
  CDR3 for alpha chain variable domain of TCR clone 318387 (TRAV13-1, TRAJ35)
CAASKGGFGNVLHV

SEQ ID NO: 636774 - protein, 15 aa, Homo sapiens
  CDR3 for beta chain variable domain of TCR clone 318387 (TRBV28, TRBJ2-1)
CASSGLADVDNEQFF

SEQ ID NO: 636775 - protein, 14 aa, Homo sapiens
  CDR3 for alpha chain variable domain of TCR clone 318388 (TRAV26-1, TRAJ38)
CIADNAGNNRKLIW

SEQ ID NO: 636776 - protein, 16 aa, Homo sapiens
  CDR3 for beta chain variable domain of TCR clone 318388 (TRBV6-1, TRBJ2-2)
CASSFGQGANTGELFF

SEQ ID NO: 636777 - protein, 15 aa, Homo sapiens
  CDR3 for alpha chain variable domain of TCR clone 318389 (TRAV17, TRAJ44)
CATERGTGTASKLTF

SEQ ID NO: 636778 - protein, 14 aa, Homo sapiens
  CDR3 for beta chain variable domain of TCR clone 318389 (TRBV7-2, TRBJ2-7)
CASRSQGAAYEQYF

SEQ ID NO: 636779 - protein, 13 aa, Homo sapiens
  CDR3 for alpha chain variable domain of TCR clone 318390 (TRAV30, TRAJ24)
CGTVTDSWGKLQF

SEQ ID NO: 636780 - protein, 19 aa, Homo sapiens
  CDR3 for beta chain variable domain of TCR clone 318390 (TRBV19, TRBJ2-5)
CASSIGQVTDFFLGETQYF

SEQ ID NO: 636781 - protein, 18 aa, Homo sapiens
  CDR3 for alpha chain variable domain of TCR clone 318391 (TRAV3, TRAJ17)
CAVRARRRGRSCRQQANF

SEQ ID NO: 636782 - protein, 17 aa, Homo sapiens
  CDR3 for beta chain variable domain of TCR clone 318391 (TRBV4-1, TRBJ2-7)
CASSRDPLGVRGGEQYF

SEQ ID NO: 636783 - protein, 12 aa, Homo sapiens
  CDR3 for alpha chain variable domain of TCR clone 318392 (TRAV16, TRAJ8)
CAPLGGFQKLVF

SEQ ID NO: 636784 - protein, 22 aa, Homo sapiens
  CDR3 for beta chain variable domain of TCR clone 318392 (TRBV11-2, TRBJ1-4)
CASSLDITRRGIPRKDNEKLFF

SEQ ID NO: 636785 - protein, 10 aa, Homo sapiens
  CDR3 for alpha chain variable domain of TCR clone 318393 (TRAV13-2, TRAJ49)
CADTGNQFYF

SEQ ID NO: 636786 - protein, 15 aa, Homo sapiens
  CDR3 for beta chain variable domain of TCR clone 318393 (TRBV12-4, TRBJ2-5)
CASSPPTGLQETQYF

SEQ ID NO: 636787 - protein, 17 aa, Homo sapiens
  CDR3 for alpha chain variable domain of TCR clone 318394 (TRAV1-2, TRAJ23)
CAVRPHSIYNQGGKLIF

SEQ ID NO: 636788 - protein, 17 aa, Homo sapiens
  CDR3 for beta chain variable domain of TCR clone 318394 (TRBV25-1, TRBJ1-4)
CASSGSGTGIKNCFLAV

SEQ ID NO: 636789 - protein, 22 aa, Homo sapiens
  CDR3 for alpha chain variable domain of TCR clone 318395 (TRAV10, TRAJ6)
CVVSTQEEATYLHLEEEPALLF

SEQ ID NO: 636790 - protein, 14 aa, Homo sapiens
  CDR3 for beta chain variable domain of TCR clone 318395 (TRBV5-1, TRBJ2-5)
CASSLAGKQETQYF

SEQ ID NO: 636791 - protein, 13 aa, Homo sapiens
  CDR3 for alpha chain variable domain of TCR clone 318396 (TRAV13-2, TRAJ42)
CAENGGSQGNLIF

SEQ ID NO: 636792 - protein, 16 aa, Homo sapiens
  CDR3 for beta chain variable domain of TCR clone 318396 (TRBV19, TRBJ2-2)
CASRSPGTGATGELFF

SEQ ID NO: 636793 - protein, 14 aa, Homo sapiens
  CDR3 for alpha chain variable domain of TCR clone 318397 (TRAV21, TRAJ35)
CAVMPIGFGNVLHC

SEQ ID NO: 636794 - protein, 15 aa, Homo sapiens
  CDR3 for beta chain variable domain of TCR clone 318397 (TRBV7-9, TRBJ2-7)
CASSLALAEAYEQYF

SEQ ID NO: 636795 - protein, 14 aa, Homo sapiens
  CDR3 for alpha chain variable domain of TCR clone 318398 (TRAV13-1, TRAJ35)
CASSKGGIGNVLHC

SEQ ID NO: 636796 - protein, 13 aa, Homo sapiens
  CDR3 for beta chain variable domain of TCR clone 318398 (TRBV7-3, TRBJ1-1)
CASSQDWGAEAFF

SEQ ID NO: 636797 - protein, 16 aa, Homo sapiens
  CDR3 for alpha chain variable domain of TCR clone 318399 (TRAV30, TRAJ24)
CGTEIVDADSWGKFQF

SEQ ID NO: 636798 - protein, 15 aa, Homo sapiens
  CDR3 for beta chain variable domain of TCR clone 318399 (TRBV15, TRBJ2-1)
CATSRVGGKYNEQFF

SEQ ID NO: 636799 - protein, 12 aa, Homo sapiens
  CDR3 for alpha chain variable domain of TCR clone 318400 (TRAV29/DV5, TRAJ41)
CAAISSGYALNF

SEQ ID NO: 636800 - protein, 17 aa, Homo sapiens
  CDR3 for beta chain variable domain of TCR clone 318400 (TRBV18, TRBJ2-1)
CASSKGLSGGATMSSSS

SEQ ID NO: 636801 - protein, 12 aa, Homo sapiens
  CDR3 for alpha chain variable domain of TCR clone 318401 (TRAV13-1, TRAJ53)
AASGGSNYKLTF

SEQ ID NO: 636802 - protein, 12 aa, Homo sapiens
  CDR3 for beta chain variable domain of TCR clone 318401 (TRBV18, TRBJ1-4)
CASSPSRERLFF

SEQ ID NO: 636803 - protein, 12 aa, Homo sapiens
  CDR3 for alpha chain variable domain of TCR clone 318402 (TRAV8-3, TRAJ26)
CAGDNYGQNFVF

SEQ ID NO: 636804 - protein, 14 aa, Homo sapiens
  CDR3 for beta chain variable domain of TCR clone 318402 (TRBV6-1, TRBJ2-7)
CASTWTGDYYEQYF

SEQ ID NO: 636805 - protein, 17 aa, Homo sapiens
  CDR3 for alpha chain variable domain of TCR clone 318403 (TRAV3, TRAJ6)
CAVRDGPRAGRSYIPTF

SEQ ID NO: 636806 - protein, 15 aa, Homo sapiens
  CDR3 for beta chain variable domain of TCR clone 318403 (TRBV11-3, TRBJ2-7)
CASSPGPASSYEQYF

SEQ ID NO: 636807 - protein, 15 aa, Homo sapiens
  CDR3 for alpha chain variable domain of TCR clone 318404 (TRAV25, TRAJ23)
CALAPNYNQGGKLTF

SEQ ID NO: 636808 - protein, 13 aa, Homo sapiens
  CDR3 for beta chain variable domain of TCR clone 318404 (TRBV11-3, TRBJ1-1)
CASSWDGNTEAFF

SEQ ID NO: 636809 - protein, 14 aa, Homo sapiens
  CDR3 for alpha chain variable domain of TCR clone 318405 (TRAV14/DV4, TRAJ26)
CAMREVTYGQNFVF

SEQ ID NO: 636810 - protein, 16 aa, Homo sapiens
  CDR3 for beta chain variable domain of TCR clone 318405 (TRBV9, TRBJ1-2)
CASSVEEKVSPYGYTF

SEQ ID NO: 636811 - protein, 17 aa, Homo sapiens
  CDR3 for alpha chain variable domain of TCR clone 318406 (TRAV21, TRAJ24)
CAGIRLRSTDSWGKLQF

SEQ ID NO: 636812 - protein, 15 aa, Homo sapiens
  CDR3 for beta chain variable domain of TCR clone 318406 (TRBV7-8, TRBJ2-3)
CASSPRGLSTDTQYF

SEQ ID NO: 636813 - protein, 16 aa, Homo sapiens
  CDR3 for alpha chain variable domain of TCR clone 318407 (TRAV30, TRAJ24)
CGTEIVDADSWGKFQF

SEQ ID NO: 636814 - protein, 14 aa, Homo sapiens
  CDR3 for beta chain variable domain of TCR clone 318407 (TRBV19, TRBJ2-7)
CASNFRETFTGMYF

SEQ ID NO: 636815 - protein, 17 aa, Homo sapiens
  CDR3 for alpha chain variable domain of TCR clone 318408 (TRAV13-1, TRAJ31)
CAPRDRFMFGDGAQLVV

SEQ ID NO: 636816 - protein, 12 aa, Homo sapiens
  CDR3 for beta chain variable domain of TCR clone 318408 (TRBV7-9, TRBJ2-7)
CASSLEGYEQYF

SEQ ID NO: 636817 - protein, 14 aa, Homo sapiens
  CDR3 for alpha chain variable domain of TCR clone 318409 (TRAV26-1, TRAJ38)
CIADNAGNNRKLIW

SEQ ID NO: 636818 - protein, 11 aa, Homo sapiens
  CDR3 for beta chain variable domain of TCR clone 318409 (TRBV13, TRBJ2-3)
CASGNADTQYF

SEQ ID NO: 636819 - protein, 18 aa, Homo sapiens
  CDR3 for alpha chain variable domain of TCR clone 318410 (TRAV21, TRAJ52)
CAVRPSPAGGTSYGKLTF

SEQ ID NO: 636820 - protein, 17 aa, Homo sapiens
  CDR3 for beta chain variable domain of TCR clone 318410 (TRBV13, TRBJ2-3)
CSSSLSRVAGGRNTQYV

SEQ ID NO: 636821 - protein, 15 aa, Homo sapiens
  CDR3 for alpha chain variable domain of TCR clone 318411 (TRAV8-3, TRAJ45)
CASSYSGGAADGLTF

SEQ ID NO: 636822 - protein, 17 aa, Homo sapiens
  CDR3 for beta chain variable domain of TCR clone 318411 (TRBV7-8, TRBJ1-2)
CASSLRPLQGHLYGYTF

SEQ ID NO: 636823 - protein, 13 aa, Homo sapiens
  CDR3 for alpha chain variable domain of TCR clone 318412 (TRAV23/DV6, TRAJ22)
CAPYSGSARQLTF

SEQ ID NO: 636824 - protein, 15 aa, Homo sapiens
  CDR3 for beta chain variable domain of TCR clone 318412 (TRBV11-2, TRBJ1-6)
CASILDPWAVSPLHF

SEQ ID NO: 636825 - protein, 14 aa, Homo sapiens
  CDR3 for alpha chain variable domain of TCR clone 318413 (TRAV8-4, TRAJ5)
SAVSTDPGRRALTF

SEQ ID NO: 636826 - protein, 14 aa, Homo sapiens
  CDR3 for beta chain variable domain of TCR clone 318413 (TRBV5-1, TRBJ2-2)
CASSLGGGSGELFF

SEQ ID NO: 636827 - protein, 15 aa, Homo sapiens
  CDR3 for alpha chain variable domain of TCR clone 318414 (TRAV23/DV6, TRAJ15)
CAALPAGRNCSDLLE

SEQ ID NO: 636828 - protein, 14 aa, Homo sapiens
  CDR3 for beta chain variable domain of TCR clone 318414 (TRBV7-9, TRBJ1-2)
CASSRQGANYGCTF

SEQ ID NO: 636829 - protein, 14 aa, Homo sapiens
  CDR3 for alpha chain variable domain of TCR clone 318415 (TRAV20, TRAJ42)
CAVQAGGSQGNRTF

SEQ ID NO: 636830 - protein, 14 aa, Homo sapiens
  CDR3 for beta chain variable domain of TCR clone 318415 (TRBV28, TRBJ1-2)
CASRIQGANYGYTF

SEQ ID NO: 636831 - protein, 17 aa, Homo sapiens
  CDR3 for alpha chain variable domain of TCR clone 318416 (TRAV8-6, TRAJ58)
CAVSSWVGETSGSRLTF

SEQ ID NO: 636832 - protein, 13 aa, Homo sapiens
  CDR3 for beta chain variable domain of TCR clone 318416 (TRBV20-1, TRBJ1-1)
CSARGGGNTEAFF

SEQ ID NO: 636833 - protein, 10 aa, Homo sapiens
  CDR3 for alpha chain variable domain of TCR clone 318417 (TRAV8-3, TRAJ43)
CAVALADMRV

SEQ ID NO: 636834 - protein, 14 aa, Homo sapiens
  CDR3 for beta chain variable domain of TCR clone 318417 (TRBV4-2, TRBJ2-1)
CASGLDRAYNEQFF

SEQ ID NO: 636835 - protein, 17 aa, Homo sapiens
  CDR3 for alpha chain variable domain of TCR clone 318418 (TRAV3, TRAJ6)
CAVRDGPRAGGSDIPTF

SEQ ID NO: 636836 - protein, 15 aa, Homo sapiens
  CDR3 for beta chain variable domain of TCR clone 318418 (TRBV7-9, TRBJ1-6)
CASSSPGRGNSPLHF

SEQ ID NO: 636837 - protein, 15 aa, Homo sapiens
  CDR3 for alpha chain variable domain of TCR clone 318419 (TRAV3, TRAJ45)
CAVRTPWGGADGLTF

SEQ ID NO: 636838 - protein, 15 aa, Homo sapiens
  CDR3 for beta chain variable domain of TCR clone 318419 (TRBV2, TRBJ2-1)
CASSEEREGDNEQFF

SEQ ID NO: 636839 - protein, 14 aa, Homo sapiens
  CDR3 for alpha chain variable domain of TCR clone 318420 (TRAV2, TRAJ37)
CAVDFTSSTGTLIF

SEQ ID NO: 636840 - protein, 13 aa, Homo sapiens
  CDR3 for beta chain variable domain of TCR clone 318420 (TRBV20-1, TRBJ1-1)
CSAPLGGGTEAFF

SEQ ID NO: 636841 - protein, 11 aa, Homo sapiens
  CDR3 for alpha chain variable domain of TCR clone 318421 (TRAV12-1, TRAJ21)
CVVYNFNKFYF

SEQ ID NO: 636842 - protein, 14 aa, Homo sapiens
  CDR3 for beta chain variable domain of TCR clone 318421 (TRBV19, TRBJ2-7)
WASSMGQGAIEQYF

SEQ ID NO: 636843 - protein, 14 aa, Homo sapiens
  CDR3 for alpha chain variable domain of TCR clone 318422 (TRAV9-2, TRAJ39)
CALYIYNAGNMPTF

SEQ ID NO: 636844 - protein, 15 aa, Homo sapiens
  CDR3 for beta chain variable domain of TCR clone 318422 (TRBV20-1, TRBJ1-5)
CSAKPPGQGPQPQHF

SEQ ID NO: 636845 - protein, 13 aa, Homo sapiens
  CDR3 for alpha chain variable domain of TCR clone 318423 (TRAV8-3, TRAJ43)
CAVGPDNNNDMRF

SEQ ID NO: 636846 - protein, 15 aa, Homo sapiens
  CDR3 for beta chain variable domain of TCR clone 318423 (TRBV7-3, TRBJ2-1)
CASSQRGGALIEQFF

SEQ ID NO: 636847 - protein, 14 aa, Homo sapiens
  CDR3 for alpha chain variable domain of TCR clone 318424 (TRAV12-3, TRAJ58)
CAMSTETSGSRLTF

SEQ ID NO: 636848 - protein, 15 aa, Homo sapiens
  CDR3 for beta chain variable domain of TCR clone 318424 (TRBV6-3, TRBJ2-7)
CASSSPGTVFYEQYF

SEQ ID NO: 636849 - protein, 18 aa, Homo sapiens
  CDR3 for alpha chain variable domain of TCR clone 318425 (TRAV13-1, TRAJ52)
CAASKRSAGGTCYGKRTF

SEQ ID NO: 636850 - protein, 14 aa, Homo sapiens
  CDR3 for beta chain variable domain of TCR clone 318425 (TRBV7-2, TRBJ2-7)
CASSPKTSFYEQYF

SEQ ID NO: 636851 - protein, 12 aa, Homo sapiens
  CDR3 for alpha chain variable domain of TCR clone 318426 (TRAV1-1, TRAJ39)
CAVPVVGNMLTF

SEQ ID NO: 636852 - protein, 13 aa, Homo sapiens
  CDR3 for beta chain variable domain of TCR clone 318426 (TRBV4-2, TRBJ1-1)
CASSQAGNTEAFF

SEQ ID NO: 636853 - protein, 12 aa, Homo sapiens
  CDR3 for alpha chain variable domain of TCR clone 318427 (TRAV13-2, TRAJ23)
CAERHRGGKLTF

SEQ ID NO: 636854 - protein, 15 aa, Homo sapiens
  CDR3 for beta chain variable domain of TCR clone 318427 (TRBV9, TRBJ1-6)
CASSVAGTGDSPLHF

SEQ ID NO: 636855 - protein, 14 aa, Homo sapiens
  CDR3 for alpha chain variable domain of TCR clone 318428 (TRAV1-1, TRAJ23)
CAVPVYNQGGKLIF

SEQ ID NO: 636856 - protein, 14 aa, Homo sapiens
  CDR3 for beta chain variable domain of TCR clone 318428 (TRBV4-1, TRBJ2-2)
CASSQAVNTGELFF

SEQ ID NO: 636857 - protein, 12 aa, Homo sapiens
  CDR3 for alpha chain variable domain of TCR clone 318429 (TRAV12-2, TRAJ10)
WGVTGGGNKLTF

SEQ ID NO: 636858 - protein, 13 aa, Homo sapiens
  CDR3 for beta chain variable domain of TCR clone 318429 (TRBV11-2, TRBJ2-1)
CASSLDLVNEQFF

SEQ ID NO: 636859 - protein, 14 aa, Homo sapiens
  CDR3 for alpha chain variable domain of TCR clone 318430 (TRAV26-1, TRAJ38)
CIADNAGNNRKLTL

SEQ ID NO: 636860 - protein, 13 aa, Homo sapiens
  CDR3 for beta chain variable domain of TCR clone 318430 (TRBV20-1, TRBJ1-1)
CSARGGGNTEAFF

SEQ ID NO: 636861 - protein, 14 aa, Homo sapiens
  CDR3 for alpha chain variable domain of TCR clone 318431 (TRAV1-2, TRAJ16)
CAVNRFSDGQKLLF

SEQ ID NO: 636862 - protein, 17 aa, Homo sapiens
  CDR3 for beta chain variable domain of TCR clone 318431 (TRBV4-3, TRBJ1-5)
CASSQWGDGGPNQPQHF

SEQ ID NO: 636863 - protein, 15 aa, Homo sapiens
  CDR3 for alpha chain variable domain of TCR clone 318432 (TRAV13-1, TRAJ57)
QVPPLSQGGAEKLVF

SEQ ID NO: 636864 - protein, 17 aa, Homo sapiens
  CDR3 for beta chain variable domain of TCR clone 318432 (TRBV7-3, TRBJ2-3)
CASSLMKRMRGADTQYF

SEQ ID NO: 636865 - protein, 14 aa, Homo sapiens
  CDR3 for alpha chain variable domain of TCR clone 318433 (TRAV26-1, TRAJ38)
CIADNAGNNRKLMW

SEQ ID NO: 636866 - protein, 13 aa, Homo sapiens
  CDR3 for beta chain variable domain of TCR clone 318433 (TRBV20-1, TRBJ1-1)
CSAPPGGHTEAFF

SEQ ID NO: 636867 - protein, 13 aa, Homo sapiens
  CDR3 for alpha chain variable domain of TCR clone 318434 (TRAV12-3, TRAJ40)
CAMSHSGTYKYIF

SEQ ID NO: 636868 - protein, 14 aa, Homo sapiens
  CDR3 for beta chain variable domain of TCR clone 318434 (TRBV7-2, TRBJ1-5)
CASSTQGAGQPQHF

SEQ ID NO: 636869 - protein, 11 aa, Homo sapiens
  CDR3 for alpha chain variable domain of TCR clone 318435 (TRAV3, TRAJ17)
PRGAAGNKLTF

SEQ ID NO: 636870 - protein, 14 aa, Homo sapiens
  CDR3 for beta chain variable domain of TCR clone 318435 (TRBV7-8, TRBJ1-2)
CASSPDSLSYGYTF

SEQ ID NO: 636871 - protein, 18 aa, Homo sapiens
  CDR3 for alpha chain variable domain of TCR clone 318436 (TRAV26-1, TRAJ22)
CIVRVALISSGSARQLTF

SEQ ID NO: 636872 - protein, 18 aa, Homo sapiens
  CDR3 for beta chain variable domain of TCR clone 318436 (TRBV4-1, TRBJ1-5)
CASSQDPRGQGLNQPQHF

SEQ ID NO: 636873 - protein, 11 aa, Homo sapiens
  CDR3 for alpha chain variable domain of TCR clone 318437 (TRAV17, TRAJ36)
CAPAGANNLFF

SEQ ID NO: 636874 - protein, 12 aa, Homo sapiens
  CDR3 for beta chain variable domain of TCR clone 318437 (TRBV29-1, TRBJ2-3)
CSVTGGADTQYF

SEQ ID NO: 636875 - protein, 14 aa, Homo sapiens
  CDR3 for alpha chain variable domain of TCR clone 318438 (TRAV1-2, TRAJ16)
CAVNRLSDGQKLLF

SEQ ID NO: 636876 - protein, 13 aa, Homo sapiens
  CDR3 for beta chain variable domain of TCR clone 318438 (TRBV2, TRBJ2-2)
CQQGNLRGGELFF

SEQ ID NO: 636877 - protein, 15 aa, Homo sapiens
  CDR3 for alpha chain variable domain of TCR clone 318439 (TRAV8-2, TRAJ15)
GGVTMGNQAGTALIF

SEQ ID NO: 636878 - protein, 12 aa, Homo sapiens
  CDR3 for beta chain variable domain of TCR clone 318439 (TRBV6-1, TRBJ2-7)
CASSDYSYEQYF

SEQ ID NO: 636879 - protein, 10 aa, Homo sapiens
  CDR3 for alpha chain variable domain of TCR clone 318440 (TRAV1-2, TRAJ31)
CVSEDARLMF

SEQ ID NO: 636880 - protein, 14 aa, Homo sapiens
  CDR3 for beta chain variable domain of TCR clone 318440 (TRBV7-6, TRBJ2-1)
CASSVAGEINEQFF

SEQ ID NO: 636881 - protein, 12 aa, Homo sapiens
  CDR3 for alpha chain variable domain of TCR clone 318441 (TRAV3, TRAJ43)
CAVRDPNNDMRF

SEQ ID NO: 636882 - protein, 15 aa, Homo sapiens
  CDR3 for beta chain variable domain of TCR clone 318441 (TRBV7-3, TRBJ2-2)
CASKANGANTGELFF

SEQ ID NO: 636883 - protein, 18 aa, Homo sapiens
  CDR3 for alpha chain variable domain of TCR clone 318442 (TRAV26-1, TRAJ23)
CIVRVGLEVWNQGGKRIF

SEQ ID NO: 636884 - protein, 15 aa, Homo sapiens
  CDR3 for beta chain variable domain of TCR clone 318442 (TRBV10-3, TRBJ2-3)
CAISDWDRDTDTQYF

SEQ ID NO: 636885 - protein, 14 aa, Homo sapiens
  CDR3 for alpha chain variable domain of TCR clone 318443 (TRAV20, TRAJ37)
CAVQSPSNTGKLIF

SEQ ID NO: 636886 - protein, 14 aa, Homo sapiens
  CDR3 for beta chain variable domain of TCR clone 318443 (TRBV7-3, TRBJ2-2)
CASSLNSNTGELFF

SEQ ID NO: 636887 - protein, 17 aa, Homo sapiens
  CDR3 for alpha chain variable domain of TCR clone 318444 (TRAV3, TRAJ6)
CAVRDGPRTGGSYIPTF

SEQ ID NO: 636888 - protein, 13 aa, Homo sapiens
  CDR3 for beta chain variable domain of TCR clone 318444 (TRBV19, TRBJ2-7)
CASSIGRTYEQYF

SEQ ID NO: 636889 - protein, 16 aa, Homo sapiens
  CDR3 for alpha chain variable domain of TCR clone 318445 (TRAV3, TRAJ21)
CAVRDIERGNFNKFYF

SEQ ID NO: 636890 - protein, 13 aa, Homo sapiens
  CDR3 for beta chain variable domain of TCR clone 318445 (TRBV4-2, TRBJ1-1)
CASSQAGNTDAFF

SEQ ID NO: 636891 - protein, 13 aa, Homo sapiens
  CDR3 for alpha chain variable domain of TCR clone 318446 (TRAV12-1, TRAJ9)
CVVNSPGGFKTIF

SEQ ID NO: 636892 - protein, 14 aa, Homo sapiens
  CDR3 for beta chain variable domain of TCR clone 318446 (TRBV7-6, TRBJ2-3)
CASSLGTVTDTQYF

SEQ ID NO: 636893 - protein, 14 aa, Homo sapiens
  CDR3 for alpha chain variable domain of TCR clone 318447 (TRAV16, TRAJ17)
CAPRIKAAGNKLTF

SEQ ID NO: 636894 - protein, 15 aa, Homo sapiens
  CDR3 for beta chain variable domain of TCR clone 318447 (TRBV7-2, TRBJ2-7)
CASSLSSGRTYEQYF

SEQ ID NO: 636895 - protein, 17 aa, Homo sapiens
  CDR3 for alpha chain variable domain of TCR clone 318448 (TRAV38-1, TRAJ45)
CAFMKHYMGGGADGLTF

SEQ ID NO: 636896 - protein, 15 aa, Homo sapiens
  CDR3 for beta chain variable domain of TCR clone 318448 (TRBV7-6, TRBJ2-5)
CASSKPTGPQETQYF

SEQ ID NO: 636897 - protein, 13 aa, Homo sapiens
  CDR3 for alpha chain variable domain of TCR clone 318449 (TRAV1-2, TRAJ9)
CAALNTGGFKTIF

SEQ ID NO: 636898 - protein, 16 aa, Homo sapiens
  CDR3 for beta chain variable domain of TCR clone 318449 (TRBV11-2, TRBJ2-1)
CASSPWLAGVYNEQFF

SEQ ID NO: 636899 - protein, 13 aa, Homo sapiens
  CDR3 for alpha chain variable domain of TCR clone 318450 (TRAV22, TRAJ29)
CAVGGSGNTPLVF

SEQ ID NO: 636900 - protein, 13 aa, Homo sapiens
  CDR3 for beta chain variable domain of TCR clone 318450 (TRBV4-2, TRBJ1-1)
CASSQAGNTEAFF

SEQ ID NO: 636901 - protein, 11 aa, Homo sapiens
  CDR3 for alpha chain variable domain of TCR clone 318451 (TRAV2, TRAJ13)
CASGGYQKVTF

SEQ ID NO: 636902 - protein, 12 aa, Homo sapiens
  CDR3 for beta chain variable domain of TCR clone 318451 (TRBV11-2, TRBJ2-2)
CASSLGSGELFF

SEQ ID NO: 636903 - protein, 16 aa, Homo sapiens
  CDR3 for alpha chain variable domain of TCR clone 318452 (TRAV27, TRAJ53)
CAAPAGSGGSNYKLTF

SEQ ID NO: 636904 - protein, 16 aa, Homo sapiens
  CDR3 for beta chain variable domain of TCR clone 318452 (TRBV7-3, TRBJ2-2)
CASSLKRGTLSGELFF

SEQ ID NO: 636905 - protein, 15 aa, Homo sapiens
  CDR3 for alpha chain variable domain of TCR clone 318453 (TRAV21, TRAJ53)
CATLNSGGSNYKLTF

SEQ ID NO: 636906 - protein, 16 aa, Homo sapiens
  CDR3 for beta chain variable domain of TCR clone 318453 (TRBV9, TRBJ2-1)
CTSSVGGGGNYNEQFF

SEQ ID NO: 636907 - protein, 15 aa, Homo sapiens
  CDR3 for alpha chain variable domain of TCR clone 318454 (TRAV12-1, TRAJ45)
CVVLSGGGGADGLTF

SEQ ID NO: 636908 - protein, 16 aa, Homo sapiens
  CDR3 for beta chain variable domain of TCR clone 318454 (TRBV6-5, TRBJ2-1)
CASSETLAGITMSSSS

SEQ ID NO: 636909 - protein, 13 aa, Homo sapiens
  CDR3 for alpha chain variable domain of TCR clone 318455 (TRAV12-3, TRAJ33)
CAMSVNSNYQLIW

SEQ ID NO: 636910 - protein, 15 aa, Homo sapiens
  CDR3 for beta chain variable domain of TCR clone 318455 (TRBV4-1, TRBJ2-7)
CASSQGRGGDLEQYF

SEQ ID NO: 636911 - protein, 14 aa, Homo sapiens
  CDR3 for alpha chain variable domain of TCR clone 318456 (TRAV20, TRAJ10)
CAVRVEGGGNKLTF

SEQ ID NO: 636912 - protein, 17 aa, Homo sapiens
  CDR3 for beta chain variable domain of TCR clone 318456 (TRBV13, TRBJ2-3)
CASSLSRVAGGRNTQYF

SEQ ID NO: 636913 - protein, 16 aa, Homo sapiens
  CDR3 for alpha chain variable domain of TCR clone 318457 (TRAV3, TRAJ37)
CAVRGNGSGNTGKLIF

SEQ ID NO: 636914 - protein, 13 aa, Homo sapiens
  CDR3 for beta chain variable domain of TCR clone 318457 (TRBV19, TRBJ1-2)
CASSVPGQDGYTF

SEQ ID NO: 636915 - protein, 16 aa, Homo sapiens
  CDR3 for alpha chain variable domain of TCR clone 318458 (TRAV17, TRAJ43)
CATVPPRFGAGTRLTV

SEQ ID NO: 636916 - protein, 15 aa, Homo sapiens
  CDR3 for beta chain variable domain of TCR clone 318458 (TRBV19, TRBJ1-2)
CASSVGQVLNYGYTF

SEQ ID NO: 636917 - protein, 12 aa, Homo sapiens
  CDR3 for alpha chain variable domain of TCR clone 318459 (TRAV17, TRAJ30)
FVPERRDDKIIF

SEQ ID NO: 636918 - protein, 14 aa, Homo sapiens
  CDR3 for beta chain variable domain of TCR clone 318459 (TRBV7-7, TRBJ2-2)
CASSRDRSTGELFF

SEQ ID NO: 636919 - protein, 13 aa, Homo sapiens
  CDR3 for alpha chain variable domain of TCR clone 318460 (TRAV21, TRAJ20)
CAVGLRVDYKLSF

SEQ ID NO: 636920 - protein, 12 aa, Homo sapiens
  CDR3 for beta chain variable domain of TCR clone 318460 (TRBV7-3, TRBJ2-5)
CQQLPGGETQYF

SEQ ID NO: 636921 - protein, 13 aa, Homo sapiens
  CDR3 for alpha chain variable domain of TCR clone 318461 (TRAV12-3, TRAJ33)
CAMSVNSNYQLIW

SEQ ID NO: 636922 - protein, 13 aa, Homo sapiens
  CDR3 for beta chain variable domain of TCR clone 318461 (TRBV20-1, TRBJ2-5)
CSARGDYQETQYF

SEQ ID NO: 636923 - protein, 14 aa, Homo sapiens
  CDR3 for alpha chain variable domain of TCR clone 318462 (TRAV30, TRAJ26)
CGTEIVSYGQNFVF

SEQ ID NO: 636924 - protein, 13 aa, Homo sapiens
  CDR3 for beta chain variable domain of TCR clone 318462 (TRBV10-3, TRBJ2-7)
CASKLAVNYEQYC

SEQ ID NO: 636925 - protein, 14 aa, Homo sapiens
  CDR3 for alpha chain variable domain of TCR clone 318463 (TRAV3, TRAJ9)
CAVRLNTGGFKTIF

SEQ ID NO: 636926 - protein, 12 aa, Homo sapiens
  CDR3 for beta chain variable domain of TCR clone 318463 (TRBV7-9, TRBJ1-4)
CASSTDREKLFF

SEQ ID NO: 636927 - protein, 16 aa, Homo sapiens
  CDR3 for alpha chain variable domain of TCR clone 318464 (TRAV30, TRAJ24)
GGTEIVDADSWGKFQF

SEQ ID NO: 636928 - protein, 12 aa, Homo sapiens
  CDR3 for beta chain variable domain of TCR clone 318464 (TRBV11-2, TRBJ2-2)
CASSLGGGELFF

SEQ ID NO: 636929 - protein, 12 aa, Homo sapiens
  CDR3 for alpha chain variable domain of TCR clone 318465 (TRAV3, TRAJ20)
CAVRDPDYKLSF

SEQ ID NO: 636930 - protein, 13 aa, Homo sapiens
  CDR3 for beta chain variable domain of TCR clone 318465 (TRBV19, TRBJ2-7)
CASRKAGGSEQYF

SEQ ID NO: 636931 - protein, 17 aa, Homo sapiens
  CDR3 for alpha chain variable domain of TCR clone 318466 (TRAV3, TRAJ42)
CAVRDRDYGGSQGNLIF

SEQ ID NO: 636932 - protein, 12 aa, Homo sapiens
  CDR3 for beta chain variable domain of TCR clone 318466 (TRBV19, TRBJ1-1)
CASTSGGGEAFF

SEQ ID NO: 636933 - protein, 23 aa, Homo sapiens
  CDR3 for alpha chain variable domain of TCR clone 318467 (TRAV26-1, TRAJ52)
CCVLLHRRAHRNAGGTSYGKLTF

SEQ ID NO: 636934 - protein, 15 aa, Homo sapiens
  CDR3 for beta chain variable domain of TCR clone 318467 (TRBV29-1, TRBJ2-1)
CSGRDRKSSYNEQFF

SEQ ID NO: 636935 - protein, 11 aa, Homo sapiens
  CDR3 for alpha chain variable domain of TCR clone 318468 (TRAV25, TRAJ5)
CRGGGRRALTF

SEQ ID NO: 636936 - protein, 17 aa, Homo sapiens
  CDR3 for beta chain variable domain of TCR clone 318468 (TRBV19, TRBJ2-4)
CASRGRGGEKTFSTSAP

SEQ ID NO: 636937 - protein, 14 aa, Homo sapiens
  CDR3 for alpha chain variable domain of TCR clone 318469 (TRAV1-2, TRAJ8)
CAVRADTGFQKLVF

SEQ ID NO: 636938 - protein, 16 aa, Homo sapiens
  CDR3 for beta chain variable domain of TCR clone 318469 (TRBV4-1, TRBJ1-4)
CASSQDLRRGGEKLFF

SEQ ID NO: 636939 - protein, 16 aa, Homo sapiens
  CDR3 for alpha chain variable domain of TCR clone 318470 (TRAV38-2/DV8, TRAJ45)
CAYTPTSGGGADGLTF

SEQ ID NO: 636940 - protein, 14 aa, Homo sapiens
  CDR3 for beta chain variable domain of TCR clone 318470 (TRBV7-9, TRBJ2-2)
CASSLGHRTGELFF

SEQ ID NO: 636941 - protein, 12 aa, Homo sapiens
  CDR3 for alpha chain variable domain of TCR clone 318471 (TRAV20, TRAJ39)
CAVGNAGNMLTF

SEQ ID NO: 636942 - protein, 15 aa, Homo sapiens
  CDR3 for beta chain variable domain of TCR clone 318471 (TRBV7-9, TRBJ2-7)
CASSLALAEAYEQYF

SEQ ID NO: 636943 - protein, 15 aa, Homo sapiens
  CDR3 for alpha chain variable domain of TCR clone 318472 (TRAV12-1, TRAJ52)
CVGNAGGTSYGKLTF

SEQ ID NO: 636944 - protein, 14 aa, Homo sapiens
  CDR3 for beta chain variable domain of TCR clone 318472 (TRBV7-3, TRBJ2-2)
CSSSPDPSGRELFF

SEQ ID NO: 636945 - protein, 15 aa, Homo sapiens
  CDR3 for alpha chain variable domain of TCR clone 318473 (TRAV27, TRAJ38)
CAARRNAGNNRKLIW

SEQ ID NO: 636946 - protein, 15 aa, Homo sapiens
  CDR3 for beta chain variable domain of TCR clone 318473 (TRBV2, TRBJ2-1)
CASSELAGSYNEQFF

SEQ ID NO: 636947 - protein, 14 aa, Homo sapiens
  CDR3 for alpha chain variable domain of TCR clone 318474 (TRAV2, TRAJ23)
CAVIIYNQGGKLIV

SEQ ID NO: 636948 - protein, 13 aa, Homo sapiens
  CDR3 for beta chain variable domain of TCR clone 318474 (TRBV20-1, TRBJ2-3)
CSATSGGAGTQYF

SEQ ID NO: 636949 - protein, 14 aa, Homo sapiens
  CDR3 for alpha chain variable domain of TCR clone 318475 (TRAV26-1, TRAJ30)
CIVRPRNRDDKIIF

SEQ ID NO: 636950 - protein, 14 aa, Homo sapiens
  CDR3 for beta chain variable domain of TCR clone 318475 (TRBV12-5, TRBJ2-5)
CASGSRTHQETQYF

SEQ ID NO: 636951 - protein, 17 aa, Homo sapiens
  CDR3 for alpha chain variable domain of TCR clone 318476 (TRAV3, TRAJ13)
CAVREVRRTGGYQKVTF

SEQ ID NO: 636952 - protein, 14 aa, Homo sapiens
  CDR3 for beta chain variable domain of TCR clone 318476 (TRBV12-5, TRBJ2-5)
CASGSRTHQETQYF

SEQ ID NO: 636953 - protein, 14 aa, Homo sapiens
  CDR3 for alpha chain variable domain of TCR clone 318477 (TRAV12-2, TRAJ40)
CAVKIPSGTYKYIF

SEQ ID NO: 636954 - protein, 15 aa, Homo sapiens
  CDR3 for beta chain variable domain of TCR clone 318477 (TRBV7-2, TRBJ2-1)
CASSLVAGRYNEQFF

SEQ ID NO: 636955 - protein, 15 aa, Homo sapiens
  CDR3 for alpha chain variable domain of TCR clone 318478 (TRAV4, TRAJ8)
CLVGEQHTGFQKLVF

SEQ ID NO: 636956 - protein, 15 aa, Homo sapiens
  CDR3 for beta chain variable domain of TCR clone 318478 (TRBV7-9, TRBJ2-5)
CASSNRDYLQENQYF

SEQ ID NO: 636957 - protein, 15 aa, Homo sapiens
  CDR3 for alpha chain variable domain of TCR clone 318479 (TRAV12-3, TRAJ6)
CAMSATNGGSYIPTF

SEQ ID NO: 636958 - protein, 16 aa, Homo sapiens
  CDR3 for beta chain variable domain of TCR clone 318479 (TRBV20-1, TRBJ1-2)
GSASMGQGVANYGYTF

SEQ ID NO: 636959 - protein, 12 aa, Homo sapiens
  CDR3 for alpha chain variable domain of TCR clone 318480 (TRAV2, TRAJ33)
CAVPDSNYQLIW

SEQ ID NO: 636960 - protein, 20 aa, Homo sapiens
  CDR3 for beta chain variable domain of TCR clone 318480 (TRBV19, TRBJ2-1)
CASSISRTVTSARLNNEQFF

SEQ ID NO: 636961 - protein, 14 aa, Homo sapiens
  CDR3 for alpha chain variable domain of TCR clone 318481 (TRAV12-2, TRAJ40)
CAVKIPSGTYKYIF

SEQ ID NO: 636962 - protein, 14 aa, Homo sapiens
  CDR3 for beta chain variable domain of TCR clone 318481 (TRBV2, TRBJ2-3)
CASRLAGLKDTQYF

SEQ ID NO: 636963 - protein, 14 aa, Homo sapiens
  CDR3 for alpha chain variable domain of TCR clone 318482 (TRAV8-1, TRAJ5)
CAVRTDTGRRALTF

SEQ ID NO: 636964 - protein, 16 aa, Homo sapiens
  CDR3 for beta chain variable domain of TCR clone 318482 (TRBV7-2, TRBJ1-3)
CASSSGRVLSGNTIYF

SEQ ID NO: 636965 - protein, 14 aa, Homo sapiens
  CDR3 for alpha chain variable domain of TCR clone 318483 (TRAV29/DV5, TRAJ34)
CAASASGNTDKLIF

SEQ ID NO: 636966 - protein, 18 aa, Homo sapiens
  CDR3 for beta chain variable domain of TCR clone 318483 (TRBV4-1, TRBJ1-5)
CASSQDPRGQGLNQPQHF

SEQ ID NO: 636967 - protein, 12 aa, Homo sapiens
  CDR3 for alpha chain variable domain of TCR clone 318484 (TRAV21, TRAJ34)
CAVRGNTDKLIF

SEQ ID NO: 636968 - protein, 13 aa, Homo sapiens
  CDR3 for beta chain variable domain of TCR clone 318484 (TRBV7-9, TRBJ2-1)
CASSWESYNEQFF

SEQ ID NO: 636969 - protein, 11 aa, Homo sapiens
  CDR3 for alpha chain variable domain of TCR clone 318485 (TRAV1-2, TRAJ20)
CAVANDYKLSF

SEQ ID NO: 636970 - protein, 15 aa, Homo sapiens
  CDR3 for beta chain variable domain of TCR clone 318485 (TRBV6-1, TRBJ1-5)
CASSELREGNQPQHF

SEQ ID NO: 636971 - protein, 13 aa, Homo sapiens
  CDR3 for alpha chain variable domain of TCR clone 318486 (TRAV8-3, TRAJ4)
WVFYSGGYNKLIF

SEQ ID NO: 636972 - protein, 16 aa, Homo sapiens
  CDR3 for beta chain variable domain of TCR clone 318486 (TRBV7-8, TRBJ2-3)
CDSSTEGQRETDTQYF

SEQ ID NO: 636973 - protein, 16 aa, Homo sapiens
  CDR3 for alpha chain variable domain of TCR clone 318487 (TRAV3, TRAJ37)
CAVRGKGSGNTGKLLF

SEQ ID NO: 636974 - protein, 13 aa, Homo sapiens
  CDR3 for beta chain variable domain of TCR clone 318487 (TRBV7-3, TRBJ1-1)
CASSQDWGAEAFF

SEQ ID NO: 636975 - protein, 15 aa, Homo sapiens
  CDR3 for alpha chain variable domain of TCR clone 318488 (TRAV26-1, TRAJ39)
CIVRDGSNAGTMLTF

SEQ ID NO: 636976 - protein, 16 aa, Homo sapiens
  CDR3 for beta chain variable domain of TCR clone 318488 (TRBV7-2, TRBJ1-3)
CASSRLEASSGNTIYF

SEQ ID NO: 636977 - protein, 14 aa, Homo sapiens
  CDR3 for alpha chain variable domain of TCR clone 318489 (TRAV1-2, TRAJ16)
CAVNRFSDGQKLLF

SEQ ID NO: 636978 - protein, 15 aa, Homo sapiens
  CDR3 for beta chain variable domain of TCR clone 318489 (TRBV29-1, TRBJ2-7)
CSVECFDRGSYEQYF

SEQ ID NO: 636979 - protein, 16 aa, Homo sapiens
  CDR3 for alpha chain variable domain of TCR clone 318490 (TRAV12-3, TRAJ53)
CAMSPGSGGSNYKLTF

SEQ ID NO: 636980 - protein, 17 aa, Homo sapiens
  CDR3 for beta chain variable domain of TCR clone 318490 (TRBV28, TRBJ2-5)
WASSTPEGDALQETQYF

SEQ ID NO: 636981 - protein, 12 aa, Homo sapiens
  CDR3 for alpha chain variable domain of TCR clone 318491 (TRAV12-3, TRAJ40)
CAMSSGTYKYIF

SEQ ID NO: 636982 - protein, 13 aa, Homo sapiens
  CDR3 for beta chain variable domain of TCR clone 318491 (TRBV7-3, TRBJ1-2)
CASSLKQNYGYTF

SEQ ID NO: 636983 - protein, 13 aa, Homo sapiens
  CDR3 for alpha chain variable domain of TCR clone 318492 (TRAV13-1, TRAJ53)
CAASKGSNYKLTF

SEQ ID NO: 636984 - protein, 15 aa, Homo sapiens
  CDR3 for beta chain variable domain of TCR clone 318492 (TRBV28, TRBJ2-1)
CASSIIAGGRSEQFF

SEQ ID NO: 636985 - protein, 16 aa, Homo sapiens
  CDR3 for alpha chain variable domain of TCR clone 318493 (TRAV8-1, TRAJ48)
CAVTLISNFGNDKLTF

SEQ ID NO: 636986 - protein, 12 aa, Homo sapiens
  CDR3 for beta chain variable domain of TCR clone 318493 (TRBV20-1, TRBJ1-2)
CSAPGFNYGYTF

SEQ ID NO: 636987 - protein, 13 aa, Homo sapiens
  CDR3 for alpha chain variable domain of TCR clone 318494 (TRAV8-3, TRAJ28)
CAVGAVGSYQLTL

SEQ ID NO: 636988 - protein, 16 aa, Homo sapiens
  CDR3 for beta chain variable domain of TCR clone 318494 (TRBV19, TRBJ2-1)
CASSKAGPSSYNEQFF

SEQ ID NO: 636989 - protein, 16 aa, Homo sapiens
  CDR3 for alpha chain variable domain of TCR clone 318495 (TRAV36/DV7, TRAJ30)
CAVETYGLDRDDKIIF

SEQ ID NO: 636990 - protein, 15 aa, Homo sapiens
  CDR3 for beta chain variable domain of TCR clone 318495 (TRBV7-3, TRBJ2-1)
CASSLDGNSYNEQFF

SEQ ID NO: 636991 - protein, 13 aa, Homo sapiens
  CDR3 for alpha chain variable domain of TCR clone 318496 (TRAV38-1, TRAJ42)
CARWGGSQGNLIF

SEQ ID NO: 636992 - protein, 15 aa, Homo sapiens
  CDR3 for beta chain variable domain of TCR clone 318496 (TRBV14, TRBJ1-2)
CASSPEKGGNYGYTF

SEQ ID NO: 636993 - protein, 16 aa, Homo sapiens
  CDR3 for alpha chain variable domain of TCR clone 318497 (TRAV3, TRAJ10)
CAVRVMRAGGGNKLTF

SEQ ID NO: 636994 - protein, 14 aa, Homo sapiens
  CDR3 for beta chain variable domain of TCR clone 318497 (TRBV19, TRBJ2-1)
CASPTFVLSGEQFF

SEQ ID NO: 636995 - protein, 13 aa, Homo sapiens
  CDR3 for alpha chain variable domain of TCR clone 318498 (TRAV3, TRAJ21)
CAVREPDFNKFYF

SEQ ID NO: 636996 - protein, 14 aa, Homo sapiens
  CDR3 for beta chain variable domain of TCR clone 318498 (TRBV2, TRBJ1-5)
CASSENRGGQPRHF

SEQ ID NO: 636997 - protein, 16 aa, Homo sapiens
  CDR3 for alpha chain variable domain of TCR clone 318499 (TRAV4, TRAJ22)
CLVGDLYSGFARQLTF

SEQ ID NO: 636998 - protein, 16 aa, Homo sapiens
  CDR3 for beta chain variable domain of TCR clone 318499 (TRBV7-9, TRBJ2-3)
CASSPWREVGTDTQYF

SEQ ID NO: 636999 - protein, 12 aa, Homo sapiens
  CDR3 for alpha chain variable domain of TCR clone 318500 (TRAV12-3, TRAJ4)
CATTGAGTRLAV

SEQ ID NO: 637000 - protein, 14 aa, Homo sapiens
  CDR3 for beta chain variable domain of TCR clone 318500 (TRBV10-3, TRBJ1-1)
CAISDTDRGVEAFF

SEQ ID NO: 637001 - protein, 14 aa, Homo sapiens
  CDR3 for alpha chain variable domain of TCR clone 318501 (TRAV12-3, TRAJ10)
SHLPLTGGGNKLTF

SEQ ID NO: 637002 - protein, 15 aa, Homo sapiens
  CDR3 for beta chain variable domain of TCR clone 318501 (TRBV12-4, TRBJ2-1)
CASSLQAGAADEQFF

SEQ ID NO: 637003 - protein, 14 aa, Homo sapiens
  CDR3 for alpha chain variable domain of TCR clone 318502 (TRAV1-2, TRAJ17)
CALRRGAAGNKLTF

SEQ ID NO: 637004 - protein, 12 aa, Homo sapiens
  CDR3 for beta chain variable domain of TCR clone 318502 (TRBV12-4, TRBJ2-1)
CASSLVRVEQFF

SEQ ID NO: 637005 - protein, 13 aa, Homo sapiens
  CDR3 for alpha chain variable domain of TCR clone 318503 (TRAV21, TRAJ27)
CAARPGNAGKSTF

SEQ ID NO: 637006 - protein, 13 aa, Homo sapiens
  CDR3 for beta chain variable domain of TCR clone 318503 (TRBV12-5, TRBJ2-3)
CASGDRQSDMQYF

SEQ ID NO: 637007 - protein, 12 aa, Homo sapiens
  CDR3 for alpha chain variable domain of TCR clone 318504 (TRAV12-3, TRAJ17)
CAMTLTGNKLTF

SEQ ID NO: 637008 - protein, 12 aa, Homo sapiens
  CDR3 for beta chain variable domain of TCR clone 318504 (TRBV18, TRBJ2-4)
CASSPEGNIQYF

SEQ ID NO: 637009 - protein, 15 aa, Homo sapiens
  CDR3 for alpha chain variable domain of TCR clone 318505 (TRAV4, TRAJ36)
CLVGDRQTGANNLFF

SEQ ID NO: 637010 - protein, 17 aa, Homo sapiens
  CDR3 for beta chain variable domain of TCR clone 318505 (TRBV3-1, TRBJ2-5)
CASSNWGGTSGQETQYF

SEQ ID NO: 637011 - protein, 11 aa, Homo sapiens
  CDR3 for alpha chain variable domain of TCR clone 318506 (TRAV12-1, TRAJ34)
CVVNKGRELIF

SEQ ID NO: 637012 - protein, 13 aa, Homo sapiens
  CDR3 for beta chain variable domain of TCR clone 318506 (TRBV6-1, TRBJ1-1)
CASSRQGNTEAFS

SEQ ID NO: 637013 - protein, 15 aa, Homo sapiens
  CDR3 for alpha chain variable domain of TCR clone 318507 (TRAV17, TRAJ22)
CATAPISGSARHLTF

SEQ ID NO: 637014 - protein, 14 aa, Homo sapiens
  CDR3 for beta chain variable domain of TCR clone 318507 (TRBV9, TRBJ2-1)
CASSVDRRGKEQFF

SEQ ID NO: 637015 - protein, 15 aa, Homo sapiens
  CDR3 for alpha chain variable domain of TCR clone 318508 (TRAV4, TRAJ39)
CLVGPNNNAGNMLTL

SEQ ID NO: 637016 - protein, 13 aa, Homo sapiens
  CDR3 for beta chain variable domain of TCR clone 318508 (TRBV11-2, TRBJ2-5)
CVSSSTGEETQYF

SEQ ID NO: 637017 - protein, 14 aa, Homo sapiens
  CDR3 for alpha chain variable domain of TCR clone 318509 (TRAV12-2, TRAJ40)
CAVKIPSGTYKYIF

SEQ ID NO: 637018 - protein, 13 aa, Homo sapiens
  CDR3 for beta chain variable domain of TCR clone 318509 (TRBV7-9, TRBJ1-2)
CASSLTQNYGYTF

SEQ ID NO: 637019 - protein, 12 aa, Homo sapiens
  CDR3 for alpha chain variable domain of TCR clone 318510 (TRAV12-3, TRAJ41)
CAMSYSGYALNF

SEQ ID NO: 637020 - protein, 13 aa, Homo sapiens
  CDR3 for beta chain variable domain of TCR clone 318510 (TRBV7-3, TRBJ2-1)
CASSLDSYNEQYF

SEQ ID NO: 637021 - protein, 11 aa, Homo sapiens
  CDR3 for alpha chain variable domain of TCR clone 318511 (TRAV1-2, TRAJ40)
CAVPGTYKYIF

SEQ ID NO: 637022 - protein, 14 aa, Homo sapiens
  CDR3 for beta chain variable domain of TCR clone 318511 (TRBV5-1, TRBJ2-5)
CASSLAGKQETQYF

SEQ ID NO: 637023 - protein, 18 aa, Homo sapiens
  CDR3 for alpha chain variable domain of TCR clone 318512 (TRAV13-1, TRAJ52)
CAAKNPNAGGTSYGKLTF

SEQ ID NO: 637024 - protein, 15 aa, Homo sapiens
  CDR3 for beta chain variable domain of TCR clone 318512 (TRBV7-3, TRBJ2-7)
CASSLTGQGKYEQYF

SEQ ID NO: 637025 - protein, 14 aa, Homo sapiens
  CDR3 for alpha chain variable domain of TCR clone 318513 (TRAV8-3, TRAJ27)
CAGGRNTNAGKSTF

SEQ ID NO: 637026 - protein, 12 aa, Homo sapiens
  CDR3 for beta chain variable domain of TCR clone 318513 (TRBV11-2, TRBJ2-2)
CASSLGGGELFF

SEQ ID NO: 637027 - protein, 11 aa, Homo sapiens
  CDR3 for alpha chain variable domain of TCR clone 318514 (TRAV17, TRAJ9)
CGFTGGFKTIF

SEQ ID NO: 637028 - protein, 15 aa, Homo sapiens
  CDR3 for beta chain variable domain of TCR clone 318514 (TRBV6-1, TRBJ2-3)
CASSERGGITDTQYF

SEQ ID NO: 637029 - protein, 13 aa, Homo sapiens
  CDR3 for alpha chain variable domain of TCR clone 318515 (TRAV21, TRAJ57)
CAVTQGGSEKLVF

SEQ ID NO: 637030 - protein, 13 aa, Homo sapiens
  CDR3 for beta chain variable domain of TCR clone 318515 (TRBV27, TRBJ2-7)
CASSLTTGYEQYF

SEQ ID NO: 637031 - protein, 13 aa, Homo sapiens
  CDR3 for alpha chain variable domain of TCR clone 318516 (TRAV8-3, TRAJ43)
CAVGTDNNNDMRF

SEQ ID NO: 637032 - protein, 14 aa, Homo sapiens
  CDR3 for beta chain variable domain of TCR clone 318516 (TRBV19, TRBJ2-1)
CASPTFVLSGEQFF

SEQ ID NO: 637033 - protein, 11 aa, Homo sapiens
  CDR3 for alpha chain variable domain of TCR clone 318517 (TRAV27, TRAJ20)
CAGLNDYKLSF

SEQ ID NO: 637034 - protein, 14 aa, Homo sapiens
  CDR3 for beta chain variable domain of TCR clone 318517 (TRBV12-5, TRBJ2-5)
CASGSRTHQETQYF

SEQ ID NO: 637035 - protein, 16 aa, Homo sapiens
  CDR3 for alpha chain variable domain of TCR clone 318518 (TRAV27, TRAJ52)
CAGAGAGGTSYGKLTF

SEQ ID NO: 637036 - protein, 17 aa, Homo sapiens
  CDR3 for beta chain variable domain of TCR clone 318518 (TRBV24-1, TRBJ2-3)
CATSDLPSWEDTDTQYF

SEQ ID NO: 637037 - protein, 12 aa, Homo sapiens
  CDR3 for alpha chain variable domain of TCR clone 318519 (TRAV12-2, TRAJ42)
CAVGGSQGNLIF

SEQ ID NO: 637038 - protein, 13 aa, Homo sapiens
  CDR3 for beta chain variable domain of TCR clone 318519 (TRBV2, TRBJ2-7)
CASSVGGSGEQYF

SEQ ID NO: 637039 - protein, 17 aa, Homo sapiens
  CDR3 for alpha chain variable domain of TCR clone 318520 (TRAV13-1, )
CAANIQNPDPAVYQLSD

SEQ ID NO: 637040 - protein, 14 aa, Homo sapiens
  CDR3 for beta chain variable domain of TCR clone 318520 (TRBV19, TRBJ2-7)
CASSIGPNSYEQYF

SEQ ID NO: 637041 - protein, 18 aa, Homo sapiens
  CDR3 for alpha chain variable domain of TCR clone 318521 (TRAV21, TRAJ52)
CAVRPSPAGGTSYGKPTF

SEQ ID NO: 637042 - protein, 17 aa, Homo sapiens
  CDR3 for beta chain variable domain of TCR clone 318521 (TRBV13, TRBJ2-3)
RASSLSRVAGGRNTQYF

SEQ ID NO: 637043 - protein, 14 aa, Homo sapiens
  CDR3 for alpha chain variable domain of TCR clone 318522 (TRAV8-2, TRAJ11)
CVVSEKSGYSTLTF

SEQ ID NO: 637044 - protein, 16 aa, Homo sapiens
  CDR3 for beta chain variable domain of TCR clone 318522 (TRBV12-4, TRBJ1-5)
CASSRPVGGSNQPQHF

SEQ ID NO: 637045 - protein, 14 aa, Homo sapiens
  CDR3 for alpha chain variable domain of TCR clone 318523 (TRAV26-1, TRAJ40)
CIVRLLSGTYKYIF

SEQ ID NO: 637046 - protein, 14 aa, Homo sapiens
  CDR3 for beta chain variable domain of TCR clone 318523 (TRBV7-6, TRBJ2-3)
CASSLGTVTDTQYF

SEQ ID NO: 637047 - protein, 13 aa, Homo sapiens
  CDR3 for alpha chain variable domain of TCR clone 318524 (TRAV20, TRAJ20)
CTVQAGSGYKLSF

SEQ ID NO: 637048 - protein, 14 aa, Homo sapiens
  CDR3 for beta chain variable domain of TCR clone 318524 (TRBV7-6, TRBJ2-7)
CASSPRAGMYEQYF

SEQ ID NO: 637049 - protein, 11 aa, Homo sapiens
  CDR3 for alpha chain variable domain of TCR clone 318525 (TRAV1-2, TRAJ40)
CAVSGTYKYIF

SEQ ID NO: 637050 - protein, 14 aa, Homo sapiens
  CDR3 for beta chain variable domain of TCR clone 318525 (TRBV19, TRBJ2-1)
CASPTFVLSGEQFF

SEQ ID NO: 637051 - protein, 16 aa, Homo sapiens
  CDR3 for alpha chain variable domain of TCR clone 318526 (TRAV8-4, TRAJ44)
YAVSASLTGTASKLTF

SEQ ID NO: 637052 - protein, 16 aa, Homo sapiens
  CDR3 for beta chain variable domain of TCR clone 318526 (TRBV7-3, TRBJ2-2)
CASSLKRGTLSGELFF

SEQ ID NO: 637053 - protein, 14 aa, Homo sapiens
  CDR3 for alpha chain variable domain of TCR clone 318527 (TRAV2, TRAJ37)
CAVAGSSNTGKLIS

SEQ ID NO: 637054 - protein, 15 aa, Homo sapiens
  CDR3 for beta chain variable domain of TCR clone 318527 (TRBV24-1, TRBJ2-4)
CATSDPRDRANIQYF

SEQ ID NO: 637055 - protein, 14 aa, Homo sapiens
  CDR3 for alpha chain variable domain of TCR clone 318528 (TRAV1-2, TRAJ8)
CAVREDTGFQKLLF

SEQ ID NO: 637056 - protein, 15 aa, Homo sapiens
  CDR3 for beta chain variable domain of TCR clone 318528 (TRBV5-5, TRBJ1-5)
CASSSTPGSNQPQHF

SEQ ID NO: 637057 - protein, 20 aa, Homo sapiens
  CDR3 for alpha chain variable domain of TCR clone 318529 (TRAV12-1, TRAJ42)
SSVIQPPTSVKGGSQGNLIF

SEQ ID NO: 637058 - protein, 14 aa, Homo sapiens
  CDR3 for beta chain variable domain of TCR clone 318529 (TRBV11-2, TRBJ2-7)
CASSLGAGAYEQYF

SEQ ID NO: 637059 - protein, 11 aa, Homo sapiens
  CDR3 for alpha chain variable domain of TCR clone 318530 (TRAV2, TRAJ13)
CASGGYQKVTF

SEQ ID NO: 637060 - protein, 14 aa, Homo sapiens
  CDR3 for beta chain variable domain of TCR clone 318530 (TRBV6-1, TRBJ1-3)
CASVQGGGGNTIDF

SEQ ID NO: 637061 - protein, 17 aa, Homo sapiens
  CDR3 for alpha chain variable domain of TCR clone 318531 (TRAV3, TRAJ42)
SAVRDRDYGGSQGNLIF

SEQ ID NO: 637062 - protein, 16 aa, Homo sapiens
  CDR3 for beta chain variable domain of TCR clone 318531 (TRBV9, TRBJ2-1)
CASSVGGGGNYNEQFF

SEQ ID NO: 637063 - protein, 12 aa, Homo sapiens
  CDR3 for alpha chain variable domain of TCR clone 318532 (TRAV3, TRAJ20)
CAVRDPDYKLSF

SEQ ID NO: 637064 - protein, 13 aa, Homo sapiens
  CDR3 for beta chain variable domain of TCR clone 318532 (TRBV9, TRBJ2-1)
CASRVGQGGEQFF

SEQ ID NO: 637065 - protein, 13 aa, Homo sapiens
  CDR3 for alpha chain variable domain of TCR clone 318533 (TRAV2, TRAJ40)
CAVVTSGTYKYIF

SEQ ID NO: 637066 - protein, 16 aa, Homo sapiens
  CDR3 for beta chain variable domain of TCR clone 318533 (TRBV19, TRBJ2-2)
CASRSPGTWATGELFF

SEQ ID NO: 637067 - protein, 12 aa, Homo sapiens
  CDR3 for alpha chain variable domain of TCR clone 318534 (TRAV2, TRAJ31)
CAVEDNNARLMF

SEQ ID NO: 637068 - protein, 16 aa, Homo sapiens
  CDR3 for beta chain variable domain of TCR clone 318534 (TRBV10-3, TRBJ2-1)
YAISGVGDGGGGEQFF

SEQ ID NO: 637069 - protein, 14 aa, Homo sapiens
  CDR3 for alpha chain variable domain of TCR clone 318535 (TRAV26-1, TRAJ38)
CIADNAGNNRKLIW

SEQ ID NO: 637070 - protein, 15 aa, Homo sapiens
  CDR3 for beta chain variable domain of TCR clone 318535 (TRBV7-2, TRBJ2-1)
CASSLASGRVNEQFF

SEQ ID NO: 637071 - protein, 13 aa, Homo sapiens
  CDR3 for alpha chain variable domain of TCR clone 318536 (TRAV27, TRAJ6)
CAGGTRGSYIPTF

SEQ ID NO: 637072 - protein, 17 aa, Homo sapiens
  CDR3 for beta chain variable domain of TCR clone 318536 (TRBV20-1, TRBJ2-1)
CSASSSGLAGSYNEQLF

SEQ ID NO: 637073 - protein, 19 aa, Homo sapiens
  CDR3 for alpha chain variable domain of TCR clone 318537 (TRAV26-1, TRAJ52)
CIVRAHRNAGGTSYGKLTF

SEQ ID NO: 637074 - protein, 13 aa, Homo sapiens
  CDR3 for beta chain variable domain of TCR clone 318537 (TRBV19, TRBJ2-7)
CASRKAGVSEQYF

SEQ ID NO: 637075 - protein, 15 aa, Homo sapiens
  CDR3 for alpha chain variable domain of TCR clone 318538 (TRAV3, TRAJ3)
CAVRDRDSSASKINF

SEQ ID NO: 637076 - protein, 15 aa, Homo sapiens
  CDR3 for beta chain variable domain of TCR clone 318538 (TRBV19, TRBJ2-1)
CASSSPGVPLDEQFF

SEQ ID NO: 637077 - protein, 16 aa, Homo sapiens
  CDR3 for alpha chain variable domain of TCR clone 318539 (TRAV3, TRAJ10)
CAVRDMNAGGGNKLTF

SEQ ID NO: 637078 - protein, 12 aa, Homo sapiens
  CDR3 for beta chain variable domain of TCR clone 318539 (TRBV7-9, TRBJ2-7)
CASSIKREEQYF

SEQ ID NO: 637079 - protein, 15 aa, Homo sapiens
  CDR3 for alpha chain variable domain of TCR clone 318540 (TRAV21, TRAJ57)
CAVIITQGGSEKLVF

SEQ ID NO: 637080 - protein, 14 aa, Homo sapiens
  CDR3 for beta chain variable domain of TCR clone 318540 (TRBV5-1, TRBJ2-2)
CASSFIWIPGELFF

SEQ ID NO: 637081 - protein, 12 aa, Homo sapiens
  CDR3 for alpha chain variable domain of TCR clone 318541 (TRAV2, TRAJ9)
CAVGAGGFKTIF

SEQ ID NO: 637082 - protein, 13 aa, Homo sapiens
  CDR3 for beta chain variable domain of TCR clone 318541 (TRBV27, TRBJ1-4)
CASSLMGDEKLFF

SEQ ID NO: 637083 - protein, 13 aa, Homo sapiens
  CDR3 for alpha chain variable domain of TCR clone 318542 (TRAV8-3, TRAJ44)
CAVVPGTASKPTF

SEQ ID NO: 637084 - protein, 13 aa, Homo sapiens
  CDR3 for beta chain variable domain of TCR clone 318542 (TRBV10-3, TRBJ1-2)
CAISERDSYGYTF

SEQ ID NO: 637085 - protein, 15 aa, Homo sapiens
  CDR3 for alpha chain variable domain of TCR clone 318543 (TRAV12-1, TRAJ26)
CVVNSWVTMVRILSL

SEQ ID NO: 637086 - protein, 15 aa, Homo sapiens
  CDR3 for beta chain variable domain of TCR clone 318543 (TRBV6-3, TRBJ2-3)
RLIHYSVGQADTLYF

SEQ ID NO: 637087 - protein, 13 aa, Homo sapiens
  CDR3 for alpha chain variable domain of TCR clone 318544 (TRAV8-2, TRAJ49)
CVVTPNTGNQFYF

SEQ ID NO: 637088 - protein, 15 aa, Homo sapiens
  CDR3 for beta chain variable domain of TCR clone 318544 (TRBV20-1, TRBJ2-7)
CSARDRVSGMDEQYF

SEQ ID NO: 637089 - protein, 16 aa, Homo sapiens
  CDR3 for alpha chain variable domain of TCR clone 318545 (TRAV26-2, TRAJ48)
CILRPPFNFGVEKLTF

SEQ ID NO: 637090 - protein, 15 aa, Homo sapiens
  CDR3 for beta chain variable domain of TCR clone 318545 (TRBV20-1, TRBJ2-3)
CSARVEGTYTDTQYF

SEQ ID NO: 637091 - protein, 11 aa, Homo sapiens
  CDR3 for alpha chain variable domain of TCR clone 318546 (TRAV13-1, TRAJ39)
CASHAGNMLTF

SEQ ID NO: 637092 - protein, 16 aa, Homo sapiens
  CDR3 for beta chain variable domain of TCR clone 318546 (TRBV2, TRBJ2-3)
CASSTSVEGVTDTQYF

SEQ ID NO: 637093 - protein, 14 aa, Homo sapiens
  CDR3 for alpha chain variable domain of TCR clone 318547 (TRAV1-2, TRAJ16)
WAVNRFSDGQKLLF

SEQ ID NO: 637094 - protein, 15 aa, Homo sapiens
  CDR3 for beta chain variable domain of TCR clone 318547 (TRBV6-1, TRBJ2-3)
CASSERGGITDTQYF

SEQ ID NO: 637095 - protein, 14 aa, Homo sapiens
  CDR3 for alpha chain variable domain of TCR clone 318548 (TRAV4, TRAJ26)
CLVGPHNYGQNFVF

SEQ ID NO: 637096 - protein, 17 aa, Homo sapiens
  CDR3 for beta chain variable domain of TCR clone 318548 (TRBV20-1, TRBJ2-1)
CSASSSGLAGDYNEQFF

SEQ ID NO: 637097 - protein, 11 aa, Homo sapiens
  CDR3 for alpha chain variable domain of TCR clone 318549 (TRAV21, TRAJ17)
CAAPAGNKLTF

SEQ ID NO: 637098 - protein, 13 aa, Homo sapiens
  CDR3 for beta chain variable domain of TCR clone 318549 (TRBV7-8, TRBJ2-7)
CASSLTGGREQYF

SEQ ID NO: 637099 - protein, 22 aa, Homo sapiens
  CDR3 for alpha chain variable domain of TCR clone 318550 (TRAV2, TRAJ38)
CAVEDFPNAGNNHIQNSDPAVY

SEQ ID NO: 637100 - protein, 14 aa, Homo sapiens
  CDR3 for beta chain variable domain of TCR clone 318550 (TRBV29-1, TRBJ1-4)
CSVSGRQGGEKLFF

SEQ ID NO: 637101 - protein, 13 aa, Homo sapiens
  CDR3 for alpha chain variable domain of TCR clone 318551 (TRAV30, TRAJ18)
CGTEASTLGRLYF

SEQ ID NO: 637102 - protein, 15 aa, Homo sapiens
  CDR3 for beta chain variable domain of TCR clone 318551 (TRBV7-3, TRBJ2-1)
CASSRSGRGSSEQFF

SEQ ID NO: 637103 - protein, 16 aa, Homo sapiens
  CDR3 for alpha chain variable domain of TCR clone 318552 (TRAV20, TRAJ10)
CAVLRGLTGGGNKLTF

SEQ ID NO: 637104 - protein, 14 aa, Homo sapiens
  CDR3 for beta chain variable domain of TCR clone 318552 (TRBV19, TRBJ1-5)
CASRAPDSFLSQDF

SEQ ID NO: 637105 - protein, 18 aa, Homo sapiens
  CDR3 for alpha chain variable domain of TCR clone 318553 (TRAV12-3, TRAJ52)
CAMSVGGAGGTSYGKLTF

SEQ ID NO: 637106 - protein, 15 aa, Homo sapiens
  CDR3 for beta chain variable domain of TCR clone 318553 (TRBV7-2, TRBJ1-2)
CASSPRAGWNYGDTF

SEQ ID NO: 637107 - protein, 16 aa, Homo sapiens
  CDR3 for alpha chain variable domain of TCR clone 318554 (TRAV30, TRAJ24)
CGTEIVDADSWGKFQF

SEQ ID NO: 637108 - protein, 17 aa, Homo sapiens
  CDR3 for beta chain variable domain of TCR clone 318554 (TRBV11-2, TRBJ2-1)
CASSLALAEFGRNEQFF

SEQ ID NO: 637109 - protein, 13 aa, Homo sapiens
  CDR3 for alpha chain variable domain of TCR clone 318555 (TRAV30, TRAJ6)
CGFIEGRSYIPTF

SEQ ID NO: 637110 - protein, 13 aa, Homo sapiens
  CDR3 for beta chain variable domain of TCR clone 318555 (TRBV5-4, TRBJ2-5)
CASSPVSQETQYF

SEQ ID NO: 637111 - protein, 14 aa, Homo sapiens
  CDR3 for alpha chain variable domain of TCR clone 318556 (TRAV4, TRAJ20)
CLVGLRSNDYKLSF

SEQ ID NO: 637112 - protein, 18 aa, Homo sapiens
  CDR3 for beta chain variable domain of TCR clone 318556 (TRBV2, TRBJ2-5)
CASSGDPQGRGAQETQYF

SEQ ID NO: 637113 - protein, 12 aa, Homo sapiens
  CDR3 for alpha chain variable domain of TCR clone 318557 (TRAV25, TRAJ20)
WAGRSNDYKLSF

SEQ ID NO: 637114 - protein, 15 aa, Homo sapiens
  CDR3 for beta chain variable domain of TCR clone 318557 (TRBV7-6, TRBJ2-7)
CASSGRRDTFGEQYF

SEQ ID NO: 637115 - protein, 14 aa, Homo sapiens
  CDR3 for alpha chain variable domain of TCR clone 318558 (TRAV12-2, TRAJ9)
CAVNMEGGGFKTIL

SEQ ID NO: 637116 - protein, 14 aa, Homo sapiens
  CDR3 for beta chain variable domain of TCR clone 318558 (TRBV5-1, TRBJ1-1)
CASSLAVGSGEALF

SEQ ID NO: 637117 - protein, 13 aa, Homo sapiens
  CDR3 for alpha chain variable domain of TCR clone 318559 (TRAV2, TRAJ40)
RAVVTSGTYKYIF

SEQ ID NO: 637118 - protein, 14 aa, Homo sapiens
  CDR3 for beta chain variable domain of TCR clone 318559 (TRBV19, TRBJ2-1)
CASPTFVLIGEQFF

SEQ ID NO: 637119 - protein, 15 aa, Homo sapiens
  CDR3 for alpha chain variable domain of TCR clone 318560 (TRAV13-1, TRAJ10)
VAATILTGGGNKLTF

SEQ ID NO: 637120 - protein, 15 aa, Homo sapiens
  CDR3 for beta chain variable domain of TCR clone 318560 (TRBV2, TRBJ2-7)
CASTLLGSGATEQYF

SEQ ID NO: 637121 - protein, 14 aa, Homo sapiens
  CDR3 for alpha chain variable domain of TCR clone 318561 (TRAV29/DV5, TRAJ36)
CAARRKTGANNLFF

SEQ ID NO: 637122 - protein, 14 aa, Homo sapiens
  CDR3 for beta chain variable domain of TCR clone 318561 (TRBV12-5, TRBJ2-5)
CASGSRTHQETQYS

SEQ ID NO: 637123 - protein, 12 aa, Homo sapiens
  CDR3 for alpha chain variable domain of TCR clone 318562 (TRAV1-1, TRAJ20)
CDVREDDYKLSF

SEQ ID NO: 637124 - protein, 13 aa, Homo sapiens
  CDR3 for beta chain variable domain of TCR clone 318562 (TRBV7-2, TRBJ2-2)
CASSLAVTGELFF

SEQ ID NO: 637125 - protein, 14 aa, Homo sapiens
  CDR3 for alpha chain variable domain of TCR clone 318563 (TRAV27, TRAJ37)
CAGERSSNTGKLIC

SEQ ID NO: 637126 - protein, 15 aa, Homo sapiens
  CDR3 for beta chain variable domain of TCR clone 318563 (TRBV11-3, TRBJ1-6)
CASSLDWGANSPLHF

SEQ ID NO: 637127 - protein, 13 aa, Homo sapiens
  CDR3 for alpha chain variable domain of TCR clone 318564 (TRAV8-4, TRAJ10)
CAAFTGGGNKLTF

SEQ ID NO: 637128 - protein, 15 aa, Homo sapiens
  CDR3 for beta chain variable domain of TCR clone 318564 (TRBV2, TRBJ2-3)
CASSDFETATDTQYF

SEQ ID NO: 637129 - protein, 11 aa, Homo sapiens
  CDR3 for alpha chain variable domain of TCR clone 318565 (TRAV35, TRAJ30)
CAGHGDDKIIF

SEQ ID NO: 637130 - protein, 14 aa, Homo sapiens
  CDR3 for beta chain variable domain of TCR clone 318565 (TRBV7-6, TRBJ1-6)
CASSQAGGGSPLHF

SEQ ID NO: 637131 - protein, 16 aa, Homo sapiens
  CDR3 for alpha chain variable domain of TCR clone 318566 (TRAV16, TRAJ42)
CALSGLLGGSQGKLIF

SEQ ID NO: 637132 - protein, 15 aa, Homo sapiens
  CDR3 for beta chain variable domain of TCR clone 318566 (TRBV5-1, TRBJ2-1)
CASSPGGLAGNEQFF

SEQ ID NO: 637133 - protein, 14 aa, Homo sapiens
  CDR3 for alpha chain variable domain of TCR clone 318567 (TRAV13-1, TRAJ35)
CAASKGGFGNVLHC

SEQ ID NO: 637134 - protein, 14 aa, Homo sapiens
  CDR3 for beta chain variable domain of TCR clone 318567 (TRBV7-8, TRBJ2-3)
CASSFSDGQDTQYF

SEQ ID NO: 637135 - protein, 15 aa, Homo sapiens
  CDR3 for alpha chain variable domain of TCR clone 318568 (TRAV4, TRAJ39)
CLVGPKNNAGNMLTF

SEQ ID NO: 637136 - protein, 14 aa, Homo sapiens
  CDR3 for beta chain variable domain of TCR clone 318568 (TRBV11-2, TRBJ2-5)
CASSRTGGIETQYF

SEQ ID NO: 637137 - protein, 15 aa, Homo sapiens
  CDR3 for alpha chain variable domain of TCR clone 318569 (TRAV8-6, TRAJ6)
CAVSFTSGGSNIPTF

SEQ ID NO: 637138 - protein, 13 aa, Homo sapiens
  CDR3 for beta chain variable domain of TCR clone 318569 (TRBV29-1, TRBJ2-1)
CSVEGGRVNEQFF

SEQ ID NO: 637139 - protein, 14 aa, Homo sapiens
  CDR3 for alpha chain variable domain of TCR clone 318570 (TRAV1-1, TRAJ27)
CALSETPMQANQPL

SEQ ID NO: 637140 - protein, 17 aa, Homo sapiens
  CDR3 for beta chain variable domain of TCR clone 318570 (TRBV20-1, TRBJ2-3)
SAVLDPKGVSATDTQYF

SEQ ID NO: 637141 - protein, 15 aa, Homo sapiens
  CDR3 for alpha chain variable domain of TCR clone 318571 (TRAV21, TRAJ37)
CAVWPTLSNTGKLIF

SEQ ID NO: 637142 - protein, 16 aa, Homo sapiens
  CDR3 for beta chain variable domain of TCR clone 318571 (TRBV24-1, TRBJ2-3)
CATSDRRQDLTDTQYF

SEQ ID NO: 637143 - protein, 14 aa, Homo sapiens
  CDR3 for alpha chain variable domain of TCR clone 318572 (TRAV13-2, TRAJ17)
CTENSKAAGKKLTF

SEQ ID NO: 637144 - protein, 11 aa, Homo sapiens
  CDR3 for beta chain variable domain of TCR clone 318572 (TRBV6-3, TRBJ2-3)
CATGQADMQYF

SEQ ID NO: 637145 - protein, 12 aa, Homo sapiens
  CDR3 for alpha chain variable domain of TCR clone 318573 (TRAV21, TRAJ39)
CTADNAGNMLTF

SEQ ID NO: 637146 - protein, 12 aa, Homo sapiens
  CDR3 for beta chain variable domain of TCR clone 318573 (TRBV5-4, TRBJ2-7)
CASSWAGQGENF

SEQ ID NO: 637147 - protein, 12 aa, Homo sapiens
  CDR3 for alpha chain variable domain of TCR clone 318574 (TRAV26-1, TRAJ13)
CIVSRGYQKVTF

SEQ ID NO: 637148 - protein, 16 aa, Homo sapiens
  CDR3 for beta chain variable domain of TCR clone 318574 (TRBV27, TRBJ2-1)
CASSLSKCFGLDEQFF

SEQ ID NO: 637149 - protein, 14 aa, Homo sapiens
  CDR3 for alpha chain variable domain of TCR clone 318575 (TRAV1-2, TRAJ8)
CAVREDTGFQKIVF

SEQ ID NO: 637150 - protein, 13 aa, Homo sapiens
  CDR3 for beta chain variable domain of TCR clone 318575 (TRBV6-4, TRBJ1-5)
CASSADLNQPQHF

SEQ ID NO: 637151 - protein, 16 aa, Homo sapiens
  CDR3 for alpha chain variable domain of TCR clone 318576 (TRAV12-1, TRAJ53)
CVVTSVAGGSNYKLTF

SEQ ID NO: 637152 - protein, 16 aa, Homo sapiens
  CDR3 for beta chain variable domain of TCR clone 318576 (TRBV6-6, TRBJ2-3)
CASGYSHAGSTDTQYF

SEQ ID NO: 637153 - protein, 10 aa, Homo sapiens
  CDR3 for alpha chain variable domain of TCR clone 318577 (TRAV3, TRAJ30)
CAVREIEIIF

SEQ ID NO: 637154 - protein, 12 aa, Homo sapiens
  CDR3 for beta chain variable domain of TCR clone 318577 (TRBV20-1, TRBJ2-3)
RSADGAGDTQYF

SEQ ID NO: 637155 - protein, 14 aa, Homo sapiens
  CDR3 for alpha chain variable domain of TCR clone 318578 (TRAV13-1, TRAJ23)
CAASRLGRGGKLIF

SEQ ID NO: 637156 - protein, 13 aa, Homo sapiens
  CDR3 for beta chain variable domain of TCR clone 318578 (TRBV7-2, TRBJ1-1)
CASSLRANTEAFF

SEQ ID NO: 637157 - protein, 15 aa, Homo sapiens
  CDR3 for alpha chain variable domain of TCR clone 318579 (TRAV8-4, TRAJ37)
CAVSKVSGNTGKLIF

SEQ ID NO: 637158 - protein, 17 aa, Homo sapiens
  CDR3 for beta chain variable domain of TCR clone 318579 (TRBV20-1, TRBJ2-1)
CSARDRRRASSYNEQFF

SEQ ID NO: 637159 - protein, 12 aa, Homo sapiens
  CDR3 for alpha chain variable domain of TCR clone 318580 (TRAV17, TRAJ4)
CATDGGYNKLIF

SEQ ID NO: 637160 - protein, 13 aa, Homo sapiens
  CDR3 for beta chain variable domain of TCR clone 318580 (TRBV10-3, TRBJ2-7)
CASKLAVNYEQYF

SEQ ID NO: 637161 - protein, 12 aa, Homo sapiens
  CDR3 for alpha chain variable domain of TCR clone 318581 (TRAV3, TRAJ31)
CAVRDGNARLMF

SEQ ID NO: 637162 - protein, 18 aa, Homo sapiens
  CDR3 for beta chain variable domain of TCR clone 318581 (TRBV7-2, TRBJ2-3)
CASSLRREGSGITDTQHF

SEQ ID NO: 637163 - protein, 15 aa, Homo sapiens
  CDR3 for alpha chain variable domain of TCR clone 318582 (TRAV35, TRAJ50)
CAGQLRKTSYDKVIF

SEQ ID NO: 637164 - protein, 16 aa, Homo sapiens
  CDR3 for beta chain variable domain of TCR clone 318582 (TRBV20-1, TRBJ1-2)
CSASMGQGVANYGYTF

SEQ ID NO: 637165 - protein, 13 aa, Homo sapiens
  CDR3 for alpha chain variable domain of TCR clone 318583 (TRAV8-6, TRAJ49)
CAVITNTGNQFFF

SEQ ID NO: 637166 - protein, 14 aa, Homo sapiens
  CDR3 for beta chain variable domain of TCR clone 318583 (TRBV27, TRBJ2-2)
CASRPGVNAGELFF

SEQ ID NO: 637167 - protein, 16 aa, Homo sapiens
  CDR3 for alpha chain variable domain of TCR clone 318584 (TRAV12-2, TRAJ28)
CAVITDSGAGSYELTF

SEQ ID NO: 637168 - protein, 12 aa, Homo sapiens
  CDR3 for beta chain variable domain of TCR clone 318584 (TRBV9, TRBJ2-2)
CASSLVTGELFF

SEQ ID NO: 637169 - protein, 15 aa, Homo sapiens
  CDR3 for alpha chain variable domain of TCR clone 318585 (TRAV14/DV4, TRAJ33)
CAMREGRDSNYQLIW

SEQ ID NO: 637170 - protein, 12 aa, Homo sapiens
  CDR3 for beta chain variable domain of TCR clone 318585 (TRBV5-4, TRBJ2-7)
CASSWAGQGENF

SEQ ID NO: 637171 - protein, 14 aa, Homo sapiens
  CDR3 for alpha chain variable domain of TCR clone 318586 (TRAV38-1, TRAJ45)
CASHSGGGAAGLTF

SEQ ID NO: 637172 - protein, 12 aa, Homo sapiens
  CDR3 for beta chain variable domain of TCR clone 318586 (TRBV7-8, TRBJ2-7)
CASSLGDREQYF

SEQ ID NO: 637173 - protein, 15 aa, Homo sapiens
  CDR3 for alpha chain variable domain of TCR clone 318587 (TRAV17, TRAJ57)
CATGPSQAGSEKLVF

SEQ ID NO: 637174 - protein, 15 aa, Homo sapiens
  CDR3 for beta chain variable domain of TCR clone 318587 (TRBV9, TRBJ1-6)
CASSVAGTGDSPLHF

SEQ ID NO: 637175 - protein, 14 aa, Homo sapiens
  CDR3 for alpha chain variable domain of TCR clone 318588 (TRAV38-2/DV8, TRAJ30)
CAYMDGLGGDKIIF

SEQ ID NO: 637176 - protein, 15 aa, Homo sapiens
  CDR3 for beta chain variable domain of TCR clone 318588 (TRBV7-9, TRBJ2-2)
CASRPDDRDTGELFF

SEQ ID NO: 637177 - protein, 13 aa, Homo sapiens
  CDR3 for alpha chain variable domain of TCR clone 318589 (TRAV4, TRAJ34)
CLVGDYNTDKLTF

SEQ ID NO: 637178 - protein, 23 aa, Homo sapiens
  CDR3 for beta chain variable domain of TCR clone 318589 (TRBV4-2, TRBJ2-3)
RASSQDPPRASSISGGRGDTQYS

SEQ ID NO: 637179 - protein, 14 aa, Homo sapiens
  CDR3 for alpha chain variable domain of TCR clone 318590 (TRAV12-1, TRAJ9)
CVVTGYTGGFKTIF

SEQ ID NO: 637180 - protein, 14 aa, Homo sapiens
  CDR3 for beta chain variable domain of TCR clone 318590 (TRBV7-3, TRBJ1-1)
CASSLKGGNTEAFF

SEQ ID NO: 637181 - protein, 14 aa, Homo sapiens
  CDR3 for alpha chain variable domain of TCR clone 318591 (TRAV17, TRAJ54)
CATDANQGAQRLVF

SEQ ID NO: 637182 - protein, 14 aa, Homo sapiens
  CDR3 for beta chain variable domain of TCR clone 318591 (TRBV25-1, TRBJ1-1)
CASTHLGGNTEAFF

SEQ ID NO: 637183 - protein, 14 aa, Homo sapiens
  CDR3 for alpha chain variable domain of TCR clone 318592 (TRAV8-6, TRAJ20)
CAVSDRRVRDKLSF

SEQ ID NO: 637184 - protein, 16 aa, Homo sapiens
  CDR3 for beta chain variable domain of TCR clone 318592 (TRBV28, TRBJ1-2)
CANSHGQGVYKDGYTF

SEQ ID NO: 637185 - protein, 14 aa, Homo sapiens
  CDR3 for alpha chain variable domain of TCR clone 318593 (TRAV12-2, TRAJ11)
CAVNMNSGYSTLTF

SEQ ID NO: 637186 - protein, 13 aa, Homo sapiens
  CDR3 for beta chain variable domain of TCR clone 318593 (TRBV6-1, TRBJ1-2)
CASSDSPSYGFTF

SEQ ID NO: 637187 - protein, 13 aa, Homo sapiens
  CDR3 for alpha chain variable domain of TCR clone 318594 (TRAV12-2, TRAJ9)
CAVKWAGGFKTIF

SEQ ID NO: 637188 - protein, 19 aa, Homo sapiens
  CDR3 for beta chain variable domain of TCR clone 318594 (TRBV7-2, TRBJ2-3)
CASSFHSRNWGGGTDTQYF

SEQ ID NO: 637189 - protein, 16 aa, Homo sapiens
  CDR3 for alpha chain variable domain of TCR clone 318595 (TRAV20, TRAJ22)
CAVQASSSGSARQLTF

SEQ ID NO: 637190 - protein, 13 aa, Homo sapiens
  CDR3 for beta chain variable domain of TCR clone 318595 (TRBV27, TRBJ2-1)
CTSRTLGVGEQFF

SEQ ID NO: 637191 - protein, 18 aa, Homo sapiens
  CDR3 for alpha chain variable domain of TCR clone 318596 (TRAV13-1, TRAJ52)
CAASKRSAGGTSYGKLTF

SEQ ID NO: 637192 - protein, 15 aa, Homo sapiens
  CDR3 for beta chain variable domain of TCR clone 318596 (TRBV5-1, TRBJ2-7)
CASSLNGGPAREQYF

SEQ ID NO: 637193 - protein, 21 aa, Homo sapiens
  CDR3 for alpha chain variable domain of TCR clone 318597 (TRAV17, TRAJ57)
TASRAADTASYFCANPEKLVF

SEQ ID NO: 637194 - protein, 15 aa, Homo sapiens
  CDR3 for beta chain variable domain of TCR clone 318597 (TRBV11-2, TRBJ2-3)
CQQLSRAGALDTQYF

SEQ ID NO: 637195 - protein, 14 aa, Homo sapiens
  CDR3 for alpha chain variable domain of TCR clone 318598 (TRAV2, TRAJ9)
CAVEDRSGGFKTIF

SEQ ID NO: 637196 - protein, 17 aa, Homo sapiens
  CDR3 for beta chain variable domain of TCR clone 318598 (TRBV25-1, TRBJ2-5)
CASSRRGGRGGQETQYF

SEQ ID NO: 637197 - protein, 14 aa, Homo sapiens
  CDR3 for alpha chain variable domain of TCR clone 318599 (TRAV1-2, TRAJ16)
CAVNRFSDGQKLPF

SEQ ID NO: 637198 - protein, 15 aa, Homo sapiens
  CDR3 for beta chain variable domain of TCR clone 318599 (TRBV11-3, TRBJ2-7)
CASSPGPASSYEQYF

SEQ ID NO: 637199 - protein, 16 aa, Homo sapiens
  CDR3 for alpha chain variable domain of TCR clone 318600 (TRAV26-1, TRAJ33)
CIVPFWGEDSNYQLIW

SEQ ID NO: 637200 - protein, 13 aa, Homo sapiens
  CDR3 for beta chain variable domain of TCR clone 318600 (TRBV20-1, TRBJ1-6)
CSAPLGVGSPLHF

SEQ ID NO: 637201 - protein, 15 aa, Homo sapiens
  CDR3 for alpha chain variable domain of TCR clone 318601 (TRAV12-3, TRAJ6)
CAMSATTGGSNIPTF

SEQ ID NO: 637202 - protein, 16 aa, Homo sapiens
  CDR3 for beta chain variable domain of TCR clone 318601 (TRBV19, TRBJ2-1)
CASSKAGPSSYNEQFF

SEQ ID NO: 637203 - protein, 12 aa, Homo sapiens
  CDR3 for alpha chain variable domain of TCR clone 318602 (TRAV12-3, TRAJ17)
CAMTLTGNKLTF

SEQ ID NO: 637204 - protein, 18 aa, Homo sapiens
  CDR3 for beta chain variable domain of TCR clone 318602 (TRBV4-3, TRBJ1-6)
CASSQETPASAYNSPLHF

SEQ ID NO: 637205 - protein, 12 aa, Homo sapiens
  CDR3 for alpha chain variable domain of TCR clone 318603 (TRAV3, TRAJ43)
CAVRDPNNDMRF

SEQ ID NO: 637206 - protein, 15 aa, Homo sapiens
  CDR3 for beta chain variable domain of TCR clone 318603 (TRBV12-4, TRBJ2-5)
CASTLNSGRGETQYF

SEQ ID NO: 637207 - protein, 12 aa, Homo sapiens
  CDR3 for alpha chain variable domain of TCR clone 318604 (TRAV2, TRAJ26)
CAGSPGRLWSEF

SEQ ID NO: 637208 - protein, 11 aa, Homo sapiens
  CDR3 for beta chain variable domain of TCR clone 318604 (TRBV13, TRBJ2-2)
CASSPRTGSTP

SEQ ID NO: 637209 - protein, 12 aa, Homo sapiens
  CDR3 for alpha chain variable domain of TCR clone 318605 (TRAV38-1, TRAJ47)
CAFETYGNKLVF

SEQ ID NO: 637210 - protein, 13 aa, Homo sapiens
  CDR3 for beta chain variable domain of TCR clone 318605 (TRBV4-2, TRBJ1-1)
CASSQAGNTEAVF

SEQ ID NO: 637211 - protein, 14 aa, Homo sapiens
  CDR3 for alpha chain variable domain of TCR clone 318606 (TRAV1-1, TRAJ28)
CAAPSGAGSYHITF

SEQ ID NO: 637212 - protein, 15 aa, Homo sapiens
  CDR3 for beta chain variable domain of TCR clone 318606 (TRBV7-2, TRBJ1-2)
CASSLVSGGDYGYTF

SEQ ID NO: 637213 - protein, 14 aa, Homo sapiens
  CDR3 for alpha chain variable domain of TCR clone 318607 (TRAV12-2, TRAJ40)
CAVKIPSGTYNSIF

SEQ ID NO: 637214 - protein, 14 aa, Homo sapiens
  CDR3 for beta chain variable domain of TCR clone 318607 (TRBV20-1, TRBJ1-1)
CSAQTRIGGTEAFF

SEQ ID NO: 637215 - protein, 15 aa, Homo sapiens
  CDR3 for alpha chain variable domain of TCR clone 318608 (TRAV3, TRAJ22)
CAVRDRGGSARQLTF

SEQ ID NO: 637216 - protein, 14 aa, Homo sapiens
  CDR3 for beta chain variable domain of TCR clone 318608 (TRBV9, TRBJ2-7)
CASSAGSALYEQYF

SEQ ID NO: 637217 - protein, 13 aa, Homo sapiens
  CDR3 for alpha chain variable domain of TCR clone 318609 (TRAV2, TRAJ40)
CAVVTSGTYQYIF

SEQ ID NO: 637218 - protein, 16 aa, Homo sapiens
  CDR3 for beta chain variable domain of TCR clone 318609 (TRBV29-1, TRBJ2-6)
CSVEDITYSGANVLTF

SEQ ID NO: 637219 - protein, 12 aa, Homo sapiens
  CDR3 for alpha chain variable domain of TCR clone 318610 (TRAV35, TRAJ49)
CAGWNTGNQFYF

SEQ ID NO: 637220 - protein, 14 aa, Homo sapiens
  CDR3 for beta chain variable domain of TCR clone 318610 (TRBV7-3, TRBJ1-1)
CASSLGTGYTEAFF

SEQ ID NO: 637221 - protein, 13 aa, Homo sapiens
  CDR3 for alpha chain variable domain of TCR clone 318611 (TRAV12-3, TRAJ7)
CAMSASGNNRLAF

SEQ ID NO: 637222 - protein, 13 aa, Homo sapiens
  CDR3 for beta chain variable domain of TCR clone 318611 (TRBV19, TRBJ1-2)
CASSVPGQGGYTF

SEQ ID NO: 637223 - protein, 11 aa, Homo sapiens
  CDR3 for alpha chain variable domain of TCR clone 318612 (TRAV13-2, TRAJ26)
CAEIPGQDFVF

SEQ ID NO: 637224 - protein, 19 aa, Homo sapiens
  CDR3 for beta chain variable domain of TCR clone 318612 (TRBV19, TRBJ2-2)
CASTRPGLAGGRVTGELFF

SEQ ID NO: 637225 - protein, 15 aa, Homo sapiens
  CDR3 for alpha chain variable domain of TCR clone 318613 (TRAV8-2, TRAJ40)
CVVLGTTSGTYQYIF

SEQ ID NO: 637226 - protein, 13 aa, Homo sapiens
  CDR3 for beta chain variable domain of TCR clone 318613 (TRBV10-3, TRBJ2-7)
CASKLAVNYEQYF

SEQ ID NO: 637227 - protein, 15 aa, Homo sapiens
  CDR3 for alpha chain variable domain of TCR clone 318614 (TRAV12-1, TRAJ44)
CVVFVNTGTASKLTF

SEQ ID NO: 637228 - protein, 18 aa, Homo sapiens
  CDR3 for beta chain variable domain of TCR clone 318614 (TRBV20-1, TRBJ2-3)
CSASGLAGGPGTTDTQYF

SEQ ID NO: 637229 - protein, 14 aa, Homo sapiens
  CDR3 for alpha chain variable domain of TCR clone 318615 (TRAV38-1, TRAJ45)
CAYYSGGGADGLTF

SEQ ID NO: 637230 - protein, 15 aa, Homo sapiens
  CDR3 for beta chain variable domain of TCR clone 318615 (TRBV11-2, TRBJ2-1)
CASSKNRGLIYEHFF

SEQ ID NO: 637231 - protein, 12 aa, Homo sapiens
  CDR3 for alpha chain variable domain of TCR clone 318616 (TRAV17, TRAJ57)
CATHGGSEKLVF

SEQ ID NO: 637232 - protein, 13 aa, Homo sapiens
  CDR3 for beta chain variable domain of TCR clone 318616 (TRBV7-9, TRBJ2-7)
CASSFAGGYEQYF

SEQ ID NO: 637233 - protein, 13 aa, Homo sapiens
  CDR3 for alpha chain variable domain of TCR clone 318617 (TRAV2, TRAJ10)
CAVETGGGNKLTF

SEQ ID NO: 637234 - protein, 11 aa, Homo sapiens
  CDR3 for beta chain variable domain of TCR clone 318617 (TRBV12-4, TRBJ2-3)
CASTATDTQYF

SEQ ID NO: 637235 - protein, 15 aa, Homo sapiens
  CDR3 for alpha chain variable domain of TCR clone 318618 (TRAV27, TRAJ38)
CAGWFNAGNNRKLIW

SEQ ID NO: 637236 - protein, 15 aa, Homo sapiens
  CDR3 for beta chain variable domain of TCR clone 318618 (TRBV6-3, TRBJ2-7)
CASSSPGTVFYEQYF

SEQ ID NO: 637237 - protein, 13 aa, Homo sapiens
  CDR3 for alpha chain variable domain of TCR clone 318619 (TRAV12-3, TRAJ31)
CAMSANNNARLMF

SEQ ID NO: 637238 - protein, 16 aa, Homo sapiens
  CDR3 for beta chain variable domain of TCR clone 318619 (TRBV7-9, TRBJ1-2)
CASSIGFSAGEDGYTF

SEQ ID NO: 637239 - protein, 15 aa, Homo sapiens
  CDR3 for alpha chain variable domain of TCR clone 318620 (TRAV29/DV5, TRAJ53)
CAASASGRSNYKLTF

SEQ ID NO: 637240 - protein, 19 aa, Homo sapiens
  CDR3 for beta chain variable domain of TCR clone 318620 (TRBV5-1, TRBJ2-3)
CASSLWLAGGITTTDTQYF

SEQ ID NO: 637241 - protein, 12 aa, Homo sapiens
  CDR3 for alpha chain variable domain of TCR clone 318621 (TRAV17, TRAJ30)
CVPERRDDKIIF

SEQ ID NO: 637242 - protein, 15 aa, Homo sapiens
  CDR3 for beta chain variable domain of TCR clone 318621 (TRBV11-3, TRBJ2-3)
CASLKDGREGDTQYF

SEQ ID NO: 637243 - protein, 12 aa, Homo sapiens
  CDR3 for alpha chain variable domain of TCR clone 318622 (TRAV13-2, TRAJ23)
CAERHRGGRLIF

SEQ ID NO: 637244 - protein, 14 aa, Homo sapiens
  CDR3 for beta chain variable domain of TCR clone 318622 (TRBV7-3, TRBJ2-3)
RASSSTGVADTQYF

SEQ ID NO: 637245 - protein, 15 aa, Homo sapiens
  CDR3 for alpha chain variable domain of TCR clone 318623 (TRAV26-1, TRAJ29)
CIVRVEGSGNTPLVF

SEQ ID NO: 637246 - protein, 15 aa, Homo sapiens
  CDR3 for beta chain variable domain of TCR clone 318623 (TRBV28, TRBJ2-6)
CASSHRGFGANVLTF

SEQ ID NO: 637247 - protein, 14 aa, Homo sapiens
  CDR3 for alpha chain variable domain of TCR clone 318624 (TRAV13-1, TRAJ22)
CAAINGGSARQLTF

SEQ ID NO: 637248 - protein, 14 aa, Homo sapiens
  CDR3 for beta chain variable domain of TCR clone 318624 (TRBV18, TRBJ2-2)
CASSPGQNTGELFF

SEQ ID NO: 637249 - protein, 11 aa, Homo sapiens
  CDR3 for alpha chain variable domain of TCR clone 318625 (TRAV23/DV6, TRAJ58)
CAARLLRGETS

SEQ ID NO: 637250 - protein, 13 aa, Homo sapiens
  CDR3 for beta chain variable domain of TCR clone 318625 (TRBV7-2, TRBJ2-2)
CASSSVRAGELFF

SEQ ID NO: 637251 - protein, 18 aa, Homo sapiens
  CDR3 for alpha chain variable domain of TCR clone 318626 (TRAV13-1, TRAJ52)
CAASKRSAGGTSYGKLTF

SEQ ID NO: 637252 - protein, 15 aa, Homo sapiens
  CDR3 for beta chain variable domain of TCR clone 318626 (TRBV20-1, TRBJ1-5)
CSARSGPSMNQPQHF

SEQ ID NO: 637253 - protein, 14 aa, Homo sapiens
  CDR3 for alpha chain variable domain of TCR clone 318627 (TRAV20, TRAJ56)
CAVQFGGANSKLTF

SEQ ID NO: 637254 - protein, 13 aa, Homo sapiens
  CDR3 for beta chain variable domain of TCR clone 318627 (TRBV10-3, TRBJ2-7)
CASKLAVNYEQYF

SEQ ID NO: 637255 - protein, 15 aa, Homo sapiens
  CDR3 for alpha chain variable domain of TCR clone 318628 (TRAV26-1, TRAJ44)
CIARVPFGTASKLTF

SEQ ID NO: 637256 - protein, 15 aa, Homo sapiens
  CDR3 for beta chain variable domain of TCR clone 318628 (TRBV27, TRBJ2-1)
CASSNGGGSSNEQFF

SEQ ID NO: 637257 - protein, 15 aa, Homo sapiens
  CDR3 for alpha chain variable domain of TCR clone 318629 (TRAV17, TRAJ57)
CATGPSQGGSEKLVF

SEQ ID NO: 637258 - protein, 15 aa, Homo sapiens
  CDR3 for beta chain variable domain of TCR clone 318629 (TRBV7-9, TRBJ1-6)
CASSSPGRGNSPLHC

SEQ ID NO: 637259 - protein, 15 aa, Homo sapiens
  CDR3 for alpha chain variable domain of TCR clone 318630 (TRAV35, TRAJ23)
CAGPLGNNQGGKLIF

SEQ ID NO: 637260 - protein, 14 aa, Homo sapiens
  CDR3 for beta chain variable domain of TCR clone 318630 (TRBV7-9, TRBJ1-1)
CASNPLQSYTGAFF

SEQ ID NO: 637261 - protein, 15 aa, Homo sapiens
  CDR3 for alpha chain variable domain of TCR clone 318631 (TRAV13-2, TRAJ10)
CAENRDTGGGNKLTF

SEQ ID NO: 637262 - protein, 16 aa, Homo sapiens
  CDR3 for beta chain variable domain of TCR clone 318631 (TRBV7-2, TRBJ2-2)
CASSLYRGPNTGELFF

SEQ ID NO: 637263 - protein, 13 aa, Homo sapiens
  CDR3 for alpha chain variable domain of TCR clone 318632 (TRAV22, TRAJ29)
CAVGGSGNTPLVL

SEQ ID NO: 637264 - protein, 13 aa, Homo sapiens
  CDR3 for beta chain variable domain of TCR clone 318632 (TRBV19, TRBJ2-7)
CASRKAGGSEQYF

SEQ ID NO: 637265 - protein, 14 aa, Homo sapiens
  CDR3 for alpha chain variable domain of TCR clone 318633 (TRAV8-4, TRAJ9)
CAVRINTGGFKTIF

SEQ ID NO: 637266 - protein, 14 aa, Homo sapiens
  CDR3 for beta chain variable domain of TCR clone 318633 (TRBV7-2, TRBJ2-7)
CASSLYPGRYEQYF

SEQ ID NO: 637267 - protein, 14 aa, Homo sapiens
  CDR3 for alpha chain variable domain of TCR clone 318634 (TRAV1-2, TRAJ29)
CAVRELTSAPPLVF

SEQ ID NO: 637268 - protein, 15 aa, Homo sapiens
  CDR3 for beta chain variable domain of TCR clone 318634 (TRBV20-1, TRBJ2-7)
CSARDRVSGMDEQYF

SEQ ID NO: 637269 - protein, 10 aa, Homo sapiens
  CDR3 for alpha chain variable domain of TCR clone 318635 (TRAV36/DV7, TRAJ48)
CAVGNEKLTF

SEQ ID NO: 637270 - protein, 14 aa, Homo sapiens
  CDR3 for beta chain variable domain of TCR clone 318635 (TRBV19, TRBJ2-6)
CASTIGSGANVLTF

SEQ ID NO: 637271 - protein, 11 aa, Homo sapiens
  CDR3 for alpha chain variable domain of TCR clone 318636 (TRAV17, TRAJ31)
CATSNNARLMF

SEQ ID NO: 637272 - protein, 12 aa, Homo sapiens
  CDR3 for beta chain variable domain of TCR clone 318636 (TRBV7-2, TRBJ2-5)
CASSQYQETQYF

SEQ ID NO: 637273 - protein, 13 aa, Homo sapiens
  CDR3 for alpha chain variable domain of TCR clone 318637 (TRAV20, TRAJ48)
CAVQGVGNEKFTF

SEQ ID NO: 637274 - protein, 14 aa, Homo sapiens
  CDR3 for beta chain variable domain of TCR clone 318637 (TRBV27, TRBJ2-7)
CASSFRDGPYEQYF

SEQ ID NO: 637275 - protein, 14 aa, Homo sapiens
  CDR3 for alpha chain variable domain of TCR clone 318638 (TRAV17, TRAJ10)
CATTITGGGNKLTF

SEQ ID NO: 637276 - protein, 13 aa, Homo sapiens
  CDR3 for beta chain variable domain of TCR clone 318638 (TRBV7-9, TRBJ1-2)
CASSLKQNYGYTF

SEQ ID NO: 637277 - protein, 11 aa, Homo sapiens
  CDR3 for alpha chain variable domain of TCR clone 318639 (TRAV17, TRAJ9)
CGFTGGFKTIF

SEQ ID NO: 637278 - protein, 14 aa, Homo sapiens
  CDR3 for beta chain variable domain of TCR clone 318639 (TRBV7-9, TRBJ2-2)
CASSLVQDTGELYF

SEQ ID NO: 637279 - protein, 17 aa, Homo sapiens
  CDR3 for alpha chain variable domain of TCR clone 318640 (TRAV12-2, TRAJ6)
CAPQGPPRAGGSYRPNF

SEQ ID NO: 637280 - protein, 16 aa, Homo sapiens
  CDR3 for beta chain variable domain of TCR clone 318640 (TRBV19, TRBJ2-2)
CASSTARASNTGELFF

SEQ ID NO: 637281 - protein, 13 aa, Homo sapiens
  CDR3 for alpha chain variable domain of TCR clone 318641 (TRAV17, TRAJ9)
CATDYTGGFKTIF

SEQ ID NO: 637282 - protein, 15 aa, Homo sapiens
  CDR3 for beta chain variable domain of TCR clone 318641 (TRBV7-9, TRBJ2-7)
CASSPGGGLTYEQYF

SEQ ID NO: 637283 - protein, 14 aa, Homo sapiens
  CDR3 for alpha chain variable domain of TCR clone 318642 (TRAV17, TRAJ57)
CATDASGGSEKLVF

SEQ ID NO: 637284 - protein, 14 aa, Homo sapiens
  CDR3 for beta chain variable domain of TCR clone 318642 (TRBV4-2, TRBJ2-7)
CASGLVRAYNEQFF

SEQ ID NO: 637285 - protein, 12 aa, Homo sapiens
  CDR3 for alpha chain variable domain of TCR clone 318643 (TRAV26-1, TRAJ35)
CIGLSFGNVLHC

SEQ ID NO: 637286 - protein, 14 aa, Homo sapiens
  CDR3 for beta chain variable domain of TCR clone 318643 (TRBV7-2, TRBJ2-1)
CASSRGGARNEQFF

SEQ ID NO: 637287 - protein, 21 aa, Homo sapiens
  CDR3 for alpha chain variable domain of TCR clone 318644 (TRAV8-3, TRAJ6)
CAVGGEEATYLHLEEDPALLF

SEQ ID NO: 637288 - protein, 14 aa, Homo sapiens
  CDR3 for beta chain variable domain of TCR clone 318644 (TRBV5-1, TRBJ2-7)
CASSRGESLYEQYF

SEQ ID NO: 637289 - protein, 14 aa, Homo sapiens
  CDR3 for alpha chain variable domain of TCR clone 318645 (TRAV12-3, TRAJ42)
CAMNYGGRYGNLIF

SEQ ID NO: 637290 - protein, 15 aa, Homo sapiens
  CDR3 for beta chain variable domain of TCR clone 318645 (TRBV5-7, TRBJ1-5)
CASSYGKLWDQPQHF

SEQ ID NO: 637291 - protein, 13 aa, Homo sapiens
  CDR3 for alpha chain variable domain of TCR clone 318646 (TRAV21, TRAJ27)
CAALNTNAGKSTF

SEQ ID NO: 637292 - protein, 15 aa, Homo sapiens
  CDR3 for beta chain variable domain of TCR clone 318646 (TRBV2, TRBJ2-2)
CASSRETVGTGELFF

SEQ ID NO: 637293 - protein, 13 aa, Homo sapiens
  CDR3 for alpha chain variable domain of TCR clone 318647 (TRAV27, TRAJ56)
CAGKPGANSKLTF

SEQ ID NO: 637294 - protein, 15 aa, Homo sapiens
  CDR3 for beta chain variable domain of TCR clone 318647 (TRBV7-2, TRBJ1-2)
CASSPRAGWNYGYTF

SEQ ID NO: 637295 - protein, 15 aa, Homo sapiens
  CDR3 for alpha chain variable domain of TCR clone 318648 (TRAV3, TRAJ42)
CAVRGGAGSQGNLIF

SEQ ID NO: 637296 - protein, 14 aa, Homo sapiens
  CDR3 for beta chain variable domain of TCR clone 318648 (TRBV25-1, TRBJ1-1)
CASTHLGGNTEAFF

SEQ ID NO: 637297 - protein, 15 aa, Homo sapiens
  CDR3 for alpha chain variable domain of TCR clone 318649 (TRAV8-6, TRAJ44)
CAVRLIYRHCQYTHI

SEQ ID NO: 637298 - protein, 13 aa, Homo sapiens
  CDR3 for beta chain variable domain of TCR clone 318649 (TRBV27, TRBJ2-7)
CASSFSQGYEQYF

SEQ ID NO: 637299 - protein, 15 aa, Homo sapiens
  CDR3 for alpha chain variable domain of TCR clone 318650 (TRAV12-1, TRAJ41)
CVVNSRTGSGYALTF

SEQ ID NO: 637300 - protein, 11 aa, Homo sapiens
  CDR3 for beta chain variable domain of TCR clone 318650 (TRBV6-4, TRBJ2-1)
CASSDSYAQFF

SEQ ID NO: 637301 - protein, 15 aa, Homo sapiens
  CDR3 for alpha chain variable domain of TCR clone 318651 (TRAV23/DV6, TRAJ28)
CAALLAYSGAGIYQL

SEQ ID NO: 637302 - protein, 13 aa, Homo sapiens
  CDR3 for beta chain variable domain of TCR clone 318651 (TRBV4-2, TRBJ2-3)
CASSQGNTDTQYF

SEQ ID NO: 637303 - protein, 12 aa, Homo sapiens
  CDR3 for alpha chain variable domain of TCR clone 318652 (TRAV3, TRAJ43)
CAVRDPNNDMRF

SEQ ID NO: 637304 - protein, 13 aa, Homo sapiens
  CDR3 for beta chain variable domain of TCR clone 318652 (TRBV2, TRBJ1-1)
CASNLLRNTEAFF

SEQ ID NO: 637305 - protein, 12 aa, Homo sapiens
  CDR3 for alpha chain variable domain of TCR clone 318653 (TRAV12-1, TRAJ40)
CVVYSGTYKYIF

SEQ ID NO: 637306 - protein, 17 aa, Homo sapiens
  CDR3 for beta chain variable domain of TCR clone 318653 (TRBV24-1, TRBJ1-2)
CATSDPRQGVLSGGYTF

SEQ ID NO: 637307 - protein, 22 aa, Homo sapiens
  CDR3 for alpha chain variable domain of TCR clone 318654 (TRAV4, )
CLVGPHNYDIQHPDPAVYQLRD

SEQ ID NO: 637308 - protein, 17 aa, Homo sapiens
  CDR3 for beta chain variable domain of TCR clone 318654 (TRBV24-1, TRBJ2-1)
CATSDVSTSGTYNEQFF

SEQ ID NO: 637309 - protein, 16 aa, Homo sapiens
  CDR3 for alpha chain variable domain of TCR clone 318655 (TRAV35, TRAJ42)
GRLERYYGGSQGNPIF

SEQ ID NO: 637310 - protein, 15 aa, Homo sapiens
  CDR3 for beta chain variable domain of TCR clone 318655 (TRBV6-1, TRBJ2-7)
CASSDWDKPNYEQYF

SEQ ID NO: 637311 - protein, 10 aa, Homo sapiens
  CDR3 for alpha chain variable domain of TCR clone 318656 (TRAV4, TRAJ15)
CLPFWTALIF

SEQ ID NO: 637312 - protein, 15 aa, Homo sapiens
  CDR3 for beta chain variable domain of TCR clone 318656 (TRBV5-1, TRBJ2-1)
CASSFSGTCYNEQFF

SEQ ID NO: 637313 - protein, 14 aa, Homo sapiens
  CDR3 for alpha chain variable domain of TCR clone 318657 (TRAV29/DV5, TRAJ48)
CAAMALFGNEQLTF

SEQ ID NO: 637314 - protein, 15 aa, Homo sapiens
  CDR3 for beta chain variable domain of TCR clone 318657 (TRBV7-2, TRBJ2-1)
CASTHGTGIYNEQFF

SEQ ID NO: 637315 - protein, 13 aa, Homo sapiens
  CDR3 for alpha chain variable domain of TCR clone 318658 (TRAV13-1, TRAJ39)
CAASIWEGDMLTF

SEQ ID NO: 637316 - protein, 15 aa, Homo sapiens
  CDR3 for beta chain variable domain of TCR clone 318658 (TRBV7-9, TRBJ1-1)
CASSLLEQGGTEAFF

SEQ ID NO: 637317 - protein, 11 aa, Homo sapiens
  CDR3 for alpha chain variable domain of TCR clone 318659 (TRAV16, TRAJ31)
CALFKNARLMF

SEQ ID NO: 637318 - protein, 15 aa, Homo sapiens
  CDR3 for beta chain variable domain of TCR clone 318659 (TRBV18, TRBJ1-1)
CASSPRQGENTEAFF

SEQ ID NO: 637319 - protein, 12 aa, Homo sapiens
  CDR3 for alpha chain variable domain of TCR clone 318660 (TRAV12-3, TRAJ17)
CAMTLTGNKLTF

SEQ ID NO: 637320 - protein, 14 aa, Homo sapiens
  CDR3 for beta chain variable domain of TCR clone 318660 (TRBV7-2, TRBJ2-7)
CASSPKTSLYEQYF

SEQ ID NO: 637321 - protein, 12 aa, Homo sapiens
  CDR3 for alpha chain variable domain of TCR clone 318661 (TRAV13-1, TRAJ21)
CAAFFTFNKFYF

SEQ ID NO: 637322 - protein, 14 aa, Homo sapiens
  CDR3 for beta chain variable domain of TCR clone 318661 (TRBV4-1, TRBJ2-7)
CASRLTSGSYEQYF

SEQ ID NO: 637323 - protein, 17 aa, Homo sapiens
  CDR3 for alpha chain variable domain of TCR clone 318662 (TRAV3, TRAJ6)
CAVRDCPRAGGSYIPTF

SEQ ID NO: 637324 - protein, 13 aa, Homo sapiens
  CDR3 for beta chain variable domain of TCR clone 318662 (TRBV27, TRBJ2-1)
CASRTLGVGEQFF

SEQ ID NO: 637325 - protein, 16 aa, Homo sapiens
  CDR3 for alpha chain variable domain of TCR clone 318663 (TRAV30, TRAJ26)
CGTESVGDNYIQNFVF

SEQ ID NO: 637326 - protein, 13 aa, Homo sapiens
  CDR3 for beta chain variable domain of TCR clone 318663 (TRBV19, TRBJ1-2)
CASSISEDYGYTF

SEQ ID NO: 637327 - protein, 10 aa, Homo sapiens
  CDR3 for alpha chain variable domain of TCR clone 318664 (TRAV30, TRAJ48)
CGIGNEKLTF

SEQ ID NO: 637328 - protein, 15 aa, Homo sapiens
  CDR3 for beta chain variable domain of TCR clone 318664 (TRBV28, TRBJ2-5)
WASSPPWSYQETQYF

SEQ ID NO: 637329 - protein, 13 aa, Homo sapiens
  CDR3 for alpha chain variable domain of TCR clone 318665 (TRAV3, TRAJ20)
CAVRSLNDYKLSF

SEQ ID NO: 637330 - protein, 13 aa, Homo sapiens
  CDR3 for beta chain variable domain of TCR clone 318665 (TRBV7-3, TRBJ1-1)
CASSQDGGAEAFF

SEQ ID NO: 637331 - protein, 15 aa, Homo sapiens
  CDR3 for alpha chain variable domain of TCR clone 318666 (TRAV13-2, TRAJ5)
CAENPHWTGRRALTF

SEQ ID NO: 637332 - protein, 13 aa, Homo sapiens
  CDR3 for beta chain variable domain of TCR clone 318666 (TRBV6-6, TRBJ2-1)
CASSLHQGDEQFF

SEQ ID NO: 637333 - protein, 15 aa, Homo sapiens
  CDR3 for alpha chain variable domain of TCR clone 318667 (TRAV3, TRAJ20)
CAVRDIKLSDYKLSF

SEQ ID NO: 637334 - protein, 13 aa, Homo sapiens
  CDR3 for beta chain variable domain of TCR clone 318667 (TRBV20-1, TRBJ1-1)
CSARGGANTEAFF

SEQ ID NO: 637335 - protein, 17 aa, Homo sapiens
  CDR3 for alpha chain variable domain of TCR clone 318668 (TRAV3, TRAJ6)
CSVRDGPRAGGSYIPHF

SEQ ID NO: 637336 - protein, 14 aa, Homo sapiens
  CDR3 for beta chain variable domain of TCR clone 318668 (TRBV7-2, TRBJ2-7)
CASSPKTSFYEQYF

SEQ ID NO: 637337 - protein, 10 aa, Homo sapiens
  CDR3 for alpha chain variable domain of TCR clone 318669 (TRAV21, TRAJ31)
CAVDNARLMF

SEQ ID NO: 637338 - protein, 14 aa, Homo sapiens
  CDR3 for beta chain variable domain of TCR clone 318669 (TRBV19, TRBJ1-5)
CASSLGTGGQPQHF

SEQ ID NO: 637339 - protein, 14 aa, Homo sapiens
  CDR3 for alpha chain variable domain of TCR clone 318670 (TRAV38-1, TRAJ29)
CAFITPSGNTPLVF

SEQ ID NO: 637340 - protein, 14 aa, Homo sapiens
  CDR3 for beta chain variable domain of TCR clone 318670 (TRBV18, TRBJ2-7)
CVSSPRGGAYEQYF

SEQ ID NO: 637341 - protein, 15 aa, Homo sapiens
  CDR3 for alpha chain variable domain of TCR clone 318671 (TRAV38-2/DV8, TRAJ57)
CASARAQGGSEKLVF

SEQ ID NO: 637342 - protein, 17 aa, Homo sapiens
  CDR3 for beta chain variable domain of TCR clone 318671 (TRBV18, TRBJ1-5)
CASSPTMGQGTNQPKHF

SEQ ID NO: 637343 - protein, 12 aa, Homo sapiens
  CDR3 for alpha chain variable domain of TCR clone 318672 (TRAV4, TRAJ26)
CLVGDYGQNFFF

SEQ ID NO: 637344 - protein, 15 aa, Homo sapiens
  CDR3 for beta chain variable domain of TCR clone 318672 (TRBV27, TRBJ2-1)
CASSNGGGSSNEQFF

SEQ ID NO: 637345 - protein, 16 aa, Homo sapiens
  CDR3 for alpha chain variable domain of TCR clone 318673 (TRAV16, TRAJ4)
CALSRMFSGGYNKLIF

SEQ ID NO: 637346 - protein, 20 aa, Homo sapiens
  CDR3 for beta chain variable domain of TCR clone 318673 (TRBV7-8, TRBJ2-1)
CASSLAHRLAGVRSYNEQFF

SEQ ID NO: 637347 - protein, 13 aa, Homo sapiens
  CDR3 for alpha chain variable domain of TCR clone 318674 (TRAV2, TRAJ40)
CAVVTSGSYKYIF

SEQ ID NO: 637348 - protein, 13 aa, Homo sapiens
  CDR3 for beta chain variable domain of TCR clone 318674 (TRBV7-9, TRBJ2-5)
CASLPSGRETQYF

SEQ ID NO: 637349 - protein, 12 aa, Homo sapiens
  CDR3 for alpha chain variable domain of TCR clone 318675 (TRAV30, TRAJ20)
CGTESNDYKLSF

SEQ ID NO: 637350 - protein, 15 aa, Homo sapiens
  CDR3 for beta chain variable domain of TCR clone 318675 (TRBV20-1, TRBJ2-7)
CSARDRVSGMDEQYF

SEQ ID NO: 637351 - protein, 14 aa, Homo sapiens
  CDR3 for alpha chain variable domain of TCR clone 318676 (TRAV1-2, TRAJ16)
CAVNRFSDGQKLLS

SEQ ID NO: 637352 - protein, 12 aa, Homo sapiens
  CDR3 for beta chain variable domain of TCR clone 318676 (TRBV11-2, TRBJ2-2)
CASSLGGGELFF

SEQ ID NO: 637353 - protein, 12 aa, Homo sapiens
  CDR3 for alpha chain variable domain of TCR clone 318677 (TRAV23/DV6, TRAJ36)
CAASNEANNLFF

SEQ ID NO: 637354 - protein, 14 aa, Homo sapiens
  CDR3 for beta chain variable domain of TCR clone 318677 (TRBV19, TRBJ2-1)
CASPTFVLSGEQFF

SEQ ID NO: 637355 - protein, 17 aa, Homo sapiens
  CDR3 for alpha chain variable domain of TCR clone 318678 (TRAV23/DV6, TRAJ57)
CAASPTLSQGGSEKLVF

SEQ ID NO: 637356 - protein, 14 aa, Homo sapiens
  CDR3 for beta chain variable domain of TCR clone 318678 (TRBV25-1, TRBJ1-1)
CASTHPGGNTEAFF

SEQ ID NO: 637357 - protein, 10 aa, Homo sapiens
  CDR3 for alpha chain variable domain of TCR clone 318679 (TRAV2, TRAJ21)
CAVDFTTSTN

SEQ ID NO: 637358 - protein, 12 aa, Homo sapiens
  CDR3 for beta chain variable domain of TCR clone 318679 (TRBV7-3, TRBJ2-1)
CASSFQSGPQFF

SEQ ID NO: 637359 - protein, 15 aa, Homo sapiens
  CDR3 for alpha chain variable domain of TCR clone 318680 (TRAV21, TRAJ10)
CAVRGLTGGGNKLTF

SEQ ID NO: 637360 - protein, 14 aa, Homo sapiens
  CDR3 for beta chain variable domain of TCR clone 318680 (TRBV7-2, TRBJ2-7)
CASSPKTSFYEQYF

SEQ ID NO: 637361 - protein, 16 aa, Homo sapiens
  CDR3 for alpha chain variable domain of TCR clone 318681 (TRAV3, TRAJ37)
CAVRGKGSGNTGKLIF

SEQ ID NO: 637362 - protein, 14 aa, Homo sapiens
  CDR3 for beta chain variable domain of TCR clone 318681 (TRBV11-2, TRBJ2-5)
CASSRTGGIETQYF

SEQ ID NO: 637363 - protein, 18 aa, Homo sapiens
  CDR3 for alpha chain variable domain of TCR clone 318682 (TRAV12-3, TRAJ52)
YAMSRTNAGGTSYGKLTF

SEQ ID NO: 637364 - protein, 17 aa, Homo sapiens
  CDR3 for beta chain variable domain of TCR clone 318682 (TRBV7-3, TRBJ2-3)
CASSLMKRMRGADTQHF

SEQ ID NO: 637365 - protein, 15 aa, Homo sapiens
  CDR3 for alpha chain variable domain of TCR clone 318683 (TRAV1-2, TRAJ38)
CVVSENAGNNRKLIW

SEQ ID NO: 637366 - protein, 16 aa, Homo sapiens
  CDR3 for beta chain variable domain of TCR clone 318683 (TRBV4-1, TRBJ2-7)
CASSLTAGQATYEQYF

SEQ ID NO: 637367 - protein, 11 aa, Homo sapiens
  CDR3 for alpha chain variable domain of TCR clone 318684 (TRAV35, TRAJ30)
CAPGGDDKIIF

SEQ ID NO: 637368 - protein, 14 aa, Homo sapiens
  CDR3 for beta chain variable domain of TCR clone 318684 (TRBV7-6, TRBJ2-1)
CASSLGGGTDEQFF

SEQ ID NO: 637369 - protein, 13 aa, Homo sapiens
  CDR3 for alpha chain variable domain of TCR clone 318685 (TRAV1-2, TRAJ9)
CAALNTGGFKTIF

SEQ ID NO: 637370 - protein, 13 aa, Homo sapiens
  CDR3 for beta chain variable domain of TCR clone 318685 (TRBV7-3, TRBJ2-1)
CASSLDSYNEQFF

SEQ ID NO: 637371 - protein, 13 aa, Homo sapiens
  CDR3 for alpha chain variable domain of TCR clone 318686 (TRAV29/DV5, TRAJ31)
CAASRNNNARLMF

SEQ ID NO: 637372 - protein, 12 aa, Homo sapiens
  CDR3 for beta chain variable domain of TCR clone 318686 (TRBV11-2, TRBJ2-1)
CASSPGNNGQFF

SEQ ID NO: 637373 - protein, 14 aa, Homo sapiens
  CDR3 for alpha chain variable domain of TCR clone 318687 (TRAV1-2, TRAJ16)
CAVKRFSDGQKLLF

SEQ ID NO: 637374 - protein, 16 aa, Homo sapiens
  CDR3 for beta chain variable domain of TCR clone 318687 (TRBV19, TRBJ2-1)
CASSEILAGDGNEQFF

SEQ ID NO: 637375 - protein, 14 aa, Homo sapiens
  CDR3 for alpha chain variable domain of TCR clone 318688 (TRAV8-3, TRAJ21)
CAVDARDNFSKFYF

SEQ ID NO: 637376 - protein, 16 aa, Homo sapiens
  CDR3 for beta chain variable domain of TCR clone 318688 (TRBV20-1, TRBJ2-1)
CSARDLAGHSYNEQFF

SEQ ID NO: 637377 - protein, 15 aa, Homo sapiens
  CDR3 for alpha chain variable domain of TCR clone 318689 (TRAV16, TRAJ10)
CALEGLTGGGNKLTF

SEQ ID NO: 637378 - protein, 16 aa, Homo sapiens
  CDR3 for beta chain variable domain of TCR clone 318689 (TRBV5-7, TRBJ1-1)
CASSLVGPRGNTEAFS

SEQ ID NO: 637379 - protein, 14 aa, Homo sapiens
  CDR3 for alpha chain variable domain of TCR clone 318690 (TRAV12-3, TRAJ10)
SHLPLTGGGNKLTF

SEQ ID NO: 637380 - protein, 12 aa, Homo sapiens
  CDR3 for beta chain variable domain of TCR clone 318690 (TRBV6-6, TRBJ2-3)
CASSSRGDTQYC

SEQ ID NO: 637381 - protein, 17 aa, Homo sapiens
  CDR3 for alpha chain variable domain of TCR clone 318691 (TRAV26-2, TRAJ28)
CILRPLLIVAGSYQLTF

SEQ ID NO: 637382 - protein, 16 aa, Homo sapiens
  CDR3 for beta chain variable domain of TCR clone 318691 (TRBV6-4, TRBJ1-4)
CASSGTGQDPNEKLFF

SEQ ID NO: 637383 - protein, 13 aa, Homo sapiens
  CDR3 for alpha chain variable domain of TCR clone 318692 (TRAV2, TRAJ15)
CAVASQAGTALIF

SEQ ID NO: 637384 - protein, 14 aa, Homo sapiens
  CDR3 for beta chain variable domain of TCR clone 318692 (TRBV7-3, TRBJ2-2)
CQQRDGTGNRELFF

SEQ ID NO: 637385 - protein, 15 aa, Homo sapiens
  CDR3 for alpha chain variable domain of TCR clone 318693 (TRAV1-1, TRAJ5)
CAVRHMDTGRRALPF

SEQ ID NO: 637386 - protein, 17 aa, Homo sapiens
  CDR3 for beta chain variable domain of TCR clone 318693 (TRBV28, TRBJ2-7)
CASSPGLAGGDSSEQYF

SEQ ID NO: 637387 - protein, 14 aa, Homo sapiens
  CDR3 for alpha chain variable domain of TCR clone 318694 (TRAV17, TRAJ15)
CATTTNQAGTALIF

SEQ ID NO: 637388 - protein, 14 aa, Homo sapiens
  CDR3 for beta chain variable domain of TCR clone 318694 (TRBV4-1, TRBJ2-2)
CASSQAVNTGELFF

SEQ ID NO: 637389 - protein, 14 aa, Homo sapiens
  CDR3 for alpha chain variable domain of TCR clone 318695 (TRAV9-2, TRAJ39)
CALYIYNAGNMLTF

SEQ ID NO: 637390 - protein, 12 aa, Homo sapiens
  CDR3 for beta chain variable domain of TCR clone 318695 (TRBV2, TRBJ2-7)
CASKRGSYEQYF

SEQ ID NO: 637391 - protein, 19 aa, Homo sapiens
  CDR3 for alpha chain variable domain of TCR clone 318696 (TRAV26-1, TRAJ52)
CIVRAHCNAGGTSYGKLTF

SEQ ID NO: 637392 - protein, 15 aa, Homo sapiens
  CDR3 for beta chain variable domain of TCR clone 318696 (TRBV12-4, TRBJ2-5)
CASSPPTGLQETQYF

SEQ ID NO: 637393 - protein, 19 aa, Homo sapiens
  CDR3 for alpha chain variable domain of TCR clone 318697 (TRAV2, TRAJ20)
ILQVREAAAAVYRDCKLSF

SEQ ID NO: 637394 - protein, 16 aa, Homo sapiens
  CDR3 for beta chain variable domain of TCR clone 318697 (TRBV9, TRBJ2-2)
CASSAMGKGNTGELFF

SEQ ID NO: 637395 - protein, 12 aa, Homo sapiens
  CDR3 for alpha chain variable domain of TCR clone 318698 (TRAV13-1, TRAJ49)
CAASIWGKQFYF

SEQ ID NO: 637396 - protein, 14 aa, Homo sapiens
  CDR3 for beta chain variable domain of TCR clone 318698 (TRBV12-4, TRBJ1-1)
CASSLDGLNTEAFF

SEQ ID NO: 637397 - protein, 13 aa, Homo sapiens
  CDR3 for alpha chain variable domain of TCR clone 318699 (TRAV23/DV6, TRAJ12)
CAPRVDSSSKLIF

SEQ ID NO: 637398 - protein, 12 aa, Homo sapiens
  CDR3 for beta chain variable domain of TCR clone 318699 (TRBV7-8, TRBJ2-7)
CASSLGDREQYF

SEQ ID NO: 637399 - protein, 15 aa, Homo sapiens
  CDR3 for alpha chain variable domain of TCR clone 318700 (TRAV38-1, TRAJ37)
CAFIHGSGNTGKLIF

SEQ ID NO: 637400 - protein, 13 aa, Homo sapiens
  CDR3 for beta chain variable domain of TCR clone 318700 (TRBV12-4, TRBJ2-7)
CASSPTETYEQYF

SEQ ID NO: 637401 - protein, 20 aa, Homo sapiens
  CDR3 for alpha chain variable domain of TCR clone 318701 (TRAV27, TRAJ10)
ASTSVPSRGILTGGGNKLTF

SEQ ID NO: 637402 - protein, 14 aa, Homo sapiens
  CDR3 for beta chain variable domain of TCR clone 318701 (TRBV7-2, TRBJ2-7)
CASSPKTSFYEQYF

SEQ ID NO: 637403 - protein, 15 aa, Homo sapiens
  CDR3 for alpha chain variable domain of TCR clone 318702 (TRAV34, TRAJ38)
CGADFTPGINRKLIW

SEQ ID NO: 637404 - protein, 16 aa, Homo sapiens
  CDR3 for beta chain variable domain of TCR clone 318702 (TRBV12-5, TRBJ2-5)
CASGPRTSGNQETQYF

SEQ ID NO: 637405 - protein, 14 aa, Homo sapiens
  CDR3 for alpha chain variable domain of TCR clone 318703 (TRAV1-2, TRAJ16)
CAVNRSSDGQKLLF

SEQ ID NO: 637406 - protein, 13 aa, Homo sapiens
  CDR3 for beta chain variable domain of TCR clone 318703 (TRBV12-4, TRBJ1-5)
CASRSRGNQPQHF

SEQ ID NO: 637407 - protein, 14 aa, Homo sapiens
  CDR3 for alpha chain variable domain of TCR clone 318704 (TRAV12-1, TRAJ13)
CVVIDSGGYQKVNF

SEQ ID NO: 637408 - protein, 12 aa, Homo sapiens
  CDR3 for beta chain variable domain of TCR clone 318704 (TRBV29-1, TRBJ2-3)
CSVTGGADTQYF

SEQ ID NO: 637409 - protein, 13 aa, Homo sapiens
  CDR3 for alpha chain variable domain of TCR clone 318705 (TRAV17, TRAJ54)
CATGIQGAQKLVF

SEQ ID NO: 637410 - protein, 14 aa, Homo sapiens
  CDR3 for beta chain variable domain of TCR clone 318705 (TRBV11-2, TRBJ1-2)
CASSLGTANYGYTF

SEQ ID NO: 637411 - protein, 16 aa, Homo sapiens
  CDR3 for alpha chain variable domain of TCR clone 318706 (TRAV3, TRAJ18)
CAGRDGRGSTLGRIYF

SEQ ID NO: 637412 - protein, 15 aa, Homo sapiens
  CDR3 for beta chain variable domain of TCR clone 318706 (TRBV7-9, TRBJ1-6)
CASSSPGRGNSPLHF

SEQ ID NO: 637413 - protein, 15 aa, Homo sapiens
  CDR3 for alpha chain variable domain of TCR clone 318707 (TRAV17, TRAJ10)
CATVLLTGGGNKLTF

SEQ ID NO: 637414 - protein, 14 aa, Homo sapiens
  CDR3 for beta chain variable domain of TCR clone 318707 (TRBV4-2, TRBJ2-1)
CASGLDRAYNEQFF

SEQ ID NO: 637415 - protein, 13 aa, Homo sapiens
  CDR3 for alpha chain variable domain of TCR clone 318708 (TRAV1-2, TRAJ12)
CAVSMDSSYKLIF

SEQ ID NO: 637416 - protein, 14 aa, Homo sapiens
  CDR3 for beta chain variable domain of TCR clone 318708 (TRBV7-2, TRBJ1-2)
CASSQTGSTYGYTF

SEQ ID NO: 637417 - protein, 14 aa, Homo sapiens
  CDR3 for alpha chain variable domain of TCR clone 318709 (TRAV1-1, TRAJ27)
CAVIYNTNAGKSTF

SEQ ID NO: 637418 - protein, 18 aa, Homo sapiens
  CDR3 for beta chain variable domain of TCR clone 318709 (TRBV18, TRBJ1-3)
CASSPRGGAGPSGNTIYF

SEQ ID NO: 637419 - protein, 23 aa, Homo sapiens
  CDR3 for alpha chain variable domain of TCR clone 318710 (TRAV13-1, )
CAASTRRAQIPDIQNPDPAVYQL

SEQ ID NO: 637420 - protein, 15 aa, Homo sapiens
  CDR3 for beta chain variable domain of TCR clone 318710 (TRBV28, TRBJ1-3)
CASSMGWASGNTIYF

SEQ ID NO: 637421 - protein, 13 aa, Homo sapiens
  CDR3 for alpha chain variable domain of TCR clone 318711 (TRAV17, TRAJ33)
CATDADSNYQLIG

SEQ ID NO: 637422 - protein, 17 aa, Homo sapiens
  CDR3 for beta chain variable domain of TCR clone 318711 (TRBV20-1, TRBJ2-3)
CSAVSPGLAGGQDTQYF

SEQ ID NO: 637423 - protein, 16 aa, Homo sapiens
  CDR3 for alpha chain variable domain of TCR clone 318712 (TRAV30, TRAJ24)
CGTEIVDADSLGKFKF

SEQ ID NO: 637424 - protein, 14 aa, Homo sapiens
  CDR3 for beta chain variable domain of TCR clone 318712 (TRBV12-5, TRBJ2-5)
CASGSRTHQETQYF

SEQ ID NO: 637425 - protein, 17 aa, Homo sapiens
  CDR3 for alpha chain variable domain of TCR clone 318713 (TRAV3, TRAJ42)
CAVRDRDYGGSQGNLIF

SEQ ID NO: 637426 - protein, 13 aa, Homo sapiens
  CDR3 for beta chain variable domain of TCR clone 318713 (TRBV10-3, TRBJ2-7)
CASKLAVNYEQYY

SEQ ID NO: 637427 - protein, 14 aa, Homo sapiens
  CDR3 for alpha chain variable domain of TCR clone 318714 (TRAV12-2, TRAJ5)
CAVNRSTGRRALTF

SEQ ID NO: 637428 - protein, 16 aa, Homo sapiens
  CDR3 for beta chain variable domain of TCR clone 318714 (TRBV19, TRBJ2-2)
CASRSPGTGATGELFF

SEQ ID NO: 637429 - protein, 16 aa, Homo sapiens
  CDR3 for alpha chain variable domain of TCR clone 318715 (TRAV3, TRAJ37)
CAVRVRGSGNTGKLSF

SEQ ID NO: 637430 - protein, 15 aa, Homo sapiens
  CDR3 for beta chain variable domain of TCR clone 318715 (TRBV9, TRBJ1-6)
CASSVAGTGDSPLHF

SEQ ID NO: 637431 - protein, 13 aa, Homo sapiens
  CDR3 for alpha chain variable domain of TCR clone 318716 (TRAV27, TRAJ3)
ASLRGSSASKIIF

SEQ ID NO: 637432 - protein, 15 aa, Homo sapiens
  CDR3 for beta chain variable domain of TCR clone 318716 (TRBV28, TRBJ1-3)
CASRMGWASGNTIYF

SEQ ID NO: 637433 - protein, 14 aa, Homo sapiens
  CDR3 for alpha chain variable domain of TCR clone 318717 (TRAV36/DV7, TRAJ40)
CAVETTSGTYKYIF

SEQ ID NO: 637434 - protein, 15 aa, Homo sapiens
  CDR3 for beta chain variable domain of TCR clone 318717 (TRBV11-3, TRBJ2-3)
CASLKDGREGDTQYF

SEQ ID NO: 637435 - protein, 14 aa, Homo sapiens
  CDR3 for alpha chain variable domain of TCR clone 318718 (TRAV3, TRAJ7)
CAVREEEREQQTRF

SEQ ID NO: 637436 - protein, 12 aa, Homo sapiens
  CDR3 for beta chain variable domain of TCR clone 318718 (TRBV7-8, TRBJ2-7)
CASSRGDREQYF

SEQ ID NO: 637437 - protein, 11 aa, Homo sapiens
  CDR3 for alpha chain variable domain of TCR clone 318719 (TRAV17, TRAJ9)
CATTGGFKTIF

SEQ ID NO: 637438 - protein, 13 aa, Homo sapiens
  CDR3 for beta chain variable domain of TCR clone 318719 (TRBV7-9, TRBJ2-2)
CASSLDPTGELFF

SEQ ID NO: 637439 - protein, 15 aa, Homo sapiens
  CDR3 for alpha chain variable domain of TCR clone 318720 (TRAV4, TRAJ39)
CLVGTNNNAGNMLTF

SEQ ID NO: 637440 - protein, 13 aa, Homo sapiens
  CDR3 for beta chain variable domain of TCR clone 318720 (TRBV11-3, TRBJ2-5)
CASSSTGEETQYF

SEQ ID NO: 637441 - protein, 13 aa, Homo sapiens
  CDR3 for alpha chain variable domain of TCR clone 318721 (TRAV17, TRAJ39)
CAISTNAGNMLTF

SEQ ID NO: 637442 - protein, 13 aa, Homo sapiens
  CDR3 for beta chain variable domain of TCR clone 318721 (TRBV7-9, TRBJ1-2)
CASSLKQNYGYTF

SEQ ID NO: 637443 - protein, 15 aa, Homo sapiens
  CDR3 for alpha chain variable domain of TCR clone 318722 (TRAV13-1, TRAJ44)
CAASRGGGTASKLTF

SEQ ID NO: 637444 - protein, 15 aa, Homo sapiens
  CDR3 for beta chain variable domain of TCR clone 318722 (TRBV6-5, TRBJ2-1)
CASSYDAGAGNEQFF

SEQ ID NO: 637445 - protein, 13 aa, Homo sapiens
  CDR3 for alpha chain variable domain of TCR clone 318723 (TRAV12-3, TRAJ54)
CAMTLQGAQKLVF

SEQ ID NO: 637446 - protein, 14 aa, Homo sapiens
  CDR3 for beta chain variable domain of TCR clone 318723 (TRBV4-1, TRBJ2-2)
CASSQAVSTGELFF

SEQ ID NO: 637447 - protein, 16 aa, Homo sapiens
  CDR3 for alpha chain variable domain of TCR clone 318724 (TRAV12-3, TRAJ53)
CAMSPGSGGSNYKLTF

SEQ ID NO: 637448 - protein, 16 aa, Homo sapiens
  CDR3 for beta chain variable domain of TCR clone 318724 (TRBV5-1, TRBJ2-7)
CASSWGTGGRAWEQYF

SEQ ID NO: 637449 - protein, 14 aa, Homo sapiens
  CDR3 for alpha chain variable domain of TCR clone 318725 (TRAV12-2, TRAJ13)
CAGKKTGGYPKVTF

SEQ ID NO: 637450 - protein, 15 aa, Homo sapiens
  CDR3 for beta chain variable domain of TCR clone 318725 (TRBV27, TRBJ2-1)
CASSNGGGSSNEQFF

SEQ ID NO: 637451 - protein, 16 aa, Homo sapiens
  CDR3 for alpha chain variable domain of TCR clone 318726 (TRAV6, TRAJ37)
CAPDIFGSSNTGKLII

SEQ ID NO: 637452 - protein, 14 aa, Homo sapiens
  CDR3 for beta chain variable domain of TCR clone 318726 (TRBV5-7, TRBJ2-7)
CASSLRSATYEQYF

SEQ ID NO: 637453 - protein, 13 aa, Homo sapiens
  CDR3 for alpha chain variable domain of TCR clone 318727 (TRAV1-1, TRAJ23)
CAVVANQGGKLIF

SEQ ID NO: 637454 - protein, 16 aa, Homo sapiens
  CDR3 for beta chain variable domain of TCR clone 318727 (TRBV5-5, TRBJ1-2)
CASSPAWGRGLYGYTF

SEQ ID NO: 637455 - protein, 14 aa, Homo sapiens
  CDR3 for alpha chain variable domain of TCR clone 318728 (TRAV6, TRAJ10)
CALDFTGGGNKLTF

SEQ ID NO: 637456 - protein, 14 aa, Homo sapiens
  CDR3 for beta chain variable domain of TCR clone 318728 (TRBV27, TRBJ1-1)
CASSLLSGLSEAFF

SEQ ID NO: 637457 - protein, 13 aa, Homo sapiens
  CDR3 for alpha chain variable domain of TCR clone 318729 (TRAV21, TRAJ27)
CAARPGNAGKSTF

SEQ ID NO: 637458 - protein, 13 aa, Homo sapiens
  CDR3 for beta chain variable domain of TCR clone 318729 (TRBV19, TRBJ2-7)
CASSTTGNYEQYF

SEQ ID NO: 637459 - protein, 12 aa, Homo sapiens
  CDR3 for alpha chain variable domain of TCR clone 318730 (TRAV27, )
CAGALKLATTIS

SEQ ID NO: 637460 - protein, 12 aa, Homo sapiens
  CDR3 for beta chain variable domain of TCR clone 318730 (TRBV11-2, TRBJ2-2)
CASSLGGGELFF

SEQ ID NO: 637461 - protein, 15 aa, Homo sapiens
  CDR3 for alpha chain variable domain of TCR clone 318731 (TRAV3, TRAJ22)
CAVRDRGGSARQLTF

SEQ ID NO: 637462 - protein, 13 aa, Homo sapiens
  CDR3 for beta chain variable domain of TCR clone 318731 (TRBV4-2, TRBJ2-1)
CASSPGTYNEQFF

SEQ ID NO: 637463 - protein, 21 aa, Homo sapiens
  CDR3 for alpha chain variable domain of TCR clone 318732 (TRAV16, TRAJ22)
HLKKPFAQGEDSAMYLRQLTF

SEQ ID NO: 637464 - protein, 17 aa, Homo sapiens
  CDR3 for beta chain variable domain of TCR clone 318732 (TRBV19, TRBJ2-7)
CASSISFYDSYPYEQYF

SEQ ID NO: 637465 - protein, 16 aa, Homo sapiens
  CDR3 for alpha chain variable domain of TCR clone 318733 (TRAV13-2, TRAJ53)
CAENANSGGSNYKLTF

SEQ ID NO: 637466 - protein, 16 aa, Homo sapiens
  CDR3 for beta chain variable domain of TCR clone 318733 (TRBV19, TRBJ2-2)
CASRSPGTGATGELFF

SEQ ID NO: 637467 - protein, 14 aa, Homo sapiens
  CDR3 for alpha chain variable domain of TCR clone 318734 (TRAV12-3, TRAJ10)
SHLPLTGGGNKLTF

SEQ ID NO: 637468 - protein, 16 aa, Homo sapiens
  CDR3 for beta chain variable domain of TCR clone 318734 (TRBV4-2, TRBJ2-7)
CASSQDGGSLRGEQYF

SEQ ID NO: 637469 - protein, 17 aa, Homo sapiens
  CDR3 for alpha chain variable domain of TCR clone 318735 (TRAV8-6, TRAJ8)
CAVKEGIENTGFQKLVF

SEQ ID NO: 637470 - protein, 13 aa, Homo sapiens
  CDR3 for beta chain variable domain of TCR clone 318735 (TRBV10-3, TRBJ2-5)
CAMTSGAGETQYF

SEQ ID NO: 637471 - protein, 15 aa, Homo sapiens
  CDR3 for alpha chain variable domain of TCR clone 318736 (TRAV26-2, TRAJ13)
CILRDLSGGYQKVTF

SEQ ID NO: 637472 - protein, 15 aa, Homo sapiens
  CDR3 for beta chain variable domain of TCR clone 318736 (TRBV20-1, TRBJ2-5)
CSAEGTGGLQETQYF

SEQ ID NO: 637473 - protein, 18 aa, Homo sapiens
  CDR3 for alpha chain variable domain of TCR clone 318737 (TRAV21, TRAJ52)
CAVRPSPAGGTSYGKLTF

SEQ ID NO: 637474 - protein, 14 aa, Homo sapiens
  CDR3 for beta chain variable domain of TCR clone 318737 (TRBV4-1, TRBJ2-2)
WASSQAVNTGELFF

SEQ ID NO: 637475 - protein, 13 aa, Homo sapiens
  CDR3 for alpha chain variable domain of TCR clone 318738 (TRAV2, TRAJ40)
CAVVTSGTYKYIF

SEQ ID NO: 637476 - protein, 14 aa, Homo sapiens
  CDR3 for beta chain variable domain of TCR clone 318738 (TRBV19, TRBJ2-1)
CASPTVVLSGEQFL

SEQ ID NO: 637477 - protein, 15 aa, Homo sapiens
  CDR3 for alpha chain variable domain of TCR clone 318739 (TRAV25, TRAJ23)
CALAPNYNQGGKLIF

SEQ ID NO: 637478 - protein, 14 aa, Homo sapiens
  CDR3 for beta chain variable domain of TCR clone 318739 (TRBV11-2, TRBJ1-5)
CASSLDRGRQPQHF

SEQ ID NO: 637479 - protein, 15 aa, Homo sapiens
  CDR3 for alpha chain variable domain of TCR clone 318740 (TRAV21, TRAJ52)
CAVRGGGTSYGKLTF

SEQ ID NO: 637480 - protein, 15 aa, Homo sapiens
  CDR3 for beta chain variable domain of TCR clone 318740 (TRBV12-4, TRBJ2-5)
CASSPPTGLQETHYF

SEQ ID NO: 637481 - protein, 17 aa, Homo sapiens
  CDR3 for alpha chain variable domain of TCR clone 318741 (TRAV3, TRAJ42)
CAVRDRDYGGSQGNLIY

SEQ ID NO: 637482 - protein, 20 aa, Homo sapiens
  CDR3 for beta chain variable domain of TCR clone 318741 (TRBV7-8, TRBJ2-2)
CASSHLFPGPTIHITGELFF

SEQ ID NO: 637483 - protein, 14 aa, Homo sapiens
  CDR3 for alpha chain variable domain of TCR clone 318742 (TRAV12-2, TRAJ40)
CAMKTPSGTYKYIF

SEQ ID NO: 637484 - protein, 14 aa, Homo sapiens
  CDR3 for beta chain variable domain of TCR clone 318742 (TRBV20-1, TRBJ1-1)
CSAQTRIGGTEAFF

SEQ ID NO: 637485 - protein, 16 aa, Homo sapiens
  CDR3 for alpha chain variable domain of TCR clone 318743 (TRAV12-3, TRAJ53)
CAMSPGSGGRNYKLTF

SEQ ID NO: 637486 - protein, 13 aa, Homo sapiens
  CDR3 for beta chain variable domain of TCR clone 318743 (TRBV12-5, TRBJ2-3)
CASGDRQSDTQYF

SEQ ID NO: 637487 - protein, 11 aa, Homo sapiens
  CDR3 for alpha chain variable domain of TCR clone 318744 (TRAV2, TRAJ13)
CASGGYQRVTF

SEQ ID NO: 637488 - protein, 14 aa, Homo sapiens
  CDR3 for beta chain variable domain of TCR clone 318744 (TRBV19, TRBJ2-1)
FASSKDRGQDEQFF

SEQ ID NO: 637489 - protein, 12 aa, Homo sapiens
  CDR3 for alpha chain variable domain of TCR clone 318745 (TRAV8-1, TRAJ23)
CAVGNQGGKLIF

SEQ ID NO: 637490 - protein, 16 aa, Homo sapiens
  CDR3 for beta chain variable domain of TCR clone 318745 (TRBV7-3, TRBJ2-2)
CASSLKRGTMSGELFF

SEQ ID NO: 637491 - protein, 14 aa, Homo sapiens
  CDR3 for alpha chain variable domain of TCR clone 318746 (TRAV17, TRAJ39)
CATDPVRACNMLTF

SEQ ID NO: 637492 - protein, 15 aa, Homo sapiens
  CDR3 for beta chain variable domain of TCR clone 318746 (TRBV13, TRBJ1-5)
CASSFGQGGVQPQHV

SEQ ID NO: 637493 - protein, 16 aa, Homo sapiens
  CDR3 for alpha chain variable domain of TCR clone 318747 (TRAV26-1, TRAJ37)
CIVRGDGSGNTGKLIF

SEQ ID NO: 637494 - protein, 16 aa, Homo sapiens
  CDR3 for beta chain variable domain of TCR clone 318747 (TRBV4-1, TRBJ2-7)
RSSRDPLGVRGGEQYF

SEQ ID NO: 637495 - protein, 17 aa, Homo sapiens
  CDR3 for alpha chain variable domain of TCR clone 318748 (TRAV26-1, TRAJ27)
CIVSTPWINTNAGTSTF

SEQ ID NO: 637496 - protein, 16 aa, Homo sapiens
  CDR3 for beta chain variable domain of TCR clone 318748 (TRBV7-9, TRBJ2-1)
CASSLDPGLAIDEQFF

SEQ ID NO: 637497 - protein, 14 aa, Homo sapiens
  CDR3 for alpha chain variable domain of TCR clone 318749 (TRAV12-1, TRAJ17)
CVVNPKAAGNKLPF

SEQ ID NO: 637498 - protein, 16 aa, Homo sapiens
  CDR3 for beta chain variable domain of TCR clone 318749 (TRBV20-1, TRBJ2-1)
CSASASGYSSYNEQFL

SEQ ID NO: 637499 - protein, 14 aa, Homo sapiens
  CDR3 for alpha chain variable domain of TCR clone 318750 (TRAV1-1, TRAJ28)
CAAPSGAGSYQLPF

SEQ ID NO: 637500 - protein, 15 aa, Homo sapiens
  CDR3 for beta chain variable domain of TCR clone 318750 (TRBV7-2, TRBJ1-2)
CASSLVSGGDYGYTF

SEQ ID NO: 637501 - protein, 12 aa, Homo sapiens
  CDR3 for alpha chain variable domain of TCR clone 318751 (TRAV20, TRAJ4)
CSASGGYNKRIF

SEQ ID NO: 637502 - protein, 13 aa, Homo sapiens
  CDR3 for beta chain variable domain of TCR clone 318751 (TRBV9, TRBJ2-1)
CASSPSGGNEQFF

SEQ ID NO: 637503 - protein, 14 aa, Homo sapiens
  CDR3 for alpha chain variable domain of TCR clone 318752 (TRAV23/DV6, TRAJ4)
CAAPGSGGYNKLIF

SEQ ID NO: 637504 - protein, 14 aa, Homo sapiens
  CDR3 for beta chain variable domain of TCR clone 318752 (TRBV20-1, TRBJ2-7)
CSAKTGTGGYEQYF

SEQ ID NO: 637505 - protein, 16 aa, Homo sapiens
  CDR3 for alpha chain variable domain of TCR clone 318753 (TRAV3, TRAJ23)
CAVKIGIYNQGGKLIF

SEQ ID NO: 637506 - protein, 17 aa, Homo sapiens
  CDR3 for beta chain variable domain of TCR clone 318753 (TRBV10-3, TRBJ2-6)
CAISASTAPSGANVLTF

SEQ ID NO: 637507 - protein, 13 aa, Homo sapiens
  CDR3 for alpha chain variable domain of TCR clone 318754 (TRAV21, TRAJ20)
CAVGLRVDYKLSF

SEQ ID NO: 637508 - protein, 13 aa, Homo sapiens
  CDR3 for beta chain variable domain of TCR clone 318754 (TRBV6-1, TRBJ1-1)
CASSREGNTGAFF

SEQ ID NO: 637509 - protein, 13 aa, Homo sapiens
  CDR3 for alpha chain variable domain of TCR clone 318755 (TRAV38-1, TRAJ42)
CARCGGSQGNLIF

SEQ ID NO: 637510 - protein, 14 aa, Homo sapiens
  CDR3 for beta chain variable domain of TCR clone 318755 (TRBV7-9, TRBJ1-1)
CASTPIQSYTEAFF

SEQ ID NO: 637511 - protein, 20 aa, Homo sapiens
  CDR3 for alpha chain variable domain of TCR clone 318756 (TRAV4, TRAJ29)
CCVLLPRGRHPYSGNTPLVF

SEQ ID NO: 637512 - protein, 14 aa, Homo sapiens
  CDR3 for beta chain variable domain of TCR clone 318756 (TRBV7-2, TRBJ1-1)
CASSFLTGTTEAFF

SEQ ID NO: 637513 - protein, 13 aa, Homo sapiens
  CDR3 for alpha chain variable domain of TCR clone 318757 (TRAV30, TRAJ24)
CGTVTDSWGKLQF

SEQ ID NO: 637514 - protein, 17 aa, Homo sapiens
  CDR3 for beta chain variable domain of TCR clone 318757 (TRBV25-1, TRBJ1-4)
CASSPGDSTNEKLFLAV

SEQ ID NO: 637515 - protein, 11 aa, Homo sapiens
  CDR3 for alpha chain variable domain of TCR clone 318758 (TRAV12-1, TRAJ31)
CVADNNARLMF

SEQ ID NO: 637516 - protein, 12 aa, Homo sapiens
  CDR3 for beta chain variable domain of TCR clone 318758 (TRBV11-2, TRBJ2-2)
CASSLGGGELFF

SEQ ID NO: 637517 - protein, 17 aa, Homo sapiens
  CDR3 for alpha chain variable domain of TCR clone 318759 (TRAV12-2, TRAJ52)
CAGNPYAGGTSYGKLTF

SEQ ID NO: 637518 - protein, 16 aa, Homo sapiens
  CDR3 for beta chain variable domain of TCR clone 318759 (TRBV5-5, TRBJ2-2)
CASSGRREGATGELFF

SEQ ID NO: 637519 - protein, 15 aa, Homo sapiens
  CDR3 for alpha chain variable domain of TCR clone 318760 (TRAV4, TRAJ39)
CLVGPNNNAGNMLTF

SEQ ID NO: 637520 - protein, 14 aa, Homo sapiens
  CDR3 for beta chain variable domain of TCR clone 318760 (TRBV20-1, TRBJ1-1)
CSAQTRIGGTEAFF

SEQ ID NO: 637521 - protein, 14 aa, Homo sapiens
  CDR3 for alpha chain variable domain of TCR clone 318761 (TRAV2, TRAJ37)
RAVDFTSNTGKLIF

SEQ ID NO: 637522 - protein, 15 aa, Homo sapiens
  CDR3 for beta chain variable domain of TCR clone 318761 (TRBV20-1, TRBJ1-1)
CSASRGVTGNTEAYF

SEQ ID NO: 637523 - protein, 15 aa, Homo sapiens
  CDR3 for alpha chain variable domain of TCR clone 318762 (TRAV17, TRAJ57)
CATGPSQGGSEKLVF

SEQ ID NO: 637524 - protein, 16 aa, Homo sapiens
  CDR3 for beta chain variable domain of TCR clone 318762 (TRBV12-4, TRBJ1-5)
CASSRPVGGSKQPQHC

SEQ ID NO: 637525 - protein, 15 aa, Homo sapiens
  CDR3 for alpha chain variable domain of TCR clone 318763 (TRAV17, TRAJ57)
CATQKTQGGSEKLVF

SEQ ID NO: 637526 - protein, 12 aa, Homo sapiens
  CDR3 for beta chain variable domain of TCR clone 318763 (TRBV11-2, TRBJ2-2)
CASSLGGGELFF

SEQ ID NO: 637527 - protein, 14 aa, Homo sapiens
  CDR3 for alpha chain variable domain of TCR clone 318764 (TRAV8-4, TRAJ38)
CARLNAGNNRKLIW

SEQ ID NO: 637528 - protein, 12 aa, Homo sapiens
  CDR3 for beta chain variable domain of TCR clone 318764 (TRBV6-1, TRBJ2-7)
CASGEPLYEQYF

SEQ ID NO: 637529 - protein, 13 aa, Homo sapiens
  CDR3 for alpha chain variable domain of TCR clone 318765 (TRAV13-2, TRAJ8)
CAFMNTGFQKLVF

SEQ ID NO: 637530 - protein, 15 aa, Homo sapiens
  CDR3 for beta chain variable domain of TCR clone 318765 (TRBV19, TRBJ2-3)
CAAGDTNAPNHTQYF

SEQ ID NO: 637531 - protein, 15 aa, Homo sapiens
  CDR3 for alpha chain variable domain of TCR clone 318766 (TRAV12-1, TRAJ44)
CVVDTPQGTASKLTF

SEQ ID NO: 637532 - protein, 14 aa, Homo sapiens
  CDR3 for beta chain variable domain of TCR clone 318766 (TRBV7-9, TRBJ2-1)
CASSPRDSLYEQFL

SEQ ID NO: 637533 - protein, 14 aa, Homo sapiens
  CDR3 for alpha chain variable domain of TCR clone 318767 (TRAV2, TRAJ22)
CAVGRGGSARQLTF

SEQ ID NO: 637534 - protein, 15 aa, Homo sapiens
  CDR3 for beta chain variable domain of TCR clone 318767 (TRBV7-2, TRBJ2-1)
CASSSGLAGGNEQFF

SEQ ID NO: 637535 - protein, 14 aa, Homo sapiens
  CDR3 for alpha chain variable domain of TCR clone 318768 (TRAV2, TRAJ37)
CAVDFTSNTGKLIF

SEQ ID NO: 637536 - protein, 20 aa, Homo sapiens
  CDR3 for beta chain variable domain of TCR clone 318768 (TRBV28, TRBJ2-1)
CASTPIGRSPGLAGGNEQFF

SEQ ID NO: 637537 - protein, 14 aa, Homo sapiens
  CDR3 for alpha chain variable domain of TCR clone 318769 (TRAV12-2, TRAJ6)
CASKWGGGSYIPTF

SEQ ID NO: 637538 - protein, 13 aa, Homo sapiens
  CDR3 for beta chain variable domain of TCR clone 318769 (TRBV2, TRBJ1-1)
CASSEGWNTEAFF

SEQ ID NO: 637539 - protein, 12 aa, Homo sapiens
  CDR3 for alpha chain variable domain of TCR clone 318770 (TRAV25, TRAJ33)
CAGPDSNYQLIW

SEQ ID NO: 637540 - protein, 16 aa, Homo sapiens
  CDR3 for beta chain variable domain of TCR clone 318770 (TRBV11-2, TRBJ2-5)
CASSGQGYSPQETQYF

SEQ ID NO: 637541 - protein, 14 aa, Homo sapiens
  CDR3 for alpha chain variable domain of TCR clone 318771 (TRAV12-2, TRAJ40)
YAVKIRSGTYKYIF

SEQ ID NO: 637542 - protein, 13 aa, Homo sapiens
  CDR3 for beta chain variable domain of TCR clone 318771 (TRBV7-9, TRBJ1-2)
CASSLKQNYGYTF

SEQ ID NO: 637543 - protein, 14 aa, Homo sapiens
  CDR3 for alpha chain variable domain of TCR clone 318772 (TRAV12-1, TRAJ4)
CVVPLKSVYDKLIF

SEQ ID NO: 637544 - protein, 13 aa, Homo sapiens
  CDR3 for beta chain variable domain of TCR clone 318772 (TRBV27, TRBJ2-7)
CASGRGGAYEQYF

SEQ ID NO: 637545 - protein, 15 aa, Homo sapiens
  CDR3 for alpha chain variable domain of TCR clone 318773 (TRAV21, TRAJ52)
CAVRGGGTSYGKLTF

SEQ ID NO: 637546 - protein, 12 aa, Homo sapiens
  CDR3 for beta chain variable domain of TCR clone 318773 (TRBV7-2, TRBJ2-3)
CASSLTGDTQYF

SEQ ID NO: 637547 - protein, 12 aa, Homo sapiens
  CDR3 for alpha chain variable domain of TCR clone 318774 (TRAV4, TRAJ26)
CLVGDYGQNFVF

SEQ ID NO: 637548 - protein, 13 aa, Homo sapiens
  CDR3 for beta chain variable domain of TCR clone 318774 (TRBV20-1, TRBJ2-1)
CSARSSPRDEQFF

SEQ ID NO: 637549 - protein, 18 aa, Homo sapiens
  CDR3 for alpha chain variable domain of TCR clone 318775 (TRAV21, TRAJ52)
CAVRPSPAGGTSYGKLTF

SEQ ID NO: 637550 - protein, 17 aa, Homo sapiens
  CDR3 for beta chain variable domain of TCR clone 318775 (TRBV13, TRBJ2-3)
CANSLSRVAGGRNKQYF

SEQ ID NO: 637551 - protein, 12 aa, Homo sapiens
  CDR3 for alpha chain variable domain of TCR clone 318776 (TRAV29/DV5, TRAJ49)
CAATDTGNQFYF

SEQ ID NO: 637552 - protein, 12 aa, Homo sapiens
  CDR3 for beta chain variable domain of TCR clone 318776 (TRBV12-4, TRBJ2-7)
CASSLGGYEQYC

SEQ ID NO: 637553 - protein, 14 aa, Homo sapiens
  CDR3 for alpha chain variable domain of TCR clone 318777 (TRAV8-3, TRAJ4)
CAVGASGGYNKLIF

SEQ ID NO: 637554 - protein, 14 aa, Homo sapiens
  CDR3 for beta chain variable domain of TCR clone 318777 (TRBV11-1, TRBJ2-7)
CASSFRQGSYEQYF

SEQ ID NO: 637555 - protein, 14 aa, Homo sapiens
  CDR3 for alpha chain variable domain of TCR clone 318778 (TRAV13-1, TRAJ44)
CAAKATGTASKLTS

SEQ ID NO: 637556 - protein, 15 aa, Homo sapiens
  CDR3 for beta chain variable domain of TCR clone 318778 (TRBV19, TRBJ2-1)
CASIKGRGPYNEQFF

SEQ ID NO: 637557 - protein, 15 aa, Homo sapiens
  CDR3 for alpha chain variable domain of TCR clone 318779 (TRAV17, TRAJ57)
CATGPSQGGSEKLVF

SEQ ID NO: 637558 - protein, 18 aa, Homo sapiens
  CDR3 for beta chain variable domain of TCR clone 318779 (TRBV6-5, TRBJ2-6)
CASRTPGQGKTGANVLTF

SEQ ID NO: 637559 - protein, 17 aa, Homo sapiens
  CDR3 for alpha chain variable domain of TCR clone 318780 (TRAV29/DV5, TRAJ10)
CSVLLGRATGGGNKLTF

SEQ ID NO: 637560 - protein, 15 aa, Homo sapiens
  CDR3 for beta chain variable domain of TCR clone 318780 (TRBV20-1, TRBJ2-7)
CSARDRVSGMDEQYF

SEQ ID NO: 637561 - protein, 17 aa, Homo sapiens
  CDR3 for alpha chain variable domain of TCR clone 318781 (TRAV29/DV5, TRAJ52)
CAASVNAGGTSYGKLTF

SEQ ID NO: 637562 - protein, 17 aa, Homo sapiens
  CDR3 for beta chain variable domain of TCR clone 318781 (TRBV19, TRBJ1-1)
CASSMGPTLTGGIGAFF

SEQ ID NO: 637563 - protein, 14 aa, Homo sapiens
  CDR3 for alpha chain variable domain of TCR clone 318782 (TRAV12-2, TRAJ44)
CAVNPAGTARKLTF

SEQ ID NO: 637564 - protein, 16 aa, Homo sapiens
  CDR3 for beta chain variable domain of TCR clone 318782 (TRBV2, TRBJ2-1)
CASSVGGSLSYNEQFF

SEQ ID NO: 637565 - protein, 13 aa, Homo sapiens
  CDR3 for alpha chain variable domain of TCR clone 318783 (TRAV12-1, TRAJ29)
CVVVVSGNTPLVF

SEQ ID NO: 637566 - protein, 13 aa, Homo sapiens
  CDR3 for beta chain variable domain of TCR clone 318783 (TRBV7-7, TRBJ2-2)
CASSLDGTGELFF

SEQ ID NO: 637567 - protein, 13 aa, Homo sapiens
  CDR3 for alpha chain variable domain of TCR clone 318784 (TRAV13-2, TRAJ48)
YAEMDFGNEELTF

SEQ ID NO: 637568 - protein, 15 aa, Homo sapiens
  CDR3 for beta chain variable domain of TCR clone 318784 (TRBV7-9, TRBJ1-6)
CASSSPGRGNSPLHF

SEQ ID NO: 637569 - protein, 14 aa, Homo sapiens
  CDR3 for alpha chain variable domain of TCR clone 318785 (TRAV12-1, TRAJ38)
CVVNDAGNNRKLIW

SEQ ID NO: 637570 - protein, 13 aa, Homo sapiens
  CDR3 for beta chain variable domain of TCR clone 318785 (TRBV19, TRBJ1-2)
CASSVPGQDGYTF

SEQ ID NO: 637571 - protein, 11 aa, Homo sapiens
  CDR3 for alpha chain variable domain of TCR clone 318786 (TRAV21, TRAJ33)
CAVLSNYQLIW

SEQ ID NO: 637572 - protein, 12 aa, Homo sapiens
  CDR3 for beta chain variable domain of TCR clone 318786 (TRBV2, TRBJ2-7)
CASSDPDYEQYF

SEQ ID NO: 637573 - protein, 23 aa, Homo sapiens
  CDR3 for alpha chain variable domain of TCR clone 318787 (TRAV12-2, TRAJ36)
SLLIRDSQPSDSATLERANNLFF

SEQ ID NO: 637574 - protein, 13 aa, Homo sapiens
  CDR3 for beta chain variable domain of TCR clone 318787 (TRBV6-5, TRBJ1-2)
CASLSTGAGGYTF

SEQ ID NO: 637575 - protein, 12 aa, Homo sapiens
  CDR3 for alpha chain variable domain of TCR clone 318788 (TRAV13-1, TRAJ5)
CAAKAGRRALTF

SEQ ID NO: 637576 - protein, 15 aa, Homo sapiens
  CDR3 for beta chain variable domain of TCR clone 318788 (TRBV9, TRBJ1-6)
CASSVAGTGDSHLHF

SEQ ID NO: 637577 - protein, 14 aa, Homo sapiens
  CDR3 for alpha chain variable domain of TCR clone 318789 (TRAV13-1, TRAJ41)
CAARSGDSGYALNF

SEQ ID NO: 637578 - protein, 15 aa, Homo sapiens
  CDR3 for beta chain variable domain of TCR clone 318789 (TRBV10-2, TRBJ2-6)
CASSEQGTGANFLTF

SEQ ID NO: 637579 - protein, 14 aa, Homo sapiens
  CDR3 for alpha chain variable domain of TCR clone 318790 (TRAV12-2, TRAJ45)
CAVHIGGGADGLTF

SEQ ID NO: 637580 - protein, 17 aa, Homo sapiens
  CDR3 for beta chain variable domain of TCR clone 318790 (TRBV20-1, TRBJ2-2)
CSASGSGQGGLTGELFF

SEQ ID NO: 637581 - protein, 10 aa, Homo sapiens
  CDR3 for alpha chain variable domain of TCR clone 318791 (TRAV21, TRAJ31)
CAVDNARLMF

SEQ ID NO: 637582 - protein, 13 aa, Homo sapiens
  CDR3 for beta chain variable domain of TCR clone 318791 (TRBV5-7, TRBJ2-5)
CASSLRLQETQSF

SEQ ID NO: 637583 - protein, 17 aa, Homo sapiens
  CDR3 for alpha chain variable domain of TCR clone 318792 (TRAV3, TRAJ6)
RAVRDGPRAGGSYIPTF

SEQ ID NO: 637584 - protein, 20 aa, Homo sapiens
  CDR3 for beta chain variable domain of TCR clone 318792 (TRBV28, TRBJ2-1)
WASTPIGRSPGLAGGNEQFF

SEQ ID NO: 637585 - protein, 10 aa, Homo sapiens
  CDR3 for alpha chain variable domain of TCR clone 318793 (TRAV1-2, TRAJ20)
CVPNDYKLSF

SEQ ID NO: 637586 - protein, 14 aa, Homo sapiens
  CDR3 for beta chain variable domain of TCR clone 318793 (TRBV12-5, TRBJ2-5)
CATGSRTHQETQYF

SEQ ID NO: 637587 - protein, 13 aa, Homo sapiens
  CDR3 for alpha chain variable domain of TCR clone 318794 (TRAV8-6, TRAJ49)
CAVSTNTGNQFYF

SEQ ID NO: 637588 - protein, 14 aa, Homo sapiens
  CDR3 for beta chain variable domain of TCR clone 318794 (TRBV5-1, TRBJ2-7)
CASSRGESLYEQYF

SEQ ID NO: 637589 - protein, 14 aa, Homo sapiens
  CDR3 for alpha chain variable domain of TCR clone 318795 (TRAV4, TRAJ30)
CLVGDMNRDDKIIF

SEQ ID NO: 637590 - protein, 16 aa, Homo sapiens
  CDR3 for beta chain variable domain of TCR clone 318795 (TRBV7-3, TRBJ2-2)
CASSLKRGTLSGELFF

SEQ ID NO: 637591 - protein, 12 aa, Homo sapiens
  CDR3 for alpha chain variable domain of TCR clone 318796 (TRAV21, TRAJ37)
CAVRANTGKLIF

SEQ ID NO: 637592 - protein, 14 aa, Homo sapiens
  CDR3 for beta chain variable domain of TCR clone 318796 (TRBV19, TRBJ2-1)
CASEVTGARNEQFF

SEQ ID NO: 637593 - protein, 14 aa, Homo sapiens
  CDR3 for alpha chain variable domain of TCR clone 318797 (TRAV27, TRAJ38)
CAGDRAGNNRKLIW

SEQ ID NO: 637594 - protein, 13 aa, Homo sapiens
  CDR3 for beta chain variable domain of TCR clone 318797 (TRBV20-1, TRBJ2-5)
CSARGDYQETQYF

SEQ ID NO: 637595 - protein, 15 aa, Homo sapiens
  CDR3 for alpha chain variable domain of TCR clone 318798 (TRAV3, TRAJ45)
CAVRTPWGGADGLTF

SEQ ID NO: 637596 - protein, 15 aa, Homo sapiens
  CDR3 for beta chain variable domain of TCR clone 318798 (TRBV6-1, TRBJ2-2)
CQQFRTGSEHGELFF

SEQ ID NO: 637597 - protein, 15 aa, Homo sapiens
  CDR3 for alpha chain variable domain of TCR clone 318799 (TRAV8-4, TRAJ40)
CAVSSITSVTYKYIF

SEQ ID NO: 637598 - protein, 13 aa, Homo sapiens
  CDR3 for beta chain variable domain of TCR clone 318799 (TRBV2, TRBJ2-1)
CATSRGTDNEQFF

SEQ ID NO: 637599 - protein, 14 aa, Homo sapiens
  CDR3 for alpha chain variable domain of TCR clone 318800 (TRAV12-3, TRAJ10)
SHLPLAGGGNKLTF

SEQ ID NO: 637600 - protein, 16 aa, Homo sapiens
  CDR3 for beta chain variable domain of TCR clone 318800 (TRBV4-1, TRBJ1-4)
CASSQDLRRGGEKLFF

SEQ ID NO: 637601 - protein, 13 aa, Homo sapiens
  CDR3 for alpha chain variable domain of TCR clone 318801 (TRAV8-6, TRAJ7)
CAVSEYGNNRLAF

SEQ ID NO: 637602 - protein, 14 aa, Homo sapiens
  CDR3 for beta chain variable domain of TCR clone 318801 (TRBV7-2, TRBJ2-7)
CASSPKTSFYEQYF

SEQ ID NO: 637603 - protein, 14 aa, Homo sapiens
  CDR3 for alpha chain variable domain of TCR clone 318802 (TRAV12-3, TRAJ10)
SNLPLTGGGNKLTF

SEQ ID NO: 637604 - protein, 16 aa, Homo sapiens
  CDR3 for beta chain variable domain of TCR clone 318802 (TRBV4-1, TRBJ1-4)
CASSQDLRRGGEKLFF

SEQ ID NO: 637605 - protein, 17 aa, Homo sapiens
  CDR3 for alpha chain variable domain of TCR clone 318803 (TRAV3, TRAJ38)
CAVRDCLNAGNNRKLSW

SEQ ID NO: 637606 - protein, 16 aa, Homo sapiens
  CDR3 for beta chain variable domain of TCR clone 318803 (TRBV20-1, TRBJ1-4)
CSAPGQGLLTNEKLFF

SEQ ID NO: 637607 - protein, 14 aa, Homo sapiens
  CDR3 for alpha chain variable domain of TCR clone 318804 (TRAV8-4, TRAJ13)
CAVTLSGGYQKVTF

SEQ ID NO: 637608 - protein, 11 aa, Homo sapiens
  CDR3 for beta chain variable domain of TCR clone 318804 (TRBV19, TRBJ1-2)
CASSISSGYTF

SEQ ID NO: 637609 - protein, 14 aa, Homo sapiens
  CDR3 for alpha chain variable domain of TCR clone 318805 (TRAV13-1, TRAJ35)
CAASKGGFGNVLHC

SEQ ID NO: 637610 - protein, 13 aa, Homo sapiens
  CDR3 for beta chain variable domain of TCR clone 318805 (TRBV7-3, TRBJ1-1)
RASSQDWGAEAFV

SEQ ID NO: 637611 - protein, 14 aa, Homo sapiens
  CDR3 for alpha chain variable domain of TCR clone 318806 (TRAV1-2, TRAJ8)
CAVREDAGFQKLVF

SEQ ID NO: 637612 - protein, 13 aa, Homo sapiens
  CDR3 for beta chain variable domain of TCR clone 318806 (TRBV10-3, TRBJ2-7)
CASKLAVNYEQYF

SEQ ID NO: 637613 - protein, 13 aa, Homo sapiens
  CDR3 for alpha chain variable domain of TCR clone 318807 (TRAV20, TRAJ48)
CAVQGVGNEKLTF

SEQ ID NO: 637614 - protein, 19 aa, Homo sapiens
  CDR3 for beta chain variable domain of TCR clone 318807 (TRBV2, TRBJ2-2)
CASIQPGLAGGGNTGELFF

SEQ ID NO: 637615 - protein, 10 aa, Homo sapiens
  CDR3 for alpha chain variable domain of TCR clone 318808 (TRAV1-2, TRAJ20)
CACNDYKLSF

SEQ ID NO: 637616 - protein, 16 aa, Homo sapiens
  CDR3 for beta chain variable domain of TCR clone 318808 (TRBV20-1, TRBJ2-1)
CSARDLKQGMNNEQFL

SEQ ID NO: 637617 - protein, 10 aa, Homo sapiens
  CDR3 for alpha chain variable domain of TCR clone 318809 (TRAV12-3, TRAJ49)
CAMNDDQFYF

SEQ ID NO: 637618 - protein, 13 aa, Homo sapiens
  CDR3 for beta chain variable domain of TCR clone 318809 (TRBV12-4, TRBJ1-1)
CASSRGTGFEAFF

SEQ ID NO: 637619 - protein, 15 aa, Homo sapiens
  CDR3 for alpha chain variable domain of TCR clone 318810 (TRAV8-6, TRAJ10)
CAVSDQAGGGNKLTF

SEQ ID NO: 637620 - protein, 12 aa, Homo sapiens
  CDR3 for beta chain variable domain of TCR clone 318810 (TRBV11-2, TRBJ2-2)
CASSLPTGELFF

SEQ ID NO: 637621 - protein, 13 aa, Homo sapiens
  CDR3 for alpha chain variable domain of TCR clone 318811 (TRAV3, TRAJ36)
CAVKRTGANNLFF

SEQ ID NO: 637622 - protein, 16 aa, Homo sapiens
  CDR3 for beta chain variable domain of TCR clone 318811 (TRBV9, TRBJ1-2)
CASSVEEKVSPYGYTF

SEQ ID NO: 637623 - protein, 18 aa, Homo sapiens
  CDR3 for alpha chain variable domain of TCR clone 318812 (TRAV36/DV7, )
CALTDIQNPDTAVYQLRD

SEQ ID NO: 637624 - protein, 13 aa, Homo sapiens
  CDR3 for beta chain variable domain of TCR clone 318812 (TRBV4-1, TRBJ2-7)
CASSQGQAYEQYF

SEQ ID NO: 637625 - protein, 15 aa, Homo sapiens
  CDR3 for alpha chain variable domain of TCR clone 318813 (TRAV12-2, TRAJ53)
CAVNGGGGSNYKLTF

SEQ ID NO: 637626 - protein, 15 aa, Homo sapiens
  CDR3 for beta chain variable domain of TCR clone 318813 (TRBV20-1, TRBJ2-7)
CSARDRVSGMDEKYF

SEQ ID NO: 637627 - protein, 14 aa, Homo sapiens
  CDR3 for alpha chain variable domain of TCR clone 318814 (TRAV9-2, TRAJ24)
CALNPRGSWGKLQF

SEQ ID NO: 637628 - protein, 14 aa, Homo sapiens
  CDR3 for beta chain variable domain of TCR clone 318814 (TRBV12-4, TRBJ1-1)
CASSLGTGGTEAFF

SEQ ID NO: 637629 - protein, 14 aa, Homo sapiens
  CDR3 for alpha chain variable domain of TCR clone 318815 (TRAV26-1, TRAJ38)
CIADNAGNNRKLIW

SEQ ID NO: 637630 - protein, 15 aa, Homo sapiens
  CDR3 for beta chain variable domain of TCR clone 318815 (TRBV5-1, TRBJ2-3)
CASSSTSGSTDTQYF

SEQ ID NO: 637631 - protein, 16 aa, Homo sapiens
  CDR3 for alpha chain variable domain of TCR clone 318816 (TRAV30, TRAJ24)
CGTENVDADSWGKFQF

SEQ ID NO: 637632 - protein, 14 aa, Homo sapiens
  CDR3 for beta chain variable domain of TCR clone 318816 (TRBV12-5, TRBJ2-5)
CASGSRTHHETQYF

SEQ ID NO: 637633 - protein, 12 aa, Homo sapiens
  CDR3 for alpha chain variable domain of TCR clone 318817 (TRAV8-3, TRAJ26)
CAGDNYGQNFVF

SEQ ID NO: 637634 - protein, 12 aa, Homo sapiens
  CDR3 for beta chain variable domain of TCR clone 318817 (TRBV19, TRBJ2-5)
CASSISEETQYF

SEQ ID NO: 637635 - protein, 14 aa, Homo sapiens
  CDR3 for alpha chain variable domain of TCR clone 318818 (TRAV9-2, TRAJ39)
CALYIYNAGNTLTF

SEQ ID NO: 637636 - protein, 15 aa, Homo sapiens
  CDR3 for beta chain variable domain of TCR clone 318818 (TRBV7-3, TRBJ2-2)
CASSLEVLPTGELFF

SEQ ID NO: 637637 - protein, 10 aa, Homo sapiens
  CDR3 for alpha chain variable domain of TCR clone 318819 (TRAV12-1, TRAJ43)
CVVNPHRFGE

SEQ ID NO: 637638 - protein, 16 aa, Homo sapiens
  CDR3 for beta chain variable domain of TCR clone 318819 (TRBV27, TRBJ2-2)
CASSSTGGGDTGELFF

SEQ ID NO: 637639 - protein, 14 aa, Homo sapiens
  CDR3 for alpha chain variable domain of TCR clone 318820 (TRAV2, TRAJ37)
CAVDFTSNTGKLIF

SEQ ID NO: 637640 - protein, 13 aa, Homo sapiens
  CDR3 for beta chain variable domain of TCR clone 318820 (TRBV2, TRBJ2-1)
CASSDLFQDEQFF

SEQ ID NO: 637641 - protein, 15 aa, Homo sapiens
  CDR3 for alpha chain variable domain of TCR clone 318821 (TRAV26-2, TRAJ39)
CSLRGKNNAGNMLTF

SEQ ID NO: 637642 - protein, 12 aa, Homo sapiens
  CDR3 for beta chain variable domain of TCR clone 318821 (TRBV11-3, TRBJ1-1)
CASSHRQGEAFF

SEQ ID NO: 637643 - protein, 13 aa, Homo sapiens
  CDR3 for alpha chain variable domain of TCR clone 318822 (TRAV20, TRAJ48)
CAVQGVGNEKLTF

SEQ ID NO: 637644 - protein, 19 aa, Homo sapiens
  CDR3 for beta chain variable domain of TCR clone 318822 (TRBV2, TRBJ2-2)
CASSHRGLAGGGNTGELFF

SEQ ID NO: 637645 - protein, 15 aa, Homo sapiens
  CDR3 for alpha chain variable domain of TCR clone 318823 (TRAV12-2, TRAJ53)
CAVNGGGGGNYKMTF

SEQ ID NO: 637646 - protein, 17 aa, Homo sapiens
  CDR3 for beta chain variable domain of TCR clone 318823 (TRBV7-3, TRBJ2-3)
CASSLMKRMRGADTQYF

SEQ ID NO: 637647 - protein, 14 aa, Homo sapiens
  CDR3 for alpha chain variable domain of TCR clone 318824 (TRAV23/DV6, TRAJ17)
CAARGRAAANKLTF

SEQ ID NO: 637648 - protein, 12 aa, Homo sapiens
  CDR3 for beta chain variable domain of TCR clone 318824 (TRBV7-9, TRBJ2-3)
CASSSITDTQYF

SEQ ID NO: 637649 - protein, 16 aa, Homo sapiens
  CDR3 for alpha chain variable domain of TCR clone 318825 (TRAV22, TRAJ45)
CAVERGKRGGADGLTF

SEQ ID NO: 637650 - protein, 15 aa, Homo sapiens
  CDR3 for beta chain variable domain of TCR clone 318825 (TRBV5-5, TRBJ2-2)
CASSRQASGAGELFF

SEQ ID NO: 637651 - protein, 12 aa, Homo sapiens
  CDR3 for alpha chain variable domain of TCR clone 318826 (TRAV13-1, TRAJ21)
CAAKEGFNKFYF

SEQ ID NO: 637652 - protein, 16 aa, Homo sapiens
  CDR3 for beta chain variable domain of TCR clone 318826 (TRBV5-4, TRBJ2-3)
CASQQPGAGGADTPYF

SEQ ID NO: 637653 - protein, 20 aa, Homo sapiens
  CDR3 for alpha chain variable domain of TCR clone 318827 (TRAV26-1, TRAJ42)
CCVLLHRQTYYGGSQGNLII

SEQ ID NO: 637654 - protein, 16 aa, Homo sapiens
  CDR3 for beta chain variable domain of TCR clone 318827 (TRBV7-3, TRBJ2-2)
CACSLKRGTLSGELFF

SEQ ID NO: 637655 - protein, 11 aa, Homo sapiens
  CDR3 for alpha chain variable domain of TCR clone 318828 (TRAV23/DV6, TRAJ58)
CAARLLSGETS

SEQ ID NO: 637656 - protein, 14 aa, Homo sapiens
  CDR3 for beta chain variable domain of TCR clone 318828 (TRBV7-3, TRBJ2-1)
CASSLAGGTNEQFF

SEQ ID NO: 637657 - protein, 12 aa, Homo sapiens
  CDR3 for alpha chain variable domain of TCR clone 318829 (TRAV12-1, TRAJ40)
CVVNGETYKYIF

SEQ ID NO: 637658 - protein, 12 aa, Homo sapiens
  CDR3 for beta chain variable domain of TCR clone 318829 (TRBV19, TRBJ2-1)
CASSRQGAEQFF

SEQ ID NO: 637659 - protein, 14 aa, Homo sapiens
  CDR3 for alpha chain variable domain of TCR clone 318830 (TRAV1-2, TRAJ8)
CAVREDTGFQKLVF

SEQ ID NO: 637660 - protein, 16 aa, Homo sapiens
  CDR3 for beta chain variable domain of TCR clone 318830 (TRBV11-2, TRBJ2-1)
CASARGSYSHHNEQFF

SEQ ID NO: 637661 - protein, 12 aa, Homo sapiens
  CDR3 for alpha chain variable domain of TCR clone 318831 (TRAV13-2, TRAJ23)
VAERDRGGKLIF

SEQ ID NO: 637662 - protein, 16 aa, Homo sapiens
  CDR3 for beta chain variable domain of TCR clone 318831 (TRBV20-1, TRBJ1-4)
CSAPGQGLLTNEKLFF

SEQ ID NO: 637663 - protein, 14 aa, Homo sapiens
  CDR3 for alpha chain variable domain of TCR clone 318832 (TRAV8-1, TRAJ5)
CAVSMETGRRALTF

SEQ ID NO: 637664 - protein, 15 aa, Homo sapiens
  CDR3 for beta chain variable domain of TCR clone 318832 (TRBV19, TRBJ2-4)
CASRGPRRGENSQYF

SEQ ID NO: 637665 - protein, 17 aa, Homo sapiens
  CDR3 for alpha chain variable domain of TCR clone 318833 (TRAV26-1, TRAJ27)
CIVSTPWINTNAGKLTF

SEQ ID NO: 637666 - protein, 16 aa, Homo sapiens
  CDR3 for beta chain variable domain of TCR clone 318833 (TRBV7-9, TRBJ2-1)
CASSLDPGLAIDEQFF

SEQ ID NO: 637667 - protein, 13 aa, Homo sapiens
  CDR3 for alpha chain variable domain of TCR clone 318834 (TRAV8-4, TRAJ30)
CAVSVNRDDKFIF

SEQ ID NO: 637668 - protein, 13 aa, Homo sapiens
  CDR3 for beta chain variable domain of TCR clone 318834 (TRBV3-1, TRBJ2-2)
CASLARGSGELFF

SEQ ID NO: 637669 - protein, 16 aa, Homo sapiens
  CDR3 for alpha chain variable domain of TCR clone 318835 (TRAV39, TRAJ32)
CAVDMEYGGATNKLVF

SEQ ID NO: 637670 - protein, 14 aa, Homo sapiens
  CDR3 for beta chain variable domain of TCR clone 318835 (TRBV9, TRBJ2-4)
CASSPSGTSGFQYF

SEQ ID NO: 637671 - protein, 16 aa, Homo sapiens
  CDR3 for alpha chain variable domain of TCR clone 318836 (TRAV3, TRAJ37)
CAVRPHGSGNTGKLIL

SEQ ID NO: 637672 - protein, 16 aa, Homo sapiens
  CDR3 for beta chain variable domain of TCR clone 318836 (TRBV7-3, TRBJ2-2)
CASSLKRGTLSGELFF

SEQ ID NO: 637673 - protein, 16 aa, Homo sapiens
  CDR3 for alpha chain variable domain of TCR clone 318837 (TRAV1-2, TRAJ10)
CAVRGVLTGGGHKLTF

SEQ ID NO: 637674 - protein, 12 aa, Homo sapiens
  CDR3 for beta chain variable domain of TCR clone 318837 (TRBV12-4, TRBJ2-7)
CASSLGGYEQYF

SEQ ID NO: 637675 - protein, 16 aa, Homo sapiens
  CDR3 for alpha chain variable domain of TCR clone 318838 (TRAV20, TRAJ22)
CAVQASSSGSARQLTF

SEQ ID NO: 637676 - protein, 15 aa, Homo sapiens
  CDR3 for beta chain variable domain of TCR clone 318838 (TRBV28, TRBJ2-1)
CASSGLAEVDNEQFF

SEQ ID NO: 637677 - protein, 17 aa, Homo sapiens
  CDR3 for alpha chain variable domain of TCR clone 318839 (TRAV23/DV6, TRAJ57)
CAASSTLSQGGPEKLVF

SEQ ID NO: 637678 - protein, 14 aa, Homo sapiens
  CDR3 for beta chain variable domain of TCR clone 318839 (TRBV25-1, TRBJ1-1)
CASTHLGGNTGAFF

SEQ ID NO: 637679 - protein, 18 aa, Homo sapiens
  CDR3 for alpha chain variable domain of TCR clone 318840 (TRAV2, TRAJ32)
CCLLLCFHCGGATNKLIF

SEQ ID NO: 637680 - protein, 13 aa, Homo sapiens
  CDR3 for beta chain variable domain of TCR clone 318840 (TRBV10-2, TRBJ2-7)
CASGASGGYEQYF

SEQ ID NO: 637681 - protein, 15 aa, Homo sapiens
  CDR3 for alpha chain variable domain of TCR clone 318841 (TRAV3, TRAJ3)
CAVRDRDSSDSKIIF

SEQ ID NO: 637682 - protein, 18 aa, Homo sapiens
  CDR3 for beta chain variable domain of TCR clone 318841 (TRBV25-1, TRBJ1-2)
CASSGLQNGQGLIFGYTF

SEQ ID NO: 637683 - protein, 23 aa, Homo sapiens
  CDR3 for alpha chain variable domain of TCR clone 318842 (TRAV8-4, TRAJ38)
CARLNAGNNHIQNPDPAVSQLRD

SEQ ID NO: 637684 - protein, 12 aa, Homo sapiens
  CDR3 for beta chain variable domain of TCR clone 318842 (TRBV6-1, TRBJ2-7)
CASSEPLYEQYF

SEQ ID NO: 637685 - protein, 11 aa, Homo sapiens
  CDR3 for alpha chain variable domain of TCR clone 318843 (TRAV12-2, TRAJ54)
CAVEGAQKLVF

SEQ ID NO: 637686 - protein, 17 aa, Homo sapiens
  CDR3 for beta chain variable domain of TCR clone 318843 (TRBV18, TRBJ1-3)
CASAPYPTGPSGNTMYF

SEQ ID NO: 637687 - protein, 14 aa, Homo sapiens
  CDR3 for alpha chain variable domain of TCR clone 318844 (TRAV26-1, TRAJ21)
CIVRIGHNFNKFYF

SEQ ID NO: 637688 - protein, 15 aa, Homo sapiens
  CDR3 for beta chain variable domain of TCR clone 318844 (TRBV4-3, TRBJ2-1)
CASSQGLAGSNEQFF

SEQ ID NO: 637689 - protein, 15 aa, Homo sapiens
  CDR3 for alpha chain variable domain of TCR clone 318845 (TRAV26-2, TRAJ45)
CILRDRVDKEEVLTD

SEQ ID NO: 637690 - protein, 15 aa, Homo sapiens
  CDR3 for beta chain variable domain of TCR clone 318845 (TRBV7-6, TRBJ2-5)
CASSKPTGPQETQYF

SEQ ID NO: 637691 - protein, 14 aa, Homo sapiens
  CDR3 for alpha chain variable domain of TCR clone 318846 (TRAV35, TRAJ13)
CAGRSPEGYQKVTF

SEQ ID NO: 637692 - protein, 14 aa, Homo sapiens
  CDR3 for beta chain variable domain of TCR clone 318846 (TRBV19, TRBJ2-2)
CASSMVGLSGELFF

SEQ ID NO: 637693 - protein, 15 aa, Homo sapiens
  CDR3 for alpha chain variable domain of TCR clone 318847 (TRAV13-1, TRAJ17)
CAASIERAAGNKLTF

SEQ ID NO: 637694 - protein, 17 aa, Homo sapiens
  CDR3 for beta chain variable domain of TCR clone 318847 (TRBV5-1, TRBJ2-5)
CASSLLGLAANQETQYF

SEQ ID NO: 637695 - protein, 17 aa, Homo sapiens
  CDR3 for alpha chain variable domain of TCR clone 318848 (TRAV8-4, TRAJ11)
CAVSDRGENSGYSTLTF

SEQ ID NO: 637696 - protein, 17 aa, Homo sapiens
  CDR3 for beta chain variable domain of TCR clone 318848 (TRBV15, TRBJ1-4)
CATSRYGTGDPNEKLFF

SEQ ID NO: 637697 - protein, 16 aa, Homo sapiens
  CDR3 for alpha chain variable domain of TCR clone 318849 (TRAV3, TRAJ21)
CAVRDIERGNLNKFYF

SEQ ID NO: 637698 - protein, 16 aa, Homo sapiens
  CDR3 for beta chain variable domain of TCR clone 318849 (TRBV12-4, TRBJ1-5)
CARSRPVGGSNQPQHF

SEQ ID NO: 637699 - protein, 13 aa, Homo sapiens
  CDR3 for alpha chain variable domain of TCR clone 318850 (TRAV12-1, TRAJ16)
CVVNGPDGQKLLF

SEQ ID NO: 637700 - protein, 13 aa, Homo sapiens
  CDR3 for beta chain variable domain of TCR clone 318850 (TRBV2, TRBJ1-1)
CSRNPTGGFHAFF

SEQ ID NO: 637701 - protein, 15 aa, Homo sapiens
  CDR3 for alpha chain variable domain of TCR clone 318851 (TRAV8-4, TRAJ47)
CAVSDPEEYGNKLVF

SEQ ID NO: 637702 - protein, 15 aa, Homo sapiens
  CDR3 for beta chain variable domain of TCR clone 318851 (TRBV11-2, TRBJ2-1)
CASSLGPDSYNEQFC

SEQ ID NO: 637703 - protein, 16 aa, Homo sapiens
  CDR3 for alpha chain variable domain of TCR clone 318852 (TRAV4, TRAJ37)
CLVGWFGSSNTGKLIF

SEQ ID NO: 637704 - protein, 15 aa, Homo sapiens
  CDR3 for beta chain variable domain of TCR clone 318852 (TRBV12-4, TRBJ2-3)
CASSLAERPTDTQYV

SEQ ID NO: 637705 - protein, 13 aa, Homo sapiens
  CDR3 for alpha chain variable domain of TCR clone 318853 (TRAV2, TRAJ40)
CAMVTSGTYKYTF

SEQ ID NO: 637706 - protein, 14 aa, Homo sapiens
  CDR3 for beta chain variable domain of TCR clone 318853 (TRBV19, TRBJ2-1)
CASPTFVLSGEQFF

SEQ ID NO: 637707 - protein, 23 aa, Homo sapiens
  CDR3 for alpha chain variable domain of TCR clone 318854 (TRAV12-2, TRAJ22)
CSSETPSPVIQPPGRSSARQLTF

SEQ ID NO: 637708 - protein, 16 aa, Homo sapiens
  CDR3 for beta chain variable domain of TCR clone 318854 (TRBV5-1, TRBJ2-7)
GASSWGTGGRAWEQYF

SEQ ID NO: 637709 - protein, 15 aa, Homo sapiens
  CDR3 for alpha chain variable domain of TCR clone 318855 (TRAV8-2, TRAJ24)
CVVSDRTDSWGKLQF

SEQ ID NO: 637710 - protein, 11 aa, Homo sapiens
  CDR3 for beta chain variable domain of TCR clone 318855 (TRBV20-1, TRBJ1-2)
CSVQGAGGYAF

SEQ ID NO: 637711 - protein, 12 aa, Homo sapiens
  CDR3 for alpha chain variable domain of TCR clone 318856 (TRAV12-2, TRAJ9)
CAVNTGGFKTIF

SEQ ID NO: 637712 - protein, 17 aa, Homo sapiens
  CDR3 for beta chain variable domain of TCR clone 318856 (TRBV6-1, TRBJ2-3)
CASSEALRLISTDTQYF

SEQ ID NO: 637713 - protein, 10 aa, Homo sapiens
  CDR3 for alpha chain variable domain of TCR clone 318857 (TRAV1-2, TRAJ23)
CAGQGGKLIF

SEQ ID NO: 637714 - protein, 13 aa, Homo sapiens
  CDR3 for beta chain variable domain of TCR clone 318857 (TRBV27, TRBJ2-2)
CASSWRNTGELFF

SEQ ID NO: 637715 - protein, 14 aa, Homo sapiens
  CDR3 for alpha chain variable domain of TCR clone 318858 (TRAV9-2, TRAJ39)
CALYIYNAGNMPTF

SEQ ID NO: 637716 - protein, 15 aa, Homo sapiens
  CDR3 for beta chain variable domain of TCR clone 318858 (TRBV7-8, TRBJ2-7)
CASSLRHFEAYEQYF

SEQ ID NO: 637717 - protein, 12 aa, Homo sapiens
  CDR3 for alpha chain variable domain of TCR clone 318859 (TRAV27, TRAJ13)
CAGARGYQKVTF

SEQ ID NO: 637718 - protein, 14 aa, Homo sapiens
  CDR3 for beta chain variable domain of TCR clone 318859 (TRBV12-5, TRBJ2-5)
CASGSRTHQETQYF

SEQ ID NO: 637719 - protein, 13 aa, Homo sapiens
  CDR3 for alpha chain variable domain of TCR clone 318860 (TRAV1-2, TRAJ11)
CAVRDSGYSTLTF

SEQ ID NO: 637720 - protein, 13 aa, Homo sapiens
  CDR3 for beta chain variable domain of TCR clone 318860 (TRBV11-2, TRBJ2-1)
CASSLGLAGGRFF

SEQ ID NO: 637721 - protein, 16 aa, Homo sapiens
  CDR3 for alpha chain variable domain of TCR clone 318861 (TRAV3, TRAJ37)
CAVRGKGSGNTGKLIC

SEQ ID NO: 637722 - protein, 13 aa, Homo sapiens
  CDR3 for beta chain variable domain of TCR clone 318861 (TRBV7-2, TRBJ2-2)
CASSSVRAGELFF

SEQ ID NO: 637723 - protein, 23 aa, Homo sapiens
  CDR3 for alpha chain variable domain of TCR clone 318862 (TRAV17, TRAJ35)
CATAFVIGFGNVLHCVSGPQVIV

SEQ ID NO: 637724 - protein, 15 aa, Homo sapiens
  CDR3 for beta chain variable domain of TCR clone 318862 (TRBV7-9, TRBJ2-7)
CASSLALAEAYEQYF

SEQ ID NO: 637725 - protein, 14 aa, Homo sapiens
  CDR3 for alpha chain variable domain of TCR clone 318863 (TRAV27, TRAJ13)
CRSSNSGGYQKVTF

SEQ ID NO: 637726 - protein, 10 aa, Homo sapiens
  CDR3 for beta chain variable domain of TCR clone 318863 (TRBV2, TRBJ2-5)
CDSSAATQYF

SEQ ID NO: 637727 - protein, 15 aa, Homo sapiens
  CDR3 for alpha chain variable domain of TCR clone 318864 (TRAV12-2, TRAJ56)
CAVNPFTGANSKLTF

SEQ ID NO: 637728 - protein, 13 aa, Homo sapiens
  CDR3 for beta chain variable domain of TCR clone 318864 (TRBV20-1, TRBJ1-2)
CSTRDRVYGGYTF

SEQ ID NO: 637729 - protein, 12 aa, Homo sapiens
  CDR3 for alpha chain variable domain of TCR clone 318865 (TRAV13-1, TRAJ16)
CAAVSDGQKLLF

SEQ ID NO: 637730 - protein, 13 aa, Homo sapiens
  CDR3 for beta chain variable domain of TCR clone 318865 (TRBV19, TRBJ1-2)
CASSVPGQDGYTF

SEQ ID NO: 637731 - protein, 12 aa, Homo sapiens
  CDR3 for alpha chain variable domain of TCR clone 318866 (TRAV3, TRAJ43)
CAVRDPNNDMRF

SEQ ID NO: 637732 - protein, 15 aa, Homo sapiens
  CDR3 for beta chain variable domain of TCR clone 318866 (TRBV6-5, TRBJ2-1)
CASSYDAGAGNEQFV

SEQ ID NO: 637733 - protein, 16 aa, Homo sapiens
  CDR3 for alpha chain variable domain of TCR clone 318867 (TRAV30, TRAJ24)
CGTEIVDANSWGKFQF

SEQ ID NO: 637734 - protein, 15 aa, Homo sapiens
  CDR3 for beta chain variable domain of TCR clone 318867 (TRBV9, TRBJ1-6)
CASSVAGTGDSPLHF

SEQ ID NO: 637735 - protein, 23 aa, Homo sapiens
  CDR3 for alpha chain variable domain of TCR clone 318868 (TRAV26-1, TRAJ38)
CIADNAGNNHIQNPDPAVYQLRD

SEQ ID NO: 637736 - protein, 12 aa, Homo sapiens
  CDR3 for beta chain variable domain of TCR clone 318868 (TRBV19, TRBJ1-5)
CASSIGVGPQHF

SEQ ID NO: 637737 - protein, 18 aa, Homo sapiens
  CDR3 for alpha chain variable domain of TCR clone 318869 (TRAV26-1, TRAJ23)
CIVRVGLEVWNQGGKLIF

SEQ ID NO: 637738 - protein, 16 aa, Homo sapiens
  CDR3 for beta chain variable domain of TCR clone 318869 (TRBV12-4, TRBJ2-5)
CASSFFVRGRQETHYF

SEQ ID NO: 637739 - protein, 10 aa, Homo sapiens
  CDR3 for alpha chain variable domain of TCR clone 318870 (TRAV1-2, TRAJ31)
RAFFDARLMF

SEQ ID NO: 637740 - protein, 13 aa, Homo sapiens
  CDR3 for beta chain variable domain of TCR clone 318870 (TRBV7-9, TRBJ1-2)
CASSLKQNYGYTF

SEQ ID NO: 637741 - protein, 13 aa, Homo sapiens
  CDR3 for alpha chain variable domain of TCR clone 318871 (TRAV2, TRAJ40)
CAVVRSGTYKYIF

SEQ ID NO: 637742 - protein, 14 aa, Homo sapiens
  CDR3 for beta chain variable domain of TCR clone 318871 (TRBV19, TRBJ2-1)
CASPTFVLSGEQFF

SEQ ID NO: 637743 - protein, 13 aa, Homo sapiens
  CDR3 for alpha chain variable domain of TCR clone 318872 (TRAV21, TRAJ45)
CAVMGGGADGLTF

SEQ ID NO: 637744 - protein, 18 aa, Homo sapiens
  CDR3 for beta chain variable domain of TCR clone 318872 (TRBV10-3, TRBJ2-3)
CAISESRVGPMRGDTQYF

SEQ ID NO: 637745 - protein, 18 aa, Homo sapiens
  CDR3 for alpha chain variable domain of TCR clone 318873 (TRAV12-3, TRAJ52)
CAMSRTNAGGTSYGKLTF

SEQ ID NO: 637746 - protein, 17 aa, Homo sapiens
  CDR3 for beta chain variable domain of TCR clone 318873 (TRBV7-3, TRBJ2-3)
CASSLMKRTRGADTQYF

SEQ ID NO: 637747 - protein, 14 aa, Homo sapiens
  CDR3 for alpha chain variable domain of TCR clone 318874 (TRAV12-3, TRAJ22)
CAMSLFGSARQLTF

SEQ ID NO: 637748 - protein, 17 aa, Homo sapiens
  CDR3 for beta chain variable domain of TCR clone 318874 (TRBV20-1, TRBJ2-2)
CSASGSGQGGLTGELFF

SEQ ID NO: 637749 - protein, 16 aa, Homo sapiens
  CDR3 for alpha chain variable domain of TCR clone 318875 (TRAV8-3, TRAJ8)
CAVPRDGNTGFQKLVF

SEQ ID NO: 637750 - protein, 15 aa, Homo sapiens
  CDR3 for beta chain variable domain of TCR clone 318875 (TRBV4-1, TRBJ1-4)
CASSDTGGTNEKLFF

SEQ ID NO: 637751 - protein, 15 aa, Homo sapiens
  CDR3 for alpha chain variable domain of TCR clone 318876 (TRAV3, TRAJ5)
CAVRDRKTGRRALTF

SEQ ID NO: 637752 - protein, 13 aa, Homo sapiens
  CDR3 for beta chain variable domain of TCR clone 318876 (TRBV3-1, TRBJ1-1)
CASSPGVITEAFF

SEQ ID NO: 637753 - protein, 15 aa, Homo sapiens
  CDR3 for alpha chain variable domain of TCR clone 318877 (TRAV3, TRAJ5)
CAVRDLDTGRRALTF

SEQ ID NO: 637754 - protein, 16 aa, Homo sapiens
  CDR3 for beta chain variable domain of TCR clone 318877 (TRBV7-2, TRBJ1-6)
CASSLAPGNLNSPLHF

SEQ ID NO: 637755 - protein, 13 aa, Homo sapiens
  CDR3 for alpha chain variable domain of TCR clone 318878 (TRAV12-2, TRAJ15)
CAVFNQAGTAPIF

SEQ ID NO: 637756 - protein, 14 aa, Homo sapiens
  CDR3 for beta chain variable domain of TCR clone 318878 (TRBV7-8, TRBJ1-5)
CQQPGGGADQPQHF

SEQ ID NO: 637757 - protein, 12 aa, Homo sapiens
  CDR3 for alpha chain variable domain of TCR clone 318879 (TRAV1-2, TRAJ26)
CAVRYYGQNFVF

SEQ ID NO: 637758 - protein, 17 aa, Homo sapiens
  CDR3 for beta chain variable domain of TCR clone 318879 (TRBV20-1, TRBJ2-1)
CSASSSGLAGSYNEQFF

SEQ ID NO: 637759 - protein, 18 aa, Homo sapiens
  CDR3 for alpha chain variable domain of TCR clone 318880 (TRAV13-1, TRAJ52)
CAASKRSAGGTSYGKLTF

SEQ ID NO: 637760 - protein, 13 aa, Homo sapiens
  CDR3 for beta chain variable domain of TCR clone 318880 (TRBV4-1, TRBJ2-7)
CASSQGQAYEQYF

SEQ ID NO: 637761 - protein, 14 aa, Homo sapiens
  CDR3 for alpha chain variable domain of TCR clone 318881 (TRAV12-2, TRAJ13)
CAVKKTGGYQKITF

SEQ ID NO: 637762 - protein, 15 aa, Homo sapiens
  CDR3 for beta chain variable domain of TCR clone 318881 (TRBV27, TRBJ2-1)
CASSHGGGSSNEQFF

SEQ ID NO: 637763 - protein, 16 aa, Homo sapiens
  CDR3 for alpha chain variable domain of TCR clone 318882 (TRAV3, TRAJ28)
CAVLPRSGAGSYQLTF

SEQ ID NO: 637764 - protein, 13 aa, Homo sapiens
  CDR3 for beta chain variable domain of TCR clone 318882 (TRBV10-3, TRBJ2-7)
CASKLAVNYEQYF

SEQ ID NO: 637765 - protein, 13 aa, Homo sapiens
  CDR3 for alpha chain variable domain of TCR clone 318883 (TRAV27, TRAJ41)
CAGEGNSGYALNF

SEQ ID NO: 637766 - protein, 15 aa, Homo sapiens
  CDR3 for beta chain variable domain of TCR clone 318883 (TRBV6-1, TRBJ2-3)
CASSERGGITDTQYF

SEQ ID NO: 637767 - protein, 13 aa, Homo sapiens
  CDR3 for alpha chain variable domain of TCR clone 318884 (TRAV12-1, TRAJ16)
CVVNTRNGQKLPF

SEQ ID NO: 637768 - protein, 15 aa, Homo sapiens
  CDR3 for beta chain variable domain of TCR clone 318884 (TRBV20-1, TRBJ2-5)
CSAPPRTGFGETQYF

SEQ ID NO: 637769 - protein, 15 aa, Homo sapiens
  CDR3 for alpha chain variable domain of TCR clone 318885 (TRAV21, TRAJ40)
CAVRPQTSGAYKYIF

SEQ ID NO: 637770 - protein, 13 aa, Homo sapiens
  CDR3 for beta chain variable domain of TCR clone 318885 (TRBV7-2, TRBJ2-2)
CASSSVRAGELFL

SEQ ID NO: 637771 - protein, 16 aa, Homo sapiens
  CDR3 for alpha chain variable domain of TCR clone 318886 (TRAV14/DV4, TRAJ54)
CAIREGRIQGAQKLVF

SEQ ID NO: 637772 - protein, 15 aa, Homo sapiens
  CDR3 for beta chain variable domain of TCR clone 318886 (TRBV7-8, TRBJ2-1)
CASSLAGGLYNEQFF

SEQ ID NO: 637773 - protein, 13 aa, Homo sapiens
  CDR3 for alpha chain variable domain of TCR clone 318887 (TRAV36/DV7, TRAJ37)
CAVFSSNPGKLIF

SEQ ID NO: 637774 - protein, 15 aa, Homo sapiens
  CDR3 for beta chain variable domain of TCR clone 318887 (TRBV12-4, TRBJ2-5)
CQQFFVRGRQETQYF

SEQ ID NO: 637775 - protein, 12 aa, Homo sapiens
  CDR3 for alpha chain variable domain of TCR clone 318888 (TRAV12-2, TRAJ16)
CAVNLDGQKLLF

SEQ ID NO: 637776 - protein, 14 aa, Homo sapiens
  CDR3 for beta chain variable domain of TCR clone 318888 (TRBV7-2, TRBJ2-7)
CASSPKTSFYEQYF

SEQ ID NO: 637777 - protein, 12 aa, Homo sapiens
  CDR3 for alpha chain variable domain of TCR clone 318889 (TRAV21, TRAJ31)
CVLAGNNARLMF

SEQ ID NO: 637778 - protein, 11 aa, Homo sapiens
  CDR3 for beta chain variable domain of TCR clone 318889 (TRBV6-5, TRBJ1-6)
CASSPRDPQFT

SEQ ID NO: 637779 - protein, 17 aa, Homo sapiens
  CDR3 for alpha chain variable domain of TCR clone 318890 (TRAV1-1, TRAJ32)
CAVRVDELWWCYKQAHL

SEQ ID NO: 637780 - protein, 17 aa, Homo sapiens
  CDR3 for beta chain variable domain of TCR clone 318890 (TRBV13, TRBJ2-3)
CDSSLSRVAGGRNTQYF

SEQ ID NO: 637781 - protein, 13 aa, Homo sapiens
  CDR3 for alpha chain variable domain of TCR clone 318891 (TRAV3, TRAJ20)
CCEAFCNDYKLSF

SEQ ID NO: 637782 - protein, 14 aa, Homo sapiens
  CDR3 for beta chain variable domain of TCR clone 318891 (TRBV5-1, TRBJ2-1)
CASSLDDRFDEQFF

SEQ ID NO: 637783 - protein, 18 aa, Homo sapiens
  CDR3 for alpha chain variable domain of TCR clone 318892 (TRAV21, TRAJ52)
CAVMPSPAGGTSYGKLTF

SEQ ID NO: 637784 - protein, 16 aa, Homo sapiens
  CDR3 for beta chain variable domain of TCR clone 318892 (TRBV13, TRBJ2-3)
CQQPLQGSGGRNTQYF

SEQ ID NO: 637785 - protein, 13 aa, Homo sapiens
  CDR3 for alpha chain variable domain of TCR clone 318893 (TRAV2, TRAJ10)
CAVETGGGNKLTF

SEQ ID NO: 637786 - protein, 14 aa, Homo sapiens
  CDR3 for beta chain variable domain of TCR clone 318893 (TRBV20-1, TRBJ2-3)
CGAGGRRGTDTQYF

SEQ ID NO: 637787 - protein, 14 aa, Homo sapiens
  CDR3 for alpha chain variable domain of TCR clone 318894 (TRAV16, TRAJ33)
CALSAMDSNYQLIW

SEQ ID NO: 637788 - protein, 16 aa, Homo sapiens
  CDR3 for beta chain variable domain of TCR clone 318894 (TRBV4-1, TRBJ2-7)
CASSQEWTSGPLEQYF

SEQ ID NO: 637789 - protein, 11 aa, Homo sapiens
  CDR3 for alpha chain variable domain of TCR clone 318895 (TRAV27, TRAJ47)
CAGAYGNKLVF

SEQ ID NO: 637790 - protein, 20 aa, Homo sapiens
  CDR3 for beta chain variable domain of TCR clone 318895 (TRBV7-8, TRBJ2-2)
CASSHLFPGPTIHITGELFF

SEQ ID NO: 637791 - protein, 13 aa, Homo sapiens
  CDR3 for alpha chain variable domain of TCR clone 318896 (TRAV25, TRAJ30)
CAGPVDRDDKIIF

SEQ ID NO: 637792 - protein, 17 aa, Homo sapiens
  CDR3 for beta chain variable domain of TCR clone 318896 (TRBV7-9, TRBJ2-6)
CASSFGAGYSGANVLTF

SEQ ID NO: 637793 - protein, 14 aa, Homo sapiens
  CDR3 for alpha chain variable domain of TCR clone 318897 (TRAV26-1, TRAJ45)
CIEVTGGGADGLTF

SEQ ID NO: 637794 - protein, 13 aa, Homo sapiens
  CDR3 for beta chain variable domain of TCR clone 318897 (TRBV4-1, TRBJ2-1)
CASSQAGGDEQFF

SEQ ID NO: 637795 - protein, 17 aa, Homo sapiens
  CDR3 for alpha chain variable domain of TCR clone 318898 (TRAV3, TRAJ6)
CAVRDGPRAGGSYIPTF

SEQ ID NO: 637796 - protein, 15 aa, Homo sapiens
  CDR3 for beta chain variable domain of TCR clone 318898 (TRBV20-1, TRBJ1-1)
CSASWERFLNTEAFF

SEQ ID NO: 637797 - protein, 14 aa, Homo sapiens
  CDR3 for alpha chain variable domain of TCR clone 318899 (TRAV20, TRAJ9)
CAVQANTGGFKTIF

SEQ ID NO: 637798 - protein, 16 aa, Homo sapiens
  CDR3 for beta chain variable domain of TCR clone 318899 (TRBV12-5, TRBJ2-5)
CASGPRTSGNQETQYF

SEQ ID NO: 637799 - protein, 12 aa, Homo sapiens
  CDR3 for alpha chain variable domain of TCR clone 318900 (TRAV21, TRAJ37)
CAARGNTGKLIF

SEQ ID NO: 637800 - protein, 16 aa, Homo sapiens
  CDR3 for beta chain variable domain of TCR clone 318900 (TRBV19, TRBJ2-2)
CASRSPGTGATGELFF

SEQ ID NO: 637801 - protein, 14 aa, Homo sapiens
  CDR3 for alpha chain variable domain of TCR clone 318901 (TRAV34, TRAJ22)
CGADTSGSARQLTF

SEQ ID NO: 637802 - protein, 15 aa, Homo sapiens
  CDR3 for beta chain variable domain of TCR clone 318901 (TRBV28, TRBJ2-5)
CASSPPWSYQETQYF

SEQ ID NO: 637803 - protein, 14 aa, Homo sapiens
  CDR3 for alpha chain variable domain of TCR clone 318902 (TRAV2, TRAJ9)
CAVEDRSGGFKTIF

SEQ ID NO: 637804 - protein, 19 aa, Homo sapiens
  CDR3 for beta chain variable domain of TCR clone 318902 (TRBV28, TRBJ2-1)
CASSFSIRGSGRTRYEQFF

SEQ ID NO: 637805 - protein, 14 aa, Homo sapiens
  CDR3 for alpha chain variable domain of TCR clone 318903 (TRAV12-2, TRAJ13)
CAVKQTGGYQKVTF

SEQ ID NO: 637806 - protein, 15 aa, Homo sapiens
  CDR3 for beta chain variable domain of TCR clone 318903 (TRBV20-1, TRBJ2-7)
CSARDRVSGMDEQYF

SEQ ID NO: 637807 - protein, 14 aa, Homo sapiens
  CDR3 for alpha chain variable domain of TCR clone 318904 (TRAV9-2, TRAJ39)
CALYIYNAGNMLTF

SEQ ID NO: 637808 - protein, 15 aa, Homo sapiens
  CDR3 for beta chain variable domain of TCR clone 318904 (TRBV19, TRBJ1-1)
CASRETGGVNTEAFF

SEQ ID NO: 637809 - protein, 11 aa, Homo sapiens
  CDR3 for alpha chain variable domain of TCR clone 318905 (TRAV1-2, TRAJ20)
CAVANDYKLSF

SEQ ID NO: 637810 - protein, 13 aa, Homo sapiens
  CDR3 for beta chain variable domain of TCR clone 318905 (TRBV7-3, TRBJ1-1)
CASSQDWGAEGFF

SEQ ID NO: 637811 - protein, 10 aa, Homo sapiens
  CDR3 for alpha chain variable domain of TCR clone 318906 (TRAV12-2, TRAJ52)
RSTSYGKLTF

SEQ ID NO: 637812 - protein, 15 aa, Homo sapiens
  CDR3 for beta chain variable domain of TCR clone 318906 (TRBV27, TRBJ2-1)
CASSNGGGSSNEQFF

SEQ ID NO: 637813 - protein, 14 aa, Homo sapiens
  CDR3 for alpha chain variable domain of TCR clone 318907 (TRAV1-2, TRAJ8)
CAVREDTGFQKLVF

SEQ ID NO: 637814 - protein, 16 aa, Homo sapiens
  CDR3 for beta chain variable domain of TCR clone 318907 (TRBV7-3, TRBJ2-2)
CASSLKRGTLSGELFV

SEQ ID NO: 637815 - protein, 11 aa, Homo sapiens
  CDR3 for alpha chain variable domain of TCR clone 318908 (TRAV2, TRAJ13)
CASGGYQKVTF

SEQ ID NO: 637816 - protein, 15 aa, Homo sapiens
  CDR3 for beta chain variable domain of TCR clone 318908 (TRBV7-9, TRBJ1-6)
CDSSSPGRGNSPLHF

SEQ ID NO: 637817 - protein, 13 aa, Homo sapiens
  CDR3 for alpha chain variable domain of TCR clone 318909 (TRAV13-1, TRAJ39)
CAARIWAGDMLTF

SEQ ID NO: 637818 - protein, 15 aa, Homo sapiens
  CDR3 for beta chain variable domain of TCR clone 318909 (TRBV7-9, TRBJ1-1)
CASSLLEQGGTEAFF

SEQ ID NO: 637819 - protein, 13 aa, Homo sapiens
  CDR3 for alpha chain variable domain of TCR clone 318910 (TRAV8-4, TRAJ10)
CAAFTGGGNKLTF

SEQ ID NO: 637820 - protein, 15 aa, Homo sapiens
  CDR3 for beta chain variable domain of TCR clone 318910 (TRBV6-5, TRBJ2-1)
CASSYDAGAGNEQFF

SEQ ID NO: 637821 - protein, 14 aa, Homo sapiens
  CDR3 for alpha chain variable domain of TCR clone 318911 (TRAV21, TRAJ21)
CAVKGFGNFNKFYF

SEQ ID NO: 637822 - protein, 14 aa, Homo sapiens
  CDR3 for beta chain variable domain of TCR clone 318911 (TRBV7-2, TRBJ2-7)
CASSPKTSFYEQYF

SEQ ID NO: 637823 - protein, 14 aa, Homo sapiens
  CDR3 for alpha chain variable domain of TCR clone 318912 (TRAV38-1, TRAJ40)
CALRPTSGTYKYIF

SEQ ID NO: 637824 - protein, 13 aa, Homo sapiens
  CDR3 for beta chain variable domain of TCR clone 318912 (TRBV5-1, TRBJ1-5)
CASSLAQDQPQHF

SEQ ID NO: 637825 - protein, 12 aa, Homo sapiens
  CDR3 for alpha chain variable domain of TCR clone 318913 (TRAV13-1, TRAJ21)
CAAKEGFNKFYF

SEQ ID NO: 637826 - protein, 17 aa, Homo sapiens
  CDR3 for beta chain variable domain of TCR clone 318913 (TRBV19, TRBJ2-7)
CASSISFYGSYPYEQYF

SEQ ID NO: 637827 - protein, 13 aa, Homo sapiens
  CDR3 for alpha chain variable domain of TCR clone 318914 (TRAV22, TRAJ49)
CAVGMYTGNQFYF

SEQ ID NO: 637828 - protein, 13 aa, Homo sapiens
  CDR3 for beta chain variable domain of TCR clone 318914 (TRBV2, TRBJ2-3)
CASISPASDTQYF

SEQ ID NO: 637829 - protein, 12 aa, Homo sapiens
  CDR3 for alpha chain variable domain of TCR clone 318915 (TRAV12-3, TRAJ17)
CAMTLTGNKLTF

SEQ ID NO: 637830 - protein, 15 aa, Homo sapiens
  CDR3 for beta chain variable domain of TCR clone 318915 (TRBV10-3, TRBJ2-1)
CAIRYGTSGHNEQFF

SEQ ID NO: 637831 - protein, 14 aa, Homo sapiens
  CDR3 for alpha chain variable domain of TCR clone 318916 (TRAV26-1, TRAJ48)
CIVRDGFGNEKLTF

SEQ ID NO: 637832 - protein, 13 aa, Homo sapiens
  CDR3 for beta chain variable domain of TCR clone 318916 (TRBV11-3, TRBJ2-3)
CASSHDTKDTQYF

SEQ ID NO: 637833 - protein, 14 aa, Homo sapiens
  CDR3 for alpha chain variable domain of TCR clone 318917 (TRAV12-2, TRAJ15)
CAPHTGQAGTARIF

SEQ ID NO: 637834 - protein, 17 aa, Homo sapiens
  CDR3 for beta chain variable domain of TCR clone 318917 (TRBV5-5, TRBJ1-2)
CASSLGSLDGQSEGYTF

SEQ ID NO: 637835 - protein, 16 aa, Homo sapiens
  CDR3 for alpha chain variable domain of TCR clone 318918 (TRAV3, TRAJ10)
RAVRDMRAGGGNKLTF

SEQ ID NO: 637836 - protein, 16 aa, Homo sapiens
  CDR3 for beta chain variable domain of TCR clone 318918 (TRBV12-5, TRBJ2-5)
CASGPRTSGNQETQYF

SEQ ID NO: 637837 - protein, 18 aa, Homo sapiens
  CDR3 for alpha chain variable domain of TCR clone 318919 (TRAV26-1, TRAJ5)
CIVRVVPPRVTGRRALNF

SEQ ID NO: 637838 - protein, 15 aa, Homo sapiens
  CDR3 for beta chain variable domain of TCR clone 318919 (TRBV7-9, TRBJ2-7)
CASSLPMGQANEQYF

SEQ ID NO: 637839 - protein, 14 aa, Homo sapiens
  CDR3 for alpha chain variable domain of TCR clone 318920 (TRAV1-1, TRAJ23)
CAVSIYNQGGKLIF

SEQ ID NO: 637840 - protein, 12 aa, Homo sapiens
  CDR3 for beta chain variable domain of TCR clone 318920 (TRBV12-4, TRBJ2-1)
CASSKDRRWQFF

SEQ ID NO: 637841 - protein, 12 aa, Homo sapiens
  CDR3 for alpha chain variable domain of TCR clone 318921 (TRAV12-3, TRAJ17)
CAMTLTGNKLTF

SEQ ID NO: 637842 - protein, 19 aa, Homo sapiens
  CDR3 for beta chain variable domain of TCR clone 318921 (TRBV6-3, TRBJ2-1)
CASSYSWTSGRATYNEQFF

SEQ ID NO: 637843 - protein, 13 aa, Homo sapiens
  CDR3 for alpha chain variable domain of TCR clone 318922 (TRAV35, TRAJ42)
CAGFPGSQGNLIF

SEQ ID NO: 637844 - protein, 13 aa, Homo sapiens
  CDR3 for beta chain variable domain of TCR clone 318922 (TRBV29-1, TRBJ2-1)
CSVEGERVNEQFF

SEQ ID NO: 637845 - protein, 15 aa, Homo sapiens
  CDR3 for alpha chain variable domain of TCR clone 318923 (TRAV12-3, TRAJ6)
CSMSATTGGSYIPTF

SEQ ID NO: 637846 - protein, 19 aa, Homo sapiens
  CDR3 for beta chain variable domain of TCR clone 318923 (TRBV25-1, TRBJ2-2)
CAILVYRVDRGRKTGELFF

SEQ ID NO: 637847 - protein, 13 aa, Homo sapiens
  CDR3 for alpha chain variable domain of TCR clone 318924 (TRAV36/DV7, TRAJ54)
CAVGIQGAQKLVF

SEQ ID NO: 637848 - protein, 12 aa, Homo sapiens
  CDR3 for beta chain variable domain of TCR clone 318924 (TRBV7-8, TRBJ2-7)
CASSLGDREQYF

SEQ ID NO: 637849 - protein, 15 aa, Homo sapiens
  CDR3 for alpha chain variable domain of TCR clone 318925 (TRAV10, TRAJ6)
CVVRPRTGGSYIPTF

SEQ ID NO: 637850 - protein, 12 aa, Homo sapiens
  CDR3 for beta chain variable domain of TCR clone 318925 (TRBV20-1, TRBJ2-5)
CSAPRSQETQYF

SEQ ID NO: 637851 - protein, 13 aa, Homo sapiens
  CDR3 for alpha chain variable domain of TCR clone 318926 (TRAV2, TRAJ15)
CAVASQAGTALIF

SEQ ID NO: 637852 - protein, 15 aa, Homo sapiens
  CDR3 for beta chain variable domain of TCR clone 318926 (TRBV4-1, TRBJ2-7)
CASSQQGQGFDEQYF

SEQ ID NO: 637853 - protein, 14 aa, Homo sapiens
  CDR3 for alpha chain variable domain of TCR clone 318927 (TRAV2, TRAJ3)
CAVPPYSSASKIIF

SEQ ID NO: 637854 - protein, 13 aa, Homo sapiens
  CDR3 for beta chain variable domain of TCR clone 318927 (TRBV12-4, TRBJ1-1)
CASSLIGDTEAFF

SEQ ID NO: 637855 - protein, 13 aa, Homo sapiens
  CDR3 for alpha chain variable domain of TCR clone 318928 (TRAV8-3, TRAJ36)
CAVCSTGANNLFF

SEQ ID NO: 637856 - protein, 15 aa, Homo sapiens
  CDR3 for beta chain variable domain of TCR clone 318928 (TRBV7-2, TRBJ1-2)
CASSPRAGWNYGYTF

SEQ ID NO: 637857 - protein, 13 aa, Homo sapiens
  CDR3 for alpha chain variable domain of TCR clone 318929 (TRAV3, TRAJ27)
CAVRPLGAGKSTF

SEQ ID NO: 637858 - protein, 16 aa, Homo sapiens
  CDR3 for beta chain variable domain of TCR clone 318929 (TRBV15, TRBJ1-3)
CATSSPIGFSGNTIYF

SEQ ID NO: 637859 - protein, 17 aa, Homo sapiens
  CDR3 for alpha chain variable domain of TCR clone 318930 (TRAV2, TRAJ36)
CAVVDRGNWGKQPLLWA

SEQ ID NO: 637860 - protein, 14 aa, Homo sapiens
  CDR3 for beta chain variable domain of TCR clone 318930 (TRBV7-9, TRBJ2-5)
CASSLDTAQETQHF

SEQ ID NO: 637861 - protein, 14 aa, Homo sapiens
  CDR3 for alpha chain variable domain of TCR clone 318931 (TRAV14/DV4, TRAJ23)
CAMRYYNQGGKLIF

SEQ ID NO: 637862 - protein, 17 aa, Homo sapiens
  CDR3 for beta chain variable domain of TCR clone 318931 (TRBV7-2, TRBJ2-2)
CASSPRGEGEGTGELFF

SEQ ID NO: 637863 - protein, 14 aa, Homo sapiens
  CDR3 for alpha chain variable domain of TCR clone 318932 (TRAV1-2, TRAJ8)
CAVREDTGFQKLVF

SEQ ID NO: 637864 - protein, 17 aa, Homo sapiens
  CDR3 for beta chain variable domain of TCR clone 318932 (TRBV7-3, TRBJ2-2)
CISVPAAQEDTPGSCFF

SEQ ID NO: 637865 - protein, 14 aa, Homo sapiens
  CDR3 for alpha chain variable domain of TCR clone 318933 (TRAV9-2, TRAJ39)
CALYIYNAGNMLTF

SEQ ID NO: 637866 - protein, 15 aa, Homo sapiens
  CDR3 for beta chain variable domain of TCR clone 318933 (TRBV7-9, TRBJ2-6)
CASSQTGVGANVLTF

SEQ ID NO: 637867 - protein, 13 aa, Homo sapiens
  CDR3 for alpha chain variable domain of TCR clone 318934 (TRAV26-1, TRAJ54)
CIVRVKGAQKLVF

SEQ ID NO: 637868 - protein, 15 aa, Homo sapiens
  CDR3 for beta chain variable domain of TCR clone 318934 (TRBV28, TRBJ2-3)
CASGFGTRLADTQYF

SEQ ID NO: 637869 - protein, 14 aa, Homo sapiens
  CDR3 for alpha chain variable domain of TCR clone 318935 (TRAV29/DV5, TRAJ47)
CAASAIECGNKLVF

SEQ ID NO: 637870 - protein, 14 aa, Homo sapiens
  CDR3 for beta chain variable domain of TCR clone 318935 (TRBV19, TRBJ2-1)
CASPTFVLSGEQFF

SEQ ID NO: 637871 - protein, 13 aa, Homo sapiens
  CDR3 for alpha chain variable domain of TCR clone 318936 (TRAV8-2, TRAJ49)
CVVTPNTGNQFYF

SEQ ID NO: 637872 - protein, 15 aa, Homo sapiens
  CDR3 for beta chain variable domain of TCR clone 318936 (TRBV11-2, TRBJ2-1)
CASSLTSGGYNEQFV

SEQ ID NO: 637873 - protein, 16 aa, Homo sapiens
  CDR3 for alpha chain variable domain of TCR clone 318937 (TRAV35, TRAJ52)
CAGQGSGGTSYGKLTF

SEQ ID NO: 637874 - protein, 17 aa, Homo sapiens
  CDR3 for beta chain variable domain of TCR clone 318937 (TRBV13, TRBJ2-3)
RASSLSRVAGGRNTQYF

SEQ ID NO: 637875 - protein, 14 aa, Homo sapiens
  CDR3 for alpha chain variable domain of TCR clone 318938 (TRAV12-3, TRAJ10)
SHLPLTGGGNKLTF

SEQ ID NO: 637876 - protein, 11 aa, Homo sapiens
  CDR3 for beta chain variable domain of TCR clone 318938 (TRBV29-1, TRBJ2-5)
CSDDRTGTQYF

SEQ ID NO: 637877 - protein, 17 aa, Homo sapiens
  CDR3 for alpha chain variable domain of TCR clone 318939 (TRAV3, TRAJ42)
CAVRDRDYGVSQGNLIF

SEQ ID NO: 637878 - protein, 12 aa, Homo sapiens
  CDR3 for beta chain variable domain of TCR clone 318939 (TRBV29-1, TRBJ2-3)
CSVTGGADTQYF

SEQ ID NO: 637879 - protein, 12 aa, Homo sapiens
  CDR3 for alpha chain variable domain of TCR clone 318940 (TRAV25, TRAJ30)
CAGKNRDNKIIF

SEQ ID NO: 637880 - protein, 11 aa, Homo sapiens
  CDR3 for beta chain variable domain of TCR clone 318940 (TRBV12-4, TRBJ2-7)
CATPEKGEQYF

SEQ ID NO: 637881 - protein, 14 aa, Homo sapiens
  CDR3 for alpha chain variable domain of TCR clone 318941 (TRAV23/DV6, TRAJ23)
CAAGPYNQGGKLIF

SEQ ID NO: 637882 - protein, 17 aa, Homo sapiens
  CDR3 for beta chain variable domain of TCR clone 318941 (TRBV4-2, TRBJ1-1)
CAGSQVATGGMNTEAFF

SEQ ID NO: 637883 - protein, 15 aa, Homo sapiens
  CDR3 for alpha chain variable domain of TCR clone 318942 (TRAV17, TRAJ37)
CATDGGSSNTGKLIF

SEQ ID NO: 637884 - protein, 19 aa, Homo sapiens
  CDR3 for beta chain variable domain of TCR clone 318942 (TRBV25-1, TRBJ2-2)
CAILVYRVDRGRKTGELFF

SEQ ID NO: 637885 - protein, 15 aa, Homo sapiens
  CDR3 for alpha chain variable domain of TCR clone 318943 (TRAV1-2, TRAJ30)
CAVRPHGNRDDKIIF

SEQ ID NO: 637886 - protein, 13 aa, Homo sapiens
  CDR3 for beta chain variable domain of TCR clone 318943 (TRBV11-3, TRBJ2-3)
CASSHDTKDTQYF

SEQ ID NO: 637887 - protein, 15 aa, Homo sapiens
  CDR3 for alpha chain variable domain of TCR clone 318944 (TRAV36/DV7, TRAJ44)
CAVCRNTGTASKLTF

SEQ ID NO: 637888 - protein, 13 aa, Homo sapiens
  CDR3 for beta chain variable domain of TCR clone 318944 (TRBV18, TRBJ2-3)
FASSTGRTDTQYF

SEQ ID NO: 637889 - protein, 13 aa, Homo sapiens
  CDR3 for alpha chain variable domain of TCR clone 318945 (TRAV35, TRAJ43)
CAGYPYNNNDMRF

SEQ ID NO: 637890 - protein, 15 aa, Homo sapiens
  CDR3 for beta chain variable domain of TCR clone 318945 (TRBV25-1, TRBJ1-4)
CASCKRIATNEKLFF

SEQ ID NO: 637891 - protein, 13 aa, Homo sapiens
  CDR3 for alpha chain variable domain of TCR clone 318946 (TRAV8-3, TRAJ48)
CAVVPFGNEKLTF

SEQ ID NO: 637892 - protein, 19 aa, Homo sapiens
  CDR3 for beta chain variable domain of TCR clone 318946 (TRBV25-1, TRBJ2-2)
CAIPVYRVDRGHKTGELFF

SEQ ID NO: 637893 - protein, 13 aa, Homo sapiens
  CDR3 for alpha chain variable domain of TCR clone 318947 (TRAV29/DV5, TRAJ31)
CAASRNNNARLMV

SEQ ID NO: 637894 - protein, 12 aa, Homo sapiens
  CDR3 for beta chain variable domain of TCR clone 318947 (TRBV11-2, TRBJ2-1)
CASSPGNNEQFF

SEQ ID NO: 637895 - protein, 15 aa, Homo sapiens
  CDR3 for alpha chain variable domain of TCR clone 318948 (TRAV14/DV4, TRAJ12)
CAMTPPVDSSYKSIF

SEQ ID NO: 637896 - protein, 14 aa, Homo sapiens
  CDR3 for beta chain variable domain of TCR clone 318948 (TRBV19, TRBJ2-1)
CASSDNQGANEQFF

SEQ ID NO: 637897 - protein, 14 aa, Homo sapiens
  CDR3 for alpha chain variable domain of TCR clone 318949 (TRAV3, TRAJ33)
CAVRDMDSNYNLIW

SEQ ID NO: 637898 - protein, 19 aa, Homo sapiens
  CDR3 for beta chain variable domain of TCR clone 318949 (TRBV7-3, TRBJ1-2)
CASSFPQGNDGELWLHLRF

SEQ ID NO: 637899 - protein, 17 aa, Homo sapiens
  CDR3 for alpha chain variable domain of TCR clone 318950 (TRAV35, TRAJ47)
VLLDCRTHTEYGNKLVF

SEQ ID NO: 637900 - protein, 11 aa, Homo sapiens
  CDR3 for beta chain variable domain of TCR clone 318950 (TRBV29-1, TRBJ1-1)
CSVEVGTRTFF

SEQ ID NO: 637901 - protein, 13 aa, Homo sapiens
  CDR3 for alpha chain variable domain of TCR clone 318951 (TRAV12-3, TRAJ13)
CAMSSGGYQKVTF

SEQ ID NO: 637902 - protein, 13 aa, Homo sapiens
  CDR3 for beta chain variable domain of TCR clone 318951 (TRBV20-1, TRBJ1-1)
CGAPPGGHTEAFF

SEQ ID NO: 637903 - protein, 13 aa, Homo sapiens
  CDR3 for alpha chain variable domain of TCR clone 318952 (TRAV8-4, TRAJ36)
CAVSEGGANNLFF

SEQ ID NO: 637904 - protein, 12 aa, Homo sapiens
  CDR3 for beta chain variable domain of TCR clone 318952 (TRBV28, TRBJ2-3)
CASSLYRDTQYF

SEQ ID NO: 637905 - protein, 14 aa, Homo sapiens
  CDR3 for alpha chain variable domain of TCR clone 318953 (TRAV13-2, TRAJ17)
CAENSKAAGNKLTF

SEQ ID NO: 637906 - protein, 15 aa, Homo sapiens
  CDR3 for beta chain variable domain of TCR clone 318953 (TRBV27, TRBJ2-1)
CASSNGGGSSSEQFF

SEQ ID NO: 637907 - protein, 17 aa, Homo sapiens
  CDR3 for alpha chain variable domain of TCR clone 318954 (TRAV3, TRAJ6)
CAVRDGPRAGGSYIPTF

SEQ ID NO: 637908 - protein, 14 aa, Homo sapiens
  CDR3 for beta chain variable domain of TCR clone 318954 (TRBV4-2, TRBJ1-2)
CASSPGGSNYGYTF

SEQ ID NO: 637909 - protein, 13 aa, Homo sapiens
  CDR3 for alpha chain variable domain of TCR clone 318955 (TRAV8-6, TRAJ21)
CAVSPSYLNKFYF

SEQ ID NO: 637910 - protein, 14 aa, Homo sapiens
  CDR3 for beta chain variable domain of TCR clone 318955 (TRBV7-9, TRBJ2-5)
CASSLDTAQETQYF

SEQ ID NO: 637911 - protein, 15 aa, Homo sapiens
  CDR3 for alpha chain variable domain of TCR clone 318956 (TRAV3, TRAJ20)
CAVRDIKLSDYKLSF

SEQ ID NO: 637912 - protein, 14 aa, Homo sapiens
  CDR3 for beta chain variable domain of TCR clone 318956 (TRBV7-6, TRBJ2-7)
CASSFRQGADEQYF

SEQ ID NO: 637913 - protein, 11 aa, Homo sapiens
  CDR3 for alpha chain variable domain of TCR clone 318957 (TRAV3, TRAJ21)
CAVGNFNKFYF

SEQ ID NO: 637914 - protein, 14 aa, Homo sapiens
  CDR3 for beta chain variable domain of TCR clone 318957 (TRBV19, TRBJ2-1)
CASQTFVLSGEQFF

SEQ ID NO: 637915 - protein, 12 aa, Homo sapiens
  CDR3 for alpha chain variable domain of TCR clone 318958 (TRAV1-1, TRAJ8)
CAGGTGFQKLVF

SEQ ID NO: 637916 - protein, 16 aa, Homo sapiens
  CDR3 for beta chain variable domain of TCR clone 318958 (TRBV28, TRBJ1-2)
CASRIQGANYGYTLVR

SEQ ID NO: 637917 - protein, 12 aa, Homo sapiens
  CDR3 for alpha chain variable domain of TCR clone 318959 (TRAV12-1, TRAJ40)
CVFFSGTYKYIF

SEQ ID NO: 637918 - protein, 17 aa, Homo sapiens
  CDR3 for beta chain variable domain of TCR clone 318959 (TRBV7-8, TRBJ2-6)
CASSAGTGGAGANVLTF

SEQ ID NO: 637919 - protein, 14 aa, Homo sapiens
  CDR3 for alpha chain variable domain of TCR clone 318960 (TRAV12-3, TRAJ9)
CAMSPNTGGFKTIF

SEQ ID NO: 637920 - protein, 11 aa, Homo sapiens
  CDR3 for beta chain variable domain of TCR clone 318960 (TRBV19, TRBJ2-7)
CASGNSYEQYF

SEQ ID NO: 637921 - protein, 15 aa, Homo sapiens
  CDR3 for alpha chain variable domain of TCR clone 318961 (TRAV3, TRAJ22)
CAVRDRGGSARQLTF

SEQ ID NO: 637922 - protein, 16 aa, Homo sapiens
  CDR3 for beta chain variable domain of TCR clone 318961 (TRBV24-1, TRBJ2-2)
CATSDTGQGGTGELFF

SEQ ID NO: 637923 - protein, 15 aa, Homo sapiens
  CDR3 for alpha chain variable domain of TCR clone 318962 (TRAV13-2, TRAJ10)
CAENRDTGGGNKLTF

SEQ ID NO: 637924 - protein, 16 aa, Homo sapiens
  CDR3 for beta chain variable domain of TCR clone 318962 (TRBV2, TRBJ1-3)
CASSRTGGSTGNSIYF

SEQ ID NO: 637925 - protein, 13 aa, Homo sapiens
  CDR3 for alpha chain variable domain of TCR clone 318963 (TRAV35, TRAJ44)
CAGLSGTASKLTF

SEQ ID NO: 637926 - protein, 16 aa, Homo sapiens
  CDR3 for beta chain variable domain of TCR clone 318963 (TRBV5-7, TRBJ2-7)
CASSSPGGRTPYEQYF

SEQ ID NO: 637927 - protein, 17 aa, Homo sapiens
  CDR3 for alpha chain variable domain of TCR clone 318964 (TRAV26-1, TRAJ53)
CIVRVDDSGGSNYKLTF

SEQ ID NO: 637928 - protein, 15 aa, Homo sapiens
  CDR3 for beta chain variable domain of TCR clone 318964 (TRBV20-1, TRBJ2-7)
CSARVPAAYFSEQYF

SEQ ID NO: 637929 - protein, 12 aa, Homo sapiens
  CDR3 for alpha chain variable domain of TCR clone 318965 (TRAV13-1, TRAJ17)
CAARTAGNKLTF

SEQ ID NO: 637930 - protein, 14 aa, Homo sapiens
  CDR3 for beta chain variable domain of TCR clone 318965 (TRBV15, TRBJ2-3)
CATRSGTSTDTQYF

SEQ ID NO: 637931 - protein, 13 aa, Homo sapiens
  CDR3 for alpha chain variable domain of TCR clone 318966 (TRAV1-1, TRAJ9)
CAAKNTGGFKTIF

SEQ ID NO: 637932 - protein, 20 aa, Homo sapiens
  CDR3 for beta chain variable domain of TCR clone 318966 (TRBV7-8, TRBJ2-2)
CASSHFFPGPTIHITGELFF

SEQ ID NO: 637933 - protein, 13 aa, Homo sapiens
  CDR3 for alpha chain variable domain of TCR clone 318967 (TRAV14/DV4, TRAJ23)
CAMREVKGGKLIF

SEQ ID NO: 637934 - protein, 16 aa, Homo sapiens
  CDR3 for beta chain variable domain of TCR clone 318967 (TRBV12-4, TRBJ2-3)
CASSFGTGGISDTQYF

SEQ ID NO: 637935 - protein, 13 aa, Homo sapiens
  CDR3 for alpha chain variable domain of TCR clone 318968 (TRAV3, TRAJ21)
CAVGNFNKFYFVS

SEQ ID NO: 637936 - protein, 16 aa, Homo sapiens
  CDR3 for beta chain variable domain of TCR clone 318968 (TRBV19, TRBJ2-1)
CASSKAGPSSYNEQFF

SEQ ID NO: 637937 - protein, 12 aa, Homo sapiens
  CDR3 for alpha chain variable domain of TCR clone 318969 (TRAV20, TRAJ4)
CRASGGYNKLIF

SEQ ID NO: 637938 - protein, 18 aa, Homo sapiens
  CDR3 for beta chain variable domain of TCR clone 318969 (TRBV19, TRBJ1-5)
CASSKGQVSIHSKQPQHF

SEQ ID NO: 637939 - protein, 16 aa, Homo sapiens
  CDR3 for alpha chain variable domain of TCR clone 318970 (TRAV12-2, TRAJ40)
CAVIRGGTSGTYKYIF

SEQ ID NO: 637940 - protein, 12 aa, Homo sapiens
  CDR3 for beta chain variable domain of TCR clone 318970 (TRBV11-2, TRBJ2-2)
CASSLPTGELFF

SEQ ID NO: 637941 - protein, 11 aa, Homo sapiens
  CDR3 for alpha chain variable domain of TCR clone 318971 (TRAV8-6, TRAJ20)
CAVSYDYKLSF

SEQ ID NO: 637942 - protein, 14 aa, Homo sapiens
  CDR3 for beta chain variable domain of TCR clone 318971 (TRBV10-2, TRBJ2-2)
CASSERSSTGELFF

SEQ ID NO: 637943 - protein, 13 aa, Homo sapiens
  CDR3 for alpha chain variable domain of TCR clone 318972 (TRAV21, TRAJ8)
CAAPSTGFQKLVF

SEQ ID NO: 637944 - protein, 13 aa, Homo sapiens
  CDR3 for beta chain variable domain of TCR clone 318972 (TRBV6-3, TRBJ2-3)
CASTLQGIDTQYF

SEQ ID NO: 637945 - protein, 14 aa, Homo sapiens
  CDR3 for alpha chain variable domain of TCR clone 318973 (TRAV3, TRAJ8)
CAALMNTGFQKLVF

SEQ ID NO: 637946 - protein, 15 aa, Homo sapiens
  CDR3 for beta chain variable domain of TCR clone 318973 (TRBV28, TRBJ2-5)
CASSLGVGNQETQYF

SEQ ID NO: 637947 - protein, 15 aa, Homo sapiens
  CDR3 for alpha chain variable domain of TCR clone 318974 (TRAV13-1, TRAJ43)
RAATPELGGNNDMRF

SEQ ID NO: 637948 - protein, 15 aa, Homo sapiens
  CDR3 for beta chain variable domain of TCR clone 318974 (TRBV10-2, TRBJ2-6)
CASSEQGTGANVLTF

SEQ ID NO: 637949 - protein, 15 aa, Homo sapiens
  CDR3 for alpha chain variable domain of TCR clone 318975 (TRAV3, TRAJ47)
CAVGDIGEYGNKLVF

SEQ ID NO: 637950 - protein, 14 aa, Homo sapiens
  CDR3 for beta chain variable domain of TCR clone 318975 (TRBV13, TRBJ2-5)
CASSLERVGETQCF

SEQ ID NO: 637951 - protein, 13 aa, Homo sapiens
  CDR3 for alpha chain variable domain of TCR clone 318976 (TRAV1-1, TRAJ38)
CASNAGNNRKLIW

SEQ ID NO: 637952 - protein, 13 aa, Homo sapiens
  CDR3 for beta chain variable domain of TCR clone 318976 (TRBV11-2, TRBJ2-5)
CASSSTGEETQYS

SEQ ID NO: 637953 - protein, 12 aa, Homo sapiens
  CDR3 for alpha chain variable domain of TCR clone 318977 (TRAV1-1, TRAJ39)
CAVPVVGNMLTF

SEQ ID NO: 637954 - protein, 13 aa, Homo sapiens
  CDR3 for beta chain variable domain of TCR clone 318977 (TRBV29-1, TRBJ1-1)
CSVVGQGGTEAFF

SEQ ID NO: 637955 - protein, 14 aa, Homo sapiens
  CDR3 for alpha chain variable domain of TCR clone 318978 (TRAV1-1, TRAJ27)
CAVIYDTNAGKSTF

SEQ ID NO: 637956 - protein, 14 aa, Homo sapiens
  CDR3 for beta chain variable domain of TCR clone 318978 (TRBV6-5, TRBJ1-2)
CASSYDGTGGGYTF

SEQ ID NO: 637957 - protein, 16 aa, Homo sapiens
  CDR3 for alpha chain variable domain of TCR clone 318979 (TRAV3, TRAJ21)
CAVRDIERGNFNKFYF

SEQ ID NO: 637958 - protein, 11 aa, Homo sapiens
  CDR3 for beta chain variable domain of TCR clone 318979 (TRBV20-1, TRBJ1-5)
CSAQGDQTQHF

SEQ ID NO: 637959 - protein, 15 aa, Homo sapiens
  CDR3 for alpha chain variable domain of TCR clone 318980 (TRAV13-2, TRAJ50)
CAEEPLKTSYDKVIF

SEQ ID NO: 637960 - protein, 16 aa, Homo sapiens
  CDR3 for beta chain variable domain of TCR clone 318980 (TRBV5-1, TRBJ1-1)
CASSSGVNSLNTEAFF

SEQ ID NO: 637961 - protein, 15 aa, Homo sapiens
  CDR3 for alpha chain variable domain of TCR clone 318981 (TRAV3, TRAJ47)
CAVRDIGEYGNKLVF

SEQ ID NO: 637962 - protein, 13 aa, Homo sapiens
  CDR3 for beta chain variable domain of TCR clone 318981 (TRBV7-3, TRBJ1-1)
CASSQDWGAEAFF

SEQ ID NO: 637963 - protein, 14 aa, Homo sapiens
  CDR3 for alpha chain variable domain of TCR clone 318982 (TRAV1-2, TRAJ16)
CAVNRVSDGQKLLF

SEQ ID NO: 637964 - protein, 13 aa, Homo sapiens
  CDR3 for beta chain variable domain of TCR clone 318982 (TRBV20-1, TRBJ1-1)
CSAPPGGHTEAFF

SEQ ID NO: 637965 - protein, 14 aa, Homo sapiens
  CDR3 for alpha chain variable domain of TCR clone 318983 (TRAV17, TRAJ22)
CATDASGSARQLTF

SEQ ID NO: 637966 - protein, 18 aa, Homo sapiens
  CDR3 for beta chain variable domain of TCR clone 318983 (TRBV7-2, TRBJ2-3)
CASSPPGGGITSTDTQYF

SEQ ID NO: 637967 - protein, 18 aa, Homo sapiens
  CDR3 for alpha chain variable domain of TCR clone 318984 (TRAV13-1, TRAJ52)
CAASKRSAGGTSYGNLTF

SEQ ID NO: 637968 - protein, 16 aa, Homo sapiens
  CDR3 for beta chain variable domain of TCR clone 318984 (TRBV12-5, TRBJ2-5)
CASGPRTSGNQETQYF

SEQ ID NO: 637969 - protein, 17 aa, Homo sapiens
  CDR3 for alpha chain variable domain of TCR clone 318985 (TRAV13-2, TRAJ5)
CAESVVIVGHGQESTYF

SEQ ID NO: 637970 - protein, 18 aa, Homo sapiens
  CDR3 for beta chain variable domain of TCR clone 318985 (TRBV4-1, TRBJ2-3)
CASSHQLAGGSSTDTQYF

SEQ ID NO: 637971 - protein, 13 aa, Homo sapiens
  CDR3 for alpha chain variable domain of TCR clone 318986 (TRAV8-6, TRAJ21)
CALSPSSLNKFYF

SEQ ID NO: 637972 - protein, 13 aa, Homo sapiens
  CDR3 for beta chain variable domain of TCR clone 318986 (TRBV10-2, TRBJ2-3)
CASSESGDHTQYF

SEQ ID NO: 637973 - protein, 14 aa, Homo sapiens
  CDR3 for alpha chain variable domain of TCR clone 318987 (TRAV16, TRAJ32)
CALKSGGATNRLIF

SEQ ID NO: 637974 - protein, 13 aa, Homo sapiens
  CDR3 for beta chain variable domain of TCR clone 318987 (TRBV15, TRBJ1-6)
CATSGGLNLPLHF

SEQ ID NO: 637975 - protein, 14 aa, Homo sapiens
  CDR3 for alpha chain variable domain of TCR clone 318988 (TRAV1-2, TRAJ8)
CAVREDTGFQKLVY

SEQ ID NO: 637976 - protein, 14 aa, Homo sapiens
  CDR3 for beta chain variable domain of TCR clone 318988 (TRBV15, TRBJ2-3)
CATRSGTSTDTQYF

SEQ ID NO: 637977 - protein, 13 aa, Homo sapiens
  CDR3 for alpha chain variable domain of TCR clone 318989 (TRAV2, TRAJ40)
CAVVTSGTYKYIF

SEQ ID NO: 637978 - protein, 12 aa, Homo sapiens
  CDR3 for beta chain variable domain of TCR clone 318989 (TRBV11-2, TRBJ2-2)
CASSLGGGELFV

SEQ ID NO: 637979 - protein, 14 aa, Homo sapiens
  CDR3 for alpha chain variable domain of TCR clone 318990 (TRAV12-2, TRAJ13)
FAVKKTGGYQKVTF

SEQ ID NO: 637980 - protein, 13 aa, Homo sapiens
  CDR3 for beta chain variable domain of TCR clone 318990 (TRBV20-1, TRBJ1-3)
CSARLGVGNTIYF

SEQ ID NO: 637981 - protein, 12 aa, Homo sapiens
  CDR3 for alpha chain variable domain of TCR clone 318991 (TRAV16, TRAJ10)
CSRTGGGNKLTF

SEQ ID NO: 637982 - protein, 17 aa, Homo sapiens
  CDR3 for beta chain variable domain of TCR clone 318991 (TRBV7-8, TRBJ2-6)
CASSAGTGGAGANDLTF

SEQ ID NO: 637983 - protein, 13 aa, Homo sapiens
  CDR3 for alpha chain variable domain of TCR clone 318992 (TRAV8-4, TRAJ30)
CAVSVNRDDKIIF

SEQ ID NO: 637984 - protein, 17 aa, Homo sapiens
  CDR3 for beta chain variable domain of TCR clone 318992 (TRBV3-1, TRBJ2-7)
CASSQDLTGLSSYEQYF

SEQ ID NO: 637985 - protein, 14 aa, Homo sapiens
  CDR3 for alpha chain variable domain of TCR clone 318993 (TRAV1-2, TRAJ15)
CAMRDRQAGTALIF

SEQ ID NO: 637986 - protein, 14 aa, Homo sapiens
  CDR3 for beta chain variable domain of TCR clone 318993 (TRBV7-8, TRBJ2-7)
CASSPRDRVYEQYF

SEQ ID NO: 637987 - protein, 14 aa, Homo sapiens
  CDR3 for alpha chain variable domain of TCR clone 318994 (TRAV3, TRAJ37)
CSVKESGNTGKLIF

SEQ ID NO: 637988 - protein, 14 aa, Homo sapiens
  CDR3 for beta chain variable domain of TCR clone 318994 (TRBV2, TRBJ1-5)
CASSENRGGQPQHF

SEQ ID NO: 637989 - protein, 14 aa, Homo sapiens
  CDR3 for alpha chain variable domain of TCR clone 318995 (TRAV1-2, TRAJ16)
CAVNRFSDGQKLLF

SEQ ID NO: 637990 - protein, 15 aa, Homo sapiens
  CDR3 for beta chain variable domain of TCR clone 318995 (TRBV9, TRBJ1-6)
CASSLAGTGDSTLHF

SEQ ID NO: 637991 - protein, 13 aa, Homo sapiens
  CDR3 for alpha chain variable domain of TCR clone 318996 (TRAV23/DV6, TRAJ24)
CAASEDSWGNLQF

SEQ ID NO: 637992 - protein, 12 aa, Homo sapiens
  CDR3 for beta chain variable domain of TCR clone 318996 (TRBV5-1, TRBJ2-7)
CASSDSTYEQYF

SEQ ID NO: 637993 - protein, 20 aa, Homo sapiens
  CDR3 for alpha chain variable domain of TCR clone 318997 (TRAV12-1, TRAJ42)
SSVIQPPTSVKGGSQGNPIF

SEQ ID NO: 637994 - protein, 18 aa, Homo sapiens
  CDR3 for beta chain variable domain of TCR clone 318997 (TRBV11-2, TRBJ2-3)
CASSLGGAARGAPNTQYF

SEQ ID NO: 637995 - protein, 16 aa, Homo sapiens
  CDR3 for alpha chain variable domain of TCR clone 318998 (TRAV26-1, TRAJ47)
CIVRVVLSPYGNKLVF

SEQ ID NO: 637996 - protein, 16 aa, Homo sapiens
  CDR3 for beta chain variable domain of TCR clone 318998 (TRBV5-1, TRBJ2-1)
CASSFGVSGSYNEQFF

SEQ ID NO: 637997 - protein, 14 aa, Homo sapiens
  CDR3 for alpha chain variable domain of TCR clone 318999 (TRAV12-3, TRAJ10)
SHLPLTGGGNTLTF

SEQ ID NO: 637998 - protein, 12 aa, Homo sapiens
  CDR3 for beta chain variable domain of TCR clone 318999 (TRBV7-9, TRBJ2-7)
CASSIKREEQYF

SEQ ID NO: 637999 - protein, 16 aa, Homo sapiens
  CDR3 for alpha chain variable domain of TCR clone 319000 (TRAV16, TRAJ4)
CALSRMFSGGYNKLIF

SEQ ID NO: 638000 - protein, 12 aa, Homo sapiens
  CDR3 for beta chain variable domain of TCR clone 319000 (TRBV14, TRBJ2-7)
CASSSLKGEQYF

SEQ ID NO: 638001 - protein, 12 aa, Homo sapiens
  CDR3 for alpha chain variable domain of TCR clone 319001 (TRAV13-1, TRAJ48)
CAANFGNEKLTF

SEQ ID NO: 638002 - protein, 13 aa, Homo sapiens
  CDR3 for beta chain variable domain of TCR clone 319001 (TRBV5-5, TRBJ2-7)
CASSSQTRQRQYF

SEQ ID NO: 638003 - protein, 14 aa, Homo sapiens
  CDR3 for alpha chain variable domain of TCR clone 319002 (TRAV17, TRAJ34)
CATDSLEGTDKLIF

SEQ ID NO: 638004 - protein, 20 aa, Homo sapiens
  CDR3 for beta chain variable domain of TCR clone 319002 (TRBV11-2, TRBJ2-7)
LRTRPCISVPAAELPYEQYF

SEQ ID NO: 638005 - protein, 17 aa, Homo sapiens
  CDR3 for alpha chain variable domain of TCR clone 319003 (TRAV3, TRAJ6)
CAVRDGPRAGGSYIPTF

SEQ ID NO: 638006 - protein, 13 aa, Homo sapiens
  CDR3 for beta chain variable domain of TCR clone 319003 (TRBV12-5, TRBJ2-3)
CARGDRQSDTQYF

SEQ ID NO: 638007 - protein, 11 aa, Homo sapiens
  CDR3 for alpha chain variable domain of TCR clone 319004 (TRAV17, TRAJ9)
CGFTGGFKTIF

SEQ ID NO: 638008 - protein, 16 aa, Homo sapiens
  CDR3 for beta chain variable domain of TCR clone 319004 (TRBV4-2, TRBJ1-5)
CASSQGQGASNQPQHF

SEQ ID NO: 638009 - protein, 14 aa, Homo sapiens
  CDR3 for alpha chain variable domain of TCR clone 319005 (TRAV1-2, TRAJ16)
CAVNRFSDGQKLLF

SEQ ID NO: 638010 - protein, 15 aa, Homo sapiens
  CDR3 for beta chain variable domain of TCR clone 319005 (TRBV19, TRBJ2-1)
CASSLETSGYNEQFF

SEQ ID NO: 638011 - protein, 12 aa, Homo sapiens
  CDR3 for alpha chain variable domain of TCR clone 319006 (TRAV13-2, TRAJ23)
CAERHRGGKLIY

SEQ ID NO: 638012 - protein, 15 aa, Homo sapiens
  CDR3 for beta chain variable domain of TCR clone 319006 (TRBV20-1, TRBJ1-4)
SAPGQGLLTNEKLFF

SEQ ID NO: 638013 - protein, 16 aa, Homo sapiens
  CDR3 for alpha chain variable domain of TCR clone 319007 (TRAV14/DV4, TRAJ54)
CAMREGRIQGAQKLVF

SEQ ID NO: 638014 - protein, 16 aa, Homo sapiens
  CDR3 for beta chain variable domain of TCR clone 319007 (TRBV5-1, TRBJ2-5)
CASSLTTSLGKETQYF

SEQ ID NO: 638015 - protein, 12 aa, Homo sapiens
  CDR3 for alpha chain variable domain of TCR clone 319008 (TRAV27, TRAJ41)
CAGRNSGYALNF

SEQ ID NO: 638016 - protein, 15 aa, Homo sapiens
  CDR3 for beta chain variable domain of TCR clone 319008 (TRBV20-1, TRBJ1-5)
CSATSDRSLGQPQHF

SEQ ID NO: 638017 - protein, 17 aa, Homo sapiens
  CDR3 for alpha chain variable domain of TCR clone 319009 (TRAV3, TRAJ42)
CAVRDRDYGGSQGDLIF

SEQ ID NO: 638018 - protein, 14 aa, Homo sapiens
  CDR3 for beta chain variable domain of TCR clone 319009 (TRBV12-5, TRBJ2-5)
CASGSRTHQETQYF

SEQ ID NO: 638019 - protein, 16 aa, Homo sapiens
  CDR3 for alpha chain variable domain of TCR clone 319010 (TRAV12-3, TRAJ53)
CAMSPGSGGSNYKLTF

SEQ ID NO: 638020 - protein, 12 aa, Homo sapiens
  CDR3 for beta chain variable domain of TCR clone 319010 (TRBV20-1, TRBJ2-7)
CSAGLKMGEQYF

SEQ ID NO: 638021 - protein, 14 aa, Homo sapiens
  CDR3 for alpha chain variable domain of TCR clone 319011 (TRAV12-1, TRAJ12)
CVVTRMDSSYKLIF

SEQ ID NO: 638022 - protein, 16 aa, Homo sapiens
  CDR3 for beta chain variable domain of TCR clone 319011 (TRBV27, TRBJ2-2)
CASSFRGLVRTGELFF

SEQ ID NO: 638023 - protein, 11 aa, Homo sapiens
  CDR3 for alpha chain variable domain of TCR clone 319012 (TRAV30, TRAJ23)
CVTEIAGKLIF

SEQ ID NO: 638024 - protein, 16 aa, Homo sapiens
  CDR3 for beta chain variable domain of TCR clone 319012 (TRBV7-2, TRBJ2-7)
CASTSRAASGGYEQYF

SEQ ID NO: 638025 - protein, 12 aa, Homo sapiens
  CDR3 for alpha chain variable domain of TCR clone 319013 (TRAV1-2, TRAJ33)
CACGDSNYQLIW

SEQ ID NO: 638026 - protein, 12 aa, Homo sapiens
  CDR3 for beta chain variable domain of TCR clone 319013 (TRBV11-2, TRBJ2-1)
CASSPGNNEQFF

SEQ ID NO: 638027 - protein, 14 aa, Homo sapiens
  CDR3 for alpha chain variable domain of TCR clone 319014 (TRAV1-2, TRAJ8)
CAVREYTGFQKLVF

SEQ ID NO: 638028 - protein, 14 aa, Homo sapiens
  CDR3 for beta chain variable domain of TCR clone 319014 (TRBV7-6, TRBJ2-3)
CASSLGTVTDTQYF

SEQ ID NO: 638029 - protein, 16 aa, Homo sapiens
  CDR3 for alpha chain variable domain of TCR clone 319015 (TRAV3, TRAJ37)
CAVRPHGSGNTGKLIF

SEQ ID NO: 638030 - protein, 16 aa, Homo sapiens
  CDR3 for beta chain variable domain of TCR clone 319015 (TRBV9, TRBJ1-2)
CPSSVEEKVSPYGYTF

SEQ ID NO: 638031 - protein, 11 aa, Homo sapiens
  CDR3 for alpha chain variable domain of TCR clone 319016 (TRAV26-1, TRAJ37)
CIVRVGRELIL

SEQ ID NO: 638032 - protein, 15 aa, Homo sapiens
  CDR3 for beta chain variable domain of TCR clone 319016 (TRBV11-2, TRBJ2-1)
CASSLGPDSYNEQFF

SEQ ID NO: 638033 - protein, 14 aa, Homo sapiens
  CDR3 for alpha chain variable domain of TCR clone 319017 (TRAV13-1, TRAJ44)
RAAKATGTASKLTF

SEQ ID NO: 638034 - protein, 13 aa, Homo sapiens
  CDR3 for beta chain variable domain of TCR clone 319017 (TRBV5-5, TRBJ1-2)
CASSFWRGEDYTF

SEQ ID NO: 638035 - protein, 14 aa, Homo sapiens
  CDR3 for alpha chain variable domain of TCR clone 319018 (TRAV12-3, TRAJ11)
CAMTTNSGYSTLTF

SEQ ID NO: 638036 - protein, 16 aa, Homo sapiens
  CDR3 for beta chain variable domain of TCR clone 319018 (TRBV27, TRBJ2-2)
CASSFRGLVRTGELFF

SEQ ID NO: 638037 - protein, 14 aa, Homo sapiens
  CDR3 for alpha chain variable domain of TCR clone 319019 (TRAV13-1, TRAJ35)
CAASKGGFGNVLHC

SEQ ID NO: 638038 - protein, 16 aa, Homo sapiens
  CDR3 for beta chain variable domain of TCR clone 319019 (TRBV7-3, TRBJ2-3)
CASSLSGYRPEDTQYF

SEQ ID NO: 638039 - protein, 12 aa, Homo sapiens
  CDR3 for alpha chain variable domain of TCR clone 319020 (TRAV21, TRAJ3)
CCFYSSASKIIF

SEQ ID NO: 638040 - protein, 16 aa, Homo sapiens
  CDR3 for beta chain variable domain of TCR clone 319020 (TRBV7-9, TRBJ2-1)
CASSDVAGGSYNEQFF

SEQ ID NO: 638041 - protein, 10 aa, Homo sapiens
  CDR3 for alpha chain variable domain of TCR clone 319021 (TRAV38-1, TRAJ34)
CAFMDDKLIF

SEQ ID NO: 638042 - protein, 13 aa, Homo sapiens
  CDR3 for beta chain variable domain of TCR clone 319021 (TRBV12-4, TRBJ1-2)
CASSLRQGKGYTF

SEQ ID NO: 638043 - protein, 13 aa, Homo sapiens
  CDR3 for alpha chain variable domain of TCR clone 319022 (TRAV26-1, TRAJ33)
CIVRVEGNYQLIW

SEQ ID NO: 638044 - protein, 16 aa, Homo sapiens
  CDR3 for beta chain variable domain of TCR clone 319022 (TRBV15, TRBJ2-7)
CATSRHRGRGRGEQYF

SEQ ID NO: 638045 - protein, 12 aa, Homo sapiens
  CDR3 for alpha chain variable domain of TCR clone 319023 (TRAV1-2, TRAJ42)
CVAGGSQGNLIF

SEQ ID NO: 638046 - protein, 19 aa, Homo sapiens
  CDR3 for beta chain variable domain of TCR clone 319023 (TRBV23-1, TRBJ2-3)
TVSLRQQPRSTGSTDTQYF

SEQ ID NO: 638047 - protein, 12 aa, Homo sapiens
  CDR3 for alpha chain variable domain of TCR clone 319024 (TRAV13-2, TRAJ23)
CAERHRGGKLIF

SEQ ID NO: 638048 - protein, 13 aa, Homo sapiens
  CDR3 for beta chain variable domain of TCR clone 319024 (TRBV7-9, TRBJ1-4)
CATQIGPNEKLFF

SEQ ID NO: 638049 - protein, 16 aa, Homo sapiens
  CDR3 for alpha chain variable domain of TCR clone 319025 (TRAV3, TRAJ37)
CAVRPHGSGNTGKLIF

SEQ ID NO: 638050 - protein, 13 aa, Homo sapiens
  CDR3 for beta chain variable domain of TCR clone 319025 (TRBV5-4, TRBJ2-5)
CASSPVSQETQYF

SEQ ID NO: 638051 - protein, 11 aa, Homo sapiens
  CDR3 for alpha chain variable domain of TCR clone 319026 (TRAV1-2, TRAJ8)
CAVSSFQKLAF

SEQ ID NO: 638052 - protein, 19 aa, Homo sapiens
  CDR3 for beta chain variable domain of TCR clone 319026 (TRBV7-2, TRBJ2-5)
CASGTSGGTPPLGSETQYF

SEQ ID NO: 638053 - protein, 14 aa, Homo sapiens
  CDR3 for alpha chain variable domain of TCR clone 319027 (TRAV23/DV6, TRAJ58)
CAGMRETSGSRLTF

SEQ ID NO: 638054 - protein, 13 aa, Homo sapiens
  CDR3 for beta chain variable domain of TCR clone 319027 (TRBV28, TRBJ2-7)
CASRSSGVYEQFF

SEQ ID NO: 638055 - protein, 13 aa, Homo sapiens
  CDR3 for alpha chain variable domain of TCR clone 319028 (TRAV26-1, TRAJ30)
CIVRVESNDKIIF

SEQ ID NO: 638056 - protein, 16 aa, Homo sapiens
  CDR3 for beta chain variable domain of TCR clone 319028 (TRBV13, TRBJ2-3)
CQQPLQGSGGGNTQYF

SEQ ID NO: 638057 - protein, 11 aa, Homo sapiens
  CDR3 for alpha chain variable domain of TCR clone 319029 (TRAV1-2, TRAJ20)
CAVANDYKLSF

SEQ ID NO: 638058 - protein, 18 aa, Homo sapiens
  CDR3 for beta chain variable domain of TCR clone 319029 (TRBV7-9, TRBJ2-7)
CASSLTTSGSRTWYEQYF

SEQ ID NO: 638059 - protein, 16 aa, Homo sapiens
  CDR3 for alpha chain variable domain of TCR clone 319030 (TRAV1-2, TRAJ10)
CAVRGVLTGGGNKLTF

SEQ ID NO: 638060 - protein, 15 aa, Homo sapiens
  CDR3 for beta chain variable domain of TCR clone 319030 (TRBV10-3, TRBJ2-7)
CATREQGLRSYEQYF

SEQ ID NO: 638061 - protein, 12 aa, Homo sapiens
  CDR3 for alpha chain variable domain of TCR clone 319031 (TRAV12-3, TRAJ20)
CAMVRGDYKLSF

SEQ ID NO: 638062 - protein, 15 aa, Homo sapiens
  CDR3 for beta chain variable domain of TCR clone 319031 (TRBV11-2, TRBJ2-1)
CASSKNRGLIYEQFF

SEQ ID NO: 638063 - protein, 14 aa, Homo sapiens
  CDR3 for alpha chain variable domain of TCR clone 319032 (TRAV1-2, TRAJ8)
CAVREDKGFQKLVF

SEQ ID NO: 638064 - protein, 15 aa, Homo sapiens
  CDR3 for beta chain variable domain of TCR clone 319032 (TRBV9, TRBJ1-6)
CASSVAGTGDSPLHF

SEQ ID NO: 638065 - protein, 14 aa, Homo sapiens
  CDR3 for alpha chain variable domain of TCR clone 319033 (TRAV13-2, TRAJ6)
CAERGSGGSYIPTF

SEQ ID NO: 638066 - protein, 13 aa, Homo sapiens
  CDR3 for beta chain variable domain of TCR clone 319033 (TRBV19, TRBJ1-2)
CASSQGQVYGDTF

SEQ ID NO: 638067 - protein, 11 aa, Homo sapiens
  CDR3 for alpha chain variable domain of TCR clone 319034 (TRAV27, TRAJ47)
SIVEYANKLVF

SEQ ID NO: 638068 - protein, 18 aa, Homo sapiens
  CDR3 for beta chain variable domain of TCR clone 319034 (TRBV2, TRBJ2-1)
CASRGLAGGPRTYNEQFF

SEQ ID NO: 638069 - protein, 13 aa, Homo sapiens
  CDR3 for alpha chain variable domain of TCR clone 319035 (TRAV12-2, TRAJ31)
CAVKADNNARLLF

SEQ ID NO: 638070 - protein, 15 aa, Homo sapiens
  CDR3 for beta chain variable domain of TCR clone 319035 (TRBV15, TRBJ1-5)
CATSREQGGNQPQHF

SEQ ID NO: 638071 - protein, 14 aa, Homo sapiens
  CDR3 for alpha chain variable domain of TCR clone 319036 (TRAV34, TRAJ44)
CGADGTGTASKLTF

SEQ ID NO: 638072 - protein, 15 aa, Homo sapiens
  CDR3 for beta chain variable domain of TCR clone 319036 (TRBV2, TRBJ2-1)
CASSELAGSYNEQFF

SEQ ID NO: 638073 - protein, 18 aa, Homo sapiens
  CDR3 for alpha chain variable domain of TCR clone 319037 (TRAV13-1, TRAJ52)
CAAKNPNAGGTSYGKLTF

SEQ ID NO: 638074 - protein, 15 aa, Homo sapiens
  CDR3 for beta chain variable domain of TCR clone 319037 (TRBV9, TRBJ1-6)
CASRVAGTGDSPLHF

SEQ ID NO: 638075 - protein, 14 aa, Homo sapiens
  CDR3 for alpha chain variable domain of TCR clone 319038 (TRAV26-1, TRAJ3)
CIVRVGSSASKIIF

SEQ ID NO: 638076 - protein, 14 aa, Homo sapiens
  CDR3 for beta chain variable domain of TCR clone 319038 (TRBV5-5, TRBJ2-7)
CASSLGLAVYEQYF

SEQ ID NO: 638077 - protein, 11 aa, Homo sapiens
  CDR3 for alpha chain variable domain of TCR clone 319039 (TRAV12-2, TRAJ43)
CASPIGNDMRF

SEQ ID NO: 638078 - protein, 12 aa, Homo sapiens
  CDR3 for beta chain variable domain of TCR clone 319039 (TRBV11-2, TRBJ2-2)
CASSLPTGELFF

SEQ ID NO: 638079 - protein, 18 aa, Homo sapiens
  CDR3 for alpha chain variable domain of TCR clone 319040 (TRAV13-1, TRAJ52)
CAASKRSAGGTSYGKLTF

SEQ ID NO: 638080 - protein, 15 aa, Homo sapiens
  CDR3 for beta chain variable domain of TCR clone 319040 (TRBV18, TRBJ2-6)
CASSPSYAGANVLTF

SEQ ID NO: 638081 - protein, 14 aa, Homo sapiens
  CDR3 for alpha chain variable domain of TCR clone 319041 (TRAV20, TRAJ56)
CAVQFGGANSKLTF

SEQ ID NO: 638082 - protein, 14 aa, Homo sapiens
  CDR3 for beta chain variable domain of TCR clone 319041 (TRBV20-1, TRBJ2-7)
CSAKRGRSSYEPYF

SEQ ID NO: 638083 - protein, 14 aa, Homo sapiens
  CDR3 for alpha chain variable domain of TCR clone 319042 (TRAV2, TRAJ9)
CAVEDRSGGFKTIF

SEQ ID NO: 638084 - protein, 11 aa, Homo sapiens
  CDR3 for beta chain variable domain of TCR clone 319042 (TRBV7-2, TRBJ2-7)
CASSSGLWQYF

SEQ ID NO: 638085 - protein, 13 aa, Homo sapiens
  CDR3 for alpha chain variable domain of TCR clone 319043 (TRAV8-4, TRAJ5)
CAVLDTGRRALTF

SEQ ID NO: 638086 - protein, 12 aa, Homo sapiens
  CDR3 for beta chain variable domain of TCR clone 319043 (TRBV7-9, TRBJ1-6)
CASSASESPLHL

SEQ ID NO: 638087 - protein, 14 aa, Homo sapiens
  CDR3 for alpha chain variable domain of TCR clone 319044 (TRAV26-1, TRAJ38)
CIADNAGNNRKLIW

SEQ ID NO: 638088 - protein, 15 aa, Homo sapiens
  CDR3 for beta chain variable domain of TCR clone 319044 (TRBV5-1, TRBJ2-7)
CASSLMTSGSNEQYF

SEQ ID NO: 638089 - protein, 18 aa, Homo sapiens
  CDR3 for alpha chain variable domain of TCR clone 319045 (TRAV13-1, TRAJ52)
CAAKNPNAGGTSYGKLTL

SEQ ID NO: 638090 - protein, 14 aa, Homo sapiens
  CDR3 for beta chain variable domain of TCR clone 319045 (TRBV7-3, TRBJ2-1)
CASSLAGGTNEQFF

SEQ ID NO: 638091 - protein, 14 aa, Homo sapiens
  CDR3 for alpha chain variable domain of TCR clone 319046 (TRAV12-3, TRAJ12)
CAMSEVDSSYKLIF

SEQ ID NO: 638092 - protein, 16 aa, Homo sapiens
  CDR3 for beta chain variable domain of TCR clone 319046 (TRBV18, TRBJ1-5)
CASSPYRVEGNQPQHF

SEQ ID NO: 638093 - protein, 13 aa, Homo sapiens
  CDR3 for alpha chain variable domain of TCR clone 319047 (TRAV12-1, TRAJ33)
CGDSPDSNYQLIW

SEQ ID NO: 638094 - protein, 14 aa, Homo sapiens
  CDR3 for beta chain variable domain of TCR clone 319047 (TRBV13, TRBJ2-7)
CASSLKGASYEQYF

SEQ ID NO: 638095 - protein, 10 aa, Homo sapiens
  CDR3 for alpha chain variable domain of TCR clone 319048 (TRAV21, TRAJ43)
CAVRVGDMRF

SEQ ID NO: 638096 - protein, 13 aa, Homo sapiens
  CDR3 for beta chain variable domain of TCR clone 319048 (TRBV20-1, TRBJ2-7)
CSAPGLADYEQYL

SEQ ID NO: 638097 - protein, 14 aa, Homo sapiens
  CDR3 for alpha chain variable domain of TCR clone 319049 (TRAV2, TRAJ37)
CAVDCTSNTGKLIF

SEQ ID NO: 638098 - protein, 15 aa, Homo sapiens
  CDR3 for beta chain variable domain of TCR clone 319049 (TRBV20-1, TRBJ1-1)
CSANRGVTGNTEAFF

SEQ ID NO: 638099 - protein, 11 aa, Homo sapiens
  CDR3 for alpha chain variable domain of TCR clone 319050 (TRAV21, TRAJ34)
CAHYNTDKLIF

SEQ ID NO: 638100 - protein, 14 aa, Homo sapiens
  CDR3 for beta chain variable domain of TCR clone 319050 (TRBV6-1, TRBJ1-3)
CDSVQGGGGNTIYF

SEQ ID NO: 638101 - protein, 14 aa, Homo sapiens
  CDR3 for alpha chain variable domain of TCR clone 319051 (TRAV12-3, TRAJ42)
CAMNYGGSQGNLIF

SEQ ID NO: 638102 - protein, 16 aa, Homo sapiens
  CDR3 for beta chain variable domain of TCR clone 319051 (TRBV11-2, TRBJ2-2)
CASSLRTGNLIGELFF

SEQ ID NO: 638103 - protein, 13 aa, Homo sapiens
  CDR3 for alpha chain variable domain of TCR clone 319052 (TRAV19, TRAJ26)
CALTFYYGQNFVF

SEQ ID NO: 638104 - protein, 14 aa, Homo sapiens
  CDR3 for beta chain variable domain of TCR clone 319052 (TRBV7-8, TRBJ2-3)
CASSLEAGTDTQYF

SEQ ID NO: 638105 - protein, 15 aa, Homo sapiens
  CDR3 for alpha chain variable domain of TCR clone 319053 (TRAV3, TRAJ9)
CAVRDSNTGGFRTIF

SEQ ID NO: 638106 - protein, 16 aa, Homo sapiens
  CDR3 for beta chain variable domain of TCR clone 319053 (TRBV15, TRBJ2-5)
CATSPTTGQGMETQYF

SEQ ID NO: 638107 - protein, 14 aa, Homo sapiens
  CDR3 for alpha chain variable domain of TCR clone 319054 (TRAV1-2, TRAJ16)
CAVNRFSDGQKQLF

SEQ ID NO: 638108 - protein, 11 aa, Homo sapiens
  CDR3 for beta chain variable domain of TCR clone 319054 (TRBV29-1, TRBJ2-5)
CSEDRTGTQYF

SEQ ID NO: 638109 - protein, 16 aa, Homo sapiens
  CDR3 for alpha chain variable domain of TCR clone 319055 (TRAV26-1, TRAJ32)
CIVRTNYGGATNKPNF

SEQ ID NO: 638110 - protein, 14 aa, Homo sapiens
  CDR3 for beta chain variable domain of TCR clone 319055 (TRBV27, TRBJ1-1)
CASSLLSGLSEAFF

SEQ ID NO: 638111 - protein, 13 aa, Homo sapiens
  CDR3 for alpha chain variable domain of TCR clone 319056 (TRAV2, TRAJ40)
CAVVTSGTYKYIF

SEQ ID NO: 638112 - protein, 14 aa, Homo sapiens
  CDR3 for beta chain variable domain of TCR clone 319056 (TRBV7-9, TRBJ2-1)
CASSTMVVFGEQFF

SEQ ID NO: 638113 - protein, 12 aa, Homo sapiens
  CDR3 for alpha chain variable domain of TCR clone 319057 (TRAV27, TRAJ9)
WAGESGGFKTIF

SEQ ID NO: 638114 - protein, 18 aa, Homo sapiens
  CDR3 for beta chain variable domain of TCR clone 319057 (TRBV10-2, TRBJ2-2)
CISAPAVHRQADAGELFF

SEQ ID NO: 638115 - protein, 14 aa, Homo sapiens
  CDR3 for alpha chain variable domain of TCR clone 319058 (TRAV35, TRAJ42)
CAGRYGGSQGNLIF

SEQ ID NO: 638116 - protein, 15 aa, Homo sapiens
  CDR3 for beta chain variable domain of TCR clone 319058 (TRBV7-9, TRBJ2-1)
CASSLGWGRANEKFF

SEQ ID NO: 638117 - protein, 13 aa, Homo sapiens
  CDR3 for alpha chain variable domain of TCR clone 319059 (TRAV8-3, TRAJ28)
YAVGAVGSYQLTF

SEQ ID NO: 638118 - protein, 15 aa, Homo sapiens
  CDR3 for beta chain variable domain of TCR clone 319059 (TRBV7-9, TRBJ1-5)
CASSQGHQPNQPQHL

SEQ ID NO: 638119 - protein, 12 aa, Homo sapiens
  CDR3 for alpha chain variable domain of TCR clone 319060 (TRAV17, TRAJ15)
CATGGTGTALIF

SEQ ID NO: 638120 - protein, 16 aa, Homo sapiens
  CDR3 for beta chain variable domain of TCR clone 319060 (TRBV24-1, TRBJ2-3)
CATSGYRDRDTDTQYF

SEQ ID NO: 638121 - protein, 18 aa, Homo sapiens
  CDR3 for alpha chain variable domain of TCR clone 319061 (TRAV26-1, TRAJ22)
CIVRVALISSGSARQLTF

SEQ ID NO: 638122 - protein, 18 aa, Homo sapiens
  CDR3 for beta chain variable domain of TCR clone 319061 (TRBV7-6, TRBJ2-1)
CANSPRTSGMSSYNEQFF

SEQ ID NO: 638123 - protein, 14 aa, Homo sapiens
  CDR3 for alpha chain variable domain of TCR clone 319062 (TRAV1-2, TRAJ16)
CAVNRFSDGEKLLF

SEQ ID NO: 638124 - protein, 13 aa, Homo sapiens
  CDR3 for beta chain variable domain of TCR clone 319062 (TRBV19, TRBJ1-2)
CASSVPGQDGYTF

SEQ ID NO: 638125 - protein, 16 aa, Homo sapiens
  CDR3 for alpha chain variable domain of TCR clone 319063 (TRAV8-1, TRAJ42)
CAVTSRYGGSQGNLIF

SEQ ID NO: 638126 - protein, 12 aa, Homo sapiens
  CDR3 for beta chain variable domain of TCR clone 319063 (TRBV6-3, TRBJ2-7)
CANSLGRMGLYF

SEQ ID NO: 638127 - protein, 11 aa, Homo sapiens
  CDR3 for alpha chain variable domain of TCR clone 319064 (TRAV8-4, TRAJ20)
CAVTNVLTTTS

SEQ ID NO: 638128 - protein, 13 aa, Homo sapiens
  CDR3 for beta chain variable domain of TCR clone 319064 (TRBV7-3, TRBJ2-5)
CASSFRGGETQYF

SEQ ID NO: 638129 - protein, 18 aa, Homo sapiens
  CDR3 for alpha chain variable domain of TCR clone 319065 (TRAV13-1, TRAJ52)
CAAKNPNAGGTSYGKLTF

SEQ ID NO: 638130 - protein, 15 aa, Homo sapiens
  CDR3 for beta chain variable domain of TCR clone 319065 (TRBV6-5, TRBJ2-7)
CASSARRGSDNEQYF

SEQ ID NO: 638131 - protein, 13 aa, Homo sapiens
  CDR3 for alpha chain variable domain of TCR clone 319066 (TRAV17, TRAJ15)
CATVNQAGTALIF

SEQ ID NO: 638132 - protein, 11 aa, Homo sapiens
  CDR3 for beta chain variable domain of TCR clone 319066 (TRBV19, TRBJ1-1)
CASSIGSEAFF

SEQ ID NO: 638133 - protein, 16 aa, Homo sapiens
  CDR3 for alpha chain variable domain of TCR clone 319067 (TRAV25, TRAJ53)
CAGPKGSGGSNYKLTF

SEQ ID NO: 638134 - protein, 17 aa, Homo sapiens
  CDR3 for beta chain variable domain of TCR clone 319067 (TRBV11-3, TRBJ2-6)
CASKWGQVLSGANVLTF

SEQ ID NO: 638135 - protein, 14 aa, Homo sapiens
  CDR3 for alpha chain variable domain of TCR clone 319068 (TRAV12-1, TRAJ17)
CVVNYKAAGNKLTF

SEQ ID NO: 638136 - protein, 14 aa, Homo sapiens
  CDR3 for beta chain variable domain of TCR clone 319068 (TRBV10-1, TRBJ2-2)
CASTSGQNTGELFF

SEQ ID NO: 638137 - protein, 15 aa, Homo sapiens
  CDR3 for alpha chain variable domain of TCR clone 319069 (TRAV26-1, TRAJ29)
CIVRVEGSGNTPLVF

SEQ ID NO: 638138 - protein, 14 aa, Homo sapiens
  CDR3 for beta chain variable domain of TCR clone 319069 (TRBV7-9, TRBJ1-5)
CQQPRSPAHQPQHF

SEQ ID NO: 638139 - protein, 13 aa, Homo sapiens
  CDR3 for alpha chain variable domain of TCR clone 319070 (TRAV8-1, TRAJ30)
CAVNGRRDDKIIF

SEQ ID NO: 638140 - protein, 15 aa, Homo sapiens
  CDR3 for beta chain variable domain of TCR clone 319070 (TRBV5-6, TRBJ1-5)
CASSYGKLWDQPQHF

SEQ ID NO: 638141 - protein, 12 aa, Homo sapiens
  CDR3 for alpha chain variable domain of TCR clone 319071 (TRAV13-1, TRAJ45)
VGSGGGADGLTF

SEQ ID NO: 638142 - protein, 16 aa, Homo sapiens
  CDR3 for beta chain variable domain of TCR clone 319071 (TRBV7-2, TRBJ2-7)
CASSRPGTGLVHEQYF

SEQ ID NO: 638143 - protein, 14 aa, Homo sapiens
  CDR3 for alpha chain variable domain of TCR clone 319072 (TRAV12-3, TRAJ10)
SHLPLTRGGNKLTF

SEQ ID NO: 638144 - protein, 13 aa, Homo sapiens
  CDR3 for beta chain variable domain of TCR clone 319072 (TRBV27, TRBJ1-1)
CASSLSIGAEAFF

SEQ ID NO: 638145 - protein, 12 aa, Homo sapiens
  CDR3 for alpha chain variable domain of TCR clone 319073 (TRAV22, TRAJ22)
CAPGGSARQLTF

SEQ ID NO: 638146 - protein, 16 aa, Homo sapiens
  CDR3 for beta chain variable domain of TCR clone 319073 (TRBV11-3, TRBJ2-5)
CASSSVVAGSTETQYF

SEQ ID NO: 638147 - protein, 18 aa, Homo sapiens
  CDR3 for alpha chain variable domain of TCR clone 319074 (TRAV26-2, TRAJ45)
CILRLWGYSGGGADGLTF

SEQ ID NO: 638148 - protein, 17 aa, Homo sapiens
  CDR3 for beta chain variable domain of TCR clone 319074 (TRBV28, TRBJ2-3)
CASSPTPAGGWVDTQYF

SEQ ID NO: 638149 - protein, 10 aa, Homo sapiens
  CDR3 for alpha chain variable domain of TCR clone 319075 (TRAV26-1, TRAJ22)
CIVSLNFFWF

SEQ ID NO: 638150 - protein, 14 aa, Homo sapiens
  CDR3 for beta chain variable domain of TCR clone 319075 (TRBV12-5, TRBJ2-5)
CASGSRTHQETQYF

SEQ ID NO: 638151 - protein, 11 aa, Homo sapiens
  CDR3 for alpha chain variable domain of TCR clone 319076 (TRAV35, TRAJ30)
CAPGGDDKIIF

SEQ ID NO: 638152 - protein, 13 aa, Homo sapiens
  CDR3 for beta chain variable domain of TCR clone 319076 (TRBV7-6, TRBJ2-1)
CQQLWGGADEQFF

SEQ ID NO: 638153 - protein, 13 aa, Homo sapiens
  CDR3 for alpha chain variable domain of TCR clone 319077 (TRAV24, TRAJ44)
CALLTGTASKLTF

SEQ ID NO: 638154 - protein, 14 aa, Homo sapiens
  CDR3 for beta chain variable domain of TCR clone 319077 (TRBV12-4, TRBJ1-1)
CASSFSQMNTEAFF

SEQ ID NO: 638155 - protein, 18 aa, Homo sapiens
  CDR3 for alpha chain variable domain of TCR clone 319078 (TRAV13-1, TRAJ52)
CAAKNPNAGGTSYGKLTF

SEQ ID NO: 638156 - protein, 17 aa, Homo sapiens
  CDR3 for beta chain variable domain of TCR clone 319078 (TRBV11-2, TRBJ2-1)
CASSLYPPGVEYNEQSF

SEQ ID NO: 638157 - protein, 13 aa, Homo sapiens
  CDR3 for alpha chain variable domain of TCR clone 319079 (TRAV29/DV5, TRAJ29)
CAASAAGNTPLVL

SEQ ID NO: 638158 - protein, 14 aa, Homo sapiens
  CDR3 for beta chain variable domain of TCR clone 319079 (TRBV19, TRBJ2-3)
YASSAPRGTDTQYF

SEQ ID NO: 638159 - protein, 13 aa, Homo sapiens
  CDR3 for alpha chain variable domain of TCR clone 319080 (TRAV21, TRAJ56)
CAVRLGANIKLTF

SEQ ID NO: 638160 - protein, 12 aa, Homo sapiens
  CDR3 for beta chain variable domain of TCR clone 319080 (TRBV12-4, TRBJ2-3)
CASSNTTDTQYF

SEQ ID NO: 638161 - protein, 17 aa, Homo sapiens
  CDR3 for alpha chain variable domain of TCR clone 319081 (TRAV8-6, TRAJ58)
CAVSSWVGETSGSRLTF

SEQ ID NO: 638162 - protein, 17 aa, Homo sapiens
  CDR3 for beta chain variable domain of TCR clone 319081 (TRBV20-1, TRBJ2-7)
CSARDRSLGWTSSTSGR

SEQ ID NO: 638163 - protein, 15 aa, Homo sapiens
  CDR3 for alpha chain variable domain of TCR clone 319082 (TRAV4, TRAJ8)
CLVGVLNTGFQKLVC

SEQ ID NO: 638164 - protein, 13 aa, Homo sapiens
  CDR3 for beta chain variable domain of TCR clone 319082 (TRBV28, TRBJ2-1)
CASRSGGLNEQFF

SEQ ID NO: 638165 - protein, 15 aa, Homo sapiens
  CDR3 for alpha chain variable domain of TCR clone 319083 (TRAV17, TRAJ56)
CATAPFTGANSKLTF

SEQ ID NO: 638166 - protein, 14 aa, Homo sapiens
  CDR3 for beta chain variable domain of TCR clone 319083 (TRBV19, TRBJ2-1)
CASPTFVLSGEQFF

SEQ ID NO: 638167 - protein, 16 aa, Homo sapiens
  CDR3 for alpha chain variable domain of TCR clone 319084 (TRAV3, TRAJ10)
CAVRDMSAGGGNKLTF

SEQ ID NO: 638168 - protein, 19 aa, Homo sapiens
  CDR3 for beta chain variable domain of TCR clone 319084 (TRBV6-3, TRBJ1-2)
CASSYSKGRTGPPNYGYTF

SEQ ID NO: 638169 - protein, 17 aa, Homo sapiens
  CDR3 for alpha chain variable domain of TCR clone 319085 (TRAV3, TRAJ42)
CAVRDRDEGGSQGNLIF

SEQ ID NO: 638170 - protein, 13 aa, Homo sapiens
  CDR3 for beta chain variable domain of TCR clone 319085 (TRBV10-3, TRBJ2-7)
CASKLAVNYEQYF

SEQ ID NO: 638171 - protein, 16 aa, Homo sapiens
  CDR3 for alpha chain variable domain of TCR clone 319086 (TRAV3, TRAJ40)
CAVRDRIASGTYKYIF

SEQ ID NO: 638172 - protein, 15 aa, Homo sapiens
  CDR3 for beta chain variable domain of TCR clone 319086 (TRBV27, TRBJ2-1)
CASSNGGGSSNEQFF

SEQ ID NO: 638173 - protein, 13 aa, Homo sapiens
  CDR3 for alpha chain variable domain of TCR clone 319087 (TRAV23/DV6, TRAJ34)
CAAIENNTDKLIF

SEQ ID NO: 638174 - protein, 15 aa, Homo sapiens
  CDR3 for beta chain variable domain of TCR clone 319087 (TRBV27, TRBJ2-1)
CASSNGGGSSNEQFF

SEQ ID NO: 638175 - protein, 14 aa, Homo sapiens
  CDR3 for alpha chain variable domain of TCR clone 319088 (TRAV35, TRAJ22)
CAGHLSGSARQLTF

SEQ ID NO: 638176 - protein, 15 aa, Homo sapiens
  CDR3 for beta chain variable domain of TCR clone 319088 (TRBV5-4, TRBJ2-1)
CASSPTSGGDVGQFF

SEQ ID NO: 638177 - protein, 13 aa, Homo sapiens
  CDR3 for alpha chain variable domain of TCR clone 319089 (TRAV17, TRAJ33)
CATDADSNYQLIW

SEQ ID NO: 638178 - protein, 17 aa, Homo sapiens
  CDR3 for beta chain variable domain of TCR clone 319089 (TRBV20-1, TRBJ2-3)
GSAVSPGLAGGQDTQYF

SEQ ID NO: 638179 - protein, 15 aa, Homo sapiens
  CDR3 for alpha chain variable domain of TCR clone 319090 (TRAV3, TRAJ5)
CAVRDLDTGRRALTF

SEQ ID NO: 638180 - protein, 14 aa, Homo sapiens
  CDR3 for beta chain variable domain of TCR clone 319090 (TRBV25-1, TRBJ1-1)
CASTHLGGNTKAFF

SEQ ID NO: 638181 - protein, 18 aa, Homo sapiens
  CDR3 for alpha chain variable domain of TCR clone 319091 (TRAV26-1, TRAJ57)
CIVRVALRFQGGYEKLVF

SEQ ID NO: 638182 - protein, 15 aa, Homo sapiens
  CDR3 for beta chain variable domain of TCR clone 319091 (TRBV27, TRBJ2-1)
CAISNGGGSSNEQFF

SEQ ID NO: 638183 - protein, 13 aa, Homo sapiens
  CDR3 for alpha chain variable domain of TCR clone 319092 (TRAV21, TRAJ27)
CDARPGNAGKSTF

SEQ ID NO: 638184 - protein, 14 aa, Homo sapiens
  CDR3 for beta chain variable domain of TCR clone 319092 (TRBV7-9, TRBJ2-7)
CASSLGGSSYEQYF

SEQ ID NO: 638185 - protein, 16 aa, Homo sapiens
  CDR3 for alpha chain variable domain of TCR clone 319093 (TRAV3, TRAJ37)
CAVRGKGSGNTGKLIF

SEQ ID NO: 638186 - protein, 14 aa, Homo sapiens
  CDR3 for beta chain variable domain of TCR clone 319093 (TRBV7-2, TRBJ2-5)
CASSFTQGQETQYF

SEQ ID NO: 638187 - protein, 11 aa, Homo sapiens
  CDR3 for alpha chain variable domain of TCR clone 319094 (TRAV4, TRAJ23)
CLVAPGGKLIF

SEQ ID NO: 638188 - protein, 15 aa, Homo sapiens
  CDR3 for beta chain variable domain of TCR clone 319094 (TRBV7-2, TRBJ2-1)
CVSSFQADEYNEQFF

SEQ ID NO: 638189 - protein, 14 aa, Homo sapiens
  CDR3 for alpha chain variable domain of TCR clone 319095 (TRAV12-2, TRAJ36)
CAVKISTGANNPFF

SEQ ID NO: 638190 - protein, 14 aa, Homo sapiens
  CDR3 for beta chain variable domain of TCR clone 319095 (TRBV25-1, TRBJ1-2)
CASSDTTGVVGHTF

SEQ ID NO: 638191 - protein, 14 aa, Homo sapiens
  CDR3 for alpha chain variable domain of TCR clone 319096 (TRAV17, TRAJ17)
CATVVRGAGNKLTF

SEQ ID NO: 638192 - protein, 14 aa, Homo sapiens
  CDR3 for beta chain variable domain of TCR clone 319096 (TRBV12-4, TRBJ2-7)
CASSFSGADYKQYF

SEQ ID NO: 638193 - protein, 14 aa, Homo sapiens
  CDR3 for alpha chain variable domain of TCR clone 319097 (TRAV30, TRAJ26)
CGTEIVSYGQNFVF

SEQ ID NO: 638194 - protein, 16 aa, Homo sapiens
  CDR3 for beta chain variable domain of TCR clone 319097 (TRBV7-3, TRBJ2-2)
CASSLKRGTLSGELFF

SEQ ID NO: 638195 - protein, 14 aa, Homo sapiens
  CDR3 for alpha chain variable domain of TCR clone 319098 (TRAV13-1, TRAJ52)
CAANGGTSYGKLTL

SEQ ID NO: 638196 - protein, 12 aa, Homo sapiens
  CDR3 for beta chain variable domain of TCR clone 319098 (TRBV19, TRBJ2-1)
CASSMQDTEQFF

SEQ ID NO: 638197 - protein, 13 aa, Homo sapiens
  CDR3 for alpha chain variable domain of TCR clone 319099 (TRAV8-6, TRAJ8)
CAVSNTGFQKLVF

SEQ ID NO: 638198 - protein, 15 aa, Homo sapiens
  CDR3 for beta chain variable domain of TCR clone 319099 (TRBV28, TRBJ2-5)
CATSSGRTIQETQYF

SEQ ID NO: 638199 - protein, 17 aa, Homo sapiens
  CDR3 for alpha chain variable domain of TCR clone 319100 (TRAV3, TRAJ6)
CAVRDGPRAGGSYIPTF

SEQ ID NO: 638200 - protein, 20 aa, Homo sapiens
  CDR3 for beta chain variable domain of TCR clone 319100 (TRBV28, TRBJ2-1)
CVSTPIGRSPGLAGGNEQFF

SEQ ID NO: 638201 - protein, 14 aa, Homo sapiens
  CDR3 for alpha chain variable domain of TCR clone 319101 (TRAV38-1, TRAJ43)
CAFMKHNNNNDMRF

SEQ ID NO: 638202 - protein, 16 aa, Homo sapiens
  CDR3 for beta chain variable domain of TCR clone 319101 (TRBV11-2, TRBJ2-5)
CASSGQGYSPQESQYF

SEQ ID NO: 638203 - protein, 17 aa, Homo sapiens
  CDR3 for alpha chain variable domain of TCR clone 319102 (TRAV12-1, TRAJ32)
CVMNMQGYGGATNKLIL

SEQ ID NO: 638204 - protein, 13 aa, Homo sapiens
  CDR3 for beta chain variable domain of TCR clone 319102 (TRBV6-6, TRBJ2-1)
CASSLHQGDEQFF

SEQ ID NO: 638205 - protein, 13 aa, Homo sapiens
  CDR3 for alpha chain variable domain of TCR clone 319103 (TRAV36/DV7, TRAJ37)
CAVFSSNTGKLIF

SEQ ID NO: 638206 - protein, 13 aa, Homo sapiens
  CDR3 for beta chain variable domain of TCR clone 319103 (TRBV27, TRBJ1-4)
CASSLMGDEKLFF

SEQ ID NO: 638207 - protein, 13 aa, Homo sapiens
  CDR3 for alpha chain variable domain of TCR clone 319104 (TRAV12-2, TRAJ22)
CAVKWGSARQLTF

SEQ ID NO: 638208 - protein, 11 aa, Homo sapiens
  CDR3 for beta chain variable domain of TCR clone 319104 (TRBV11-2, TRBJ2-2)
CASSLPGELFF

SEQ ID NO: 638209 - protein, 13 aa, Homo sapiens
  CDR3 for alpha chain variable domain of TCR clone 319105 (TRAV26-1, TRAJ29)
CIVRRSGNTPLVF

SEQ ID NO: 638210 - protein, 15 aa, Homo sapiens
  CDR3 for beta chain variable domain of TCR clone 319105 (TRBV10-3, TRBJ2-1)
CATNGGPGQGDEQFF

SEQ ID NO: 638211 - protein, 14 aa, Homo sapiens
  CDR3 for alpha chain variable domain of TCR clone 319106 (TRAV34, TRAJ22)
CGADTSGSARQLSF

SEQ ID NO: 638212 - protein, 16 aa, Homo sapiens
  CDR3 for beta chain variable domain of TCR clone 319106 (TRBV2, TRBJ2-3)
CQHRGAPRRWTDTQYF

SEQ ID NO: 638213 - protein, 13 aa, Homo sapiens
  CDR3 for alpha chain variable domain of TCR clone 319107 (TRAV12-1, TRAJ38)
CVLPAGNNRKLIW

SEQ ID NO: 638214 - protein, 15 aa, Homo sapiens
  CDR3 for beta chain variable domain of TCR clone 319107 (TRBV10-3, TRBJ2-1)
CAISESASGRKEQFF

SEQ ID NO: 638215 - protein, 14 aa, Homo sapiens
  CDR3 for alpha chain variable domain of TCR clone 319108 (TRAV1-2, TRAJ8)
CAVREDTGFQKLVF

SEQ ID NO: 638216 - protein, 13 aa, Homo sapiens
  CDR3 for beta chain variable domain of TCR clone 319108 (TRBV20-1, TRBJ1-4)
CSARTPYNAKLFF

SEQ ID NO: 638217 - protein, 17 aa, Homo sapiens
  CDR3 for alpha chain variable domain of TCR clone 319109 (TRAV3, TRAJ22)
CAVRDPPLEGFCKATDL

SEQ ID NO: 638218 - protein, 16 aa, Homo sapiens
  CDR3 for beta chain variable domain of TCR clone 319109 (TRBV5-1, TRBJ1-1)
CASSSGGNSLNTEAFF

SEQ ID NO: 638219 - protein, 18 aa, Homo sapiens
  CDR3 for alpha chain variable domain of TCR clone 319110 (TRAV13-1, TRAJ52)
CAASKRRSGGTSYGKLTF

SEQ ID NO: 638220 - protein, 13 aa, Homo sapiens
  CDR3 for beta chain variable domain of TCR clone 319110 (TRBV12-4, TRBJ1-2)
CASSLRQGKGYTF

SEQ ID NO: 638221 - protein, 13 aa, Homo sapiens
  CDR3 for alpha chain variable domain of TCR clone 319111 (TRAV38-1, TRAJ42)
CARGGGSQGNLII

SEQ ID NO: 638222 - protein, 10 aa, Homo sapiens
  CDR3 for beta chain variable domain of TCR clone 319111 (TRBV2, TRBJ2-5)
CASSAATQYF

SEQ ID NO: 638223 - protein, 15 aa, Homo sapiens
  CDR3 for alpha chain variable domain of TCR clone 319112 (TRAV8-4, TRAJ7)
CAVSGGNYWNNRLAF

SEQ ID NO: 638224 - protein, 11 aa, Homo sapiens
  CDR3 for beta chain variable domain of TCR clone 319112 (TRBV20-1, TRBJ2-1)
CSLSSGSEQFF

SEQ ID NO: 638225 - protein, 11 aa, Homo sapiens
  CDR3 for alpha chain variable domain of TCR clone 319113 (TRAV13-1, TRAJ27)
CAAYNAGKSTF

SEQ ID NO: 638226 - protein, 15 aa, Homo sapiens
  CDR3 for beta chain variable domain of TCR clone 319113 (TRBV6-1, TRBJ1-5)
CATSDIDSKDQPQHF

SEQ ID NO: 638227 - protein, 12 aa, Homo sapiens
  CDR3 for alpha chain variable domain of TCR clone 319114 (TRAV3, TRAJ20)
CAVRDPDYKLSF

SEQ ID NO: 638228 - protein, 17 aa, Homo sapiens
  CDR3 for beta chain variable domain of TCR clone 319114 (TRBV19, TRBJ2-3)
CASSTLGVAGVKDTQYF

SEQ ID NO: 638229 - protein, 14 aa, Homo sapiens
  CDR3 for alpha chain variable domain of TCR clone 319115 (TRAV16, TRAJ17)
CALSEGAAGNKLTF

SEQ ID NO: 638230 - protein, 14 aa, Homo sapiens
  CDR3 for beta chain variable domain of TCR clone 319115 (TRBV28, TRBJ2-2)
CASRIRSGTGELLF

SEQ ID NO: 638231 - protein, 12 aa, Homo sapiens
  CDR3 for alpha chain variable domain of TCR clone 319116 (TRAV36/DV7, TRAJ54)
CAVVPGAQKLVF

SEQ ID NO: 638232 - protein, 18 aa, Homo sapiens
  CDR3 for beta chain variable domain of TCR clone 319116 (TRBV20-1, TRBJ2-3)
CSASGLAGGPGTTDTQYF

SEQ ID NO: 638233 - protein, 13 aa, Homo sapiens
  CDR3 for alpha chain variable domain of TCR clone 319117 (TRAV35, TRAJ48)
CAGHEFGNEKLTF

SEQ ID NO: 638234 - protein, 20 aa, Homo sapiens
  CDR3 for beta chain variable domain of TCR clone 319117 (TRBV28, TRBJ2-1)
CASTPIGRSPGLAGGNEQFF

SEQ ID NO: 638235 - protein, 12 aa, Homo sapiens
  CDR3 for alpha chain variable domain of TCR clone 319118 (TRAV8-3, TRAJ26)
CAGDNYGQNFVF

SEQ ID NO: 638236 - protein, 13 aa, Homo sapiens
  CDR3 for beta chain variable domain of TCR clone 319118 (TRBV20-1, TRBJ2-5)
CSARGDYQESQYF

SEQ ID NO: 638237 - protein, 14 aa, Homo sapiens
  CDR3 for alpha chain variable domain of TCR clone 319119 (TRAV1-2, TRAJ16)
CAVNRFSDGQKLLF

SEQ ID NO: 638238 - protein, 13 aa, Homo sapiens
  CDR3 for beta chain variable domain of TCR clone 319119 (TRBV10-3, TRBJ2-7)
CASELAVNYEQYF

SEQ ID NO: 638239 - protein, 11 aa, Homo sapiens
  CDR3 for alpha chain variable domain of TCR clone 319120 (TRAV3, TRAJ17)
PSGAAGNKLTF

SEQ ID NO: 638240 - protein, 16 aa, Homo sapiens
  CDR3 for beta chain variable domain of TCR clone 319120 (TRBV7-6, TRBJ2-1)
CASSAPGPSSYNEQFF

SEQ ID NO: 638241 - protein, 13 aa, Homo sapiens
  CDR3 for alpha chain variable domain of TCR clone 319121 (TRAV26-2, TRAJ37)
CIRGSSNTGKLIF

SEQ ID NO: 638242 - protein, 16 aa, Homo sapiens
  CDR3 for beta chain variable domain of TCR clone 319121 (TRBV7-2, TRBJ2-5)
CASSPGGARRGETQYV

SEQ ID NO: 638243 - protein, 12 aa, Homo sapiens
  CDR3 for alpha chain variable domain of TCR clone 319122 (TRAV12-2, TRAJ10)
WGVTGGGNKLTF

SEQ ID NO: 638244 - protein, 14 aa, Homo sapiens
  CDR3 for beta chain variable domain of TCR clone 319122 (TRBV5-1, TRBJ1-1)
CASSLTRRSTEAFF

SEQ ID NO: 638245 - protein, 14 aa, Homo sapiens
  CDR3 for alpha chain variable domain of TCR clone 319123 (TRAV2, TRAJ9)
CAVADRSGGFKTIF

SEQ ID NO: 638246 - protein, 14 aa, Homo sapiens
  CDR3 for beta chain variable domain of TCR clone 319123 (TRBV18, TRBJ1-5)
CASSRQQRNRPQHF

SEQ ID NO: 638247 - protein, 20 aa, Homo sapiens
  CDR3 for alpha chain variable domain of TCR clone 319124 (TRAV25, TRAJ21)
TATQTTDVGTYPLSFNKFYF

SEQ ID NO: 638248 - protein, 16 aa, Homo sapiens
  CDR3 for beta chain variable domain of TCR clone 319124 (TRBV7-2, TRBJ2-6)
CAILSGVSSGANVLTF

SEQ ID NO: 638249 - protein, 14 aa, Homo sapiens
  CDR3 for alpha chain variable domain of TCR clone 319125 (TRAV2, TRAJ37)
CAVDFTSKTGKLIF

SEQ ID NO: 638250 - protein, 14 aa, Homo sapiens
  CDR3 for beta chain variable domain of TCR clone 319125 (TRBV6-1, TRBJ1-3)
CASVQGGGGNTIYF

SEQ ID NO: 638251 - protein, 16 aa, Homo sapiens
  CDR3 for alpha chain variable domain of TCR clone 319126 (TRAV30, TRAJ24)
CGTEIVDADSWGKFQF

SEQ ID NO: 638252 - protein, 13 aa, Homo sapiens
  CDR3 for beta chain variable domain of TCR clone 319126 (TRBV19, TRBJ1-2)
CASIQQGAYGYTF

SEQ ID NO: 638253 - protein, 17 aa, Homo sapiens
  CDR3 for alpha chain variable domain of TCR clone 319127 (TRAV1-1, TRAJ32)
CAVRVDELWWCYKQAHL

SEQ ID NO: 638254 - protein, 16 aa, Homo sapiens
  CDR3 for beta chain variable domain of TCR clone 319127 (TRBV7-3, TRBJ2-2)
CASSLKRGTLSGELFF

SEQ ID NO: 638255 - protein, 10 aa, Homo sapiens
  CDR3 for alpha chain variable domain of TCR clone 319128 (TRAV1-2, TRAJ20)
CALNNYKLSF

SEQ ID NO: 638256 - protein, 16 aa, Homo sapiens
  CDR3 for beta chain variable domain of TCR clone 319128 (TRBV20-1, TRBJ1-1)
CSARALTQGMNTEAFF

SEQ ID NO: 638257 - protein, 14 aa, Homo sapiens
  CDR3 for alpha chain variable domain of TCR clone 319129 (TRAV1-2, TRAJ16)
CAVNRFSDGQKLLF

SEQ ID NO: 638258 - protein, 11 aa, Homo sapiens
  CDR3 for beta chain variable domain of TCR clone 319129 (TRBV7-2, TRBJ2-3)
CASSLGDTQYF

SEQ ID NO: 638259 - protein, 22 aa, Homo sapiens
  CDR3 for alpha chain variable domain of TCR clone 319130 (TRAV3, TRAJ38)
CAVRDCLNAGNNHIKNPDPAVY

SEQ ID NO: 638260 - protein, 19 aa, Homo sapiens
  CDR3 for beta chain variable domain of TCR clone 319130 (TRBV7-2, TRBJ2-3)
CASSFLSRNWGGGTDMQYF

SEQ ID NO: 638261 - protein, 10 aa, Homo sapiens
  CDR3 for alpha chain variable domain of TCR clone 319131 (TRAV17, TRAJ9)
CATGSTRLQN

SEQ ID NO: 638262 - protein, 14 aa, Homo sapiens
  CDR3 for beta chain variable domain of TCR clone 319131 (TRBV7-8, TRBJ2-7)
CASTFRGGPNEQYF

SEQ ID NO: 638263 - protein, 10 aa, Homo sapiens
  CDR3 for alpha chain variable domain of TCR clone 319132 (TRAV36/DV7, TRAJ48)
CAVGNEKLTF

SEQ ID NO: 638264 - protein, 15 aa, Homo sapiens
  CDR3 for beta chain variable domain of TCR clone 319132 (TRBV20-1, TRBJ2-7)
CSAESGTSGAYEQYF

SEQ ID NO: 638265 - protein, 13 aa, Homo sapiens
  CDR3 for alpha chain variable domain of TCR clone 319133 (TRAV16, TRAJ27)
CALRRTNAGKATF

SEQ ID NO: 638266 - protein, 15 aa, Homo sapiens
  CDR3 for beta chain variable domain of TCR clone 319133 (TRBV18, TRBJ2-1)
CASSPPSASYNEQFF

SEQ ID NO: 638267 - protein, 16 aa, Homo sapiens
  CDR3 for alpha chain variable domain of TCR clone 319134 (TRAV8-4, TRAJ5)
CAVSPLTDTGRRALTF

SEQ ID NO: 638268 - protein, 13 aa, Homo sapiens
  CDR3 for beta chain variable domain of TCR clone 319134 (TRBV7-9, TRBJ1-2)
CASSLKQNYGYTF

SEQ ID NO: 638269 - protein, 13 aa, Homo sapiens
  CDR3 for alpha chain variable domain of TCR clone 319135 (TRAV38-2/DV8, TRAJ53)
CASGGGSNYELTF

SEQ ID NO: 638270 - protein, 16 aa, Homo sapiens
  CDR3 for beta chain variable domain of TCR clone 319135 (TRBV28, TRBJ1-5)
CASRFRGAVQNQPQHF

SEQ ID NO: 638271 - protein, 17 aa, Homo sapiens
  CDR3 for alpha chain variable domain of TCR clone 319136 (TRAV14/DV4, TRAJ4)
CAMREASGRGGYNKLIF

SEQ ID NO: 638272 - protein, 16 aa, Homo sapiens
  CDR3 for beta chain variable domain of TCR clone 319136 (TRBV9, TRBJ2-3)
CASSGTSGKDTDTQYF

SEQ ID NO: 638273 - protein, 11 aa, Homo sapiens
  CDR3 for alpha chain variable domain of TCR clone 319137 (TRAV13-1, TRAJ23)
CAASSRGKLIF

SEQ ID NO: 638274 - protein, 13 aa, Homo sapiens
  CDR3 for beta chain variable domain of TCR clone 319137 (TRBV7-3, TRBJ2-5)
CASSVWGGETQYF

SEQ ID NO: 638275 - protein, 12 aa, Homo sapiens
  CDR3 for alpha chain variable domain of TCR clone 319138 (TRAV13-1, TRAJ27)
WAAHTNAGKSTF

SEQ ID NO: 638276 - protein, 14 aa, Homo sapiens
  CDR3 for beta chain variable domain of TCR clone 319138 (TRBV19, TRBJ2-2)
CASSGQGIAGELFF

SEQ ID NO: 638277 - protein, 12 aa, Homo sapiens
  CDR3 for alpha chain variable domain of TCR clone 319139 (TRAV21, TRAJ3)
CCFYSSASKIIF

SEQ ID NO: 638278 - protein, 18 aa, Homo sapiens
  CDR3 for beta chain variable domain of TCR clone 319139 (TRBV7-6, TRBJ2-1)
CASSPRTSGMSSYNEQFF

SEQ ID NO: 638279 - protein, 14 aa, Homo sapiens
  CDR3 for alpha chain variable domain of TCR clone 319140 (TRAV12-3, TRAJ22)
CAMSLFGSARQLTF

SEQ ID NO: 638280 - protein, 11 aa, Homo sapiens
  CDR3 for beta chain variable domain of TCR clone 319140 (TRBV12-4, TRBJ2-2)
CASSSAGELVF

SEQ ID NO: 638281 - protein, 13 aa, Homo sapiens
  CDR3 for alpha chain variable domain of TCR clone 319141 (TRAV21, TRAJ27)
CAARPGNAGKSTF

SEQ ID NO: 638282 - protein, 13 aa, Homo sapiens
  CDR3 for beta chain variable domain of TCR clone 319141 (TRBV18, TRBJ2-7)
RASQSGGGYEQYF

SEQ ID NO: 638283 - protein, 14 aa, Homo sapiens
  CDR3 for alpha chain variable domain of TCR clone 319142 (TRAV3, TRAJ40)
CAVRDRRGTYKYLF

SEQ ID NO: 638284 - protein, 15 aa, Homo sapiens
  CDR3 for beta chain variable domain of TCR clone 319142 (TRBV11-1, TRBJ1-3)
CASTDPRAFGNTIYF

SEQ ID NO: 638285 - protein, 15 aa, Homo sapiens
  CDR3 for alpha chain variable domain of TCR clone 319143 (TRAV13-1, TRAJ17)
CAASIHGGCSQQANF

SEQ ID NO: 638286 - protein, 14 aa, Homo sapiens
  CDR3 for beta chain variable domain of TCR clone 319143 (TRBV20-1, TRBJ2-4)
CSARDRGQGGIQYF

SEQ ID NO: 638287 - protein, 16 aa, Homo sapiens
  CDR3 for alpha chain variable domain of TCR clone 319144 (TRAV3, TRAJ21)
CAVRDIERGNFNKFYF

SEQ ID NO: 638288 - protein, 13 aa, Homo sapiens
  CDR3 for beta chain variable domain of TCR clone 319144 (TRBV27, TRBJ2-7)
CASSVTTGYGQYF

SEQ ID NO: 638289 - protein, 13 aa, Homo sapiens
  CDR3 for alpha chain variable domain of TCR clone 319145 (TRAV26-1, TRAJ30)
CIVNMNRDAKIIF

SEQ ID NO: 638290 - protein, 16 aa, Homo sapiens
  CDR3 for beta chain variable domain of TCR clone 319145 (TRBV16, TRBJ2-7)
CASSRPAGGSSYEQYI

SEQ ID NO: 638291 - protein, 14 aa, Homo sapiens
  CDR3 for alpha chain variable domain of TCR clone 319146 (TRAV13-1, TRAJ10)
CAAKEPGGGNKLTF

SEQ ID NO: 638292 - protein, 12 aa, Homo sapiens
  CDR3 for beta chain variable domain of TCR clone 319146 (TRBV5-1, TRBJ1-2)
CASSQDTYGYTF

SEQ ID NO: 638293 - protein, 18 aa, Homo sapiens
  CDR3 for alpha chain variable domain of TCR clone 319147 (TRAV9-2, TRAJ52)
CALSRHKSGGTSYGKLTL

SEQ ID NO: 638294 - protein, 13 aa, Homo sapiens
  CDR3 for beta chain variable domain of TCR clone 319147 (TRBV7-9, TRBJ1-2)
CASSLKQNYGYTF

SEQ ID NO: 638295 - protein, 14 aa, Homo sapiens
  CDR3 for alpha chain variable domain of TCR clone 319148 (TRAV12-2, TRAJ6)
CAVIASGGRYIPTF

SEQ ID NO: 638296 - protein, 16 aa, Homo sapiens
  CDR3 for beta chain variable domain of TCR clone 319148 (TRBV7-2, TRBJ2-3)
CASSLAGAGSGDTQYF

SEQ ID NO: 638297 - protein, 15 aa, Homo sapiens
  CDR3 for alpha chain variable domain of TCR clone 319149 (TRAV1-1, TRAJ22)
CAVRVSSGSARQLTF

SEQ ID NO: 638298 - protein, 15 aa, Homo sapiens
  CDR3 for beta chain variable domain of TCR clone 319149 (TRBV20-1, TRBJ2-7)
CSARDRVAGMDEQYF

SEQ ID NO: 638299 - protein, 11 aa, Homo sapiens
  CDR3 for alpha chain variable domain of TCR clone 319150 (TRAV3, TRAJ21)
CAVGNFDKFYF

SEQ ID NO: 638300 - protein, 16 aa, Homo sapiens
  CDR3 for beta chain variable domain of TCR clone 319150 (TRBV19, TRBJ2-1)
CASIKAGPSSYNEQFF

SEQ ID NO: 638301 - protein, 16 aa, Homo sapiens
  CDR3 for alpha chain variable domain of TCR clone 319151 (TRAV26-1, TRAJ40)
CIVRGYPTSGNYKYIF

SEQ ID NO: 638302 - protein, 14 aa, Homo sapiens
  CDR3 for beta chain variable domain of TCR clone 319151 (TRBV5-1, TRBJ1-4)
CASSSGQGGEKLFF

SEQ ID NO: 638303 - protein, 14 aa, Homo sapiens
  CDR3 for alpha chain variable domain of TCR clone 319152 (TRAV12-1, TRAJ12)
CVVTSGDSSYKLIF

SEQ ID NO: 638304 - protein, 14 aa, Homo sapiens
  CDR3 for beta chain variable domain of TCR clone 319152 (TRBV27, TRBJ2-2)
CASRPGVNTGELFF

SEQ ID NO: 638305 - protein, 14 aa, Homo sapiens
  CDR3 for alpha chain variable domain of TCR clone 319153 (TRAV9-2, TRAJ39)
CALYIYNAGNMLTF

SEQ ID NO: 638306 - protein, 13 aa, Homo sapiens
  CDR3 for beta chain variable domain of TCR clone 319153 (TRBV20-1, TRBJ1-1)
CSARVGGNTEAFF

SEQ ID NO: 638307 - protein, 14 aa, Homo sapiens
  CDR3 for alpha chain variable domain of TCR clone 319154 (TRAV12-2, TRAJ13)
CAVKKTGGYRKVTF

SEQ ID NO: 638308 - protein, 13 aa, Homo sapiens
  CDR3 for beta chain variable domain of TCR clone 319154 (TRBV19, TRBJ1-2)
CASSVPGQDGYTF

SEQ ID NO: 638309 - protein, 14 aa, Homo sapiens
  CDR3 for alpha chain variable domain of TCR clone 319155 (TRAV1-1, TRAJ27)
CAVIYNTNAGKSTF

SEQ ID NO: 638310 - protein, 19 aa, Homo sapiens
  CDR3 for beta chain variable domain of TCR clone 319155 (TRBV7-3, TRBJ2-2)
CASSLRAGGSGPNTGELFF

SEQ ID NO: 638311 - protein, 13 aa, Homo sapiens
  CDR3 for alpha chain variable domain of TCR clone 319156 (TRAV36/DV7, TRAJ37)
CAVFSSNTCKLIF

SEQ ID NO: 638312 - protein, 16 aa, Homo sapiens
  CDR3 for beta chain variable domain of TCR clone 319156 (TRBV3-1, TRBJ2-5)
CASSPGQFNGFGTQYF

SEQ ID NO: 638313 - protein, 11 aa, Homo sapiens
  CDR3 for alpha chain variable domain of TCR clone 319157 (TRAV1-1, TRAJ23)
CAVRQGGKLIF

SEQ ID NO: 638314 - protein, 16 aa, Homo sapiens
  CDR3 for beta chain variable domain of TCR clone 319157 (TRBV4-1, TRBJ2-7)
CASSHSGTSGTYEQYF

SEQ ID NO: 638315 - protein, 20 aa, Homo sapiens
  CDR3 for alpha chain variable domain of TCR clone 319158 (TRAV25, TRAJ44)
TDVGTRYLLLGTGTASKLTF

SEQ ID NO: 638316 - protein, 16 aa, Homo sapiens
  CDR3 for beta chain variable domain of TCR clone 319158 (TRBV4-2, TRBJ2-3)
CASSLSGTGSTDTQYF

SEQ ID NO: 638317 - protein, 12 aa, Homo sapiens
  CDR3 for alpha chain variable domain of TCR clone 319159 (TRAV21, TRAJ6)
CAVKGGSDIPTY

SEQ ID NO: 638318 - protein, 13 aa, Homo sapiens
  CDR3 for beta chain variable domain of TCR clone 319159 (TRBV11-2, TRBJ1-1)
CASSFTENTEAFF

SEQ ID NO: 638319 - protein, 14 aa, Homo sapiens
  CDR3 for alpha chain variable domain of TCR clone 319160 (TRAV12-2, TRAJ45)
SAVNIGGGADGLTF

SEQ ID NO: 638320 - protein, 13 aa, Homo sapiens
  CDR3 for beta chain variable domain of TCR clone 319160 (TRBV19, TRBJ2-2)
CASSIWSTGELFF

SEQ ID NO: 638321 - protein, 11 aa, Homo sapiens
  CDR3 for alpha chain variable domain of TCR clone 319161 (TRAV1-2, TRAJ31)
RAVNNNARLMF

SEQ ID NO: 638322 - protein, 15 aa, Homo sapiens
  CDR3 for beta chain variable domain of TCR clone 319161 (TRBV28, TRBJ2-1)
CASSIIAGGRSEQFF

SEQ ID NO: 638323 - protein, 15 aa, Homo sapiens
  CDR3 for alpha chain variable domain of TCR clone 319162 (TRAV21, TRAJ53)
CATLNSGGSNHKLTF

SEQ ID NO: 638324 - protein, 16 aa, Homo sapiens
  CDR3 for beta chain variable domain of TCR clone 319162 (TRBV11-2, TRBJ2-7)
CASSLAPTGVNYEQYF

SEQ ID NO: 638325 - protein, 17 aa, Homo sapiens
  CDR3 for alpha chain variable domain of TCR clone 319163 (TRAV16, TRAJ26)
CALSGSEFCLSSRNQIV

SEQ ID NO: 638326 - protein, 12 aa, Homo sapiens
  CDR3 for beta chain variable domain of TCR clone 319163 (TRBV11-2, TRBJ2-1)
CASSPGNNEQFF

SEQ ID NO: 638327 - protein, 14 aa, Homo sapiens
  CDR3 for alpha chain variable domain of TCR clone 319164 (TRAV1-2, TRAJ16)
CAVNRFSDVQKLLF

SEQ ID NO: 638328 - protein, 12 aa, Homo sapiens
  CDR3 for beta chain variable domain of TCR clone 319164 (TRBV14, TRBJ1-1)
CASSQIKGLAFF

SEQ ID NO: 638329 - protein, 15 aa, Homo sapiens
  CDR3 for alpha chain variable domain of TCR clone 319165 (TRAV13-1, TRAJ17)
CAASIERAAGNKLTF

SEQ ID NO: 638330 - protein, 15 aa, Homo sapiens
  CDR3 for beta chain variable domain of TCR clone 319165 (TRBV4-3, TRBJ2-1)
CASSQMRGAHNEQFF

SEQ ID NO: 638331 - protein, 20 aa, Homo sapiens
  CDR3 for alpha chain variable domain of TCR clone 319166 (TRAV38-1, TRAJ43)
CAFMKHNSGRHALWSRDQTD

SEQ ID NO: 638332 - protein, 11 aa, Homo sapiens
  CDR3 for beta chain variable domain of TCR clone 319166 (TRBV7-9, TRBJ2-3)
CASSYTDTQYF

SEQ ID NO: 638333 - protein, 16 aa, Homo sapiens
  CDR3 for alpha chain variable domain of TCR clone 319167 (TRAV3, TRAJ10)
CAVSDMRAGGGNKLTF

SEQ ID NO: 638334 - protein, 16 aa, Homo sapiens
  CDR3 for beta chain variable domain of TCR clone 319167 (TRBV5-7, TRBJ1-5)
CASSLQQDREYQPQHF

SEQ ID NO: 638335 - protein, 16 aa, Homo sapiens
  CDR3 for alpha chain variable domain of TCR clone 319168 (TRAV38-1, TRAJ56)
CAFMKRQTGANSKLTF

SEQ ID NO: 638336 - protein, 12 aa, Homo sapiens
  CDR3 for beta chain variable domain of TCR clone 319168 (TRBV12-5, TRBJ2-5)
CASGQGVETQYF

SEQ ID NO: 638337 - protein, 16 aa, Homo sapiens
  CDR3 for alpha chain variable domain of TCR clone 319169 (TRAV23/DV6, TRAJ48)
CAASGVVNFGNEKLTF

SEQ ID NO: 638338 - protein, 15 aa, Homo sapiens
  CDR3 for beta chain variable domain of TCR clone 319169 (TRBV20-1, TRBJ2-5)
CSAGLAGVSKETQYF

SEQ ID NO: 638339 - protein, 14 aa, Homo sapiens
  CDR3 for alpha chain variable domain of TCR clone 319170 (TRAV26-1, TRAJ38)
CIADNAGNNRKLIW

SEQ ID NO: 638340 - protein, 14 aa, Homo sapiens
  CDR3 for beta chain variable domain of TCR clone 319170 (TRBV19, TRBJ2-3)
CASSIDLGGDTQYF

SEQ ID NO: 638341 - protein, 16 aa, Homo sapiens
  CDR3 for alpha chain variable domain of TCR clone 319171 (TRAV39, TRAJ32)
CAVDMEYGGATNKLIF

SEQ ID NO: 638342 - protein, 13 aa, Homo sapiens
  CDR3 for beta chain variable domain of TCR clone 319171 (TRBV13, TRBJ2-1)
CASILGGRGEQFF

SEQ ID NO: 638343 - protein, 14 aa, Homo sapiens
  CDR3 for alpha chain variable domain of TCR clone 319172 (TRAV17, TRAJ16)
CATADFSDGQKLLF

SEQ ID NO: 638344 - protein, 12 aa, Homo sapiens
  CDR3 for beta chain variable domain of TCR clone 319172 (TRBV24-1, TRBJ1-1)
CVTLYPDTEAFL

SEQ ID NO: 638345 - protein, 14 aa, Homo sapiens
  CDR3 for alpha chain variable domain of TCR clone 319173 (TRAV27, TRAJ40)
CADPTTSGTYKYIF

SEQ ID NO: 638346 - protein, 12 aa, Homo sapiens
  CDR3 for beta chain variable domain of TCR clone 319173 (TRBV7-8, TRBJ2-7)
CASSLGDREQYF

SEQ ID NO: 638347 - protein, 17 aa, Homo sapiens
  CDR3 for alpha chain variable domain of TCR clone 319174 (TRAV3, TRAJ6)
CAVRDGPRAGGSYIPTF

SEQ ID NO: 638348 - protein, 16 aa, Homo sapiens
  CDR3 for beta chain variable domain of TCR clone 319174 (TRBV2, TRBJ2-1)
CASSANPRDWQAEQFF

SEQ ID NO: 638349 - protein, 21 aa, Homo sapiens
  CDR3 for alpha chain variable domain of TCR clone 319175 (TRAV17, TRAJ7)
TASRAADTASYFFATLGRLAF

SEQ ID NO: 638350 - protein, 13 aa, Homo sapiens
  CDR3 for beta chain variable domain of TCR clone 319175 (TRBV12-4, TRBJ2-7)
CASSLERVREQYF

SEQ ID NO: 638351 - protein, 12 aa, Homo sapiens
  CDR3 for alpha chain variable domain of TCR clone 319176 (TRAV21, TRAJ39)
CAADNAGNMLTF

SEQ ID NO: 638352 - protein, 15 aa, Homo sapiens
  CDR3 for beta chain variable domain of TCR clone 319176 (TRBV27, TRBJ2-1)
CASSNVGGSSNEQFF

SEQ ID NO: 638353 - protein, 13 aa, Homo sapiens
  CDR3 for alpha chain variable domain of TCR clone 319177 (TRAV8-3, TRAJ43)
CAVGPDNNNDIRF

SEQ ID NO: 638354 - protein, 14 aa, Homo sapiens
  CDR3 for beta chain variable domain of TCR clone 319177 (TRBV19, TRBJ2-1)
CANPTFVLSGEQFF

SEQ ID NO: 638355 - protein, 14 aa, Homo sapiens
  CDR3 for alpha chain variable domain of TCR clone 319178 (TRAV12-1, TRAJ9)
CVVNIITGGFKTIF

SEQ ID NO: 638356 - protein, 14 aa, Homo sapiens
  CDR3 for beta chain variable domain of TCR clone 319178 (TRBV11-1, TRBJ2-7)
CASSFRQGSYEQYF

SEQ ID NO: 638357 - protein, 14 aa, Homo sapiens
  CDR3 for alpha chain variable domain of TCR clone 319179 (TRAV1-2, TRAJ28)
CVARSGAGSYQLTF

SEQ ID NO: 638358 - protein, 13 aa, Homo sapiens
  CDR3 for beta chain variable domain of TCR clone 319179 (TRBV7-3, TRBJ1-1)
CASSQDWGAEAFF

SEQ ID NO: 638359 - protein, 13 aa, Homo sapiens
  CDR3 for alpha chain variable domain of TCR clone 319180 (TRAV2, TRAJ21)
CAVEDLNLNKFYF

SEQ ID NO: 638360 - protein, 15 aa, Homo sapiens
  CDR3 for beta chain variable domain of TCR clone 319180 (TRBV28, TRBJ2-7)
CASSPGQGSIETQYF

SEQ ID NO: 638361 - protein, 18 aa, Homo sapiens
  CDR3 for alpha chain variable domain of TCR clone 319181 (TRAV29/DV5, TRAJ52)
CAAGFRGAGGTSYGKLTF

SEQ ID NO: 638362 - protein, 14 aa, Homo sapiens
  CDR3 for beta chain variable domain of TCR clone 319181 (TRBV20-1, TRBJ1-1)
CSAQTRIGGTEAFF

SEQ ID NO: 638363 - protein, 15 aa, Homo sapiens
  CDR3 for alpha chain variable domain of TCR clone 319182 (TRAV8-3, TRAJ27)
CAVGPSKANEGKSTF

SEQ ID NO: 638364 - protein, 15 aa, Homo sapiens
  CDR3 for beta chain variable domain of TCR clone 319182 (TRBV7-2, TRBJ2-1)
CASSSGLAGGNEQFF

SEQ ID NO: 638365 - protein, 14 aa, Homo sapiens
  CDR3 for alpha chain variable domain of TCR clone 319183 (TRAV8-3, TRAJ10)
CAVGNAGGGNKLTF

SEQ ID NO: 638366 - protein, 16 aa, Homo sapiens
  CDR3 for beta chain variable domain of TCR clone 319183 (TRBV11-2, TRBJ1-2)
CASSLDTGGAYHGYTF

SEQ ID NO: 638367 - protein, 16 aa, Homo sapiens
  CDR3 for alpha chain variable domain of TCR clone 319184 (TRAV30, TRAJ24)
CGTEIVDADSWGKFQF

SEQ ID NO: 638368 - protein, 13 aa, Homo sapiens
  CDR3 for beta chain variable domain of TCR clone 319184 (TRBV5-5, TRBJ2-7)
CASSSQTRQRQYF

SEQ ID NO: 638369 - protein, 16 aa, Homo sapiens
  CDR3 for alpha chain variable domain of TCR clone 319185 (TRAV12-1, TRAJ52)
CVVPPAGGTSYGKLTS

SEQ ID NO: 638370 - protein, 13 aa, Homo sapiens
  CDR3 for beta chain variable domain of TCR clone 319185 (TRBV9, TRBJ2-1)
CASSPSGGSEQFF

SEQ ID NO: 638371 - protein, 11 aa, Homo sapiens
  CDR3 for alpha chain variable domain of TCR clone 319186 (TRAV20, TRAJ40)
CGVGGTYKYIF

SEQ ID NO: 638372 - protein, 15 aa, Homo sapiens
  CDR3 for beta chain variable domain of TCR clone 319186 (TRBV6-3, TRBJ2-2)
CASSFLATLTGELFF

SEQ ID NO: 638373 - protein, 18 aa, Homo sapiens
  CDR3 for alpha chain variable domain of TCR clone 319187 (TRAV8-3, )
CAVGAGNIQNPDPAVYQL

SEQ ID NO: 638374 - protein, 14 aa, Homo sapiens
  CDR3 for beta chain variable domain of TCR clone 319187 (TRBV5-1, TRBJ1-5)
CASSLGQGAQPQHF

SEQ ID NO: 638375 - protein, 11 aa, Homo sapiens
  CDR3 for alpha chain variable domain of TCR clone 319188 (TRAV1-2, TRAJ40)
CAVPGTYKYIF

SEQ ID NO: 638376 - protein, 16 aa, Homo sapiens
  CDR3 for beta chain variable domain of TCR clone 319188 (TRBV29-1, TRBJ2-7)
CSDEVVGTSGSYEQYF

SEQ ID NO: 638377 - protein, 12 aa, Homo sapiens
  CDR3 for alpha chain variable domain of TCR clone 319189 (TRAV13-2, TRAJ8)
CAPWLGFQKLVF

SEQ ID NO: 638378 - protein, 16 aa, Homo sapiens
  CDR3 for beta chain variable domain of TCR clone 319189 (TRBV2, TRBJ2-3)
CASSTSVEGVTDTQYF

SEQ ID NO: 638379 - protein, 16 aa, Homo sapiens
  CDR3 for alpha chain variable domain of TCR clone 319190 (TRAV14/DV4, TRAJ57)
CNERGLTQGGSEKLVF

SEQ ID NO: 638380 - protein, 13 aa, Homo sapiens
  CDR3 for beta chain variable domain of TCR clone 319190 (TRBV11-2, TRBJ2-5)
CASGHGAKETQYF

SEQ ID NO: 638381 - protein, 16 aa, Homo sapiens
  CDR3 for alpha chain variable domain of TCR clone 319191 (TRAV3, TRAJ37)
CAVRGKGSGNTGKLII

SEQ ID NO: 638382 - protein, 13 aa, Homo sapiens
  CDR3 for beta chain variable domain of TCR clone 319191 (TRBV14, TRBJ2-7)
CASSQDRRYEQYF

SEQ ID NO: 638383 - protein, 13 aa, Homo sapiens
  CDR3 for alpha chain variable domain of TCR clone 319192 (TRAV6, TRAJ40)
CALVTSGTYTYIF

SEQ ID NO: 638384 - protein, 13 aa, Homo sapiens
  CDR3 for beta chain variable domain of TCR clone 319192 (TRBV28, TRBJ2-7)
CASRFTPRPEQYF

SEQ ID NO: 638385 - protein, 12 aa, Homo sapiens
  CDR3 for alpha chain variable domain of TCR clone 319193 (TRAV12-3, TRAJ17)
CAMTLTGNKLTF

SEQ ID NO: 638386 - protein, 15 aa, Homo sapiens
  CDR3 for beta chain variable domain of TCR clone 319193 (TRBV20-1, TRBJ2-7)
CIARDRGSGMDEQYF

SEQ ID NO: 638387 - protein, 13 aa, Homo sapiens
  CDR3 for alpha chain variable domain of TCR clone 319194 (TRAV3, TRAJ17)
CAVPRAAGNKLTF

SEQ ID NO: 638388 - protein, 15 aa, Homo sapiens
  CDR3 for beta chain variable domain of TCR clone 319194 (TRBV7-9, TRBJ1-6)
CASSSPGRGNSPLHF

SEQ ID NO: 638389 - protein, 15 aa, Homo sapiens
  CDR3 for alpha chain variable domain of TCR clone 319195 (TRAV3, TRAJ22)
CAVRDRGGSARQPPF

SEQ ID NO: 638390 - protein, 13 aa, Homo sapiens
  CDR3 for beta chain variable domain of TCR clone 319195 (TRBV2, TRBJ1-5)
CATAGPGNQPQHF

SEQ ID NO: 638391 - protein, 15 aa, Homo sapiens
  CDR3 for alpha chain variable domain of TCR clone 319196 (TRAV13-1, TRAJ31)
CAPRDRLMFGDGTQL

SEQ ID NO: 638392 - protein, 12 aa, Homo sapiens
  CDR3 for beta chain variable domain of TCR clone 319196 (TRBV7-9, TRBJ2-7)
CASSLEGYEQYF

SEQ ID NO: 638393 - protein, 13 aa, Homo sapiens
  CDR3 for alpha chain variable domain of TCR clone 319197 (TRAV12-2, TRAJ15)
CAVFNQAGTALIF

SEQ ID NO: 638394 - protein, 14 aa, Homo sapiens
  CDR3 for beta chain variable domain of TCR clone 319197 (TRBV7-8, TRBJ1-5)
AAAGGGGADQPQHF

SEQ ID NO: 638395 - protein, 12 aa, Homo sapiens
  CDR3 for alpha chain variable domain of TCR clone 319198 (TRAV8-3, TRAJ26)
CAGVNYGQNFVF

SEQ ID NO: 638396 - protein, 15 aa, Homo sapiens
  CDR3 for beta chain variable domain of TCR clone 319198 (TRBV20-1, TRBJ2-7)
CSARDRVSGMDEQYF

SEQ ID NO: 638397 - protein, 15 aa, Homo sapiens
  CDR3 for alpha chain variable domain of TCR clone 319199 (TRAV12-3, TRAJ6)
CAMSATTGGSYIPTF

SEQ ID NO: 638398 - protein, 12 aa, Homo sapiens
  CDR3 for beta chain variable domain of TCR clone 319199 (TRBV7-3, TRBJ2-1)
CASSFINNEQFF

SEQ ID NO: 638399 - protein, 20 aa, Homo sapiens
  CDR3 for alpha chain variable domain of TCR clone 319200 (TRAV12-3, TRAJ41)
SLFIRDSQPSGSATPEALNF

SEQ ID NO: 638400 - protein, 15 aa, Homo sapiens
  CDR3 for beta chain variable domain of TCR clone 319200 (TRBV5-1, TRBJ2-7)
CASSLDLTSSYEQYF

SEQ ID NO: 638401 - protein, 14 aa, Homo sapiens
  CDR3 for alpha chain variable domain of TCR clone 319201 (TRAV20, TRAJ20)
CAVRRVYNDYKLSF

SEQ ID NO: 638402 - protein, 13 aa, Homo sapiens
  CDR3 for beta chain variable domain of TCR clone 319201 (TRBV19, TRBJ2-5)
CASSETAPETQYF

SEQ ID NO: 638403 - protein, 10 aa, Homo sapiens
  CDR3 for alpha chain variable domain of TCR clone 319202 (TRAV26-1, TRAJ22)
RSDSARQLTF

SEQ ID NO: 638404 - protein, 12 aa, Homo sapiens
  CDR3 for beta chain variable domain of TCR clone 319202 (TRBV11-2, TRBJ2-2)
CASSLGGGELFF

SEQ ID NO: 638405 - protein, 15 aa, Homo sapiens
  CDR3 for alpha chain variable domain of TCR clone 319203 (TRAV26-1, TRAJ29)
CIVRVEGSGNTPLVF

SEQ ID NO: 638406 - protein, 15 aa, Homo sapiens
  CDR3 for beta chain variable domain of TCR clone 319203 (TRBV7-3, TRBJ2-6)
CASSLGGSGANVLTF

SEQ ID NO: 638407 - protein, 14 aa, Homo sapiens
  CDR3 for alpha chain variable domain of TCR clone 319204 (TRAV26-1, TRAJ34)
CIVIVAYNTDKLIF

SEQ ID NO: 638408 - protein, 13 aa, Homo sapiens
  CDR3 for beta chain variable domain of TCR clone 319204 (TRBV7-9, TRBJ2-7)
CASSFAGAYEQYF

SEQ ID NO: 638409 - protein, 15 aa, Homo sapiens
  CDR3 for alpha chain variable domain of TCR clone 319205 (TRAV4, TRAJ39)
CLVGPNNNAGNLLTF

SEQ ID NO: 638410 - protein, 14 aa, Homo sapiens
  CDR3 for beta chain variable domain of TCR clone 319205 (TRBV11-2, TRBJ2-5)
CASSRTGGIETQYF

SEQ ID NO: 638411 - protein, 14 aa, Homo sapiens
  CDR3 for alpha chain variable domain of TCR clone 319206 (TRAV16, TRAJ33)
CALSAMDSNSQLIW

SEQ ID NO: 638412 - protein, 15 aa, Homo sapiens
  CDR3 for beta chain variable domain of TCR clone 319206 (TRBV28, TRBJ2-7)
CASSLEAYPIYEQYF

SEQ ID NO: 638413 - protein, 12 aa, Homo sapiens
  CDR3 for alpha chain variable domain of TCR clone 319207 (TRAV8-6, TRAJ57)
CAANSGSEKLVF

SEQ ID NO: 638414 - protein, 13 aa, Homo sapiens
  CDR3 for beta chain variable domain of TCR clone 319207 (TRBV23-1, TRBJ1-4)
CASRGKFNEKLFF

SEQ ID NO: 638415 - protein, 15 aa, Homo sapiens
  CDR3 for alpha chain variable domain of TCR clone 319208 (TRAV12-1, TRAJ44)
CVVFVNTGTASKLTF

SEQ ID NO: 638416 - protein, 17 aa, Homo sapiens
  CDR3 for beta chain variable domain of TCR clone 319208 (TRBV7-8, TRBJ2-6)
CASSAGTGGAGATVLTF

SEQ ID NO: 638417 - protein, 15 aa, Homo sapiens
  CDR3 for alpha chain variable domain of TCR clone 319209 (TRAV17, TRAJ57)
CATGPSQGGSEKLSL

SEQ ID NO: 638418 - protein, 14 aa, Homo sapiens
  CDR3 for beta chain variable domain of TCR clone 319209 (TRBV12-5, TRBJ2-5)
CASGSRTHQETQYF

SEQ ID NO: 638419 - protein, 14 aa, Homo sapiens
  CDR3 for alpha chain variable domain of TCR clone 319210 (TRAV25, TRAJ20)
CAGKGRWNDYKLSF

SEQ ID NO: 638420 - protein, 12 aa, Homo sapiens
  CDR3 for beta chain variable domain of TCR clone 319210 (TRBV12-5, TRBJ2-3)
CASQASTDTQYF

SEQ ID NO: 638421 - protein, 16 aa, Homo sapiens
  CDR3 for alpha chain variable domain of TCR clone 319211 (TRAV3, TRAJ10)
CAVRDMNAGGGNKITF

SEQ ID NO: 638422 - protein, 15 aa, Homo sapiens
  CDR3 for beta chain variable domain of TCR clone 319211 (TRBV5-1, TRBJ1-2)
CASSLGSVTNYGYTF

SEQ ID NO: 638423 - protein, 16 aa, Homo sapiens
  CDR3 for alpha chain variable domain of TCR clone 319212 (TRAV8-6, TRAJ28)
CAVTSKPGAGCYQLTF

SEQ ID NO: 638424 - protein, 16 aa, Homo sapiens
  CDR3 for beta chain variable domain of TCR clone 319212 (TRBV12-4, TRBJ2-5)
CASSWRPSGDLETQYF

SEQ ID NO: 638425 - protein, 13 aa, Homo sapiens
  CDR3 for alpha chain variable domain of TCR clone 319213 (TRAV2, TRAJ16)
CAVEFGDGQTLLF

SEQ ID NO: 638426 - protein, 14 aa, Homo sapiens
  CDR3 for beta chain variable domain of TCR clone 319213 (TRBV6-3, TRBJ2-5)
CASSYSLREKTQYF

SEQ ID NO: 638427 - protein, 14 aa, Homo sapiens
  CDR3 for alpha chain variable domain of TCR clone 319214 (TRAV8-6, TRAJ53)
CAALVLGSNYKLTF

SEQ ID NO: 638428 - protein, 15 aa, Homo sapiens
  CDR3 for beta chain variable domain of TCR clone 319214 (TRBV20-1, TRBJ2-3)
CSAEPRAGHGDKQYF

SEQ ID NO: 638429 - protein, 10 aa, Homo sapiens
  CDR3 for alpha chain variable domain of TCR clone 319215 (TRAV21, TRAJ31)
CAVDNARLMF

SEQ ID NO: 638430 - protein, 16 aa, Homo sapiens
  CDR3 for beta chain variable domain of TCR clone 319215 (TRBV7-6, TRBJ2-1)
CASSAPGPSSYNEQFF

SEQ ID NO: 638431 - protein, 13 aa, Homo sapiens
  CDR3 for alpha chain variable domain of TCR clone 319216 (TRAV29/DV5, TRAJ34)
CAARVDNTDKLIF

SEQ ID NO: 638432 - protein, 15 aa, Homo sapiens
  CDR3 for beta chain variable domain of TCR clone 319216 (TRBV7-2, TRBJ2-3)
CASSLAGAFIDTQYF

SEQ ID NO: 638433 - protein, 14 aa, Homo sapiens
  CDR3 for alpha chain variable domain of TCR clone 319217 (TRAV1-2, TRAJ16)
CAVNRFSDGQKLLF

SEQ ID NO: 638434 - protein, 14 aa, Homo sapiens
  CDR3 for beta chain variable domain of TCR clone 319217 (TRBV7-9, TRBJ2-2)
CASSLIQDTGELFF

SEQ ID NO: 638435 - protein, 12 aa, Homo sapiens
  CDR3 for alpha chain variable domain of TCR clone 319218 (TRAV12-3, TRAJ17)
RAMTLTGNKLTF

SEQ ID NO: 638436 - protein, 15 aa, Homo sapiens
  CDR3 for beta chain variable domain of TCR clone 319218 (TRBV6-6, TRBJ2-5)
CASSPGGGLEETQYF

SEQ ID NO: 638437 - protein, 15 aa, Homo sapiens
  CDR3 for alpha chain variable domain of TCR clone 319219 (TRAV4, TRAJ39)
CLVGPNNNAGNMLTF

SEQ ID NO: 638438 - protein, 15 aa, Homo sapiens
  CDR3 for beta chain variable domain of TCR clone 319219 (TRBV7-3, TRBJ2-1)
CASSPTGGGEVEQFF

SEQ ID NO: 638439 - protein, 12 aa, Homo sapiens
  CDR3 for alpha chain variable domain of TCR clone 319220 (TRAV25, TRAJ11)
RAGYSGYSNLTF

SEQ ID NO: 638440 - protein, 13 aa, Homo sapiens
  CDR3 for beta chain variable domain of TCR clone 319220 (TRBV7-9, TRBJ1-2)
CASSLKQNYGYTF

SEQ ID NO: 638441 - protein, 15 aa, Homo sapiens
  CDR3 for alpha chain variable domain of TCR clone 319221 (TRAV3, TRAJ22)
CAVRDRGGSARQMPF

SEQ ID NO: 638442 - protein, 16 aa, Homo sapiens
  CDR3 for beta chain variable domain of TCR clone 319221 (TRBV5-4, TRBJ2-3)
CASQQPGAGGADTQYF

SEQ ID NO: 638443 - protein, 10 aa, Homo sapiens
  CDR3 for alpha chain variable domain of TCR clone 319222 (TRAV12-2, TRAJ48)
CAGANEKLTF

SEQ ID NO: 638444 - protein, 13 aa, Homo sapiens
  CDR3 for beta chain variable domain of TCR clone 319222 (TRBV10-3, TRBJ2-7)
CASKLAVNYEQYF

SEQ ID NO: 638445 - protein, 14 aa, Homo sapiens
  CDR3 for alpha chain variable domain of TCR clone 319223 (TRAV14/DV4, TRAJ54)
CAMREAPGAKKLVF

SEQ ID NO: 638446 - protein, 15 aa, Homo sapiens
  CDR3 for beta chain variable domain of TCR clone 319223 (TRBV7-2, TRBJ2-2)
CASRRPGQNTGELFF

SEQ ID NO: 638447 - protein, 11 aa, Homo sapiens
  CDR3 for alpha chain variable domain of TCR clone 319224 (TRAV3, TRAJ21)
CAVGNLNKFYF

SEQ ID NO: 638448 - protein, 16 aa, Homo sapiens
  CDR3 for beta chain variable domain of TCR clone 319224 (TRBV19, TRBJ2-1)
CASSKAGPSSYNEQSF

SEQ ID NO: 638449 - protein, 13 aa, Homo sapiens
  CDR3 for alpha chain variable domain of TCR clone 319225 (TRAV13-1, TRAJ39)
CAARIWAGNMLTF

SEQ ID NO: 638450 - protein, 15 aa, Homo sapiens
  CDR3 for beta chain variable domain of TCR clone 319225 (TRBV7-9, TRBJ1-1)
CASSLLEQVGTEAFF

SEQ ID NO: 638451 - protein, 12 aa, Homo sapiens
  CDR3 for alpha chain variable domain of TCR clone 319226 (TRAV3, TRAJ27)
CAVRDKAGKSTF

SEQ ID NO: 638452 - protein, 14 aa, Homo sapiens
  CDR3 for beta chain variable domain of TCR clone 319226 (TRBV15, TRBJ2-5)
CATSIGGLGETEYF

SEQ ID NO: 638453 - protein, 14 aa, Homo sapiens
  CDR3 for alpha chain variable domain of TCR clone 319227 (TRAV13-1, TRAJ44)
CATKATGTASKLTF

SEQ ID NO: 638454 - protein, 17 aa, Homo sapiens
  CDR3 for beta chain variable domain of TCR clone 319227 (TRBV7-3, TRBJ2-3)
CASSLMKRMRGADTQYF

SEQ ID NO: 638455 - protein, 13 aa, Homo sapiens
  CDR3 for alpha chain variable domain of TCR clone 319228 (TRAV27, TRAJ6)
CAGGTGGSYIPTF

SEQ ID NO: 638456 - protein, 15 aa, Homo sapiens
  CDR3 for beta chain variable domain of TCR clone 319228 (TRBV5-5, TRBJ2-7)
CASSLAAPLSYEQYF

SEQ ID NO: 638457 - protein, 11 aa, Homo sapiens
  CDR3 for alpha chain variable domain of TCR clone 319229 (TRAV23/DV6, TRAJ58)
CAARLLRGETS

SEQ ID NO: 638458 - protein, 14 aa, Homo sapiens
  CDR3 for beta chain variable domain of TCR clone 319229 (TRBV7-3, TRBJ2-1)
CASSLAGGTNEQFV

SEQ ID NO: 638459 - protein, 12 aa, Homo sapiens
  CDR3 for alpha chain variable domain of TCR clone 319230 (TRAV13-1, TRAJ48)
CAANFGNEKLTF

SEQ ID NO: 638460 - protein, 13 aa, Homo sapiens
  CDR3 for beta chain variable domain of TCR clone 319230 (TRBV7-3, TRBJ1-1)
CASSQDLGAEAFF

SEQ ID NO: 638461 - protein, 14 aa, Homo sapiens
  CDR3 for alpha chain variable domain of TCR clone 319231 (TRAV12-3, TRAJ7)
CAMSEIGGNNRLAF

SEQ ID NO: 638462 - protein, 12 aa, Homo sapiens
  CDR3 for beta chain variable domain of TCR clone 319231 (TRBV5-4, TRBJ1-1)
CASSLGRREAFF

SEQ ID NO: 638463 - protein, 14 aa, Homo sapiens
  CDR3 for alpha chain variable domain of TCR clone 319232 (TRAV12-3, TRAJ9)
CAMSPNTGGFKTIF

SEQ ID NO: 638464 - protein, 13 aa, Homo sapiens
  CDR3 for beta chain variable domain of TCR clone 319232 (TRBV7-9, TRBJ1-2)
CASSLKQNYGYTF

SEQ ID NO: 638465 - protein, 18 aa, Homo sapiens
  CDR3 for alpha chain variable domain of TCR clone 319233 (TRAV29/DV5, TRAJ52)
CAAAFRGAGGTSYGKLTF

SEQ ID NO: 638466 - protein, 16 aa, Homo sapiens
  CDR3 for beta chain variable domain of TCR clone 319233 (TRBV7-3, TRBJ2-2)
CASSLKRGTLSGELFF

SEQ ID NO: 638467 - protein, 12 aa, Homo sapiens
  CDR3 for alpha chain variable domain of TCR clone 319234 (TRAV30, TRAJ43)
CGTEERGNDMRF

SEQ ID NO: 638468 - protein, 14 aa, Homo sapiens
  CDR3 for beta chain variable domain of TCR clone 319234 (TRBV18, TRBJ2-7)
CASSPRGGAYEQYF

SEQ ID NO: 638469 - protein, 13 aa, Homo sapiens
  CDR3 for alpha chain variable domain of TCR clone 319235 (TRAV38-1, TRAJ42)
CARWGGSQGNLIF

SEQ ID NO: 638470 - protein, 13 aa, Homo sapiens
  CDR3 for beta chain variable domain of TCR clone 319235 (TRBV5-5, TRBJ1-2)
CASSFWRGEDDTF

SEQ ID NO: 638471 - protein, 14 aa, Homo sapiens
  CDR3 for alpha chain variable domain of TCR clone 319236 (TRAV1-2, TRAJ8)
CAVREDTGFQKLVF

SEQ ID NO: 638472 - protein, 19 aa, Homo sapiens
  CDR3 for beta chain variable domain of TCR clone 319236 (TRBV7-9, TRBJ1-1)
CATSFWAKRAGNPNTEAFF

SEQ ID NO: 638473 - protein, 12 aa, Homo sapiens
  CDR3 for alpha chain variable domain of TCR clone 319237 (TRAV20, TRAJ39)
CAVGNSGNMLTF

SEQ ID NO: 638474 - protein, 16 aa, Homo sapiens
  CDR3 for beta chain variable domain of TCR clone 319237 (TRBV15, TRBJ1-2)
CATSRGPRTGGGGYTF

SEQ ID NO: 638475 - protein, 16 aa, Homo sapiens
  CDR3 for alpha chain variable domain of TCR clone 319238 (TRAV35, TRAJ52)
CAGQGSGGTSYGKLTF

SEQ ID NO: 638476 - protein, 17 aa, Homo sapiens
  CDR3 for beta chain variable domain of TCR clone 319238 (TRBV13, TRBJ2-3)
CASSLSRVAGGRNTQYF

SEQ ID NO: 638477 - protein, 18 aa, Homo sapiens
  CDR3 for alpha chain variable domain of TCR clone 319239 (TRAV21, TRAJ52)
CAVRPSPAGGTSYGKLTF

SEQ ID NO: 638478 - protein, 15 aa, Homo sapiens
  CDR3 for beta chain variable domain of TCR clone 319239 (TRBV11-2, TRBJ2-7)
CASSLMVGGSYEQYF

SEQ ID NO: 638479 - protein, 11 aa, Homo sapiens
  CDR3 for alpha chain variable domain of TCR clone 319240 (TRAV12-2, TRAJ31)
CAILNNARRMF

SEQ ID NO: 638480 - protein, 16 aa, Homo sapiens
  CDR3 for beta chain variable domain of TCR clone 319240 (TRBV13, TRBJ2-2)
CASSPRTGEHTGELFF

SEQ ID NO: 638481 - protein, 15 aa, Homo sapiens
  CDR3 for alpha chain variable domain of TCR clone 319241 (TRAV12-1, TRAJ44)
CVADLPTGTASKLTF

SEQ ID NO: 638482 - protein, 13 aa, Homo sapiens
  CDR3 for beta chain variable domain of TCR clone 319241 (TRBV7-2, TRBJ2-2)
CASSLAVTGELFF

SEQ ID NO: 638483 - protein, 14 aa, Homo sapiens
  CDR3 for alpha chain variable domain of TCR clone 319242 (TRAV8-4, TRAJ34)
CAVSDPGDTDKLIF

SEQ ID NO: 638484 - protein, 15 aa, Homo sapiens
  CDR3 for beta chain variable domain of TCR clone 319242 (TRBV6-3, TRBJ2-7)
CASSSPGTVFYEQYF

SEQ ID NO: 638485 - protein, 13 aa, Homo sapiens
  CDR3 for alpha chain variable domain of TCR clone 319243 (TRAV12-2, TRAJ6)
CAVNVSRKLHTYI

SEQ ID NO: 638486 - protein, 13 aa, Homo sapiens
  CDR3 for beta chain variable domain of TCR clone 319243 (TRBV12-5, TRBJ2-3)
CASGDRQSDTQYF

SEQ ID NO: 638487 - protein, 12 aa, Homo sapiens
  CDR3 for alpha chain variable domain of TCR clone 319244 (TRAV12-3, TRAJ17)
CSMTLTGTQLTF

SEQ ID NO: 638488 - protein, 15 aa, Homo sapiens
  CDR3 for beta chain variable domain of TCR clone 319244 (TRBV20-1, TRBJ2-7)
CSARDRVSGMDEQYF

SEQ ID NO: 638489 - protein, 14 aa, Homo sapiens
  CDR3 for alpha chain variable domain of TCR clone 319245 (TRAV17, TRAJ57)
CATDPQVGSEKLVF

SEQ ID NO: 638490 - protein, 18 aa, Homo sapiens
  CDR3 for beta chain variable domain of TCR clone 319245 (TRBV20-1, TRBJ2-3)
CSASGLAGGPGTTDTQYF

SEQ ID NO: 638491 - protein, 15 aa, Homo sapiens
  CDR3 for alpha chain variable domain of TCR clone 319246 (TRAV12-3, TRAJ6)
CAMSPASGGSYIPTF

SEQ ID NO: 638492 - protein, 15 aa, Homo sapiens
  CDR3 for beta chain variable domain of TCR clone 319246 (TRBV2, TRBJ1-2)
CASSEPRTVNYGYTF

SEQ ID NO: 638493 - protein, 13 aa, Homo sapiens
  CDR3 for alpha chain variable domain of TCR clone 319247 (TRAV21, TRAJ27)
CAARPGNAGKSTF

SEQ ID NO: 638494 - protein, 14 aa, Homo sapiens
  CDR3 for beta chain variable domain of TCR clone 319247 (TRBV7-2, TRBJ2-7)
CASSPKTSVYEQYF

SEQ ID NO: 638495 - protein, 16 aa, Homo sapiens
  CDR3 for alpha chain variable domain of TCR clone 319248 (TRAV2, TRAJ4)
CAVEDRFSGGYNKLIF

SEQ ID NO: 638496 - protein, 12 aa, Homo sapiens
  CDR3 for beta chain variable domain of TCR clone 319248 (TRBV11-2, TRBJ2-2)
CASSLGGGELFF

SEQ ID NO: 638497 - protein, 14 aa, Homo sapiens
  CDR3 for alpha chain variable domain of TCR clone 319249 (TRAV26-1, TRAJ39)
CIVRGSRAGNMLTF

SEQ ID NO: 638498 - protein, 14 aa, Homo sapiens
  CDR3 for beta chain variable domain of TCR clone 319249 (TRBV7-2, TRBJ2-1)
CASSPGLAGNEQFF

SEQ ID NO: 638499 - protein, 13 aa, Homo sapiens
  CDR3 for alpha chain variable domain of TCR clone 319250 (TRAV8-6, TRAJ49)
CAVITNTGNQFYF

SEQ ID NO: 638500 - protein, 17 aa, Homo sapiens
  CDR3 for beta chain variable domain of TCR clone 319250 (TRBV11-2, TRBJ2-1)
WASSLYPPGVEYNEQFF

SEQ ID NO: 638501 - protein, 11 aa, Homo sapiens
  CDR3 for alpha chain variable domain of TCR clone 319251 (TRAV12-2, TRAJ33)
CAVGSNYQVIW

SEQ ID NO: 638502 - protein, 14 aa, Homo sapiens
  CDR3 for beta chain variable domain of TCR clone 319251 (TRBV6-1, TRBJ2-2)
CASVEHIESGELFF

SEQ ID NO: 638503 - protein, 16 aa, Homo sapiens
  CDR3 for alpha chain variable domain of TCR clone 319252 (TRAV4, TRAJ5)
CLVGPDHGHGQESTYF

SEQ ID NO: 638504 - protein, 15 aa, Homo sapiens
  CDR3 for beta chain variable domain of TCR clone 319252 (TRBV27, TRBJ2-5)
CASSLIPSGGETQCF

SEQ ID NO: 638505 - protein, 16 aa, Homo sapiens
  CDR3 for alpha chain variable domain of TCR clone 319253 (TRAV8-3, TRAJ8)
CAVPRDGNTCFQKLVF

SEQ ID NO: 638506 - protein, 15 aa, Homo sapiens
  CDR3 for beta chain variable domain of TCR clone 319253 (TRBV6-1, TRBJ2-6)
CASSSRPSGANVLTF

SEQ ID NO: 638507 - protein, 18 aa, Homo sapiens
  CDR3 for alpha chain variable domain of TCR clone 319254 (TRAV9-2, TRAJ52)
CALSRHNAGGTSYGKLTF

SEQ ID NO: 638508 - protein, 12 aa, Homo sapiens
  CDR3 for beta chain variable domain of TCR clone 319254 (TRBV7-9, TRBJ2-7)
CASSLEGYEQYF

SEQ ID NO: 638509 - protein, 15 aa, Homo sapiens
  CDR3 for alpha chain variable domain of TCR clone 319255 (TRAV34, TRAJ38)
CGADFTPGNNRKQIW

SEQ ID NO: 638510 - protein, 16 aa, Homo sapiens
  CDR3 for beta chain variable domain of TCR clone 319255 (TRBV6-1, TRBJ2-3)
CASSEVIGQGTDTQYF

SEQ ID NO: 638511 - protein, 11 aa, Homo sapiens
  CDR3 for alpha chain variable domain of TCR clone 319256 (TRAV35, TRAJ12)
RRMDSSYKLTF

SEQ ID NO: 638512 - protein, 14 aa, Homo sapiens
  CDR3 for beta chain variable domain of TCR clone 319256 (TRBV19, TRBJ1-1)
CASSPNRGDTEAFF

SEQ ID NO: 638513 - protein, 16 aa, Homo sapiens
  CDR3 for alpha chain variable domain of TCR clone 319257 (TRAV30, TRAJ24)
CGTEIVDADSWGKFQF

SEQ ID NO: 638514 - protein, 16 aa, Homo sapiens
  CDR3 for beta chain variable domain of TCR clone 319257 (TRBV18, TRBJ1-5)
CASSPYRVEGNQPQHF

SEQ ID NO: 638515 - protein, 13 aa, Homo sapiens
  CDR3 for alpha chain variable domain of TCR clone 319258 (TRAV4, TRAJ42)
CLVGGGSQGNLIF

SEQ ID NO: 638516 - protein, 17 aa, Homo sapiens
  CDR3 for beta chain variable domain of TCR clone 319258 (TRBV7-8, TRBJ1-2)
CASSLRPLQGHLYGYTF

SEQ ID NO: 638517 - protein, 17 aa, Homo sapiens
  CDR3 for alpha chain variable domain of TCR clone 319259 (TRAV8-1, TRAJ42)
CAVKCGNYGGSQGNLIF

SEQ ID NO: 638518 - protein, 15 aa, Homo sapiens
  CDR3 for beta chain variable domain of TCR clone 319259 (TRBV9, TRBJ1-6)
CASSVAGTGDSPLHF

SEQ ID NO: 638519 - protein, 10 aa, Homo sapiens
  CDR3 for alpha chain variable domain of TCR clone 319260 (TRAV13-1, TRAJ5)
CAASRRALTF

SEQ ID NO: 638520 - protein, 16 aa, Homo sapiens
  CDR3 for beta chain variable domain of TCR clone 319260 (TRBV4-3, TRBJ2-3)
CAGSQGGLAGTDTQYF

SEQ ID NO: 638521 - protein, 13 aa, Homo sapiens
  CDR3 for alpha chain variable domain of TCR clone 319261 (TRAV12-2, TRAJ52)
CAVGGTSYGKLTF

SEQ ID NO: 638522 - protein, 13 aa, Homo sapiens
  CDR3 for beta chain variable domain of TCR clone 319261 (TRBV7-3, TRBJ1-1)
CASSQDWGAEAFF

SEQ ID NO: 638523 - protein, 14 aa, Homo sapiens
  CDR3 for alpha chain variable domain of TCR clone 319262 (TRAV1-2, TRAJ8)
CAVREDTGFQKRVF

SEQ ID NO: 638524 - protein, 13 aa, Homo sapiens
  CDR3 for beta chain variable domain of TCR clone 319262 (TRBV12-4, TRBJ1-5)
RASSPDRAQPQHF

SEQ ID NO: 638525 - protein, 13 aa, Homo sapiens
  CDR3 for alpha chain variable domain of TCR clone 319263 (TRAV27, TRAJ17)
CAGAATAGNKLTF

SEQ ID NO: 638526 - protein, 14 aa, Homo sapiens
  CDR3 for beta chain variable domain of TCR clone 319263 (TRBV19, TRBJ2-1)
CASPTFVLSGEQFF

SEQ ID NO: 638527 - protein, 15 aa, Homo sapiens
  CDR3 for alpha chain variable domain of TCR clone 319264 (TRAV26-2, TRAJ39)
CSLRGNNNAGNMLTF

SEQ ID NO: 638528 - protein, 16 aa, Homo sapiens
  CDR3 for beta chain variable domain of TCR clone 319264 (TRBV20-1, TRBJ1-4)
CSARPYGGELNEKLFF

SEQ ID NO: 638529 - protein, 13 aa, Homo sapiens
  CDR3 for alpha chain variable domain of TCR clone 319265 (TRAV21, TRAJ8)
CAAPNTGFRKLVF

SEQ ID NO: 638530 - protein, 13 aa, Homo sapiens
  CDR3 for beta chain variable domain of TCR clone 319265 (TRBV6-3, TRBJ2-3)
CASTLQGIDTQYL

SEQ ID NO: 638531 - protein, 11 aa, Homo sapiens
  CDR3 for alpha chain variable domain of TCR clone 319266 (TRAV2, TRAJ33)
CVVESNYQLIW

SEQ ID NO: 638532 - protein, 15 aa, Homo sapiens
  CDR3 for beta chain variable domain of TCR clone 319266 (TRBV19, TRBJ1-1)
CASTPGQIQNTEAFF

SEQ ID NO: 638533 - protein, 14 aa, Homo sapiens
  CDR3 for alpha chain variable domain of TCR clone 319267 (TRAV20, TRAJ56)
CAVQFGGANSKLTF

SEQ ID NO: 638534 - protein, 14 aa, Homo sapiens
  CDR3 for beta chain variable domain of TCR clone 319267 (TRBV20-1, TRBJ2-7)
CTAKRGRSSYEQYF

SEQ ID NO: 638535 - protein, 13 aa, Homo sapiens
  CDR3 for alpha chain variable domain of TCR clone 319268 (TRAV13-2, TRAJ8)
CAFLNTGFQKLVF

SEQ ID NO: 638536 - protein, 17 aa, Homo sapiens
  CDR3 for beta chain variable domain of TCR clone 319268 (TRBV28, TRBJ2-1)
CASSSARQALTYNEQFF

SEQ ID NO: 638537 - protein, 17 aa, Homo sapiens
  CDR3 for alpha chain variable domain of TCR clone 319269 (TRAV3, TRAJ6)
CAVRDGPKAGESYIPTF

SEQ ID NO: 638538 - protein, 14 aa, Homo sapiens
  CDR3 for beta chain variable domain of TCR clone 319269 (TRBV7-2, TRBJ2-7)
CASSPKTSFYEQYF

SEQ ID NO: 638539 - protein, 17 aa, Homo sapiens
  CDR3 for alpha chain variable domain of TCR clone 319270 (TRAV3, TRAJ6)
CAVRDGPRAGGSYIPTF

SEQ ID NO: 638540 - protein, 19 aa, Homo sapiens
  CDR3 for beta chain variable domain of TCR clone 319270 (TRBV25-1, TRBJ2-2)
CAILVYRVDRGRKTGEQFF

SEQ ID NO: 638541 - protein, 11 aa, Homo sapiens
  CDR3 for alpha chain variable domain of TCR clone 319271 (TRAV13-1, TRAJ39)
CASHAGNMLTF

SEQ ID NO: 638542 - protein, 15 aa, Homo sapiens
  CDR3 for beta chain variable domain of TCR clone 319271 (TRBV6-3, TRBJ2-7)
CASSSLGTVFYEQYF

SEQ ID NO: 638543 - protein, 21 aa, Homo sapiens
  CDR3 for alpha chain variable domain of TCR clone 319272 (TRAV30, TRAJ43)
GLPAQLLRNLLPIIELNDMRF

SEQ ID NO: 638544 - protein, 11 aa, Homo sapiens
  CDR3 for beta chain variable domain of TCR clone 319272 (TRBV11-2, TRBJ2-2)
CASSLPGELFF

SEQ ID NO: 638545 - protein, 14 aa, Homo sapiens
  CDR3 for alpha chain variable domain of TCR clone 319273 (TRAV8-3, TRAJ4)
CAVGASGGYNKLIF

SEQ ID NO: 638546 - protein, 17 aa, Homo sapiens
  CDR3 for beta chain variable domain of TCR clone 319273 (TRBV11-2, TRBJ2-1)
CASGLYPPGVEYNEQFF

SEQ ID NO: 638547 - protein, 15 aa, Homo sapiens
  CDR3 for alpha chain variable domain of TCR clone 319274 (TRAV26-1, TRAJ29)
CIVRVEGSGNTPLVF

SEQ ID NO: 638548 - protein, 15 aa, Homo sapiens
  CDR3 for beta chain variable domain of TCR clone 319274 (TRBV7-9, TRBJ1-5)
CASSHGHQPNQPQHC

SEQ ID NO: 638549 - protein, 16 aa, Homo sapiens
  CDR3 for alpha chain variable domain of TCR clone 319275 (TRAV8-3, TRAJ8)
CAVPRDGNTGFQKLVF

SEQ ID NO: 638550 - protein, 16 aa, Homo sapiens
  CDR3 for beta chain variable domain of TCR clone 319275 (TRBV19, TRBJ2-1)
CASSKAGPSSYNEQFF

SEQ ID NO: 638551 - protein, 14 aa, Homo sapiens
  CDR3 for alpha chain variable domain of TCR clone 319276 (TRAV13-2, TRAJ15)
CAENPNQAGTALIF

SEQ ID NO: 638552 - protein, 16 aa, Homo sapiens
  CDR3 for beta chain variable domain of TCR clone 319276 (TRBV12-4, TRBJ1-2)
CASSPTAKGKTRGYTF

SEQ ID NO: 638553 - protein, 16 aa, Homo sapiens
  CDR3 for alpha chain variable domain of TCR clone 319277 (TRAV23/DV6, TRAJ35)
CAASMRLRGFGNVLHF

SEQ ID NO: 638554 - protein, 15 aa, Homo sapiens
  CDR3 for beta chain variable domain of TCR clone 319277 (TRBV19, TRBJ1-2)
CASSVGQVLNYGYTF

SEQ ID NO: 638555 - protein, 13 aa, Homo sapiens
  CDR3 for alpha chain variable domain of TCR clone 319278 (TRAV13-2, TRAJ48)
CAEMDFGNEKLTF

SEQ ID NO: 638556 - protein, 15 aa, Homo sapiens
  CDR3 for beta chain variable domain of TCR clone 319278 (TRBV20-1, TRBJ2-7)
CSARDRVSGMDEQYY

SEQ ID NO: 638557 - protein, 16 aa, Homo sapiens
  CDR3 for alpha chain variable domain of TCR clone 319279 (TRAV26-1, TRAJ40)
CIVRVARGTYKYILEQ

SEQ ID NO: 638558 - protein, 14 aa, Homo sapiens
  CDR3 for beta chain variable domain of TCR clone 319279 (TRBV7-3, TRBJ2-7)
CASSLKADSYEQYF

SEQ ID NO: 638559 - protein, 14 aa, Homo sapiens
  CDR3 for alpha chain variable domain of TCR clone 319280 (TRAV1-2, TRAJ8)
CAVREDTGFQKLVF

SEQ ID NO: 638560 - protein, 15 aa, Homo sapiens
  CDR3 for beta chain variable domain of TCR clone 319280 (TRBV27, TRBJ2-1)
CASSNGGGSSNEQFV

SEQ ID NO: 638561 - protein, 16 aa, Homo sapiens
  CDR3 for alpha chain variable domain of TCR clone 319281 (TRAV21, TRAJ37)
CAVRPRGSSNTGKLIF

SEQ ID NO: 638562 - protein, 14 aa, Homo sapiens
  CDR3 for beta chain variable domain of TCR clone 319281 (TRBV12-4, TRBJ2-5)
YASSLNRAGETQYF

SEQ ID NO: 638563 - protein, 11 aa, Homo sapiens
  CDR3 for alpha chain variable domain of TCR clone 319282 (TRAV1-2, TRAJ20)
CAVSNDYKLSF

SEQ ID NO: 638564 - protein, 11 aa, Homo sapiens
  CDR3 for beta chain variable domain of TCR clone 319282 (TRBV29-1, TRBJ2-5)
CSEDRTGTQYF

SEQ ID NO: 638565 - protein, 16 aa, Homo sapiens
  CDR3 for alpha chain variable domain of TCR clone 319283 (TRAV3, TRAJ37)
CAVRGKGSGNTGKLIF

SEQ ID NO: 638566 - protein, 14 aa, Homo sapiens
  CDR3 for beta chain variable domain of TCR clone 319283 (TRBV2, TRBJ2-1)
CASRTGSSYNEQFF

SEQ ID NO: 638567 - protein, 14 aa, Homo sapiens
  CDR3 for alpha chain variable domain of TCR clone 319284 (TRAV12-3, TRAJ54)
CAMSALQGAQKLVF

SEQ ID NO: 638568 - protein, 15 aa, Homo sapiens
  CDR3 for beta chain variable domain of TCR clone 319284 (TRBV19, TRBJ2-4)
CASSTPGIAKNIRYF

SEQ ID NO: 638569 - protein, 12 aa, Homo sapiens
  CDR3 for alpha chain variable domain of TCR clone 319285 (TRAV21, TRAJ11)
CATTSGYSTLPF

SEQ ID NO: 638570 - protein, 14 aa, Homo sapiens
  CDR3 for beta chain variable domain of TCR clone 319285 (TRBV20-1, TRBJ2-7)
CSAPELAGVGEQYF

SEQ ID NO: 638571 - protein, 17 aa, Homo sapiens
  CDR3 for alpha chain variable domain of TCR clone 319286 (TRAV3, TRAJ12)
CCERRYGTMDSSYKLIF

SEQ ID NO: 638572 - protein, 15 aa, Homo sapiens
  CDR3 for beta chain variable domain of TCR clone 319286 (TRBV5-5, TRBJ1-5)
CASSLKGGGEQPQHF

SEQ ID NO: 638573 - protein, 13 aa, Homo sapiens
  CDR3 for alpha chain variable domain of TCR clone 319287 (TRAV21, TRAJ27)
CAARPGNAGNQPL

SEQ ID NO: 638574 - protein, 13 aa, Homo sapiens
  CDR3 for beta chain variable domain of TCR clone 319287 (TRBV18, TRBJ2-7)
CASQSGGGYEQYF

SEQ ID NO: 638575 - protein, 16 aa, Homo sapiens
  CDR3 for alpha chain variable domain of TCR clone 319288 (TRAV8-3, TRAJ44)
CAVGASNTGNASKLTF

SEQ ID NO: 638576 - protein, 15 aa, Homo sapiens
  CDR3 for beta chain variable domain of TCR clone 319288 (TRBV27, TRBJ1-5)
CASTLNRGSNQPQHF

SEQ ID NO: 638577 - protein, 19 aa, Homo sapiens
  CDR3 for alpha chain variable domain of TCR clone 319289 (TRAV29/DV5, TRAJ49)
CSVLLCSKLTVDTGNQFYF

SEQ ID NO: 638578 - protein, 14 aa, Homo sapiens
  CDR3 for beta chain variable domain of TCR clone 319289 (TRBV7-2, TRBJ2-1)
CASSLVAGRNEQFF

SEQ ID NO: 638579 - protein, 13 aa, Homo sapiens
  CDR3 for alpha chain variable domain of TCR clone 319290 (TRAV29/DV5, TRAJ35)
CAASKGFGNVLHC

SEQ ID NO: 638580 - protein, 16 aa, Homo sapiens
  CDR3 for beta chain variable domain of TCR clone 319290 (TRBV28, TRBJ1-4)
CASSPPYRGRSEKLFF

SEQ ID NO: 638581 - protein, 13 aa, Homo sapiens
  CDR3 for alpha chain variable domain of TCR clone 319291 (TRAV23/DV6, TRAJ24)
CAASEDSGGKLQF

SEQ ID NO: 638582 - protein, 12 aa, Homo sapiens
  CDR3 for beta chain variable domain of TCR clone 319291 (TRBV5-1, TRBJ2-7)
CASSDSTYEQYF

SEQ ID NO: 638583 - protein, 15 aa, Homo sapiens
  CDR3 for alpha chain variable domain of TCR clone 319292 (TRAV20, TRAJ53)
CAVQASGGSNYKLTF

SEQ ID NO: 638584 - protein, 15 aa, Homo sapiens
  CDR3 for beta chain variable domain of TCR clone 319292 (TRBV7-2, TRBJ2-1)
CASSSGLAGGNEQFF

SEQ ID NO: 638585 - protein, 14 aa, Homo sapiens
  CDR3 for alpha chain variable domain of TCR clone 319293 (TRAV13-2, TRAJ17)
CAENSKAAGNKLTF

SEQ ID NO: 638586 - protein, 13 aa, Homo sapiens
  CDR3 for beta chain variable domain of TCR clone 319293 (TRBV15, TRBJ1-6)
CATSGGLNSPLHF

SEQ ID NO: 638587 - protein, 14 aa, Homo sapiens
  CDR3 for alpha chain variable domain of TCR clone 319294 (TRAV21, TRAJ45)
CAVSSGGGADGLTS

SEQ ID NO: 638588 - protein, 15 aa, Homo sapiens
  CDR3 for beta chain variable domain of TCR clone 319294 (TRBV6-1, TRBJ2-4)
CASSEAVWTINTQYF

SEQ ID NO: 638589 - protein, 15 aa, Homo sapiens
  CDR3 for alpha chain variable domain of TCR clone 319295 (TRAV2, TRAJ9)
CAVEDRGTGDFNTIF

SEQ ID NO: 638590 - protein, 16 aa, Homo sapiens
  CDR3 for beta chain variable domain of TCR clone 319295 (TRBV24-1, TRBJ2-3)
CATSDPGTGATDTQYF

SEQ ID NO: 638591 - protein, 15 aa, Homo sapiens
  CDR3 for alpha chain variable domain of TCR clone 319296 (TRAV21, TRAJ53)
CATLNSGGSNYKLSF

SEQ ID NO: 638592 - protein, 16 aa, Homo sapiens
  CDR3 for beta chain variable domain of TCR clone 319296 (TRBV24-1, TRBJ2-3)
CATSDPGTGATDTQYF

SEQ ID NO: 638593 - protein, 14 aa, Homo sapiens
  CDR3 for alpha chain variable domain of TCR clone 319297 (TRAV3, TRAJ22)
CAVRDYGSARQLTF

SEQ ID NO: 638594 - protein, 13 aa, Homo sapiens
  CDR3 for beta chain variable domain of TCR clone 319297 (TRBV11-2, TRBJ2-5)
CAGGHGAKETQYF

SEQ ID NO: 638595 - protein, 13 aa, Homo sapiens
  CDR3 for alpha chain variable domain of TCR clone 319298 (TRAV26-1, TRAJ34)
CIVRPWITDKLIF

SEQ ID NO: 638596 - protein, 16 aa, Homo sapiens
  CDR3 for beta chain variable domain of TCR clone 319298 (TRBV20-1, TRBJ2-6)
CSASSQGYDGANVLTF

SEQ ID NO: 638597 - protein, 14 aa, Homo sapiens
  CDR3 for alpha chain variable domain of TCR clone 319299 (TRAV17, TRAJ16)
CATADYSDGQKLLF

SEQ ID NO: 638598 - protein, 12 aa, Homo sapiens
  CDR3 for beta chain variable domain of TCR clone 319299 (TRBV24-1, TRBJ1-1)
CATLYPDTEAFF

SEQ ID NO: 638599 - protein, 11 aa, Homo sapiens
  CDR3 for alpha chain variable domain of TCR clone 319300 (TRAV1-1, TRAJ23)
CAVRQGGKLIF

SEQ ID NO: 638600 - protein, 13 aa, Homo sapiens
  CDR3 for beta chain variable domain of TCR clone 319300 (TRBV20-1, TRBJ1-2)
CSARGTADYGYTF

SEQ ID NO: 638601 - protein, 12 aa, Homo sapiens
  CDR3 for alpha chain variable domain of TCR clone 319301 (TRAV12-1, TRAJ40)
CVVNGETYKYIF

SEQ ID NO: 638602 - protein, 15 aa, Homo sapiens
  CDR3 for beta chain variable domain of TCR clone 319301 (TRBV11-3, TRBJ2-7)
CASSPGPASSYEQYF

SEQ ID NO: 638603 - protein, 15 aa, Homo sapiens
  CDR3 for alpha chain variable domain of TCR clone 319302 (TRAV13-1, TRAJ3)
CAASKLASSASEIIF

SEQ ID NO: 638604 - protein, 16 aa, Homo sapiens
  CDR3 for beta chain variable domain of TCR clone 319302 (TRBV25-1, TRBJ1-5)
CASGAPTVNSNQRQHF

SEQ ID NO: 638605 - protein, 12 aa, Homo sapiens
  CDR3 for alpha chain variable domain of TCR clone 319303 (TRAV21, TRAJ33)
CAKMDSNYQLIW

SEQ ID NO: 638606 - protein, 16 aa, Homo sapiens
  CDR3 for beta chain variable domain of TCR clone 319303 (TRBV29-1, TRBJ1-2)
CSVEANRDIANYGYTF

SEQ ID NO: 638607 - protein, 14 aa, Homo sapiens
  CDR3 for alpha chain variable domain of TCR clone 319304 (TRAV16, TRAJ29)
CALTRNSGNTPLVF

SEQ ID NO: 638608 - protein, 11 aa, Homo sapiens
  CDR3 for beta chain variable domain of TCR clone 319304 (TRBV12-4, TRBJ2-3)
CASTATDTQYF

SEQ ID NO: 638609 - protein, 10 aa, Homo sapiens
  CDR3 for alpha chain variable domain of TCR clone 319305 (TRAV1-2, TRAJ23)
CAGQGGKLIF

SEQ ID NO: 638610 - protein, 13 aa, Homo sapiens
  CDR3 for beta chain variable domain of TCR clone 319305 (TRBV10-3, TRBJ2-7)
CASKLAVNYEQYF

SEQ ID NO: 638611 - protein, 15 aa, Homo sapiens
  CDR3 for alpha chain variable domain of TCR clone 319306 (TRAV23/DV6, TRAJ30)
CAASSQESRDDKIIF

SEQ ID NO: 638612 - protein, 17 aa, Homo sapiens
  CDR3 for beta chain variable domain of TCR clone 319306 (TRBV4-3, TRBJ2-1)
GASSQFSSGRASGEQFF

SEQ ID NO: 638613 - protein, 10 aa, Homo sapiens
  CDR3 for alpha chain variable domain of TCR clone 319307 (TRAV22, TRAJ45)
CAVGGEVLTD

SEQ ID NO: 638614 - protein, 14 aa, Homo sapiens
  CDR3 for beta chain variable domain of TCR clone 319307 (TRBV11-2, TRBJ1-5)
CASSLDRGRQPQHF

SEQ ID NO: 638615 - protein, 13 aa, Homo sapiens
  CDR3 for alpha chain variable domain of TCR clone 319308 (TRAV8-4, TRAJ47)
CAVTALYGTKLVF

SEQ ID NO: 638616 - protein, 19 aa, Homo sapiens
  CDR3 for beta chain variable domain of TCR clone 319308 (TRBV25-1, TRBJ2-2)
CAILVYRVDRGRKTGELFF

SEQ ID NO: 638617 - protein, 15 aa, Homo sapiens
  CDR3 for alpha chain variable domain of TCR clone 319309 (TRAV3, TRAJ4)
CAVRDGTSGYNKLIF

SEQ ID NO: 638618 - protein, 14 aa, Homo sapiens
  CDR3 for beta chain variable domain of TCR clone 319309 (TRBV7-2, TRBJ2-7)
CASRSQGAAYEQYF

SEQ ID NO: 638619 - protein, 14 aa, Homo sapiens
  CDR3 for alpha chain variable domain of TCR clone 319310 (TRAV12-3, TRAJ42)
CAMNYGGSQGNLIF

SEQ ID NO: 638620 - protein, 13 aa, Homo sapiens
  CDR3 for beta chain variable domain of TCR clone 319310 (TRBV11-2, TRBJ1-1)
CASSLETSTEAFF

SEQ ID NO: 638621 - protein, 10 aa, Homo sapiens
  CDR3 for alpha chain variable domain of TCR clone 319311 (TRAV30, TRAJ24)
CGTEIVMLTA

SEQ ID NO: 638622 - protein, 17 aa, Homo sapiens
  CDR3 for beta chain variable domain of TCR clone 319311 (TRBV11-2, TRBJ2-1)
CASSLYPPGVEYNEQFF

SEQ ID NO: 638623 - protein, 15 aa, Homo sapiens
  CDR3 for alpha chain variable domain of TCR clone 319312 (TRAV16, TRAJ16)
CALPGGGSDGQKLLF

SEQ ID NO: 638624 - protein, 14 aa, Homo sapiens
  CDR3 for beta chain variable domain of TCR clone 319312 (TRBV6-1, TRBJ2-7)
CASSERVNPYEQYF

SEQ ID NO: 638625 - protein, 14 aa, Homo sapiens
  CDR3 for alpha chain variable domain of TCR clone 319313 (TRAV1-2, TRAJ16)
CAVNRFSDGQKLLF

SEQ ID NO: 638626 - protein, 14 aa, Homo sapiens
  CDR3 for beta chain variable domain of TCR clone 319313 (TRBV7-2, TRBJ1-1)
CAISFLTGTTEAFF

SEQ ID NO: 638627 - protein, 12 aa, Homo sapiens
  CDR3 for alpha chain variable domain of TCR clone 319314 (TRAV8-3, TRAJ26)
RAGDNYGQNFVF

SEQ ID NO: 638628 - protein, 13 aa, Homo sapiens
  CDR3 for beta chain variable domain of TCR clone 319314 (TRBV20-1, TRBJ1-1)
CSAPLGGGTEAFF

SEQ ID NO: 638629 - protein, 15 aa, Homo sapiens
  CDR3 for alpha chain variable domain of TCR clone 319315 (TRAV12-3, TRAJ6)
CAMSAASGGSYIPTF

SEQ ID NO: 638630 - protein, 16 aa, Homo sapiens
  CDR3 for beta chain variable domain of TCR clone 319315 (TRBV7-3, TRBJ2-2)
CASSLKRGTLSGELFF

SEQ ID NO: 638631 - protein, 13 aa, Homo sapiens
  CDR3 for alpha chain variable domain of TCR clone 319316 (TRAV36/DV7, TRAJ54)
CAVCTQGAQKLVF

SEQ ID NO: 638632 - protein, 13 aa, Homo sapiens
  CDR3 for beta chain variable domain of TCR clone 319316 (TRBV7-6, TRBJ2-7)
CASSLEHTHEQYF

SEQ ID NO: 638633 - protein, 14 aa, Homo sapiens
  CDR3 for alpha chain variable domain of TCR clone 319317 (TRAV23/DV6, TRAJ8)
CAASKNTGFQKLVS

SEQ ID NO: 638634 - protein, 16 aa, Homo sapiens
  CDR3 for beta chain variable domain of TCR clone 319317 (TRBV4-1, TRBJ2-6)
CASSQVGDPEANVLTF

SEQ ID NO: 638635 - protein, 16 aa, Homo sapiens
  CDR3 for alpha chain variable domain of TCR clone 319318 (TRAV1-2, TRAJ10)
CAVRGILTGGGNKLTF

SEQ ID NO: 638636 - protein, 12 aa, Homo sapiens
  CDR3 for beta chain variable domain of TCR clone 319318 (TRBV7-8, TRBJ2-7)
CASSLGGREQYF

SEQ ID NO: 638637 - protein, 17 aa, Homo sapiens
  CDR3 for alpha chain variable domain of TCR clone 319319 (TRAV8-3, TRAJ50)
CAVGAVDTETSYGKVIF

SEQ ID NO: 638638 - protein, 13 aa, Homo sapiens
  CDR3 for beta chain variable domain of TCR clone 319319 (TRBV7-9, TRBJ2-2)
CASSSAGTGELFF

SEQ ID NO: 638639 - protein, 17 aa, Homo sapiens
  CDR3 for alpha chain variable domain of TCR clone 319320 (TRAV3, TRAJ42)
CAVRDRDYGGSPGNLIF

SEQ ID NO: 638640 - protein, 12 aa, Homo sapiens
  CDR3 for beta chain variable domain of TCR clone 319320 (TRBV11-2, TRBJ2-1)
CASSPGNNEQFF

SEQ ID NO: 638641 - protein, 11 aa, Homo sapiens
  CDR3 for alpha chain variable domain of TCR clone 319321 (TRAV12-3, TRAJ49)
CAANTGNQLYF

SEQ ID NO: 638642 - protein, 15 aa, Homo sapiens
  CDR3 for beta chain variable domain of TCR clone 319321 (TRBV11-2, TRBJ2-1)
CASSLGTSGLNEQFF

SEQ ID NO: 638643 - protein, 12 aa, Homo sapiens
  CDR3 for alpha chain variable domain of TCR clone 319322 (TRAV2, TRAJ10)
CASTGGGNNLTF

SEQ ID NO: 638644 - protein, 13 aa, Homo sapiens
  CDR3 for beta chain variable domain of TCR clone 319322 (TRBV7-2, TRBJ2-5)
CQQLVRGGETQYF

SEQ ID NO: 638645 - protein, 17 aa, Homo sapiens
  CDR3 for alpha chain variable domain of TCR clone 319323 (TRAV26-1, TRAJ47)
CIVPSLLYMEYGNKLVF

SEQ ID NO: 638646 - protein, 14 aa, Homo sapiens
  CDR3 for beta chain variable domain of TCR clone 319323 (TRBV7-3, TRBJ1-5)
SASSFSGCNQPQHF

SEQ ID NO: 638647 - protein, 12 aa, Homo sapiens
  CDR3 for alpha chain variable domain of TCR clone 319324 (TRAV12-1, TRAJ52)
CTGGTSYGKLTF

SEQ ID NO: 638648 - protein, 12 aa, Homo sapiens
  CDR3 for beta chain variable domain of TCR clone 319324 (TRBV28, TRBJ2-7)
CASSFSSYEQYF

SEQ ID NO: 638649 - protein, 14 aa, Homo sapiens
  CDR3 for alpha chain variable domain of TCR clone 319325 (TRAV1-2, TRAJ16)
CAVNRYSDGQKLLF

SEQ ID NO: 638650 - protein, 15 aa, Homo sapiens
  CDR3 for beta chain variable domain of TCR clone 319325 (TRBV27, TRBJ2-1)
CASSNGGGSSNEQFF

SEQ ID NO: 638651 - protein, 14 aa, Homo sapiens
  CDR3 for alpha chain variable domain of TCR clone 319326 (TRAV2, TRAJ9)
CAVEDRSGGFKTIF

SEQ ID NO: 638652 - protein, 13 aa, Homo sapiens
  CDR3 for beta chain variable domain of TCR clone 319326 (TRBV20-1, TRBJ2-7)
CSATPWRRYEQYF

SEQ ID NO: 638653 - protein, 15 aa, Homo sapiens
  CDR3 for alpha chain variable domain of TCR clone 319327 (TRAV26-1, TRAJ15)
CIVRAANQAGTALIS

SEQ ID NO: 638654 - protein, 15 aa, Homo sapiens
  CDR3 for beta chain variable domain of TCR clone 319327 (TRBV20-1, TRBJ1-1)
CSARSAATSNTEAFL

SEQ ID NO: 638655 - protein, 13 aa, Homo sapiens
  CDR3 for alpha chain variable domain of TCR clone 319328 (TRAV1-2, TRAJ9)
CAAVNTGGFKTIF

SEQ ID NO: 638656 - protein, 12 aa, Homo sapiens
  CDR3 for beta chain variable domain of TCR clone 319328 (TRBV11-3, TRBJ1-1)
CASSHRQGEAFF

SEQ ID NO: 638657 - protein, 18 aa, Homo sapiens
  CDR3 for alpha chain variable domain of TCR clone 319329 (TRAV1-2, TRAJ18)
CAVRDRGDRGSTLGRLYF

SEQ ID NO: 638658 - protein, 16 aa, Homo sapiens
  CDR3 for beta chain variable domain of TCR clone 319329 (TRBV29-1, TRBJ1-2)
CSVEANRDIANYGYTF

SEQ ID NO: 638659 - protein, 18 aa, Homo sapiens
  CDR3 for alpha chain variable domain of TCR clone 319330 (TRAV21, TRAJ52)
CAVRPSPAGGTSYGKLTF

SEQ ID NO: 638660 - protein, 16 aa, Homo sapiens
  CDR3 for beta chain variable domain of TCR clone 319330 (TRBV20-1, TRBJ2-5)
CSPGGTSGGYMETQYF

SEQ ID NO: 638661 - protein, 13 aa, Homo sapiens
  CDR3 for alpha chain variable domain of TCR clone 319331 (TRAV2, TRAJ15)
CAVASQAGTALIF

SEQ ID NO: 638662 - protein, 14 aa, Homo sapiens
  CDR3 for beta chain variable domain of TCR clone 319331 (TRBV7-9, TRBJ1-1)
CASSLVPVWTEAFF

SEQ ID NO: 638663 - protein, 14 aa, Homo sapiens
  CDR3 for alpha chain variable domain of TCR clone 319332 (TRAV8-2, TRAJ4)
CVVSPSGGYNKLIF

SEQ ID NO: 638664 - protein, 11 aa, Homo sapiens
  CDR3 for beta chain variable domain of TCR clone 319332 (TRBV29-1, TRBJ2-5)
CSVASGETQYF

SEQ ID NO: 638665 - protein, 14 aa, Homo sapiens
  CDR3 for alpha chain variable domain of TCR clone 319333 (TRAV2, TRAJ29)
CAGPFQYGNTPLVF

SEQ ID NO: 638666 - protein, 15 aa, Homo sapiens
  CDR3 for beta chain variable domain of TCR clone 319333 (TRBV11-3, TRBJ2-3)
CASSAGTVVTNTQYF

SEQ ID NO: 638667 - protein, 13 aa, Homo sapiens
  CDR3 for alpha chain variable domain of TCR clone 319334 (TRAV3, TRAJ8)
CAVRFTGFQKLVF

SEQ ID NO: 638668 - protein, 16 aa, Homo sapiens
  CDR3 for beta chain variable domain of TCR clone 319334 (TRBV12-5, TRBJ2-5)
CASGPRTSGNQETQYF

SEQ ID NO: 638669 - protein, 16 aa, Homo sapiens
  CDR3 for alpha chain variable domain of TCR clone 319335 (TRAV12-1, TRAJ12)
CVVNTLLMDSSYKLIF

SEQ ID NO: 638670 - protein, 15 aa, Homo sapiens
  CDR3 for beta chain variable domain of TCR clone 319335 (TRBV7-9, TRBJ1-6)
CASSSPGRGNSPLHF

SEQ ID NO: 638671 - protein, 14 aa, Homo sapiens
  CDR3 for alpha chain variable domain of TCR clone 319336 (TRAV3, TRAJ21)
CAVRDAYNFNKFYF

SEQ ID NO: 638672 - protein, 15 aa, Homo sapiens
  CDR3 for beta chain variable domain of TCR clone 319336 (TRBV5-7, TRBJ1-5)
CASSYGKLWDQPQHF

SEQ ID NO: 638673 - protein, 14 aa, Homo sapiens
  CDR3 for alpha chain variable domain of TCR clone 319337 (TRAV12-2, TRAJ45)
CAVYSGGGADGLTF

SEQ ID NO: 638674 - protein, 13 aa, Homo sapiens
  CDR3 for beta chain variable domain of TCR clone 319337 (TRBV7-7, TRBJ2-3)
CASSLRRADTQYF

SEQ ID NO: 638675 - protein, 14 aa, Homo sapiens
  CDR3 for alpha chain variable domain of TCR clone 319338 (TRAV4, TRAJ31)
CLVGDRDNNASLMF

SEQ ID NO: 638676 - protein, 13 aa, Homo sapiens
  CDR3 for beta chain variable domain of TCR clone 319338 (TRBV5-1, TRBJ1-1)
CASSLGSDTEAFF

SEQ ID NO: 638677 - protein, 13 aa, Homo sapiens
  CDR3 for alpha chain variable domain of TCR clone 319339 (TRAV35, TRAJ42)
CAGFPGSQGNLIF

SEQ ID NO: 638678 - protein, 12 aa, Homo sapiens
  CDR3 for beta chain variable domain of TCR clone 319339 (TRBV12-4, TRBJ2-1)
CASSPGRNEQFF

SEQ ID NO: 638679 - protein, 12 aa, Homo sapiens
  CDR3 for alpha chain variable domain of TCR clone 319340 (TRAV3, TRAJ7)
CADLLWEQQTRF

SEQ ID NO: 638680 - protein, 16 aa, Homo sapiens
  CDR3 for beta chain variable domain of TCR clone 319340 (TRBV10-3, TRBJ2-1)
CAISGVGDGGGGEQFF

SEQ ID NO: 638681 - protein, 14 aa, Homo sapiens
  CDR3 for alpha chain variable domain of TCR clone 319341 (TRAV1-2, TRAJ16)
CAVNWFSDGQKLLF

SEQ ID NO: 638682 - protein, 13 aa, Homo sapiens
  CDR3 for beta chain variable domain of TCR clone 319341 (TRBV11-2, TRBJ2-5)
CASSFSSQETQYF

SEQ ID NO: 638683 - protein, 12 aa, Homo sapiens
  CDR3 for alpha chain variable domain of TCR clone 319342 (TRAV8-3, TRAJ43)
CAVGAGYNDMRF

SEQ ID NO: 638684 - protein, 14 aa, Homo sapiens
  CDR3 for beta chain variable domain of TCR clone 319342 (TRBV4-2, TRBJ1-5)
CASSRDRGNQPQHF

SEQ ID NO: 638685 - protein, 13 aa, Homo sapiens
  CDR3 for alpha chain variable domain of TCR clone 319343 (TRAV26-2, TRAJ57)
CILSRGGSEKLVF

SEQ ID NO: 638686 - protein, 13 aa, Homo sapiens
  CDR3 for beta chain variable domain of TCR clone 319343 (TRBV19, TRBJ2-7)
CASRKAGGSEQYF

SEQ ID NO: 638687 - protein, 14 aa, Homo sapiens
  CDR3 for alpha chain variable domain of TCR clone 319344 (TRAV12-2, TRAJ36)
CAVNPPTGANNLFF

SEQ ID NO: 638688 - protein, 13 aa, Homo sapiens
  CDR3 for beta chain variable domain of TCR clone 319344 (TRBV2, TRBJ1-1)
CASSVLMNTEAFF

SEQ ID NO: 638689 - protein, 14 aa, Homo sapiens
  CDR3 for alpha chain variable domain of TCR clone 319345 (TRAV1-2, TRAJ16)
CAVNRFSDGQKLLC

SEQ ID NO: 638690 - protein, 15 aa, Homo sapiens
  CDR3 for beta chain variable domain of TCR clone 319345 (TRBV19, TRBJ1-5)
CASSIVWADNQPQHF

SEQ ID NO: 638691 - protein, 13 aa, Homo sapiens
  CDR3 for alpha chain variable domain of TCR clone 319346 (TRAV17, TRAJ22)
CAHHSGSARQLTF

SEQ ID NO: 638692 - protein, 16 aa, Homo sapiens
  CDR3 for beta chain variable domain of TCR clone 319346 (TRBV4-1, TRBJ1-2)
CASSQDAGRVLYGDTF

SEQ ID NO: 638693 - protein, 15 aa, Homo sapiens
  CDR3 for alpha chain variable domain of TCR clone 319347 (TRAV16, TRAJ12)
CSRWPLRDSSYKLIF

SEQ ID NO: 638694 - protein, 13 aa, Homo sapiens
  CDR3 for beta chain variable domain of TCR clone 319347 (TRBV4-2, TRBJ1-1)
CASSQAGNTEAFF

SEQ ID NO: 638695 - protein, 14 aa, Homo sapiens
  CDR3 for alpha chain variable domain of TCR clone 319348 (TRAV25, TRAJ35)
CARRMEGFGNVLHC

SEQ ID NO: 638696 - protein, 13 aa, Homo sapiens
  CDR3 for beta chain variable domain of TCR clone 319348 (TRBV20-1, TRBJ2-2)
CSASAAGTGELFF

SEQ ID NO: 638697 - protein, 13 aa, Homo sapiens
  CDR3 for alpha chain variable domain of TCR clone 319349 (TRAV26-1, TRAJ35)
CIVSRRVGEMLHC

SEQ ID NO: 638698 - protein, 17 aa, Homo sapiens
  CDR3 for beta chain variable domain of TCR clone 319349 (TRBV7-9, TRBJ2-7)
CSSSFAGSRGGAYEQYF

SEQ ID NO: 638699 - protein, 11 aa, Homo sapiens
  CDR3 for alpha chain variable domain of TCR clone 319350 (TRAV2, TRAJ13)
CASGGYQKVTF

SEQ ID NO: 638700 - protein, 12 aa, Homo sapiens
  CDR3 for beta chain variable domain of TCR clone 319350 (TRBV2, TRBJ2-7)
CASTYRTDEQYF

SEQ ID NO: 638701 - protein, 11 aa, Homo sapiens
  CDR3 for alpha chain variable domain of TCR clone 319351 (TRAV3, TRAJ21)
CAVGNFNKLYF

SEQ ID NO: 638702 - protein, 16 aa, Homo sapiens
  CDR3 for beta chain variable domain of TCR clone 319351 (TRBV19, TRBJ2-1)
CASSKAGPSSYHEQFF

SEQ ID NO: 638703 - protein, 15 aa, Homo sapiens
  CDR3 for alpha chain variable domain of TCR clone 319352 (TRAV3, TRAJ22)
CAVRDRGWSARQLTF

SEQ ID NO: 638704 - protein, 20 aa, Homo sapiens
  CDR3 for beta chain variable domain of TCR clone 319352 (TRBV11-2, TRBJ1-6)
CASSLVFATGGSVHPSTLGT

SEQ ID NO: 638705 - protein, 12 aa, Homo sapiens
  CDR3 for alpha chain variable domain of TCR clone 319353 (TRAV12-3, TRAJ17)
CAMTLTGNKLTF

SEQ ID NO: 638706 - protein, 15 aa, Homo sapiens
  CDR3 for beta chain variable domain of TCR clone 319353 (TRBV20-1, TRBJ2-7)
CIARDRVSGMEEQYF

SEQ ID NO: 638707 - protein, 17 aa, Homo sapiens
  CDR3 for alpha chain variable domain of TCR clone 319354 (TRAV2, TRAJ32)
CAVEDLNYGGATNKLIF

SEQ ID NO: 638708 - protein, 16 aa, Homo sapiens
  CDR3 for beta chain variable domain of TCR clone 319354 (TRBV4-3, TRBJ2-1)
CASSPALDRGVNEQFF

SEQ ID NO: 638709 - protein, 15 aa, Homo sapiens
  CDR3 for alpha chain variable domain of TCR clone 319355 (TRAV14/DV4, TRAJ10)
CAMRELTGGGNKLTF

SEQ ID NO: 638710 - protein, 18 aa, Homo sapiens
  CDR3 for beta chain variable domain of TCR clone 319355 (TRBV7-9, TRBJ2-7)
CASSLTTSGSRTWYEQHF

SEQ ID NO: 638711 - protein, 15 aa, Homo sapiens
  CDR3 for alpha chain variable domain of TCR clone 319356 (TRAV25, TRAJ23)
CALAPNYNQGGKLIF

SEQ ID NO: 638712 - protein, 13 aa, Homo sapiens
  CDR3 for beta chain variable domain of TCR clone 319356 (TRBV11-3, TRBJ1-1)
CSSSWDGNTEAFF

SEQ ID NO: 638713 - protein, 15 aa, Homo sapiens
  CDR3 for alpha chain variable domain of TCR clone 319357 (TRAV1-2, TRAJ18)
CAWEGRGSTLGGLYF

SEQ ID NO: 638714 - protein, 14 aa, Homo sapiens
  CDR3 for beta chain variable domain of TCR clone 319357 (TRBV4-3, TRBJ2-7)
CASSQDVAGGEQYF

SEQ ID NO: 638715 - protein, 18 aa, Homo sapiens
  CDR3 for alpha chain variable domain of TCR clone 319358 (TRAV21, TRAJ52)
CAVTPSPAGGTSYGKLTF

SEQ ID NO: 638716 - protein, 15 aa, Homo sapiens
  CDR3 for beta chain variable domain of TCR clone 319358 (TRBV19, TRBJ1-1)
CASTSGQIQNTEAFF

SEQ ID NO: 638717 - protein, 14 aa, Homo sapiens
  CDR3 for alpha chain variable domain of TCR clone 319359 (TRAV16, TRAJ33)
WALSAMDSNYQLIW

SEQ ID NO: 638718 - protein, 15 aa, Homo sapiens
  CDR3 for beta chain variable domain of TCR clone 319359 (TRBV19, TRBJ1-1)
GASTSGQIQNTEAFF

SEQ ID NO: 638719 - protein, 17 aa, Homo sapiens
  CDR3 for alpha chain variable domain of TCR clone 319360 (TRAV3, TRAJ6)
CAVRDGPRAGGSYIPTC

SEQ ID NO: 638720 - protein, 18 aa, Homo sapiens
  CDR3 for beta chain variable domain of TCR clone 319360 (TRBV7-3, TRBJ2-3)
CASSSTGTYPGSTDTQYF

SEQ ID NO: 638721 - protein, 14 aa, Homo sapiens
  CDR3 for alpha chain variable domain of TCR clone 319361 (TRAV3, TRAJ40)
CAVRDRRGTYKYIF

SEQ ID NO: 638722 - protein, 16 aa, Homo sapiens
  CDR3 for beta chain variable domain of TCR clone 319361 (TRBV15, TRBJ1-2)
CATSRGPRTGGGGYTF

SEQ ID NO: 638723 - protein, 15 aa, Homo sapiens
  CDR3 for alpha chain variable domain of TCR clone 319362 (TRAV3, TRAJ20)
CAVRDIKLSDYKLSF

SEQ ID NO: 638724 - protein, 13 aa, Homo sapiens
  CDR3 for beta chain variable domain of TCR clone 319362 (TRBV10-2, TRBJ2-7)
CASGASGGYEQYF

SEQ ID NO: 638725 - protein, 13 aa, Homo sapiens
  CDR3 for alpha chain variable domain of TCR clone 319363 (TRAV3, TRAJ16)
CAVRDRNGQKLLF

SEQ ID NO: 638726 - protein, 15 aa, Homo sapiens
  CDR3 for beta chain variable domain of TCR clone 319363 (TRBV5-1, TRBJ2-1)
CASSPPRAPDNEQFF

SEQ ID NO: 638727 - protein, 14 aa, Homo sapiens
  CDR3 for alpha chain variable domain of TCR clone 319364 (TRAV38-1, TRAJ45)
CACYSGGGADGLTF

SEQ ID NO: 638728 - protein, 20 aa, Homo sapiens
  CDR3 for beta chain variable domain of TCR clone 319364 (TRBV28, TRBJ2-1)
CASTPIGRSPGRAGGNEQFF

SEQ ID NO: 638729 - protein, 14 aa, Homo sapiens
  CDR3 for alpha chain variable domain of TCR clone 319365 (TRAV2, TRAJ9)
CAVEDRSGGFKTIF

SEQ ID NO: 638730 - protein, 15 aa, Homo sapiens
  CDR3 for beta chain variable domain of TCR clone 319365 (TRBV6-6, TRBJ2-7)
CASSYSYGGSYERYF

SEQ ID NO: 638731 - protein, 15 aa, Homo sapiens
  CDR3 for alpha chain variable domain of TCR clone 319366 (TRAV12-1, TRAJ36)
CVVNEHQTGANNPFF

SEQ ID NO: 638732 - protein, 14 aa, Homo sapiens
  CDR3 for beta chain variable domain of TCR clone 319366 (TRBV10-3, TRBJ2-5)
CAIRTSGGQETQYF

SEQ ID NO: 638733 - protein, 12 aa, Homo sapiens
  CDR3 for alpha chain variable domain of TCR clone 319367 (TRAV21, TRAJ31)
CAVWGNNARLMF

SEQ ID NO: 638734 - protein, 13 aa, Homo sapiens
  CDR3 for beta chain variable domain of TCR clone 319367 (TRBV20-1, TRBJ1-1)
CSARLGQGTEAFF

SEQ ID NO: 638735 - protein, 12 aa, Homo sapiens
  CDR3 for alpha chain variable domain of TCR clone 319368 (TRAV25, TRAJ31)
CAGHLNNARLMF

SEQ ID NO: 638736 - protein, 15 aa, Homo sapiens
  CDR3 for beta chain variable domain of TCR clone 319368 (TRBV7-9, TRBJ1-5)
CASSQGRQPNQPQHF

SEQ ID NO: 638737 - protein, 12 aa, Homo sapiens
  CDR3 for alpha chain variable domain of TCR clone 319369 (TRAV1-1, TRAJ33)
CAASDSNSQLIW

SEQ ID NO: 638738 - protein, 18 aa, Homo sapiens
  CDR3 for beta chain variable domain of TCR clone 319369 (TRBV20-1, TRBJ2-2)
CSARVQTARPSGTGELFF

SEQ ID NO: 638739 - protein, 15 aa, Homo sapiens
  CDR3 for alpha chain variable domain of TCR clone 319370 (TRAV20, TRAJ6)
CAVRLQSGGSYIPTI

SEQ ID NO: 638740 - protein, 14 aa, Homo sapiens
  CDR3 for beta chain variable domain of TCR clone 319370 (TRBV12-4, TRBJ2-7)
CASSASGGWYEQYF

SEQ ID NO: 638741 - protein, 14 aa, Homo sapiens
  CDR3 for alpha chain variable domain of TCR clone 319371 (TRAV16, TRAJ42)
CALLAGGSQGTLIF

SEQ ID NO: 638742 - protein, 15 aa, Homo sapiens
  CDR3 for beta chain variable domain of TCR clone 319371 (TRBV2, TRBJ2-7)
CASSEGLARSYEQYF

SEQ ID NO: 638743 - protein, 13 aa, Homo sapiens
  CDR3 for alpha chain variable domain of TCR clone 319372 (TRAV12-1, TRAJ26)
CVVRRNYGQNFVF

SEQ ID NO: 638744 - protein, 13 aa, Homo sapiens
  CDR3 for beta chain variable domain of TCR clone 319372 (TRBV7-6, TRBJ1-2)
CASSLVADYGYTF

SEQ ID NO: 638745 - protein, 13 aa, Homo sapiens
  CDR3 for alpha chain variable domain of TCR clone 319373 (TRAV8-4, TRAJ10)
CAAFTGGGSKLTF

SEQ ID NO: 638746 - protein, 15 aa, Homo sapiens
  CDR3 for beta chain variable domain of TCR clone 319373 (TRBV2, TRBJ2-3)
CASSDFEKATDTQYF

SEQ ID NO: 638747 - protein, 15 aa, Homo sapiens
  CDR3 for alpha chain variable domain of TCR clone 319374 (TRAV8-3, TRAJ45)
CASSYSGGGADGLTF

SEQ ID NO: 638748 - protein, 12 aa, Homo sapiens
  CDR3 for beta chain variable domain of TCR clone 319374 (TRBV18, TRBJ2-7)
CASSLDSYEQYF

SEQ ID NO: 638749 - protein, 15 aa, Homo sapiens
  CDR3 for alpha chain variable domain of TCR clone 319375 (TRAV26-1, TRAJ12)
IASSELMDSSYKLIF

SEQ ID NO: 638750 - protein, 11 aa, Homo sapiens
  CDR3 for beta chain variable domain of TCR clone 319375 (TRBV7-9, TRBJ2-3)
CASSPLDTQYF

SEQ ID NO: 638751 - protein, 14 aa, Homo sapiens
  CDR3 for alpha chain variable domain of TCR clone 319376 (TRAV8-2, TRAJ6)
CVVISAGGSYIPTF

SEQ ID NO: 638752 - protein, 16 aa, Homo sapiens
  CDR3 for beta chain variable domain of TCR clone 319376 (TRBV7-6, TRBJ2-6)
CASSLPGLSGANVLTS

SEQ ID NO: 638753 - protein, 12 aa, Homo sapiens
  CDR3 for alpha chain variable domain of TCR clone 319377 (TRAV26-1, TRAJ36)
CIVRVRADNLFF

SEQ ID NO: 638754 - protein, 16 aa, Homo sapiens
  CDR3 for beta chain variable domain of TCR clone 319377 (TRBV6-6, TRBJ2-3)
CASSYSHAGSTDTQYF

SEQ ID NO: 638755 - protein, 16 aa, Homo sapiens
  CDR3 for alpha chain variable domain of TCR clone 319378 (TRAV26-1, TRAJ32)
CIVRTNYGGATNMLIF

SEQ ID NO: 638756 - protein, 14 aa, Homo sapiens
  CDR3 for beta chain variable domain of TCR clone 319378 (TRBV27, TRBJ1-1)
CASSLLSGLSEAFF

SEQ ID NO: 638757 - protein, 14 aa, Homo sapiens
  CDR3 for alpha chain variable domain of TCR clone 319379 (TRAV8-3, TRAJ4)
CAVGAAGGYNKLIF

SEQ ID NO: 638758 - protein, 15 aa, Homo sapiens
  CDR3 for beta chain variable domain of TCR clone 319379 (TRBV5-7, TRBJ2-7)
CASSLPGQVFYEQYF

SEQ ID NO: 638759 - protein, 14 aa, Homo sapiens
  CDR3 for alpha chain variable domain of TCR clone 319380 (TRAV8-6, TRAJ53)
CAALVLGSNYKLTF

SEQ ID NO: 638760 - protein, 15 aa, Homo sapiens
  CDR3 for beta chain variable domain of TCR clone 319380 (TRBV20-1, TRBJ2-3)
CSAEPLAGHGDTQYI

SEQ ID NO: 638761 - protein, 18 aa, Homo sapiens
  CDR3 for alpha chain variable domain of TCR clone 319381 (TRAV3, TRAJ17)
CAVRARRGGRSCRQQANF

SEQ ID NO: 638762 - protein, 12 aa, Homo sapiens
  CDR3 for beta chain variable domain of TCR clone 319381 (TRBV7-9, TRBJ2-7)
CASSIKREEQYF

SEQ ID NO: 638763 - protein, 13 aa, Homo sapiens
  CDR3 for alpha chain variable domain of TCR clone 319382 (TRAV3, TRAJ41)
CAVSSNSGYALNF

SEQ ID NO: 638764 - protein, 14 aa, Homo sapiens
  CDR3 for beta chain variable domain of TCR clone 319382 (TRBV7-2, TRBJ2-7)
CASNPKTSFYEQYF

SEQ ID NO: 638765 - protein, 13 aa, Homo sapiens
  CDR3 for alpha chain variable domain of TCR clone 319383 (TRAV30, TRAJ34)
CGTVGYNTDKHIF

SEQ ID NO: 638766 - protein, 16 aa, Homo sapiens
  CDR3 for beta chain variable domain of TCR clone 319383 (TRBV7-9, TRBJ1-2)
CASSLGFSSGEDGYTF

SEQ ID NO: 638767 - protein, 14 aa, Homo sapiens
  CDR3 for alpha chain variable domain of TCR clone 319384 (TRAV12-3, TRAJ42)
SAMNYGGSQGNLIF

SEQ ID NO: 638768 - protein, 15 aa, Homo sapiens
  CDR3 for beta chain variable domain of TCR clone 319384 (TRBV5-7, TRBJ1-5)
CASSYGKLWDQPQHF

SEQ ID NO: 638769 - protein, 14 aa, Homo sapiens
  CDR3 for alpha chain variable domain of TCR clone 319385 (TRAV1-2, TRAJ8)
CAVREDTGFQKLVF

SEQ ID NO: 638770 - protein, 16 aa, Homo sapiens
  CDR3 for beta chain variable domain of TCR clone 319385 (TRBV5-7, TRBJ2-5)
CASTLAPAGGRGTQYF

SEQ ID NO: 638771 - protein, 11 aa, Homo sapiens
  CDR3 for alpha chain variable domain of TCR clone 319386 (TRAV12-3, TRAJ43)
CAMSVSNDMRF

SEQ ID NO: 638772 - protein, 13 aa, Homo sapiens
  CDR3 for beta chain variable domain of TCR clone 319386 (TRBV20-1, TRBJ1-1)
CRAPLGGGTEAFF

SEQ ID NO: 638773 - protein, 14 aa, Homo sapiens
  CDR3 for alpha chain variable domain of TCR clone 319387 (TRAV1-2, TRAJ16)
CAVNRFSDGQKLLF

SEQ ID NO: 638774 - protein, 14 aa, Homo sapiens
  CDR3 for beta chain variable domain of TCR clone 319387 (TRBV4-1, TRBJ2-7)
CASRSQGAAYEQYF

SEQ ID NO: 638775 - protein, 14 aa, Homo sapiens
  CDR3 for alpha chain variable domain of TCR clone 319388 (TRAV12-2, TRAJ52)
CAVPGGTSYGKLTF

SEQ ID NO: 638776 - protein, 17 aa, Homo sapiens
  CDR3 for beta chain variable domain of TCR clone 319388 (TRBV13, TRBJ2-3)
CASSLSRVAGGRNTQYF

SEQ ID NO: 638777 - protein, 18 aa, Homo sapiens
  CDR3 for alpha chain variable domain of TCR clone 319389 (TRAV26-1, TRAJ23)
CIVRVGLEVWNQGGKLIF

SEQ ID NO: 638778 - protein, 15 aa, Homo sapiens
  CDR3 for beta chain variable domain of TCR clone 319389 (TRBV29-1, TRBJ2-1)
CSVEAPRGSPNEQFF

SEQ ID NO: 638779 - protein, 14 aa, Homo sapiens
  CDR3 for alpha chain variable domain of TCR clone 319390 (TRAV2, TRAJ3)
CAVDRYSSASKIIF

SEQ ID NO: 638780 - protein, 16 aa, Homo sapiens
  CDR3 for beta chain variable domain of TCR clone 319390 (TRBV20-1, TRBJ1-5)
SAVLNYRDSKRISQHF

SEQ ID NO: 638781 - protein, 14 aa, Homo sapiens
  CDR3 for alpha chain variable domain of TCR clone 319391 (TRAV8-4, TRAJ15)
CAVTIREAGTALFF

SEQ ID NO: 638782 - protein, 16 aa, Homo sapiens
  CDR3 for beta chain variable domain of TCR clone 319391 (TRBV29-1, TRBJ2-6)
CSVEDITYSGANVLTF

SEQ ID NO: 638783 - protein, 15 aa, Homo sapiens
  CDR3 for alpha chain variable domain of TCR clone 319392 (TRAV26-1, TRAJ22)
CIVRVSFWFCKATDL

SEQ ID NO: 638784 - protein, 13 aa, Homo sapiens
  CDR3 for beta chain variable domain of TCR clone 319392 (TRBV7-9, TRBJ1-2)
CASSLKQNYGETF

SEQ ID NO: 638785 - protein, 17 aa, Homo sapiens
  CDR3 for alpha chain variable domain of TCR clone 319393 (TRAV3, TRAJ6)
CAVSDGPRAGGSYIPTF

SEQ ID NO: 638786 - protein, 13 aa, Homo sapiens
  CDR3 for beta chain variable domain of TCR clone 319393 (TRBV20-1, TRBJ1-1)
CSARGGGNTEAFF

SEQ ID NO: 638787 - protein, 14 aa, Homo sapiens
  CDR3 for alpha chain variable domain of TCR clone 319394 (TRAV8-2, TRAJ4)
CVVSPSGGYNKLSF

SEQ ID NO: 638788 - protein, 15 aa, Homo sapiens
  CDR3 for beta chain variable domain of TCR clone 319394 (TRBV4-1, TRBJ1-4)
CASSDKGGTNEKLFF

SEQ ID NO: 638789 - protein, 13 aa, Homo sapiens
  CDR3 for alpha chain variable domain of TCR clone 319395 (TRAV29/DV5, TRAJ31)
CAASRNNNARLMV

SEQ ID NO: 638790 - protein, 12 aa, Homo sapiens
  CDR3 for beta chain variable domain of TCR clone 319395 (TRBV11-2, TRBJ2-2)
CASSLGGGELFF

SEQ ID NO: 638791 - protein, 16 aa, Homo sapiens
  CDR3 for alpha chain variable domain of TCR clone 319396 (TRAV13-1, TRAJ45)
CAARGSRKGGADRLTF

SEQ ID NO: 638792 - protein, 13 aa, Homo sapiens
  CDR3 for beta chain variable domain of TCR clone 319396 (TRBV12-4, TRBJ2-5)
CASRKRGKETQYF

SEQ ID NO: 638793 - protein, 14 aa, Homo sapiens
  CDR3 for alpha chain variable domain of TCR clone 319397 (TRAV1-2, TRAJ16)
CAVNRFSDGQKLLF

SEQ ID NO: 638794 - protein, 15 aa, Homo sapiens
  CDR3 for beta chain variable domain of TCR clone 319397 (TRBV9, TRBJ1-6)
CASCVAGTGDSPLHF

SEQ ID NO: 638795 - protein, 15 aa, Homo sapiens
  CDR3 for alpha chain variable domain of TCR clone 319398 (TRAV21, TRAJ10)
CAVRGLTGGGNKLTF

SEQ ID NO: 638796 - protein, 14 aa, Homo sapiens
  CDR3 for beta chain variable domain of TCR clone 319398 (TRBV15, TRBJ2-7)
CATSRVARGYEQYF

SEQ ID NO: 638797 - protein, 19 aa, Homo sapiens
  CDR3 for alpha chain variable domain of TCR clone 319399 (TRAV1-2, TRAJ26)
CLLPLCCERPDNYGQNFVF

SEQ ID NO: 638798 - protein, 16 aa, Homo sapiens
  CDR3 for beta chain variable domain of TCR clone 319399 (TRBV19, TRBJ2-3)
CASSFYTTGIGDTQYF

SEQ ID NO: 638799 - protein, 17 aa, Homo sapiens
  CDR3 for alpha chain variable domain of TCR clone 319400 (TRAV3, TRAJ6)
FAVRDGPRAGGSYIPTF

SEQ ID NO: 638800 - protein, 14 aa, Homo sapiens
  CDR3 for beta chain variable domain of TCR clone 319400 (TRBV7-2, TRBJ2-7)
RASSPKTSFYEQYF

SEQ ID NO: 638801 - protein, 15 aa, Homo sapiens
  CDR3 for alpha chain variable domain of TCR clone 319401 (TRAV23/DV6, TRAJ18)
CAARYRGSTLGRLYF

SEQ ID NO: 638802 - protein, 13 aa, Homo sapiens
  CDR3 for beta chain variable domain of TCR clone 319401 (TRBV7-9, TRBJ2-3)
CASSPGSTDTQYF

SEQ ID NO: 638803 - protein, 13 aa, Homo sapiens
  CDR3 for alpha chain variable domain of TCR clone 319402 (TRAV20, TRAJ54)
CAVQAGEAQKLVF

SEQ ID NO: 638804 - protein, 14 aa, Homo sapiens
  CDR3 for beta chain variable domain of TCR clone 319402 (TRBV20-1, TRBJ2-7)
CSAKTGTGGYEQYF

SEQ ID NO: 638805 - protein, 17 aa, Homo sapiens
  CDR3 for alpha chain variable domain of TCR clone 319403 (TRAV3, TRAJ42)
CAVRDRDYGGSQGNPIF

SEQ ID NO: 638806 - protein, 12 aa, Homo sapiens
  CDR3 for beta chain variable domain of TCR clone 319403 (TRBV7-9, TRBJ2-3)
CASSFITDTQYF

SEQ ID NO: 638807 - protein, 15 aa, Homo sapiens
  CDR3 for alpha chain variable domain of TCR clone 319404 (TRAV3, TRAJ22)
CAVRDRGGSARQLTF

SEQ ID NO: 638808 - protein, 15 aa, Homo sapiens
  CDR3 for beta chain variable domain of TCR clone 319404 (TRBV28, TRBJ1-3)
CASSMGWASGNTIYF

SEQ ID NO: 638809 - protein, 16 aa, Homo sapiens
  CDR3 for alpha chain variable domain of TCR clone 319405 (TRAV9-2, TRAJ10)
CSLSEGGTGGGNKLTF

SEQ ID NO: 638810 - protein, 16 aa, Homo sapiens
  CDR3 for beta chain variable domain of TCR clone 319405 (TRBV7-2, TRBJ1-4)
CASSPVGRFDREKLFF

SEQ ID NO: 638811 - protein, 12 aa, Homo sapiens
  CDR3 for alpha chain variable domain of TCR clone 319406 (TRAV16, TRAJ9)
CALRAGGFKTIF

SEQ ID NO: 638812 - protein, 13 aa, Homo sapiens
  CDR3 for beta chain variable domain of TCR clone 319406 (TRBV4-3, TRBJ1-1)
CASSQVEGSRAFF

SEQ ID NO: 638813 - protein, 16 aa, Homo sapiens
  CDR3 for alpha chain variable domain of TCR clone 319407 (TRAV3, TRAJ37)
CAVRGKGSGNTGKLIF

SEQ ID NO: 638814 - protein, 15 aa, Homo sapiens
  CDR3 for beta chain variable domain of TCR clone 319407 (TRBV11-2, TRBJ2-1)
CASSLTSGGYNEQFF

SEQ ID NO: 638815 - protein, 14 aa, Homo sapiens
  CDR3 for alpha chain variable domain of TCR clone 319408 (TRAV16, TRAJ30)
CAPPSLNRDDKIIF

SEQ ID NO: 638816 - protein, 14 aa, Homo sapiens
  CDR3 for beta chain variable domain of TCR clone 319408 (TRBV7-2, TRBJ2-7)
CASRSQGAAYEQYF

SEQ ID NO: 638817 - protein, 12 aa, Homo sapiens
  CDR3 for alpha chain variable domain of TCR clone 319409 (TRAV1-1, TRAJ8)
RAGGTGFQKLVF

SEQ ID NO: 638818 - protein, 13 aa, Homo sapiens
  CDR3 for beta chain variable domain of TCR clone 319409 (TRBV7-9, TRBJ1-2)
CASSLKQNYGDTF

SEQ ID NO: 638819 - protein, 14 aa, Homo sapiens
  CDR3 for alpha chain variable domain of TCR clone 319410 (TRAV1-2, TRAJ8)
CALSEDTGFQKLVF

SEQ ID NO: 638820 - protein, 15 aa, Homo sapiens
  CDR3 for beta chain variable domain of TCR clone 319410 (TRBV11-3, TRBJ2-1)
CASSLGDSSHNEQFF

SEQ ID NO: 638821 - protein, 12 aa, Homo sapiens
  CDR3 for alpha chain variable domain of TCR clone 319411 (TRAV29/DV5, TRAJ53)
CAASGGNYKLTF

SEQ ID NO: 638822 - protein, 16 aa, Homo sapiens
  CDR3 for beta chain variable domain of TCR clone 319411 (TRBV11-2, TRBJ1-2)
CASSLDTGGADYGYTF

SEQ ID NO: 638823 - protein, 10 aa, Homo sapiens
  CDR3 for alpha chain variable domain of TCR clone 319412 (TRAV3, TRAJ30)
CAVREIEIIF

SEQ ID NO: 638824 - protein, 13 aa, Homo sapiens
  CDR3 for beta chain variable domain of TCR clone 319412 (TRBV12-4, TRBJ1-2)
CASSLRQGKGYTF

SEQ ID NO: 638825 - protein, 17 aa, Homo sapiens
  CDR3 for alpha chain variable domain of TCR clone 319413 (TRAV20, TRAJ57)
CAVQAIVAQGGSEKLVF

SEQ ID NO: 638826 - protein, 13 aa, Homo sapiens
  CDR3 for beta chain variable domain of TCR clone 319413 (TRBV20-1, TRBJ2-5)
CSALVGGGETQYF

SEQ ID NO: 638827 - protein, 14 aa, Homo sapiens
  CDR3 for alpha chain variable domain of TCR clone 319414 (TRAV12-2, TRAJ13)
CAVKETGGYQKVTF

SEQ ID NO: 638828 - protein, 15 aa, Homo sapiens
  CDR3 for beta chain variable domain of TCR clone 319414 (TRBV5-1, TRBJ2-3)
CASSVTSGSTDTQYF

SEQ ID NO: 638829 - protein, 15 aa, Homo sapiens
  CDR3 for alpha chain variable domain of TCR clone 319415 (TRAV3, TRAJ3)
CAVRDRRSSASKIIF

SEQ ID NO: 638830 - protein, 13 aa, Homo sapiens
  CDR3 for beta chain variable domain of TCR clone 319415 (TRBV29-1, TRBJ1-1)
CSVGDSRNTEAFF

SEQ ID NO: 638831 - protein, 11 aa, Homo sapiens
  CDR3 for alpha chain variable domain of TCR clone 319416 (TRAV13-1, TRAJ23)
STYNQGGKLIF

SEQ ID NO: 638832 - protein, 14 aa, Homo sapiens
  CDR3 for beta chain variable domain of TCR clone 319416 (TRBV7-6, TRBJ2-7)
CASSFRQGADEQYF

SEQ ID NO: 638833 - protein, 13 aa, Homo sapiens
  CDR3 for alpha chain variable domain of TCR clone 319417 (TRAV27, TRAJ17)
CAGAAPAGHKLTF

SEQ ID NO: 638834 - protein, 15 aa, Homo sapiens
  CDR3 for beta chain variable domain of TCR clone 319417 (TRBV5-1, TRBJ2-3)
CASRNQAGSTETQYF

SEQ ID NO: 638835 - protein, 14 aa, Homo sapiens
  CDR3 for alpha chain variable domain of TCR clone 319418 (TRAV25, TRAJ45)
CAGNSGGGADGLTF

SEQ ID NO: 638836 - protein, 15 aa, Homo sapiens
  CDR3 for beta chain variable domain of TCR clone 319418 (TRBV20-1, TRBJ2-7)
CSARDRVSGMDEQYF

SEQ ID NO: 638837 - protein, 11 aa, Homo sapiens
  CDR3 for alpha chain variable domain of TCR clone 319419 (TRAV21, TRAJ11)
CAVNGYSTLTF

SEQ ID NO: 638838 - protein, 17 aa, Homo sapiens
  CDR3 for beta chain variable domain of TCR clone 319419 (TRBV13, TRBJ2-3)
CANSLSRVAGGRNTQYF

SEQ ID NO: 638839 - protein, 13 aa, Homo sapiens
  CDR3 for alpha chain variable domain of TCR clone 319420 (TRAV12-3, TRAJ13)
CAMCSGGYQKVTF

SEQ ID NO: 638840 - protein, 14 aa, Homo sapiens
  CDR3 for beta chain variable domain of TCR clone 319420 (TRBV2, TRBJ2-1)
CASRTGSSYNEQFF

SEQ ID NO: 638841 - protein, 14 aa, Homo sapiens
  CDR3 for alpha chain variable domain of TCR clone 319421 (TRAV26-1, TRAJ8)
CIVRVDTGFQKLVF

SEQ ID NO: 638842 - protein, 16 aa, Homo sapiens
  CDR3 for beta chain variable domain of TCR clone 319421 (TRBV13, TRBJ2-2)
CASSPRTGEHTGELFF

SEQ ID NO: 638843 - protein, 13 aa, Homo sapiens
  CDR3 for alpha chain variable domain of TCR clone 319422 (TRAV36/DV7, TRAJ33)
CAVDMDSNDQLIW

SEQ ID NO: 638844 - protein, 16 aa, Homo sapiens
  CDR3 for beta chain variable domain of TCR clone 319422 (TRBV15, TRBJ2-3)
CATRLSGGRAPDTQYF

SEQ ID NO: 638845 - protein, 15 aa, Homo sapiens
  CDR3 for alpha chain variable domain of TCR clone 319423 (TRAV27, TRAJ38)
CAARRNAGNNRKLIW

SEQ ID NO: 638846 - protein, 12 aa, Homo sapiens
  CDR3 for beta chain variable domain of TCR clone 319423 (TRBV20-1, TRBJ2-7)
CSAGLKMGEQYF

SEQ ID NO: 638847 - protein, 14 aa, Homo sapiens
  CDR3 for alpha chain variable domain of TCR clone 319424 (TRAV23/DV6, TRAJ11)
CAASLESGYSTLTV

SEQ ID NO: 638848 - protein, 13 aa, Homo sapiens
  CDR3 for beta chain variable domain of TCR clone 319424 (TRBV4-1, TRBJ2-5)
CASSLTRGETQYF

SEQ ID NO: 638849 - protein, 14 aa, Homo sapiens
  CDR3 for alpha chain variable domain of TCR clone 319425 (TRAV4, TRAJ26)
CLVGPHNYGQNVVF

SEQ ID NO: 638850 - protein, 17 aa, Homo sapiens
  CDR3 for beta chain variable domain of TCR clone 319425 (TRBV24-1, TRBJ2-1)
CATSDVSTSGTYNEQFF

SEQ ID NO: 638851 - protein, 15 aa, Homo sapiens
  CDR3 for alpha chain variable domain of TCR clone 319426 (TRAV3, TRAJ5)
CAVRDVDTGRRALTF

SEQ ID NO: 638852 - protein, 13 aa, Homo sapiens
  CDR3 for beta chain variable domain of TCR clone 319426 (TRBV12-4, TRBJ2-7)
CASSPTDTYEQYF

SEQ ID NO: 638853 - protein, 12 aa, Homo sapiens
  CDR3 for alpha chain variable domain of TCR clone 319427 (TRAV8-4, TRAJ31)
CSVSDSNARLMF

SEQ ID NO: 638854 - protein, 16 aa, Homo sapiens
  CDR3 for beta chain variable domain of TCR clone 319427 (TRBV20-1, TRBJ1-2)
CSASMGQGVANYGYTF

SEQ ID NO: 638855 - protein, 16 aa, Homo sapiens
  CDR3 for alpha chain variable domain of TCR clone 319428 (TRAV1-2, TRAJ10)
CAVRGELTGGGNKLTF

SEQ ID NO: 638856 - protein, 15 aa, Homo sapiens
  CDR3 for beta chain variable domain of TCR clone 319428 (TRBV27, TRBJ2-7)
CASSPIVTGAYEQYF

SEQ ID NO: 638857 - protein, 16 aa, Homo sapiens
  CDR3 for alpha chain variable domain of TCR clone 319429 (TRAV12-2, TRAJ28)
CSVITDSGAGSYQLTF

SEQ ID NO: 638858 - protein, 14 aa, Homo sapiens
  CDR3 for beta chain variable domain of TCR clone 319429 (TRBV25-1, TRBJ1-1)
CASTHLGGNTEAFF

SEQ ID NO: 638859 - protein, 12 aa, Homo sapiens
  CDR3 for alpha chain variable domain of TCR clone 319430 (TRAV13-2, TRAJ23)
CAERHRGGKLIF

SEQ ID NO: 638860 - protein, 16 aa, Homo sapiens
  CDR3 for beta chain variable domain of TCR clone 319430 (TRBV4-2, TRBJ1-1)
CASRPLDGGGDTEAFF

SEQ ID NO: 638861 - protein, 13 aa, Homo sapiens
  CDR3 for alpha chain variable domain of TCR clone 319431 (TRAV8-3, TRAJ28)
CAVGAVGSYQLTF

SEQ ID NO: 638862 - protein, 14 aa, Homo sapiens
  CDR3 for beta chain variable domain of TCR clone 319431 (TRBV7-2, TRBJ2-7)
CASRSQGAAYEQSF

SEQ ID NO: 638863 - protein, 14 aa, Homo sapiens
  CDR3 for alpha chain variable domain of TCR clone 319432 (TRAV12-2, TRAJ17)
CAVLFKAAGNKLTF

SEQ ID NO: 638864 - protein, 15 aa, Homo sapiens
  CDR3 for beta chain variable domain of TCR clone 319432 (TRBV20-1, TRBJ2-7)
CSASDRVSGMDEQYF

SEQ ID NO: 638865 - protein, 15 aa, Homo sapiens
  CDR3 for alpha chain variable domain of TCR clone 319433 (TRAV10, TRAJ39)
CVVSARNNAGNMLTF

SEQ ID NO: 638866 - protein, 11 aa, Homo sapiens
  CDR3 for beta chain variable domain of TCR clone 319433 (TRBV12-4, TRBJ2-3)
CASTATDTQYF

SEQ ID NO: 638867 - protein, 18 aa, Homo sapiens
  CDR3 for alpha chain variable domain of TCR clone 319434 (TRAV12-3, TRAJ52)
CAMSVGGAGGTRYGKLTF

SEQ ID NO: 638868 - protein, 17 aa, Homo sapiens
  CDR3 for beta chain variable domain of TCR clone 319434 (TRBV13, TRBJ2-3)
CASSLSRVAGGRNTQYF

SEQ ID NO: 638869 - protein, 15 aa, Homo sapiens
  CDR3 for alpha chain variable domain of TCR clone 319435 (TRAV12-1, TRAJ45)
CVVLSGGGGADGLTF

SEQ ID NO: 638870 - protein, 14 aa, Homo sapiens
  CDR3 for beta chain variable domain of TCR clone 319435 (TRBV25-1, TRBJ1-1)
CASTHLRGNTEAFF

SEQ ID NO: 638871 - protein, 16 aa, Homo sapiens
  CDR3 for alpha chain variable domain of TCR clone 319436 (TRAV30, TRAJ24)
CGTEIVDADSWGKLQF

SEQ ID NO: 638872 - protein, 18 aa, Homo sapiens
  CDR3 for beta chain variable domain of TCR clone 319436 (TRBV20-1, TRBJ2-6)
CSAETTPTHGSGANVLTF

SEQ ID NO: 638873 - protein, 13 aa, Homo sapiens
  CDR3 for alpha chain variable domain of TCR clone 319437 (TRAV17, TRAJ9)
CATDFTGGFKTIF

SEQ ID NO: 638874 - protein, 15 aa, Homo sapiens
  CDR3 for beta chain variable domain of TCR clone 319437 (TRBV9, TRBJ1-6)
CASSVAGTGDSPLHF

SEQ ID NO: 638875 - protein, 15 aa, Homo sapiens
  CDR3 for alpha chain variable domain of TCR clone 319438 (TRAV13-1, TRAJ17)
CAASIERAAGNKLTF

SEQ ID NO: 638876 - protein, 13 aa, Homo sapiens
  CDR3 for beta chain variable domain of TCR clone 319438 (TRBV7-7, TRBJ2-3)
RASSLSRADTQYF

SEQ ID NO: 638877 - protein, 13 aa, Homo sapiens
  CDR3 for alpha chain variable domain of TCR clone 319439 (TRAV21, TRAJ27)
CAQWGGNAGRTTF

SEQ ID NO: 638878 - protein, 14 aa, Homo sapiens
  CDR3 for beta chain variable domain of TCR clone 319439 (TRBV2, TRBJ2-3)
CAVGGTISTDTQYF

SEQ ID NO: 638879 - protein, 14 aa, Homo sapiens
  CDR3 for alpha chain variable domain of TCR clone 319440 (TRAV16, TRAJ31)
CALSGRNNNARLLF

SEQ ID NO: 638880 - protein, 12 aa, Homo sapiens
  CDR3 for beta chain variable domain of TCR clone 319440 (TRBV11-2, TRBJ1-2)
CASSREGDGYTF

SEQ ID NO: 638881 - protein, 13 aa, Homo sapiens
  CDR3 for alpha chain variable domain of TCR clone 319441 (TRAV26-2, TRAJ43)
CILRAVNNNDMRF

SEQ ID NO: 638882 - protein, 15 aa, Homo sapiens
  CDR3 for beta chain variable domain of TCR clone 319441 (TRBV7-2, TRBJ2-1)
CASTHGSGIYNEQFF

SEQ ID NO: 638883 - protein, 15 aa, Homo sapiens
  CDR3 for alpha chain variable domain of TCR clone 319442 (TRAV12-2, TRAJ43)
CAFDMRFGAGTRLTV

SEQ ID NO: 638884 - protein, 12 aa, Homo sapiens
  CDR3 for beta chain variable domain of TCR clone 319442 (TRBV7-2, TRBJ1-6)
CASSLSSSPLHF

SEQ ID NO: 638885 - protein, 13 aa, Homo sapiens
  CDR3 for alpha chain variable domain of TCR clone 319443 (TRAV19, TRAJ26)
CALTFDYGQNFVF

SEQ ID NO: 638886 - protein, 15 aa, Homo sapiens
  CDR3 for beta chain variable domain of TCR clone 319443 (TRBV2, TRBJ2-1)
CASSELAGSYNEQFF

SEQ ID NO: 638887 - protein, 15 aa, Homo sapiens
  CDR3 for alpha chain variable domain of TCR clone 319444 (TRAV8-3, TRAJ40)
GAAPSLGSGTYRYIF

SEQ ID NO: 638888 - protein, 12 aa, Homo sapiens
  CDR3 for beta chain variable domain of TCR clone 319444 (TRBV11-2, TRBJ2-2)
CASSLGGGELFF

SEQ ID NO: 638889 - protein, 15 aa, Homo sapiens
  CDR3 for alpha chain variable domain of TCR clone 319445 (TRAV21, TRAJ52)
CAVRGGGTSYGKLTF

SEQ ID NO: 638890 - protein, 15 aa, Homo sapiens
  CDR3 for beta chain variable domain of TCR clone 319445 (TRBV18, TRBJ1-5)
CSSSPSDRSNQPQHF

SEQ ID NO: 638891 - protein, 10 aa, Homo sapiens
  CDR3 for alpha chain variable domain of TCR clone 319446 (TRAV23/DV6, TRAJ43)
CAATVAALVQ

SEQ ID NO: 638892 - protein, 15 aa, Homo sapiens
  CDR3 for beta chain variable domain of TCR clone 319446 (TRBV20-1, TRBJ1-1)
CSASRGVTGNTEAFF

SEQ ID NO: 638893 - protein, 16 aa, Homo sapiens
  CDR3 for alpha chain variable domain of TCR clone 319447 (TRAV23/DV6, TRAJ9)
CAASIGGNTGGFKTIF

SEQ ID NO: 638894 - protein, 11 aa, Homo sapiens
  CDR3 for beta chain variable domain of TCR clone 319447 (TRBV10-3, TRBJ2-7)
CAIREVDEQYF

SEQ ID NO: 638895 - protein, 12 aa, Homo sapiens
  CDR3 for alpha chain variable domain of TCR clone 319448 (TRAV16, TRAJ10)
CSRTGGGNKLTF

SEQ ID NO: 638896 - protein, 11 aa, Homo sapiens
  CDR3 for beta chain variable domain of TCR clone 319448 (TRBV7-9, TRBJ2-3)
CASSPTDTQYF

SEQ ID NO: 638897 - protein, 15 aa, Homo sapiens
  CDR3 for alpha chain variable domain of TCR clone 319449 (TRAV26-1, TRAJ29)
FTVRVEGSGNTPLVF

SEQ ID NO: 638898 - protein, 15 aa, Homo sapiens
  CDR3 for beta chain variable domain of TCR clone 319449 (TRBV7-9, TRBJ1-5)
CASSQGHQPNQPQHF

SEQ ID NO: 638899 - protein, 14 aa, Homo sapiens
  CDR3 for alpha chain variable domain of TCR clone 319450 (TRAV3, TRAJ34)
CTVRAPGNTDKLIF

SEQ ID NO: 638900 - protein, 15 aa, Homo sapiens
  CDR3 for beta chain variable domain of TCR clone 319450 (TRBV5-1, TRBJ2-5)
CASSSGREMVETQYF

SEQ ID NO: 638901 - protein, 11 aa, Homo sapiens
  CDR3 for alpha chain variable domain of TCR clone 319451 (TRAV12-1, TRAJ8)
CVVTGVQKLVF

SEQ ID NO: 638902 - protein, 14 aa, Homo sapiens
  CDR3 for beta chain variable domain of TCR clone 319451 (TRBV19, TRBJ2-1)
CASGKSTQYNEQFF

SEQ ID NO: 638903 - protein, 15 aa, Homo sapiens
  CDR3 for alpha chain variable domain of TCR clone 319452 (TRAV27, TRAJ24)
CAGDMTTDSWGKFQF

SEQ ID NO: 638904 - protein, 14 aa, Homo sapiens
  CDR3 for beta chain variable domain of TCR clone 319452 (TRBV7-9, TRBJ1-2)
CASSLDLKAYGYTF

SEQ ID NO: 638905 - protein, 16 aa, Homo sapiens
  CDR3 for alpha chain variable domain of TCR clone 319453 (TRAV26-1, TRAJ33)
CIVPFWGEDSNYQLIW

SEQ ID NO: 638906 - protein, 15 aa, Homo sapiens
  CDR3 for beta chain variable domain of TCR clone 319453 (TRBV28, TRBJ2-5)
CASSPPWSYQETQYF

SEQ ID NO: 638907 - protein, 14 aa, Homo sapiens
  CDR3 for alpha chain variable domain of TCR clone 319454 (TRAV1-2, TRAJ8)
CAVSEDTGFQKLVF

SEQ ID NO: 638908 - protein, 12 aa, Homo sapiens
  CDR3 for beta chain variable domain of TCR clone 319454 (TRBV11-2, TRBJ2-2)
CASSLGGGELFF

SEQ ID NO: 638909 - protein, 14 aa, Homo sapiens
  CDR3 for alpha chain variable domain of TCR clone 319455 (TRAV4, TRAJ17)
CLVGDPLVGNKLTF

SEQ ID NO: 638910 - protein, 14 aa, Homo sapiens
  CDR3 for beta chain variable domain of TCR clone 319455 (TRBV28, TRBJ1-2)
CASRIQGANYGYTF

SEQ ID NO: 638911 - protein, 17 aa, Homo sapiens
  CDR3 for alpha chain variable domain of TCR clone 319456 (TRAV3, TRAJ42)
CAVRDRDYGGSQGNLIF

SEQ ID NO: 638912 - protein, 14 aa, Homo sapiens
  CDR3 for beta chain variable domain of TCR clone 319456 (TRBV15, TRBJ2-3)
CATARDGGGDTQYF

SEQ ID NO: 638913 - protein, 11 aa, Homo sapiens
  CDR3 for alpha chain variable domain of TCR clone 319457 (TRAV21, TRAJ9)
CAVPRGFKTIF

SEQ ID NO: 638914 - protein, 17 aa, Homo sapiens
  CDR3 for beta chain variable domain of TCR clone 319457 (TRBV7-9, TRBJ2-5)
CATSGGARDPVLRARHA

SEQ ID NO: 638915 - protein, 14 aa, Homo sapiens
  CDR3 for alpha chain variable domain of TCR clone 319458 (TRAV12-1, TRAJ17)
CVVNYKAAGNKLTF

SEQ ID NO: 638916 - protein, 18 aa, Homo sapiens
  CDR3 for beta chain variable domain of TCR clone 319458 (TRBV4-2, TRBJ2-6)
CASSQLQGVLTGANVLTF

SEQ ID NO: 638917 - protein, 14 aa, Homo sapiens
  CDR3 for alpha chain variable domain of TCR clone 319459 (TRAV17, TRAJ37)
CATVPSSNTGKLIF

SEQ ID NO: 638918 - protein, 14 aa, Homo sapiens
  CDR3 for beta chain variable domain of TCR clone 319459 (TRBV19, TRBJ2-1)
CASPTFVLSGEQFF

SEQ ID NO: 638919 - protein, 14 aa, Homo sapiens
  CDR3 for alpha chain variable domain of TCR clone 319460 (TRAV13-1, TRAJ40)
CAASRTSGTYKYIF

SEQ ID NO: 638920 - protein, 15 aa, Homo sapiens
  CDR3 for beta chain variable domain of TCR clone 319460 (TRBV7-3, TRBJ2-1)
CASSPTGGGEVEQFF

SEQ ID NO: 638921 - protein, 16 aa, Homo sapiens
  CDR3 for alpha chain variable domain of TCR clone 319461 (TRAV36/DV7, TRAJ33)
WRPGNKVQDSNYQLIW

SEQ ID NO: 638922 - protein, 15 aa, Homo sapiens
  CDR3 for beta chain variable domain of TCR clone 319461 (TRBV29-1, TRBJ2-1)
CSVGRHALLYNEQFF

SEQ ID NO: 638923 - protein, 14 aa, Homo sapiens
  CDR3 for alpha chain variable domain of TCR clone 319462 (TRAV12-3, TRAJ9)
CAMSPNTGGFKTIF

SEQ ID NO: 638924 - protein, 13 aa, Homo sapiens
  CDR3 for beta chain variable domain of TCR clone 319462 (TRBV7-2, TRBJ2-2)
CASSLAVTGELFF

SEQ ID NO: 638925 - protein, 17 aa, Homo sapiens
  CDR3 for alpha chain variable domain of TCR clone 319463 (TRAV3, TRAJ6)
CAVRDGPRAGGSYIPTF

SEQ ID NO: 638926 - protein, 15 aa, Homo sapiens
  CDR3 for beta chain variable domain of TCR clone 319463 (TRBV20-1, TRBJ2-3)
CSASPPQVSTDTQYF

SEQ ID NO: 638927 - protein, 12 aa, Homo sapiens
  CDR3 for alpha chain variable domain of TCR clone 319464 (TRAV21, TRAJ33)
CAKIDSNYQLIW

SEQ ID NO: 638928 - protein, 15 aa, Homo sapiens
  CDR3 for beta chain variable domain of TCR clone 319464 (TRBV7-2, TRBJ1-2)
CASSPRAGWNYGYTF

SEQ ID NO: 638929 - protein, 15 aa, Homo sapiens
  CDR3 for alpha chain variable domain of TCR clone 319465 (TRAV8-4, TRAJ6)
CAASAPSGGSYLPTF

SEQ ID NO: 638930 - protein, 15 aa, Homo sapiens
  CDR3 for beta chain variable domain of TCR clone 319465 (TRBV7-3, TRBJ2-2)
CASKANGANTGELFF

SEQ ID NO: 638931 - protein, 16 aa, Homo sapiens
  CDR3 for alpha chain variable domain of TCR clone 319466 (TRAV21, TRAJ37)
CAVRTVGSSNTGKLIF

SEQ ID NO: 638932 - protein, 13 aa, Homo sapiens
  CDR3 for beta chain variable domain of TCR clone 319466 (TRBV7-9, TRBJ2-5)
CASLPSGRETQYF

SEQ ID NO: 638933 - protein, 13 aa, Homo sapiens
  CDR3 for alpha chain variable domain of TCR clone 319467 (TRAV3, TRAJ20)
CAVRPLNDYKLRF

SEQ ID NO: 638934 - protein, 12 aa, Homo sapiens
  CDR3 for beta chain variable domain of TCR clone 319467 (TRBV6-1, TRBJ2-1)
CATYGLNNEQFF

SEQ ID NO: 638935 - protein, 14 aa, Homo sapiens
  CDR3 for alpha chain variable domain of TCR clone 319468 (TRAV12-2, TRAJ41)
CAVNRANYGYALNF

SEQ ID NO: 638936 - protein, 13 aa, Homo sapiens
  CDR3 for beta chain variable domain of TCR clone 319468 (TRBV7-9, TRBJ1-2)
CASSLKQNYGYAF

SEQ ID NO: 638937 - protein, 16 aa, Homo sapiens
  CDR3 for alpha chain variable domain of TCR clone 319469 (TRAV16, TRAJ4)
CALSRMFSGGYNKLIF

SEQ ID NO: 638938 - protein, 15 aa, Homo sapiens
  CDR3 for beta chain variable domain of TCR clone 319469 (TRBV7-2, TRBJ2-3)
CASSLNLRDTDTQYF

SEQ ID NO: 638939 - protein, 15 aa, Homo sapiens
  CDR3 for alpha chain variable domain of TCR clone 319470 (TRAV3, TRAJ47)
CAVRDIGEYGNKLVF

SEQ ID NO: 638940 - protein, 14 aa, Homo sapiens
  CDR3 for beta chain variable domain of TCR clone 319470 (TRBV13, TRBJ2-5)
CARSLERVGETQYF

SEQ ID NO: 638941 - protein, 14 aa, Homo sapiens
  CDR3 for alpha chain variable domain of TCR clone 319471 (TRAV17, TRAJ45)
CATASGGGADGLTF

SEQ ID NO: 638942 - protein, 15 aa, Homo sapiens
  CDR3 for beta chain variable domain of TCR clone 319471 (TRBV20-1, TRBJ2-7)
CSARDRVSGMDEQYF

SEQ ID NO: 638943 - protein, 15 aa, Homo sapiens
  CDR3 for alpha chain variable domain of TCR clone 319472 (TRAV21, TRAJ37)
CAVRTAGSQHRQTNL

SEQ ID NO: 638944 - protein, 13 aa, Homo sapiens
  CDR3 for beta chain variable domain of TCR clone 319472 (TRBV7-9, TRBJ2-5)
CASLPSGRETQYF

SEQ ID NO: 638945 - protein, 15 aa, Homo sapiens
  CDR3 for alpha chain variable domain of TCR clone 319473 (TRAV8-3, TRAJ20)
CAVEAKGSNDYKRSF

SEQ ID NO: 638946 - protein, 12 aa, Homo sapiens
  CDR3 for beta chain variable domain of TCR clone 319473 (TRBV7-2, TRBJ1-2)
CASRDSIYGYTF

SEQ ID NO: 638947 - protein, 15 aa, Homo sapiens
  CDR3 for alpha chain variable domain of TCR clone 319474 (TRAV13-1, TRAJ10)
CAATILTGGGAKLTF

SEQ ID NO: 638948 - protein, 15 aa, Homo sapiens
  CDR3 for beta chain variable domain of TCR clone 319474 (TRBV2, TRBJ2-7)
CASTLLGSGATEQYF

SEQ ID NO: 638949 - protein, 11 aa, Homo sapiens
  CDR3 for alpha chain variable domain of TCR clone 319475 (TRAV3, TRAJ21)
CAVGNLNKFYF

SEQ ID NO: 638950 - protein, 16 aa, Homo sapiens
  CDR3 for beta chain variable domain of TCR clone 319475 (TRBV19, TRBJ2-1)
CASSKAGPSSYNEQFF

SEQ ID NO: 638951 - protein, 15 aa, Homo sapiens
  CDR3 for alpha chain variable domain of TCR clone 319476 (TRAV3, TRAJ20)
CAVRDIKLSDYKLSF

SEQ ID NO: 638952 - protein, 14 aa, Homo sapiens
  CDR3 for beta chain variable domain of TCR clone 319476 (TRBV18, TRBJ2-3)
CASSGLADTDTQYF

SEQ ID NO: 638953 - protein, 13 aa, Homo sapiens
  CDR3 for alpha chain variable domain of TCR clone 319477 (TRAV3, TRAJ20)
CAVRDTPRYKLSF

SEQ ID NO: 638954 - protein, 20 aa, Homo sapiens
  CDR3 for beta chain variable domain of TCR clone 319477 (TRBV7-8, TRBJ2-2)
CASSHLFPGPTIHITGELFF

SEQ ID NO: 638955 - protein, 11 aa, Homo sapiens
  CDR3 for alpha chain variable domain of TCR clone 319478 (TRAV21, TRAJ34)
CAVTNTDKLIF

SEQ ID NO: 638956 - protein, 15 aa, Homo sapiens
  CDR3 for beta chain variable domain of TCR clone 319478 (TRBV6-1, TRBJ2-1)
CASSELRGQYNEQFF

SEQ ID NO: 638957 - protein, 13 aa, Homo sapiens
  CDR3 for alpha chain variable domain of TCR clone 319479 (TRAV12-1, TRAJ7)
CVVNMRGNNRLAF

SEQ ID NO: 638958 - protein, 13 aa, Homo sapiens
  CDR3 for beta chain variable domain of TCR clone 319479 (TRBV12-4, TRBJ1-2)
CASSSGLTVISTF

SEQ ID NO: 638959 - protein, 11 aa, Homo sapiens
  CDR3 for alpha chain variable domain of TCR clone 319480 (TRAV21, TRAJ56)
SATGANSKLTF

SEQ ID NO: 638960 - protein, 16 aa, Homo sapiens
  CDR3 for beta chain variable domain of TCR clone 319480 (TRBV12-5, TRBJ2-5)
CASGPRTSGNQETQYF

SEQ ID NO: 638961 - protein, 15 aa, Homo sapiens
  CDR3 for alpha chain variable domain of TCR clone 319481 (TRAV12-1, TRAJ44)
CVVFVNTGTASKLPF

SEQ ID NO: 638962 - protein, 17 aa, Homo sapiens
  CDR3 for beta chain variable domain of TCR clone 319481 (TRBV7-8, TRBJ2-6)
CASSAGTGGAGANVLTL

SEQ ID NO: 638963 - protein, 11 aa, Homo sapiens
  CDR3 for alpha chain variable domain of TCR clone 319482 (TRAV3, TRAJ21)
FAVGNFNKFYF

SEQ ID NO: 638964 - protein, 13 aa, Homo sapiens
  CDR3 for beta chain variable domain of TCR clone 319482 (TRBV7-9, TRBJ1-2)
CASSLKQNYGYIF

SEQ ID NO: 638965 - protein, 15 aa, Homo sapiens
  CDR3 for alpha chain variable domain of TCR clone 319483 (TRAV17, TRAJ22)
CATAPISGSARQLTF

SEQ ID NO: 638966 - protein, 14 aa, Homo sapiens
  CDR3 for beta chain variable domain of TCR clone 319483 (TRBV9, TRBJ2-1)
CASSVDLRGKEQFF

SEQ ID NO: 638967 - protein, 12 aa, Homo sapiens
  CDR3 for alpha chain variable domain of TCR clone 319484 (TRAV12-2, TRAJ42)
CAVGGSQGNLIF

SEQ ID NO: 638968 - protein, 16 aa, Homo sapiens
  CDR3 for beta chain variable domain of TCR clone 319484 (TRBV7-3, TRBJ2-2)
CVSSLKRGTLSGELFF

SEQ ID NO: 638969 - protein, 15 aa, Homo sapiens
  CDR3 for alpha chain variable domain of TCR clone 319485 (TRAV8-3, TRAJ45)
CASSYSGGGADGLTF

SEQ ID NO: 638970 - protein, 18 aa, Homo sapiens
  CDR3 for beta chain variable domain of TCR clone 319485 (TRBV18, TRBJ1-3)
CDSSPRGGAGPSGNTIYF

SEQ ID NO: 638971 - protein, 16 aa, Homo sapiens
  CDR3 for alpha chain variable domain of TCR clone 319486 (TRAV30, TRAJ24)
CGTEIVDADSWGKFQF

SEQ ID NO: 638972 - protein, 16 aa, Homo sapiens
  CDR3 for beta chain variable domain of TCR clone 319486 (TRBV4-2, TRBJ2-6)
CASSQARSSGANVLTF

SEQ ID NO: 638973 - protein, 19 aa, Homo sapiens
  CDR3 for alpha chain variable domain of TCR clone 319487 (TRAV26-1, TRAJ28)
CIVRVAHAYSGAGSYQLTF

SEQ ID NO: 638974 - protein, 17 aa, Homo sapiens
  CDR3 for beta chain variable domain of TCR clone 319487 (TRBV9, TRBJ2-2)
CASSVGGQGTDTGELFL

SEQ ID NO: 638975 - protein, 11 aa, Homo sapiens
  CDR3 for alpha chain variable domain of TCR clone 319488 (TRAV3, TRAJ13)
CAVTSYQKVTF

SEQ ID NO: 638976 - protein, 15 aa, Homo sapiens
  CDR3 for beta chain variable domain of TCR clone 319488 (TRBV7-3, TRBJ2-1)
CASSPRDRGSNEQFF

SEQ ID NO: 638977 - protein, 15 aa, Homo sapiens
  CDR3 for alpha chain variable domain of TCR clone 319489 (TRAV12-3, TRAJ6)
CAMSAASGGSYIPTF

SEQ ID NO: 638978 - protein, 11 aa, Homo sapiens
  CDR3 for beta chain variable domain of TCR clone 319489 (TRBV6-1, TRBJ2-1)
CASISSNEQFF

SEQ ID NO: 638979 - protein, 13 aa, Homo sapiens
  CDR3 for alpha chain variable domain of TCR clone 319490 (TRAV3, TRAJ41)
CAVSSNSGNALNF

SEQ ID NO: 638980 - protein, 14 aa, Homo sapiens
  CDR3 for beta chain variable domain of TCR clone 319490 (TRBV7-2, TRBJ2-7)
CASSPKTSFYEQYF

SEQ ID NO: 638981 - protein, 12 aa, Homo sapiens
  CDR3 for alpha chain variable domain of TCR clone 319491 (TRAV27, TRAJ11)
CGGASGYSTLTF

SEQ ID NO: 638982 - protein, 14 aa, Homo sapiens
  CDR3 for beta chain variable domain of TCR clone 319491 (TRBV12-5, TRBJ1-3)
CASGPAGSGNTIYF

SEQ ID NO: 638983 - protein, 13 aa, Homo sapiens
  CDR3 for alpha chain variable domain of TCR clone 319492 (TRAV23/DV6, TRAJ22)
CAPYSGSARQLTF

SEQ ID NO: 638984 - protein, 14 aa, Homo sapiens
  CDR3 for beta chain variable domain of TCR clone 319492 (TRBV7-8, TRBJ2-3)
CASSLEAGTDTQYF

SEQ ID NO: 638985 - protein, 12 aa, Homo sapiens
  CDR3 for alpha chain variable domain of TCR clone 319493 (TRAV26-1, TRAJ43)
RIVRTRGDDMRF

SEQ ID NO: 638986 - protein, 16 aa, Homo sapiens
  CDR3 for beta chain variable domain of TCR clone 319493 (TRBV3-1, TRBJ2-1)
CASSQGGRRSFDEQFF

SEQ ID NO: 638987 - protein, 12 aa, Homo sapiens
  CDR3 for alpha chain variable domain of TCR clone 319494 (TRAV38-1, TRAJ36)
CAFETGANNLFF

SEQ ID NO: 638988 - protein, 16 aa, Homo sapiens
  CDR3 for beta chain variable domain of TCR clone 319494 (TRBV6-5, TRBJ2-1)
CASSETLAGHYNEQFF

SEQ ID NO: 638989 - protein, 15 aa, Homo sapiens
  CDR3 for alpha chain variable domain of TCR clone 319495 (TRAV4, TRAJ39)
CLVGPNNNAGNMLTF

SEQ ID NO: 638990 - protein, 15 aa, Homo sapiens
  CDR3 for beta chain variable domain of TCR clone 319495 (TRBV19, TRBJ1-6)
CASSTQGAVGSTLHF

SEQ ID NO: 638991 - protein, 14 aa, Homo sapiens
  CDR3 for alpha chain variable domain of TCR clone 319496 (TRAV1-2, TRAJ16)
CAVNRFSDGQKLLF

SEQ ID NO: 638992 - protein, 12 aa, Homo sapiens
  CDR3 for beta chain variable domain of TCR clone 319496 (TRBV7-8, TRBJ1-1)
CASGTATTEAFF

SEQ ID NO: 638993 - protein, 13 aa, Homo sapiens
  CDR3 for alpha chain variable domain of TCR clone 319497 (TRAV16, TRAJ22)
SAMLAGSARPLTF

SEQ ID NO: 638994 - protein, 18 aa, Homo sapiens
  CDR3 for beta chain variable domain of TCR clone 319497 (TRBV7-2, TRBJ2-3)
CASSLETSRGRKADTQYF

SEQ ID NO: 638995 - protein, 14 aa, Homo sapiens
  CDR3 for alpha chain variable domain of TCR clone 319498 (TRAV1-2, TRAJ15)
CAVRDRQAGTALIF

SEQ ID NO: 638996 - protein, 14 aa, Homo sapiens
  CDR3 for beta chain variable domain of TCR clone 319498 (TRBV7-8, TRBJ1-5)
CASSTGTVGGPQHF

SEQ ID NO: 638997 - protein, 15 aa, Homo sapiens
  CDR3 for alpha chain variable domain of TCR clone 319499 (TRAV26-1, TRAJ40)
FIDRYATSGTYKYIF

SEQ ID NO: 638998 - protein, 11 aa, Homo sapiens
  CDR3 for beta chain variable domain of TCR clone 319499 (TRBV7-9, TRBJ2-1)
CASSSQNEQFF

SEQ ID NO: 638999 - protein, 15 aa, Homo sapiens
  CDR3 for alpha chain variable domain of TCR clone 319500 (TRAV3, TRAJ3)
CAVRDMSSSASKIIF

SEQ ID NO: 639000 - protein, 14 aa, Homo sapiens
  CDR3 for beta chain variable domain of TCR clone 319500 (TRBV27, TRBJ1-4)
CASSLDGGWEKLFF

SEQ ID NO: 639001 - protein, 14 aa, Homo sapiens
  CDR3 for alpha chain variable domain of TCR clone 319501 (TRAV16, TRAJ15)
CALSDPQAGTALIF

SEQ ID NO: 639002 - protein, 12 aa, Homo sapiens
  CDR3 for beta chain variable domain of TCR clone 319501 (TRBV18, TRBJ2-5)
CASPPSKETQYF

SEQ ID NO: 639003 - protein, 12 aa, Homo sapiens
  CDR3 for alpha chain variable domain of TCR clone 319502 (TRAV17, TRAJ20)
CSTQSNDYKLSF

SEQ ID NO: 639004 - protein, 13 aa, Homo sapiens
  CDR3 for beta chain variable domain of TCR clone 319502 (TRBV10-3, TRBJ1-1)
CAIIPEGGTEAFF

SEQ ID NO: 639005 - protein, 13 aa, Homo sapiens
  CDR3 for alpha chain variable domain of TCR clone 319503 (TRAV8-6, TRAJ8)
CAVSNTGFQKLVF

SEQ ID NO: 639006 - protein, 15 aa, Homo sapiens
  CDR3 for beta chain variable domain of TCR clone 319503 (TRBV28, TRBJ2-5)
CASSSGRTIQETLYF

SEQ ID NO: 639007 - protein, 17 aa, Homo sapiens
  CDR3 for alpha chain variable domain of TCR clone 319504 (TRAV12-2, TRAJ22)
CAVNRIPFSGSARQLTF

SEQ ID NO: 639008 - protein, 13 aa, Homo sapiens
  CDR3 for beta chain variable domain of TCR clone 319504 (TRBV12-4, TRBJ1-5)
CASSPDRAQPQHF

SEQ ID NO: 639009 - protein, 14 aa, Homo sapiens
  CDR3 for alpha chain variable domain of TCR clone 319505 (TRAV12-2, TRAJ13)
CAVKKTGGYQKVTF

SEQ ID NO: 639010 - protein, 13 aa, Homo sapiens
  CDR3 for beta chain variable domain of TCR clone 319505 (TRBV15, TRBJ2-7)
CATSTTGHYEQFF

SEQ ID NO: 639011 - protein, 16 aa, Homo sapiens
  CDR3 for alpha chain variable domain of TCR clone 319506 (TRAV27, TRAJ13)
CAGAKSDSGGYQKVTF

SEQ ID NO: 639012 - protein, 13 aa, Homo sapiens
  CDR3 for beta chain variable domain of TCR clone 319506 (TRBV20-1, TRBJ1-1)
CSARGGGNTEAFF

SEQ ID NO: 639013 - protein, 11 aa, Homo sapiens
  CDR3 for alpha chain variable domain of TCR clone 319507 (TRAV23/DV6, TRAJ48)
CAPRWGEKLTF

SEQ ID NO: 639014 - protein, 13 aa, Homo sapiens
  CDR3 for beta chain variable domain of TCR clone 319507 (TRBV12-4, TRBJ2-5)
CGSSPGTEETQYF

SEQ ID NO: 639015 - protein, 12 aa, Homo sapiens
  CDR3 for alpha chain variable domain of TCR clone 319508 (TRAV27, TRAJ35)
CAGADFGNVLHC

SEQ ID NO: 639016 - protein, 16 aa, Homo sapiens
  CDR3 for beta chain variable domain of TCR clone 319508 (TRBV6-1, TRBJ2-1)
CASILGQGSSYNEQFF

SEQ ID NO: 639017 - protein, 14 aa, Homo sapiens
  CDR3 for alpha chain variable domain of TCR clone 319509 (TRAV13-1, TRAJ20)
CAVRPGSNDYKLSF

SEQ ID NO: 639018 - protein, 13 aa, Homo sapiens
  CDR3 for beta chain variable domain of TCR clone 319509 (TRBV20-1, TRBJ1-1)
CSAPPGGHTEAFF

SEQ ID NO: 639019 - protein, 14 aa, Homo sapiens
  CDR3 for alpha chain variable domain of TCR clone 319510 (TRAV6, TRAJ17)
CALDIEAAGNQLTF

SEQ ID NO: 639020 - protein, 17 aa, Homo sapiens
  CDR3 for beta chain variable domain of TCR clone 319510 (TRBV2, TRBJ1-5)
CASSVGTGMRGYQPQHF

SEQ ID NO: 639021 - protein, 14 aa, Homo sapiens
  CDR3 for alpha chain variable domain of TCR clone 319511 (TRAV13-1, TRAJ44)
CAASSGGTDSKLTF

SEQ ID NO: 639022 - protein, 15 aa, Homo sapiens
  CDR3 for beta chain variable domain of TCR clone 319511 (TRBV20-1, TRBJ2-7)
CSARDRVSGMDEQYF

SEQ ID NO: 639023 - protein, 20 aa, Homo sapiens
  CDR3 for alpha chain variable domain of TCR clone 319512 (TRAV1-2, TRAJ8)
CAVREDTGFQTCIWNWHPTS

SEQ ID NO: 639024 - protein, 12 aa, Homo sapiens
  CDR3 for beta chain variable domain of TCR clone 319512 (TRBV27, TRBJ2-2)
CASKLFTGELFF

SEQ ID NO: 639025 - protein, 13 aa, Homo sapiens
  CDR3 for alpha chain variable domain of TCR clone 319513 (TRAV27, TRAJ49)
CAPRPYTGNQFYF

SEQ ID NO: 639026 - protein, 16 aa, Homo sapiens
  CDR3 for beta chain variable domain of TCR clone 319513 (TRBV6-1, TRBJ2-5)
CASSETLDRGAETQYF

SEQ ID NO: 639027 - protein, 19 aa, Homo sapiens
  CDR3 for alpha chain variable domain of TCR clone 319514 (TRAV26-1, TRAJ52)
CSVRAHRNAGGTSYGKLTF

SEQ ID NO: 639028 - protein, 13 aa, Homo sapiens
  CDR3 for beta chain variable domain of TCR clone 319514 (TRBV20-1, TRBJ1-6)
CSAPLGVGSPLHF

SEQ ID NO: 639029 - protein, 11 aa, Homo sapiens
  CDR3 for alpha chain variable domain of TCR clone 319515 (TRAV2, TRAJ33)
CAVESNYQLIW

SEQ ID NO: 639030 - protein, 15 aa, Homo sapiens
  CDR3 for beta chain variable domain of TCR clone 319515 (TRBV7-2, TRBJ1-2)
CASSLAPDRGLGYTF

SEQ ID NO: 639031 - protein, 14 aa, Homo sapiens
  CDR3 for alpha chain variable domain of TCR clone 319516 (TRAV23/DV6, TRAJ40)
CAASLTSGTYKYVF

SEQ ID NO: 639032 - protein, 14 aa, Homo sapiens
  CDR3 for beta chain variable domain of TCR clone 319516 (TRBV5-1, TRBJ2-3)
CASSRGQGGGTQYF

SEQ ID NO: 639033 - protein, 17 aa, Homo sapiens
  CDR3 for alpha chain variable domain of TCR clone 319517 (TRAV27, TRAJ52)
CAGAGWAGGTSYGKLTF

SEQ ID NO: 639034 - protein, 16 aa, Homo sapiens
  CDR3 for beta chain variable domain of TCR clone 319517 (TRBV19, TRBJ2-1)
CASSKAGPSSYNEQSF

SEQ ID NO: 639035 - protein, 16 aa, Homo sapiens
  CDR3 for alpha chain variable domain of TCR clone 319518 (TRAV4, TRAJ22)
CLVGDLYSGSARQLTF

SEQ ID NO: 639036 - protein, 13 aa, Homo sapiens
  CDR3 for beta chain variable domain of TCR clone 319518 (TRBV11-2, TRBJ2-2)
CASGRDREEELFF

SEQ ID NO: 639037 - protein, 13 aa, Homo sapiens
  CDR3 for alpha chain variable domain of TCR clone 319519 (TRAV13-1, TRAJ6)
CAARSGGSYIPTF

SEQ ID NO: 639038 - protein, 13 aa, Homo sapiens
  CDR3 for beta chain variable domain of TCR clone 319519 (TRBV7-8, TRBJ2-7)
CASSLTGGREQYF

SEQ ID NO: 639039 - protein, 14 aa, Homo sapiens
  CDR3 for alpha chain variable domain of TCR clone 319520 (TRAV38-1, TRAJ40)
CALRPTSGTYKYIF

SEQ ID NO: 639040 - protein, 14 aa, Homo sapiens
  CDR3 for beta chain variable domain of TCR clone 319520 (TRBV25-1, TRBJ1-1)
CASTHLGGNTESFS

SEQ ID NO: 639041 - protein, 14 aa, Homo sapiens
  CDR3 for alpha chain variable domain of TCR clone 319521 (TRAV29/DV5, TRAJ44)
CAAFLVGTASKLTF

SEQ ID NO: 639042 - protein, 15 aa, Homo sapiens
  CDR3 for beta chain variable domain of TCR clone 319521 (TRBV7-3, TRBJ2-2)
CASSETGQGTGELVF

SEQ ID NO: 639043 - protein, 14 aa, Homo sapiens
  CDR3 for alpha chain variable domain of TCR clone 319522 (TRAV26-1, TRAJ38)
CIADNAGNNRQLIW

SEQ ID NO: 639044 - protein, 12 aa, Homo sapiens
  CDR3 for beta chain variable domain of TCR clone 319522 (TRBV5-1, TRBJ2-7)
CASSFRGYEQYF

SEQ ID NO: 639045 - protein, 11 aa, Homo sapiens
  CDR3 for alpha chain variable domain of TCR clone 319523 (TRAV12-1, TRAJ8)
CVVTGFQKLEF

SEQ ID NO: 639046 - protein, 12 aa, Homo sapiens
  CDR3 for beta chain variable domain of TCR clone 319523 (TRBV10-3, TRBJ2-1)
CAIHTGHNEQFF

SEQ ID NO: 639047 - protein, 22 aa, Homo sapiens
  CDR3 for alpha chain variable domain of TCR clone 319524 (TRAV8-3, TRAJ23)
CAVIFITREESLSSDRERSYLR

SEQ ID NO: 639048 - protein, 15 aa, Homo sapiens
  CDR3 for beta chain variable domain of TCR clone 319524 (TRBV18, TRBJ2-1)
CASSPPSASYNEQFF

SEQ ID NO: 639049 - protein, 13 aa, Homo sapiens
  CDR3 for alpha chain variable domain of TCR clone 319525 (TRAV20, TRAJ37)
CAGCSSNTGKLIF

SEQ ID NO: 639050 - protein, 13 aa, Homo sapiens
  CDR3 for beta chain variable domain of TCR clone 319525 (TRBV20-1, TRBJ1-1)
CSARVGGNTEALF

SEQ ID NO: 639051 - protein, 13 aa, Homo sapiens
  CDR3 for alpha chain variable domain of TCR clone 319526 (TRAV2, TRAJ21)
CAVEDLNFNKFYF

SEQ ID NO: 639052 - protein, 15 aa, Homo sapiens
  CDR3 for beta chain variable domain of TCR clone 319526 (TRBV28, TRBJ2-5)
CASSPGQGNIETQYF

SEQ ID NO: 639053 - protein, 15 aa, Homo sapiens
  CDR3 for alpha chain variable domain of TCR clone 319527 (TRAV2, TRAJ24)
CAVEVLTDSWGKFQF

SEQ ID NO: 639054 - protein, 13 aa, Homo sapiens
  CDR3 for beta chain variable domain of TCR clone 319527 (TRBV28, TRBJ2-5)
CASSFAGGETQYF

SEQ ID NO: 639055 - protein, 11 aa, Homo sapiens
  CDR3 for alpha chain variable domain of TCR clone 319528 (TRAV2, TRAJ13)
CASGGYHKVTF

SEQ ID NO: 639056 - protein, 15 aa, Homo sapiens
  CDR3 for beta chain variable domain of TCR clone 319528 (TRBV11-1, TRBJ2-7)
CASSLNYGASYEQYF

SEQ ID NO: 639057 - protein, 14 aa, Homo sapiens
  CDR3 for alpha chain variable domain of TCR clone 319529 (TRAV17, TRAJ40)
SATALTSGTYKYIF

SEQ ID NO: 639058 - protein, 13 aa, Homo sapiens
  CDR3 for beta chain variable domain of TCR clone 319529 (TRBV27, TRBJ2-1)
CASSSGSYNEQFF

SEQ ID NO: 639059 - protein, 13 aa, Homo sapiens
  CDR3 for alpha chain variable domain of TCR clone 319530 (TRAV12-2, TRAJ34)
CAVRGYNTDKLIF

SEQ ID NO: 639060 - protein, 15 aa, Homo sapiens
  CDR3 for beta chain variable domain of TCR clone 319530 (TRBV28, TRBJ2-1)
GASRTGAGVIARQFF

SEQ ID NO: 639061 - protein, 13 aa, Homo sapiens
  CDR3 for alpha chain variable domain of TCR clone 319531 (TRAV2, TRAJ40)
CAVVTSGTYKYIF

SEQ ID NO: 639062 - protein, 14 aa, Homo sapiens
  CDR3 for beta chain variable domain of TCR clone 319531 (TRBV28, TRBJ2-1)
CDSSYYTAYNEQFF

SEQ ID NO: 639063 - protein, 15 aa, Homo sapiens
  CDR3 for alpha chain variable domain of TCR clone 319532 (TRAV8-6, TRAJ11)
CAVSDRRSGYSTLPF

SEQ ID NO: 639064 - protein, 15 aa, Homo sapiens
  CDR3 for beta chain variable domain of TCR clone 319532 (TRBV7-3, TRBJ2-1)
CASSPTGGSRNEQFF

SEQ ID NO: 639065 - protein, 14 aa, Homo sapiens
  CDR3 for alpha chain variable domain of TCR clone 319533 (TRAV1-2, TRAJ16)
CAVNRFSDGQKLLF

SEQ ID NO: 639066 - protein, 15 aa, Homo sapiens
  CDR3 for beta chain variable domain of TCR clone 319533 (TRBV7-9, TRBJ1-4)
CASSARTGGNDKLFF

SEQ ID NO: 639067 - protein, 12 aa, Homo sapiens
  CDR3 for alpha chain variable domain of TCR clone 319534 (TRAV12-2, TRAJ20)
CAVNRNDYKLSF

SEQ ID NO: 639068 - protein, 16 aa, Homo sapiens
  CDR3 for beta chain variable domain of TCR clone 319534 (TRBV7-3, TRBJ1-2)
CACSLGAPVPNYGYTF

SEQ ID NO: 639069 - protein, 17 aa, Homo sapiens
  CDR3 for alpha chain variable domain of TCR clone 319535 (TRAV12-2, TRAJ52)
CAVNKGAGGTSYGKLTF

SEQ ID NO: 639070 - protein, 14 aa, Homo sapiens
  CDR3 for beta chain variable domain of TCR clone 319535 (TRBV4-3, TRBJ2-2)
CASSPGGVNGELFF

SEQ ID NO: 639071 - protein, 14 aa, Homo sapiens
  CDR3 for alpha chain variable domain of TCR clone 319536 (TRAV21, TRAJ11)
CAVRRNSGNSTLTF

SEQ ID NO: 639072 - protein, 11 aa, Homo sapiens
  CDR3 for beta chain variable domain of TCR clone 319536 (TRBV11-2, TRBJ1-1)
CASSINTEAFF

SEQ ID NO: 639073 - protein, 13 aa, Homo sapiens
  CDR3 for alpha chain variable domain of TCR clone 319537 (TRAV21, TRAJ20)
CAVGLMVDYKLSF

SEQ ID NO: 639074 - protein, 12 aa, Homo sapiens
  CDR3 for beta chain variable domain of TCR clone 319537 (TRBV11-2, TRBJ2-2)
CASSLPTGELFF

SEQ ID NO: 639075 - protein, 11 aa, Homo sapiens
  CDR3 for alpha chain variable domain of TCR clone 319538 (TRAV23/DV6, TRAJ47)
CAASIRNGIWK

SEQ ID NO: 639076 - protein, 15 aa, Homo sapiens
  CDR3 for beta chain variable domain of TCR clone 319538 (TRBV5-1, TRBJ2-3)
CASSVTSGSTDTQYF

SEQ ID NO: 639077 - protein, 15 aa, Homo sapiens
  CDR3 for alpha chain variable domain of TCR clone 319539 (TRAV38-2/DV8, TRAJ47)
CAYRSAKGYGNKLVF

SEQ ID NO: 639078 - protein, 17 aa, Homo sapiens
  CDR3 for beta chain variable domain of TCR clone 319539 (TRBV7-3, TRBJ2-2)
CASSLSGTSGGTGELFF

SEQ ID NO: 639079 - protein, 14 aa, Homo sapiens
  CDR3 for alpha chain variable domain of TCR clone 319540 (TRAV13-1, TRAJ9)
CAASALTGGFKTIF

SEQ ID NO: 639080 - protein, 18 aa, Homo sapiens
  CDR3 for beta chain variable domain of TCR clone 319540 (TRBV20-1, TRBJ2-3)
CSASGLAGGPGTTDTQYF

SEQ ID NO: 639081 - protein, 13 aa, Homo sapiens
  CDR3 for alpha chain variable domain of TCR clone 319541 (TRAV3, TRAJ43)
CAVKARNNNDMRF

SEQ ID NO: 639082 - protein, 16 aa, Homo sapiens
  CDR3 for beta chain variable domain of TCR clone 319541 (TRBV7-9, TRBJ2-3)
CASSFSVAVGIDTQYF

SEQ ID NO: 639083 - protein, 12 aa, Homo sapiens
  CDR3 for alpha chain variable domain of TCR clone 319542 (TRAV21, TRAJ13)
PGPSGGYPKVTF

SEQ ID NO: 639084 - protein, 15 aa, Homo sapiens
  CDR3 for beta chain variable domain of TCR clone 319542 (TRBV7-9, TRBJ1-6)
CASSSPGRGNSPLHF

SEQ ID NO: 639085 - protein, 14 aa, Homo sapiens
  CDR3 for alpha chain variable domain of TCR clone 319543 (TRAV3, TRAJ21)
CAVESQANFNKFYF

SEQ ID NO: 639086 - protein, 18 aa, Homo sapiens
  CDR3 for beta chain variable domain of TCR clone 319543 (TRBV7-9, TRBJ2-1)
CASSLAVSGTSGSNEQFF

SEQ ID NO: 639087 - protein, 16 aa, Homo sapiens
  CDR3 for alpha chain variable domain of TCR clone 319544 (TRAV3, TRAJ10)
CSVRDMRAGGGNKLTF

SEQ ID NO: 639088 - protein, 15 aa, Homo sapiens
  CDR3 for beta chain variable domain of TCR clone 319544 (TRBV11-2, TRBJ1-6)
CASTGFGTAVSPLHV

SEQ ID NO: 639089 - protein, 13 aa, Homo sapiens
  CDR3 for alpha chain variable domain of TCR clone 319545 (TRAV27, TRAJ29)
CAGAHSGNTPLVF

SEQ ID NO: 639090 - protein, 15 aa, Homo sapiens
  CDR3 for beta chain variable domain of TCR clone 319545 (TRBV7-2, TRBJ1-5)
CASSSGQGHAQPQHF

SEQ ID NO: 639091 - protein, 15 aa, Homo sapiens
  CDR3 for alpha chain variable domain of TCR clone 319546 (TRAV17, TRAJ22)
CATVAPSGSARKLTF

SEQ ID NO: 639092 - protein, 16 aa, Homo sapiens
  CDR3 for beta chain variable domain of TCR clone 319546 (TRBV10-3, TRBJ2-7)
CAISADFADRPYEQYF

SEQ ID NO: 639093 - protein, 13 aa, Homo sapiens
  CDR3 for alpha chain variable domain of TCR clone 319547 (TRAV36/DV7, TRAJ33)
CAVDMDSNYQLIW

SEQ ID NO: 639094 - protein, 16 aa, Homo sapiens
  CDR3 for beta chain variable domain of TCR clone 319547 (TRBV15, TRBJ2-3)
CANRLSGRRAPDTQYF

SEQ ID NO: 639095 - protein, 14 aa, Homo sapiens
  CDR3 for alpha chain variable domain of TCR clone 319548 (TRAV23/DV6, TRAJ57)
CAASNQGGTEKLVF

SEQ ID NO: 639096 - protein, 13 aa, Homo sapiens
  CDR3 for beta chain variable domain of TCR clone 319548 (TRBV11-2, TRBJ2-7)
CASGSYPSYEQYF

SEQ ID NO: 639097 - protein, 15 aa, Homo sapiens
  CDR3 for alpha chain variable domain of TCR clone 319549 (TRAV21, TRAJ32)
CAVNSYGGATNKLIF

SEQ ID NO: 639098 - protein, 18 aa, Homo sapiens
  CDR3 for beta chain variable domain of TCR clone 319549 (TRBV7-9, TRBJ2-1)
WASSTGLAEGSSYNEQFF

SEQ ID NO: 639099 - protein, 10 aa, Homo sapiens
  CDR3 for alpha chain variable domain of TCR clone 319550 (TRAV30, TRAJ48)
CGIGNEKLTF

SEQ ID NO: 639100 - protein, 15 aa, Homo sapiens
  CDR3 for beta chain variable domain of TCR clone 319550 (TRBV6-1, TRBJ2-5)
CASSEGWGIQETQYF

SEQ ID NO: 639101 - protein, 13 aa, Homo sapiens
  CDR3 for alpha chain variable domain of TCR clone 319551 (TRAV12-2, TRAJ39)
CAVNNNAGNMLTF

SEQ ID NO: 639102 - protein, 14 aa, Homo sapiens
  CDR3 for beta chain variable domain of TCR clone 319551 (TRBV20-1, TRBJ1-1)
CSARDRRTNTEAFF

SEQ ID NO: 639103 - protein, 10 aa, Homo sapiens
  CDR3 for alpha chain variable domain of TCR clone 319552 (TRAV25, TRAJ43)
CRPNNNDMRF

SEQ ID NO: 639104 - protein, 16 aa, Homo sapiens
  CDR3 for beta chain variable domain of TCR clone 319552 (TRBV7-2, TRBJ1-4)
CASSLAPGRRDEKLFF

SEQ ID NO: 639105 - protein, 14 aa, Homo sapiens
  CDR3 for alpha chain variable domain of TCR clone 319553 (TRAV1-2, TRAJ16)
CAVNRFSDGKKLLF

SEQ ID NO: 639106 - protein, 14 aa, Homo sapiens
  CDR3 for beta chain variable domain of TCR clone 319553 (TRBV19, TRBJ2-7)
CASSMGQGAIEQYF

SEQ ID NO: 639107 - protein, 16 aa, Homo sapiens
  CDR3 for alpha chain variable domain of TCR clone 319554 (TRAV12-3, TRAJ50)
CAMRDPMKTSYDKVIF

SEQ ID NO: 639108 - protein, 13 aa, Homo sapiens
  CDR3 for beta chain variable domain of TCR clone 319554 (TRBV4-1, TRBJ2-3)
CASRLDFTDTQYF

SEQ ID NO: 639109 - protein, 10 aa, Homo sapiens
  CDR3 for alpha chain variable domain of TCR clone 319555 (TRAV36/DV7, TRAJ48)
CAVGNEKLTF

SEQ ID NO: 639110 - protein, 16 aa, Homo sapiens
  CDR3 for beta chain variable domain of TCR clone 319555 (TRBV15, TRBJ2-3)
CATSLSGGRAPDKQYF

SEQ ID NO: 639111 - protein, 11 aa, Homo sapiens
  CDR3 for alpha chain variable domain of TCR clone 319556 (TRAV12-3, TRAJ41)
CALNAREALNF

SEQ ID NO: 639112 - protein, 16 aa, Homo sapiens
  CDR3 for beta chain variable domain of TCR clone 319556 (TRBV7-8, TRBJ2-3)
CASSTEGQRETDTQYF

SEQ ID NO: 639113 - protein, 14 aa, Homo sapiens
  CDR3 for alpha chain variable domain of TCR clone 319557 (TRAV2, TRAJ9)
CAVEDRSGGFNTIF

SEQ ID NO: 639114 - protein, 15 aa, Homo sapiens
  CDR3 for beta chain variable domain of TCR clone 319557 (TRBV4-1, TRBJ2-5)
CASSQWDLYQETQYF

SEQ ID NO: 639115 - protein, 13 aa, Homo sapiens
  CDR3 for alpha chain variable domain of TCR clone 319558 (TRAV13-1, TRAJ48)
CAAASFGNEKLTF

SEQ ID NO: 639116 - protein, 14 aa, Homo sapiens
  CDR3 for beta chain variable domain of TCR clone 319558 (TRBV18, TRBJ2-1)
CASSPGTSETEEFF

SEQ ID NO: 639117 - protein, 14 aa, Homo sapiens
  CDR3 for alpha chain variable domain of TCR clone 319559 (TRAV8-4, TRAJ15)
CAVTIREAGTALIF

SEQ ID NO: 639118 - protein, 16 aa, Homo sapiens
  CDR3 for beta chain variable domain of TCR clone 319559 (TRBV29-1, TRBJ2-6)
SAALKTSPTGANVLTF

SEQ ID NO: 639119 - protein, 15 aa, Homo sapiens
  CDR3 for alpha chain variable domain of TCR clone 319560 (TRAV13-1, TRAJ57)
QVPPLSQGGSEKLAF

SEQ ID NO: 639120 - protein, 17 aa, Homo sapiens
  CDR3 for beta chain variable domain of TCR clone 319560 (TRBV20-1, TRBJ2-1)
CSASSSGLAGSYNEQFF

SEQ ID NO: 639121 - protein, 19 aa, Homo sapiens
  CDR3 for alpha chain variable domain of TCR clone 319561 (TRAV1-2, TRAJ26)
CLLPLCCERPDKYGQNFVF

SEQ ID NO: 639122 - protein, 13 aa, Homo sapiens
  CDR3 for beta chain variable domain of TCR clone 319561 (TRBV7-2, TRBJ2-5)
CASSYWTGETQYF

SEQ ID NO: 639123 - protein, 12 aa, Homo sapiens
  CDR3 for alpha chain variable domain of TCR clone 319562 (TRAV12-2, TRAJ8)
CAVNTGFQKLVF

SEQ ID NO: 639124 - protein, 13 aa, Homo sapiens
  CDR3 for beta chain variable domain of TCR clone 319562 (TRBV19, TRBJ1-2)
CASSVPGQDGYTF

SEQ ID NO: 639125 - protein, 15 aa, Homo sapiens
  CDR3 for alpha chain variable domain of TCR clone 319563 (TRAV17, TRAJ52)
CATEAGGTSYGKLTF

SEQ ID NO: 639126 - protein, 17 aa, Homo sapiens
  CDR3 for beta chain variable domain of TCR clone 319563 (TRBV7-8, TRBJ2-6)
CASSAGTGGAGANVLTF

SEQ ID NO: 639127 - protein, 13 aa, Homo sapiens
  CDR3 for alpha chain variable domain of TCR clone 319564 (TRAV13-1, TRAJ11)
CAASIRGYSTLTF

SEQ ID NO: 639128 - protein, 14 aa, Homo sapiens
  CDR3 for beta chain variable domain of TCR clone 319564 (TRBV4-2, TRBJ2-1)
CASGLDRAYNEQCF

SEQ ID NO: 639129 - protein, 13 aa, Homo sapiens
  CDR3 for alpha chain variable domain of TCR clone 319565 (TRAV17, TRAJ9)
CATDYPGGFKTIF

SEQ ID NO: 639130 - protein, 14 aa, Homo sapiens
  CDR3 for beta chain variable domain of TCR clone 319565 (TRBV19, TRBJ2-5)
CASSMTGQQETHYF

SEQ ID NO: 639131 - protein, 14 aa, Homo sapiens
  CDR3 for alpha chain variable domain of TCR clone 319566 (TRAV17, TRAJ49)
CATNARDTGNQFYF

SEQ ID NO: 639132 - protein, 14 aa, Homo sapiens
  CDR3 for beta chain variable domain of TCR clone 319566 (TRBV5-5, TRBJ1-2)
CASSFGQINYGYTF

SEQ ID NO: 639133 - protein, 16 aa, Homo sapiens
  CDR3 for alpha chain variable domain of TCR clone 319567 (TRAV17, TRAJ28)
CATASVSGAGGYQLTF

SEQ ID NO: 639134 - protein, 11 aa, Homo sapiens
  CDR3 for beta chain variable domain of TCR clone 319567 (TRBV7-9, TRBJ2-5)
CAISLGETQYF

SEQ ID NO: 639135 - protein, 12 aa, Homo sapiens
  CDR3 for alpha chain variable domain of TCR clone 319568 (TRAV1-1, TRAJ30)
CAVRGGDDKIIF

SEQ ID NO: 639136 - protein, 14 aa, Homo sapiens
  CDR3 for beta chain variable domain of TCR clone 319568 (TRBV6-1, TRBJ1-3)
CASVQGGGGNTIYF

SEQ ID NO: 639137 - protein, 14 aa, Homo sapiens
  CDR3 for alpha chain variable domain of TCR clone 319569 (TRAV12-2, TRAJ45)
CAVYSGGGADGLTF

SEQ ID NO: 639138 - protein, 14 aa, Homo sapiens
  CDR3 for beta chain variable domain of TCR clone 319569 (TRBV12-4, TRBJ2-7)
CASSASGGWYEQYF

SEQ ID NO: 639139 - protein, 14 aa, Homo sapiens
  CDR3 for alpha chain variable domain of TCR clone 319570 (TRAV10, TRAJ32)
CGEPRGGATNKLIF

SEQ ID NO: 639140 - protein, 14 aa, Homo sapiens
  CDR3 for beta chain variable domain of TCR clone 319570 (TRBV5-4, TRBJ2-2)
CASRLDGGTGELFF

SEQ ID NO: 639141 - protein, 16 aa, Homo sapiens
  CDR3 for alpha chain variable domain of TCR clone 319571 (TRAV12-2, TRAJ52)
CRLANAGGTSYGKLTF

SEQ ID NO: 639142 - protein, 12 aa, Homo sapiens
  CDR3 for beta chain variable domain of TCR clone 319571 (TRBV11-2, TRBJ2-2)
CASSLGGGELFF

SEQ ID NO: 639143 - protein, 15 aa, Homo sapiens
  CDR3 for alpha chain variable domain of TCR clone 319572 (TRAV13-1, TRAJ18)
CAASGGGSTLGRIYF

SEQ ID NO: 639144 - protein, 13 aa, Homo sapiens
  CDR3 for beta chain variable domain of TCR clone 319572 (TRBV18, TRBJ2-1)
CASGLASNNEQFF

SEQ ID NO: 639145 - protein, 16 aa, Homo sapiens
  CDR3 for alpha chain variable domain of TCR clone 319573 (TRAV29/DV5, TRAJ36)
CAASAGVETGANNLFF

SEQ ID NO: 639146 - protein, 12 aa, Homo sapiens
  CDR3 for beta chain variable domain of TCR clone 319573 (TRBV7-8, TRBJ2-7)
CASSLGDREQYF

SEQ ID NO: 639147 - protein, 14 aa, Homo sapiens
  CDR3 for alpha chain variable domain of TCR clone 319574 (TRAV17, TRAJ54)
CATDANQGAQKLVF

SEQ ID NO: 639148 - protein, 12 aa, Homo sapiens
  CDR3 for beta chain variable domain of TCR clone 319574 (TRBV7-9, TRBJ2-7)
CASSIKREGQYF

SEQ ID NO: 639149 - protein, 14 aa, Homo sapiens
  CDR3 for alpha chain variable domain of TCR clone 319575 (TRAV13-1, TRAJ35)
CAASKGGFGNVLHC

SEQ ID NO: 639150 - protein, 14 aa, Homo sapiens
  CDR3 for beta chain variable domain of TCR clone 319575 (TRBV19, TRBJ1-5)
CASGTEVYNQPQHF

SEQ ID NO: 639151 - protein, 11 aa, Homo sapiens
  CDR3 for alpha chain variable domain of TCR clone 319576 (TRAV12-2, TRAJ49)
CALQGGKQFYF

SEQ ID NO: 639152 - protein, 14 aa, Homo sapiens
  CDR3 for beta chain variable domain of TCR clone 319576 (TRBV7-2, TRBJ2-7)
CASSPKTSFYEQYF

SEQ ID NO: 639153 - protein, 18 aa, Homo sapiens
  CDR3 for alpha chain variable domain of TCR clone 319577 (TRAV26-1, TRAJ56)
CIVRVASGVTGANSKLTF

SEQ ID NO: 639154 - protein, 14 aa, Homo sapiens
  CDR3 for beta chain variable domain of TCR clone 319577 (TRBV25-1, TRBJ1-1)
CASTHLGGNTEAFF

SEQ ID NO: 639155 - protein, 13 aa, Homo sapiens
  CDR3 for alpha chain variable domain of TCR clone 319578 (TRAV13-1, TRAJ20)
CAARVSNDYKLSF

SEQ ID NO: 639156 - protein, 15 aa, Homo sapiens
  CDR3 for beta chain variable domain of TCR clone 319578 (TRBV7-2, TRBJ1-5)
CASSSTGVDNQPQHF

SEQ ID NO: 639157 - protein, 11 aa, Homo sapiens
  CDR3 for alpha chain variable domain of TCR clone 319579 (TRAV12-2, TRAJ23)
CAVDQGGKLIF

SEQ ID NO: 639158 - protein, 20 aa, Homo sapiens
  CDR3 for beta chain variable domain of TCR clone 319579 (TRBV7-8, TRBJ2-2)
CASSHLFPGPTIHITGELFF

SEQ ID NO: 639159 - protein, 18 aa, Homo sapiens
  CDR3 for alpha chain variable domain of TCR clone 319580 (TRAV17, TRAJ45)
CATSLDLYSGGGAAGFTF

SEQ ID NO: 639160 - protein, 15 aa, Homo sapiens
  CDR3 for beta chain variable domain of TCR clone 319580 (TRBV11-2, TRBJ2-1)
CASSKNRGLIYEQFF

SEQ ID NO: 639161 - protein, 14 aa, Homo sapiens
  CDR3 for alpha chain variable domain of TCR clone 319581 (TRAV17, TRAJ11)
CATDTSRGYSTLTF

SEQ ID NO: 639162 - protein, 14 aa, Homo sapiens
  CDR3 for beta chain variable domain of TCR clone 319581 (TRBV11-2, TRBJ2-3)
CASSRLARTDTQYF

SEQ ID NO: 639163 - protein, 10 aa, Homo sapiens
  CDR3 for alpha chain variable domain of TCR clone 319582 (TRAV26-1, TRAJ40)
CIAGTYKYIF

SEQ ID NO: 639164 - protein, 11 aa, Homo sapiens
  CDR3 for beta chain variable domain of TCR clone 319582 (TRBV29-1, TRBJ2-7)
CSEDRTGTQYF

SEQ ID NO: 639165 - protein, 14 aa, Homo sapiens
  CDR3 for alpha chain variable domain of TCR clone 319583 (TRAV12-1, TRAJ24)
CVVRSTDSWGKFQF

SEQ ID NO: 639166 - protein, 16 aa, Homo sapiens
  CDR3 for beta chain variable domain of TCR clone 319583 (TRBV27, TRBJ2-2)
CASSFRGLVRTGELFF

SEQ ID NO: 639167 - protein, 13 aa, Homo sapiens
  CDR3 for alpha chain variable domain of TCR clone 319584 (TRAV4, TRAJ22)
CLVGSGSARQLTF

SEQ ID NO: 639168 - protein, 15 aa, Homo sapiens
  CDR3 for beta chain variable domain of TCR clone 319584 (TRBV7-9, TRBJ1-6)
CASSSPGRGNSPLHF

SEQ ID NO: 639169 - protein, 17 aa, Homo sapiens
  CDR3 for alpha chain variable domain of TCR clone 319585 (TRAV3, TRAJ12)
CCERRDGTMDSSYKLIF

SEQ ID NO: 639170 - protein, 15 aa, Homo sapiens
  CDR3 for beta chain variable domain of TCR clone 319585 (TRBV5-5, TRBJ1-5)
CASSLKGGGEHPQHF

SEQ ID NO: 639171 - protein, 12 aa, Homo sapiens
  CDR3 for alpha chain variable domain of TCR clone 319586 (TRAV12-3, TRAJ17)
CAMTLTGNKLTF

SEQ ID NO: 639172 - protein, 13 aa, Homo sapiens
  CDR3 for beta chain variable domain of TCR clone 319586 (TRBV19, TRBJ2-7)
CASSAGHGYEQYF

SEQ ID NO: 639173 - protein, 12 aa, Homo sapiens
  CDR3 for alpha chain variable domain of TCR clone 319587 (TRAV8-3, TRAJ26)
CAGDIYGQNFVF

SEQ ID NO: 639174 - protein, 17 aa, Homo sapiens
  CDR3 for beta chain variable domain of TCR clone 319587 (TRBV7-8, TRBJ2-6)
CASSAGTGGAGANVLTF

SEQ ID NO: 639175 - protein, 11 aa, Homo sapiens
  CDR3 for alpha chain variable domain of TCR clone 319588 (TRAV17, TRAJ31)
CATDRTARLMF

SEQ ID NO: 639176 - protein, 16 aa, Homo sapiens
  CDR3 for beta chain variable domain of TCR clone 319588 (TRBV5-7, TRBJ2-1)
CASSGGLAGTYNEQFF

SEQ ID NO: 639177 - protein, 18 aa, Homo sapiens
  CDR3 for alpha chain variable domain of TCR clone 319589 (TRAV29/DV5, TRAJ52)
CAAGFRGAGGTSYGKLTF

SEQ ID NO: 639178 - protein, 12 aa, Homo sapiens
  CDR3 for beta chain variable domain of TCR clone 319589 (TRBV20-1, TRBJ2-1)
CSARLGTDEQFF

SEQ ID NO: 639179 - protein, 14 aa, Homo sapiens
  CDR3 for alpha chain variable domain of TCR clone 319590 (TRAV12-3, TRAJ33)
CAMSVPGSNYQLIW

SEQ ID NO: 639180 - protein, 17 aa, Homo sapiens
  CDR3 for beta chain variable domain of TCR clone 319590 (TRBV7-9, TRBJ2-1)
CASSLLWGQGYNNEQFF

SEQ ID NO: 639181 - protein, 18 aa, Homo sapiens
  CDR3 for alpha chain variable domain of TCR clone 319591 (TRAV12-2, )
CAVEDIQNPNPAVYQLRD

SEQ ID NO: 639182 - protein, 20 aa, Homo sapiens
  CDR3 for beta chain variable domain of TCR clone 319591 (TRBV11-3, TRBJ2-7)
CASSQRTSGSLRAVLRAGHQ

SEQ ID NO: 639183 - protein, 15 aa, Homo sapiens
  CDR3 for alpha chain variable domain of TCR clone 319592 (TRAV3, TRAJ4)
CAVRDGTGGYNKQIF

SEQ ID NO: 639184 - protein, 16 aa, Homo sapiens
  CDR3 for beta chain variable domain of TCR clone 319592 (TRBV27, TRBJ2-2)
CASSSSGVSNTGELFF

SEQ ID NO: 639185 - protein, 14 aa, Homo sapiens
  CDR3 for alpha chain variable domain of TCR clone 319593 (TRAV12-2, TRAJ13)
CAVKKTGGYQQVTF

SEQ ID NO: 639186 - protein, 14 aa, Homo sapiens
  CDR3 for beta chain variable domain of TCR clone 319593 (TRBV7-2, TRBJ2-7)
CASSPKTSFYEQYF

SEQ ID NO: 639187 - protein, 14 aa, Homo sapiens
  CDR3 for alpha chain variable domain of TCR clone 319594 (TRAV1-2, TRAJ8)
CAVREDTGFKKLVF

SEQ ID NO: 639188 - protein, 14 aa, Homo sapiens
  CDR3 for beta chain variable domain of TCR clone 319594 (TRBV11-2, TRBJ2-3)
CASSRLARTDTQYF

SEQ ID NO: 639189 - protein, 19 aa, Homo sapiens
  CDR3 for alpha chain variable domain of TCR clone 319595 (TRAV26-1, TRAJ52)
CIVRAANNAGGTSYGKLTF

SEQ ID NO: 639190 - protein, 14 aa, Homo sapiens
  CDR3 for beta chain variable domain of TCR clone 319595 (TRBV19, TRBJ1-2)
CASSIGAGSYGYTF

SEQ ID NO: 639191 - protein, 13 aa, Homo sapiens
  CDR3 for alpha chain variable domain of TCR clone 319596 (TRAV39, TRAJ33)
FAANPDINYQLIW

SEQ ID NO: 639192 - protein, 13 aa, Homo sapiens
  CDR3 for beta chain variable domain of TCR clone 319596 (TRBV18, TRBJ1-1)
CASSGGRNTEAFF

SEQ ID NO: 639193 - protein, 13 aa, Homo sapiens
  CDR3 for alpha chain variable domain of TCR clone 319597 (TRAV27, TRAJ58)
CVGFETSGSRLTF

SEQ ID NO: 639194 - protein, 14 aa, Homo sapiens
  CDR3 for beta chain variable domain of TCR clone 319597 (TRBV6-1, TRBJ1-3)
CASVQGGGGNTIYF

SEQ ID NO: 639195 - protein, 14 aa, Homo sapiens
  CDR3 for alpha chain variable domain of TCR clone 319598 (TRAV29/DV5, TRAJ36)
CAARRKTGANNLFF

SEQ ID NO: 639196 - protein, 12 aa, Homo sapiens
  CDR3 for beta chain variable domain of TCR clone 319598 (TRBV14, TRBJ2-5)
CASSQLKETQYV

SEQ ID NO: 639197 - protein, 14 aa, Homo sapiens
  CDR3 for alpha chain variable domain of TCR clone 319599 (TRAV12-1, TRAJ23)
CVVIVYNQGGELIF

SEQ ID NO: 639198 - protein, 13 aa, Homo sapiens
  CDR3 for beta chain variable domain of TCR clone 319599 (TRBV11-2, TRBJ2-5)
CASSFSSQETQYF

SEQ ID NO: 639199 - protein, 15 aa, Homo sapiens
  CDR3 for alpha chain variable domain of TCR clone 319600 (TRAV3, TRAJ20)
CAVRDIKLSDYKISF

SEQ ID NO: 639200 - protein, 18 aa, Homo sapiens
  CDR3 for beta chain variable domain of TCR clone 319600 (TRBV20-1, TRBJ2-5)
CSQTGDSGRLGGKETQYF

SEQ ID NO: 639201 - protein, 16 aa, Homo sapiens
  CDR3 for alpha chain variable domain of TCR clone 319601 (TRAV12-2, TRAJ52)
CRLANAGGTSCGKLTF

SEQ ID NO: 639202 - protein, 13 aa, Homo sapiens
  CDR3 for beta chain variable domain of TCR clone 319601 (TRBV10-3, TRBJ2-7)
CASKLAVNYEQYF

SEQ ID NO: 639203 - protein, 14 aa, Homo sapiens
  CDR3 for alpha chain variable domain of TCR clone 319602 (TRAV13-1, TRAJ9)
CAASALTGGFKTIV

SEQ ID NO: 639204 - protein, 16 aa, Homo sapiens
  CDR3 for beta chain variable domain of TCR clone 319602 (TRBV7-8, TRBJ2-4)
CASSAERTLAKNMQYF

SEQ ID NO: 639205 - protein, 13 aa, Homo sapiens
  CDR3 for alpha chain variable domain of TCR clone 319603 (TRAV3, TRAJ20)
CAVRSLNDYTLSF

SEQ ID NO: 639206 - protein, 13 aa, Homo sapiens
  CDR3 for beta chain variable domain of TCR clone 319603 (TRBV6-1, TRBJ2-1)
CAGMDPTNNEQFF

SEQ ID NO: 639207 - protein, 13 aa, Homo sapiens
  CDR3 for alpha chain variable domain of TCR clone 319604 (TRAV20, TRAJ49)
CAVQARTGNQFYF

SEQ ID NO: 639208 - protein, 13 aa, Homo sapiens
  CDR3 for beta chain variable domain of TCR clone 319604 (TRBV7-2, TRBJ1-1)
CASSQDWGAEAFF

SEQ ID NO: 639209 - protein, 14 aa, Homo sapiens
  CDR3 for alpha chain variable domain of TCR clone 319605 (TRAV1-2, TRAJ16)
CAVNRFSDDQKLLS

SEQ ID NO: 639210 - protein, 15 aa, Homo sapiens
  CDR3 for beta chain variable domain of TCR clone 319605 (TRBV9, TRBJ1-6)
CASSVAGTGDSPLHF

SEQ ID NO: 639211 - protein, 15 aa, Homo sapiens
  CDR3 for alpha chain variable domain of TCR clone 319606 (TRAV17, TRAJ22)
CATVAPSGSARQLTF

SEQ ID NO: 639212 - protein, 15 aa, Homo sapiens
  CDR3 for beta chain variable domain of TCR clone 319606 (TRBV11-2, TRBJ2-1)
CASSRNRGLMYEQFF

SEQ ID NO: 639213 - protein, 15 aa, Homo sapiens
  CDR3 for alpha chain variable domain of TCR clone 319607 (TRAV21, TRAJ53)
CATLNSGGSKYKLTF

SEQ ID NO: 639214 - protein, 15 aa, Homo sapiens
  CDR3 for beta chain variable domain of TCR clone 319607 (TRBV27, TRBJ2-1)
CASSNGGGSSNEQFF

SEQ ID NO: 639215 - protein, 13 aa, Homo sapiens
  CDR3 for alpha chain variable domain of TCR clone 319608 (TRAV36/DV7, TRAJ7)
CAGTRYGNNRLAF

SEQ ID NO: 639216 - protein, 15 aa, Homo sapiens
  CDR3 for beta chain variable domain of TCR clone 319608 (TRBV11-3, TRBJ2-7)
CASSPGTASSYEQYF

SEQ ID NO: 639217 - protein, 15 aa, Homo sapiens
  CDR3 for alpha chain variable domain of TCR clone 319609 (TRAV26-1, TRAJ17)
CIVRVVKAAGNKLTF

SEQ ID NO: 639218 - protein, 14 aa, Homo sapiens
  CDR3 for beta chain variable domain of TCR clone 319609 (TRBV11-2, TRBJ2-5)
CASSRTGGIETQYF

SEQ ID NO: 639219 - protein, 16 aa, Homo sapiens
  CDR3 for alpha chain variable domain of TCR clone 319610 (TRAV3, TRAJ37)
CAVRGKGSGNTGKLIF

SEQ ID NO: 639220 - protein, 15 aa, Homo sapiens
  CDR3 for beta chain variable domain of TCR clone 319610 (TRBV13, TRBJ1-5)
CASSFGQGGVQPQHF

SEQ ID NO: 639221 - protein, 12 aa, Homo sapiens
  CDR3 for alpha chain variable domain of TCR clone 319611 (TRAV35, TRAJ49)
CAGWNTGNQFYF

SEQ ID NO: 639222 - protein, 15 aa, Homo sapiens
  CDR3 for beta chain variable domain of TCR clone 319611 (TRBV11-2, TRBJ2-2)
CASSSDRVNAGELFF

SEQ ID NO: 639223 - protein, 14 aa, Homo sapiens
  CDR3 for alpha chain variable domain of TCR clone 319612 (TRAV12-2, TRAJ9)
CAVNMEGGGFKTIF

SEQ ID NO: 639224 - protein, 14 aa, Homo sapiens
  CDR3 for beta chain variable domain of TCR clone 319612 (TRBV2, TRBJ2-5)
CASSEVLAQETQYF

SEQ ID NO: 639225 - protein, 14 aa, Homo sapiens
  CDR3 for alpha chain variable domain of TCR clone 319613 (TRAV35, TRAJ38)
CAGSNAGNYRKLIW

SEQ ID NO: 639226 - protein, 12 aa, Homo sapiens
  CDR3 for beta chain variable domain of TCR clone 319613 (TRBV19, TRBJ2-7)
CASTDRGYEQYF

SEQ ID NO: 639227 - protein, 14 aa, Homo sapiens
  CDR3 for alpha chain variable domain of TCR clone 319614 (TRAV12-2, TRAJ45)
CAVNKGGGADGLTF

SEQ ID NO: 639228 - protein, 15 aa, Homo sapiens
  CDR3 for beta chain variable domain of TCR clone 319614 (TRBV5-5, TRBJ1-5)
CASSSTPGSNQPQHF

SEQ ID NO: 639229 - protein, 15 aa, Homo sapiens
  CDR3 for alpha chain variable domain of TCR clone 319615 (TRAV16, TRAJ4)
CALEEPSGGYNKLIF

SEQ ID NO: 639230 - protein, 13 aa, Homo sapiens
  CDR3 for beta chain variable domain of TCR clone 319615 (TRBV7-3, TRBJ2-7)
CASSQAGGYEQYF

SEQ ID NO: 639231 - protein, 13 aa, Homo sapiens
  CDR3 for alpha chain variable domain of TCR clone 319616 (TRAV12-2, TRAJ37)
CAGGSGNTGKLIF

SEQ ID NO: 639232 - protein, 17 aa, Homo sapiens
  CDR3 for beta chain variable domain of TCR clone 319616 (TRBV11-2, TRBJ2-1)
CASSLYPPGVEYNEQVF

SEQ ID NO: 639233 - protein, 13 aa, Homo sapiens
  CDR3 for alpha chain variable domain of TCR clone 319617 (TRAV17, TRAJ9)
CATDGTGGFKTIF

SEQ ID NO: 639234 - protein, 13 aa, Homo sapiens
  CDR3 for beta chain variable domain of TCR clone 319617 (TRBV7-6, TRBJ1-2)
CASSLVADYGYTF

SEQ ID NO: 639235 - protein, 16 aa, Homo sapiens
  CDR3 for alpha chain variable domain of TCR clone 319618 (TRAV12-2, TRAJ32)
CAVNLGQGGATNKLIF

SEQ ID NO: 639236 - protein, 13 aa, Homo sapiens
  CDR3 for beta chain variable domain of TCR clone 319618 (TRBV9, TRBJ2-2)
CASCPRPAGELFF

SEQ ID NO: 639237 - protein, 17 aa, Homo sapiens
  CDR3 for alpha chain variable domain of TCR clone 319619 (TRAV3, TRAJ6)
CAVRDGTGAGGSYIPPF

SEQ ID NO: 639238 - protein, 14 aa, Homo sapiens
  CDR3 for beta chain variable domain of TCR clone 319619 (TRBV7-2, TRBJ2-7)
CASSPKTSFYEQYF

SEQ ID NO: 639239 - protein, 14 aa, Homo sapiens
  CDR3 for alpha chain variable domain of TCR clone 319620 (TRAV23/DV6, TRAJ57)
CAVSNQGGSEKLVF

SEQ ID NO: 639240 - protein, 13 aa, Homo sapiens
  CDR3 for beta chain variable domain of TCR clone 319620 (TRBV11-2, TRBJ2-7)
CASSSYPSYEQYF

SEQ ID NO: 639241 - protein, 15 aa, Homo sapiens
  CDR3 for alpha chain variable domain of TCR clone 319621 (TRAV3, TRAJ21)
CAVRERTSTNFTLDL

SEQ ID NO: 639242 - protein, 14 aa, Homo sapiens
  CDR3 for beta chain variable domain of TCR clone 319621 (TRBV4-1, TRBJ2-2)
CASSQVVNTGELFF

SEQ ID NO: 639243 - protein, 13 aa, Homo sapiens
  CDR3 for alpha chain variable domain of TCR clone 319622 (TRAV21, TRAJ27)
CAARPGNAGKSTF

SEQ ID NO: 639244 - protein, 14 aa, Homo sapiens
  CDR3 for beta chain variable domain of TCR clone 319622 (TRBV20-1, TRBJ2-3)
CRAYSGGRADTQYF

SEQ ID NO: 639245 - protein, 14 aa, Homo sapiens
  CDR3 for alpha chain variable domain of TCR clone 319623 (TRAV1-2, TRAJ16)
CAVNRFSDGQQLLF

SEQ ID NO: 639246 - protein, 14 aa, Homo sapiens
  CDR3 for beta chain variable domain of TCR clone 319623 (TRBV13, TRBJ2-5)
CASSLGREQETQYF

SEQ ID NO: 639247 - protein, 12 aa, Homo sapiens
  CDR3 for alpha chain variable domain of TCR clone 319624 (TRAV3, TRAJ20)
CAVRDPAYKLSF

SEQ ID NO: 639248 - protein, 14 aa, Homo sapiens
  CDR3 for beta chain variable domain of TCR clone 319624 (TRBV20-1, TRBJ1-1)
CSAQTRIGGTEAFF

SEQ ID NO: 639249 - protein, 15 aa, Homo sapiens
  CDR3 for alpha chain variable domain of TCR clone 319625 (TRAV26-1, TRAJ22)
CIVRVSFWFCKATDL

SEQ ID NO: 639250 - protein, 13 aa, Homo sapiens
  CDR3 for beta chain variable domain of TCR clone 319625 (TRBV7-9, TRBJ2-3)
CASSPGSTDTQYF

SEQ ID NO: 639251 - protein, 14 aa, Homo sapiens
  CDR3 for alpha chain variable domain of TCR clone 319626 (TRAV26-1, TRAJ38)
CIADNAGNNRKMIW

SEQ ID NO: 639252 - protein, 15 aa, Homo sapiens
  CDR3 for beta chain variable domain of TCR clone 319626 (TRBV9, TRBJ2-1)
CASSLAGSSYNEQFF

SEQ ID NO: 639253 - protein, 12 aa, Homo sapiens
  CDR3 for alpha chain variable domain of TCR clone 319627 (TRAV16, TRAJ10)
CSRTGGGNKLTF

SEQ ID NO: 639254 - protein, 14 aa, Homo sapiens
  CDR3 for beta chain variable domain of TCR clone 319627 (TRBV7-2, TRBJ2-7)
CASSPKTSFYEQYC

SEQ ID NO: 639255 - protein, 13 aa, Homo sapiens
  CDR3 for alpha chain variable domain of TCR clone 319628 (TRAV38-2/DV8, TRAJ34)
CAYRTWNTDKLIF

SEQ ID NO: 639256 - protein, 15 aa, Homo sapiens
  CDR3 for beta chain variable domain of TCR clone 319628 (TRBV28, TRBJ2-1)
CASSGLAEVDNEQFF

SEQ ID NO: 639257 - protein, 17 aa, Homo sapiens
  CDR3 for alpha chain variable domain of TCR clone 319629 (TRAV3, TRAJ6)
CAVRDGPRAGGSYIPTL

SEQ ID NO: 639258 - protein, 13 aa, Homo sapiens
  CDR3 for beta chain variable domain of TCR clone 319629 (TRBV19, TRBJ1-2)
CASSVPGQDGYTF

SEQ ID NO: 639259 - protein, 16 aa, Homo sapiens
  CDR3 for alpha chain variable domain of TCR clone 319630 (TRAV12-1, TRAJ12)
CVVNTLLMDSSYKLIF

SEQ ID NO: 639260 - protein, 17 aa, Homo sapiens
  CDR3 for beta chain variable domain of TCR clone 319630 (TRBV7-3, TRBJ2-2)
CASSLSGTSGGTGELFF

SEQ ID NO: 639261 - protein, 14 aa, Homo sapiens
  CDR3 for alpha chain variable domain of TCR clone 319631 (TRAV27, TRAJ44)
CAASFTGTASKLTC

SEQ ID NO: 639262 - protein, 13 aa, Homo sapiens
  CDR3 for beta chain variable domain of TCR clone 319631 (TRBV27, TRBJ2-3)
CATSRGGLYTQYF

SEQ ID NO: 639263 - protein, 18 aa, Homo sapiens
  CDR3 for alpha chain variable domain of TCR clone 319632 (TRAV12-2, )
CAVEDIQNPDPAVYQLRD

SEQ ID NO: 639264 - protein, 16 aa, Homo sapiens
  CDR3 for beta chain variable domain of TCR clone 319632 (TRBV6-1, TRBJ1-2)
CAISGAWQGRSHGYTF

SEQ ID NO: 639265 - protein, 11 aa, Homo sapiens
  CDR3 for alpha chain variable domain of TCR clone 319633 (TRAV21, TRAJ9)
CAVPGGFNTIF

SEQ ID NO: 639266 - protein, 17 aa, Homo sapiens
  CDR3 for beta chain variable domain of TCR clone 319633 (TRBV7-9, TRBJ2-5)
CATSGGARDPVLRARHA

SEQ ID NO: 639267 - protein, 15 aa, Homo sapiens
  CDR3 for alpha chain variable domain of TCR clone 319634 (TRAV13-2, TRAJ8)
CAPGGRNTGFQKLVF

SEQ ID NO: 639268 - protein, 16 aa, Homo sapiens
  CDR3 for beta chain variable domain of TCR clone 319634 (TRBV5-4, TRBJ2-3)
CASQQPGAGGADTQYF

SEQ ID NO: 639269 - protein, 15 aa, Homo sapiens
  CDR3 for alpha chain variable domain of TCR clone 319635 (TRAV17, TRAJ16)
CATALRFSDGQKLLF

SEQ ID NO: 639270 - protein, 12 aa, Homo sapiens
  CDR3 for beta chain variable domain of TCR clone 319635 (TRBV19, TRBJ1-1)
CASSIGTEEAFF

SEQ ID NO: 639271 - protein, 15 aa, Homo sapiens
  CDR3 for alpha chain variable domain of TCR clone 319636 (TRAV20, TRAJ23)
CAVQAVGNQGGKLIF

SEQ ID NO: 639272 - protein, 13 aa, Homo sapiens
  CDR3 for beta chain variable domain of TCR clone 319636 (TRBV9, TRBJ2-7)
CASSASDSYEQYF

SEQ ID NO: 639273 - protein, 23 aa, Homo sapiens
  CDR3 for alpha chain variable domain of TCR clone 319637 (TRAV12-2, TRAJ36)
SLLIRDSQPSDSATLERANNLFF

SEQ ID NO: 639274 - protein, 16 aa, Homo sapiens
  CDR3 for beta chain variable domain of TCR clone 319637 (TRBV2, TRBJ2-1)
CASSVGGSLSYNEQFF

SEQ ID NO: 639275 - protein, 13 aa, Homo sapiens
  CDR3 for alpha chain variable domain of TCR clone 319638 (TRAV27, TRAJ45)
CRSSGGGADGLTF

SEQ ID NO: 639276 - protein, 12 aa, Homo sapiens
  CDR3 for beta chain variable domain of TCR clone 319638 (TRBV7-9, TRBJ1-4)
CASSTDREKLFF

SEQ ID NO: 639277 - protein, 13 aa, Homo sapiens
  CDR3 for alpha chain variable domain of TCR clone 319639 (TRAV1-2, TRAJ31)
CAVRPNNNARLMF

SEQ ID NO: 639278 - protein, 14 aa, Homo sapiens
  CDR3 for beta chain variable domain of TCR clone 319639 (TRBV11-2, TRBJ2-1)
CASILSGPYNEQFF

SEQ ID NO: 639279 - protein, 13 aa, Homo sapiens
  CDR3 for alpha chain variable domain of TCR clone 319640 (TRAV1-2, TRAJ31)
CALRPNNNARLMF

SEQ ID NO: 639280 - protein, 14 aa, Homo sapiens
  CDR3 for beta chain variable domain of TCR clone 319640 (TRBV11-2, TRBJ2-1)
CASSLSGPYNEQFF

SEQ ID NO: 639281 - protein, 16 aa, Homo sapiens
  CDR3 for alpha chain variable domain of TCR clone 319641 (TRAV30, TRAJ24)
CGTEIVDADSWGKFQF

SEQ ID NO: 639282 - protein, 15 aa, Homo sapiens
  CDR3 for beta chain variable domain of TCR clone 319641 (TRBV15, TRBJ1-5)
CATSREPVSNQPQHF

SEQ ID NO: 639283 - protein, 18 aa, Homo sapiens
  CDR3 for alpha chain variable domain of TCR clone 319642 (TRAV12-3, TRAJ52)
CAMSVGGAGGTSYGKLTF

SEQ ID NO: 639284 - protein, 14 aa, Homo sapiens
  CDR3 for beta chain variable domain of TCR clone 319642 (TRBV28, TRBJ1-1)
CASSSEQGYTEAFF

SEQ ID NO: 639285 - protein, 14 aa, Homo sapiens
  CDR3 for alpha chain variable domain of TCR clone 319643 (TRAV3, TRAJ7)
CAVGEEEREQQTRF

SEQ ID NO: 639286 - protein, 12 aa, Homo sapiens
  CDR3 for beta chain variable domain of TCR clone 319643 (TRBV7-8, TRBJ2-7)
CASSLGDREQYF

SEQ ID NO: 639287 - protein, 14 aa, Homo sapiens
  CDR3 for alpha chain variable domain of TCR clone 319644 (TRAV34, TRAJ22)
CGADTSGSARQLTF

SEQ ID NO: 639288 - protein, 15 aa, Homo sapiens
  CDR3 for beta chain variable domain of TCR clone 319644 (TRBV6-1, TRBJ2-3)
CASSERGGITDTQYF

SEQ ID NO: 639289 - protein, 12 aa, Homo sapiens
  CDR3 for alpha chain variable domain of TCR clone 319645 (TRAV12-1, TRAJ34)
CVVAGATDKLVF

SEQ ID NO: 639290 - protein, 12 aa, Homo sapiens
  CDR3 for beta chain variable domain of TCR clone 319645 (TRBV7-9, TRBJ1-1)
CASILVRGEAFF

SEQ ID NO: 639291 - protein, 10 aa, Homo sapiens
  CDR3 for alpha chain variable domain of TCR clone 319646 (TRAV26-1, TRAJ40)
CIAGTYKYIF

SEQ ID NO: 639292 - protein, 14 aa, Homo sapiens
  CDR3 for beta chain variable domain of TCR clone 319646 (TRBV7-8, TRBJ2-3)
CASSFKSSTDTQYF

SEQ ID NO: 639293 - protein, 13 aa, Homo sapiens
  CDR3 for alpha chain variable domain of TCR clone 319647 (TRAV13-1, TRAJ6)
CAARRGGSYIPTF

SEQ ID NO: 639294 - protein, 16 aa, Homo sapiens
  CDR3 for beta chain variable domain of TCR clone 319647 (TRBV7-9, TRBJ2-2)
CASSLATGAGTGELFF

SEQ ID NO: 639295 - protein, 14 aa, Homo sapiens
  CDR3 for alpha chain variable domain of TCR clone 319648 (TRAV29/DV5, TRAJ36)
CAARRKTGANNLFF

SEQ ID NO: 639296 - protein, 14 aa, Homo sapiens
  CDR3 for beta chain variable domain of TCR clone 319648 (TRBV28, TRBJ2-7)
CASKPGPDLYEQYF

SEQ ID NO: 639297 - protein, 15 aa, Homo sapiens
  CDR3 for alpha chain variable domain of TCR clone 319649 (TRAV13-1, TRAJ17)
CAASIERAAGNKLNF

SEQ ID NO: 639298 - protein, 15 aa, Homo sapiens
  CDR3 for beta chain variable domain of TCR clone 319649 (TRBV6-5, TRBJ2-1)
CASSYDAGAGNEQFF

SEQ ID NO: 639299 - protein, 14 aa, Homo sapiens
  CDR3 for alpha chain variable domain of TCR clone 319650 (TRAV17, TRAJ15)
CATTTNQAGTALIF

SEQ ID NO: 639300 - protein, 16 aa, Homo sapiens
  CDR3 for beta chain variable domain of TCR clone 319650 (TRBV4-1, TRBJ2-7)
CASSRGDILNSYEQCF

SEQ ID NO: 639301 - protein, 14 aa, Homo sapiens
  CDR3 for alpha chain variable domain of TCR clone 319651 (TRAV3, TRAJ16)
CCERLKSDGKKLPF

SEQ ID NO: 639302 - protein, 15 aa, Homo sapiens
  CDR3 for beta chain variable domain of TCR clone 319651 (TRBV28, TRBJ2-7)
CASSPGGRGFYEQYF

SEQ ID NO: 639303 - protein, 15 aa, Homo sapiens
  CDR3 for alpha chain variable domain of TCR clone 319652 (TRAV12-2, TRAJ56)
CAVNPFTGANSKLTF

SEQ ID NO: 639304 - protein, 13 aa, Homo sapiens
  CDR3 for beta chain variable domain of TCR clone 319652 (TRBV20-1, TRBJ1-2)
CSARDRVYGGYTF

SEQ ID NO: 639305 - protein, 14 aa, Homo sapiens
  CDR3 for alpha chain variable domain of TCR clone 319653 (TRAV38-1, TRAJ45)
CAYYSRGGADGLTF

SEQ ID NO: 639306 - protein, 14 aa, Homo sapiens
  CDR3 for beta chain variable domain of TCR clone 319653 (TRBV25-1, TRBJ1-1)
CASTHLGGNTEAFF

SEQ ID NO: 639307 - protein, 13 aa, Homo sapiens
  CDR3 for alpha chain variable domain of TCR clone 319654 (TRAV27, TRAJ42)
CAGARGSQGNLIF

SEQ ID NO: 639308 - protein, 13 aa, Homo sapiens
  CDR3 for beta chain variable domain of TCR clone 319654 (TRBV28, TRBJ2-5)
CASSFAGGETQYF

SEQ ID NO: 639309 - protein, 14 aa, Homo sapiens
  CDR3 for alpha chain variable domain of TCR clone 319655 (TRAV8-2, TRAJ4)
CVVSPSGGYNKLIF

SEQ ID NO: 639310 - protein, 15 aa, Homo sapiens
  CDR3 for beta chain variable domain of TCR clone 319655 (TRBV4-1, TRBJ1-4)
CASSDTGGSNEKLFF

SEQ ID NO: 639311 - protein, 14 aa, Homo sapiens
  CDR3 for alpha chain variable domain of TCR clone 319656 (TRAV12-2, TRAJ40)
CAVKIPSGTYKYIF

SEQ ID NO: 639312 - protein, 14 aa, Homo sapiens
  CDR3 for beta chain variable domain of TCR clone 319656 (TRBV2, TRBJ2-1)
CASSEALIYNEQFF

SEQ ID NO: 639313 - protein, 13 aa, Homo sapiens
  CDR3 for alpha chain variable domain of TCR clone 319657 (TRAV23/DV6, TRAJ22)
CAPYSGSARPLPF

SEQ ID NO: 639314 - protein, 15 aa, Homo sapiens
  CDR3 for beta chain variable domain of TCR clone 319657 (TRBV11-2, TRBJ1-6)
CASSLDPWAVSPLHF

SEQ ID NO: 639315 - protein, 13 aa, Homo sapiens
  CDR3 for alpha chain variable domain of TCR clone 319658 (TRAV12-3, TRAJ56)
CALATGANSKLTF

SEQ ID NO: 639316 - protein, 13 aa, Homo sapiens
  CDR3 for beta chain variable domain of TCR clone 319658 (TRBV9, TRBJ2-7)
CASSVAEYYEQYF

SEQ ID NO: 639317 - protein, 13 aa, Homo sapiens
  CDR3 for alpha chain variable domain of TCR clone 319659 (TRAV12-3, TRAJ33)
CAVSVNSNYQLIW

SEQ ID NO: 639318 - protein, 17 aa, Homo sapiens
  CDR3 for beta chain variable domain of TCR clone 319659 (TRBV4-1, TRBJ1-4)
CASSQEGPRGVEEKLFF

SEQ ID NO: 639319 - protein, 11 aa, Homo sapiens
  CDR3 for alpha chain variable domain of TCR clone 319660 (TRAV1-2, TRAJ31)
CSVNNNARLMF

SEQ ID NO: 639320 - protein, 15 aa, Homo sapiens
  CDR3 for beta chain variable domain of TCR clone 319660 (TRBV28, TRBJ2-1)
CASSIIAGGRSEQFL

SEQ ID NO: 639321 - protein, 15 aa, Homo sapiens
  CDR3 for alpha chain variable domain of TCR clone 319661 (TRAV29/DV5, TRAJ24)
CAASGATDGWGKFQF

SEQ ID NO: 639322 - protein, 12 aa, Homo sapiens
  CDR3 for beta chain variable domain of TCR clone 319661 (TRBV11-2, TRBJ2-2)
CASSLPTGELFF

SEQ ID NO: 639323 - protein, 12 aa, Homo sapiens
  CDR3 for alpha chain variable domain of TCR clone 319662 (TRAV1-1, TRAJ8)
CAGGTGFQKLVF

SEQ ID NO: 639324 - protein, 16 aa, Homo sapiens
  CDR3 for beta chain variable domain of TCR clone 319662 (TRBV7-2, TRBJ2-7)
CASSLDPGGGSGEQYF

SEQ ID NO: 639325 - protein, 14 aa, Homo sapiens
  CDR3 for alpha chain variable domain of TCR clone 319663 (TRAV36/DV7, TRAJ40)
CAVETTSRTYKYIF

SEQ ID NO: 639326 - protein, 13 aa, Homo sapiens
  CDR3 for beta chain variable domain of TCR clone 319663 (TRBV29-1, TRBJ2-1)
CSVEGGRVNEQFF

SEQ ID NO: 639327 - protein, 11 aa, Homo sapiens
  CDR3 for alpha chain variable domain of TCR clone 319664 (TRAV12-3, TRAJ27)
CAMANAVKSTF

SEQ ID NO: 639328 - protein, 14 aa, Homo sapiens
  CDR3 for beta chain variable domain of TCR clone 319664 (TRBV4-1, TRBJ2-2)
CASSQAVNTGELFF

SEQ ID NO: 639329 - protein, 17 aa, Homo sapiens
  CDR3 for alpha chain variable domain of TCR clone 319665 (TRAV36/DV7, TRAJ52)
CAVAQRAGGTSYGKLPF

SEQ ID NO: 639330 - protein, 14 aa, Homo sapiens
  CDR3 for beta chain variable domain of TCR clone 319665 (TRBV20-1, TRBJ1-1)
CSAQTRIGGTEAFF

SEQ ID NO: 639331 - protein, 17 aa, Homo sapiens
  CDR3 for alpha chain variable domain of TCR clone 319666 (TRAV3, TRAJ42)
CAVRDRDYGGSRGNLIF

SEQ ID NO: 639332 - protein, 12 aa, Homo sapiens
  CDR3 for beta chain variable domain of TCR clone 319666 (TRBV11-2, TRBJ2-1)
CASSPGNNEQFF

SEQ ID NO: 639333 - protein, 13 aa, Homo sapiens
  CDR3 for alpha chain variable domain of TCR clone 319667 (TRAV8-3, TRAJ43)
CAVVPYNNNDTRF

SEQ ID NO: 639334 - protein, 16 aa, Homo sapiens
  CDR3 for beta chain variable domain of TCR clone 319667 (TRBV7-2, TRBJ2-5)
CASSPFPTGGEETQYF

SEQ ID NO: 639335 - protein, 12 aa, Homo sapiens
  CDR3 for alpha chain variable domain of TCR clone 319668 (TRAV38-1, TRAJ34)
CAFMKETDKLIF

SEQ ID NO: 639336 - protein, 14 aa, Homo sapiens
  CDR3 for beta chain variable domain of TCR clone 319668 (TRBV25-1, TRBJ1-1)
CASTHLGGNTEAFF

SEQ ID NO: 639337 - protein, 12 aa, Homo sapiens
  CDR3 for alpha chain variable domain of TCR clone 319669 (TRAV12-1, TRAJ40)
CVFYSGTYKYIF

SEQ ID NO: 639338 - protein, 18 aa, Homo sapiens
  CDR3 for beta chain variable domain of TCR clone 319669 (TRBV12-4, TRBJ2-2)
CASSLVAGTQGRTGELFF

SEQ ID NO: 639339 - protein, 13 aa, Homo sapiens
  CDR3 for alpha chain variable domain of TCR clone 319670 (TRAV26-2, TRAJ43)
CILRAVNNNHMRF

SEQ ID NO: 639340 - protein, 16 aa, Homo sapiens
  CDR3 for beta chain variable domain of TCR clone 319670 (TRBV15, TRBJ2-7)
CATSARQARSSYEQYF

SEQ ID NO: 639341 - protein, 15 aa, Homo sapiens
  CDR3 for alpha chain variable domain of TCR clone 319671 (TRAV23/DV6, TRAJ30)
CAASSQESRDDKIIS

SEQ ID NO: 639342 - protein, 13 aa, Homo sapiens
  CDR3 for beta chain variable domain of TCR clone 319671 (TRBV12-4, TRBJ2-7)
CASSPTETYEQYF

SEQ ID NO: 639343 - protein, 14 aa, Homo sapiens
  CDR3 for alpha chain variable domain of TCR clone 319672 (TRAV12-1, TRAJ7)
CVVNPPHGNNRLAF

SEQ ID NO: 639344 - protein, 14 aa, Homo sapiens
  CDR3 for beta chain variable domain of TCR clone 319672 (TRBV28, TRBJ2-7)
CASSLRARGNEQYF

SEQ ID NO: 639345 - protein, 14 aa, Homo sapiens
  CDR3 for alpha chain variable domain of TCR clone 319673 (TRAV13-1, TRAJ35)
CAASKGGFGNVLHC

SEQ ID NO: 639346 - protein, 16 aa, Homo sapiens
  CDR3 for beta chain variable domain of TCR clone 319673 (TRBV2, TRBJ2-7)
CASRKGSLGLVYEQYF

SEQ ID NO: 639347 - protein, 11 aa, Homo sapiens
  CDR3 for alpha chain variable domain of TCR clone 319674 (TRAV2, TRAJ33)
CAVDSNYQLIW

SEQ ID NO: 639348 - protein, 16 aa, Homo sapiens
  CDR3 for beta chain variable domain of TCR clone 319674 (TRBV27, TRBJ2-2)
CASSFRGLVRTGELFF

SEQ ID NO: 639349 - protein, 14 aa, Homo sapiens
  CDR3 for alpha chain variable domain of TCR clone 319675 (TRAV26-1, TRAJ38)
CIVVGAGTNRKLIW

SEQ ID NO: 639350 - protein, 12 aa, Homo sapiens
  CDR3 for beta chain variable domain of TCR clone 319675 (TRBV5-1, TRBJ2-5)
CASSWDQETQYF

SEQ ID NO: 639351 - protein, 12 aa, Homo sapiens
  CDR3 for alpha chain variable domain of TCR clone 319676 (TRAV12-2, TRAJ43)
CAVNVNNNDMRL

SEQ ID NO: 639352 - protein, 17 aa, Homo sapiens
  CDR3 for beta chain variable domain of TCR clone 319676 (TRBV3-1, TRBJ2-2)
CASSQFRDKVDTGELFF

SEQ ID NO: 639353 - protein, 12 aa, Homo sapiens
  CDR3 for alpha chain variable domain of TCR clone 319677 (TRAV8-4, TRAJ43)
CAVSVNNNDMRF

SEQ ID NO: 639354 - protein, 15 aa, Homo sapiens
  CDR3 for beta chain variable domain of TCR clone 319677 (TRBV6-3, TRBJ2-7)
CASSSPGTVFYEQYF

SEQ ID NO: 639355 - protein, 12 aa, Homo sapiens
  CDR3 for alpha chain variable domain of TCR clone 319678 (TRAV12-3, TRAJ17)
CAMTLTGNKQTF

SEQ ID NO: 639356 - protein, 17 aa, Homo sapiens
  CDR3 for beta chain variable domain of TCR clone 319678 (TRBV7-3, TRBJ2-3)
CASSLMKRMRGADTQYF

SEQ ID NO: 639357 - protein, 16 aa, Homo sapiens
  CDR3 for alpha chain variable domain of TCR clone 319679 (TRAV12-2, TRAJ28)
CAVITDSGAGSYQLTF

SEQ ID NO: 639358 - protein, 12 aa, Homo sapiens
  CDR3 for beta chain variable domain of TCR clone 319679 (TRBV11-2, TRBJ2-1)
CASSPGNNEQFF

SEQ ID NO: 639359 - protein, 12 aa, Homo sapiens
  CDR3 for alpha chain variable domain of TCR clone 319680 (TRAV12-2, TRAJ4)
GWPEGGYNKLIF

SEQ ID NO: 639360 - protein, 11 aa, Homo sapiens
  CDR3 for beta chain variable domain of TCR clone 319680 (TRBV11-2, TRBJ2-2)
CASSLPGELFF

SEQ ID NO: 639361 - protein, 16 aa, Homo sapiens
  CDR3 for alpha chain variable domain of TCR clone 319681 (TRAV8-6, TRAJ28)
CAATSKPGAGSYQLTF

SEQ ID NO: 639362 - protein, 16 aa, Homo sapiens
  CDR3 for beta chain variable domain of TCR clone 319681 (TRBV12-4, TRBJ2-5)
CASSWRPSGDLETQYF

SEQ ID NO: 639363 - protein, 14 aa, Homo sapiens
  CDR3 for alpha chain variable domain of TCR clone 319682 (TRAV3, TRAJ40)
CAVRDRRGTYKYIF

SEQ ID NO: 639364 - protein, 15 aa, Homo sapiens
  CDR3 for beta chain variable domain of TCR clone 319682 (TRBV28, TRBJ2-5)
CASSIIAGGRSEQFF

SEQ ID NO: 639365 - protein, 13 aa, Homo sapiens
  CDR3 for alpha chain variable domain of TCR clone 319683 (TRAV2, TRAJ12)
CAVGADSSYKLIF

SEQ ID NO: 639366 - protein, 13 aa, Homo sapiens
  CDR3 for beta chain variable domain of TCR clone 319683 (TRBV20-1, TRBJ2-1)
CSARASPRDEQFF

SEQ ID NO: 639367 - protein, 17 aa, Homo sapiens
  CDR3 for alpha chain variable domain of TCR clone 319684 (TRAV12-3, TRAJ52)
CASPPFAVGTSYGKLTF

SEQ ID NO: 639368 - protein, 16 aa, Homo sapiens
  CDR3 for beta chain variable domain of TCR clone 319684 (TRBV6-5, TRBJ2-5)
CASSSVGRWGRETQYF

SEQ ID NO: 639369 - protein, 20 aa, Homo sapiens
  CDR3 for alpha chain variable domain of TCR clone 319685 (TRAV12-1, TRAJ42)
SSVIQPPTSVKGGSQGNLIF

SEQ ID NO: 639370 - protein, 14 aa, Homo sapiens
  CDR3 for beta chain variable domain of TCR clone 319685 (TRBV2, TRBJ2-7)
CASSLTAGGYEQYF

SEQ ID NO: 639371 - protein, 15 aa, Homo sapiens
  CDR3 for alpha chain variable domain of TCR clone 319686 (TRAV3, TRAJ9)
CAVRARNTGGFETIF

SEQ ID NO: 639372 - protein, 15 aa, Homo sapiens
  CDR3 for beta chain variable domain of TCR clone 319686 (TRBV19, TRBJ2-1)
CASSTGTSSYNEQFF

SEQ ID NO: 639373 - protein, 11 aa, Homo sapiens
  CDR3 for alpha chain variable domain of TCR clone 319687 (TRAV8-4, TRAJ26)
CDGGEGQNFFF

SEQ ID NO: 639374 - protein, 17 aa, Homo sapiens
  CDR3 for beta chain variable domain of TCR clone 319687 (TRBV7-9, TRBJ2-3)
CASSPTVAGDLTDTQYF

SEQ ID NO: 639375 - protein, 13 aa, Homo sapiens
  CDR3 for alpha chain variable domain of TCR clone 319688 (TRAV23/DV6, TRAJ22)
CEPYSGSARQLTF

SEQ ID NO: 639376 - protein, 15 aa, Homo sapiens
  CDR3 for beta chain variable domain of TCR clone 319688 (TRBV11-2, TRBJ1-6)
CASSLDPWAVSPLHF

SEQ ID NO: 639377 - protein, 11 aa, Homo sapiens
  CDR3 for alpha chain variable domain of TCR clone 319689 (TRAV35, TRAJ34)
CWARNTDKLIF

SEQ ID NO: 639378 - protein, 13 aa, Homo sapiens
  CDR3 for beta chain variable domain of TCR clone 319689 (TRBV20-1, TRBJ1-5)
CSATAAGGQPQHF

SEQ ID NO: 639379 - protein, 13 aa, Homo sapiens
  CDR3 for alpha chain variable domain of TCR clone 319690 (TRAV17, TRAJ22)
CAHHSGSARQLTF

SEQ ID NO: 639380 - protein, 13 aa, Homo sapiens
  CDR3 for beta chain variable domain of TCR clone 319690 (TRBV20-1, TRBJ2-5)
CSAATELQETQYF

SEQ ID NO: 639381 - protein, 11 aa, Homo sapiens
  CDR3 for alpha chain variable domain of TCR clone 319691 (TRAV2, TRAJ21)
CAVFNFNKFYF

SEQ ID NO: 639382 - protein, 13 aa, Homo sapiens
  CDR3 for beta chain variable domain of TCR clone 319691 (TRBV6-3, TRBJ2-1)
CASSYDNYNEQFF

SEQ ID NO: 639383 - protein, 13 aa, Homo sapiens
  CDR3 for alpha chain variable domain of TCR clone 319692 (TRAV16, TRAJ10)
CAPAREEETNSPL

SEQ ID NO: 639384 - protein, 19 aa, Homo sapiens
  CDR3 for beta chain variable domain of TCR clone 319692 (TRBV25-1, TRBJ2-2)
CAILVYRVDRGRKTGELFF

SEQ ID NO: 639385 - protein, 14 aa, Homo sapiens
  CDR3 for alpha chain variable domain of TCR clone 319693 (TRAV12-1, TRAJ3)
CVVILYSSASKIIF

SEQ ID NO: 639386 - protein, 18 aa, Homo sapiens
  CDR3 for beta chain variable domain of TCR clone 319693 (TRBV12-4, TRBJ2-2)
CASSRSGGAMPNTGELFF

SEQ ID NO: 639387 - protein, 13 aa, Homo sapiens
  CDR3 for alpha chain variable domain of TCR clone 319694 (TRAV30, TRAJ24)
CGTATDSWGKLQF

SEQ ID NO: 639388 - protein, 15 aa, Homo sapiens
  CDR3 for beta chain variable domain of TCR clone 319694 (TRBV19, TRBJ1-1)
CASTSGQIQNTEAFF

SEQ ID NO: 639389 - protein, 15 aa, Homo sapiens
  CDR3 for alpha chain variable domain of TCR clone 319695 (TRAV8-4, TRAJ40)
CAVSDDTSGTYKYLF

SEQ ID NO: 639390 - protein, 11 aa, Homo sapiens
  CDR3 for beta chain variable domain of TCR clone 319695 (TRBV19, TRBJ1-2)
CASSISSGYTF

SEQ ID NO: 639391 - protein, 15 aa, Homo sapiens
  CDR3 for alpha chain variable domain of TCR clone 319696 (TRAV4, TRAJ28)
TTAFLSEAGSYQLTF

SEQ ID NO: 639392 - protein, 14 aa, Homo sapiens
  CDR3 for beta chain variable domain of TCR clone 319696 (TRBV7-9, TRBJ2-5)
CASSLDTAQETQYF

SEQ ID NO: 639393 - protein, 12 aa, Homo sapiens
  CDR3 for alpha chain variable domain of TCR clone 319697 (TRAV2, TRAJ31)
CAVEDNNARPMF

SEQ ID NO: 639394 - protein, 14 aa, Homo sapiens
  CDR3 for beta chain variable domain of TCR clone 319697 (TRBV28, TRBJ1-5)
CASSRTGLNQPQHF

SEQ ID NO: 639395 - protein, 13 aa, Homo sapiens
  CDR3 for alpha chain variable domain of TCR clone 319698 (TRAV36/DV7, TRAJ49)
CAVEANTGNQFYF

SEQ ID NO: 639396 - protein, 12 aa, Homo sapiens
  CDR3 for beta chain variable domain of TCR clone 319698 (TRBV24-1, TRBJ2-1)
CATRDGNNEQFF

SEQ ID NO: 639397 - protein, 15 aa, Homo sapiens
  CDR3 for alpha chain variable domain of TCR clone 319699 (TRAV8-4, TRAJ3)
CAVTGENLVQQCFQD

SEQ ID NO: 639398 - protein, 16 aa, Homo sapiens
  CDR3 for beta chain variable domain of TCR clone 319699 (TRBV4-2, TRBJ1-1)
CASSQAGFGMNTEVFF

SEQ ID NO: 639399 - protein, 14 aa, Homo sapiens
  CDR3 for alpha chain variable domain of TCR clone 319700 (TRAV12-3, TRAJ10)
SHLPLTGGGNKLTF

SEQ ID NO: 639400 - protein, 15 aa, Homo sapiens
  CDR3 for beta chain variable domain of TCR clone 319700 (TRBV28, TRBJ2-3)
CAPTFRDWSTDTQYF

SEQ ID NO: 639401 - protein, 11 aa, Homo sapiens
  CDR3 for alpha chain variable domain of TCR clone 319701 (TRAV13-2, TRAJ43)
CAERGNNDMRF

SEQ ID NO: 639402 - protein, 13 aa, Homo sapiens
  CDR3 for beta chain variable domain of TCR clone 319701 (TRBV7-3, TRBJ2-1)
CASSLDSYNEQFF

SEQ ID NO: 639403 - protein, 12 aa, Homo sapiens
  CDR3 for alpha chain variable domain of TCR clone 319702 (TRAV13-1, TRAJ21)
CAAKEGFNKFCF

SEQ ID NO: 639404 - protein, 14 aa, Homo sapiens
  CDR3 for beta chain variable domain of TCR clone 319702 (TRBV23-1, TRBJ2-5)
CASSFLRSQETQYF

SEQ ID NO: 639405 - protein, 17 aa, Homo sapiens
  CDR3 for alpha chain variable domain of TCR clone 319703 (TRAV38-1, TRAJ28)
CAFMKPTSGAGSCQLTF

SEQ ID NO: 639406 - protein, 15 aa, Homo sapiens
  CDR3 for beta chain variable domain of TCR clone 319703 (TRBV5-1, TRBJ2-4)
CASSLGGGGSYIQYF

SEQ ID NO: 639407 - protein, 12 aa, Homo sapiens
  CDR3 for alpha chain variable domain of TCR clone 319704 (TRAV13-1, TRAJ49)
CAASPMGNQFYF

SEQ ID NO: 639408 - protein, 13 aa, Homo sapiens
  CDR3 for beta chain variable domain of TCR clone 319704 (TRBV24-1, TRBJ2-2)
CATSDWSTGELFC

SEQ ID NO: 639409 - protein, 14 aa, Homo sapiens
  CDR3 for alpha chain variable domain of TCR clone 319705 (TRAV12-2, TRAJ13)
CAVKKTGGYQKVTF

SEQ ID NO: 639410 - protein, 14 aa, Homo sapiens
  CDR3 for beta chain variable domain of TCR clone 319705 (TRBV7-3, TRBJ2-7)
CASSLKADSYEQYF

SEQ ID NO: 639411 - protein, 14 aa, Homo sapiens
  CDR3 for alpha chain variable domain of TCR clone 319706 (TRAV1-2, TRAJ15)
CAVRDRQAGTALIF

SEQ ID NO: 639412 - protein, 14 aa, Homo sapiens
  CDR3 for beta chain variable domain of TCR clone 319706 (TRBV9, TRBJ2-1)
CASSVDPRGKEQFF

SEQ ID NO: 639413 - protein, 13 aa, Homo sapiens
  CDR3 for alpha chain variable domain of TCR clone 319707 (TRAV35, TRAJ43)
CAGYPYNNNDMRF

SEQ ID NO: 639414 - protein, 17 aa, Homo sapiens
  CDR3 for beta chain variable domain of TCR clone 319707 (TRBV20-1, TRBJ2-1)
CSASSSGLAGSYNEQFF

SEQ ID NO: 639415 - protein, 15 aa, Homo sapiens
  CDR3 for alpha chain variable domain of TCR clone 319708 (TRAV12-1, TRAJ5)
CVVNMLETGRRARTF

SEQ ID NO: 639416 - protein, 12 aa, Homo sapiens
  CDR3 for beta chain variable domain of TCR clone 319708 (TRBV11-2, TRBJ2-2)
CASSLGGGELFF

SEQ ID NO: 639417 - protein, 14 aa, Homo sapiens
  CDR3 for alpha chain variable domain of TCR clone 319709 (TRAV2, TRAJ9)
CAVEDRSGGFKNIF

SEQ ID NO: 639418 - protein, 12 aa, Homo sapiens
  CDR3 for beta chain variable domain of TCR clone 319709 (TRBV7-9, TRBJ2-7)
CASSLEGYEQYF

SEQ ID NO: 639419 - protein, 14 aa, Homo sapiens
  CDR3 for alpha chain variable domain of TCR clone 319710 (TRAV12-1, TRAJ30)
CVVNIGGRDDKIIF

SEQ ID NO: 639420 - protein, 15 aa, Homo sapiens
  CDR3 for beta chain variable domain of TCR clone 319710 (TRBV18, TRBJ1-2)
CATSPSNTPNYGDTF

SEQ ID NO: 639421 - protein, 14 aa, Homo sapiens
  CDR3 for alpha chain variable domain of TCR clone 319711 (TRAV27, TRAJ58)
CAGDGETSGSRLTF

SEQ ID NO: 639422 - protein, 16 aa, Homo sapiens
  CDR3 for beta chain variable domain of TCR clone 319711 (TRBV5-1, TRBJ2-3)
CASSLGLAVYTDTQYF

SEQ ID NO: 639423 - protein, 15 aa, Homo sapiens
  CDR3 for alpha chain variable domain of TCR clone 319712 (TRAV13-1, TRAJ44)
CAASRNPGTASKLTF

SEQ ID NO: 639424 - protein, 14 aa, Homo sapiens
  CDR3 for beta chain variable domain of TCR clone 319712 (TRBV11-2, TRBJ1-2)
CASSLYRGNYGYTF

SEQ ID NO: 639425 - protein, 15 aa, Homo sapiens
  CDR3 for alpha chain variable domain of TCR clone 319713 (TRAV26-1, TRAJ39)
CIVRVARNAGNMLTF

SEQ ID NO: 639426 - protein, 18 aa, Homo sapiens
  CDR3 for beta chain variable domain of TCR clone 319713 (TRBV7-6, TRBJ2-1)
CASSPRTSGMSSYNEQFF

SEQ ID NO: 639427 - protein, 13 aa, Homo sapiens
  CDR3 for alpha chain variable domain of TCR clone 319714 (TRAV2, TRAJ41)
CAVEEYSGDALNF

SEQ ID NO: 639428 - protein, 15 aa, Homo sapiens
  CDR3 for beta chain variable domain of TCR clone 319714 (TRBV12-4, TRBJ1-6)
CASSLLGGSNSPLHF

SEQ ID NO: 639429 - protein, 14 aa, Homo sapiens
  CDR3 for alpha chain variable domain of TCR clone 319715 (TRAV8-1, TRAJ27)
CAVNVGTNAGKSTF

SEQ ID NO: 639430 - protein, 13 aa, Homo sapiens
  CDR3 for beta chain variable domain of TCR clone 319715 (TRBV7-9, TRBJ1-2)
CASSLKQNYGYTF

SEQ ID NO: 639431 - protein, 15 aa, Homo sapiens
  CDR3 for alpha chain variable domain of TCR clone 319716 (TRAV1-2, TRAJ35)
CAVRDPGGFGNVLHC

SEQ ID NO: 639432 - protein, 14 aa, Homo sapiens
  CDR3 for beta chain variable domain of TCR clone 319716 (TRBV5-1, TRBJ2-1)
CASSQDDRFDEQFF

SEQ ID NO: 639433 - protein, 12 aa, Homo sapiens
  CDR3 for alpha chain variable domain of TCR clone 319717 (TRAV12-3, TRAJ20)
CAMVRGDYKLSF

SEQ ID NO: 639434 - protein, 13 aa, Homo sapiens
  CDR3 for beta chain variable domain of TCR clone 319717 (TRBV23-1, TRBJ1-4)
CASRGKFIEKLFF

SEQ ID NO: 639435 - protein, 15 aa, Homo sapiens
  CDR3 for alpha chain variable domain of TCR clone 319718 (TRAV35, TRAJ40)
CAGQLGTSGTYKYIF

SEQ ID NO: 639436 - protein, 15 aa, Homo sapiens
  CDR3 for beta chain variable domain of TCR clone 319718 (TRBV25-1, TRBJ2-5)
CASSDTGTHQETQYF

SEQ ID NO: 639437 - protein, 11 aa, Homo sapiens
  CDR3 for alpha chain variable domain of TCR clone 319719 (TRAV4, TRAJ23)
CLVAPGGKLIF

SEQ ID NO: 639438 - protein, 15 aa, Homo sapiens
  CDR3 for beta chain variable domain of TCR clone 319719 (TRBV7-2, TRBJ2-1)
CASSFQAHEYNEQFF

SEQ ID NO: 639439 - protein, 14 aa, Homo sapiens
  CDR3 for alpha chain variable domain of TCR clone 319720 (TRAV13-1, TRAJ9)
CAASVLTGGFKTIF

SEQ ID NO: 639440 - protein, 13 aa, Homo sapiens
  CDR3 for beta chain variable domain of TCR clone 319720 (TRBV20-1, TRBJ1-1)
CSAGTVGNTEAFF

SEQ ID NO: 639441 - protein, 14 aa, Homo sapiens
  CDR3 for alpha chain variable domain of TCR clone 319721 (TRAV12-3, TRAJ10)
SHLPLTGGGNKLTF

SEQ ID NO: 639442 - protein, 17 aa, Homo sapiens
  CDR3 for beta chain variable domain of TCR clone 319721 (TRBV28, TRBJ2-5)
CASSTPEGDALQETQFF

SEQ ID NO: 639443 - protein, 20 aa, Homo sapiens
  CDR3 for alpha chain variable domain of TCR clone 319722 (TRAV21, TRAJ30)
CAVRRRMTRSSLETGHDFIF

SEQ ID NO: 639444 - protein, 15 aa, Homo sapiens
  CDR3 for beta chain variable domain of TCR clone 319722 (TRBV6-6, TRBJ2-7)
CASSYSYGGSYEQYF

SEQ ID NO: 639445 - protein, 16 aa, Homo sapiens
  CDR3 for alpha chain variable domain of TCR clone 319723 (TRAV26-1, TRAJ37)
CIYARHGSSNTGKLIL

SEQ ID NO: 639446 - protein, 16 aa, Homo sapiens
  CDR3 for beta chain variable domain of TCR clone 319723 (TRBV19, TRBJ2-4)
CATGGLAGGTKNMQYF

SEQ ID NO: 639447 - protein, 18 aa, Homo sapiens
  CDR3 for alpha chain variable domain of TCR clone 319724 (TRAV13-1, TRAJ52)
CAASKRSAGGTSYGKLTF

SEQ ID NO: 639448 - protein, 13 aa, Homo sapiens
  CDR3 for beta chain variable domain of TCR clone 319724 (TRBV2, TRBJ1-2)
CASTWTGEDGYTF

SEQ ID NO: 639449 - protein, 15 aa, Homo sapiens
  CDR3 for alpha chain variable domain of TCR clone 319725 (TRAV23/DV6, TRAJ28)
CAALLASSGAGSYQL

SEQ ID NO: 639450 - protein, 15 aa, Homo sapiens
  CDR3 for beta chain variable domain of TCR clone 319725 (TRBV7-2, TRBJ2-1)
CASSLVAGRYNEQFF

SEQ ID NO: 639451 - protein, 17 aa, Homo sapiens
  CDR3 for alpha chain variable domain of TCR clone 319726 (TRAV22, TRAJ52)
CAVERRAGGTSYGKLTF

SEQ ID NO: 639452 - protein, 14 aa, Homo sapiens
  CDR3 for beta chain variable domain of TCR clone 319726 (TRBV27, TRBJ2-1)
CASSRRGGFNEQFF

SEQ ID NO: 639453 - protein, 14 aa, Homo sapiens
  CDR3 for alpha chain variable domain of TCR clone 319727 (TRAV17, TRAJ16)
CATADFLDGQKLLF

SEQ ID NO: 639454 - protein, 14 aa, Homo sapiens
  CDR3 for beta chain variable domain of TCR clone 319727 (TRBV19, TRBJ2-1)
CASSPGLAPNEQFF

SEQ ID NO: 639455 - protein, 18 aa, Homo sapiens
  CDR3 for alpha chain variable domain of TCR clone 319728 (TRAV21, TRAJ52)
CAVRPSPAGGTSYGKLTF

SEQ ID NO: 639456 - protein, 13 aa, Homo sapiens
  CDR3 for beta chain variable domain of TCR clone 319728 (TRBV28, TRBJ1-5)
CASRMTGDQPQHF

SEQ ID NO: 639457 - protein, 13 aa, Homo sapiens
  CDR3 for alpha chain variable domain of TCR clone 319729 (TRAV25, TRAJ30)
CAGRVDRDDKIIF

SEQ ID NO: 639458 - protein, 18 aa, Homo sapiens
  CDR3 for beta chain variable domain of TCR clone 319729 (TRBV11-2, TRBJ2-3)
CASSLGGASRGAPNTQYF

SEQ ID NO: 639459 - protein, 16 aa, Homo sapiens
  CDR3 for alpha chain variable domain of TCR clone 319730 (TRAV3, TRAJ37)
CAVSGKGSGNTGKLIF

SEQ ID NO: 639460 - protein, 21 aa, Homo sapiens
  CDR3 for beta chain variable domain of TCR clone 319730 (TRBV15, TRBJ2-1)
AWGTQPCTCVPPAEVDTARFF

SEQ ID NO: 639461 - protein, 17 aa, Homo sapiens
  CDR3 for alpha chain variable domain of TCR clone 319731 (TRAV3, TRAJ12)
CAVRDGGRMDSSYKLIC

SEQ ID NO: 639462 - protein, 12 aa, Homo sapiens
  CDR3 for beta chain variable domain of TCR clone 319731 (TRBV11-2, TRBJ2-2)
CASSLGGGELFF

SEQ ID NO: 639463 - protein, 16 aa, Homo sapiens
  CDR3 for alpha chain variable domain of TCR clone 319732 (TRAV26-2, TRAJ57)
CILRDVGSGGSEKLGF

SEQ ID NO: 639464 - protein, 13 aa, Homo sapiens
  CDR3 for beta chain variable domain of TCR clone 319732 (TRBV18, TRBJ2-3)
CASSPGVKDTQYF

SEQ ID NO: 639465 - protein, 16 aa, Homo sapiens
  CDR3 for alpha chain variable domain of TCR clone 319733 (TRAV12-3, TRAJ45)
CAMGWGSGGGADGLTF

SEQ ID NO: 639466 - protein, 15 aa, Homo sapiens
  CDR3 for beta chain variable domain of TCR clone 319733 (TRBV3-1, TRBJ1-2)
CVSSHPGTPGYGYTF

SEQ ID NO: 639467 - protein, 14 aa, Homo sapiens
  CDR3 for alpha chain variable domain of TCR clone 319734 (TRAV26-2, TRAJ31)
CILIPGNNNARLMF

SEQ ID NO: 639468 - protein, 16 aa, Homo sapiens
  CDR3 for beta chain variable domain of TCR clone 319734 (TRBV11-1, TRBJ1-1)
CATSPRDRAFNTEAFF

SEQ ID NO: 639469 - protein, 15 aa, Homo sapiens
  CDR3 for alpha chain variable domain of TCR clone 319735 (TRAV12-3, TRAJ6)
CAMSATTGGSYIPTF

SEQ ID NO: 639470 - protein, 17 aa, Homo sapiens
  CDR3 for beta chain variable domain of TCR clone 319735 (TRBV5-1, TRBJ2-7)
CASSLNGGLRGSSTSGR

SEQ ID NO: 639471 - protein, 13 aa, Homo sapiens
  CDR3 for alpha chain variable domain of TCR clone 319736 (TRAV12-3, TRAJ9)
CAMSGGGGFKTIF

SEQ ID NO: 639472 - protein, 15 aa, Homo sapiens
  CDR3 for beta chain variable domain of TCR clone 319736 (TRBV20-1, TRBJ2-1)
CSARVGGVGGLEQFF

SEQ ID NO: 639473 - protein, 15 aa, Homo sapiens
  CDR3 for alpha chain variable domain of TCR clone 319737 (TRAV26-1, TRAJ22)
CIVRVSFWFVKATDL

SEQ ID NO: 639474 - protein, 13 aa, Homo sapiens
  CDR3 for beta chain variable domain of TCR clone 319737 (TRBV7-9, TRBJ1-2)
CASSLKQNYGYTF

SEQ ID NO: 639475 - protein, 17 aa, Homo sapiens
  CDR3 for alpha chain variable domain of TCR clone 319738 (TRAV13-1, TRAJ42)
CAASELWRKSRKSHLWK

SEQ ID NO: 639476 - protein, 15 aa, Homo sapiens
  CDR3 for beta chain variable domain of TCR clone 319738 (TRBV20-1, TRBJ2-1)
CSASSAGSSYNEQFF

SEQ ID NO: 639477 - protein, 16 aa, Homo sapiens
  CDR3 for alpha chain variable domain of TCR clone 319739 (TRAV21, TRAJ37)
CAVRTAGCSNTGKLIF

SEQ ID NO: 639478 - protein, 13 aa, Homo sapiens
  CDR3 for beta chain variable domain of TCR clone 319739 (TRBV7-9, TRBJ2-5)
CASLPSGRETQYF

SEQ ID NO: 639479 - protein, 13 aa, Homo sapiens
  CDR3 for alpha chain variable domain of TCR clone 319740 (TRAV27, TRAJ41)
CAGEGNSGYALNF

SEQ ID NO: 639480 - protein, 14 aa, Homo sapiens
  CDR3 for beta chain variable domain of TCR clone 319740 (TRBV25-1, TRBJ1-1)
CASTHLGGNTQAFF

SEQ ID NO: 639481 - protein, 11 aa, Homo sapiens
  CDR3 for alpha chain variable domain of TCR clone 319741 (TRAV27, TRAJ20)
SAGADDYKLSF

SEQ ID NO: 639482 - protein, 12 aa, Homo sapiens
  CDR3 for beta chain variable domain of TCR clone 319741 (TRBV2, TRBJ1-1)
CATPSRGTEAFF

SEQ ID NO: 639483 - protein, 17 aa, Homo sapiens
  CDR3 for alpha chain variable domain of TCR clone 319742 (TRAV3, TRAJ6)
CAVRDGPRAGGSYIPTF

SEQ ID NO: 639484 - protein, 16 aa, Homo sapiens
  CDR3 for beta chain variable domain of TCR clone 319742 (TRBV5-1, TRBJ2-2)
CASSFPAGANTGELFC

SEQ ID NO: 639485 - protein, 14 aa, Homo sapiens
  CDR3 for alpha chain variable domain of TCR clone 319743 (TRAV8-3, TRAJ6)
CAMGASGGSYIPTF

SEQ ID NO: 639486 - protein, 17 aa, Homo sapiens
  CDR3 for beta chain variable domain of TCR clone 319743 (TRBV18, TRBJ2-2)
CASSPSDPWQNTGELFF

SEQ ID NO: 639487 - protein, 15 aa, Homo sapiens
  CDR3 for alpha chain variable domain of TCR clone 319744 (TRAV14/DV4, TRAJ12)
CAMTTPVDSSYKLIF

SEQ ID NO: 639488 - protein, 13 aa, Homo sapiens
  CDR3 for beta chain variable domain of TCR clone 319744 (TRBV10-3, TRBJ2-7)
CASKLAVNYEQYF

SEQ ID NO: 639489 - protein, 12 aa, Homo sapiens
  CDR3 for alpha chain variable domain of TCR clone 319745 (TRAV12-1, TRAJ40)
CVGVSGTYKYIF

SEQ ID NO: 639490 - protein, 12 aa, Homo sapiens
  CDR3 for beta chain variable domain of TCR clone 319745 (TRBV11-2, TRBJ2-2)
CASSLPTGELFF

SEQ ID NO: 639491 - protein, 14 aa, Homo sapiens
  CDR3 for alpha chain variable domain of TCR clone 319746 (TRAV13-1, TRAJ35)
CAASKGGFGNVLHC

SEQ ID NO: 639492 - protein, 13 aa, Homo sapiens
  CDR3 for beta chain variable domain of TCR clone 319746 (TRBV7-3, TRBJ1-1)
CASSQEWGAEAVF

SEQ ID NO: 639493 - protein, 14 aa, Homo sapiens
  CDR3 for alpha chain variable domain of TCR clone 319747 (TRAV8-1, TRAJ34)
CAVNPSYNTDKLIF

SEQ ID NO: 639494 - protein, 16 aa, Homo sapiens
  CDR3 for beta chain variable domain of TCR clone 319747 (TRBV7-2, TRBJ2-6)
CASSLAGRSGAKLLTF

SEQ ID NO: 639495 - protein, 13 aa, Homo sapiens
  CDR3 for alpha chain variable domain of TCR clone 319748 (TRAV1-2, TRAJ33)
CAVSEDSNYQLIW

SEQ ID NO: 639496 - protein, 13 aa, Homo sapiens
  CDR3 for beta chain variable domain of TCR clone 319748 (TRBV12-4, TRBJ2-2)
CASSITGSGELFF

SEQ ID NO: 639497 - protein, 15 aa, Homo sapiens
  CDR3 for alpha chain variable domain of TCR clone 319749 (TRAV26-1, TRAJ15)
CIVRATNQAGTALIF

SEQ ID NO: 639498 - protein, 15 aa, Homo sapiens
  CDR3 for beta chain variable domain of TCR clone 319749 (TRBV20-1, TRBJ1-1)
CSARSAATSNTKAFF

SEQ ID NO: 639499 - protein, 18 aa, Homo sapiens
  CDR3 for alpha chain variable domain of TCR clone 319750 (TRAV26-1, TRAJ21)
CCVLFIVRPPYNFNKFYF

SEQ ID NO: 639500 - protein, 14 aa, Homo sapiens
  CDR3 for beta chain variable domain of TCR clone 319750 (TRBV19, TRBJ2-1)
CASPTFVLSGEQFF

SEQ ID NO: 639501 - protein, 15 aa, Homo sapiens
  CDR3 for alpha chain variable domain of TCR clone 319751 (TRAV26-1, TRAJ39)
CIVRVASNAGNMVTF

SEQ ID NO: 639502 - protein, 14 aa, Homo sapiens
  CDR3 for beta chain variable domain of TCR clone 319751 (TRBV7-6, TRBJ2-3)
CASSVAGGTDTQYF

SEQ ID NO: 639503 - protein, 12 aa, Homo sapiens
  CDR3 for alpha chain variable domain of TCR clone 319752 (TRAV3, TRAJ20)
CAVRDPDYKLSF

SEQ ID NO: 639504 - protein, 16 aa, Homo sapiens
  CDR3 for beta chain variable domain of TCR clone 319752 (TRBV20-1, TRBJ1-4)
CNAPGQGLLTNEKLFF

SEQ ID NO: 639505 - protein, 13 aa, Homo sapiens
  CDR3 for alpha chain variable domain of TCR clone 319753 (TRAV3, TRAJ8)
CAVRCTGFQKLVF

SEQ ID NO: 639506 - protein, 15 aa, Homo sapiens
  CDR3 for beta chain variable domain of TCR clone 319753 (TRBV20-1, TRBJ2-7)
CSARDRVSGMDEQYF

SEQ ID NO: 639507 - protein, 13 aa, Homo sapiens
  CDR3 for alpha chain variable domain of TCR clone 319754 (TRAV12-2, TRAJ20)
CAVYPSNDYKLSF

SEQ ID NO: 639508 - protein, 15 aa, Homo sapiens
  CDR3 for beta chain variable domain of TCR clone 319754 (TRBV5-1, TRBJ2-1)
CASSPPRAPYNEQFF

SEQ ID NO: 639509 - protein, 11 aa, Homo sapiens
  CDR3 for alpha chain variable domain of TCR clone 319755 (TRAV12-2, TRAJ29)
CAVTLRSPLIF

SEQ ID NO: 639510 - protein, 16 aa, Homo sapiens
  CDR3 for beta chain variable domain of TCR clone 319755 (TRBV5-1, TRBJ2-2)
CAGSLGGTGSTGELFF

SEQ ID NO: 639511 - protein, 16 aa, Homo sapiens
  CDR3 for alpha chain variable domain of TCR clone 319756 (TRAV30, TRAJ24)
CGTEIVDADSWGKFQF

SEQ ID NO: 639512 - protein, 13 aa, Homo sapiens
  CDR3 for beta chain variable domain of TCR clone 319756 (TRBV10-3, TRBJ2-7)
CASKLAVNYKQYF

SEQ ID NO: 639513 - protein, 14 aa, Homo sapiens
  CDR3 for alpha chain variable domain of TCR clone 319757 (TRAV26-1, TRAJ38)
CIADNAGNNRKLIW

SEQ ID NO: 639514 - protein, 15 aa, Homo sapiens
  CDR3 for beta chain variable domain of TCR clone 319757 (TRBV15, TRBJ2-1)
CATSRADRGHNEQFF

SEQ ID NO: 639515 - protein, 11 aa, Homo sapiens
  CDR3 for alpha chain variable domain of TCR clone 319758 (TRAV27, TRAJ40)
SLTSGTYKYIF

SEQ ID NO: 639516 - protein, 12 aa, Homo sapiens
  CDR3 for beta chain variable domain of TCR clone 319758 (TRBV18, TRBJ2-3)
CQLNQKTDTQYF

SEQ ID NO: 639517 - protein, 13 aa, Homo sapiens
  CDR3 for alpha chain variable domain of TCR clone 319759 (TRAV26-1, TRAJ34)
CIVRGHNTDKLIF

SEQ ID NO: 639518 - protein, 14 aa, Homo sapiens
  CDR3 for beta chain variable domain of TCR clone 319759 (TRBV20-1, TRBJ2-2)
CSAPDTANTGELFF

SEQ ID NO: 639519 - protein, 12 aa, Homo sapiens
  CDR3 for alpha chain variable domain of TCR clone 319760 (TRAV25, TRAJ29)
CAGHSGNTPLVF

SEQ ID NO: 639520 - protein, 16 aa, Homo sapiens
  CDR3 for beta chain variable domain of TCR clone 319760 (TRBV12-5, TRBJ2-5)
CASGPRTSGNQETQYF

SEQ ID NO: 639521 - protein, 16 aa, Homo sapiens
  CDR3 for alpha chain variable domain of TCR clone 319761 (TRAV21, TRAJ37)
CAVRPRGSSSTGKLIF

SEQ ID NO: 639522 - protein, 16 aa, Homo sapiens
  CDR3 for beta chain variable domain of TCR clone 319761 (TRBV7-9, TRBJ1-2)
CASSLGFSSGEDGYTF

SEQ ID NO: 639523 - protein, 14 aa, Homo sapiens
  CDR3 for alpha chain variable domain of TCR clone 319762 (TRAV1-2, TRAJ16)
CAVNRFSDGLKLLF

SEQ ID NO: 639524 - protein, 13 aa, Homo sapiens
  CDR3 for beta chain variable domain of TCR clone 319762 (TRBV11-2, TRBJ2-1)
CASSLGLAGGRFF

SEQ ID NO: 639525 - protein, 12 aa, Homo sapiens
  CDR3 for alpha chain variable domain of TCR clone 319763 (TRAV13-1, TRAJ49)
CAASIWGNQFYF

SEQ ID NO: 639526 - protein, 15 aa, Homo sapiens
  CDR3 for beta chain variable domain of TCR clone 319763 (TRBV6-3, TRBJ2-7)
CASSSPGTVFYEQYF

SEQ ID NO: 639527 - protein, 14 aa, Homo sapiens
  CDR3 for alpha chain variable domain of TCR clone 319764 (TRAV35, TRAJ50)
CAGHRKTSYDKVIF

SEQ ID NO: 639528 - protein, 14 aa, Homo sapiens
  CDR3 for beta chain variable domain of TCR clone 319764 (TRBV19, TRBJ2-5)
CASSMTGQQETQYF

SEQ ID NO: 639529 - protein, 15 aa, Homo sapiens
  CDR3 for alpha chain variable domain of TCR clone 319765 (TRAV3, TRAJ12)
CAVRDIRDSSSKLIF

SEQ ID NO: 639530 - protein, 15 aa, Homo sapiens
  CDR3 for beta chain variable domain of TCR clone 319765 (TRBV27, TRBJ2-7)
CASSLRNEQGYEQYF

SEQ ID NO: 639531 - protein, 14 aa, Homo sapiens
  CDR3 for alpha chain variable domain of TCR clone 319766 (TRAV29/DV5, TRAJ36)
CAARRKTGANNLSF

SEQ ID NO: 639532 - protein, 15 aa, Homo sapiens
  CDR3 for beta chain variable domain of TCR clone 319766 (TRBV19, TRBJ1-6)
CASSTQGAVGSPLHF

SEQ ID NO: 639533 - protein, 13 aa, Homo sapiens
  CDR3 for alpha chain variable domain of TCR clone 319767 (TRAV21, TRAJ20)
CAVGLRVDYKLSF

SEQ ID NO: 639534 - protein, 13 aa, Homo sapiens
  CDR3 for beta chain variable domain of TCR clone 319767 (TRBV6-1, TRBJ1-1)
CASSRQGNIEAFF

SEQ ID NO: 639535 - protein, 14 aa, Homo sapiens
  CDR3 for alpha chain variable domain of TCR clone 319768 (TRAV1-1, TRAJ27)
CAVIYNTNAGKSTF

SEQ ID NO: 639536 - protein, 13 aa, Homo sapiens
  CDR3 for beta chain variable domain of TCR clone 319768 (TRBV27, TRBJ2-1)
CASRTLGVGEQFF

SEQ ID NO: 639537 - protein, 13 aa, Homo sapiens
  CDR3 for alpha chain variable domain of TCR clone 319769 (TRAV13-2, TRAJ16)
CADARTDGQKLLF

SEQ ID NO: 639538 - protein, 15 aa, Homo sapiens
  CDR3 for beta chain variable domain of TCR clone 319769 (TRBV29-1, TRBJ2-1)
CSVEAPRGSPNEQFF

SEQ ID NO: 639539 - protein, 10 aa, Homo sapiens
  CDR3 for alpha chain variable domain of TCR clone 319770 (TRAV16, TRAJ22)
SAMYLRQLTF

SEQ ID NO: 639540 - protein, 15 aa, Homo sapiens
  CDR3 for beta chain variable domain of TCR clone 319770 (TRBV11-1, TRBJ1-6)
CASSSPGRGNSPLHF

SEQ ID NO: 639541 - protein, 16 aa, Homo sapiens
  CDR3 for alpha chain variable domain of TCR clone 319771 (TRAV38-1, TRAJ42)
CAFRLVRGGSQGNRIF

SEQ ID NO: 639542 - protein, 15 aa, Homo sapiens
  CDR3 for beta chain variable domain of TCR clone 319771 (TRBV7-2, TRBJ1-2)
CASSITWTGNYGYTF

SEQ ID NO: 639543 - protein, 14 aa, Homo sapiens
  CDR3 for alpha chain variable domain of TCR clone 319772 (TRAV16, TRAJ37)
CALDISGNTGKLIF

SEQ ID NO: 639544 - protein, 14 aa, Homo sapiens
  CDR3 for beta chain variable domain of TCR clone 319772 (TRBV7-2, TRBJ2-5)
CASSPRGSSETQYF

SEQ ID NO: 639545 - protein, 15 aa, Homo sapiens
  CDR3 for alpha chain variable domain of TCR clone 319773 (TRAV27, TRAJ45)
CRSPHSGGGADGLTF

SEQ ID NO: 639546 - protein, 12 aa, Homo sapiens
  CDR3 for beta chain variable domain of TCR clone 319773 (TRBV24-1, TRBJ2-7)
CATSDPGYEQYF

SEQ ID NO: 639547 - protein, 17 aa, Homo sapiens
  CDR3 for alpha chain variable domain of TCR clone 319774 (TRAV8-6, TRAJ58)
CAVSSWVGETSGSRLTF

SEQ ID NO: 639548 - protein, 16 aa, Homo sapiens
  CDR3 for beta chain variable domain of TCR clone 319774 (TRBV7-2, TRBJ2-7)
CASSFPLAGGPLEQYF

SEQ ID NO: 639549 - protein, 18 aa, Homo sapiens
  CDR3 for alpha chain variable domain of TCR clone 319775 (TRAV13-1, TRAJ52)
CAAKNPNAGGTSYGKLTF

SEQ ID NO: 639550 - protein, 15 aa, Homo sapiens
  CDR3 for beta chain variable domain of TCR clone 319775 (TRBV7-2, TRBJ2-1)
CASSLVGSSYNEQFF

SEQ ID NO: 639551 - protein, 15 aa, Homo sapiens
  CDR3 for alpha chain variable domain of TCR clone 319776 (TRAV26-1, TRAJ56)
CIVRVATGAKSKLTF

SEQ ID NO: 639552 - protein, 15 aa, Homo sapiens
  CDR3 for beta chain variable domain of TCR clone 319776 (TRBV27, TRBJ2-7)
CASSPQREGQREQYF

SEQ ID NO: 639553 - protein, 12 aa, Homo sapiens
  CDR3 for alpha chain variable domain of TCR clone 319777 (TRAV12-2, TRAJ3)
CAVWSSASKIIF

SEQ ID NO: 639554 - protein, 12 aa, Homo sapiens
  CDR3 for beta chain variable domain of TCR clone 319777 (TRBV11-2, TRBJ2-1)
CASSPGDNEQFF

SEQ ID NO: 639555 - protein, 11 aa, Homo sapiens
  CDR3 for alpha chain variable domain of TCR clone 319778 (TRAV2, TRAJ13)
CASGGYQKVTF

SEQ ID NO: 639556 - protein, 15 aa, Homo sapiens
  CDR3 for beta chain variable domain of TCR clone 319778 (TRBV6-1, TRBJ2-2)
CASSRLREDTGELFF

SEQ ID NO: 639557 - protein, 18 aa, Homo sapiens
  CDR3 for alpha chain variable domain of TCR clone 319779 (TRAV25, TRAJ52)
CAASKRSAGGTSYGKLTF

SEQ ID NO: 639558 - protein, 13 aa, Homo sapiens
  CDR3 for beta chain variable domain of TCR clone 319779 (TRBV12-4, TRBJ1-2)
CASSLRQGKGYTF

SEQ ID NO: 639559 - protein, 14 aa, Homo sapiens
  CDR3 for alpha chain variable domain of TCR clone 319780 (TRAV1-2, TRAJ17)
CAVRDMTAGNKLTF

SEQ ID NO: 639560 - protein, 18 aa, Homo sapiens
  CDR3 for beta chain variable domain of TCR clone 319780 (TRBV6-6, TRBJ1-3)
CASSYSKWDSISGNTIYF

SEQ ID NO: 639561 - protein, 15 aa, Homo sapiens
  CDR3 for alpha chain variable domain of TCR clone 319781 (TRAV8-3, TRAJ45)
CASSYSGGGADGLTF

SEQ ID NO: 639562 - protein, 13 aa, Homo sapiens
  CDR3 for beta chain variable domain of TCR clone 319781 (TRBV28, TRBJ1-2)
CAGRDRGNYGYTF

SEQ ID NO: 639563 - protein, 14 aa, Homo sapiens
  CDR3 for alpha chain variable domain of TCR clone 319782 (TRAV12-2, TRAJ13)
CAVKKTGGYQKVTF

SEQ ID NO: 639564 - protein, 11 aa, Homo sapiens
  CDR3 for beta chain variable domain of TCR clone 319782 (TRBV29-1, TRBJ2-5)
RSEDRTGTQYV

SEQ ID NO: 639565 - protein, 20 aa, Homo sapiens
  CDR3 for alpha chain variable domain of TCR clone 319783 (TRAV8-3, TRAJ44)
LSTSVLWGRLYTGTASKLTF

SEQ ID NO: 639566 - protein, 16 aa, Homo sapiens
  CDR3 for beta chain variable domain of TCR clone 319783 (TRBV6-4, TRBJ1-2)
CASSEAVGDPNYGYTF

SEQ ID NO: 639567 - protein, 15 aa, Homo sapiens
  CDR3 for alpha chain variable domain of TCR clone 319784 (TRAV27, TRAJ38)
CAARRNAGNNRKLIW

SEQ ID NO: 639568 - protein, 14 aa, Homo sapiens
  CDR3 for beta chain variable domain of TCR clone 319784 (TRBV7-2, TRBJ2-7)
CASSTRDGAYEQYF

SEQ ID NO: 639569 - protein, 14 aa, Homo sapiens
  CDR3 for alpha chain variable domain of TCR clone 319785 (TRAV12-2, TRAJ40)
CAVKIPSGTYKYIF

SEQ ID NO: 639570 - protein, 14 aa, Homo sapiens
  CDR3 for beta chain variable domain of TCR clone 319785 (TRBV20-1, TRBJ1-1)
SSAQTRIGGTEAFF

SEQ ID NO: 639571 - protein, 14 aa, Homo sapiens
  CDR3 for alpha chain variable domain of TCR clone 319786 (TRAV12-3, TRAJ10)
SHLPLTVGGNKLTF

SEQ ID NO: 639572 - protein, 13 aa, Homo sapiens
  CDR3 for beta chain variable domain of TCR clone 319786 (TRBV29-1, TRBJ2-5)
CSVEATAQGTQYF

SEQ ID NO: 639573 - protein, 11 aa, Homo sapiens
  CDR3 for alpha chain variable domain of TCR clone 319787 (TRAV21, TRAJ48)
CAVDGNEKLTF

SEQ ID NO: 639574 - protein, 14 aa, Homo sapiens
  CDR3 for beta chain variable domain of TCR clone 319787 (TRBV7-9, TRBJ1-2)
CASSRQGANYGYTF

SEQ ID NO: 639575 - protein, 14 aa, Homo sapiens
  CDR3 for alpha chain variable domain of TCR clone 319788 (TRAV12-3, TRAJ10)
SHLPLTGGGNKLTF

SEQ ID NO: 639576 - protein, 14 aa, Homo sapiens
  CDR3 for beta chain variable domain of TCR clone 319788 (TRBV15, TRBJ2-5)
CATSIGGLGETQYF

SEQ ID NO: 639577 - protein, 16 aa, Homo sapiens
  CDR3 for alpha chain variable domain of TCR clone 319789 (TRAV3, TRAJ10)
CAVRDMNAGGGNKLTF

SEQ ID NO: 639578 - protein, 13 aa, Homo sapiens
  CDR3 for beta chain variable domain of TCR clone 319789 (TRBV29-1, TRBJ2-3)
CSATRGGRDTQYF

SEQ ID NO: 639579 - protein, 16 aa, Homo sapiens
  CDR3 for alpha chain variable domain of TCR clone 319790 (TRAV12-3, TRAJ53)
CAMSPGSGGSNYKLTF

SEQ ID NO: 639580 - protein, 17 aa, Homo sapiens
  CDR3 for beta chain variable domain of TCR clone 319790 (TRBV27, TRBJ2-6)
CASSLTGFASGANVLTF

SEQ ID NO: 639581 - protein, 14 aa, Homo sapiens
  CDR3 for alpha chain variable domain of TCR clone 319791 (TRAV2, TRAJ29)
CAGPFQYGNTPLVF

SEQ ID NO: 639582 - protein, 15 aa, Homo sapiens
  CDR3 for beta chain variable domain of TCR clone 319791 (TRBV6-3, TRBJ2-2)
CASSFLATLTGELFF

SEQ ID NO: 639583 - protein, 18 aa, Homo sapiens
  CDR3 for alpha chain variable domain of TCR clone 319792 (TRAV9-2, TRAJ52)
CALSRHNAVGTSYGKLTF

SEQ ID NO: 639584 - protein, 15 aa, Homo sapiens
  CDR3 for beta chain variable domain of TCR clone 319792 (TRBV11-3, TRBJ2-3)
CASLKDGREGDTQYF

SEQ ID NO: 639585 - protein, 14 aa, Homo sapiens
  CDR3 for alpha chain variable domain of TCR clone 319793 (TRAV8-6, TRAJ9)
CAVSSYNGGFKTIF

SEQ ID NO: 639586 - protein, 15 aa, Homo sapiens
  CDR3 for beta chain variable domain of TCR clone 319793 (TRBV2, TRBJ1-2)
CASSESRTVNYGYTF

SEQ ID NO: 639587 - protein, 12 aa, Homo sapiens
  CDR3 for alpha chain variable domain of TCR clone 319794 (TRAV25, TRAJ5)
CAGGGGRRAITF

SEQ ID NO: 639588 - protein, 15 aa, Homo sapiens
  CDR3 for beta chain variable domain of TCR clone 319794 (TRBV7-9, TRBJ1-5)
CASSQGHQPNQPQHF

SEQ ID NO: 639589 - protein, 11 aa, Homo sapiens
  CDR3 for alpha chain variable domain of TCR clone 319795 (TRAV21, TRAJ34)
CAVTNTDKLIF

SEQ ID NO: 639590 - protein, 16 aa, Homo sapiens
  CDR3 for beta chain variable domain of TCR clone 319795 (TRBV18, TRBJ1-1)
CASSPGVGRRGGEAFF

SEQ ID NO: 639591 - protein, 14 aa, Homo sapiens
  CDR3 for alpha chain variable domain of TCR clone 319796 (TRAV13-1, TRAJ20)
CAARPGSNDYKLSF

SEQ ID NO: 639592 - protein, 11 aa, Homo sapiens
  CDR3 for beta chain variable domain of TCR clone 319796 (TRBV12-4, TRBJ2-2)
CASSSAGELFF

SEQ ID NO: 639593 - protein, 15 aa, Homo sapiens
  CDR3 for alpha chain variable domain of TCR clone 319797 (TRAV3, TRAJ4)
CAVRDGTGGYSKLIF

SEQ ID NO: 639594 - protein, 15 aa, Homo sapiens
  CDR3 for beta chain variable domain of TCR clone 319797 (TRBV27, TRBJ2-7)
CASSPDQGRLYEQYF

SEQ ID NO: 639595 - protein, 11 aa, Homo sapiens
  CDR3 for alpha chain variable domain of TCR clone 319798 (TRAV2, TRAJ13)
CASGGYQKVTF

SEQ ID NO: 639596 - protein, 17 aa, Homo sapiens
  CDR3 for beta chain variable domain of TCR clone 319798 (TRBV4-2, TRBJ2-2)
CASSQVKLAGNTGELFF

SEQ ID NO: 639597 - protein, 18 aa, Homo sapiens
  CDR3 for alpha chain variable domain of TCR clone 319799 (TRAV8-3, TRAJ4)
CTSVLWVFYSGGYNKRIF

SEQ ID NO: 639598 - protein, 16 aa, Homo sapiens
  CDR3 for beta chain variable domain of TCR clone 319799 (TRBV7-8, TRBJ2-3)
CASSTEGQRETDTQYF

SEQ ID NO: 639599 - protein, 10 aa, Homo sapiens
  CDR3 for alpha chain variable domain of TCR clone 319800 (TRAV16, TRAJ22)
SAMYLRHMTF

SEQ ID NO: 639600 - protein, 15 aa, Homo sapiens
  CDR3 for beta chain variable domain of TCR clone 319800 (TRBV7-9, TRBJ1-6)
CASSSPGRGNSPLDF

SEQ ID NO: 639601 - protein, 15 aa, Homo sapiens
  CDR3 for alpha chain variable domain of TCR clone 319801 (TRAV13-1, TRAJ17)
CAASIERPAGNKLTF

SEQ ID NO: 639602 - protein, 12 aa, Homo sapiens
  CDR3 for beta chain variable domain of TCR clone 319801 (TRBV5-7, TRBJ1-1)
CASSLGRGKAFF

SEQ ID NO: 639603 - protein, 13 aa, Homo sapiens
  CDR3 for alpha chain variable domain of TCR clone 319802 (TRAV1-2, TRAJ9)
CAALNTGGFKTIF

SEQ ID NO: 639604 - protein, 15 aa, Homo sapiens
  CDR3 for beta chain variable domain of TCR clone 319802 (TRBV13, TRBJ1-5)
CASSFGQGGVQPQHF

SEQ ID NO: 639605 - protein, 13 aa, Homo sapiens
  CDR3 for alpha chain variable domain of TCR clone 319803 (TRAV20, TRAJ54)
CAVQAGGAQKLVF

SEQ ID NO: 639606 - protein, 16 aa, Homo sapiens
  CDR3 for beta chain variable domain of TCR clone 319803 (TRBV12-4, TRBJ1-5)
CASSRPVGGSNQPQHF

SEQ ID NO: 639607 - protein, 15 aa, Homo sapiens
  CDR3 for alpha chain variable domain of TCR clone 319804 (TRAV13-1, TRAJ10)
CAATILTGGGNKLTF

SEQ ID NO: 639608 - protein, 15 aa, Homo sapiens
  CDR3 for beta chain variable domain of TCR clone 319804 (TRBV7-9, TRBJ1-4)
CASSRTGGFNEKLFF

SEQ ID NO: 639609 - protein, 12 aa, Homo sapiens
  CDR3 for alpha chain variable domain of TCR clone 319805 (TRAV1-2, TRAJ33)
CAALDSNYQLIW

SEQ ID NO: 639610 - protein, 13 aa, Homo sapiens
  CDR3 for beta chain variable domain of TCR clone 319805 (TRBV7-2, TRBJ2-7)
CASSFGQEKEQYV

SEQ ID NO: 639611 - protein, 13 aa, Homo sapiens
  CDR3 for alpha chain variable domain of TCR clone 319806 (TRAV8-3, TRAJ44)
CAVVHGTASKLTF

SEQ ID NO: 639612 - protein, 14 aa, Homo sapiens
  CDR3 for beta chain variable domain of TCR clone 319806 (TRBV11-2, TRBJ2-3)
CASRRLARTDTQYF

SEQ ID NO: 639613 - protein, 13 aa, Homo sapiens
  CDR3 for alpha chain variable domain of TCR clone 319807 (TRAV12-2, TRAJ42)
CAVRRGSQGNLIF

SEQ ID NO: 639614 - protein, 13 aa, Homo sapiens
  CDR3 for beta chain variable domain of TCR clone 319807 (TRBV7-9, TRBJ2-3)
CASSPGSTDTQYF

SEQ ID NO: 639615 - protein, 16 aa, Homo sapiens
  CDR3 for alpha chain variable domain of TCR clone 319808 (TRAV12-1, TRAJ43)
CVVNPHRFGAGTRLTV

SEQ ID NO: 639616 - protein, 15 aa, Homo sapiens
  CDR3 for beta chain variable domain of TCR clone 319808 (TRBV11-3, TRBJ2-3)
CASLKDGREGDTQYF

SEQ ID NO: 639617 - protein, 13 aa, Homo sapiens
  CDR3 for alpha chain variable domain of TCR clone 319809 (TRAV36/DV7, TRAJ54)
CAVDIQGAQKLEF

SEQ ID NO: 639618 - protein, 14 aa, Homo sapiens
  CDR3 for beta chain variable domain of TCR clone 319809 (TRBV19, TRBJ2-7)
CASNFRDTFTGMYF

SEQ ID NO: 639619 - protein, 14 aa, Homo sapiens
  CDR3 for alpha chain variable domain of TCR clone 319810 (TRAV12-2, TRAJ13)
CAVKKTGGYQKVTF

SEQ ID NO: 639620 - protein, 15 aa, Homo sapiens
  CDR3 for beta chain variable domain of TCR clone 319810 (TRBV2, TRBJ2-1)
CASSELAGSYNDQFF

SEQ ID NO: 639621 - protein, 14 aa, Homo sapiens
  CDR3 for alpha chain variable domain of TCR clone 319811 (TRAV12-3, TRAJ10)
SHLPLTGGGNKLTF

SEQ ID NO: 639622 - protein, 14 aa, Homo sapiens
  CDR3 for beta chain variable domain of TCR clone 319811 (TRBV5-1, TRBJ2-3)
CASSLFGPTDTQYF

SEQ ID NO: 639623 - protein, 12 aa, Homo sapiens
  CDR3 for alpha chain variable domain of TCR clone 319812 (TRAV30, TRAJ43)
CGTEERGNDMRF

SEQ ID NO: 639624 - protein, 16 aa, Homo sapiens
  CDR3 for beta chain variable domain of TCR clone 319812 (TRBV12-5, TRBJ2-5)
CASGPRTSGNQETQYF

SEQ ID NO: 639625 - protein, 14 aa, Homo sapiens
  CDR3 for alpha chain variable domain of TCR clone 319813 (TRAV8-3, TRAJ26)
CAVAPGNYGQNFVF

SEQ ID NO: 639626 - protein, 14 aa, Homo sapiens
  CDR3 for beta chain variable domain of TCR clone 319813 (TRBV19, TRBJ2-7)
CASSVDSESYEQYF

SEQ ID NO: 639627 - protein, 16 aa, Homo sapiens
  CDR3 for alpha chain variable domain of TCR clone 319814 (TRAV3, TRAJ21)
CAVRDIERGNFNKFYF

SEQ ID NO: 639628 - protein, 12 aa, Homo sapiens
  CDR3 for beta chain variable domain of TCR clone 319814 (TRBV11-2, TRBJ2-2)
CASSLPTGELFF

SEQ ID NO: 639629 - protein, 11 aa, Homo sapiens
  CDR3 for alpha chain variable domain of TCR clone 319815 (TRAV12-3, TRAJ5)
SWPTGRRALTF

SEQ ID NO: 639630 - protein, 15 aa, Homo sapiens
  CDR3 for beta chain variable domain of TCR clone 319815 (TRBV6-5, TRBJ2-7)
CASSYSTSGNYEQYF

SEQ ID NO: 639631 - protein, 18 aa, Homo sapiens
  CDR3 for alpha chain variable domain of TCR clone 319816 (TRAV13-1, TRAJ52)
CAASKRSAGGTSYGKMTF

SEQ ID NO: 639632 - protein, 15 aa, Homo sapiens
  CDR3 for beta chain variable domain of TCR clone 319816 (TRBV20-1, TRBJ1-1)
CSASRGVTGNTEAFF

SEQ ID NO: 639633 - protein, 14 aa, Homo sapiens
  CDR3 for alpha chain variable domain of TCR clone 319817 (TRAV26-1, TRAJ49)
CIVRLTNTGNQYYF

SEQ ID NO: 639634 - protein, 13 aa, Homo sapiens
  CDR3 for beta chain variable domain of TCR clone 319817 (TRBV10-1, TRBJ1-1)
CASQGQTNTEAFF

SEQ ID NO: 639635 - protein, 13 aa, Homo sapiens
  CDR3 for alpha chain variable domain of TCR clone 319818 (TRAV20, TRAJ42)
RAVQGGSQGNHIF

SEQ ID NO: 639636 - protein, 15 aa, Homo sapiens
  CDR3 for beta chain variable domain of TCR clone 319818 (TRBV10-1, TRBJ2-1)
CASSEWRGTYNEQFF

SEQ ID NO: 639637 - protein, 18 aa, Homo sapiens
  CDR3 for alpha chain variable domain of TCR clone 319819 (TRAV13-1, TRAJ52)
CAAKNPNAGGTSYGKLTF

SEQ ID NO: 639638 - protein, 14 aa, Homo sapiens
  CDR3 for beta chain variable domain of TCR clone 319819 (TRBV2, TRBJ2-7)
CASTVGRSSYEQYF

SEQ ID NO: 639639 - protein, 14 aa, Homo sapiens
  CDR3 for alpha chain variable domain of TCR clone 319820 (TRAV17, TRAJ56)
CATVPAGANSKLTF

SEQ ID NO: 639640 - protein, 17 aa, Homo sapiens
  CDR3 for beta chain variable domain of TCR clone 319820 (TRBV20-1, TRBJ2-2)
CSASGSGQGGLTGELFF

SEQ ID NO: 639641 - protein, 12 aa, Homo sapiens
  CDR3 for alpha chain variable domain of TCR clone 319821 (TRAV8-3, TRAJ20)
CAVVFNDYKLSF

SEQ ID NO: 639642 - protein, 12 aa, Homo sapiens
  CDR3 for beta chain variable domain of TCR clone 319821 (TRBV29-1, TRBJ2-3)
CSVTGGADTQYF

SEQ ID NO: 639643 - protein, 13 aa, Homo sapiens
  CDR3 for alpha chain variable domain of TCR clone 319822 (TRAV26-1, TRAJ38)
CIVRGGNNRKLIW

SEQ ID NO: 639644 - protein, 13 aa, Homo sapiens
  CDR3 for beta chain variable domain of TCR clone 319822 (TRBV7-9, TRBJ1-2)
CASSLKQNYGYTF

SEQ ID NO: 639645 - protein, 14 aa, Homo sapiens
  CDR3 for alpha chain variable domain of TCR clone 319823 (TRAV3, TRAJ28)
CAVRRGAGSYQLTF

SEQ ID NO: 639646 - protein, 14 aa, Homo sapiens
  CDR3 for beta chain variable domain of TCR clone 319823 (TRBV7-8, TRBJ2-3)
CASSLEAGTDTQYF

SEQ ID NO: 639647 - protein, 10 aa, Homo sapiens
  CDR3 for alpha chain variable domain of TCR clone 319824 (TRAV13-1, TRAJ39)
CIPCRHMLTF

SEQ ID NO: 639648 - protein, 14 aa, Homo sapiens
  CDR3 for beta chain variable domain of TCR clone 319824 (TRBV11-2, TRBJ1-5)
CASSLDRGRQPQHF

SEQ ID NO: 639649 - protein, 12 aa, Homo sapiens
  CDR3 for alpha chain variable domain of TCR clone 319825 (TRAV12-3, TRAJ17)
FVMTLTGNKLTF

SEQ ID NO: 639650 - protein, 15 aa, Homo sapiens
  CDR3 for beta chain variable domain of TCR clone 319825 (TRBV20-1, TRBJ2-7)
CSARDRVSGMDEQYF

SEQ ID NO: 639651 - protein, 16 aa, Homo sapiens
  CDR3 for alpha chain variable domain of TCR clone 319826 (TRAV22, TRAJ45)
CAVEGGKRGGADGLTF

SEQ ID NO: 639652 - protein, 11 aa, Homo sapiens
  CDR3 for beta chain variable domain of TCR clone 319826 (TRBV29-1, TRBJ2-5)
CSEDRTGTQYF

SEQ ID NO: 639653 - protein, 14 aa, Homo sapiens
  CDR3 for alpha chain variable domain of TCR clone 319827 (TRAV12-1, TRAJ17)
CVVSYKAAGNKLTF

SEQ ID NO: 639654 - protein, 16 aa, Homo sapiens
  CDR3 for beta chain variable domain of TCR clone 319827 (TRBV12-4, TRBJ1-5)
CASSRPVGGSNQPQHF

SEQ ID NO: 639655 - protein, 16 aa, Homo sapiens
  CDR3 for alpha chain variable domain of TCR clone 319828 (TRAV26-1, TRAJ53)
CIVRLAMGGSNYKLTF

SEQ ID NO: 639656 - protein, 12 aa, Homo sapiens
  CDR3 for beta chain variable domain of TCR clone 319828 (TRBV7-9, TRBJ1-5)
CASSPQGQPQHF

SEQ ID NO: 639657 - protein, 14 aa, Homo sapiens
  CDR3 for alpha chain variable domain of TCR clone 319829 (TRAV8-4, TRAJ34)
CAVSDPGDTDKLIF

SEQ ID NO: 639658 - protein, 12 aa, Homo sapiens
  CDR3 for beta chain variable domain of TCR clone 319829 (TRBV7-9, TRBJ2-2)
CASSLGGGELFF

SEQ ID NO: 639659 - protein, 14 aa, Homo sapiens
  CDR3 for alpha chain variable domain of TCR clone 319830 (TRAV23/DV6, TRAJ24)
CAASLSDSWGKLQF

SEQ ID NO: 639660 - protein, 13 aa, Homo sapiens
  CDR3 for beta chain variable domain of TCR clone 319830 (TRBV12-4, TRBJ2-5)
CASSPGTEETQYF

SEQ ID NO: 639661 - protein, 15 aa, Homo sapiens
  CDR3 for alpha chain variable domain of TCR clone 319831 (TRAV8-3, TRAJ7)
CAVGSISYGNNRLAF

SEQ ID NO: 639662 - protein, 15 aa, Homo sapiens
  CDR3 for beta chain variable domain of TCR clone 319831 (TRBV27, TRBJ2-1)
CASSNGGGSSNEQFF

SEQ ID NO: 639663 - protein, 16 aa, Homo sapiens
  CDR3 for alpha chain variable domain of TCR clone 319832 (TRAV3, TRAJ21)
CAVRDIERGNFNKFYF

SEQ ID NO: 639664 - protein, 16 aa, Homo sapiens
  CDR3 for beta chain variable domain of TCR clone 319832 (TRBV25-1, TRBJ1-1)
CASSGDRDRGRIEAFF

SEQ ID NO: 639665 - protein, 12 aa, Homo sapiens
  CDR3 for alpha chain variable domain of TCR clone 319833 (TRAV19, TRAJ23)
CALRAWGGKLIF

SEQ ID NO: 639666 - protein, 12 aa, Homo sapiens
  CDR3 for beta chain variable domain of TCR clone 319833 (TRBV28, TRBJ2-3)
CASSLYRDTQYF

SEQ ID NO: 639667 - protein, 16 aa, Homo sapiens
  CDR3 for alpha chain variable domain of TCR clone 319834 (TRAV14/DV4, TRAJ53)
CAMREGGGGSNYKLTF

SEQ ID NO: 639668 - protein, 15 aa, Homo sapiens
  CDR3 for beta chain variable domain of TCR clone 319834 (TRBV7-2, TRBJ2-1)
CASRKTGSSYNEQFF

SEQ ID NO: 639669 - protein, 13 aa, Homo sapiens
  CDR3 for alpha chain variable domain of TCR clone 319835 (TRAV8-4, TRAJ30)
FAVSVNRDDKIIF

SEQ ID NO: 639670 - protein, 13 aa, Homo sapiens
  CDR3 for beta chain variable domain of TCR clone 319835 (TRBV3-1, TRBJ2-2)
CASLARGSGELFF

SEQ ID NO: 639671 - protein, 13 aa, Homo sapiens
  CDR3 for alpha chain variable domain of TCR clone 319836 (TRAV21, TRAJ20)
CAVGLRVDYKLSF

SEQ ID NO: 639672 - protein, 13 aa, Homo sapiens
  CDR3 for beta chain variable domain of TCR clone 319836 (TRBV11-2, TRBJ1-2)
CASSLGTNYGYTF

SEQ ID NO: 639673 - protein, 14 aa, Homo sapiens
  CDR3 for alpha chain variable domain of TCR clone 319837 (TRAV1-2, TRAJ8)
CAVREDTGFQKLAF

SEQ ID NO: 639674 - protein, 16 aa, Homo sapiens
  CDR3 for beta chain variable domain of TCR clone 319837 (TRBV29-1, TRBJ2-6)
CSVEDITYSGANVLTF

SEQ ID NO: 639675 - protein, 13 aa, Homo sapiens
  CDR3 for alpha chain variable domain of TCR clone 319838 (TRAV3, TRAJ21)
CAVREPDFNKFYF

SEQ ID NO: 639676 - protein, 14 aa, Homo sapiens
  CDR3 for beta chain variable domain of TCR clone 319838 (TRBV5-5, TRBJ1-2)
CASGLDPYNYGYTF

SEQ ID NO: 639677 - protein, 14 aa, Homo sapiens
  CDR3 for alpha chain variable domain of TCR clone 319839 (TRAV1-2, TRAJ15)
CSVSDRQAGTALIF

SEQ ID NO: 639678 - protein, 14 aa, Homo sapiens
  CDR3 for beta chain variable domain of TCR clone 319839 (TRBV25-1, TRBJ1-1)
CASTHLGGNTEAFF

SEQ ID NO: 639679 - protein, 11 aa, Homo sapiens
  CDR3 for alpha chain variable domain of TCR clone 319840 (TRAV3, TRAJ21)
CSVGNFNKFYF

SEQ ID NO: 639680 - protein, 12 aa, Homo sapiens
  CDR3 for beta chain variable domain of TCR clone 319840 (TRBV29-1, TRBJ2-3)
CSVTGGADTQYF

SEQ ID NO: 639681 - protein, 15 aa, Homo sapiens
  CDR3 for alpha chain variable domain of TCR clone 319841 (TRAV27, TRAJ38)
CAARRNAGNNRKLIW

SEQ ID NO: 639682 - protein, 14 aa, Homo sapiens
  CDR3 for beta chain variable domain of TCR clone 319841 (TRBV27, TRBJ2-2)
CASRPGVNTGELFF

SEQ ID NO: 639683 - protein, 15 aa, Homo sapiens
  CDR3 for alpha chain variable domain of TCR clone 319842 (TRAV2, TRAJ9)
CAVEDRGTGGFKTIF

SEQ ID NO: 639684 - protein, 16 aa, Homo sapiens
  CDR3 for beta chain variable domain of TCR clone 319842 (TRBV7-9, TRBJ2-7)
CASSYPDREGGYEQYF

SEQ ID NO: 639685 - protein, 16 aa, Homo sapiens
  CDR3 for alpha chain variable domain of TCR clone 319843 (TRAV3, TRAJ18)
CAARDGRGSTLGRLYF

SEQ ID NO: 639686 - protein, 15 aa, Homo sapiens
  CDR3 for beta chain variable domain of TCR clone 319843 (TRBV7-9, TRBJ1-6)
CASSSPGRGNSPLHF

SEQ ID NO: 639687 - protein, 14 aa, Homo sapiens
  CDR3 for alpha chain variable domain of TCR clone 319844 (TRAV35, TRAJ42)
CAGRYGGSQGNLIF

SEQ ID NO: 639688 - protein, 15 aa, Homo sapiens
  CDR3 for beta chain variable domain of TCR clone 319844 (TRBV7-9, TRBJ2-1)
CASSLGWGRGNEQFF

SEQ ID NO: 639689 - protein, 18 aa, Homo sapiens
  CDR3 for alpha chain variable domain of TCR clone 319845 (TRAV17, TRAJ45)
CATSLDLYSGGGADGLTF

SEQ ID NO: 639690 - protein, 15 aa, Homo sapiens
  CDR3 for beta chain variable domain of TCR clone 319845 (TRBV11-2, TRBJ2-1)
CASGKNRGLIYEQFF

SEQ ID NO: 639691 - protein, 12 aa, Homo sapiens
  CDR3 for alpha chain variable domain of TCR clone 319846 (TRAV1-1, TRAJ33)
CAASDSNYQLIW

SEQ ID NO: 639692 - protein, 18 aa, Homo sapiens
  CDR3 for beta chain variable domain of TCR clone 319846 (TRBV20-1, TRBJ2-2)
FSARVQTARPSGTGELFF

SEQ ID NO: 639693 - protein, 16 aa, Homo sapiens
  CDR3 for alpha chain variable domain of TCR clone 319847 (TRAV30, TRAJ24)
CGTEIVDADSWGKFQS

SEQ ID NO: 639694 - protein, 16 aa, Homo sapiens
  CDR3 for beta chain variable domain of TCR clone 319847 (TRBV19, TRBJ2-1)
CASSKAGPSSYNEQFF

SEQ ID NO: 639695 - protein, 13 aa, Homo sapiens
  CDR3 for alpha chain variable domain of TCR clone 319848 (TRAV29/DV5, TRAJ33)
CAASKGRSYQLIW

SEQ ID NO: 639696 - protein, 14 aa, Homo sapiens
  CDR3 for beta chain variable domain of TCR clone 319848 (TRBV28, TRBJ2-6)
CASRHPSGANVLTF

SEQ ID NO: 639697 - protein, 13 aa, Homo sapiens
  CDR3 for alpha chain variable domain of TCR clone 319849 (TRAV4, TRAJ34)
CLVGDYNTDKLIF

SEQ ID NO: 639698 - protein, 19 aa, Homo sapiens
  CDR3 for beta chain variable domain of TCR clone 319849 (TRBV7-2, TRBJ2-3)
CASSPGLAGGGLTTDTQYF

SEQ ID NO: 639699 - protein, 12 aa, Homo sapiens
  CDR3 for alpha chain variable domain of TCR clone 319850 (TRAV3, TRAJ34)
CAVLGNTDKLIF

SEQ ID NO: 639700 - protein, 16 aa, Homo sapiens
  CDR3 for beta chain variable domain of TCR clone 319850 (TRBV19, TRBJ2-1)
CASSKAGPSSYNEQFF

SEQ ID NO: 639701 - protein, 13 aa, Homo sapiens
  CDR3 for alpha chain variable domain of TCR clone 319851 (TRAV21, TRAJ37)
CAVSSGNTGKLIF

SEQ ID NO: 639702 - protein, 13 aa, Homo sapiens
  CDR3 for beta chain variable domain of TCR clone 319851 (TRBV4-1, TRBJ2-5)
CASSQTSVETQYF

SEQ ID NO: 639703 - protein, 15 aa, Homo sapiens
  CDR3 for alpha chain variable domain of TCR clone 319852 (TRAV2, TRAJ15)
CAVEDREQAGTALIF

SEQ ID NO: 639704 - protein, 15 aa, Homo sapiens
  CDR3 for beta chain variable domain of TCR clone 319852 (TRBV9, TRBJ1-6)
CASSVAGTGDSPLHF

SEQ ID NO: 639705 - protein, 14 aa, Homo sapiens
  CDR3 for alpha chain variable domain of TCR clone 319853 (TRAV12-2, TRAJ17)
CAVLFKAAGNKLTF

SEQ ID NO: 639706 - protein, 17 aa, Homo sapiens
  CDR3 for beta chain variable domain of TCR clone 319853 (TRBV20-1, TRBJ2-2)
CSASGSGQGGLTGELFI

SEQ ID NO: 639707 - protein, 15 aa, Homo sapiens
  CDR3 for alpha chain variable domain of TCR clone 319854 (TRAV4, TRAJ39)
CLVGPNNNAGNILAF

SEQ ID NO: 639708 - protein, 13 aa, Homo sapiens
  CDR3 for beta chain variable domain of TCR clone 319854 (TRBV11-2, TRBJ2-5)
CASSSTGEETQYF

SEQ ID NO: 639709 - protein, 19 aa, Homo sapiens
  CDR3 for alpha chain variable domain of TCR clone 319855 (TRAV29/DV5, TRAJ49)
CSVLLCSKLTVDTGNPFYF

SEQ ID NO: 639710 - protein, 18 aa, Homo sapiens
  CDR3 for beta chain variable domain of TCR clone 319855 (TRBV18, TRBJ1-3)
CASSPRGGAGPSGNTIYF

SEQ ID NO: 639711 - protein, 12 aa, Homo sapiens
  CDR3 for alpha chain variable domain of TCR clone 319856 (TRAV16, TRAJ49)
CALNEGGNQFYF

SEQ ID NO: 639712 - protein, 14 aa, Homo sapiens
  CDR3 for beta chain variable domain of TCR clone 319856 (TRBV12-4, TRBJ1-1)
CASSFSQMNTEAFF

SEQ ID NO: 639713 - protein, 14 aa, Homo sapiens
  CDR3 for alpha chain variable domain of TCR clone 319857 (TRAV12-2, TRAJ45)
CAVNIGGGADGLTF

SEQ ID NO: 639714 - protein, 17 aa, Homo sapiens
  CDR3 for beta chain variable domain of TCR clone 319857 (TRBV20-1, TRBJ2-2)
CSASGSRQGGLTGELFF

SEQ ID NO: 639715 - protein, 17 aa, Homo sapiens
  CDR3 for alpha chain variable domain of TCR clone 319858 (TRAV12-2, TRAJ52)
IQPPTSFRSTSYGKLTF

SEQ ID NO: 639716 - protein, 11 aa, Homo sapiens
  CDR3 for beta chain variable domain of TCR clone 319858 (TRBV11-2, TRBJ2-2)
CASSLPGELFF

SEQ ID NO: 639717 - protein, 13 aa, Homo sapiens
  CDR3 for alpha chain variable domain of TCR clone 319859 (TRAV25, TRAJ10)
CAGRTGGGNKLTF

SEQ ID NO: 639718 - protein, 15 aa, Homo sapiens
  CDR3 for beta chain variable domain of TCR clone 319859 (TRBV19, TRBJ2-1)
CARSSPGVPLDEQFF

SEQ ID NO: 639719 - protein, 14 aa, Homo sapiens
  CDR3 for alpha chain variable domain of TCR clone 319860 (TRAV12-1, TRAJ30)
CVVNIGWRDDKSIF

SEQ ID NO: 639720 - protein, 14 aa, Homo sapiens
  CDR3 for beta chain variable domain of TCR clone 319860 (TRBV7-6, TRBJ2-3)
CASSLGTVTDTQYF

SEQ ID NO: 639721 - protein, 11 aa, Homo sapiens
  CDR3 for alpha chain variable domain of TCR clone 319861 (TRAV2, TRAJ13)
CASGGYQKVTF

SEQ ID NO: 639722 - protein, 12 aa, Homo sapiens
  CDR3 for beta chain variable domain of TCR clone 319861 (TRBV19, TRBJ2-1)
CASSRQGAEQFS

SEQ ID NO: 639723 - protein, 14 aa, Homo sapiens
  CDR3 for alpha chain variable domain of TCR clone 319862 (TRAV21, TRAJ38)
CAVANAGNNRKLIW

SEQ ID NO: 639724 - protein, 16 aa, Homo sapiens
  CDR3 for beta chain variable domain of TCR clone 319862 (TRBV5-4, TRBJ2-1)
CASSLALAGAYNEQFV

SEQ ID NO: 639725 - protein, 10 aa, Homo sapiens
  CDR3 for alpha chain variable domain of TCR clone 319863 (TRAV23/DV6, TRAJ57)
CAASSTLYHG

SEQ ID NO: 639726 - protein, 14 aa, Homo sapiens
  CDR3 for beta chain variable domain of TCR clone 319863 (TRBV25-1, TRBJ1-1)
CASTHLGGNTEAFF

SEQ ID NO: 639727 - protein, 14 aa, Homo sapiens
  CDR3 for alpha chain variable domain of TCR clone 319864 (TRAV21, TRAJ3)
CAVMGYSSASKIIF

SEQ ID NO: 639728 - protein, 14 aa, Homo sapiens
  CDR3 for beta chain variable domain of TCR clone 319864 (TRBV20-1, TRBJ2-3)
CSARGGTSTDTQYF

SEQ ID NO: 639729 - protein, 18 aa, Homo sapiens
  CDR3 for alpha chain variable domain of TCR clone 319865 (TRAV13-1, TRAJ52)
CAAKNPNAGGTSYGQLPF

SEQ ID NO: 639730 - protein, 14 aa, Homo sapiens
  CDR3 for beta chain variable domain of TCR clone 319865 (TRBV4-1, TRBJ2-2)
CASSQAVNTGELFF

SEQ ID NO: 639731 - protein, 15 aa, Homo sapiens
  CDR3 for alpha chain variable domain of TCR clone 319866 (TRAV12-3, TRAJ5)
CAMSGLGTGRRALTF

SEQ ID NO: 639732 - protein, 13 aa, Homo sapiens
  CDR3 for beta chain variable domain of TCR clone 319866 (TRBV20-1, TRBJ2-7)
CSARTGAGYEQYF

SEQ ID NO: 639733 - protein, 15 aa, Homo sapiens
  CDR3 for alpha chain variable domain of TCR clone 319867 (TRAV27, TRAJ38)
CAARRNAGNNRKLIG

SEQ ID NO: 639734 - protein, 13 aa, Homo sapiens
  CDR3 for beta chain variable domain of TCR clone 319867 (TRBV12-5, TRBJ2-3)
CASDDRQSDTQYF

SEQ ID NO: 639735 - protein, 13 aa, Homo sapiens
  CDR3 for alpha chain variable domain of TCR clone 319868 (TRAV12-1, TRAJ3)
CVVNPRGASRIIF

SEQ ID NO: 639736 - protein, 13 aa, Homo sapiens
  CDR3 for beta chain variable domain of TCR clone 319868 (TRBV28, TRBJ1-5)
CASSDRGNQPQHF

SEQ ID NO: 639737 - protein, 10 aa, Homo sapiens
  CDR3 for alpha chain variable domain of TCR clone 319869 (TRAV23/DV6, TRAJ57)
CAASSTLSQS

SEQ ID NO: 639738 - protein, 15 aa, Homo sapiens
  CDR3 for beta chain variable domain of TCR clone 319869 (TRBV25-1, TRBJ1-4)
CASSPGDSNNEKLFF

SEQ ID NO: 639739 - protein, 14 aa, Homo sapiens
  CDR3 for alpha chain variable domain of TCR clone 319870 (TRAV1-2, TRAJ8)
CAVREVTGFQKLVF

SEQ ID NO: 639740 - protein, 14 aa, Homo sapiens
  CDR3 for beta chain variable domain of TCR clone 319870 (TRBV18, TRBJ2-7)
CASSPRGGAYEQYF

SEQ ID NO: 639741 - protein, 14 aa, Homo sapiens
  CDR3 for alpha chain variable domain of TCR clone 319871 (TRAV17, TRAJ16)
CATADFSDGQKPPF

SEQ ID NO: 639742 - protein, 12 aa, Homo sapiens
  CDR3 for beta chain variable domain of TCR clone 319871 (TRBV24-1, TRBJ1-1)
CATLYPDTEAFF

SEQ ID NO: 639743 - protein, 14 aa, Homo sapiens
  CDR3 for alpha chain variable domain of TCR clone 319872 (TRAV3, TRAJ9)
CAVRGNTGGFKTVF

SEQ ID NO: 639744 - protein, 14 aa, Homo sapiens
  CDR3 for beta chain variable domain of TCR clone 319872 (TRBV15, TRBJ2-1)
CATSGVEDYNEQFF

SEQ ID NO: 639745 - protein, 12 aa, Homo sapiens
  CDR3 for alpha chain variable domain of TCR clone 319873 (TRAV21, TRAJ31)
CAVSPARGRLMF

SEQ ID NO: 639746 - protein, 14 aa, Homo sapiens
  CDR3 for beta chain variable domain of TCR clone 319873 (TRBV28, TRBJ2-7)
CASSLLSISYEQYF

SEQ ID NO: 639747 - protein, 16 aa, Homo sapiens
  CDR3 for alpha chain variable domain of TCR clone 319874 (TRAV3, TRAJ8)
RAVRDYPNTGFQKLVF

SEQ ID NO: 639748 - protein, 12 aa, Homo sapiens
  CDR3 for beta chain variable domain of TCR clone 319874 (TRBV12-4, TRBJ2-1)
CASSPGRNEQFF

SEQ ID NO: 639749 - protein, 13 aa, Homo sapiens
  CDR3 for alpha chain variable domain of TCR clone 319875 (TRAV1-1, TRAJ10)
CAVNSGGYQKVTF

SEQ ID NO: 639750 - protein, 14 aa, Homo sapiens
  CDR3 for beta chain variable domain of TCR clone 319875 (TRBV7-6, TRBJ2-3)
CASSLGTVTDTQYF

SEQ ID NO: 639751 - protein, 14 aa, Homo sapiens
  CDR3 for alpha chain variable domain of TCR clone 319876 (TRAV26-1, TRAJ45)
CIEVTGGGADGLTF

SEQ ID NO: 639752 - protein, 14 aa, Homo sapiens
  CDR3 for beta chain variable domain of TCR clone 319876 (TRBV6-1, TRBJ1-3)
CASVQGGGGNTIYL

SEQ ID NO: 639753 - protein, 15 aa, Homo sapiens
  CDR3 for alpha chain variable domain of TCR clone 319877 (TRAV3, TRAJ5)
CAVRDRKTGRRALTF

SEQ ID NO: 639754 - protein, 16 aa, Homo sapiens
  CDR3 for beta chain variable domain of TCR clone 319877 (TRBV19, TRBJ2-2)
CASRSPGTGATGELFF

SEQ ID NO: 639755 - protein, 16 aa, Homo sapiens
  CDR3 for alpha chain variable domain of TCR clone 319878 (TRAV30, TRAJ24)
CGTEIVDADSWGKFQF

SEQ ID NO: 639756 - protein, 14 aa, Homo sapiens
  CDR3 for beta chain variable domain of TCR clone 319878 (TRBV19, TRBJ2-1)
CASPTFVLSGKQFF

SEQ ID NO: 639757 - protein, 11 aa, Homo sapiens
  CDR3 for alpha chain variable domain of TCR clone 319879 (TRAV3, TRAJ21)
CAVGNFNKFYF

SEQ ID NO: 639758 - protein, 13 aa, Homo sapiens
  CDR3 for beta chain variable domain of TCR clone 319879 (TRBV20-1, TRBJ2-2)
CSASAAGTGELFS

SEQ ID NO: 639759 - protein, 12 aa, Homo sapiens
  CDR3 for alpha chain variable domain of TCR clone 319880 (TRAV12-1, TRAJ40)
CVVNGETYKYIF

SEQ ID NO: 639760 - protein, 16 aa, Homo sapiens
  CDR3 for beta chain variable domain of TCR clone 319880 (TRBV29-1, TRBJ2-7)
CSVEDAEDGTAYEQYF

SEQ ID NO: 639761 - protein, 14 aa, Homo sapiens
  CDR3 for alpha chain variable domain of TCR clone 319881 (TRAV12-2, TRAJ13)
CAVKKTGGYQKATF

SEQ ID NO: 639762 - protein, 15 aa, Homo sapiens
  CDR3 for beta chain variable domain of TCR clone 319881 (TRBV20-1, TRBJ2-1)
CSARGIGGTHNEQFF

SEQ ID NO: 639763 - protein, 15 aa, Homo sapiens
  CDR3 for alpha chain variable domain of TCR clone 319882 (TRAV8-3, TRAJ45)
CASSYSGGGADGLTF

SEQ ID NO: 639764 - protein, 17 aa, Homo sapiens
  CDR3 for beta chain variable domain of TCR clone 319882 (TRBV7-8, TRBJ1-2)
CASCLRPLQGHLYGYTF

SEQ ID NO: 639765 - protein, 18 aa, Homo sapiens
  CDR3 for alpha chain variable domain of TCR clone 319883 (TRAV21, TRAJ52)
CAVRPSPAGGTSYGKLTF

SEQ ID NO: 639766 - protein, 14 aa, Homo sapiens
  CDR3 for beta chain variable domain of TCR clone 319883 (TRBV20-1, TRBJ2-7)
CSAISREASYEQYF

SEQ ID NO: 639767 - protein, 20 aa, Homo sapiens
  CDR3 for alpha chain variable domain of TCR clone 319884 (TRAV12-1, TRAJ42)
SSVIQPPTSVKGGSQGNLIF

SEQ ID NO: 639768 - protein, 18 aa, Homo sapiens
  CDR3 for beta chain variable domain of TCR clone 319884 (TRBV11-2, TRBJ2-3)
CASSLGGASRGAPNTQYI

SEQ ID NO: 639769 - protein, 14 aa, Homo sapiens
  CDR3 for alpha chain variable domain of TCR clone 319885 (TRAV4, TRAJ43)
CLVGPMYNNNDRRF

SEQ ID NO: 639770 - protein, 21 aa, Homo sapiens
  CDR3 for beta chain variable domain of TCR clone 319885 (TRBV11-1, TRBJ2-1)
CASSARERLRPEGPSYNEQFF

SEQ ID NO: 639771 - protein, 14 aa, Homo sapiens
  CDR3 for alpha chain variable domain of TCR clone 319886 (TRAV12-1, TRAJ17)
CVVNYKATGDKLTF

SEQ ID NO: 639772 - protein, 17 aa, Homo sapiens
  CDR3 for beta chain variable domain of TCR clone 319886 (TRBV20-1, TRBJ2-1)
CSASSSGLAGSYNEQFF

SEQ ID NO: 639773 - protein, 12 aa, Homo sapiens
  CDR3 for alpha chain variable domain of TCR clone 319887 (TRAV27, TRAJ35)
CAGADFGNVLHC

SEQ ID NO: 639774 - protein, 12 aa, Homo sapiens
  CDR3 for beta chain variable domain of TCR clone 319887 (TRBV6-3, TRBJ2-7)
CASSLTPYEQYF

SEQ ID NO: 639775 - protein, 16 aa, Homo sapiens
  CDR3 for alpha chain variable domain of TCR clone 319888 (TRAV12-2, TRAJ32)
RAVNLGQGGATNKLIF

SEQ ID NO: 639776 - protein, 13 aa, Homo sapiens
  CDR3 for beta chain variable domain of TCR clone 319888 (TRBV9, TRBJ2-2)
CASSPRPAGELFF

SEQ ID NO: 639777 - protein, 14 aa, Homo sapiens
  CDR3 for alpha chain variable domain of TCR clone 319889 (TRAV16, TRAJ33)
CALSAMDSNYQLIW

SEQ ID NO: 639778 - protein, 15 aa, Homo sapiens
  CDR3 for beta chain variable domain of TCR clone 319889 (TRBV18, TRBJ2-1)
CASLPDRGRDNEQFF

SEQ ID NO: 639779 - protein, 10 aa, Homo sapiens
  CDR3 for alpha chain variable domain of TCR clone 319890 (TRAV23/DV6, TRAJ43)
CAAAVAALEQ

SEQ ID NO: 639780 - protein, 16 aa, Homo sapiens
  CDR3 for beta chain variable domain of TCR clone 319890 (TRBV18, TRBJ1-2)
CASSPPESVTIYGYTL

SEQ ID NO: 639781 - protein, 14 aa, Homo sapiens
  CDR3 for alpha chain variable domain of TCR clone 319891 (TRAV12-2, TRAJ13)
CAVKKTGGYQKVTF

SEQ ID NO: 639782 - protein, 14 aa, Homo sapiens
  CDR3 for beta chain variable domain of TCR clone 319891 (TRBV7-2, TRBJ2-5)
CASSLSGGGETQYF

SEQ ID NO: 639783 - protein, 18 aa, Homo sapiens
  CDR3 for alpha chain variable domain of TCR clone 319892 (TRAV35, TRAJ28)
CAGHNYPLSGPGSYQLTF

SEQ ID NO: 639784 - protein, 12 aa, Homo sapiens
  CDR3 for beta chain variable domain of TCR clone 319892 (TRBV7-9, TRBJ1-1)
CASSLEGTEAFF

SEQ ID NO: 639785 - protein, 11 aa, Homo sapiens
  CDR3 for alpha chain variable domain of TCR clone 319893 (TRAV21, TRAJ9)
CTVPGGFKTIF

SEQ ID NO: 639786 - protein, 17 aa, Homo sapiens
  CDR3 for beta chain variable domain of TCR clone 319893 (TRBV7-9, TRBJ2-5)
CATSGGARDPVLRARHA

SEQ ID NO: 639787 - protein, 14 aa, Homo sapiens
  CDR3 for alpha chain variable domain of TCR clone 319894 (TRAV12-3, TRAJ42)
CAMNYGGSQGNLIF

SEQ ID NO: 639788 - protein, 19 aa, Homo sapiens
  CDR3 for beta chain variable domain of TCR clone 319894 (TRBV4-1, TRBJ2-1)
CASSQGPLPGLGSRNEQFF

SEQ ID NO: 639789 - protein, 13 aa, Homo sapiens
  CDR3 for alpha chain variable domain of TCR clone 319895 (TRAV9-2, TRAJ53)
CALSGGSNYKLTF

SEQ ID NO: 639790 - protein, 17 aa, Homo sapiens
  CDR3 for beta chain variable domain of TCR clone 319895 (TRBV11-2, TRBJ2-1)
CASSLYPPGVEYNEQFS

SEQ ID NO: 639791 - protein, 14 aa, Homo sapiens
  CDR3 for alpha chain variable domain of TCR clone 319896 (TRAV12-2, TRAJ13)
CAVKKTGGYQKVTF

SEQ ID NO: 639792 - protein, 16 aa, Homo sapiens
  CDR3 for beta chain variable domain of TCR clone 319896 (TRBV7-9, TRBJ1-2)
CASSLGFSSGEDSYTF

SEQ ID NO: 639793 - protein, 18 aa, Homo sapiens
  CDR3 for alpha chain variable domain of TCR clone 319897 (TRAV26-1, TRAJ5)
CIVRVVHPRDTGRRVLTF

SEQ ID NO: 639794 - protein, 15 aa, Homo sapiens
  CDR3 for beta chain variable domain of TCR clone 319897 (TRBV7-9, TRBJ2-7)
CASSLPMGQANEQYF

SEQ ID NO: 639795 - protein, 12 aa, Homo sapiens
  CDR3 for alpha chain variable domain of TCR clone 319898 (TRAV1-2, TRAJ33)
CAALDSNYQLIW

SEQ ID NO: 639796 - protein, 12 aa, Homo sapiens
  CDR3 for beta chain variable domain of TCR clone 319898 (TRBV7-8, TRBJ2-7)
CASSLGDREQYF

SEQ ID NO: 639797 - protein, 15 aa, Homo sapiens
  CDR3 for alpha chain variable domain of TCR clone 319899 (TRAV3, TRAJ22)
CAVRDRGGSARQLTF

SEQ ID NO: 639798 - protein, 13 aa, Homo sapiens
  CDR3 for beta chain variable domain of TCR clone 319899 (TRBV7-2, TRBJ2-5)
CASSQTSVETQYF

SEQ ID NO: 639799 - protein, 11 aa, Homo sapiens
  CDR3 for alpha chain variable domain of TCR clone 319900 (TRAV2, TRAJ13)
CASVGYQKVTF

SEQ ID NO: 639800 - protein, 15 aa, Homo sapiens
  CDR3 for beta chain variable domain of TCR clone 319900 (TRBV28, TRBJ1-3)
CASSMGWASGNTIYF

SEQ ID NO: 639801 - protein, 12 aa, Homo sapiens
  CDR3 for alpha chain variable domain of TCR clone 319901 (TRAV12-1, TRAJ34)
CVVAGATDKPIF

SEQ ID NO: 639802 - protein, 14 aa, Homo sapiens
  CDR3 for beta chain variable domain of TCR clone 319901 (TRBV7-2, TRBJ2-7)
CASRSQGAAYEQYF

SEQ ID NO: 639803 - protein, 16 aa, Homo sapiens
  CDR3 for alpha chain variable domain of TCR clone 319902 (TRAV3, TRAJ21)
CAVRDIERGNFNKFYF

SEQ ID NO: 639804 - protein, 13 aa, Homo sapiens
  CDR3 for beta chain variable domain of TCR clone 319902 (TRBV24-1, TRBJ2-2)
CATSDWSTGELFF

SEQ ID NO: 639805 - protein, 14 aa, Homo sapiens
  CDR3 for alpha chain variable domain of TCR clone 319903 (TRAV16, TRAJ54)
CALSLIQGAQKLVF

SEQ ID NO: 639806 - protein, 17 aa, Homo sapiens
  CDR3 for beta chain variable domain of TCR clone 319903 (TRBV25-1, TRBJ2-7)
CASSDARVVFSSYEQYF

SEQ ID NO: 639807 - protein, 12 aa, Homo sapiens
  CDR3 for alpha chain variable domain of TCR clone 319904 (TRAV17, TRAJ57)
CATDGGSEKLVF

SEQ ID NO: 639808 - protein, 14 aa, Homo sapiens
  CDR3 for beta chain variable domain of TCR clone 319904 (TRBV7-2, TRBJ2-5)
CASSFGGAQETQYF

SEQ ID NO: 639809 - protein, 16 aa, Homo sapiens
  CDR3 for alpha chain variable domain of TCR clone 319905 (TRAV30, TRAJ24)
CGTEIVDADSWRKFQF

SEQ ID NO: 639810 - protein, 14 aa, Homo sapiens
  CDR3 for beta chain variable domain of TCR clone 319905 (TRBV7-6, TRBJ2-7)
CASSFRQGADEQYF

SEQ ID NO: 639811 - protein, 16 aa, Homo sapiens
  CDR3 for alpha chain variable domain of TCR clone 319906 (TRAV1-2, TRAJ10)
CAVRGVLTGGGNKLTF

SEQ ID NO: 639812 - protein, 15 aa, Homo sapiens
  CDR3 for beta chain variable domain of TCR clone 319906 (TRBV7-9, TRBJ1-6)
CASSSPGRGNSPLHL

SEQ ID NO: 639813 - protein, 14 aa, Homo sapiens
  CDR3 for alpha chain variable domain of TCR clone 319907 (TRAV12-2, TRAJ13)
CAAKKTGGYQKVTF

SEQ ID NO: 639814 - protein, 15 aa, Homo sapiens
  CDR3 for beta chain variable domain of TCR clone 319907 (TRBV9, TRBJ1-6)
CDSSVAGTGDSPLHF

SEQ ID NO: 639815 - protein, 12 aa, Homo sapiens
  CDR3 for alpha chain variable domain of TCR clone 319908 (TRAV13-1, TRAJ49)
CAAPNTGNQFYF

SEQ ID NO: 639816 - protein, 17 aa, Homo sapiens
  CDR3 for beta chain variable domain of TCR clone 319908 (TRBV25-1, TRBJ2-7)
CASSGARVVGSSDEQYF

SEQ ID NO: 639817 - protein, 11 aa, Homo sapiens
  CDR3 for alpha chain variable domain of TCR clone 319909 (TRAV21, TRAJ39)
LLLNAGNMLTF

SEQ ID NO: 639818 - protein, 16 aa, Homo sapiens
  CDR3 for beta chain variable domain of TCR clone 319909 (TRBV9, TRBJ2-7)
CASSVGLGGGTYEQYF

SEQ ID NO: 639819 - protein, 13 aa, Homo sapiens
  CDR3 for alpha chain variable domain of TCR clone 319910 (TRAV35, TRAJ33)
CAGRHDSNYQLIW

SEQ ID NO: 639820 - protein, 15 aa, Homo sapiens
  CDR3 for beta chain variable domain of TCR clone 319910 (TRBV20-1, TRBJ1-1)
CSASRGVTGNTEAFF

SEQ ID NO: 639821 - protein, 15 aa, Homo sapiens
  CDR3 for alpha chain variable domain of TCR clone 319911 (TRAV12-2, TRAJ13)
CRESLGSEGYQKVTF

SEQ ID NO: 639822 - protein, 15 aa, Homo sapiens
  CDR3 for beta chain variable domain of TCR clone 319911 (TRBV6-5, TRBJ2-1)
CASRRAQLSYNEQFF

SEQ ID NO: 639823 - protein, 13 aa, Homo sapiens
  CDR3 for alpha chain variable domain of TCR clone 319912 (TRAV25, TRAJ24)
CAGGTDSWGKFKF

SEQ ID NO: 639824 - protein, 16 aa, Homo sapiens
  CDR3 for beta chain variable domain of TCR clone 319912 (TRBV28, TRBJ2-3)
CASSLFTGVSTDTQYF

SEQ ID NO: 639825 - protein, 14 aa, Homo sapiens
  CDR3 for alpha chain variable domain of TCR clone 319913 (TRAV26-1, TRAJ45)
CIEVTGGGADGLTF

SEQ ID NO: 639826 - protein, 18 aa, Homo sapiens
  CDR3 for beta chain variable domain of TCR clone 319913 (TRBV18, TRBJ2-3)
CASSYTSGAAGGTDTQYF

SEQ ID NO: 639827 - protein, 15 aa, Homo sapiens
  CDR3 for alpha chain variable domain of TCR clone 319914 (TRAV26-1, TRAJ22)
CIVRVSLWPCKATDL

SEQ ID NO: 639828 - protein, 12 aa, Homo sapiens
  CDR3 for beta chain variable domain of TCR clone 319914 (TRBV11-2, TRBJ2-2)
CASSLGGGELFF

SEQ ID NO: 639829 - protein, 14 aa, Homo sapiens
  CDR3 for alpha chain variable domain of TCR clone 319915 (TRAV23/DV6, TRAJ11)
CAALIGGGYSTLPF

SEQ ID NO: 639830 - protein, 13 aa, Homo sapiens
  CDR3 for beta chain variable domain of TCR clone 319915 (TRBV11-3, TRBJ1-1)
CASSLGGNTEAFF

SEQ ID NO: 639831 - protein, 14 aa, Homo sapiens
  CDR3 for alpha chain variable domain of TCR clone 319916 (TRAV4, TRAJ41)
CLVGDGDSGYALNF

SEQ ID NO: 639832 - protein, 14 aa, Homo sapiens
  CDR3 for beta chain variable domain of TCR clone 319916 (TRBV4-2, TRBJ2-7)
CASSQGQTAYEQYF

SEQ ID NO: 639833 - protein, 21 aa, Homo sapiens
  CDR3 for alpha chain variable domain of TCR clone 319917 (TRAV12-1, TRAJ32)
SSVIQPPTSMNYGGATNKLIF

SEQ ID NO: 639834 - protein, 15 aa, Homo sapiens
  CDR3 for beta chain variable domain of TCR clone 319917 (TRBV7-9, TRBJ2-2)
CASGPLDTFPGELVF

SEQ ID NO: 639835 - protein, 20 aa, Homo sapiens
  CDR3 for alpha chain variable domain of TCR clone 319918 (TRAV12-1, TRAJ42)
SSVIQPPTSVKGGSQGNLIF

SEQ ID NO: 639836 - protein, 15 aa, Homo sapiens
  CDR3 for beta chain variable domain of TCR clone 319918 (TRBV28, TRBJ2-1)
CASSIIAGGRSEQFF

SEQ ID NO: 639837 - protein, 16 aa, Homo sapiens
  CDR3 for alpha chain variable domain of TCR clone 319919 (TRAV3, TRAJ37)
CSVRPHGSGNTGKLIF

SEQ ID NO: 639838 - protein, 17 aa, Homo sapiens
  CDR3 for beta chain variable domain of TCR clone 319919 (TRBV5-1, TRBJ2-5)
CASSPVALGQNQETQYF

SEQ ID NO: 639839 - protein, 13 aa, Homo sapiens
  CDR3 for alpha chain variable domain of TCR clone 319920 (TRAV1-2, TRAJ9)
CAALNTGGFKTIF

SEQ ID NO: 639840 - protein, 16 aa, Homo sapiens
  CDR3 for beta chain variable domain of TCR clone 319920 (TRBV19, TRBJ2-2)
CASSTARASNTGELFF

SEQ ID NO: 639841 - protein, 13 aa, Homo sapiens
  CDR3 for alpha chain variable domain of TCR clone 319921 (TRAV12-1, TRAJ11)
CVVTRGGYSTLTF

SEQ ID NO: 639842 - protein, 15 aa, Homo sapiens
  CDR3 for beta chain variable domain of TCR clone 319921 (TRBV5-1, TRBJ2-2)
CASSTFNINTGELFF

SEQ ID NO: 639843 - protein, 13 aa, Homo sapiens
  CDR3 for alpha chain variable domain of TCR clone 319922 (TRAV17, TRAJ9)
CATDYTGGVKTIF

SEQ ID NO: 639844 - protein, 14 aa, Homo sapiens
  CDR3 for beta chain variable domain of TCR clone 319922 (TRBV19, TRBJ2-7)
CASSMGQGAIEQYF

SEQ ID NO: 639845 - protein, 16 aa, Homo sapiens
  CDR3 for alpha chain variable domain of TCR clone 319923 (TRAV26-1, TRAJ32)
CIVRTNYCGATNKLIF

SEQ ID NO: 639846 - protein, 14 aa, Homo sapiens
  CDR3 for beta chain variable domain of TCR clone 319923 (TRBV27, TRBJ1-1)
CASSLLSGLSEAFF

SEQ ID NO: 639847 - protein, 14 aa, Homo sapiens
  CDR3 for alpha chain variable domain of TCR clone 319924 (TRAV17, TRAJ16)
CATADFSDGPKLLF

SEQ ID NO: 639848 - protein, 15 aa, Homo sapiens
  CDR3 for beta chain variable domain of TCR clone 319924 (TRBV6-5, TRBJ2-1)
CASSYDAGAGNEQFF

SEQ ID NO: 639849 - protein, 14 aa, Homo sapiens
  CDR3 for alpha chain variable domain of TCR clone 319925 (TRAV13-1, TRAJ44)
CAAKATGTASKLTF

SEQ ID NO: 639850 - protein, 14 aa, Homo sapiens
  CDR3 for beta chain variable domain of TCR clone 319925 (TRBV7-3, TRBJ2-1)
CASSLAGRTNEQFF

SEQ ID NO: 639851 - protein, 14 aa, Homo sapiens
  CDR3 for alpha chain variable domain of TCR clone 319926 (TRAV1-2, TRAJ8)
CAVREDTCFQKLVF

SEQ ID NO: 639852 - protein, 11 aa, Homo sapiens
  CDR3 for beta chain variable domain of TCR clone 319926 (TRBV11-2, TRBJ2-2)
CASSLPGELFF

SEQ ID NO: 639853 - protein, 15 aa, Homo sapiens
  CDR3 for alpha chain variable domain of TCR clone 319927 (TRAV12-1, TRAJ41)
CVVNGASNSGYALNF

SEQ ID NO: 639854 - protein, 15 aa, Homo sapiens
  CDR3 for beta chain variable domain of TCR clone 319927 (TRBV7-2, TRBJ1-5)
CASSSTGVDNQTQHF

SEQ ID NO: 639855 - protein, 15 aa, Homo sapiens
  CDR3 for alpha chain variable domain of TCR clone 319928 (TRAV12-1, TRAJ52)
CVGNARGTSYGKLTF

SEQ ID NO: 639856 - protein, 14 aa, Homo sapiens
  CDR3 for beta chain variable domain of TCR clone 319928 (TRBV7-3, TRBJ2-2)
CASSPDPSGRELFF

SEQ ID NO: 639857 - protein, 14 aa, Homo sapiens
  CDR3 for alpha chain variable domain of TCR clone 319929 (TRAV26-1, TRAJ38)
CIADIAGNNRKLIW

SEQ ID NO: 639858 - protein, 15 aa, Homo sapiens
  CDR3 for beta chain variable domain of TCR clone 319929 (TRBV7-2, TRBJ2-1)
CASSLVAGRYNEQFF

SEQ ID NO: 639859 - protein, 16 aa, Homo sapiens
  CDR3 for alpha chain variable domain of TCR clone 319930 (TRAV1-2, TRAJ10)
CAVRGVLTGGGNKLTF

SEQ ID NO: 639860 - protein, 15 aa, Homo sapiens
  CDR3 for beta chain variable domain of TCR clone 319930 (TRBV7-3, TRBJ2-2)
CASSLYGGDTGELFF

SEQ ID NO: 639861 - protein, 18 aa, Homo sapiens
  CDR3 for alpha chain variable domain of TCR clone 319931 (TRAV26-1, TRAJ44)
CIVRVAGGGISTASKLTF

SEQ ID NO: 639862 - protein, 12 aa, Homo sapiens
  CDR3 for beta chain variable domain of TCR clone 319931 (TRBV11-2, TRBJ2-2)
CASSLGGGELFF

SEQ ID NO: 639863 - protein, 17 aa, Homo sapiens
  CDR3 for alpha chain variable domain of TCR clone 319932 (TRAV3, TRAJ6)
CAVRDGPRAGGSYIPTF

SEQ ID NO: 639864 - protein, 13 aa, Homo sapiens
  CDR3 for beta chain variable domain of TCR clone 319932 (TRBV12-5, TRBJ2-3)
CASGDRQSDPQYF

SEQ ID NO: 639865 - protein, 19 aa, Homo sapiens
  CDR3 for alpha chain variable domain of TCR clone 319933 (TRAV25, TRAJ20)
TATQTTDVGILPHDYKLSC

SEQ ID NO: 639866 - protein, 15 aa, Homo sapiens
  CDR3 for beta chain variable domain of TCR clone 319933 (TRBV6-6, TRBJ1-5)
CASSSIQGTNQPQHF

SEQ ID NO: 639867 - protein, 13 aa, Homo sapiens
  CDR3 for alpha chain variable domain of TCR clone 319934 (TRAV12-1, TRAJ26)
CVVRRNYGQNFVF

SEQ ID NO: 639868 - protein, 14 aa, Homo sapiens
  CDR3 for beta chain variable domain of TCR clone 319934 (TRBV24-1, TRBJ2-1)
CATADRGEYNEQFF

SEQ ID NO: 639869 - protein, 17 aa, Homo sapiens
  CDR3 for alpha chain variable domain of TCR clone 319935 (TRAV16, TRAJ58)
CITVLSNGENSGSRLTF

SEQ ID NO: 639870 - protein, 13 aa, Homo sapiens
  CDR3 for beta chain variable domain of TCR clone 319935 (TRBV20-1, TRBJ2-2)
CSASAAGTGELFF

SEQ ID NO: 639871 - protein, 14 aa, Homo sapiens
  CDR3 for alpha chain variable domain of TCR clone 319936 (TRAV10, TRAJ36)
CVVSEGTAANNLFF

SEQ ID NO: 639872 - protein, 13 aa, Homo sapiens
  CDR3 for beta chain variable domain of TCR clone 319936 (TRBV28, TRBJ2-7)
CASSVTWDREMYF

SEQ ID NO: 639873 - protein, 16 aa, Homo sapiens
  CDR3 for alpha chain variable domain of TCR clone 319937 (TRAV26-1, TRAJ37)
CVVRGDGPGNTGKLIF

SEQ ID NO: 639874 - protein, 17 aa, Homo sapiens
  CDR3 for beta chain variable domain of TCR clone 319937 (TRBV4-1, TRBJ2-7)
CASSRDPLGVRGGEQYF

SEQ ID NO: 639875 - protein, 14 aa, Homo sapiens
  CDR3 for alpha chain variable domain of TCR clone 319938 (TRAV13-1, TRAJ35)
CAASKGGFGYVLHC

SEQ ID NO: 639876 - protein, 15 aa, Homo sapiens
  CDR3 for beta chain variable domain of TCR clone 319938 (TRBV28, TRBJ2-1)
CASSGLAEVDNEQFF

SEQ ID NO: 639877 - protein, 16 aa, Homo sapiens
  CDR3 for alpha chain variable domain of TCR clone 319939 (TRAV13-1, TRAJ22)
CAAKGGRSGSARQLTF

SEQ ID NO: 639878 - protein, 15 aa, Homo sapiens
  CDR3 for beta chain variable domain of TCR clone 319939 (TRBV9, TRBJ1-6)
CASSVAGTGDSPLNF

SEQ ID NO: 639879 - protein, 12 aa, Homo sapiens
  CDR3 for alpha chain variable domain of TCR clone 319940 (TRAV25, TRAJ54)
CAGGWGAQKLAF

SEQ ID NO: 639880 - protein, 12 aa, Homo sapiens
  CDR3 for beta chain variable domain of TCR clone 319940 (TRBV7-8, TRBJ2-7)
CASSLGDREQYF

SEQ ID NO: 639881 - protein, 17 aa, Homo sapiens
  CDR3 for alpha chain variable domain of TCR clone 319941 (TRAV12-3, TRAJ31)
CAMKDRLMFGDGTQLVV

SEQ ID NO: 639882 - protein, 15 aa, Homo sapiens
  CDR3 for beta chain variable domain of TCR clone 319941 (TRBV9, TRBJ1-6)
CASSVAGTGDSPLHF

SEQ ID NO: 639883 - protein, 15 aa, Homo sapiens
  CDR3 for alpha chain variable domain of TCR clone 319942 (TRAV3, TRAJ22)
CAVRDRGGSARQLTF

SEQ ID NO: 639884 - protein, 16 aa, Homo sapiens
  CDR3 for beta chain variable domain of TCR clone 319942 (TRBV29-1, TRBJ2-7)
CSVEVVGTSGSYEQYF

SEQ ID NO: 639885 - protein, 16 aa, Homo sapiens
  CDR3 for alpha chain variable domain of TCR clone 319943 (TRAV3, TRAJ37)
CAVRGKGSGNSGKLIF

SEQ ID NO: 639886 - protein, 13 aa, Homo sapiens
  CDR3 for beta chain variable domain of TCR clone 319943 (TRBV14, TRBJ2-7)
CASSQDRRYEQYF

SEQ ID NO: 639887 - protein, 16 aa, Homo sapiens
  CDR3 for alpha chain variable domain of TCR clone 319944 (TRAV30, TRAJ24)
CGTEIVDADSWGKFPF

SEQ ID NO: 639888 - protein, 14 aa, Homo sapiens
  CDR3 for beta chain variable domain of TCR clone 319944 (TRBV5-5, TRBJ1-2)
CASSLDPYNYGYTF

SEQ ID NO: 639889 - protein, 15 aa, Homo sapiens
  CDR3 for alpha chain variable domain of TCR clone 319945 (TRAV3, TRAJ13)
CAVRVYSGGYQKVTL

SEQ ID NO: 639890 - protein, 15 aa, Homo sapiens
  CDR3 for beta chain variable domain of TCR clone 319945 (TRBV5-7, TRBJ1-2)
CASSLGVAANYGYTF

SEQ ID NO: 639891 - protein, 15 aa, Homo sapiens
  CDR3 for alpha chain variable domain of TCR clone 319946 (TRAV29/DV5, TRAJ54)
CAAIPIVQGAQKLVF

SEQ ID NO: 639892 - protein, 16 aa, Homo sapiens
  CDR3 for beta chain variable domain of TCR clone 319946 (TRBV7-3, TRBJ2-2)
CASSLKGTGTTGELFF

SEQ ID NO: 639893 - protein, 18 aa, Homo sapiens
  CDR3 for alpha chain variable domain of TCR clone 319947 (TRAV12-3, TRAJ52)
CAMSRTNAGGTSYGKLTF

SEQ ID NO: 639894 - protein, 15 aa, Homo sapiens
  CDR3 for beta chain variable domain of TCR clone 319947 (TRBV7-6, TRBJ2-7)
CASSLGGAEPYEQYF

SEQ ID NO: 639895 - protein, 11 aa, Homo sapiens
  CDR3 for alpha chain variable domain of TCR clone 319948 (TRAV12-3, TRAJ27)
CAMANAGKSTF

SEQ ID NO: 639896 - protein, 17 aa, Homo sapiens
  CDR3 for beta chain variable domain of TCR clone 319948 (TRBV11-2, TRBJ2-6)
CASSQRDIFSGANVLTF

SEQ ID NO: 639897 - protein, 15 aa, Homo sapiens
  CDR3 for alpha chain variable domain of TCR clone 319949 (TRAV38-1, TRAJ37)
CAFIFGSGNTGKLIF

SEQ ID NO: 639898 - protein, 19 aa, Homo sapiens
  CDR3 for beta chain variable domain of TCR clone 319949 (TRBV25-1, TRBJ2-2)
CAILVYRVDRGRKTGELFF

SEQ ID NO: 639899 - protein, 14 aa, Homo sapiens
  CDR3 for alpha chain variable domain of TCR clone 319950 (TRAV12-3, TRAJ10)
SHLPLTGGGNKLTF

SEQ ID NO: 639900 - protein, 15 aa, Homo sapiens
  CDR3 for beta chain variable domain of TCR clone 319950 (TRBV6-3, TRBJ2-7)
CASSSPGTVFYERYF

SEQ ID NO: 639901 - protein, 15 aa, Homo sapiens
  CDR3 for alpha chain variable domain of TCR clone 319951 (TRAV8-6, TRAJ10)
CAVSDQAGGGNKLTF

SEQ ID NO: 639902 - protein, 15 aa, Homo sapiens
  CDR3 for beta chain variable domain of TCR clone 319951 (TRBV3-1, TRBJ2-5)
CASSANLGGPVTQYF

SEQ ID NO: 639903 - protein, 13 aa, Homo sapiens
  CDR3 for alpha chain variable domain of TCR clone 319952 (TRAV4, TRAJ42)
CLVGWGSQGNLIF

SEQ ID NO: 639904 - protein, 16 aa, Homo sapiens
  CDR3 for beta chain variable domain of TCR clone 319952 (TRBV5-1, TRBJ2-3)
CASSLQGRVGADTQYF

SEQ ID NO: 639905 - protein, 13 aa, Homo sapiens
  CDR3 for alpha chain variable domain of TCR clone 319953 (TRAV2, TRAJ15)
CAVASQAGTALIF

SEQ ID NO: 639906 - protein, 14 aa, Homo sapiens
  CDR3 for beta chain variable domain of TCR clone 319953 (TRBV5-4, TRBJ2-5)
CASSLVRGQETQYF

SEQ ID NO: 639907 - protein, 14 aa, Homo sapiens
  CDR3 for alpha chain variable domain of TCR clone 319954 (TRAV17, TRAJ57)
CATDASGGSEKLVF

SEQ ID NO: 639908 - protein, 14 aa, Homo sapiens
  CDR3 for beta chain variable domain of TCR clone 319954 (TRBV4-2, TRBJ2-1)
CASGMDRAYNEQFF

SEQ ID NO: 639909 - protein, 15 aa, Homo sapiens
  CDR3 for alpha chain variable domain of TCR clone 319955 (TRAV12-1, TRAJ42)
CVVTRNGGSQGNLIF

SEQ ID NO: 639910 - protein, 14 aa, Homo sapiens
  CDR3 for beta chain variable domain of TCR clone 319955 (TRBV11-2, TRBJ2-3)
CASSLGGGANTQYF

SEQ ID NO: 639911 - protein, 13 aa, Homo sapiens
  CDR3 for alpha chain variable domain of TCR clone 319956 (TRAV35, TRAJ20)
CAGPLSNDYNLSF

SEQ ID NO: 639912 - protein, 17 aa, Homo sapiens
  CDR3 for beta chain variable domain of TCR clone 319956 (TRBV20-1, TRBJ2-1)
CSASSSGLAGSYNEQFF

SEQ ID NO: 639913 - protein, 15 aa, Homo sapiens
  CDR3 for alpha chain variable domain of TCR clone 319957 (TRAV8-3, TRAJ45)
CATSYSGGGADGLTL

SEQ ID NO: 639914 - protein, 20 aa, Homo sapiens
  CDR3 for beta chain variable domain of TCR clone 319957 (TRBV28, TRBJ2-1)
CASTPIGRSPGLAGGNEQFF

SEQ ID NO: 639915 - protein, 13 aa, Homo sapiens
  CDR3 for alpha chain variable domain of TCR clone 319958 (TRAV26-1, TRAJ30)
CIVNMNRDDKVIF

SEQ ID NO: 639916 - protein, 16 aa, Homo sapiens
  CDR3 for beta chain variable domain of TCR clone 319958 (TRBV16, TRBJ2-7)
CASSRPAGESSYEQYF

SEQ ID NO: 639917 - protein, 13 aa, Homo sapiens
  CDR3 for alpha chain variable domain of TCR clone 319959 (TRAV12-2, TRAJ18)
CAVRGSTLGRLYF

SEQ ID NO: 639918 - protein, 16 aa, Homo sapiens
  CDR3 for beta chain variable domain of TCR clone 319959 (TRBV6-1, TRBJ2-1)
CASSARLAGSYNEQFF

SEQ ID NO: 639919 - protein, 13 aa, Homo sapiens
  CDR3 for alpha chain variable domain of TCR clone 319960 (TRAV8-3, TRAJ43)
CAVGPDNNNDMRF

SEQ ID NO: 639920 - protein, 18 aa, Homo sapiens
  CDR3 for beta chain variable domain of TCR clone 319960 (TRBV7-2, TRBJ1-6)
CASSLSSSPPLWEWDQAH

SEQ ID NO: 639921 - protein, 12 aa, Homo sapiens
  CDR3 for alpha chain variable domain of TCR clone 319961 (TRAV13-1, TRAJ21)
CAAKEGFNTFYF

SEQ ID NO: 639922 - protein, 15 aa, Homo sapiens
  CDR3 for beta chain variable domain of TCR clone 319961 (TRBV12-3, TRBJ2-5)
CASSPPTGHQETQYF

SEQ ID NO: 639923 - protein, 12 aa, Homo sapiens
  CDR3 for alpha chain variable domain of TCR clone 319962 (TRAV8-3, TRAJ20)
CAVGANDYKLSF

SEQ ID NO: 639924 - protein, 14 aa, Homo sapiens
  CDR3 for beta chain variable domain of TCR clone 319962 (TRBV7-3, TRBJ2-1)
CASSLAGGTNEQFF

SEQ ID NO: 639925 - protein, 14 aa, Homo sapiens
  CDR3 for alpha chain variable domain of TCR clone 319963 (TRAV1-1, TRAJ27)
CAVIYNTNAGKSTF

SEQ ID NO: 639926 - protein, 14 aa, Homo sapiens
  CDR3 for beta chain variable domain of TCR clone 319963 (TRBV25-1, TRBJ1-1)
CASTHLGGSTEDFF

SEQ ID NO: 639927 - protein, 11 aa, Homo sapiens
  CDR3 for alpha chain variable domain of TCR clone 319964 (TRAV17, TRAJ43)
CATPRSNDMRF

SEQ ID NO: 639928 - protein, 12 aa, Homo sapiens
  CDR3 for beta chain variable domain of TCR clone 319964 (TRBV11-2, TRBJ2-5)
CASSLGQETQYF

SEQ ID NO: 639929 - protein, 19 aa, Homo sapiens
  CDR3 for alpha chain variable domain of TCR clone 319965 (TRAV13-1, TRAJ52)
CAASPYQNAGGTSYGKLTF

SEQ ID NO: 639930 - protein, 11 aa, Homo sapiens
  CDR3 for beta chain variable domain of TCR clone 319965 (TRBV5-6, TRBJ1-2)
CASSRGGGYTF

SEQ ID NO: 639931 - protein, 14 aa, Homo sapiens
  CDR3 for alpha chain variable domain of TCR clone 319966 (TRAV12-1, TRAJ30)
CVPTGTNRDDKIIF

SEQ ID NO: 639932 - protein, 18 aa, Homo sapiens
  CDR3 for beta chain variable domain of TCR clone 319966 (TRBV10-3, TRBJ2-3)
CAISESRVGPMRGDTQYF

SEQ ID NO: 639933 - protein, 15 aa, Homo sapiens
  CDR3 for alpha chain variable domain of TCR clone 319967 (TRAV27, TRAJ38)
CAARRNADNNRKLIW

SEQ ID NO: 639934 - protein, 13 aa, Homo sapiens
  CDR3 for beta chain variable domain of TCR clone 319967 (TRBV12-5, TRBJ2-3)
CASGDRQSDTQYF

SEQ ID NO: 639935 - protein, 12 aa, Homo sapiens
  CDR3 for alpha chain variable domain of TCR clone 319968 (TRAV12-3, TRAJ20)
CAMVRGDYKLSF

SEQ ID NO: 639936 - protein, 13 aa, Homo sapiens
  CDR3 for beta chain variable domain of TCR clone 319968 (TRBV12-4, TRBJ1-1)
CASSLGGTTEAFF

SEQ ID NO: 639937 - protein, 16 aa, Homo sapiens
  CDR3 for alpha chain variable domain of TCR clone 319969 (TRAV12-3, TRAJ53)
CAMSPGSGGSNYKLTF

SEQ ID NO: 639938 - protein, 15 aa, Homo sapiens
  CDR3 for beta chain variable domain of TCR clone 319969 (TRBV7-6, TRBJ2-5)
CASSKPTGPQETQYF

SEQ ID NO: 639939 - protein, 13 aa, Homo sapiens
  CDR3 for alpha chain variable domain of TCR clone 319970 (TRAV3, TRAJ27)
CAVRPLGAGKSTF

SEQ ID NO: 639940 - protein, 16 aa, Homo sapiens
  CDR3 for beta chain variable domain of TCR clone 319970 (TRBV6-5, TRBJ2-7)
CASSSDPTSGFYEQYF

SEQ ID NO: 639941 - protein, 11 aa, Homo sapiens
  CDR3 for alpha chain variable domain of TCR clone 319971 (TRAV17, TRAJ31)
CATSNNARLMF

SEQ ID NO: 639942 - protein, 15 aa, Homo sapiens
  CDR3 for beta chain variable domain of TCR clone 319971 (TRBV27, TRBJ2-1)
CASSNGGGSSNEQFF

SEQ ID NO: 639943 - protein, 13 aa, Homo sapiens
  CDR3 for alpha chain variable domain of TCR clone 319972 (TRAV12-3, TRAJ31)
CATSANNNARLMF

SEQ ID NO: 639944 - protein, 16 aa, Homo sapiens
  CDR3 for beta chain variable domain of TCR clone 319972 (TRBV7-9, TRBJ1-2)
CASSLGFSSGEDGYTF

SEQ ID NO: 639945 - protein, 14 aa, Homo sapiens
  CDR3 for alpha chain variable domain of TCR clone 319973 (TRAV12-2, TRAJ17)
CAVNIKSAGNKLTF

SEQ ID NO: 639946 - protein, 12 aa, Homo sapiens
  CDR3 for beta chain variable domain of TCR clone 319973 (TRBV7-8, TRBJ2-7)
CASSLGDREQYF

SEQ ID NO: 639947 - protein, 13 aa, Homo sapiens
  CDR3 for alpha chain variable domain of TCR clone 319974 (TRAV8-4, TRAJ30)
CAVSVNRDDKIIF

SEQ ID NO: 639948 - protein, 13 aa, Homo sapiens
  CDR3 for beta chain variable domain of TCR clone 319974 (TRBV2, TRBJ2-3)
CASILAGGQGQYF

SEQ ID NO: 639949 - protein, 10 aa, Homo sapiens
  CDR3 for alpha chain variable domain of TCR clone 319975 (TRAV27, TRAJ58)
SETSGSRLAF

SEQ ID NO: 639950 - protein, 12 aa, Homo sapiens
  CDR3 for beta chain variable domain of TCR clone 319975 (TRBV2, TRBJ2-1)
CAYGPPGNEQFF

SEQ ID NO: 639951 - protein, 11 aa, Homo sapiens
  CDR3 for alpha chain variable domain of TCR clone 319976 (TRAV3, TRAJ21)
CSVGNFNKFYF

SEQ ID NO: 639952 - protein, 14 aa, Homo sapiens
  CDR3 for beta chain variable domain of TCR clone 319976 (TRBV25-1, TRBJ1-1)
CASTHLGGNTEAFF

SEQ ID NO: 639953 - protein, 14 aa, Homo sapiens
  CDR3 for alpha chain variable domain of TCR clone 319977 (TRAV38-1, TRAJ45)
CAYYSGGGAAGLTF

SEQ ID NO: 639954 - protein, 12 aa, Homo sapiens
  CDR3 for beta chain variable domain of TCR clone 319977 (TRBV11-2, TRBJ2-2)
CASSLGGGELFF

SEQ ID NO: 639955 - protein, 16 aa, Homo sapiens
  CDR3 for alpha chain variable domain of TCR clone 319978 (TRAV3, TRAJ10)
CAVRDMRAGGGNKLTF

SEQ ID NO: 639956 - protein, 15 aa, Homo sapiens
  CDR3 for beta chain variable domain of TCR clone 319978 (TRBV24-1, TRBJ2-1)
CATSGSGGFYNEQFF

SEQ ID NO: 639957 - protein, 14 aa, Homo sapiens
  CDR3 for alpha chain variable domain of TCR clone 319979 (TRAV38-2/DV8, TRAJ30)
CAYSSADRDDKIIF

SEQ ID NO: 639958 - protein, 16 aa, Homo sapiens
  CDR3 for beta chain variable domain of TCR clone 319979 (TRBV15, TRBJ1-3)
CATSSPIGFSGNTIYF

SEQ ID NO: 639959 - protein, 16 aa, Homo sapiens
  CDR3 for alpha chain variable domain of TCR clone 319980 (TRAV26-2, TRAJ45)
CTTASPIGGGADGLTF

SEQ ID NO: 639960 - protein, 20 aa, Homo sapiens
  CDR3 for beta chain variable domain of TCR clone 319980 (TRBV28, TRBJ2-1)
CASTPIGRSPGLAGGNEQLF

SEQ ID NO: 639961 - protein, 14 aa, Homo sapiens
  CDR3 for alpha chain variable domain of TCR clone 319981 (TRAV12-3, TRAJ10)
SHLPLTGGGNKLTF

SEQ ID NO: 639962 - protein, 14 aa, Homo sapiens
  CDR3 for beta chain variable domain of TCR clone 319981 (TRBV7-2, TRBJ2-7)
CASSPKTSFYEQDF

SEQ ID NO: 639963 - protein, 10 aa, Homo sapiens
  CDR3 for alpha chain variable domain of TCR clone 319982 (TRAV23/DV6, TRAJ31)
CARGGARLMF

SEQ ID NO: 639964 - protein, 16 aa, Homo sapiens
  CDR3 for beta chain variable domain of TCR clone 319982 (TRBV6-1, TRBJ2-1)
CASILRQGSSYNEQFF

SEQ ID NO: 639965 - protein, 14 aa, Homo sapiens
  CDR3 for alpha chain variable domain of TCR clone 319983 (TRAV12-3, TRAJ22)
CAMSLFGSARQLTF

SEQ ID NO: 639966 - protein, 17 aa, Homo sapiens
  CDR3 for beta chain variable domain of TCR clone 319983 (TRBV7-8, TRBJ2-6)
CASSAGTGGAGANVLTF

SEQ ID NO: 639967 - protein, 12 aa, Homo sapiens
  CDR3 for alpha chain variable domain of TCR clone 319984 (TRAV36/DV7, TRAJ37)
CACYGNTGTLIF

SEQ ID NO: 639968 - protein, 14 aa, Homo sapiens
  CDR3 for beta chain variable domain of TCR clone 319984 (TRBV6-3, TRBJ1-4)
CASSGQNLNEKLFF

SEQ ID NO: 639969 - protein, 13 aa, Homo sapiens
  CDR3 for alpha chain variable domain of TCR clone 319985 (TRAV1-2, TRAJ12)
CAVSMDSSYKLIF

SEQ ID NO: 639970 - protein, 12 aa, Homo sapiens
  CDR3 for beta chain variable domain of TCR clone 319985 (TRBV7-9, TRBJ1-4)
CASSTDREKLFF

SEQ ID NO: 639971 - protein, 14 aa, Homo sapiens
  CDR3 for alpha chain variable domain of TCR clone 319986 (TRAV8-4, TRAJ20)
CAVSGRSNDYKLSF

SEQ ID NO: 639972 - protein, 16 aa, Homo sapiens
  CDR3 for beta chain variable domain of TCR clone 319986 (TRBV29-1, TRBJ2-7)
CSVEDAEDGTAYEQYF

SEQ ID NO: 639973 - protein, 14 aa, Homo sapiens
  CDR3 for alpha chain variable domain of TCR clone 319987 (TRAV8-3, TRAJ4)
CAVGAAGGYNKLIF

SEQ ID NO: 639974 - protein, 17 aa, Homo sapiens
  CDR3 for beta chain variable domain of TCR clone 319987 (TRBV19, TRBJ2-7)
CASSISFYDSYPYEQYF

SEQ ID NO: 639975 - protein, 12 aa, Homo sapiens
  CDR3 for alpha chain variable domain of TCR clone 319988 (TRAV29/DV5, TRAJ34)
CAASGNTDKLIF

SEQ ID NO: 639976 - protein, 16 aa, Homo sapiens
  CDR3 for beta chain variable domain of TCR clone 319988 (TRBV5-1, TRBJ2-3)
CASSLQGRVGADTQYF

SEQ ID NO: 639977 - protein, 15 aa, Homo sapiens
  CDR3 for alpha chain variable domain of TCR clone 319989 (TRAV12-2, TRAJ53)
CAVNGGGGSNDKLTF

SEQ ID NO: 639978 - protein, 13 aa, Homo sapiens
  CDR3 for beta chain variable domain of TCR clone 319989 (TRBV3-1, TRBJ1-1)
CASSPGVITEALF

SEQ ID NO: 639979 - protein, 16 aa, Homo sapiens
  CDR3 for alpha chain variable domain of TCR clone 319990 (TRAV30, TRAJ24)
CGTEIVDADGWGKFQF

SEQ ID NO: 639980 - protein, 16 aa, Homo sapiens
  CDR3 for beta chain variable domain of TCR clone 319990 (TRBV28, TRBJ2-7)
CASSLFFETGGPEQYF

SEQ ID NO: 639981 - protein, 15 aa, Homo sapiens
  CDR3 for alpha chain variable domain of TCR clone 319991 (TRAV8-3, TRAJ11)
CAVGLLNSGYSTLSF

SEQ ID NO: 639982 - protein, 16 aa, Homo sapiens
  CDR3 for beta chain variable domain of TCR clone 319991 (TRBV7-9, TRBJ1-2)
CASSLGFSSGEDGYTF

SEQ ID NO: 639983 - protein, 14 aa, Homo sapiens
  CDR3 for alpha chain variable domain of TCR clone 319992 (TRAV34, TRAJ22)
CGADTSGSARQLTF

SEQ ID NO: 639984 - protein, 13 aa, Homo sapiens
  CDR3 for beta chain variable domain of TCR clone 319992 (TRBV10-3, TRBJ2-7)
CASELAVNYEQYF

SEQ ID NO: 639985 - protein, 13 aa, Homo sapiens
  CDR3 for alpha chain variable domain of TCR clone 319993 (TRAV30, TRAJ24)
CGTVTDSWGKLQF

SEQ ID NO: 639986 - protein, 13 aa, Homo sapiens
  CDR3 for beta chain variable domain of TCR clone 319993 (TRBV28, TRBJ1-1)
CASSKQGWTEAFF

SEQ ID NO: 639987 - protein, 14 aa, Homo sapiens
  CDR3 for alpha chain variable domain of TCR clone 319994 (TRAV12-2, TRAJ13)
CAVKKTGGYQKVTF

SEQ ID NO: 639988 - protein, 14 aa, Homo sapiens
  CDR3 for beta chain variable domain of TCR clone 319994 (TRBV7-3, TRBJ2-3)
CASSSTGVADTQYF

SEQ ID NO: 639989 - protein, 18 aa, Homo sapiens
  CDR3 for alpha chain variable domain of TCR clone 319995 (TRAV26-1, TRAJ23)
CIVRVGLEVWNQGGKLIF

SEQ ID NO: 639990 - protein, 14 aa, Homo sapiens
  CDR3 for beta chain variable domain of TCR clone 319995 (TRBV20-1, TRBJ1-1)
CSAQTRIGGTEAFF

SEQ ID NO: 639991 - protein, 11 aa, Homo sapiens
  CDR3 for alpha chain variable domain of TCR clone 319996 (TRAV13-1, TRAJ52)
PGGTSYGKPTF

SEQ ID NO: 639992 - protein, 16 aa, Homo sapiens
  CDR3 for beta chain variable domain of TCR clone 319996 (TRBV28, TRBJ2-7)
CASSPWVATGDLSQYF

SEQ ID NO: 639993 - protein, 16 aa, Homo sapiens
  CDR3 for alpha chain variable domain of TCR clone 319997 (TRAV14/DV4, TRAJ53)
CAMREGGGGSNYKLTF

SEQ ID NO: 639994 - protein, 11 aa, Homo sapiens
  CDR3 for beta chain variable domain of TCR clone 319997 (TRBV7-9, TRBJ2-3)
CASSGPDTQYF

SEQ ID NO: 639995 - protein, 13 aa, Homo sapiens
  CDR3 for alpha chain variable domain of TCR clone 319998 (TRAV23/DV6, TRAJ47)
CAASSQYGNKLDF

SEQ ID NO: 639996 - protein, 15 aa, Homo sapiens
  CDR3 for beta chain variable domain of TCR clone 319998 (TRBV7-3, TRBJ2-1)
CASSLDGNSYNEQFF

SEQ ID NO: 639997 - protein, 17 aa, Homo sapiens
  CDR3 for alpha chain variable domain of TCR clone 319999 (TRAV38-2/DV8, TRAJ23)
CALSRKLIFGHGTELSV

SEQ ID NO: 639998 - protein, 17 aa, Homo sapiens
  CDR3 for beta chain variable domain of TCR clone 319999 (TRBV5-4, TRBJ2-1)
CASSSAGGRGPYNEQFF

SEQ ID NO: 639999 - protein, 13 aa, Homo sapiens
  CDR3 for alpha chain variable domain of TCR clone 320000 (TRAV21, TRAJ27)
CAARPGNAGKSTF

SEQ ID NO: 640000 - protein, 16 aa, Homo sapiens
  CDR3 for beta chain variable domain of TCR clone 320000 (TRBV11-2, TRBJ2-7)
CASSLGAGAYEQYLGR

SEQ ID NO: 640001 - protein, 11 aa, Homo sapiens
  CDR3 for alpha chain variable domain of TCR clone 320001 (TRAV12-2, TRAJ39)
CAVNNMLTFGG

SEQ ID NO: 640002 - protein, 15 aa, Homo sapiens
  CDR3 for beta chain variable domain of TCR clone 320001 (TRBV10-3, TRBJ2-1)
CAIRNGTSGHNEQFF

SEQ ID NO: 640003 - protein, 12 aa, Homo sapiens
  CDR3 for alpha chain variable domain of TCR clone 320002 (TRAV12-3, TRAJ40)
CAMSSGIYKYIF

SEQ ID NO: 640004 - protein, 16 aa, Homo sapiens
  CDR3 for beta chain variable domain of TCR clone 320002 (TRBV7-3, TRBJ2-1)
CASSLEGYRSYNEQFF

SEQ ID NO: 640005 - protein, 13 aa, Homo sapiens
  CDR3 for alpha chain variable domain of TCR clone 320003 (TRAV16, TRAJ34)
CALISYNTDKLIF

SEQ ID NO: 640006 - protein, 14 aa, Homo sapiens
  CDR3 for beta chain variable domain of TCR clone 320003 (TRBV7-9, TRBJ2-2)
CASSLTANTGELFF

SEQ ID NO: 640007 - protein, 13 aa, Homo sapiens
  CDR3 for alpha chain variable domain of TCR clone 320004 (TRAV12-2, TRAJ12)
CAVNWDSSYKLIF

SEQ ID NO: 640008 - protein, 13 aa, Homo sapiens
  CDR3 for beta chain variable domain of TCR clone 320004 (TRBV20-1, TRBJ1-1)
CSARGGGNTEAFF

SEQ ID NO: 640009 - protein, 12 aa, Homo sapiens
  CDR3 for alpha chain variable domain of TCR clone 320005 (TRAV16, TRAJ26)
CALRSYGQNFVF

SEQ ID NO: 640010 - protein, 13 aa, Homo sapiens
  CDR3 for beta chain variable domain of TCR clone 320005 (TRBV4-1, TRBJ2-2)
CASSQENTGELFF

SEQ ID NO: 640011 - protein, 15 aa, Homo sapiens
  CDR3 for alpha chain variable domain of TCR clone 320006 (TRAV12-2, TRAJ23)
CAVKPIYNQGGKLIF

SEQ ID NO: 640012 - protein, 14 aa, Homo sapiens
  CDR3 for beta chain variable domain of TCR clone 320006 (TRBV7-2, TRBJ2-5)
CASSLSGGGETQYF

SEQ ID NO: 640013 - protein, 15 aa, Homo sapiens
  CDR3 for alpha chain variable domain of TCR clone 320007 (TRAV17, TRAJ45)
CATAYSGEGADGLTF

SEQ ID NO: 640014 - protein, 15 aa, Homo sapiens
  CDR3 for beta chain variable domain of TCR clone 320007 (TRBV28, TRBJ2-1)
CASSIIAGGRSEQFF

SEQ ID NO: 640015 - protein, 18 aa, Homo sapiens
  CDR3 for alpha chain variable domain of TCR clone 320008 (TRAV12-3, TRAJ52)
CAMSRTNAGGTSYGKLTF

SEQ ID NO: 640016 - protein, 14 aa, Homo sapiens
  CDR3 for beta chain variable domain of TCR clone 320008 (TRBV7-9, TRBJ2-2)
CASSGLADTGELFF

SEQ ID NO: 640017 - protein, 14 aa, Homo sapiens
  CDR3 for alpha chain variable domain of TCR clone 320009 (TRAV8-6, TRAJ49)
CAVSDPGTGNQFYF

SEQ ID NO: 640018 - protein, 16 aa, Homo sapiens
  CDR3 for beta chain variable domain of TCR clone 320009 (TRBV24-1, TRBJ2-1)
CATSGVAGSNYNEQFF

SEQ ID NO: 640019 - protein, 12 aa, Homo sapiens
  CDR3 for alpha chain variable domain of TCR clone 320010 (TRAV1-2, TRAJ29)
YAVPSGNTPLVF

SEQ ID NO: 640020 - protein, 13 aa, Homo sapiens
  CDR3 for beta chain variable domain of TCR clone 320010 (TRBV5-4, TRBJ1-1)
CASSVDLGTEAFF

SEQ ID NO: 640021 - protein, 14 aa, Homo sapiens
  CDR3 for alpha chain variable domain of TCR clone 320011 (TRAV8-4, TRAJ13)
CAVALSGGYQKVTF

SEQ ID NO: 640022 - protein, 14 aa, Homo sapiens
  CDR3 for beta chain variable domain of TCR clone 320011 (TRBV7-2, TRBJ1-2)
CASSQTGSTYGDTF

SEQ ID NO: 640023 - protein, 17 aa, Homo sapiens
  CDR3 for alpha chain variable domain of TCR clone 320012 (TRAV3, TRAJ6)
FAVRDGPRAGGSYIPTF

SEQ ID NO: 640024 - protein, 14 aa, Homo sapiens
  CDR3 for beta chain variable domain of TCR clone 320012 (TRBV7-9, TRBJ2-7)
CASSTTTGRDEQYF

SEQ ID NO: 640025 - protein, 13 aa, Homo sapiens
  CDR3 for alpha chain variable domain of TCR clone 320013 (TRAV3, TRAJ21)
CAVREPDFNKFYF

SEQ ID NO: 640026 - protein, 19 aa, Homo sapiens
  CDR3 for beta chain variable domain of TCR clone 320013 (TRBV5-1, TRBJ2-4)
CAPAASRLAGEWTKNIQYF

SEQ ID NO: 640027 - protein, 16 aa, Homo sapiens
  CDR3 for alpha chain variable domain of TCR clone 320014 (TRAV20, TRAJ22)
CAVQASSSGSARQLTF

SEQ ID NO: 640028 - protein, 14 aa, Homo sapiens
  CDR3 for beta chain variable domain of TCR clone 320014 (TRBV6-1, TRBJ1-3)
CASVQGGGGNTIYF

SEQ ID NO: 640029 - protein, 14 aa, Homo sapiens
  CDR3 for alpha chain variable domain of TCR clone 320015 (TRAV1-2, TRAJ16)
CAVNRFSDGQKLLF

SEQ ID NO: 640030 - protein, 20 aa, Homo sapiens
  CDR3 for beta chain variable domain of TCR clone 320015 (TRBV28, TRBJ2-1)
CASTPIGRSPGRAGGNEQFF

SEQ ID NO: 640031 - protein, 15 aa, Homo sapiens
  CDR3 for alpha chain variable domain of TCR clone 320016 (TRAV29/DV5, TRAJ28)
CAAGYSGAGSYQLTF

SEQ ID NO: 640032 - protein, 15 aa, Homo sapiens
  CDR3 for beta chain variable domain of TCR clone 320016 (TRBV6-1, TRBJ2-3)
CASSERGGITDTQYF

SEQ ID NO: 640033 - protein, 14 aa, Homo sapiens
  CDR3 for alpha chain variable domain of TCR clone 320017 (TRAV12-1, TRAJ38)
CVVHNAGNNRKLIW

SEQ ID NO: 640034 - protein, 13 aa, Homo sapiens
  CDR3 for beta chain variable domain of TCR clone 320017 (TRBV19, TRBJ2-1)
CAPSRGVYNEQFF

SEQ ID NO: 640035 - protein, 11 aa, Homo sapiens
  CDR3 for alpha chain variable domain of TCR clone 320018 (TRAV2, TRAJ13)
CASGGYQKVTF

SEQ ID NO: 640036 - protein, 13 aa, Homo sapiens
  CDR3 for beta chain variable domain of TCR clone 320018 (TRBV12-4, TRBJ1-1)
CASRRTENTEAFF

SEQ ID NO: 640037 - protein, 13 aa, Homo sapiens
  CDR3 for alpha chain variable domain of TCR clone 320019 (TRAV12-2, TRAJ40)
CAVKRTGNYKYIF

SEQ ID NO: 640038 - protein, 15 aa, Homo sapiens
  CDR3 for beta chain variable domain of TCR clone 320019 (TRBV12-4, TRBJ1-2)
CASSPITGGGYGYTF

SEQ ID NO: 640039 - protein, 13 aa, Homo sapiens
  CDR3 for alpha chain variable domain of TCR clone 320020 (TRAV8-2, TRAJ45)
CVVTTLQEEVLTD

SEQ ID NO: 640040 - protein, 14 aa, Homo sapiens
  CDR3 for beta chain variable domain of TCR clone 320020 (TRBV7-2, TRBJ1-1)
CASSFLTETTEAFF

SEQ ID NO: 640041 - protein, 16 aa, Homo sapiens
  CDR3 for alpha chain variable domain of TCR clone 320021 (TRAV30, TRAJ24)
RGTEIVDADSGGKFQF

SEQ ID NO: 640042 - protein, 14 aa, Homo sapiens
  CDR3 for beta chain variable domain of TCR clone 320021 (TRBV12-5, TRBJ2-5)
CASGSRTHQETQYF

SEQ ID NO: 640043 - protein, 16 aa, Homo sapiens
  CDR3 for alpha chain variable domain of TCR clone 320022 (TRAV30, TRAJ24)
RGTEIVDADSWGKFQF

SEQ ID NO: 640044 - protein, 14 aa, Homo sapiens
  CDR3 for beta chain variable domain of TCR clone 320022 (TRBV12-5, TRBJ2-5)
CASGSRTHQESQYF

SEQ ID NO: 640045 - protein, 13 aa, Homo sapiens
  CDR3 for alpha chain variable domain of TCR clone 320023 (TRAV6, TRAJ20)
CALAVSNDYKLSF

SEQ ID NO: 640046 - protein, 16 aa, Homo sapiens
  CDR3 for beta chain variable domain of TCR clone 320023 (TRBV7-9, TRBJ2-1)
CASSDVAGGSYNEQFC

SEQ ID NO: 640047 - protein, 12 aa, Homo sapiens
  CDR3 for alpha chain variable domain of TCR clone 320024 (TRAV12-3, TRAJ17)
FAMTLTGNKLTF

SEQ ID NO: 640048 - protein, 12 aa, Homo sapiens
  CDR3 for beta chain variable domain of TCR clone 320024 (TRBV2, TRBJ2-1)
CAYGPPGNEQFF

SEQ ID NO: 640049 - protein, 14 aa, Homo sapiens
  CDR3 for alpha chain variable domain of TCR clone 320025 (TRAV2, TRAJ9)
CAVEDRSGGFKTIF

SEQ ID NO: 640050 - protein, 15 aa, Homo sapiens
  CDR3 for beta chain variable domain of TCR clone 320025 (TRBV10-3, TRBJ2-5)
CAISEFGRGQETQYF

SEQ ID NO: 640051 - protein, 18 aa, Homo sapiens
  CDR3 for alpha chain variable domain of TCR clone 320026 (TRAV26-2, TRAJ54)
CILRDVEVGIQGAQKLVF

SEQ ID NO: 640052 - protein, 15 aa, Homo sapiens
  CDR3 for beta chain variable domain of TCR clone 320026 (TRBV12-4, TRBJ1-2)
CASRLGVAGNYGYTF

SEQ ID NO: 640053 - protein, 11 aa, Homo sapiens
  CDR3 for alpha chain variable domain of TCR clone 320027 (TRAV1-2, TRAJ20)
CAVANDYKLSF

SEQ ID NO: 640054 - protein, 13 aa, Homo sapiens
  CDR3 for beta chain variable domain of TCR clone 320027 (TRBV20-1, TRBJ2-7)
CSATHTSGYEQYF

SEQ ID NO: 640055 - protein, 13 aa, Homo sapiens
  CDR3 for alpha chain variable domain of TCR clone 320028 (TRAV12-2, TRAJ20)
CAVNRFDDYKPSF

SEQ ID NO: 640056 - protein, 12 aa, Homo sapiens
  CDR3 for beta chain variable domain of TCR clone 320028 (TRBV19, TRBJ2-1)
CASSQISNEQFF

SEQ ID NO: 640057 - protein, 11 aa, Homo sapiens
  CDR3 for alpha chain variable domain of TCR clone 320029 (TRAV12-2, TRAJ31)
CAILNNARLRF

SEQ ID NO: 640058 - protein, 13 aa, Homo sapiens
  CDR3 for beta chain variable domain of TCR clone 320029 (TRBV20-1, TRBJ1-1)
CSARLGQGTEAFF

SEQ ID NO: 640059 - protein, 11 aa, Homo sapiens
  CDR3 for alpha chain variable domain of TCR clone 320030 (TRAV8-4, TRAJ26)
CAGGEGQNFVF

SEQ ID NO: 640060 - protein, 14 aa, Homo sapiens
  CDR3 for beta chain variable domain of TCR clone 320030 (TRBV7-2, TRBJ2-5)
CASSTGGELRTQYF

SEQ ID NO: 640061 - protein, 14 aa, Homo sapiens
  CDR3 for alpha chain variable domain of TCR clone 320031 (TRAV14/DV4, TRAJ42)
CPRGSLRSQGNLIF

SEQ ID NO: 640062 - protein, 11 aa, Homo sapiens
  CDR3 for beta chain variable domain of TCR clone 320031 (TRBV27, TRBJ2-3)
CASSLGDTQYF

SEQ ID NO: 640063 - protein, 13 aa, Homo sapiens
  CDR3 for alpha chain variable domain of TCR clone 320032 (TRAV27, TRAJ27)
CAGGSTNAGKSTF

SEQ ID NO: 640064 - protein, 13 aa, Homo sapiens
  CDR3 for beta chain variable domain of TCR clone 320032 (TRBV20-1, TRBJ1-2)
CSASLGVGYGYTF

SEQ ID NO: 640065 - protein, 13 aa, Homo sapiens
  CDR3 for alpha chain variable domain of TCR clone 320033 (TRAV23/DV6, TRAJ22)
CATYSGSARQLTF

SEQ ID NO: 640066 - protein, 15 aa, Homo sapiens
  CDR3 for beta chain variable domain of TCR clone 320033 (TRBV11-2, TRBJ1-6)
CASSLDPWAVSPLHF

SEQ ID NO: 640067 - protein, 13 aa, Homo sapiens
  CDR3 for alpha chain variable domain of TCR clone 320034 (TRAV36/DV7, TRAJ49)
CAGDSNTGNQFYF

SEQ ID NO: 640068 - protein, 13 aa, Homo sapiens
  CDR3 for beta chain variable domain of TCR clone 320034 (TRBV10-2, TRBJ2-1)
CASGASGDAKQFF

SEQ ID NO: 640069 - protein, 14 aa, Homo sapiens
  CDR3 for alpha chain variable domain of TCR clone 320035 (TRAV26-1, TRAJ39)
CIVRGSRAGIMLTF

SEQ ID NO: 640070 - protein, 15 aa, Homo sapiens
  CDR3 for beta chain variable domain of TCR clone 320035 (TRBV7-9, TRBJ1-5)
CASSQGRQPNQPQHF

SEQ ID NO: 640071 - protein, 16 aa, Homo sapiens
  CDR3 for alpha chain variable domain of TCR clone 320036 (TRAV17, TRAJ36)
CATVSLNWGKQPRLWD

SEQ ID NO: 640072 - protein, 13 aa, Homo sapiens
  CDR3 for beta chain variable domain of TCR clone 320036 (TRBV4-1, TRBJ1-1)
CASSQLGTGEAFF

SEQ ID NO: 640073 - protein, 16 aa, Homo sapiens
  CDR3 for alpha chain variable domain of TCR clone 320037 (TRAV30, TRAJ24)
CGTAIVDADSWGKFQF

SEQ ID NO: 640074 - protein, 14 aa, Homo sapiens
  CDR3 for beta chain variable domain of TCR clone 320037 (TRBV12-5, TRBJ2-5)
CASGSRTHQEAQYF

SEQ ID NO: 640075 - protein, 17 aa, Homo sapiens
  CDR3 for alpha chain variable domain of TCR clone 320038 (TRAV3, TRAJ38)
FAVRDCLNAGNNRKLIW

SEQ ID NO: 640076 - protein, 15 aa, Homo sapiens
  CDR3 for beta chain variable domain of TCR clone 320038 (TRBV27, TRBJ2-1)
CASSNGGGSSNEQFF

SEQ ID NO: 640077 - protein, 14 aa, Homo sapiens
  CDR3 for alpha chain variable domain of TCR clone 320039 (TRAV1-2, TRAJ6)
CAVRSSGGSYIPTL

SEQ ID NO: 640078 - protein, 14 aa, Homo sapiens
  CDR3 for beta chain variable domain of TCR clone 320039 (TRBV7-9, TRBJ2-2)
CASSTVLGRGELFF

SEQ ID NO: 640079 - protein, 12 aa, Homo sapiens
  CDR3 for alpha chain variable domain of TCR clone 320040 (TRAV25, TRAJ5)
CAGGGGQESTYF

SEQ ID NO: 640080 - protein, 15 aa, Homo sapiens
  CDR3 for beta chain variable domain of TCR clone 320040 (TRBV19, TRBJ2-4)
CASRGPRRGGNIQYF

SEQ ID NO: 640081 - protein, 10 aa, Homo sapiens
  CDR3 for alpha chain variable domain of TCR clone 320041 (TRAV12-2, TRAJ52)
RSTSYGKLTF

SEQ ID NO: 640082 - protein, 14 aa, Homo sapiens
  CDR3 for beta chain variable domain of TCR clone 320041 (TRBV19, TRBJ2-1)
CASPTFVLSGEQFF

SEQ ID NO: 640083 - protein, 14 aa, Homo sapiens
  CDR3 for alpha chain variable domain of TCR clone 320042 (TRAV1-2, TRAJ8)
CAVREDTGFQKLGF

SEQ ID NO: 640084 - protein, 15 aa, Homo sapiens
  CDR3 for beta chain variable domain of TCR clone 320042 (TRBV20-1, TRBJ2-7)
RSARDRVSGMDEQYF

SEQ ID NO: 640085 - protein, 13 aa, Homo sapiens
  CDR3 for alpha chain variable domain of TCR clone 320043 (TRAV8-3, TRAJ34)
CAVGGLNTDKLIF

SEQ ID NO: 640086 - protein, 15 aa, Homo sapiens
  CDR3 for beta chain variable domain of TCR clone 320043 (TRBV20-1, TRBJ2-7)
CSARDRVSGMDEQYF

SEQ ID NO: 640087 - protein, 14 aa, Homo sapiens
  CDR3 for alpha chain variable domain of TCR clone 320044 (TRAV1-2, TRAJ16)
CSVNRFSDGQKLLF

SEQ ID NO: 640088 - protein, 14 aa, Homo sapiens
  CDR3 for beta chain variable domain of TCR clone 320044 (TRBV18, TRBJ2-7)
CASSPRGGAYEQYF

SEQ ID NO: 640089 - protein, 13 aa, Homo sapiens
  CDR3 for alpha chain variable domain of TCR clone 320045 (TRAV2, TRAJ13)
CAVESGGYQKVTF

SEQ ID NO: 640090 - protein, 14 aa, Homo sapiens
  CDR3 for beta chain variable domain of TCR clone 320045 (TRBV7-3, TRBJ1-1)
CASSLKGGNTEAFF

SEQ ID NO: 640091 - protein, 14 aa, Homo sapiens
  CDR3 for alpha chain variable domain of TCR clone 320046 (TRAV29/DV5, TRAJ36)
CAARRKTGANNLFF

SEQ ID NO: 640092 - protein, 14 aa, Homo sapiens
  CDR3 for beta chain variable domain of TCR clone 320046 (TRBV12-5, TRBJ2-5)
CASGSRTHKETQYF

SEQ ID NO: 640093 - protein, 15 aa, Homo sapiens
  CDR3 for alpha chain variable domain of TCR clone 320047 (TRAV35, TRAJ40)
CAGQLWDSGTYKNIF

SEQ ID NO: 640094 - protein, 12 aa, Homo sapiens
  CDR3 for beta chain variable domain of TCR clone 320047 (TRBV7-8, TRBJ2-7)
CASSLAGYEQYF

SEQ ID NO: 640095 - protein, 15 aa, Homo sapiens
  CDR3 for alpha chain variable domain of TCR clone 320048 (TRAV20, TRAJ43)
CAVQAGKGSNNDMRF

SEQ ID NO: 640096 - protein, 14 aa, Homo sapiens
  CDR3 for beta chain variable domain of TCR clone 320048 (TRBV27, TRBJ2-1)
CASRHLGGGKEQFF

SEQ ID NO: 640097 - protein, 18 aa, Homo sapiens
  CDR3 for alpha chain variable domain of TCR clone 320049 (TRAV21, TRAJ52)
CAVRPSPAGGTSYGKLTF

SEQ ID NO: 640098 - protein, 12 aa, Homo sapiens
  CDR3 for beta chain variable domain of TCR clone 320049 (TRBV20-1, TRBJ2-1)
CSAQYTYNEQFF

SEQ ID NO: 640099 - protein, 12 aa, Homo sapiens
  CDR3 for alpha chain variable domain of TCR clone 320050 (TRAV8-3, TRAJ20)
CAVGANYYKLSF

SEQ ID NO: 640100 - protein, 16 aa, Homo sapiens
  CDR3 for beta chain variable domain of TCR clone 320050 (TRBV19, TRBJ2-2)
CASRSPGTGATGEPFF

SEQ ID NO: 640101 - protein, 15 aa, Homo sapiens
  CDR3 for alpha chain variable domain of TCR clone 320051 (TRAV8-4, TRAJ3)
CAVSEPYSSASKLIF

SEQ ID NO: 640102 - protein, 11 aa, Homo sapiens
  CDR3 for beta chain variable domain of TCR clone 320051 (TRBV29-1, TRBJ2-5)
CSEDRTGTQYF

SEQ ID NO: 640103 - protein, 12 aa, Homo sapiens
  CDR3 for alpha chain variable domain of TCR clone 320052 (TRAV12-2, TRAJ42)
CAVGGSQGNPIF

SEQ ID NO: 640104 - protein, 16 aa, Homo sapiens
  CDR3 for beta chain variable domain of TCR clone 320052 (TRBV7-3, TRBJ2-2)
CASSLKRGTLSGELFF

SEQ ID NO: 640105 - protein, 14 aa, Homo sapiens
  CDR3 for alpha chain variable domain of TCR clone 320053 (TRAV1-2, TRAJ8)
CAVREDTGFQKLVL

SEQ ID NO: 640106 - protein, 15 aa, Homo sapiens
  CDR3 for beta chain variable domain of TCR clone 320053 (TRBV6-3, TRBJ2-7)
CASSSPGTVVYEQYF

SEQ ID NO: 640107 - protein, 11 aa, Homo sapiens
  CDR3 for alpha chain variable domain of TCR clone 320054 (TRAV2, TRAJ13)
CASGGYQKVTF

SEQ ID NO: 640108 - protein, 16 aa, Homo sapiens
  CDR3 for beta chain variable domain of TCR clone 320054 (TRBV27, TRBJ2-1)
CASSSRLAGNYNEQFF

SEQ ID NO: 640109 - protein, 14 aa, Homo sapiens
  CDR3 for alpha chain variable domain of TCR clone 320055 (TRAV1-2, TRAJ8)
CAVREDTGFQKLVF

SEQ ID NO: 640110 - protein, 18 aa, Homo sapiens
  CDR3 for beta chain variable domain of TCR clone 320055 (TRBV28, TRBJ2-1)
CASSSTSGRANSYNEQFF

SEQ ID NO: 640111 - protein, 13 aa, Homo sapiens
  CDR3 for alpha chain variable domain of TCR clone 320056 (TRAV12-1, TRAJ49)
CVVNTNTGNQFYF

SEQ ID NO: 640112 - protein, 15 aa, Homo sapiens
  CDR3 for beta chain variable domain of TCR clone 320056 (TRBV7-9, TRBJ1-5)
CASSQGHQPNQPQHF

SEQ ID NO: 640113 - protein, 15 aa, Homo sapiens
  CDR3 for alpha chain variable domain of TCR clone 320057 (TRAV17, TRAJ13)
CATDAGSGGYQKVTF

SEQ ID NO: 640114 - protein, 10 aa, Homo sapiens
  CDR3 for beta chain variable domain of TCR clone 320057 (TRBV11-2, TRBJ2-1)
PGVEYNEQFF

SEQ ID NO: 640115 - protein, 22 aa, Homo sapiens
  CDR3 for alpha chain variable domain of TCR clone 320058 (TRAV3, )
CAVRDHAGNNHIQNPDPAVYQL

SEQ ID NO: 640116 - protein, 14 aa, Homo sapiens
  CDR3 for beta chain variable domain of TCR clone 320058 (TRBV7-2, TRBJ2-7)
CASSSTVGGYEQYF

SEQ ID NO: 640117 - protein, 15 aa, Homo sapiens
  CDR3 for alpha chain variable domain of TCR clone 320059 (TRAV3, TRAJ22)
CAVRDRVGSARQLTF

SEQ ID NO: 640118 - protein, 14 aa, Homo sapiens
  CDR3 for beta chain variable domain of TCR clone 320059 (TRBV7-8, TRBJ2-3)
CANSLEAGTDTQYF

SEQ ID NO: 640119 - protein, 14 aa, Homo sapiens
  CDR3 for alpha chain variable domain of TCR clone 320060 (TRAV1-2, TRAJ8)
CAVREDTGFQKLVF

SEQ ID NO: 640120 - protein, 15 aa, Homo sapiens
  CDR3 for beta chain variable domain of TCR clone 320060 (TRBV12-4, TRBJ1-2)
CASSFVDCLWLHLRF

SEQ ID NO: 640121 - protein, 13 aa, Homo sapiens
  CDR3 for alpha chain variable domain of TCR clone 320061 (TRAV12-1, TRAJ7)
CVVNMRGNNRLAF

SEQ ID NO: 640122 - protein, 11 aa, Homo sapiens
  CDR3 for beta chain variable domain of TCR clone 320061 (TRBV12-4, TRBJ2-3)
CASTATDTQYF

SEQ ID NO: 640123 - protein, 16 aa, Homo sapiens
  CDR3 for alpha chain variable domain of TCR clone 320062 (TRAV3, TRAJ37)
CAVRGKGSGNTGKLIS

SEQ ID NO: 640124 - protein, 14 aa, Homo sapiens
  CDR3 for beta chain variable domain of TCR clone 320062 (TRBV7-2, TRBJ2-7)
CASSPKTSFYEQYF

SEQ ID NO: 640125 - protein, 13 aa, Homo sapiens
  CDR3 for alpha chain variable domain of TCR clone 320063 (TRAV21, TRAJ27)
CAARPGNAGKSTF

SEQ ID NO: 640126 - protein, 15 aa, Homo sapiens
  CDR3 for beta chain variable domain of TCR clone 320063 (TRBV7-3, TRBJ1-6)
CASSLIRDGNSPLHF

SEQ ID NO: 640127 - protein, 14 aa, Homo sapiens
  CDR3 for alpha chain variable domain of TCR clone 320064 (TRAV38-1, TRAJ22)
CAFMKQGSARQLNF

SEQ ID NO: 640128 - protein, 16 aa, Homo sapiens
  CDR3 for beta chain variable domain of TCR clone 320064 (TRBV7-3, TRBJ2-2)
CASSLKRGTLSGELFF

SEQ ID NO: 640129 - protein, 15 aa, Homo sapiens
  CDR3 for alpha chain variable domain of TCR clone 320065 (TRAV3, TRAJ22)
CAVRDRGGSARQLTF

SEQ ID NO: 640130 - protein, 14 aa, Homo sapiens
  CDR3 for beta chain variable domain of TCR clone 320065 (TRBV19, TRBJ2-2)
WASSIAGAFGELFF

SEQ ID NO: 640131 - protein, 16 aa, Homo sapiens
  CDR3 for alpha chain variable domain of TCR clone 320066 (TRAV8-6, TRAJ28)
CSVTSKPGAGSYQLTF

SEQ ID NO: 640132 - protein, 16 aa, Homo sapiens
  CDR3 for beta chain variable domain of TCR clone 320066 (TRBV12-4, TRBJ2-5)
CASSWRPSGDLETQYF

SEQ ID NO: 640133 - protein, 14 aa, Homo sapiens
  CDR3 for alpha chain variable domain of TCR clone 320067 (TRAV19, TRAJ20)
CALSEAPRGRTTTS

SEQ ID NO: 640134 - protein, 13 aa, Homo sapiens
  CDR3 for beta chain variable domain of TCR clone 320067 (TRBV15, TRBJ1-6)
CATSGGLNSPLHF

SEQ ID NO: 640135 - protein, 12 aa, Homo sapiens
  CDR3 for alpha chain variable domain of TCR clone 320068 (TRAV13-1, TRAJ15)
CAASQAGTALIF

SEQ ID NO: 640136 - protein, 18 aa, Homo sapiens
  CDR3 for beta chain variable domain of TCR clone 320068 (TRBV7-9, TRBJ2-3)
CASSLPINGQISTDKQYF

SEQ ID NO: 640137 - protein, 11 aa, Homo sapiens
  CDR3 for alpha chain variable domain of TCR clone 320069 (TRAV1-1, TRAJ20)
CAVFNDYKLSF

SEQ ID NO: 640138 - protein, 16 aa, Homo sapiens
  CDR3 for beta chain variable domain of TCR clone 320069 (TRBV19, TRBJ2-1)
CASSIKLAGSYNEQFF

SEQ ID NO: 640139 - protein, 21 aa, Homo sapiens
  CDR3 for alpha chain variable domain of TCR clone 320070 (TRAV16, TRAJ22)
HLKKPFAPGEDSAMYLRQLTF

SEQ ID NO: 640140 - protein, 15 aa, Homo sapiens
  CDR3 for beta chain variable domain of TCR clone 320070 (TRBV7-9, TRBJ1-6)
CASSSPGRGNSPLHF

SEQ ID NO: 640141 - protein, 12 aa, Homo sapiens
  CDR3 for alpha chain variable domain of TCR clone 320071 (TRAV8-2, TRAJ5)
CVVSDIGRALSF

SEQ ID NO: 640142 - protein, 14 aa, Homo sapiens
  CDR3 for beta chain variable domain of TCR clone 320071 (TRBV19, TRBJ2-7)
CASNFRDTFTGMYF

SEQ ID NO: 640143 - protein, 12 aa, Homo sapiens
  CDR3 for alpha chain variable domain of TCR clone 320072 (TRAV13-1, TRAJ15)
CAASQAGTALIF

SEQ ID NO: 640144 - protein, 14 aa, Homo sapiens
  CDR3 for beta chain variable domain of TCR clone 320072 (TRBV19, TRBJ2-2)
CASSTLDRSGELFF

SEQ ID NO: 640145 - protein, 17 aa, Homo sapiens
  CDR3 for alpha chain variable domain of TCR clone 320073 (TRAV3, TRAJ6)
CAVRDGPRAGGGYRPTF

SEQ ID NO: 640146 - protein, 14 aa, Homo sapiens
  CDR3 for beta chain variable domain of TCR clone 320073 (TRBV7-2, TRBJ2-7)
CASSPKTSFYEQYF

SEQ ID NO: 640147 - protein, 11 aa, Homo sapiens
  CDR3 for alpha chain variable domain of TCR clone 320074 (TRAV3, TRAJ21)
CAVGNFNKFYF

SEQ ID NO: 640148 - protein, 15 aa, Homo sapiens
  CDR3 for beta chain variable domain of TCR clone 320074 (TRBV20-1, TRBJ2-2)
CSARDTRLNTGELFF

SEQ ID NO: 640149 - protein, 13 aa, Homo sapiens
  CDR3 for alpha chain variable domain of TCR clone 320075 (TRAV13-1, TRAJ39)
CSKYSNAGNMLTF

SEQ ID NO: 640150 - protein, 15 aa, Homo sapiens
  CDR3 for beta chain variable domain of TCR clone 320075 (TRBV10-3, TRBJ2-1)
CAISGGREGSDEQFF

SEQ ID NO: 640151 - protein, 18 aa, Homo sapiens
  CDR3 for alpha chain variable domain of TCR clone 320076 (TRAV12-3, TRAJ52)
CAMSVGGAGGTSYGKLTF

SEQ ID NO: 640152 - protein, 15 aa, Homo sapiens
  CDR3 for beta chain variable domain of TCR clone 320076 (TRBV27, TRBJ1-6)
CGSSFDRGLGSPLHF

SEQ ID NO: 640153 - protein, 17 aa, Homo sapiens
  CDR3 for alpha chain variable domain of TCR clone 320077 (TRAV27, TRAJ13)
CAGARILGVTRKLPLEL

SEQ ID NO: 640154 - protein, 14 aa, Homo sapiens
  CDR3 for beta chain variable domain of TCR clone 320077 (TRBV20-1, TRBJ2-2)
CSAPDTANTGELFF

SEQ ID NO: 640155 - protein, 15 aa, Homo sapiens
  CDR3 for alpha chain variable domain of TCR clone 320078 (TRAV10, TRAJ42)
SLLHLWGGSQGNLIF

SEQ ID NO: 640156 - protein, 16 aa, Homo sapiens
  CDR3 for beta chain variable domain of TCR clone 320078 (TRBV19, TRBJ2-1)
CASSKAGPSSYNEQFF

SEQ ID NO: 640157 - protein, 15 aa, Homo sapiens
  CDR3 for alpha chain variable domain of TCR clone 320079 (TRAV17, TRAJ13)
CATDAGSGGYQKVTF

SEQ ID NO: 640158 - protein, 17 aa, Homo sapiens
  CDR3 for beta chain variable domain of TCR clone 320079 (TRBV11-2, TRBJ2-1)
CASSLYPPGVEYNEQFI

SEQ ID NO: 640159 - protein, 16 aa, Homo sapiens
  CDR3 for alpha chain variable domain of TCR clone 320080 (TRAV21, TRAJ52)
CAVTNAGGTSYGKLTF

SEQ ID NO: 640160 - protein, 14 aa, Homo sapiens
  CDR3 for beta chain variable domain of TCR clone 320080 (TRBV7-3, TRBJ2-1)
CASSLAGGTNEQFF

SEQ ID NO: 640161 - protein, 14 aa, Homo sapiens
  CDR3 for alpha chain variable domain of TCR clone 320081 (TRAV1-2, TRAJ27)
CAPAEYTNAGKSTF

SEQ ID NO: 640162 - protein, 18 aa, Homo sapiens
  CDR3 for beta chain variable domain of TCR clone 320081 (TRBV28, TRBJ1-2)
CASRQQHGKRGSNYGYTF

SEQ ID NO: 640163 - protein, 12 aa, Homo sapiens
  CDR3 for alpha chain variable domain of TCR clone 320082 (TRAV27, TRAJ35)
CAGADFGNVMHC

SEQ ID NO: 640164 - protein, 15 aa, Homo sapiens
  CDR3 for beta chain variable domain of TCR clone 320082 (TRBV7-2, TRBJ1-2)
CASSLVSGGDYGYTF

SEQ ID NO: 640165 - protein, 18 aa, Homo sapiens
  CDR3 for alpha chain variable domain of TCR clone 320083 (TRAV26-2, TRAJ45)
CILRVDKYSGGRADGLTF

SEQ ID NO: 640166 - protein, 11 aa, Homo sapiens
  CDR3 for beta chain variable domain of TCR clone 320083 (TRBV12-4, TRBJ2-3)
CASAATDTQYF

SEQ ID NO: 640167 - protein, 11 aa, Homo sapiens
  CDR3 for alpha chain variable domain of TCR clone 320084 (TRAV1-2, TRAJ31)
CAVKNNARLMF

SEQ ID NO: 640168 - protein, 13 aa, Homo sapiens
  CDR3 for beta chain variable domain of TCR clone 320084 (TRBV7-7, TRBJ1-1)
CASSLGANTEAFF

SEQ ID NO: 640169 - protein, 15 aa, Homo sapiens
  CDR3 for alpha chain variable domain of TCR clone 320085 (TRAV12-1, TRAJ9)
CVVSFGDTGGFKTIL

SEQ ID NO: 640170 - protein, 13 aa, Homo sapiens
  CDR3 for beta chain variable domain of TCR clone 320085 (TRBV19, TRBJ1-1)
CASSPQMNTEAFF

SEQ ID NO: 640171 - protein, 14 aa, Homo sapiens
  CDR3 for alpha chain variable domain of TCR clone 320086 (TRAV21, TRAJ52)
CGRAGGTSYGKLSF

SEQ ID NO: 640172 - protein, 14 aa, Homo sapiens
  CDR3 for beta chain variable domain of TCR clone 320086 (TRBV19, TRBJ1-2)
CASSVLGYNYGYTF

SEQ ID NO: 640173 - protein, 15 aa, Homo sapiens
  CDR3 for alpha chain variable domain of TCR clone 320087 (TRAV3, TRAJ22)
CAVRDRGGSARQLTF

SEQ ID NO: 640174 - protein, 14 aa, Homo sapiens
  CDR3 for beta chain variable domain of TCR clone 320087 (TRBV5-1, TRBJ1-6)
CASARDRNNSPLHF

SEQ ID NO: 640175 - protein, 13 aa, Homo sapiens
  CDR3 for alpha chain variable domain of TCR clone 320088 (TRAV8-3, TRAJ10)
WAILTGGGNKLTF

SEQ ID NO: 640176 - protein, 10 aa, Homo sapiens
  CDR3 for beta chain variable domain of TCR clone 320088 (TRBV20-1, TRBJ2-5)
CIARFETQYF

SEQ ID NO: 640177 - protein, 14 aa, Homo sapiens
  CDR3 for alpha chain variable domain of TCR clone 320089 (TRAV22, TRAJ28)
CALYSGAGSYQLTF

SEQ ID NO: 640178 - protein, 16 aa, Homo sapiens
  CDR3 for beta chain variable domain of TCR clone 320089 (TRBV24-1, TRBJ2-3)
CATSDPGTGATDTQYS

SEQ ID NO: 640179 - protein, 14 aa, Homo sapiens
  CDR3 for alpha chain variable domain of TCR clone 320090 (TRAV13-1, TRAJ9)
CAASRPSGGFKTIF

SEQ ID NO: 640180 - protein, 16 aa, Homo sapiens
  CDR3 for beta chain variable domain of TCR clone 320090 (TRBV7-3, TRBJ2-2)
CASSLKRGTLSGELFF

SEQ ID NO: 640181 - protein, 13 aa, Homo sapiens
  CDR3 for alpha chain variable domain of TCR clone 320091 (TRAV12-3, TRAJ33)
CAMSVNSNYQLIW

SEQ ID NO: 640182 - protein, 15 aa, Homo sapiens
  CDR3 for beta chain variable domain of TCR clone 320091 (TRBV20-1, TRBJ2-7)
CIARDRVSGMDEQYF

SEQ ID NO: 640183 - protein, 15 aa, Homo sapiens
  CDR3 for alpha chain variable domain of TCR clone 320092 (TRAV8-3, TRAJ45)
CASSYSGGGADGLTF

SEQ ID NO: 640184 - protein, 17 aa, Homo sapiens
  CDR3 for beta chain variable domain of TCR clone 320092 (TRBV7-8, TRBJ1-2)
CASSLRPLQGHLYGYTC

SEQ ID NO: 640185 - protein, 14 aa, Homo sapiens
  CDR3 for alpha chain variable domain of TCR clone 320093 (TRAV8-3, TRAJ35)
CAVVPQGVGNVLHC

SEQ ID NO: 640186 - protein, 15 aa, Homo sapiens
  CDR3 for beta chain variable domain of TCR clone 320093 (TRBV6-1, TRBJ2-2)
CASSAGQGYTGELFF

SEQ ID NO: 640187 - protein, 13 aa, Homo sapiens
  CDR3 for alpha chain variable domain of TCR clone 320094 (TRAV16, TRAJ29)
CALSRRGNTHLVF

SEQ ID NO: 640188 - protein, 15 aa, Homo sapiens
  CDR3 for beta chain variable domain of TCR clone 320094 (TRBV4-1, TRBJ2-3)
CASSRGQGIPDTQYF

SEQ ID NO: 640189 - protein, 16 aa, Homo sapiens
  CDR3 for alpha chain variable domain of TCR clone 320095 (TRAV13-1, TRAJ48)
CAASIFGNFGNEKLTF

SEQ ID NO: 640190 - protein, 16 aa, Homo sapiens
  CDR3 for beta chain variable domain of TCR clone 320095 (TRBV18, TRBJ1-5)
CASSPYRVEGNQAQHF

SEQ ID NO: 640191 - protein, 18 aa, Homo sapiens
  CDR3 for alpha chain variable domain of TCR clone 320096 (TRAV26-1, TRAJ23)
CIVRVGLEVWNQGGKLGF

SEQ ID NO: 640192 - protein, 14 aa, Homo sapiens
  CDR3 for beta chain variable domain of TCR clone 320096 (TRBV7-6, TRBJ2-3)
CASSLGTVTDTQYF

SEQ ID NO: 640193 - protein, 12 aa, Homo sapiens
  CDR3 for alpha chain variable domain of TCR clone 320097 (TRAV25, TRAJ47)
CAGQGYGNKLVF

SEQ ID NO: 640194 - protein, 12 aa, Homo sapiens
  CDR3 for beta chain variable domain of TCR clone 320097 (TRBV7-8, TRBJ2-7)
CASSLGDREQYF

SEQ ID NO: 640195 - protein, 15 aa, Homo sapiens
  CDR3 for alpha chain variable domain of TCR clone 320098 (TRAV8-3, TRAJ45)
CASSYSGGGADGLTF

SEQ ID NO: 640196 - protein, 14 aa, Homo sapiens
  CDR3 for beta chain variable domain of TCR clone 320098 (TRBV5-5, TRBJ1-2)
CASSLDPYNYGYTF

SEQ ID NO: 640197 - protein, 13 aa, Homo sapiens
  CDR3 for alpha chain variable domain of TCR clone 320099 (TRAV1-1, TRAJ29)
CAATLSGNTPLVF

SEQ ID NO: 640198 - protein, 14 aa, Homo sapiens
  CDR3 for beta chain variable domain of TCR clone 320099 (TRBV15, TRBJ2-5)
CATSIGGLGETQYF

SEQ ID NO: 640199 - protein, 13 aa, Homo sapiens
  CDR3 for alpha chain variable domain of TCR clone 320100 (TRAV8-6, TRAJ21)
CAVSPSSLNKFYF

SEQ ID NO: 640200 - protein, 14 aa, Homo sapiens
  CDR3 for beta chain variable domain of TCR clone 320100 (TRBV7-9, TRBJ2-5)
CVSSLDTAQETQYV

SEQ ID NO: 640201 - protein, 18 aa, Homo sapiens
  CDR3 for alpha chain variable domain of TCR clone 320101 (TRAV26-2, TRAJ45)
CILRLWGYSGGGADGLTL

SEQ ID NO: 640202 - protein, 17 aa, Homo sapiens
  CDR3 for beta chain variable domain of TCR clone 320101 (TRBV28, TRBJ2-3)
CASSPSPAGGRVDTQYF

SEQ ID NO: 640203 - protein, 15 aa, Homo sapiens
  CDR3 for alpha chain variable domain of TCR clone 320102 (TRAV3, TRAJ47)
CAVRDIGEYGNKLVF

SEQ ID NO: 640204 - protein, 13 aa, Homo sapiens
  CDR3 for beta chain variable domain of TCR clone 320102 (TRBV13, TRBJ2-5)
CQQLRTGWETQYF

SEQ ID NO: 640205 - protein, 19 aa, Homo sapiens
  CDR3 for alpha chain variable domain of TCR clone 320103 (TRAV1-1, TRAJ13)
CLLLLRCEGESGGYQKVTF

SEQ ID NO: 640206 - protein, 19 aa, Homo sapiens
  CDR3 for beta chain variable domain of TCR clone 320103 (TRBV14, TRBJ2-1)
CASSQDQLWETPEYNEQFF

SEQ ID NO: 640207 - protein, 14 aa, Homo sapiens
  CDR3 for alpha chain variable domain of TCR clone 320104 (TRAV12-2, TRAJ17)
CAGLFKAAGNKLTF

SEQ ID NO: 640208 - protein, 12 aa, Homo sapiens
  CDR3 for beta chain variable domain of TCR clone 320104 (TRBV11-2, TRBJ2-2)
CASSLGGGELFF

SEQ ID NO: 640209 - protein, 21 aa, Homo sapiens
  CDR3 for alpha chain variable domain of TCR clone 320105 (TRAV1-2, TRAJ18)
CAVRGEAQPWGGYTLEEELSC

SEQ ID NO: 640210 - protein, 13 aa, Homo sapiens
  CDR3 for beta chain variable domain of TCR clone 320105 (TRBV20-1, TRBJ1-1)
CSARVGGNTEAFF

SEQ ID NO: 640211 - protein, 11 aa, Homo sapiens
  CDR3 for alpha chain variable domain of TCR clone 320106 (TRAV1-1, TRAJ23)
CAVRQGGKLIF

SEQ ID NO: 640212 - protein, 20 aa, Homo sapiens
  CDR3 for beta chain variable domain of TCR clone 320106 (TRBV7-8, TRBJ2-2)
CASSYLFPGPTIHITGELFL

SEQ ID NO: 640213 - protein, 11 aa, Homo sapiens
  CDR3 for alpha chain variable domain of TCR clone 320107 (TRAV25, TRAJ34)
CASYNTDKLIF

SEQ ID NO: 640214 - protein, 15 aa, Homo sapiens
  CDR3 for beta chain variable domain of TCR clone 320107 (TRBV20-1, TRBJ2-7)
CSARDRVSGMDEQYF

SEQ ID NO: 640215 - protein, 14 aa, Homo sapiens
  CDR3 for alpha chain variable domain of TCR clone 320108 (TRAV23/DV6, TRAJ13)
CAAMYSGGYQKVIF

SEQ ID NO: 640216 - protein, 16 aa, Homo sapiens
  CDR3 for beta chain variable domain of TCR clone 320108 (TRBV9, TRBJ2-1)
CASSALGGIGNNEQFF

SEQ ID NO: 640217 - protein, 15 aa, Homo sapiens
  CDR3 for alpha chain variable domain of TCR clone 320109 (TRAV23/DV6, TRAJ30)
CAASSQESRDDKTIF

SEQ ID NO: 640218 - protein, 17 aa, Homo sapiens
  CDR3 for beta chain variable domain of TCR clone 320109 (TRBV4-3, TRBJ2-1)
CASSQFSSGRASGEQFF

SEQ ID NO: 640219 - protein, 12 aa, Homo sapiens
  CDR3 for alpha chain variable domain of TCR clone 320110 (TRAV12-1, TRAJ40)
CVFYSGTYKYIF

SEQ ID NO: 640220 - protein, 18 aa, Homo sapiens
  CDR3 for beta chain variable domain of TCR clone 320110 (TRBV12-4, TRBJ2-2)
CASSLVAGTRARTGELFF

SEQ ID NO: 640221 - protein, 18 aa, Homo sapiens
  CDR3 for alpha chain variable domain of TCR clone 320111 (TRAV1-2, TRAJ8)
CLLPLCCERGHSFQKLVF

SEQ ID NO: 640222 - protein, 16 aa, Homo sapiens
  CDR3 for beta chain variable domain of TCR clone 320111 (TRBV4-3, TRBJ2-1)
CASSPALDRGVNEQFF

SEQ ID NO: 640223 - protein, 15 aa, Homo sapiens
  CDR3 for alpha chain variable domain of TCR clone 320112 (TRAV38-2/DV8, TRAJ45)
CAYWDSGGDADGLTF

SEQ ID NO: 640224 - protein, 15 aa, Homo sapiens
  CDR3 for beta chain variable domain of TCR clone 320112 (TRBV20-1, TRBJ2-7)
CSARDRVSGMDEQYF

SEQ ID NO: 640225 - protein, 13 aa, Homo sapiens
  CDR3 for alpha chain variable domain of TCR clone 320113 (TRAV8-3, TRAJ8)
WDPMNTGFQKLVF

SEQ ID NO: 640226 - protein, 13 aa, Homo sapiens
  CDR3 for beta chain variable domain of TCR clone 320113 (TRBV10-2, TRBJ2-3)
CASSESGDHTQYF

SEQ ID NO: 640227 - protein, 16 aa, Homo sapiens
  CDR3 for alpha chain variable domain of TCR clone 320114 (TRAV4, TRAJ22)
CLVGDLYSGSARQLTF

SEQ ID NO: 640228 - protein, 15 aa, Homo sapiens
  CDR3 for beta chain variable domain of TCR clone 320114 (TRBV28, TRBJ2-5)
CASSSPLGGGETQYF

SEQ ID NO: 640229 - protein, 15 aa, Homo sapiens
  CDR3 for alpha chain variable domain of TCR clone 320115 (TRAV8-3, TRAJ27)
CAVGPSKTNAGKSAF

SEQ ID NO: 640230 - protein, 15 aa, Homo sapiens
  CDR3 for beta chain variable domain of TCR clone 320115 (TRBV4-1, TRBJ2-5)
CASSQWDLYQETQYF

SEQ ID NO: 640231 - protein, 14 aa, Homo sapiens
  CDR3 for alpha chain variable domain of TCR clone 320116 (TRAV8-2, TRAJ4)
CVVSPSGGYNKLIF

SEQ ID NO: 640232 - protein, 12 aa, Homo sapiens
  CDR3 for beta chain variable domain of TCR clone 320116 (TRBV14, TRBJ2-7)
CASSRLKGEQYF

SEQ ID NO: 640233 - protein, 12 aa, Homo sapiens
  CDR3 for alpha chain variable domain of TCR clone 320117 (TRAV12-1, TRAJ40)
CVVYSGTYKYNF

SEQ ID NO: 640234 - protein, 18 aa, Homo sapiens
  CDR3 for beta chain variable domain of TCR clone 320117 (TRBV11-2, TRBJ2-3)
CASSFGGASRGAPNTQYF

SEQ ID NO: 640235 - protein, 15 aa, Homo sapiens
  CDR3 for alpha chain variable domain of TCR clone 320118 (TRAV13-2, TRAJ10)
CAENRDTGGGNKLTF

SEQ ID NO: 640236 - protein, 13 aa, Homo sapiens
  CDR3 for beta chain variable domain of TCR clone 320118 (TRBV7-9, TRBJ1-6)
CASSLASLSPLHF

SEQ ID NO: 640237 - protein, 13 aa, Homo sapiens
  CDR3 for alpha chain variable domain of TCR clone 320119 (TRAV13-1, TRAJ12)
CAASPDSSYKLIF

SEQ ID NO: 640238 - protein, 17 aa, Homo sapiens
  CDR3 for beta chain variable domain of TCR clone 320119 (TRBV19, TRBJ2-6)
CASSTGQVFSGANVLTF

SEQ ID NO: 640239 - protein, 10 aa, Homo sapiens
  CDR3 for alpha chain variable domain of TCR clone 320120 (TRAV21, TRAJ43)
CAVRIGDMRC

SEQ ID NO: 640240 - protein, 13 aa, Homo sapiens
  CDR3 for beta chain variable domain of TCR clone 320120 (TRBV20-1, TRBJ2-7)
CSAPGLADYEQYF

SEQ ID NO: 640241 - protein, 12 aa, Homo sapiens
  CDR3 for alpha chain variable domain of TCR clone 320121 (TRAV21, TRAJ11)
CAATSGYSTLTF

SEQ ID NO: 640242 - protein, 14 aa, Homo sapiens
  CDR3 for beta chain variable domain of TCR clone 320121 (TRBV15, TRBJ2-3)
CATRSGTSTDTQYF

SEQ ID NO: 640243 - protein, 16 aa, Homo sapiens
  CDR3 for alpha chain variable domain of TCR clone 320122 (TRAV1-2, TRAJ10)
CAVRGVLTGGGNKLTF

SEQ ID NO: 640244 - protein, 14 aa, Homo sapiens
  CDR3 for beta chain variable domain of TCR clone 320122 (TRBV7-2, TRBJ2-5)
CASSLSGGGETQYF

SEQ ID NO: 640245 - protein, 16 aa, Homo sapiens
  CDR3 for alpha chain variable domain of TCR clone 320123 (TRAV26-1, TRAJ13)
CIVSPKDSGGYQKVTF

SEQ ID NO: 640246 - protein, 12 aa, Homo sapiens
  CDR3 for beta chain variable domain of TCR clone 320123 (TRBV7-2, TRBJ2-2)
CATQIVTGELFF

SEQ ID NO: 640247 - protein, 12 aa, Homo sapiens
  CDR3 for alpha chain variable domain of TCR clone 320124 (TRAV16, TRAJ56)
CAPTGANSQLTF

SEQ ID NO: 640248 - protein, 17 aa, Homo sapiens
  CDR3 for beta chain variable domain of TCR clone 320124 (TRBV27, TRBJ2-6)
CASSLTGFASGANVLTF

SEQ ID NO: 640249 - protein, 14 aa, Homo sapiens
  CDR3 for alpha chain variable domain of TCR clone 320125 (TRAV12-3, TRAJ10)
SHLPLTGGGNKLTF

SEQ ID NO: 640250 - protein, 15 aa, Homo sapiens
  CDR3 for beta chain variable domain of TCR clone 320125 (TRBV7-9, TRBJ2-2)
CASSFGQLNTGELFF

SEQ ID NO: 640251 - protein, 15 aa, Homo sapiens
  CDR3 for alpha chain variable domain of TCR clone 320126 (TRAV26-1, TRAJ44)
CIVGANTGTASKLTF

SEQ ID NO: 640252 - protein, 14 aa, Homo sapiens
  CDR3 for beta chain variable domain of TCR clone 320126 (TRBV20-1, TRBJ2-5)
CSARDGRAGETQYF

SEQ ID NO: 640253 - protein, 14 aa, Homo sapiens
  CDR3 for alpha chain variable domain of TCR clone 320127 (TRAV4, TRAJ9)
CLVGSGTGGFKTIF

SEQ ID NO: 640254 - protein, 14 aa, Homo sapiens
  CDR3 for beta chain variable domain of TCR clone 320127 (TRBV7-2, TRBJ1-1)
CASSFLTGTTEAFF

SEQ ID NO: 640255 - protein, 16 aa, Homo sapiens
  CDR3 for alpha chain variable domain of TCR clone 320128 (TRAV8-3, TRAJ42)
CAVGEGNGGSQGNLIF

SEQ ID NO: 640256 - protein, 14 aa, Homo sapiens
  CDR3 for beta chain variable domain of TCR clone 320128 (TRBV7-2, TRBJ2-1)
CASSGGGARNEQFF

SEQ ID NO: 640257 - protein, 13 aa, Homo sapiens
  CDR3 for alpha chain variable domain of TCR clone 320129 (TRAV12-2, TRAJ3)
CAFQYSSATKIIF

SEQ ID NO: 640258 - protein, 11 aa, Homo sapiens
  CDR3 for beta chain variable domain of TCR clone 320129 (TRBV20-1, TRBJ2-3)
CSGTSSTTQYF

SEQ ID NO: 640259 - protein, 15 aa, Homo sapiens
  CDR3 for alpha chain variable domain of TCR clone 320130 (TRAV12-2, TRAJ53)
CAVNGGGGSDYKLTF

SEQ ID NO: 640260 - protein, 17 aa, Homo sapiens
  CDR3 for beta chain variable domain of TCR clone 320130 (TRBV7-3, TRBJ2-3)
CASSLMKRMRGADTQYF

SEQ ID NO: 640261 - protein, 10 aa, Homo sapiens
  CDR3 for alpha chain variable domain of TCR clone 320131 (TRAV12-1, TRAJ20)
CAIYFQRLQA

SEQ ID NO: 640262 - protein, 15 aa, Homo sapiens
  CDR3 for beta chain variable domain of TCR clone 320131 (TRBV5-1, TRBJ1-1)
CASSLGEGENTEASF

SEQ ID NO: 640263 - protein, 14 aa, Homo sapiens
  CDR3 for alpha chain variable domain of TCR clone 320132 (TRAV1-1, TRAJ27)
CAVIYNTNAGKSTF

SEQ ID NO: 640264 - protein, 15 aa, Homo sapiens
  CDR3 for beta chain variable domain of TCR clone 320132 (TRBV7-2, TRBJ2-1)
CASSLAGAFIDTQYF

SEQ ID NO: 640265 - protein, 14 aa, Homo sapiens
  CDR3 for alpha chain variable domain of TCR clone 320133 (TRAV35, TRAJ50)
CAGHRQTSYDKVIF

SEQ ID NO: 640266 - protein, 13 aa, Homo sapiens
  CDR3 for beta chain variable domain of TCR clone 320133 (TRBV7-7, TRBJ2-3)
CASSLSRADTQYF

SEQ ID NO: 640267 - protein, 11 aa, Homo sapiens
  CDR3 for alpha chain variable domain of TCR clone 320134 (TRAV8-6, TRAJ23)
CAVISGGKLFF

SEQ ID NO: 640268 - protein, 14 aa, Homo sapiens
  CDR3 for beta chain variable domain of TCR clone 320134 (TRBV12-5, TRBJ2-5)
CASGSRTHQETQYF

SEQ ID NO: 640269 - protein, 11 aa, Homo sapiens
  CDR3 for alpha chain variable domain of TCR clone 320135 (TRAV12-2, TRAJ31)
CAVTRWARLMF

SEQ ID NO: 640270 - protein, 17 aa, Homo sapiens
  CDR3 for beta chain variable domain of TCR clone 320135 (TRBV6-5, TRBJ2-2)
CASSYSTSGGNTGELFF

SEQ ID NO: 640271 - protein, 14 aa, Homo sapiens
  CDR3 for alpha chain variable domain of TCR clone 320136 (TRAV12-2, TRAJ13)
CAVTKTGGYQKVTF

SEQ ID NO: 640272 - protein, 13 aa, Homo sapiens
  CDR3 for beta chain variable domain of TCR clone 320136 (TRBV12-5, TRBJ2-3)
CASGDRQSDTQYF

SEQ ID NO: 640273 - protein, 13 aa, Homo sapiens
  CDR3 for alpha chain variable domain of TCR clone 320137 (TRAV27, TRAJ42)
CAGARGSQGNLIF

SEQ ID NO: 640274 - protein, 16 aa, Homo sapiens
  CDR3 for beta chain variable domain of TCR clone 320137 (TRBV5-1, TRBJ2-7)
CASSYASTSSGGEQYF

SEQ ID NO: 640275 - protein, 14 aa, Homo sapiens
  CDR3 for alpha chain variable domain of TCR clone 320138 (TRAV12-3, TRAJ10)
SHLPLTGGGNKLTF

SEQ ID NO: 640276 - protein, 13 aa, Homo sapiens
  CDR3 for beta chain variable domain of TCR clone 320138 (TRBV5-1, TRBJ2-7)
CASSATGGNEQYF

SEQ ID NO: 640277 - protein, 15 aa, Homo sapiens
  CDR3 for alpha chain variable domain of TCR clone 320139 (TRAV13-1, TRAJ9)
CVASTLNTGGFKTIF

SEQ ID NO: 640278 - protein, 15 aa, Homo sapiens
  CDR3 for beta chain variable domain of TCR clone 320139 (TRBV6-5, TRBJ2-4)
CASSLRESPKNMQYF

SEQ ID NO: 640279 - protein, 15 aa, Homo sapiens
  CDR3 for alpha chain variable domain of TCR clone 320140 (TRAV12-3, TRAJ49)
CAMAVTPNTGHQFYF

SEQ ID NO: 640280 - protein, 18 aa, Homo sapiens
  CDR3 for beta chain variable domain of TCR clone 320140 (TRBV4-1, TRBJ1-5)
CASSQDPRGQGLNQTQHF

SEQ ID NO: 640281 - protein, 14 aa, Homo sapiens
  CDR3 for alpha chain variable domain of TCR clone 320141 (TRAV8-3, TRAJ36)
CAVGTQTGANNLSF

SEQ ID NO: 640282 - protein, 14 aa, Homo sapiens
  CDR3 for beta chain variable domain of TCR clone 320141 (TRBV25-1, TRBJ1-1)
CASTHLGGNTEAFF

SEQ ID NO: 640283 - protein, 12 aa, Homo sapiens
  CDR3 for alpha chain variable domain of TCR clone 320142 (TRAV8-6, TRAJ36)
CAVSDWLGQTTS

SEQ ID NO: 640284 - protein, 11 aa, Homo sapiens
  CDR3 for beta chain variable domain of TCR clone 320142 (TRBV12-4, TRBJ2-3)
CASTATDTQYF

SEQ ID NO: 640285 - protein, 15 aa, Homo sapiens
  CDR3 for alpha chain variable domain of TCR clone 320143 (TRAV12-3, TRAJ49)
CAMAVTRNTGNHFYF

SEQ ID NO: 640286 - protein, 18 aa, Homo sapiens
  CDR3 for beta chain variable domain of TCR clone 320143 (TRBV4-1, TRBJ1-5)
CASSQDPRGQGLNQPQHF

SEQ ID NO: 640287 - protein, 13 aa, Homo sapiens
  CDR3 for alpha chain variable domain of TCR clone 320144 (TRAV12-3, TRAJ9)
CAMRNTGGFKTIF

SEQ ID NO: 640288 - protein, 12 aa, Homo sapiens
  CDR3 for beta chain variable domain of TCR clone 320144 (TRBV12-4, TRBJ2-7)
CASSLGGYEQYF

SEQ ID NO: 640289 - protein, 14 aa, Homo sapiens
  CDR3 for alpha chain variable domain of TCR clone 320145 (TRAV1-2, TRAJ16)
CAVNRFSDGQKLLF

SEQ ID NO: 640290 - protein, 15 aa, Homo sapiens
  CDR3 for beta chain variable domain of TCR clone 320145 (TRBV6-6, TRBJ2-7)
CASSYSYGCSYEQYF

SEQ ID NO: 640291 - protein, 19 aa, Homo sapiens
  CDR3 for alpha chain variable domain of TCR clone 320146 (TRAV26-1, TRAJ29)
CCVLLHRQSRGIGNTPLVF

SEQ ID NO: 640292 - protein, 14 aa, Homo sapiens
  CDR3 for beta chain variable domain of TCR clone 320146 (TRBV25-1, TRBJ1-1)
CASTHLGGNTEAFF

SEQ ID NO: 640293 - protein, 13 aa, Homo sapiens
  CDR3 for alpha chain variable domain of TCR clone 320147 (TRAV3, TRAJ40)
CAVRGSGAYKYIF

SEQ ID NO: 640294 - protein, 13 aa, Homo sapiens
  CDR3 for beta chain variable domain of TCR clone 320147 (TRBV10-2, TRBJ2-6)
CASKSAGANVLTF

SEQ ID NO: 640295 - protein, 14 aa, Homo sapiens
  CDR3 for alpha chain variable domain of TCR clone 320148 (TRAV25, TRAJ35)
CARRMEGFGNVLHC

SEQ ID NO: 640296 - protein, 16 aa, Homo sapiens
  CDR3 for beta chain variable domain of TCR clone 320148 (TRBV5-4, TRBJ2-3)
CASQQPGAGGADTQYF

SEQ ID NO: 640297 - protein, 13 aa, Homo sapiens
  CDR3 for alpha chain variable domain of TCR clone 320149 (TRAV27, TRAJ8)
CAGGPTGFQKLVF

SEQ ID NO: 640298 - protein, 15 aa, Homo sapiens
  CDR3 for beta chain variable domain of TCR clone 320149 (TRBV20-1, TRBJ1-1)
CSASWDRFLNTEAFF

SEQ ID NO: 640299 - protein, 12 aa, Homo sapiens
  CDR3 for alpha chain variable domain of TCR clone 320150 (TRAV21, TRAJ41)
CAVREFRVCTQL

SEQ ID NO: 640300 - protein, 15 aa, Homo sapiens
  CDR3 for beta chain variable domain of TCR clone 320150 (TRBV18, TRBJ1-5)
CASSPQARSNQLQHF

SEQ ID NO: 640301 - protein, 15 aa, Homo sapiens
  CDR3 for alpha chain variable domain of TCR clone 320151 (TRAV3, TRAJ47)
CAVRDIGEYGNKLVF

SEQ ID NO: 640302 - protein, 14 aa, Homo sapiens
  CDR3 for beta chain variable domain of TCR clone 320151 (TRBV13, TRBJ2-5)
CASSLERVGETQYA

SEQ ID NO: 640303 - protein, 16 aa, Homo sapiens
  CDR3 for alpha chain variable domain of TCR clone 320152 (TRAV30, TRAJ24)
CGTEIVDVDSWGKFQF

SEQ ID NO: 640304 - protein, 14 aa, Homo sapiens
  CDR3 for beta chain variable domain of TCR clone 320152 (TRBV7-9, TRBJ2-1)
CASSPRDSLYEQFF

SEQ ID NO: 640305 - protein, 13 aa, Homo sapiens
  CDR3 for alpha chain variable domain of TCR clone 320153 (TRAV3, TRAJ29)
CAVRDIIDTPLVF

SEQ ID NO: 640306 - protein, 14 aa, Homo sapiens
  CDR3 for beta chain variable domain of TCR clone 320153 (TRBV27, TRBJ2-1)
CPSSATGGYNEQFF

SEQ ID NO: 640307 - protein, 10 aa, Homo sapiens
  CDR3 for alpha chain variable domain of TCR clone 320154 (TRAV1-2, TRAJ31)
CVSEDARLMF

SEQ ID NO: 640308 - protein, 14 aa, Homo sapiens
  CDR3 for beta chain variable domain of TCR clone 320154 (TRBV12-5, TRBJ2-5)
CASGSRTHQETQYF

SEQ ID NO: 640309 - protein, 13 aa, Homo sapiens
  CDR3 for alpha chain variable domain of TCR clone 320155 (TRAV20, TRAJ20)
WAVRWVRDYKLSF

SEQ ID NO: 640310 - protein, 14 aa, Homo sapiens
  CDR3 for beta chain variable domain of TCR clone 320155 (TRBV19, TRBJ2-2)
CASTVTANTGELFF

SEQ ID NO: 640311 - protein, 16 aa, Homo sapiens
  CDR3 for alpha chain variable domain of TCR clone 320156 (TRAV12-2, TRAJ28)
CALITDSGAGSYQLTF

SEQ ID NO: 640312 - protein, 12 aa, Homo sapiens
  CDR3 for beta chain variable domain of TCR clone 320156 (TRBV9, TRBJ2-2)
CASSLVTGELFF

SEQ ID NO: 640313 - protein, 12 aa, Homo sapiens
  CDR3 for alpha chain variable domain of TCR clone 320157 (TRAV12-2, TRAJ8)
FAVNTGFQKLVF

SEQ ID NO: 640314 - protein, 15 aa, Homo sapiens
  CDR3 for beta chain variable domain of TCR clone 320157 (TRBV7-8, TRBJ1-5)
CASSLERRGLEPQHF

SEQ ID NO: 640315 - protein, 14 aa, Homo sapiens
  CDR3 for alpha chain variable domain of TCR clone 320158 (TRAV25, TRAJ6)
CAGRESGGSYIPTF

SEQ ID NO: 640316 - protein, 15 aa, Homo sapiens
  CDR3 for beta chain variable domain of TCR clone 320158 (TRBV19, TRBJ1-5)
CASSIVWADNQPQHF

SEQ ID NO: 640317 - protein, 15 aa, Homo sapiens
  CDR3 for alpha chain variable domain of TCR clone 320159 (TRAV23/DV6, TRAJ12)
CAAIDLGAVDSSYKL

SEQ ID NO: 640318 - protein, 12 aa, Homo sapiens
  CDR3 for beta chain variable domain of TCR clone 320159 (TRBV10-3, TRBJ2-2)
CAIRENTGELFF

SEQ ID NO: 640319 - protein, 13 aa, Homo sapiens
  CDR3 for alpha chain variable domain of TCR clone 320160 (TRAV12-3, TRAJ54)
CALVPQRAQELVF

SEQ ID NO: 640320 - protein, 15 aa, Homo sapiens
  CDR3 for beta chain variable domain of TCR clone 320160 (TRBV4-1, TRBJ2-2)
CASSQDARGTGELFF

SEQ ID NO: 640321 - protein, 11 aa, Homo sapiens
  CDR3 for alpha chain variable domain of TCR clone 320161 (TRAV17, TRAJ36)
CAPTGANNLFF

SEQ ID NO: 640322 - protein, 11 aa, Homo sapiens
  CDR3 for beta chain variable domain of TCR clone 320161 (TRBV19, TRBJ1-1)
CASSIGSEAFF

SEQ ID NO: 640323 - protein, 15 aa, Homo sapiens
  CDR3 for alpha chain variable domain of TCR clone 320162 (TRAV8-3, TRAJ27)
CAVGPSKTNAGKSPF

SEQ ID NO: 640324 - protein, 14 aa, Homo sapiens
  CDR3 for beta chain variable domain of TCR clone 320162 (TRBV11-2, TRBJ2-3)
CASSRLARTDTQYF

SEQ ID NO: 640325 - protein, 14 aa, Homo sapiens
  CDR3 for alpha chain variable domain of TCR clone 320163 (TRAV12-2, TRAJ48)
CAVNAFFGNEKVTF

SEQ ID NO: 640326 - protein, 13 aa, Homo sapiens
  CDR3 for beta chain variable domain of TCR clone 320163 (TRBV28, TRBJ2-7)
CAGAQQGLDEQYF

SEQ ID NO: 640327 - protein, 10 aa, Homo sapiens
  CDR3 for alpha chain variable domain of TCR clone 320164 (TRAV21, TRAJ11)
CAERIQHPHL

SEQ ID NO: 640328 - protein, 16 aa, Homo sapiens
  CDR3 for beta chain variable domain of TCR clone 320164 (TRBV19, TRBJ2-1)
CASSKAGPSSYNEQFF

SEQ ID NO: 640329 - protein, 16 aa, Homo sapiens
  CDR3 for alpha chain variable domain of TCR clone 320165 (TRAV12-2, TRAJ32)
YAVNLGQGGATNKLIF

SEQ ID NO: 640330 - protein, 15 aa, Homo sapiens
  CDR3 for beta chain variable domain of TCR clone 320165 (TRBV20-1, TRBJ2-7)
CSARGPLAGGREQYF

SEQ ID NO: 640331 - protein, 15 aa, Homo sapiens
  CDR3 for alpha chain variable domain of TCR clone 320166 (TRAV26-2, TRAJ28)
CILVESGAGSYQLTF

SEQ ID NO: 640332 - protein, 16 aa, Homo sapiens
  CDR3 for beta chain variable domain of TCR clone 320166 (TRBV4-2, TRBJ1-2)
CASSQEIGGASYGYTI

SEQ ID NO: 640333 - protein, 16 aa, Homo sapiens
  CDR3 for alpha chain variable domain of TCR clone 320167 (TRAV30, TRAJ24)
CGTEIVDADSWGKFKF

SEQ ID NO: 640334 - protein, 13 aa, Homo sapiens
  CDR3 for beta chain variable domain of TCR clone 320167 (TRBV4-1, TRBJ2-2)
CASSQENTGELFF

SEQ ID NO: 640335 - protein, 14 aa, Homo sapiens
  CDR3 for alpha chain variable domain of TCR clone 320168 (TRAV20, TRAJ56)
CAVQFGGANSKLTF

SEQ ID NO: 640336 - protein, 14 aa, Homo sapiens
  CDR3 for beta chain variable domain of TCR clone 320168 (TRBV5-1, TRBJ2-7)
CASRPQTGFDEQYF

SEQ ID NO: 640337 - protein, 13 aa, Homo sapiens
  CDR3 for alpha chain variable domain of TCR clone 320169 (TRAV3, TRAJ7)
CAVSSYGNNRLAF

SEQ ID NO: 640338 - protein, 13 aa, Homo sapiens
  CDR3 for beta chain variable domain of TCR clone 320169 (TRBV4-1, TRBJ2-7)
CASSQGQAYEQYF

SEQ ID NO: 640339 - protein, 15 aa, Homo sapiens
  CDR3 for alpha chain variable domain of TCR clone 320170 (TRAV2, TRAJ22)
CAVPSRGGSARQLTF

SEQ ID NO: 640340 - protein, 14 aa, Homo sapiens
  CDR3 for beta chain variable domain of TCR clone 320170 (TRBV25-1, TRBJ2-7)
CASSEYRAPHEQYF

SEQ ID NO: 640341 - protein, 11 aa, Homo sapiens
  CDR3 for alpha chain variable domain of TCR clone 320171 (TRAV12-2, TRAJ39)
CAVNNMLTFGG

SEQ ID NO: 640342 - protein, 11 aa, Homo sapiens
  CDR3 for beta chain variable domain of TCR clone 320171 (TRBV11-2, TRBJ1-1)
CASSINTEAFF

SEQ ID NO: 640343 - protein, 14 aa, Homo sapiens
  CDR3 for alpha chain variable domain of TCR clone 320172 (TRAV13-1, TRAJ4)
CSATLPSGYNRLIF

SEQ ID NO: 640344 - protein, 14 aa, Homo sapiens
  CDR3 for beta chain variable domain of TCR clone 320172 (TRBV19, TRBJ2-1)
CASPTFVLSGEQFF

SEQ ID NO: 640345 - protein, 13 aa, Homo sapiens
  CDR3 for alpha chain variable domain of TCR clone 320173 (TRAV12-2, TRAJ38)
CAVNAGNNRKLIW

SEQ ID NO: 640346 - protein, 15 aa, Homo sapiens
  CDR3 for beta chain variable domain of TCR clone 320173 (TRBV5-1, TRBJ2-1)
GASSPPRAPYNEQFF

SEQ ID NO: 640347 - protein, 12 aa, Homo sapiens
  CDR3 for alpha chain variable domain of TCR clone 320174 (TRAV12-3, TRAJ17)
CAMTLTGNKLTF

SEQ ID NO: 640348 - protein, 18 aa, Homo sapiens
  CDR3 for beta chain variable domain of TCR clone 320174 (TRBV4-3, TRBJ1-6)
CASSQETPASSYNSTLYF

SEQ ID NO: 640349 - protein, 14 aa, Homo sapiens
  CDR3 for alpha chain variable domain of TCR clone 320175 (TRAV2, TRAJ37)
CAVDFTSNTGKLIF

SEQ ID NO: 640350 - protein, 14 aa, Homo sapiens
  CDR3 for beta chain variable domain of TCR clone 320175 (TRBV4-1, TRBJ2-7)
CASSPVAGGDEQYF

SEQ ID NO: 640351 - protein, 14 aa, Homo sapiens
  CDR3 for alpha chain variable domain of TCR clone 320176 (TRAV21, TRAJ10)
CAVALTGGGNKLTF

SEQ ID NO: 640352 - protein, 13 aa, Homo sapiens
  CDR3 for beta chain variable domain of TCR clone 320176 (TRBV7-2, TRBJ1-6)
CASSLGSNPPLHF

SEQ ID NO: 640353 - protein, 14 aa, Homo sapiens
  CDR3 for alpha chain variable domain of TCR clone 320177 (TRAV26-1, TRAJ38)
FIADNAGNNRKLTW

SEQ ID NO: 640354 - protein, 13 aa, Homo sapiens
  CDR3 for beta chain variable domain of TCR clone 320177 (TRBV20-1, TRBJ1-1)
CSARGGGNTEAFF

SEQ ID NO: 640355 - protein, 12 aa, Homo sapiens
  CDR3 for alpha chain variable domain of TCR clone 320178 (TRAV26-1, TRAJ53)
CIAGGSNYKLTF

SEQ ID NO: 640356 - protein, 15 aa, Homo sapiens
  CDR3 for beta chain variable domain of TCR clone 320178 (TRBV5-1, TRBJ2-2)
CASSLLQGRPGELFF

SEQ ID NO: 640357 - protein, 14 aa, Homo sapiens
  CDR3 for alpha chain variable domain of TCR clone 320179 (TRAV21, TRAJ32)
CCGDYGGATNKLIF

SEQ ID NO: 640358 - protein, 12 aa, Homo sapiens
  CDR3 for beta chain variable domain of TCR clone 320179 (TRBV2, TRBJ2-1)
CAYGPPGNEQFF

SEQ ID NO: 640359 - protein, 16 aa, Homo sapiens
  CDR3 for alpha chain variable domain of TCR clone 320180 (TRAV26-1, TRAJ23)
CIVRVHPYNREESLSS

SEQ ID NO: 640360 - protein, 15 aa, Homo sapiens
  CDR3 for beta chain variable domain of TCR clone 320180 (TRBV5-7, TRBJ2-7)
CASSPYFEGSYEQYF

SEQ ID NO: 640361 - protein, 11 aa, Homo sapiens
  CDR3 for alpha chain variable domain of TCR clone 320181 (TRAV16, TRAJ33)
CALHSNYQLIW

SEQ ID NO: 640362 - protein, 14 aa, Homo sapiens
  CDR3 for beta chain variable domain of TCR clone 320181 (TRBV7-9, TRBJ2-2)
CASSLGHRTGELFF

SEQ ID NO: 640363 - protein, 12 aa, Homo sapiens
  CDR3 for alpha chain variable domain of TCR clone 320182 (TRAV21, TRAJ11)
WAATSGYSTLTF

SEQ ID NO: 640364 - protein, 16 aa, Homo sapiens
  CDR3 for beta chain variable domain of TCR clone 320182 (TRBV28, TRBJ2-2)
CASSLEGGSNTGELFF

SEQ ID NO: 640365 - protein, 13 aa, Homo sapiens
  CDR3 for alpha chain variable domain of TCR clone 320183 (TRAV3, TRAJ20)
CAVGSLNDYKLSF

SEQ ID NO: 640366 - protein, 13 aa, Homo sapiens
  CDR3 for beta chain variable domain of TCR clone 320183 (TRBV6-1, TRBJ2-1)
CAGMDPTNNEQFF

SEQ ID NO: 640367 - protein, 12 aa, Homo sapiens
  CDR3 for alpha chain variable domain of TCR clone 320184 (TRAV12-2, TRAJ7)
CAVMRGNNRLAF

SEQ ID NO: 640368 - protein, 16 aa, Homo sapiens
  CDR3 for beta chain variable domain of TCR clone 320184 (TRBV4-1, TRBJ2-3)
CASSQRAGGLTDTQYF

SEQ ID NO: 640369 - protein, 19 aa, Homo sapiens
  CDR3 for alpha chain variable domain of TCR clone 320185 (TRAV1-2, TRAJ26)
CLLPLCCDRPDNYGQNFVF

SEQ ID NO: 640370 - protein, 17 aa, Homo sapiens
  CDR3 for beta chain variable domain of TCR clone 320185 (TRBV13, TRBJ2-3)
CASSLSRVAGGRNTQYF

SEQ ID NO: 640371 - protein, 13 aa, Homo sapiens
  CDR3 for alpha chain variable domain of TCR clone 320186 (TRAV21, TRAJ20)
CAVGLRVDYKLSF

SEQ ID NO: 640372 - protein, 17 aa, Homo sapiens
  CDR3 for beta chain variable domain of TCR clone 320186 (TRBV7-2, TRBJ2-2)
CASSTRGAGEGTGELFF

SEQ ID NO: 640373 - protein, 12 aa, Homo sapiens
  CDR3 for alpha chain variable domain of TCR clone 320187 (TRAV17, TRAJ20)
CATDSNDYKLSF

SEQ ID NO: 640374 - protein, 17 aa, Homo sapiens
  CDR3 for beta chain variable domain of TCR clone 320187 (TRBV5-1, TRBJ2-2)
CASSLVGLSGGTGELFF

SEQ ID NO: 640375 - protein, 13 aa, Homo sapiens
  CDR3 for alpha chain variable domain of TCR clone 320188 (TRAV8-3, TRAJ28)
CAVGAVGGYQLTF

SEQ ID NO: 640376 - protein, 14 aa, Homo sapiens
  CDR3 for beta chain variable domain of TCR clone 320188 (TRBV7-2, TRBJ2-7)
CASRSRGAAYEQYF

SEQ ID NO: 640377 - protein, 17 aa, Homo sapiens
  CDR3 for alpha chain variable domain of TCR clone 320189 (TRAV3, TRAJ6)
CAVRDGPRAGGSYIPQF

SEQ ID NO: 640378 - protein, 12 aa, Homo sapiens
  CDR3 for beta chain variable domain of TCR clone 320189 (TRBV11-2, TRBJ2-1)
CASSPGNNEQFF

SEQ ID NO: 640379 - protein, 15 aa, Homo sapiens
  CDR3 for alpha chain variable domain of TCR clone 320190 (TRAV3, TRAJ5)
GAVRDLDTGRRALPF

SEQ ID NO: 640380 - protein, 14 aa, Homo sapiens
  CDR3 for beta chain variable domain of TCR clone 320190 (TRBV12-5, TRBJ2-5)
CASGSRTHQETQYF

SEQ ID NO: 640381 - protein, 13 aa, Homo sapiens
  CDR3 for alpha chain variable domain of TCR clone 320191 (TRAV8-6, TRAJ49)
CAVSGQTGNQVYF

SEQ ID NO: 640382 - protein, 13 aa, Homo sapiens
  CDR3 for beta chain variable domain of TCR clone 320191 (TRBV10-2, TRBJ2-7)
CASSAESPYEQYF

SEQ ID NO: 640383 - protein, 14 aa, Homo sapiens
  CDR3 for alpha chain variable domain of TCR clone 320192 (TRAV1-2, TRAJ16)
CAVNRFSDGQKLLT

SEQ ID NO: 640384 - protein, 16 aa, Homo sapiens
  CDR3 for beta chain variable domain of TCR clone 320192 (TRBV7-2, TRBJ2-7)
CASSLDLSGGAYEQYF

SEQ ID NO: 640385 - protein, 14 aa, Homo sapiens
  CDR3 for alpha chain variable domain of TCR clone 320193 (TRAV12-3, TRAJ13)
CAMKNSWGYQKVTF

SEQ ID NO: 640386 - protein, 13 aa, Homo sapiens
  CDR3 for beta chain variable domain of TCR clone 320193 (TRBV29-1, TRBJ2-5)
CSARDRVEETQYF

SEQ ID NO: 640387 - protein, 11 aa, Homo sapiens
  CDR3 for alpha chain variable domain of TCR clone 320194 (TRAV2, TRAJ33)
CPVDSNYQLIW

SEQ ID NO: 640388 - protein, 14 aa, Homo sapiens
  CDR3 for beta chain variable domain of TCR clone 320194 (TRBV11-2, TRBJ2-3)
CASSRLARTDTQYF

SEQ ID NO: 640389 - protein, 11 aa, Homo sapiens
  CDR3 for alpha chain variable domain of TCR clone 320195 (TRAV1-1, TRAJ23)
CAVRQGGKLIF

SEQ ID NO: 640390 - protein, 20 aa, Homo sapiens
  CDR3 for beta chain variable domain of TCR clone 320195 (TRBV7-8, TRBJ2-2)
CPSSHLFPGPTVHITGELFF

SEQ ID NO: 640391 - protein, 13 aa, Homo sapiens
  CDR3 for alpha chain variable domain of TCR clone 320196 (TRAV12-2, TRAJ20)
CAVNRLDDYKLSV

SEQ ID NO: 640392 - protein, 12 aa, Homo sapiens
  CDR3 for beta chain variable domain of TCR clone 320196 (TRBV28, TRBJ2-3)
CASSLYRDTQYF

SEQ ID NO: 640393 - protein, 16 aa, Homo sapiens
  CDR3 for alpha chain variable domain of TCR clone 320197 (TRAV20, TRAJ52)
CAVQAAGGTSYGKLTF

SEQ ID NO: 640394 - protein, 13 aa, Homo sapiens
  CDR3 for beta chain variable domain of TCR clone 320197 (TRBV19, TRBJ2-2)
CASSIWSTGELFF

SEQ ID NO: 640395 - protein, 15 aa, Homo sapiens
  CDR3 for alpha chain variable domain of TCR clone 320198 (TRAV2, TRAJ9)
CAVEDRGTGGFKTIF

SEQ ID NO: 640396 - protein, 15 aa, Homo sapiens
  CDR3 for beta chain variable domain of TCR clone 320198 (TRBV5-1, TRBJ2-7)
CASSLMTSGSNEQYF

SEQ ID NO: 640397 - protein, 18 aa, Homo sapiens
  CDR3 for alpha chain variable domain of TCR clone 320199 (TRAV26-1, TRAJ23)
CVVRVGLEGWNQGGKLIF

SEQ ID NO: 640398 - protein, 16 aa, Homo sapiens
  CDR3 for beta chain variable domain of TCR clone 320199 (TRBV12-4, TRBJ2-5)
CASSFFVRGRQETQYF

SEQ ID NO: 640399 - protein, 14 aa, Homo sapiens
  CDR3 for alpha chain variable domain of TCR clone 320200 (TRAV17, TRAJ22)
CATVLSVSARQLTF

SEQ ID NO: 640400 - protein, 13 aa, Homo sapiens
  CDR3 for beta chain variable domain of TCR clone 320200 (TRBV15, TRBJ1-6)
CATSGGLNSPLHF

SEQ ID NO: 640401 - protein, 10 aa, Homo sapiens
  CDR3 for alpha chain variable domain of TCR clone 320201 (TRAV8-4, TRAJ43)
CAVSAADIRF

SEQ ID NO: 640402 - protein, 15 aa, Homo sapiens
  CDR3 for beta chain variable domain of TCR clone 320201 (TRBV5-1, TRBJ2-3)
CASSVTSGSTDTQYF

SEQ ID NO: 640403 - protein, 15 aa, Homo sapiens
  CDR3 for alpha chain variable domain of TCR clone 320202 (TRAV17, TRAJ4)
CATGTWSGGYNKLIF

SEQ ID NO: 640404 - protein, 13 aa, Homo sapiens
  CDR3 for beta chain variable domain of TCR clone 320202 (TRBV6-6, TRBJ2-7)
CASSPKHLVEQYF

SEQ ID NO: 640405 - protein, 14 aa, Homo sapiens
  CDR3 for alpha chain variable domain of TCR clone 320203 (TRAV1-2, TRAJ8)
CAVREDTGFQKLVF

SEQ ID NO: 640406 - protein, 13 aa, Homo sapiens
  CDR3 for beta chain variable domain of TCR clone 320203 (TRBV11-2, TRBJ1-1)
CASSLGRNTEAFF

SEQ ID NO: 640407 - protein, 15 aa, Homo sapiens
  CDR3 for alpha chain variable domain of TCR clone 320204 (TRAV27, TRAJ38)
CAARRNAGNNRKLLW

SEQ ID NO: 640408 - protein, 15 aa, Homo sapiens
  CDR3 for beta chain variable domain of TCR clone 320204 (TRBV6-3, TRBJ2-7)
CASSSPGTVFYEQYF

SEQ ID NO: 640409 - protein, 13 aa, Homo sapiens
  CDR3 for alpha chain variable domain of TCR clone 320205 (TRAV12-2, TRAJ4)
CAGFSGGHNTLIF

SEQ ID NO: 640410 - protein, 14 aa, Homo sapiens
  CDR3 for beta chain variable domain of TCR clone 320205 (TRBV24-1, TRBJ1-1)
CATSIPRGDTEAFF

SEQ ID NO: 640411 - protein, 15 aa, Homo sapiens
  CDR3 for alpha chain variable domain of TCR clone 320206 (TRAV27, TRAJ38)
CAARRNAGNNRKLIW

SEQ ID NO: 640412 - protein, 15 aa, Homo sapiens
  CDR3 for beta chain variable domain of TCR clone 320206 (TRBV28, TRBJ2-3)
CASSPDRQGANTQYF

SEQ ID NO: 640413 - protein, 17 aa, Homo sapiens
  CDR3 for alpha chain variable domain of TCR clone 320207 (TRAV26-2, TRAJ42)
CILRDVGYGGSQGNLIF

SEQ ID NO: 640414 - protein, 16 aa, Homo sapiens
  CDR3 for beta chain variable domain of TCR clone 320207 (TRBV29-1, TRBJ2-6)
CSVEDITYSGANDLTF

SEQ ID NO: 640415 - protein, 14 aa, Homo sapiens
  CDR3 for alpha chain variable domain of TCR clone 320208 (TRAV8-6, TRAJ53)
CAVTSGRSNYKLTF

SEQ ID NO: 640416 - protein, 14 aa, Homo sapiens
  CDR3 for beta chain variable domain of TCR clone 320208 (TRBV7-6, TRBJ2-3)
CASSLGTVTDTQYF

SEQ ID NO: 640417 - protein, 13 aa, Homo sapiens
  CDR3 for alpha chain variable domain of TCR clone 320209 (TRAV8-3, TRAJ36)
CAVGATGANNLFF

SEQ ID NO: 640418 - protein, 15 aa, Homo sapiens
  CDR3 for beta chain variable domain of TCR clone 320209 (TRBV7-8, TRBJ2-1)
CASSLHGGPYNEQFF

SEQ ID NO: 640419 - protein, 16 aa, Homo sapiens
  CDR3 for alpha chain variable domain of TCR clone 320210 (TRAV12-3, TRAJ53)
CAMSPGSGGSNYKLTF

SEQ ID NO: 640420 - protein, 14 aa, Homo sapiens
  CDR3 for beta chain variable domain of TCR clone 320210 (TRBV4-2, TRBJ2-1)
CASGLDRTYNEQFF

SEQ ID NO: 640421 - protein, 17 aa, Homo sapiens
  CDR3 for alpha chain variable domain of TCR clone 320211 (TRAV3, TRAJ6)
CAVRDGPRAGGSYIPTF

SEQ ID NO: 640422 - protein, 15 aa, Homo sapiens
  CDR3 for beta chain variable domain of TCR clone 320211 (TRBV4-3, TRBJ2-1)
CASSQGLAGSNEQFF

SEQ ID NO: 640423 - protein, 15 aa, Homo sapiens
  CDR3 for alpha chain variable domain of TCR clone 320212 (TRAV29/DV5, TRAJ29)
CAASERSSGNTPLVF

SEQ ID NO: 640424 - protein, 16 aa, Homo sapiens
  CDR3 for beta chain variable domain of TCR clone 320212 (TRBV10-3, TRBJ1-2)
CAISDKVSGPFYGYTF

SEQ ID NO: 640425 - protein, 15 aa, Homo sapiens
  CDR3 for alpha chain variable domain of TCR clone 320213 (TRAV12-3, TRAJ13)
CAMSARSGGYQKVTF

SEQ ID NO: 640426 - protein, 13 aa, Homo sapiens
  CDR3 for beta chain variable domain of TCR clone 320213 (TRBV10-3, TRBJ2-7)
CASKLAVNYEQYF

SEQ ID NO: 640427 - protein, 16 aa, Homo sapiens
  CDR3 for alpha chain variable domain of TCR clone 320214 (TRAV3, TRAJ10)
CAVRDMRAGVGNKLTF

SEQ ID NO: 640428 - protein, 15 aa, Homo sapiens
  CDR3 for beta chain variable domain of TCR clone 320214 (TRBV19, TRBJ1-6)
CASSTQGAVGSPLHF

SEQ ID NO: 640429 - protein, 13 aa, Homo sapiens
  CDR3 for alpha chain variable domain of TCR clone 320215 (TRAV12-2, TRAJ37)
CAGGSGNTGKLIF

SEQ ID NO: 640430 - protein, 14 aa, Homo sapiens
  CDR3 for beta chain variable domain of TCR clone 320215 (TRBV6-1, TRBJ2-6)
CASQQGAGADVLTF

SEQ ID NO: 640431 - protein, 13 aa, Homo sapiens
  CDR3 for alpha chain variable domain of TCR clone 320216 (TRAV22, TRAJ29)
CALWGSGNTPLVF

SEQ ID NO: 640432 - protein, 13 aa, Homo sapiens
  CDR3 for beta chain variable domain of TCR clone 320216 (TRBV4-2, TRBJ1-1)
CASSQAGNTEAFF

SEQ ID NO: 640433 - protein, 11 aa, Homo sapiens
  CDR3 for alpha chain variable domain of TCR clone 320217 (TRAV12-2, TRAJ43)
CASPIGNDMRF

SEQ ID NO: 640434 - protein, 16 aa, Homo sapiens
  CDR3 for beta chain variable domain of TCR clone 320217 (TRBV7-3, TRBJ2-2)
CASSLKRGTLSGELFF

SEQ ID NO: 640435 - protein, 14 aa, Homo sapiens
  CDR3 for alpha chain variable domain of TCR clone 320218 (TRAV34, TRAJ22)
CGPDTSGSARQLTF

SEQ ID NO: 640436 - protein, 15 aa, Homo sapiens
  CDR3 for beta chain variable domain of TCR clone 320218 (TRBV3-1, TRBJ2-1)
CASSQQPSGGNEQFF

SEQ ID NO: 640437 - protein, 15 aa, Homo sapiens
  CDR3 for alpha chain variable domain of TCR clone 320219 (TRAV2, TRAJ15)
CAVEDREQAGTALIF

SEQ ID NO: 640438 - protein, 13 aa, Homo sapiens
  CDR3 for beta chain variable domain of TCR clone 320219 (TRBV10-2, TRBJ2-3)
CASSESGDQTQYF

SEQ ID NO: 640439 - protein, 10 aa, Homo sapiens
  CDR3 for alpha chain variable domain of TCR clone 320220 (TRAV23/DV6, TRAJ57)
CAASSTLSQG

SEQ ID NO: 640440 - protein, 12 aa, Homo sapiens
  CDR3 for beta chain variable domain of TCR clone 320220 (TRBV28, TRBJ2-3)
CASSLYRDTQYF

SEQ ID NO: 640441 - protein, 12 aa, Homo sapiens
  CDR3 for alpha chain variable domain of TCR clone 320221 (TRAV8-6, TRAJ36)
CAVSDWLGQTTF

SEQ ID NO: 640442 - protein, 15 aa, Homo sapiens
  CDR3 for beta chain variable domain of TCR clone 320221 (TRBV10-3, TRBJ2-2)
CAISVATSNTGELFF

SEQ ID NO: 640443 - protein, 18 aa, Homo sapiens
  CDR3 for alpha chain variable domain of TCR clone 320222 (TRAV21, TRAJ52)
CAVRPSPAGGTSYVKLTF

SEQ ID NO: 640444 - protein, 15 aa, Homo sapiens
  CDR3 for beta chain variable domain of TCR clone 320222 (TRBV20-1, TRBJ2-7)
CSARDRVSGMDEQYF

SEQ ID NO: 640445 - protein, 16 aa, Homo sapiens
  CDR3 for alpha chain variable domain of TCR clone 320223 (TRAV30, TRAJ24)
CGTEIVDADSWGKFQF

SEQ ID NO: 640446 - protein, 12 aa, Homo sapiens
  CDR3 for beta chain variable domain of TCR clone 320223 (TRBV27, TRBJ2-2)
CASSFRGTSSHR

SEQ ID NO: 640447 - protein, 14 aa, Homo sapiens
  CDR3 for alpha chain variable domain of TCR clone 320224 (TRAV12-1, TRAJ30)
CVVNIGGRDDKSIF

SEQ ID NO: 640448 - protein, 13 aa, Homo sapiens
  CDR3 for beta chain variable domain of TCR clone 320224 (TRBV12-5, TRBJ2-1)
CASGVGRGNEQFF

SEQ ID NO: 640449 - protein, 13 aa, Homo sapiens
  CDR3 for alpha chain variable domain of TCR clone 320225 (TRAV8-6, TRAJ41)
CAVSENSGDALNF

SEQ ID NO: 640450 - protein, 14 aa, Homo sapiens
  CDR3 for beta chain variable domain of TCR clone 320225 (TRBV7-3, TRBJ2-2)
CASSSGGYTGELFF

SEQ ID NO: 640451 - protein, 14 aa, Homo sapiens
  CDR3 for alpha chain variable domain of TCR clone 320226 (TRAV26-1, TRAJ21)
CIVRVLGNFNTFYF

SEQ ID NO: 640452 - protein, 15 aa, Homo sapiens
  CDR3 for beta chain variable domain of TCR clone 320226 (TRBV6-1, TRBJ2-7)
CASSEAVAGVAEQYF

SEQ ID NO: 640453 - protein, 14 aa, Homo sapiens
  CDR3 for alpha chain variable domain of TCR clone 320227 (TRAV13-1, TRAJ44)
CAAQATGPASKLTF

SEQ ID NO: 640454 - protein, 17 aa, Homo sapiens
  CDR3 for beta chain variable domain of TCR clone 320227 (TRBV7-3, TRBJ2-3)
CASSLMKRMRGADTQYF

SEQ ID NO: 640455 - protein, 17 aa, Homo sapiens
  CDR3 for alpha chain variable domain of TCR clone 320228 (TRAV3, TRAJ28)
CAVREAYSGSGSYQLTF

SEQ ID NO: 640456 - protein, 18 aa, Homo sapiens
  CDR3 for beta chain variable domain of TCR clone 320228 (TRBV27, TRBJ2-1)
CASGNRAVGVGSKNEQFF

SEQ ID NO: 640457 - protein, 15 aa, Homo sapiens
  CDR3 for alpha chain variable domain of TCR clone 320229 (TRAV8-2, TRAJ16)
CVVSDGVSDGQKLLF

SEQ ID NO: 640458 - protein, 12 aa, Homo sapiens
  CDR3 for beta chain variable domain of TCR clone 320229 (TRBV12-4, TRBJ2-7)
CASSLGGYEQYF

SEQ ID NO: 640459 - protein, 14 aa, Homo sapiens
  CDR3 for alpha chain variable domain of TCR clone 320230 (TRAV35, TRAJ40)
CAGSTTSGTYKYIF

SEQ ID NO: 640460 - protein, 14 aa, Homo sapiens
  CDR3 for beta chain variable domain of TCR clone 320230 (TRBV5-1, TRBJ1-2)
CASSLEPVNYGYTF

SEQ ID NO: 640461 - protein, 14 aa, Homo sapiens
  CDR3 for alpha chain variable domain of TCR clone 320231 (TRAV12-1, TRAJ17)
CVVNYKAAGNKLTF

SEQ ID NO: 640462 - protein, 15 aa, Homo sapiens
  CDR3 for beta chain variable domain of TCR clone 320231 (TRBV18, TRBJ2-7)
CASSTTFMDSYEQYF

SEQ ID NO: 640463 - protein, 12 aa, Homo sapiens
  CDR3 for alpha chain variable domain of TCR clone 320232 (TRAV4, TRAJ26)
CLVGDYGQNSVF

SEQ ID NO: 640464 - protein, 16 aa, Homo sapiens
  CDR3 for beta chain variable domain of TCR clone 320232 (TRBV12-5, TRBJ2-5)
CASGPRTSGNQETQYF

SEQ ID NO: 640465 - protein, 22 aa, Homo sapiens
  CDR3 for alpha chain variable domain of TCR clone 320233 (TRAV17, TRAJ57)
MTASRAADTASYFCANPEKLVF

SEQ ID NO: 640466 - protein, 16 aa, Homo sapiens
  CDR3 for beta chain variable domain of TCR clone 320233 (TRBV11-2, TRBJ2-3)
CASSFQGRGALDTQYF

SEQ ID NO: 640467 - protein, 16 aa, Homo sapiens
  CDR3 for alpha chain variable domain of TCR clone 320234 (TRAV12-3, TRAJ53)
CAMSPGSGGSNYKLAF

SEQ ID NO: 640468 - protein, 14 aa, Homo sapiens
  CDR3 for beta chain variable domain of TCR clone 320234 (TRBV4-2, TRBJ2-1)
CASGLDRAYNEQFF

SEQ ID NO: 640469 - protein, 16 aa, Homo sapiens
  CDR3 for alpha chain variable domain of TCR clone 320235 (TRAV3, TRAJ37)
CAVRVRGSGNTGKLSL

SEQ ID NO: 640470 - protein, 16 aa, Homo sapiens
  CDR3 for beta chain variable domain of TCR clone 320235 (TRBV11-2, TRBJ2-7)
CASSPTTGGVSYEQYF

SEQ ID NO: 640471 - protein, 13 aa, Homo sapiens
  CDR3 for alpha chain variable domain of TCR clone 320236 (TRAV27, TRAJ5)
CAGGGTGRRALTF

SEQ ID NO: 640472 - protein, 16 aa, Homo sapiens
  CDR3 for beta chain variable domain of TCR clone 320236 (TRBV19, TRBJ2-5)
CASSSLLAGGKETQYF

SEQ ID NO: 640473 - protein, 13 aa, Homo sapiens
  CDR3 for alpha chain variable domain of TCR clone 320237 (TRAV25, TRAJ26)
CAGMDNYGQNFVF

SEQ ID NO: 640474 - protein, 15 aa, Homo sapiens
  CDR3 for beta chain variable domain of TCR clone 320237 (TRBV10-3, TRBJ2-1)
CAIRNGTSGHNEQFV

SEQ ID NO: 640475 - protein, 15 aa, Homo sapiens
  CDR3 for alpha chain variable domain of TCR clone 320238 (TRAV2, TRAJ9)
CAVEDRGTGGFKTII

SEQ ID NO: 640476 - protein, 16 aa, Homo sapiens
  CDR3 for beta chain variable domain of TCR clone 320238 (TRBV24-1, TRBJ2-3)
CATSDPGTGATDTQYF

SEQ ID NO: 640477 - protein, 12 aa, Homo sapiens
  CDR3 for alpha chain variable domain of TCR clone 320239 (TRAV20, TRAJ56)
YAVTGANSKLTF

SEQ ID NO: 640478 - protein, 14 aa, Homo sapiens
  CDR3 for beta chain variable domain of TCR clone 320239 (TRBV20-1, TRBJ2-5)
CSALVPGYQETQYF

SEQ ID NO: 640479 - protein, 14 aa, Homo sapiens
  CDR3 for alpha chain variable domain of TCR clone 320240 (TRAV1-2, TRAJ8)
CAVREDTGFQKLVF

SEQ ID NO: 640480 - protein, 16 aa, Homo sapiens
  CDR3 for beta chain variable domain of TCR clone 320240 (TRBV11-3, TRBJ2-1)
CQQLIPPRVEYNEQFF

SEQ ID NO: 640481 - protein, 16 aa, Homo sapiens
  CDR3 for alpha chain variable domain of TCR clone 320241 (TRAV21, TRAJ17)
FAVRPGEEAAGNKLTF

SEQ ID NO: 640482 - protein, 16 aa, Homo sapiens
  CDR3 for beta chain variable domain of TCR clone 320241 (TRBV2, TRBJ2-7)
CASSEPWTGPSYEQYF

SEQ ID NO: 640483 - protein, 15 aa, Homo sapiens
  CDR3 for alpha chain variable domain of TCR clone 320242 (TRAV17, TRAJ42)
CATDHYRGSQGNLIF

SEQ ID NO: 640484 - protein, 15 aa, Homo sapiens
  CDR3 for beta chain variable domain of TCR clone 320242 (TRBV5-1, TRBJ2-2)
CASSSQGGNTGELFF

SEQ ID NO: 640485 - protein, 14 aa, Homo sapiens
  CDR3 for alpha chain variable domain of TCR clone 320243 (TRAV2, TRAJ37)
CAVVFTSNTGKLIF

SEQ ID NO: 640486 - protein, 15 aa, Homo sapiens
  CDR3 for beta chain variable domain of TCR clone 320243 (TRBV20-1, TRBJ1-1)
CSASQGVTGNTEAFF

SEQ ID NO: 640487 - protein, 18 aa, Homo sapiens
  CDR3 for alpha chain variable domain of TCR clone 320244 (TRAV26-1, TRAJ23)
CIVRVGLEVWNQGGKLIF

SEQ ID NO: 640488 - protein, 12 aa, Homo sapiens
  CDR3 for beta chain variable domain of TCR clone 320244 (TRBV12-4, TRBJ2-7)
CASSLGGYEQYF

SEQ ID NO: 640489 - protein, 16 aa, Homo sapiens
  CDR3 for alpha chain variable domain of TCR clone 320245 (TRAV38-1, TRAJ37)
CAFKGDGYSNTGKLIF

SEQ ID NO: 640490 - protein, 13 aa, Homo sapiens
  CDR3 for beta chain variable domain of TCR clone 320245 (TRBV12-4, TRBJ2-5)
CASSLFRRETQYF

SEQ ID NO: 640491 - protein, 17 aa, Homo sapiens
  CDR3 for alpha chain variable domain of TCR clone 320246 (TRAV3, TRAJ6)
CAVRDGHRAGGSYILTF

SEQ ID NO: 640492 - protein, 14 aa, Homo sapiens
  CDR3 for beta chain variable domain of TCR clone 320246 (TRBV11-2, TRBJ2-3)
CASSRLARTDTQYF

SEQ ID NO: 640493 - protein, 12 aa, Homo sapiens
  CDR3 for alpha chain variable domain of TCR clone 320247 (TRAV2, TRAJ9)
CAFWAGGFKTIF

SEQ ID NO: 640494 - protein, 16 aa, Homo sapiens
  CDR3 for beta chain variable domain of TCR clone 320247 (TRBV13, TRBJ2-2)
CASSPRTGEHTGELFF

SEQ ID NO: 640495 - protein, 16 aa, Homo sapiens
  CDR3 for alpha chain variable domain of TCR clone 320248 (TRAV12-1, TRAJ22)
CVVNTISSGSARQLTF

SEQ ID NO: 640496 - protein, 13 aa, Homo sapiens
  CDR3 for beta chain variable domain of TCR clone 320248 (TRBV19, TRBJ2-1)
CASNGGVFIEQFF

SEQ ID NO: 640497 - protein, 11 aa, Homo sapiens
  CDR3 for alpha chain variable domain of TCR clone 320249 (TRAV13-1, TRAJ23)
CAASSRGKLIF

SEQ ID NO: 640498 - protein, 15 aa, Homo sapiens
  CDR3 for beta chain variable domain of TCR clone 320249 (TRBV4-1, TRBJ1-4)
CASSDTGGTNEKLFF

SEQ ID NO: 640499 - protein, 14 aa, Homo sapiens
  CDR3 for alpha chain variable domain of TCR clone 320250 (TRAV13-1, TRAJ35)
CAASKGGFGNELHC

SEQ ID NO: 640500 - protein, 13 aa, Homo sapiens
  CDR3 for beta chain variable domain of TCR clone 320250 (TRBV7-3, TRBJ1-1)
CASSQDWGAEASF

SEQ ID NO: 640501 - protein, 14 aa, Homo sapiens
  CDR3 for alpha chain variable domain of TCR clone 320251 (TRAV1-2, TRAJ16)
CAVNRFSDGQKLLF

SEQ ID NO: 640502 - protein, 16 aa, Homo sapiens
  CDR3 for beta chain variable domain of TCR clone 320251 (TRBV4-3, TRBJ2-2)
CASSQDRGSDTGELFF

SEQ ID NO: 640503 - protein, 14 aa, Homo sapiens
  CDR3 for alpha chain variable domain of TCR clone 320252 (TRAV12-3, TRAJ58)
CAMSTETSGSRLTF

SEQ ID NO: 640504 - protein, 13 aa, Homo sapiens
  CDR3 for beta chain variable domain of TCR clone 320252 (TRBV27, TRBJ2-3)
RASSWGRTDTQYF

SEQ ID NO: 640505 - protein, 15 aa, Homo sapiens
  CDR3 for alpha chain variable domain of TCR clone 320253 (TRAV12-2, TRAJ8)
CAVREEKTGFQKLVF

SEQ ID NO: 640506 - protein, 15 aa, Homo sapiens
  CDR3 for beta chain variable domain of TCR clone 320253 (TRBV28, TRBJ2-4)
CAAGSGTLLMGIQYF

SEQ ID NO: 640507 - protein, 14 aa, Homo sapiens
  CDR3 for alpha chain variable domain of TCR clone 320254 (TRAV2, TRAJ9)
CAVEDRSGGFKTIF

SEQ ID NO: 640508 - protein, 12 aa, Homo sapiens
  CDR3 for beta chain variable domain of TCR clone 320254 (TRBV4-3, TRBJ2-1)
CASSLSGYEQFF

SEQ ID NO: 640509 - protein, 14 aa, Homo sapiens
  CDR3 for alpha chain variable domain of TCR clone 320255 (TRAV12-3, TRAJ5)
CAMRFGHGQESTYF

SEQ ID NO: 640510 - protein, 16 aa, Homo sapiens
  CDR3 for beta chain variable domain of TCR clone 320255 (TRBV20-1, TRBJ2-3)
CSARLHSAGAIDTQYF

SEQ ID NO: 640511 - protein, 12 aa, Homo sapiens
  CDR3 for alpha chain variable domain of TCR clone 320256 (TRAV26-1, TRAJ13)
CIVSRGYQKVTF

SEQ ID NO: 640512 - protein, 14 aa, Homo sapiens
  CDR3 for beta chain variable domain of TCR clone 320256 (TRBV25-1, TRBJ1-1)
CASTHLGGNTEAFF

SEQ ID NO: 640513 - protein, 14 aa, Homo sapiens
  CDR3 for alpha chain variable domain of TCR clone 320257 (TRAV12-1, TRAJ3)
CVVSGYSGASKIIF

SEQ ID NO: 640514 - protein, 14 aa, Homo sapiens
  CDR3 for beta chain variable domain of TCR clone 320257 (TRBV6-6, TRBJ1-3)
CASSRQGSGNTIYF

SEQ ID NO: 640515 - protein, 14 aa, Homo sapiens
  CDR3 for alpha chain variable domain of TCR clone 320258 (TRAV1-2, TRAJ8)
CAVREDTGFQKLVF

SEQ ID NO: 640516 - protein, 14 aa, Homo sapiens
  CDR3 for beta chain variable domain of TCR clone 320258 (TRBV7-9, TRBJ1-1)
CASSLGGVNTEAFF

SEQ ID NO: 640517 - protein, 16 aa, Homo sapiens
  CDR3 for alpha chain variable domain of TCR clone 320259 (TRAV3, TRAJ10)
CAVRDMRAAGGNKLTF

SEQ ID NO: 640518 - protein, 13 aa, Homo sapiens
  CDR3 for beta chain variable domain of TCR clone 320259 (TRBV6-1, TRBJ1-1)
CASSRQGNTEAFF

SEQ ID NO: 640519 - protein, 15 aa, Homo sapiens
  CDR3 for alpha chain variable domain of TCR clone 320260 (TRAV36/DV7, TRAJ38)
CAVRGVAGNNRKLIW

SEQ ID NO: 640520 - protein, 13 aa, Homo sapiens
  CDR3 for beta chain variable domain of TCR clone 320260 (TRBV24-1, TRBJ2-2)
CATSDWSTGELFF

SEQ ID NO: 640521 - protein, 14 aa, Homo sapiens
  CDR3 for alpha chain variable domain of TCR clone 320261 (TRAV27, TRAJ15)
CAGFDNQAGTVLIF

SEQ ID NO: 640522 - protein, 11 aa, Homo sapiens
  CDR3 for beta chain variable domain of TCR clone 320261 (TRBV29-1, TRBJ1-1)
CSVEVGTRTFF

SEQ ID NO: 640523 - protein, 23 aa, Homo sapiens
  CDR3 for alpha chain variable domain of TCR clone 320262 (TRAV26-1, TRAJ38)
CIADNAGNNHIQNPDPAVYQLRD

SEQ ID NO: 640524 - protein, 16 aa, Homo sapiens
  CDR3 for beta chain variable domain of TCR clone 320262 (TRBV20-1, TRBJ2-1)
CSARDVTPPPYNEQFF

SEQ ID NO: 640525 - protein, 16 aa, Homo sapiens
  CDR3 for alpha chain variable domain of TCR clone 320263 (TRAV3, TRAJ6)
CAVRDGMGRRKLHTFI

SEQ ID NO: 640526 - protein, 15 aa, Homo sapiens
  CDR3 for beta chain variable domain of TCR clone 320263 (TRBV5-1, TRBJ2-7)
CASSLGDFTTYEQYF

SEQ ID NO: 640527 - protein, 12 aa, Homo sapiens
  CDR3 for alpha chain variable domain of TCR clone 320264 (TRAV35, TRAJ30)
CAGLYRDDKIIF

SEQ ID NO: 640528 - protein, 15 aa, Homo sapiens
  CDR3 for beta chain variable domain of TCR clone 320264 (TRBV18, TRBJ2-3)
CASSPLAGETDTQYF

SEQ ID NO: 640529 - protein, 18 aa, Homo sapiens
  CDR3 for alpha chain variable domain of TCR clone 320265 (TRAV21, TRAJ52)
CAVRPSPAGGTSYGKLTF

SEQ ID NO: 640530 - protein, 15 aa, Homo sapiens
  CDR3 for beta chain variable domain of TCR clone 320265 (TRBV7-9, TRBJ2-7)
CASSSSGQAVYEQYF

SEQ ID NO: 640531 - protein, 15 aa, Homo sapiens
  CDR3 for alpha chain variable domain of TCR clone 320266 (TRAV16, TRAJ12)
CSKWPLRDSSYKLIF

SEQ ID NO: 640532 - protein, 14 aa, Homo sapiens
  CDR3 for beta chain variable domain of TCR clone 320266 (TRBV11-2, TRBJ2-3)
CASSLGGGANTQYF

SEQ ID NO: 640533 - protein, 12 aa, Homo sapiens
  CDR3 for alpha chain variable domain of TCR clone 320267 (TRAV17, TRAJ20)
CATDANDYKLSF

SEQ ID NO: 640534 - protein, 17 aa, Homo sapiens
  CDR3 for beta chain variable domain of TCR clone 320267 (TRBV5-1, TRBJ2-2)
CARSMAGLAGGTGELFF

SEQ ID NO: 640535 - protein, 12 aa, Homo sapiens
  CDR3 for alpha chain variable domain of TCR clone 320268 (TRAV21, TRAJ49)
CAVRNTGNQFYF

SEQ ID NO: 640536 - protein, 15 aa, Homo sapiens
  CDR3 for beta chain variable domain of TCR clone 320268 (TRBV18, TRBJ2-6)
CASSPSYAGANVLTF

SEQ ID NO: 640537 - protein, 13 aa, Homo sapiens
  CDR3 for alpha chain variable domain of TCR clone 320269 (TRAV29/DV5, TRAJ31)
CAASRNNNARLMF

SEQ ID NO: 640538 - protein, 13 aa, Homo sapiens
  CDR3 for beta chain variable domain of TCR clone 320269 (TRBV11-2, TRBJ2-1)
CASSLDLVNEQFF

SEQ ID NO: 640539 - protein, 16 aa, Homo sapiens
  CDR3 for alpha chain variable domain of TCR clone 320270 (TRAV21, TRAJ52)
CAVTNAGGTSYGKLPF

SEQ ID NO: 640540 - protein, 16 aa, Homo sapiens
  CDR3 for beta chain variable domain of TCR clone 320270 (TRBV2, TRBJ2-1)
CASSVGGSLSYNEQFF

SEQ ID NO: 640541 - protein, 15 aa, Homo sapiens
  CDR3 for alpha chain variable domain of TCR clone 320271 (TRAV13-1, TRAJ39)
CAASRLGNAGNMLTF

SEQ ID NO: 640542 - protein, 16 aa, Homo sapiens
  CDR3 for beta chain variable domain of TCR clone 320271 (TRBV4-2, TRBJ1-1)
CASSQAGFGMNTEAFF

SEQ ID NO: 640543 - protein, 14 aa, Homo sapiens
  CDR3 for alpha chain variable domain of TCR clone 320272 (TRAV8-2, TRAJ37)
CVVGISGNTGKLIF

SEQ ID NO: 640544 - protein, 13 aa, Homo sapiens
  CDR3 for beta chain variable domain of TCR clone 320272 (TRBV7-8, TRBJ2-7)
RRVRLTEMGEQYF

SEQ ID NO: 640545 - protein, 16 aa, Homo sapiens
  CDR3 for alpha chain variable domain of TCR clone 320273 (TRAV12-3, TRAJ53)
CAMSVGSGGSNYKLTF

SEQ ID NO: 640546 - protein, 16 aa, Homo sapiens
  CDR3 for beta chain variable domain of TCR clone 320273 (TRBV7-3, TRBJ2-2)
CASSLKRGTLSVELFF

SEQ ID NO: 640547 - protein, 11 aa, Homo sapiens
  CDR3 for alpha chain variable domain of TCR clone 320274 (TRAV1-2, TRAJ20)
CAVANDYKLSF

SEQ ID NO: 640548 - protein, 15 aa, Homo sapiens
  CDR3 for beta chain variable domain of TCR clone 320274 (TRBV28, TRBJ1-1)
CASSLFGQGASEAFF

SEQ ID NO: 640549 - protein, 14 aa, Homo sapiens
  CDR3 for alpha chain variable domain of TCR clone 320275 (TRAV1-2, TRAJ16)
CAVNRFSDGQKLLF

SEQ ID NO: 640550 - protein, 15 aa, Homo sapiens
  CDR3 for beta chain variable domain of TCR clone 320275 (TRBV27, TRBJ2-1)
CASSNGGGPSNEQFF

SEQ ID NO: 640551 - protein, 14 aa, Homo sapiens
  CDR3 for alpha chain variable domain of TCR clone 320276 (TRAV14/DV4, TRAJ32)
RHVLPLTPTNKLIF

SEQ ID NO: 640552 - protein, 17 aa, Homo sapiens
  CDR3 for beta chain variable domain of TCR clone 320276 (TRBV20-1, TRBJ2-1)
CSASSSGLAGSYNEQFF

SEQ ID NO: 640553 - protein, 17 aa, Homo sapiens
  CDR3 for alpha chain variable domain of TCR clone 320277 (TRAV38-2/DV8, TRAJ45)
CSYRSRYSGGGADGITF

SEQ ID NO: 640554 - protein, 15 aa, Homo sapiens
  CDR3 for beta chain variable domain of TCR clone 320277 (TRBV19, TRBJ2-1)
CASIKGRGPYNEQFF

SEQ ID NO: 640555 - protein, 14 aa, Homo sapiens
  CDR3 for alpha chain variable domain of TCR clone 320278 (TRAV9-2, TRAJ39)
CALYIYNAGTMLPF

SEQ ID NO: 640556 - protein, 13 aa, Homo sapiens
  CDR3 for beta chain variable domain of TCR clone 320278 (TRBV12-4, TRBJ2-7)
CASSLSGVYEQYF

SEQ ID NO: 640557 - protein, 13 aa, Homo sapiens
  CDR3 for alpha chain variable domain of TCR clone 320279 (TRAV10, TRAJ40)
CVVSALGTYKYIF

SEQ ID NO: 640558 - protein, 15 aa, Homo sapiens
  CDR3 for beta chain variable domain of TCR clone 320279 (TRBV27, TRBJ2-1)
GASSNGEGPPMSSSS

SEQ ID NO: 640559 - protein, 14 aa, Homo sapiens
  CDR3 for alpha chain variable domain of TCR clone 320280 (TRAV12-1, TRAJ9)
GVVTGDTGGFKTIF

SEQ ID NO: 640560 - protein, 16 aa, Homo sapiens
  CDR3 for beta chain variable domain of TCR clone 320280 (TRBV29-1, TRBJ1-2)
CSVEANRDIANYGYTF

SEQ ID NO: 640561 - protein, 15 aa, Homo sapiens
  CDR3 for alpha chain variable domain of TCR clone 320281 (TRAV8-6, TRAJ23)
CAVRLIYNQGGKLIF

SEQ ID NO: 640562 - protein, 13 aa, Homo sapiens
  CDR3 for beta chain variable domain of TCR clone 320281 (TRBV19, TRBJ1-2)
CASSVPGQDGYTF

SEQ ID NO: 640563 - protein, 12 aa, Homo sapiens
  CDR3 for alpha chain variable domain of TCR clone 320282 (TRAV13-1, TRAJ49)
CAASPMGNQFYF

SEQ ID NO: 640564 - protein, 15 aa, Homo sapiens
  CDR3 for beta chain variable domain of TCR clone 320282 (TRBV6-1, TRBJ2-5)
CASSEGWGIQETQYF

SEQ ID NO: 640565 - protein, 17 aa, Homo sapiens
  CDR3 for alpha chain variable domain of TCR clone 320283 (TRAV13-1, TRAJ52)
RAAGRNAGGTSYGKLTF

SEQ ID NO: 640566 - protein, 13 aa, Homo sapiens
  CDR3 for beta chain variable domain of TCR clone 320283 (TRBV7-2, TRBJ1-1)
CVSNLKGAKVAFF

SEQ ID NO: 640567 - protein, 14 aa, Homo sapiens
  CDR3 for alpha chain variable domain of TCR clone 320284 (TRAV1-2, TRAJ8)
CAVREDTGFQKLVF

SEQ ID NO: 640568 - protein, 15 aa, Homo sapiens
  CDR3 for beta chain variable domain of TCR clone 320284 (TRBV15, TRBJ1-1)
FATSLQGGRNTEAFF

SEQ ID NO: 640569 - protein, 17 aa, Homo sapiens
  CDR3 for alpha chain variable domain of TCR clone 320285 (TRAV26-2, TRAJ42)
CILRDVGYGGSQGNRIF

SEQ ID NO: 640570 - protein, 16 aa, Homo sapiens
  CDR3 for beta chain variable domain of TCR clone 320285 (TRBV6-5, TRBJ2-1)
CASSETLAGHYNEQFF

SEQ ID NO: 640571 - protein, 14 aa, Homo sapiens
  CDR3 for alpha chain variable domain of TCR clone 320286 (TRAV1-2, TRAJ8)
CAVREDTGFQKLVF

SEQ ID NO: 640572 - protein, 11 aa, Homo sapiens
  CDR3 for beta chain variable domain of TCR clone 320286 (TRBV7-9, TRBJ2-1)
CASSLRDRATF

SEQ ID NO: 640573 - protein, 15 aa, Homo sapiens
  CDR3 for alpha chain variable domain of TCR clone 320287 (TRAV38-2/DV8, TRAJ45)
CAYWDSGGGADGLTF

SEQ ID NO: 640574 - protein, 14 aa, Homo sapiens
  CDR3 for beta chain variable domain of TCR clone 320287 (TRBV5-4, TRBJ1-1)
CASSLDSRRDEAFF

SEQ ID NO: 640575 - protein, 15 aa, Homo sapiens
  CDR3 for alpha chain variable domain of TCR clone 320288 (TRAV20, TRAJ4)
CAVEGSSGGYNKLIF

SEQ ID NO: 640576 - protein, 14 aa, Homo sapiens
  CDR3 for beta chain variable domain of TCR clone 320288 (TRBV7-8, TRBJ2-7)
CASTLGGALGEQYV

SEQ ID NO: 640577 - protein, 15 aa, Homo sapiens
  CDR3 for alpha chain variable domain of TCR clone 320289 (TRAV17, TRAJ4)
CATGTWSGGYTKLIF

SEQ ID NO: 640578 - protein, 13 aa, Homo sapiens
  CDR3 for beta chain variable domain of TCR clone 320289 (TRBV6-6, TRBJ2-7)
CASSPKHLAEQYF

SEQ ID NO: 640579 - protein, 13 aa, Homo sapiens
  CDR3 for alpha chain variable domain of TCR clone 320290 (TRAV20, TRAJ49)
CAVQARTGNHFYF

SEQ ID NO: 640580 - protein, 14 aa, Homo sapiens
  CDR3 for beta chain variable domain of TCR clone 320290 (TRBV7-2, TRBJ2-7)
CASSPKTSFYEQYF

SEQ ID NO: 640581 - protein, 13 aa, Homo sapiens
  CDR3 for alpha chain variable domain of TCR clone 320291 (TRAV36/DV7, TRAJ54)
CAVDIQGAKKLVF

SEQ ID NO: 640582 - protein, 14 aa, Homo sapiens
  CDR3 for beta chain variable domain of TCR clone 320291 (TRBV19, TRBJ2-7)
CASNFRDTFTGMYF

SEQ ID NO: 640583 - protein, 16 aa, Homo sapiens
  CDR3 for alpha chain variable domain of TCR clone 320292 (TRAV38-2/DV8, TRAJ57)
CAYRRRAQGGSEKLVF

SEQ ID NO: 640584 - protein, 15 aa, Homo sapiens
  CDR3 for beta chain variable domain of TCR clone 320292 (TRBV12-4, TRBJ2-5)
CASSPPTGLQETQYF

SEQ ID NO: 640585 - protein, 11 aa, Homo sapiens
  CDR3 for alpha chain variable domain of TCR clone 320293 (TRAV2, TRAJ33)
CAVESNYQLIW

SEQ ID NO: 640586 - protein, 17 aa, Homo sapiens
  CDR3 for beta chain variable domain of TCR clone 320293 (TRBV7-7, TRBJ2-2)
CASSSVPAGGEIGELFF

SEQ ID NO: 640587 - protein, 14 aa, Homo sapiens
  CDR3 for alpha chain variable domain of TCR clone 320294 (TRAV3, TRAJ37)
CAVKEAGNTGKLIF

SEQ ID NO: 640588 - protein, 11 aa, Homo sapiens
  CDR3 for beta chain variable domain of TCR clone 320294 (TRBV29-1, TRBJ2-5)
CSEDRTGTQYF

SEQ ID NO: 640589 - protein, 14 aa, Homo sapiens
  CDR3 for alpha chain variable domain of TCR clone 320295 (TRAV13-1, TRAJ44)
CAAKATGTASKLTF

SEQ ID NO: 640590 - protein, 13 aa, Homo sapiens
  CDR3 for beta chain variable domain of TCR clone 320295 (TRBV12-5, TRBJ2-3)
CASGDRQSDTQYF

SEQ ID NO: 640591 - protein, 13 aa, Homo sapiens
  CDR3 for alpha chain variable domain of TCR clone 320296 (TRAV26-1, TRAJ38)
CIVRGGNNRKLIW

SEQ ID NO: 640592 - protein, 14 aa, Homo sapiens
  CDR3 for beta chain variable domain of TCR clone 320296 (TRBV19, TRBJ2-1)
CASPTFVLSGEQFF

SEQ ID NO: 640593 - protein, 13 aa, Homo sapiens
  CDR3 for alpha chain variable domain of TCR clone 320297 (TRAV1-2, TRAJ27)
CAVFNTNAGKSTF

SEQ ID NO: 640594 - protein, 13 aa, Homo sapiens
  CDR3 for beta chain variable domain of TCR clone 320297 (TRBV2, TRBJ2-7)
CASSQGQDYEQYF

SEQ ID NO: 640595 - protein, 16 aa, Homo sapiens
  CDR3 for alpha chain variable domain of TCR clone 320298 (TRAV26-1, TRAJ36)
CIVRASYQTGANNLFF

SEQ ID NO: 640596 - protein, 16 aa, Homo sapiens
  CDR3 for beta chain variable domain of TCR clone 320298 (TRBV27, TRBJ2-5)
CASSYGPGGQKETQYF

SEQ ID NO: 640597 - protein, 16 aa, Homo sapiens
  CDR3 for alpha chain variable domain of TCR clone 320299 (TRAV35, TRAJ37)
CWAFLRGSSNTGKLIF

SEQ ID NO: 640598 - protein, 13 aa, Homo sapiens
  CDR3 for beta chain variable domain of TCR clone 320299 (TRBV2, TRBJ1-2)
CASSVRGIYGYTF

SEQ ID NO: 640599 - protein, 14 aa, Homo sapiens
  CDR3 for alpha chain variable domain of TCR clone 320300 (TRAV1-2, TRAJ16)
CAVNRFSDGQKLLF

SEQ ID NO: 640600 - protein, 13 aa, Homo sapiens
  CDR3 for beta chain variable domain of TCR clone 320300 (TRBV10-3, TRBJ2-1)
CAAGLADNNEQFF

SEQ ID NO: 640601 - protein, 10 aa, Homo sapiens
  CDR3 for alpha chain variable domain of TCR clone 320301 (TRAV23/DV6, TRAJ57)
CAASSTLSQG

SEQ ID NO: 640602 - protein, 11 aa, Homo sapiens
  CDR3 for beta chain variable domain of TCR clone 320301 (TRBV25-1, TRBJ1-1)
HTWGGNTEAFF

SEQ ID NO: 640603 - protein, 17 aa, Homo sapiens
  CDR3 for alpha chain variable domain of TCR clone 320302 (TRAV3, TRAJ6)
CAVRDGPRAGGSYIPPF

SEQ ID NO: 640604 - protein, 12 aa, Homo sapiens
  CDR3 for beta chain variable domain of TCR clone 320302 (TRBV14, TRBJ2-4)
CASSNLKSIQHF

SEQ ID NO: 640605 - protein, 14 aa, Homo sapiens
  CDR3 for alpha chain variable domain of TCR clone 320303 (TRAV8-3, TRAJ6)
CAVGASGGSYIPTF

SEQ ID NO: 640606 - protein, 13 aa, Homo sapiens
  CDR3 for beta chain variable domain of TCR clone 320303 (TRBV12-4, TRBJ2-7)
CASSPTETYEQYF

SEQ ID NO: 640607 - protein, 15 aa, Homo sapiens
  CDR3 for alpha chain variable domain of TCR clone 320304 (TRAV12-3, TRAJ6)
CAMSAISGGSYIPTF

SEQ ID NO: 640608 - protein, 11 aa, Homo sapiens
  CDR3 for beta chain variable domain of TCR clone 320304 (TRBV20-1, TRBJ1-5)
CSAQGDQPQHF

SEQ ID NO: 640609 - protein, 13 aa, Homo sapiens
  CDR3 for alpha chain variable domain of TCR clone 320305 (TRAV20, TRAJ34)
CAVRSYNTDKLIF

SEQ ID NO: 640610 - protein, 14 aa, Homo sapiens
  CDR3 for beta chain variable domain of TCR clone 320305 (TRBV27, TRBJ1-3)
CQQSSPGSGNTIYF

SEQ ID NO: 640611 - protein, 14 aa, Homo sapiens
  CDR3 for alpha chain variable domain of TCR clone 320306 (TRAV12-1, TRAJ46)
CVVTAESSGDKLTF

SEQ ID NO: 640612 - protein, 17 aa, Homo sapiens
  CDR3 for beta chain variable domain of TCR clone 320306 (TRBV4-1, TRBJ2-3)
CASSQDPAGGQLDTQYF

SEQ ID NO: 640613 - protein, 19 aa, Homo sapiens
  CDR3 for alpha chain variable domain of TCR clone 320307 (TRAV2, TRAJ20)
ILQVREADTAVYRDCKLSF

SEQ ID NO: 640614 - protein, 12 aa, Homo sapiens
  CDR3 for beta chain variable domain of TCR clone 320307 (TRBV11-2, TRBJ2-2)
CASSLGGGELFF

SEQ ID NO: 640615 - protein, 13 aa, Homo sapiens
  CDR3 for alpha chain variable domain of TCR clone 320308 (TRAV16, TRAJ31)
CALSAHNNARLMF

SEQ ID NO: 640616 - protein, 13 aa, Homo sapiens
  CDR3 for beta chain variable domain of TCR clone 320308 (TRBV12-4, TRBJ1-2)
CASSLRQGKGYTF

SEQ ID NO: 640617 - protein, 15 aa, Homo sapiens
  CDR3 for alpha chain variable domain of TCR clone 320309 (TRAV12-2, TRAJ53)
CAVNGGGGSNYKLTF

SEQ ID NO: 640618 - protein, 15 aa, Homo sapiens
  CDR3 for beta chain variable domain of TCR clone 320309 (TRBV7-2, TRBJ1-1)
CASRSATGWNTEAFF

SEQ ID NO: 640619 - protein, 15 aa, Homo sapiens
  CDR3 for alpha chain variable domain of TCR clone 320310 (TRAV26-1, TRAJ17)
CIVSSFKAAGNKLTV

SEQ ID NO: 640620 - protein, 14 aa, Homo sapiens
  CDR3 for beta chain variable domain of TCR clone 320310 (TRBV6-1, TRBJ2-2)
CASTWQGNTGELFF

SEQ ID NO: 640621 - protein, 13 aa, Homo sapiens
  CDR3 for alpha chain variable domain of TCR clone 320311 (TRAV13-2, TRAJ13)
CAETAGGYQKVTF

SEQ ID NO: 640622 - protein, 17 aa, Homo sapiens
  CDR3 for beta chain variable domain of TCR clone 320311 (TRBV20-1, TRBJ2-1)
CSARDPLAGVWDNEQFF

SEQ ID NO: 640623 - protein, 13 aa, Homo sapiens
  CDR3 for alpha chain variable domain of TCR clone 320312 (TRAV29/DV5, TRAJ40)
CAATYSGTYKYIF

SEQ ID NO: 640624 - protein, 13 aa, Homo sapiens
  CDR3 for beta chain variable domain of TCR clone 320312 (TRBV19, TRBJ1-5)
CASSIGGNQPQHF

SEQ ID NO: 640625 - protein, 12 aa, Homo sapiens
  CDR3 for alpha chain variable domain of TCR clone 320313 (TRAV3, TRAJ43)
CAVRDPNNDMRF

SEQ ID NO: 640626 - protein, 15 aa, Homo sapiens
  CDR3 for beta chain variable domain of TCR clone 320313 (TRBV6-5, TRBJ2-1)
CASSYDTGAGNEQFF

SEQ ID NO: 640627 - protein, 13 aa, Homo sapiens
  CDR3 for alpha chain variable domain of TCR clone 320314 (TRAV2, TRAJ15)
CAVASQAGTALIF

SEQ ID NO: 640628 - protein, 15 aa, Homo sapiens
  CDR3 for beta chain variable domain of TCR clone 320314 (TRBV20-1, TRBJ2-7)
CSARDRVFGMDEQYF

SEQ ID NO: 640629 - protein, 15 aa, Homo sapiens
  CDR3 for alpha chain variable domain of TCR clone 320315 (TRAV26-1, TRAJ29)
CIVRVEGSGNTPLVF

SEQ ID NO: 640630 - protein, 15 aa, Homo sapiens
  CDR3 for beta chain variable domain of TCR clone 320315 (TRBV9, TRBJ2-1)
CASSLAGSSYNEQFF

SEQ ID NO: 640631 - protein, 11 aa, Homo sapiens
  CDR3 for alpha chain variable domain of TCR clone 320316 (TRAV12-1, TRAJ34)
CVVNKGRELIF

SEQ ID NO: 640632 - protein, 15 aa, Homo sapiens
  CDR3 for beta chain variable domain of TCR clone 320316 (TRBV7-6, TRBJ1-5)
CASSQSSGINQPQHF

SEQ ID NO: 640633 - protein, 12 aa, Homo sapiens
  CDR3 for alpha chain variable domain of TCR clone 320317 (TRAV12-3, TRAJ17)
CAMTLTGNKRTF

SEQ ID NO: 640634 - protein, 18 aa, Homo sapiens
  CDR3 for beta chain variable domain of TCR clone 320317 (TRBV4-3, TRBJ1-6)
CASSQETPASSYKSPLHF

SEQ ID NO: 640635 - protein, 14 aa, Homo sapiens
  CDR3 for alpha chain variable domain of TCR clone 320318 (TRAV26-1, TRAJ38)
CIADNAGNSRKLIL

SEQ ID NO: 640636 - protein, 13 aa, Homo sapiens
  CDR3 for beta chain variable domain of TCR clone 320318 (TRBV4-1, TRBJ2-7)
CASSQGQAYEQYF

SEQ ID NO: 640637 - protein, 14 aa, Homo sapiens
  CDR3 for alpha chain variable domain of TCR clone 320319 (TRAV3, TRAJ5)
CAVRSDPGRRALTF

SEQ ID NO: 640638 - protein, 14 aa, Homo sapiens
  CDR3 for beta chain variable domain of TCR clone 320319 (TRBV7-2, TRBJ2-3)
CASSSVMPTDTQYF

SEQ ID NO: 640639 - protein, 16 aa, Homo sapiens
  CDR3 for alpha chain variable domain of TCR clone 320320 (TRAV12-3, TRAJ53)
CAMSPGSGGSNNKMTF

SEQ ID NO: 640640 - protein, 11 aa, Homo sapiens
  CDR3 for beta chain variable domain of TCR clone 320320 (TRBV29-1, TRBJ2-5)
CSEDRTGTQYF

SEQ ID NO: 640641 - protein, 15 aa, Homo sapiens
  CDR3 for alpha chain variable domain of TCR clone 320321 (TRAV21, TRAJ40)
CAVRPQTSGTYKYIF

SEQ ID NO: 640642 - protein, 13 aa, Homo sapiens
  CDR3 for beta chain variable domain of TCR clone 320321 (TRBV7-2, TRBJ2-2)
CASSSVRAGVLFF

SEQ ID NO: 640643 - protein, 10 aa, Homo sapiens
  CDR3 for alpha chain variable domain of TCR clone 320322 (TRAV12-1, TRAJ22)
HSGSARQLTF

SEQ ID NO: 640644 - protein, 16 aa, Homo sapiens
  CDR3 for beta chain variable domain of TCR clone 320322 (TRBV7-3, TRBJ2-2)
CASSLKRGTLSGELFF

SEQ ID NO: 640645 - protein, 15 aa, Homo sapiens
  CDR3 for alpha chain variable domain of TCR clone 320323 (TRAV17, TRAJ45)
CATAYSGGSADGLTF

SEQ ID NO: 640646 - protein, 11 aa, Homo sapiens
  CDR3 for beta chain variable domain of TCR clone 320323 (TRBV7-8, TRBJ2-7)
CASSLSREQYF

SEQ ID NO: 640647 - protein, 12 aa, Homo sapiens
  CDR3 for alpha chain variable domain of TCR clone 320324 (TRAV13-1, TRAJ21)
RAAKEGFNTFYF

SEQ ID NO: 640648 - protein, 17 aa, Homo sapiens
  CDR3 for beta chain variable domain of TCR clone 320324 (TRBV19, TRBJ2-7)
CASSISFYDSYPYEQYF

SEQ ID NO: 640649 - protein, 14 aa, Homo sapiens
  CDR3 for alpha chain variable domain of TCR clone 320325 (TRAV26-1, TRAJ26)
CIVRATFLSQNFVF

SEQ ID NO: 640650 - protein, 16 aa, Homo sapiens
  CDR3 for beta chain variable domain of TCR clone 320325 (TRBV12-4, TRBJ2-7)
CASRSTGTGPSYEQYF

SEQ ID NO: 640651 - protein, 14 aa, Homo sapiens
  CDR3 for alpha chain variable domain of TCR clone 320326 (TRAV12-2, TRAJ13)
CAVKKTGGYQKVTF

SEQ ID NO: 640652 - protein, 18 aa, Homo sapiens
  CDR3 for beta chain variable domain of TCR clone 320326 (TRBV11-2, TRBJ1-6)
CASSLAVQGLSLNSPLHF

SEQ ID NO: 640653 - protein, 12 aa, Homo sapiens
  CDR3 for alpha chain variable domain of TCR clone 320327 (TRAV1-1, TRAJ20)
CAVREDDYKLSF

SEQ ID NO: 640654 - protein, 18 aa, Homo sapiens
  CDR3 for beta chain variable domain of TCR clone 320327 (TRBV20-1, TRBJ2-3)
CSASGLAGGAGDHRYAVF

SEQ ID NO: 640655 - protein, 14 aa, Homo sapiens
  CDR3 for alpha chain variable domain of TCR clone 320328 (TRAV12-1, TRAJ17)
CVVNFKAAGNKLTF

SEQ ID NO: 640656 - protein, 12 aa, Homo sapiens
  CDR3 for beta chain variable domain of TCR clone 320328 (TRBV7-9, TRBJ2-7)
CASSIKREEQYF

SEQ ID NO: 640657 - protein, 14 aa, Homo sapiens
  CDR3 for alpha chain variable domain of TCR clone 320329 (TRAV2, TRAJ37)
CAVDCTDNTGKLIF

SEQ ID NO: 640658 - protein, 15 aa, Homo sapiens
  CDR3 for beta chain variable domain of TCR clone 320329 (TRBV20-1, TRBJ1-1)
CSASRGVTGYTEAFF

SEQ ID NO: 640659 - protein, 13 aa, Homo sapiens
  CDR3 for alpha chain variable domain of TCR clone 320330 (TRAV12-3, TRAJ49)
CAMSRNTGNQFYF

SEQ ID NO: 640660 - protein, 15 aa, Homo sapiens
  CDR3 for beta chain variable domain of TCR clone 320330 (TRBV10-2, TRBJ2-6)
CASSEQGTGANVLTF

SEQ ID NO: 640661 - protein, 16 aa, Homo sapiens
  CDR3 for alpha chain variable domain of TCR clone 320331 (TRAV30, TRAJ24)
CGTEIVDAGSWGKFQF

SEQ ID NO: 640662 - protein, 15 aa, Homo sapiens
  CDR3 for beta chain variable domain of TCR clone 320331 (TRBV20-1, TRBJ2-7)
CSARDRVSGMDEQYF

SEQ ID NO: 640663 - protein, 11 aa, Homo sapiens
  CDR3 for alpha chain variable domain of TCR clone 320332 (TRAV8-6, TRAJ34)
CAVWNTDKLIF

SEQ ID NO: 640664 - protein, 12 aa, Homo sapiens
  CDR3 for beta chain variable domain of TCR clone 320332 (TRBV12-4, TRBJ2-3)
CASSTLPDTQYF

SEQ ID NO: 640665 - protein, 14 aa, Homo sapiens
  CDR3 for alpha chain variable domain of TCR clone 320333 (TRAV1-2, TRAJ16)
CAVNRFSDGQTLLF

SEQ ID NO: 640666 - protein, 12 aa, Homo sapiens
  CDR3 for beta chain variable domain of TCR clone 320333 (TRBV5-1, TRBJ2-7)
CASSSTTYEQYF

SEQ ID NO: 640667 - protein, 12 aa, Homo sapiens
  CDR3 for alpha chain variable domain of TCR clone 320334 (TRAV16, TRAJ10)
CSRTGGGNKLTF

SEQ ID NO: 640668 - protein, 14 aa, Homo sapiens
  CDR3 for beta chain variable domain of TCR clone 320334 (TRBV7-9, TRBJ2-1)
CASSLGVADNEQFF

SEQ ID NO: 640669 - protein, 13 aa, Homo sapiens
  CDR3 for alpha chain variable domain of TCR clone 320335 (TRAV16, TRAJ48)
CSPLNFGNEKLTF

SEQ ID NO: 640670 - protein, 11 aa, Homo sapiens
  CDR3 for beta chain variable domain of TCR clone 320335 (TRBV12-4, TRBJ2-3)
CASTATDTQYF

SEQ ID NO: 640671 - protein, 14 aa, Homo sapiens
  CDR3 for alpha chain variable domain of TCR clone 320336 (TRAV29/DV5, TRAJ45)
CAASFRGGADGVTF

SEQ ID NO: 640672 - protein, 11 aa, Homo sapiens
  CDR3 for beta chain variable domain of TCR clone 320336 (TRBV11-2, TRBJ2-2)
CASSLPGELFF

SEQ ID NO: 640673 - protein, 12 aa, Homo sapiens
  CDR3 for alpha chain variable domain of TCR clone 320337 (TRAV29/DV5, TRAJ15)
CSSNQAGTALIF

SEQ ID NO: 640674 - protein, 15 aa, Homo sapiens
  CDR3 for beta chain variable domain of TCR clone 320337 (TRBV11-2, TRBJ2-2)
CASSSDRVNAGELFF

SEQ ID NO: 640675 - protein, 12 aa, Homo sapiens
  CDR3 for alpha chain variable domain of TCR clone 320338 (TRAV13-2, TRAJ23)
CAERHRGGKLIF

SEQ ID NO: 640676 - protein, 11 aa, Homo sapiens
  CDR3 for beta chain variable domain of TCR clone 320338 (TRBV7-2, TRBJ2-3)
CASSSSDTQYF

SEQ ID NO: 640677 - protein, 11 aa, Homo sapiens
  CDR3 for alpha chain variable domain of TCR clone 320339 (TRAV13-2, TRAJ23)
CAVETRGKLIF

SEQ ID NO: 640678 - protein, 14 aa, Homo sapiens
  CDR3 for beta chain variable domain of TCR clone 320339 (TRBV2, TRBJ2-3)
CASSEGQNTDTQYF

SEQ ID NO: 640679 - protein, 11 aa, Homo sapiens
  CDR3 for alpha chain variable domain of TCR clone 320340 (TRAV23/DV6, TRAJ58)
CAARLLRGETS

SEQ ID NO: 640680 - protein, 14 aa, Homo sapiens
  CDR3 for beta chain variable domain of TCR clone 320340 (TRBV20-1, TRBJ2-2)
CSAPDTANTGELFF

SEQ ID NO: 640681 - protein, 15 aa, Homo sapiens
  CDR3 for alpha chain variable domain of TCR clone 320341 (TRAV17, TRAJ57)
CATGPSQGGSEKLVF

SEQ ID NO: 640682 - protein, 13 aa, Homo sapiens
  CDR3 for beta chain variable domain of TCR clone 320341 (TRBV6-1, TRBJ2-1)
CASSETGVSEKFF

SEQ ID NO: 640683 - protein, 15 aa, Homo sapiens
  CDR3 for alpha chain variable domain of TCR clone 320342 (TRAV12-2, TRAJ53)
CAVNGGGGSNYKLTF

SEQ ID NO: 640684 - protein, 18 aa, Homo sapiens
  CDR3 for beta chain variable domain of TCR clone 320342 (TRBV4-1, TRBJ2-7)
CASSQDTGAGSGLNEQYF

SEQ ID NO: 640685 - protein, 14 aa, Homo sapiens
  CDR3 for alpha chain variable domain of TCR clone 320343 (TRAV1-2, TRAJ8)
CAVREDTGFQKLVF

SEQ ID NO: 640686 - protein, 15 aa, Homo sapiens
  CDR3 for beta chain variable domain of TCR clone 320343 (TRBV2, TRBJ2-3)
CASSGLAGSTDTQYF

SEQ ID NO: 640687 - protein, 13 aa, Homo sapiens
  CDR3 for alpha chain variable domain of TCR clone 320344 (TRAV21, TRAJ20)
CAVGLRVYYKLSF

SEQ ID NO: 640688 - protein, 16 aa, Homo sapiens
  CDR3 for beta chain variable domain of TCR clone 320344 (TRBV19, TRBJ2-5)
CASSIGTRGSQETQYF

SEQ ID NO: 640689 - protein, 14 aa, Homo sapiens
  CDR3 for alpha chain variable domain of TCR clone 320345 (TRAV8-4, TRAJ54)
CAVSEVLGAQKLVF

SEQ ID NO: 640690 - protein, 13 aa, Homo sapiens
  CDR3 for beta chain variable domain of TCR clone 320345 (TRBV27, TRBJ2-7)
CASSFVSSYEKYF

SEQ ID NO: 640691 - protein, 13 aa, Homo sapiens
  CDR3 for alpha chain variable domain of TCR clone 320346 (TRAV13-1, TRAJ40)
CAAISPGTYKYIF

SEQ ID NO: 640692 - protein, 13 aa, Homo sapiens
  CDR3 for beta chain variable domain of TCR clone 320346 (TRBV10-3, TRBJ2-7)
CAIRAGGPREQYF

SEQ ID NO: 640693 - protein, 14 aa, Homo sapiens
  CDR3 for alpha chain variable domain of TCR clone 320347 (TRAV35, TRAJ22)
CAGLRAGSARQLTF

SEQ ID NO: 640694 - protein, 15 aa, Homo sapiens
  CDR3 for beta chain variable domain of TCR clone 320347 (TRBV12-4, TRBJ2-5)
CASSPPTGLQETQYF

SEQ ID NO: 640695 - protein, 15 aa, Homo sapiens
  CDR3 for alpha chain variable domain of TCR clone 320348 (TRAV13-1, TRAJ57)
CAASNTQGGSEKLDF

SEQ ID NO: 640696 - protein, 16 aa, Homo sapiens
  CDR3 for beta chain variable domain of TCR clone 320348 (TRBV19, TRBJ2-1)
CASSKAGPSSYNEQFF

SEQ ID NO: 640697 - protein, 14 aa, Homo sapiens
  CDR3 for alpha chain variable domain of TCR clone 320349 (TRAV12-3, TRAJ10)
SYLPLTGGGNKLTF

SEQ ID NO: 640698 - protein, 13 aa, Homo sapiens
  CDR3 for beta chain variable domain of TCR clone 320349 (TRBV7-9, TRBJ1-2)
CASSLKQNYGYTF

SEQ ID NO: 640699 - protein, 12 aa, Homo sapiens
  CDR3 for alpha chain variable domain of TCR clone 320350 (TRAV12-3, TRAJ17)
CAMTLTGNKLTF

SEQ ID NO: 640700 - protein, 15 aa, Homo sapiens
  CDR3 for beta chain variable domain of TCR clone 320350 (TRBV20-1, TRBJ2-7)
CSAIDRFSGMDEQYF

SEQ ID NO: 640701 - protein, 15 aa, Homo sapiens
  CDR3 for alpha chain variable domain of TCR clone 320351 (TRAV4, TRAJ8)
CLVGEQHTGFQKLVF

SEQ ID NO: 640702 - protein, 14 aa, Homo sapiens
  CDR3 for beta chain variable domain of TCR clone 320351 (TRBV19, TRBJ2-1)
CASPTFVLSGEQFF

SEQ ID NO: 640703 - protein, 13 aa, Homo sapiens
  CDR3 for alpha chain variable domain of TCR clone 320352 (TRAV16, TRAJ58)
CALSIPSGSRLTF

SEQ ID NO: 640704 - protein, 16 aa, Homo sapiens
  CDR3 for beta chain variable domain of TCR clone 320352 (TRBV29-1, TRBJ2-6)
CSVEDITYSGASVLTF

SEQ ID NO: 640705 - protein, 14 aa, Homo sapiens
  CDR3 for alpha chain variable domain of TCR clone 320353 (TRAV26-1, TRAJ39)
CIVRGSRAGNMLTF

SEQ ID NO: 640706 - protein, 15 aa, Homo sapiens
  CDR3 for beta chain variable domain of TCR clone 320353 (TRBV7-3, TRBJ2-1)
CASSLDGNSYNEQFF

SEQ ID NO: 640707 - protein, 16 aa, Homo sapiens
  CDR3 for alpha chain variable domain of TCR clone 320354 (TRAV38-1, TRAJ56)
CAFMKRQTGANSKLTF

SEQ ID NO: 640708 - protein, 19 aa, Homo sapiens
  CDR3 for beta chain variable domain of TCR clone 320354 (TRBV19, TRBJ2-5)
CASSIGQVTDFFLGETQYF

SEQ ID NO: 640709 - protein, 17 aa, Homo sapiens
  CDR3 for alpha chain variable domain of TCR clone 320355 (TRAV38-1, TRAJ28)
CAFMKPTSGAGSYQLTF

SEQ ID NO: 640710 - protein, 15 aa, Homo sapiens
  CDR3 for beta chain variable domain of TCR clone 320355 (TRBV5-1, TRBJ2-4)
CASSLGGGGSYIRYF

SEQ ID NO: 640711 - protein, 14 aa, Homo sapiens
  CDR3 for alpha chain variable domain of TCR clone 320356 (TRAV12-3, TRAJ12)
CAMSEVDSSSKLIF

SEQ ID NO: 640712 - protein, 12 aa, Homo sapiens
  CDR3 for beta chain variable domain of TCR clone 320356 (TRBV18, TRBJ1-4)
CASSPSREKLFF

SEQ ID NO: 640713 - protein, 12 aa, Homo sapiens
  CDR3 for alpha chain variable domain of TCR clone 320357 (TRAV12-3, TRAJ17)
CAMTLTGKKLTF

SEQ ID NO: 640714 - protein, 12 aa, Homo sapiens
  CDR3 for beta chain variable domain of TCR clone 320357 (TRBV14, TRBJ2-5)
CASSQLKETQYF

SEQ ID NO: 640715 - protein, 14 aa, Homo sapiens
  CDR3 for alpha chain variable domain of TCR clone 320358 (TRAV8-1, TRAJ49)
CASSIANTGNQFYF

SEQ ID NO: 640716 - protein, 14 aa, Homo sapiens
  CDR3 for beta chain variable domain of TCR clone 320358 (TRBV7-6, TRBJ2-3)
CASSLGTVTDTQYF

SEQ ID NO: 640717 - protein, 12 aa, Homo sapiens
  CDR3 for alpha chain variable domain of TCR clone 320359 (TRAV21, TRAJ37)
CAVRGNTGKLIF

SEQ ID NO: 640718 - protein, 12 aa, Homo sapiens
  CDR3 for beta chain variable domain of TCR clone 320359 (TRBV11-2, TRBJ2-2)
CASSLGGGELFF

SEQ ID NO: 640719 - protein, 13 aa, Homo sapiens
  CDR3 for alpha chain variable domain of TCR clone 320360 (TRAV20, TRAJ26)
CAVPTSCGQNFVF

SEQ ID NO: 640720 - protein, 16 aa, Homo sapiens
  CDR3 for beta chain variable domain of TCR clone 320360 (TRBV28, TRBJ2-7)
CASSSPQGRDVYEQYF

SEQ ID NO: 640721 - protein, 15 aa, Homo sapiens
  CDR3 for alpha chain variable domain of TCR clone 320361 (TRAV17, TRAJ56)
CATDANTGANSKLTF

SEQ ID NO: 640722 - protein, 15 aa, Homo sapiens
  CDR3 for beta chain variable domain of TCR clone 320361 (TRBV19, TRBJ2-7)
CASSIAGTGGYEQYF

SEQ ID NO: 640723 - protein, 12 aa, Homo sapiens
  CDR3 for alpha chain variable domain of TCR clone 320362 (TRAV16, TRAJ9)
FALSSGGFKTIF

SEQ ID NO: 640724 - protein, 14 aa, Homo sapiens
  CDR3 for beta chain variable domain of TCR clone 320362 (TRBV7-9, TRBJ2-1)
CASSLAGPYNEQLF

SEQ ID NO: 640725 - protein, 14 aa, Homo sapiens
  CDR3 for alpha chain variable domain of TCR clone 320363 (TRAV1-2, TRAJ16)
CAVKRFSDGQKLLF

SEQ ID NO: 640726 - protein, 14 aa, Homo sapiens
  CDR3 for beta chain variable domain of TCR clone 320363 (TRBV19, TRBJ1-1)
CASTGHRLNTEAFF

SEQ ID NO: 640727 - protein, 16 aa, Homo sapiens
  CDR3 for alpha chain variable domain of TCR clone 320364 (TRAV30, TRAJ24)
CGTEIVDADSWGKFQF

SEQ ID NO: 640728 - protein, 13 aa, Homo sapiens
  CDR3 for beta chain variable domain of TCR clone 320364 (TRBV7-8, TRBJ2-7)
CASSLTGGREQNF

SEQ ID NO: 640729 - protein, 12 aa, Homo sapiens
  CDR3 for alpha chain variable domain of TCR clone 320365 (TRAV2, TRAJ5)
CALDTGRRALTF

SEQ ID NO: 640730 - protein, 15 aa, Homo sapiens
  CDR3 for beta chain variable domain of TCR clone 320365 (TRBV10-3, TRBJ2-1)
CASSDVQDRAYEQLF

SEQ ID NO: 640731 - protein, 14 aa, Homo sapiens
  CDR3 for alpha chain variable domain of TCR clone 320366 (TRAV12-2, TRAJ9)
LAVNMEGGGFKTIF

SEQ ID NO: 640732 - protein, 14 aa, Homo sapiens
  CDR3 for beta chain variable domain of TCR clone 320366 (TRBV2, TRBJ2-5)
CASSEVLAQETQYF

SEQ ID NO: 640733 - protein, 15 aa, Homo sapiens
  CDR3 for alpha chain variable domain of TCR clone 320367 (TRAV13-2, TRAJ53)
CAETVSGGSNYKLTF

SEQ ID NO: 640734 - protein, 16 aa, Homo sapiens
  CDR3 for beta chain variable domain of TCR clone 320367 (TRBV24-1, TRBJ2-3)
CATSDPGTGATDTQYF

SEQ ID NO: 640735 - protein, 16 aa, Homo sapiens
  CDR3 for alpha chain variable domain of TCR clone 320368 (TRAV26-1, TRAJ37)
CFVRGDGSGNTGKLIF

SEQ ID NO: 640736 - protein, 17 aa, Homo sapiens
  CDR3 for beta chain variable domain of TCR clone 320368 (TRBV4-1, TRBJ2-7)
CASSRDPLGVRGGEQYF

SEQ ID NO: 640737 - protein, 14 aa, Homo sapiens
  CDR3 for alpha chain variable domain of TCR clone 320369 (TRAV13-1, TRAJ44)
CAEKATGTASKLTF

SEQ ID NO: 640738 - protein, 17 aa, Homo sapiens
  CDR3 for beta chain variable domain of TCR clone 320369 (TRBV7-3, TRBJ2-3)
CASSSMKRMRGADTQYF

SEQ ID NO: 640739 - protein, 17 aa, Homo sapiens
  CDR3 for alpha chain variable domain of TCR clone 320370 (TRAV8-3, TRAJ8)
CAVGPNEHRLSETCSWN

SEQ ID NO: 640740 - protein, 13 aa, Homo sapiens
  CDR3 for beta chain variable domain of TCR clone 320370 (TRBV10-2, TRBJ2-3)
CASSESGDHTQYF

SEQ ID NO: 640741 - protein, 15 aa, Homo sapiens
  CDR3 for alpha chain variable domain of TCR clone 320371 (TRAV12-2, TRAJ53)
YAVNGGGGSNYKLTF

SEQ ID NO: 640742 - protein, 16 aa, Homo sapiens
  CDR3 for beta chain variable domain of TCR clone 320371 (TRBV19, TRBJ2-1)
CASSKAGPSSYNEQFF

SEQ ID NO: 640743 - protein, 14 aa, Homo sapiens
  CDR3 for alpha chain variable domain of TCR clone 320372 (TRAV8-3, TRAJ4)
CAVGAAGGYNKLIF

SEQ ID NO: 640744 - protein, 13 aa, Homo sapiens
  CDR3 for beta chain variable domain of TCR clone 320372 (TRBV28, TRBJ2-7)
CASSPSGTYEQYF

SEQ ID NO: 640745 - protein, 13 aa, Homo sapiens
  CDR3 for alpha chain variable domain of TCR clone 320373 (TRAV8-6, TRAJ9)
CAVWDTGGFKTIF

SEQ ID NO: 640746 - protein, 14 aa, Homo sapiens
  CDR3 for beta chain variable domain of TCR clone 320373 (TRBV2, TRBJ2-1)
FASSEALIYNEQFF

SEQ ID NO: 640747 - protein, 15 aa, Homo sapiens
  CDR3 for alpha chain variable domain of TCR clone 320374 (TRAV17, TRAJ37)
CATDHGSNNTGKLIF

SEQ ID NO: 640748 - protein, 14 aa, Homo sapiens
  CDR3 for beta chain variable domain of TCR clone 320374 (TRBV7-2, TRBJ2-3)
CASSRTSGADTQYF

SEQ ID NO: 640749 - protein, 14 aa, Homo sapiens
  CDR3 for alpha chain variable domain of TCR clone 320375 (TRAV13-1, TRAJ45)
CAATSGGGADGLTF

SEQ ID NO: 640750 - protein, 16 aa, Homo sapiens
  CDR3 for beta chain variable domain of TCR clone 320375 (TRBV13, TRBJ2-2)
CASSPRTGEHTGELFF

SEQ ID NO: 640751 - protein, 13 aa, Homo sapiens
  CDR3 for alpha chain variable domain of TCR clone 320376 (TRAV12-3, TRAJ5)
CAMRPTGRRALTF

SEQ ID NO: 640752 - protein, 13 aa, Homo sapiens
  CDR3 for beta chain variable domain of TCR clone 320376 (TRBV2, TRBJ2-7)
CASSVLEAYEQYF

SEQ ID NO: 640753 - protein, 10 aa, Homo sapiens
  CDR3 for alpha chain variable domain of TCR clone 320377 (TRAV12-2, TRAJ10)
CAAWTGVETH

SEQ ID NO: 640754 - protein, 15 aa, Homo sapiens
  CDR3 for beta chain variable domain of TCR clone 320377 (TRBV2, TRBJ2-7)
CASSEGLARSYEQYF

SEQ ID NO: 640755 - protein, 12 aa, Homo sapiens
  CDR3 for alpha chain variable domain of TCR clone 320378 (TRAV13-1, TRAJ49)
CAASIRSSQFYF

SEQ ID NO: 640756 - protein, 14 aa, Homo sapiens
  CDR3 for beta chain variable domain of TCR clone 320378 (TRBV7-2, TRBJ2-1)
CASSPGLAGNEQFF

SEQ ID NO: 640757 - protein, 18 aa, Homo sapiens
  CDR3 for alpha chain variable domain of TCR clone 320379 (TRAV12-3, TRAJ52)
CAMSVGGAGGTSYGKLTF

SEQ ID NO: 640758 - protein, 15 aa, Homo sapiens
  CDR3 for beta chain variable domain of TCR clone 320379 (TRBV27, TRBJ1-6)
CACSFDRGLGSTLHF

SEQ ID NO: 640759 - protein, 12 aa, Homo sapiens
  CDR3 for alpha chain variable domain of TCR clone 320380 (TRAV12-3, TRAJ43)
CAISSNNNDMRF

SEQ ID NO: 640760 - protein, 15 aa, Homo sapiens
  CDR3 for beta chain variable domain of TCR clone 320380 (TRBV11-3, TRBJ1-4)
CASSPRHATNEKLFF

SEQ ID NO: 640761 - protein, 13 aa, Homo sapiens
  CDR3 for alpha chain variable domain of TCR clone 320381 (TRAV16, TRAJ26)
CITVLCLGQNFVF

SEQ ID NO: 640762 - protein, 12 aa, Homo sapiens
  CDR3 for beta chain variable domain of TCR clone 320381 (TRBV11-2, TRBJ2-1)
CARSPGNNEQFF

SEQ ID NO: 640763 - protein, 13 aa, Homo sapiens
  CDR3 for alpha chain variable domain of TCR clone 320382 (TRAV17, TRAJ31)
CATDENNNARLMF

SEQ ID NO: 640764 - protein, 14 aa, Homo sapiens
  CDR3 for beta chain variable domain of TCR clone 320382 (TRBV7-2, TRBJ2-7)
CASSPKTSFYEQYF

SEQ ID NO: 640765 - protein, 14 aa, Homo sapiens
  CDR3 for alpha chain variable domain of TCR clone 320383 (TRAV22, TRAJ6)
CAGVGPGGSYIPTF

SEQ ID NO: 640766 - protein, 11 aa, Homo sapiens
  CDR3 for beta chain variable domain of TCR clone 320383 (TRBV20-1, TRBJ2-1)
CSLSSGSEQFL

SEQ ID NO: 640767 - protein, 14 aa, Homo sapiens
  CDR3 for alpha chain variable domain of TCR clone 320384 (TRAV12-2, TRAJ13)
CAVKKTGCYQKVTF

SEQ ID NO: 640768 - protein, 17 aa, Homo sapiens
  CDR3 for beta chain variable domain of TCR clone 320384 (TRBV13, TRBJ2-3)
CASSLSRVAGGRNTQYF

SEQ ID NO: 640769 - protein, 15 aa, Homo sapiens
  CDR3 for alpha chain variable domain of TCR clone 320385 (TRAV3, TRAJ27)
CAVGDPLTNAGKSTF

SEQ ID NO: 640770 - protein, 15 aa, Homo sapiens
  CDR3 for beta chain variable domain of TCR clone 320385 (TRBV28, TRBJ2-1)
CASSIIAGGRSEQFF

SEQ ID NO: 640771 - protein, 14 aa, Homo sapiens
  CDR3 for alpha chain variable domain of TCR clone 320386 (TRAV8-6, TRAJ49)
CAVSDPGTGNQFYF

SEQ ID NO: 640772 - protein, 13 aa, Homo sapiens
  CDR3 for beta chain variable domain of TCR clone 320386 (TRBV7-9, TRBJ1-2)
CASSLKQNYGYTV

SEQ ID NO: 640773 - protein, 14 aa, Homo sapiens
  CDR3 for alpha chain variable domain of TCR clone 320387 (TRAV12-2, TRAJ11)
CAVNRESGYNTLTF

SEQ ID NO: 640774 - protein, 10 aa, Homo sapiens
  CDR3 for beta chain variable domain of TCR clone 320387 (TRBV20-1, TRBJ2-5)
CSARFETQYF

SEQ ID NO: 640775 - protein, 16 aa, Homo sapiens
  CDR3 for alpha chain variable domain of TCR clone 320388 (TRAV4, TRAJ22)
CFVGDLYSGSARQLTF

SEQ ID NO: 640776 - protein, 17 aa, Homo sapiens
  CDR3 for beta chain variable domain of TCR clone 320388 (TRBV23-1, TRBJ1-1)
CASSPPPGLDMNTEAFF

SEQ ID NO: 640777 - protein, 13 aa, Homo sapiens
  CDR3 for alpha chain variable domain of TCR clone 320389 (TRAV21, TRAJ27)
CAALNTNAGTSTF

SEQ ID NO: 640778 - protein, 14 aa, Homo sapiens
  CDR3 for beta chain variable domain of TCR clone 320389 (TRBV27, TRBJ1-1)
CASSLLSGLSEAFF

SEQ ID NO: 640779 - protein, 13 aa, Homo sapiens
  CDR3 for alpha chain variable domain of TCR clone 320390 (TRAV4, TRAJ34)
CLVGDYNTDKLIF

SEQ ID NO: 640780 - protein, 23 aa, Homo sapiens
  CDR3 for beta chain variable domain of TCR clone 320390 (TRBV4-3, TRBJ2-3)
WASSQDPPRASSISGGRGDTQYF

SEQ ID NO: 640781 - protein, 14 aa, Homo sapiens
  CDR3 for alpha chain variable domain of TCR clone 320391 (TRAV2, TRAJ9)
CAVEDRSGGFKTIF

SEQ ID NO: 640782 - protein, 14 aa, Homo sapiens
  CDR3 for beta chain variable domain of TCR clone 320391 (TRBV27, TRBJ2-1)
CASSATGGYNEQFF

SEQ ID NO: 640783 - protein, 13 aa, Homo sapiens
  CDR3 for alpha chain variable domain of TCR clone 320392 (TRAV12-1, TRAJ31)
CGVNMNNNARLMF

SEQ ID NO: 640784 - protein, 15 aa, Homo sapiens
  CDR3 for beta chain variable domain of TCR clone 320392 (TRBV4-1, TRBJ1-2)
CASSQGQGAAYGYTF

SEQ ID NO: 640785 - protein, 14 aa, Homo sapiens
  CDR3 for alpha chain variable domain of TCR clone 320393 (TRAV1-2, TRAJ16)
CAVNRFSDGQKLLF

SEQ ID NO: 640786 - protein, 17 aa, Homo sapiens
  CDR3 for beta chain variable domain of TCR clone 320393 (TRBV20-1, TRBJ2-2)
CSASGSGQGGLTGELFC

SEQ ID NO: 640787 - protein, 13 aa, Homo sapiens
  CDR3 for alpha chain variable domain of TCR clone 320394 (TRAV12-2, TRAJ52)
CAVSGTSYGKLTF

SEQ ID NO: 640788 - protein, 14 aa, Homo sapiens
  CDR3 for beta chain variable domain of TCR clone 320394 (TRBV7-2, TRBJ2-7)
CASSPKTSFYEQYF

SEQ ID NO: 640789 - protein, 18 aa, Homo sapiens
  CDR3 for alpha chain variable domain of TCR clone 320395 (TRAV13-1, TRAJ52)
RAAKNPNAGGTSYGKLTF

SEQ ID NO: 640790 - protein, 18 aa, Homo sapiens
  CDR3 for beta chain variable domain of TCR clone 320395 (TRBV4-1, TRBJ1-4)
CASSPRTGGAWTNEKLFF

SEQ ID NO: 640791 - protein, 14 aa, Homo sapiens
  CDR3 for alpha chain variable domain of TCR clone 320396 (TRAV3, TRAJ21)
CAVRDAYNFNKFYS

SEQ ID NO: 640792 - protein, 17 aa, Homo sapiens
  CDR3 for beta chain variable domain of TCR clone 320396 (TRBV20-1, TRBJ1-6)
CSARGGYTFSYNSPLHF

SEQ ID NO: 640793 - protein, 16 aa, Homo sapiens
  CDR3 for alpha chain variable domain of TCR clone 320397 (TRAV30, TRAJ24)
CGTEIVDADSWGKFQF

SEQ ID NO: 640794 - protein, 11 aa, Homo sapiens
  CDR3 for beta chain variable domain of TCR clone 320397 (TRBV19, TRBJ1-1)
CASSIGSDAFF

SEQ ID NO: 640795 - protein, 13 aa, Homo sapiens
  CDR3 for alpha chain variable domain of TCR clone 320398 (TRAV21, TRAJ57)
CSVTQGGSEKLVF

SEQ ID NO: 640796 - protein, 19 aa, Homo sapiens
  CDR3 for beta chain variable domain of TCR clone 320398 (TRBV29-1, TRBJ2-7)
SAALKMLRTVRPKSSTSGR

SEQ ID NO: 640797 - protein, 17 aa, Homo sapiens
  CDR3 for alpha chain variable domain of TCR clone 320399 (TRAV4, )
CLVDIQSPDPAVYQLRD

SEQ ID NO: 640798 - protein, 12 aa, Homo sapiens
  CDR3 for beta chain variable domain of TCR clone 320399 (TRBV6-1, TRBJ2-7)
CASSDYSYEQYF

SEQ ID NO: 640799 - protein, 12 aa, Homo sapiens
  CDR3 for alpha chain variable domain of TCR clone 320400 (TRAV27, TRAJ41)
CAGRNPRYALNF

SEQ ID NO: 640800 - protein, 15 aa, Homo sapiens
  CDR3 for beta chain variable domain of TCR clone 320400 (TRBV20-1, TRBJ1-5)
CSATSDRGLGQPQHF

SEQ ID NO: 640801 - protein, 14 aa, Homo sapiens
  CDR3 for alpha chain variable domain of TCR clone 320401 (TRAV12-2, TRAJ13)
CAVQKTGGNQKVTF

SEQ ID NO: 640802 - protein, 15 aa, Homo sapiens
  CDR3 for beta chain variable domain of TCR clone 320401 (TRBV27, TRBJ2-1)
CASSNGGGSSNEQFF

SEQ ID NO: 640803 - protein, 14 aa, Homo sapiens
  CDR3 for alpha chain variable domain of TCR clone 320402 (TRAV13-1, TRAJ35)
CAASKGGFGNVLHC

SEQ ID NO: 640804 - protein, 15 aa, Homo sapiens
  CDR3 for beta chain variable domain of TCR clone 320402 (TRBV7-3, TRBJ1-1)
CASSQDWGAKLSLDK

SEQ ID NO: 640805 - protein, 14 aa, Homo sapiens
  CDR3 for alpha chain variable domain of TCR clone 320403 (TRAV1-2, TRAJ16)
CAVNRFSDGQKLIF

SEQ ID NO: 640806 - protein, 15 aa, Homo sapiens
  CDR3 for beta chain variable domain of TCR clone 320403 (TRBV29-1, TRBJ2-7)
CSVEFFDRGSYEQYF

SEQ ID NO: 640807 - protein, 14 aa, Homo sapiens
  CDR3 for alpha chain variable domain of TCR clone 320404 (TRAV21, TRAJ37)
CAVKGSSNTGKLIF

SEQ ID NO: 640808 - protein, 15 aa, Homo sapiens
  CDR3 for beta chain variable domain of TCR clone 320404 (TRBV7-2, TRBJ2-2)
CASSSLTGGTGELFF

SEQ ID NO: 640809 - protein, 17 aa, Homo sapiens
  CDR3 for alpha chain variable domain of TCR clone 320405 (TRAV14/DV4, TRAJ3)
CAMREGPEYSSAAKIIF

SEQ ID NO: 640810 - protein, 17 aa, Homo sapiens
  CDR3 for beta chain variable domain of TCR clone 320405 (TRBV20-1, TRBJ1-5)
CSARVGGERQGNQPQHF

SEQ ID NO: 640811 - protein, 14 aa, Homo sapiens
  CDR3 for alpha chain variable domain of TCR clone 320406 (TRAV8-4, TRAJ9)
CAVRINNGGFKTIF

SEQ ID NO: 640812 - protein, 15 aa, Homo sapiens
  CDR3 for beta chain variable domain of TCR clone 320406 (TRBV10-2, TRBJ2-6)
CASSEQGTGANVLNF

SEQ ID NO: 640813 - protein, 14 aa, Homo sapiens
  CDR3 for alpha chain variable domain of TCR clone 320407 (TRAV13-1, TRAJ44)
CAAKATGTASKLTF

SEQ ID NO: 640814 - protein, 17 aa, Homo sapiens
  CDR3 for beta chain variable domain of TCR clone 320407 (TRBV7-3, TRBJ2-3)
CASRLMKGMRGADTQYF

SEQ ID NO: 640815 - protein, 11 aa, Homo sapiens
  CDR3 for alpha chain variable domain of TCR clone 320408 (TRAV21, TRAJ11)
CAVNGYSTLTF

SEQ ID NO: 640816 - protein, 17 aa, Homo sapiens
  CDR3 for beta chain variable domain of TCR clone 320408 (TRBV28, TRBJ2-7)
CASSPLHRASGVYEQYF

SEQ ID NO: 640817 - protein, 15 aa, Homo sapiens
  CDR3 for alpha chain variable domain of TCR clone 320409 (TRAV4, TRAJ39)
CLVGPNNNAVNMLTF

SEQ ID NO: 640818 - protein, 14 aa, Homo sapiens
  CDR3 for beta chain variable domain of TCR clone 320409 (TRBV19, TRBJ2-1)
CASPTFVLSGEQFF

SEQ ID NO: 640819 - protein, 13 aa, Homo sapiens
  CDR3 for alpha chain variable domain of TCR clone 320410 (TRAV8-6, TRAJ21)
CAVSPSSLTKFYF

SEQ ID NO: 640820 - protein, 13 aa, Homo sapiens
  CDR3 for beta chain variable domain of TCR clone 320410 (TRBV29-1, TRBJ2-1)
CSVEGGRVNEQFF

SEQ ID NO: 640821 - protein, 12 aa, Homo sapiens
  CDR3 for alpha chain variable domain of TCR clone 320411 (TRAV12-3, TRAJ4)
CAMTGAGPRLAV

SEQ ID NO: 640822 - protein, 17 aa, Homo sapiens
  CDR3 for beta chain variable domain of TCR clone 320411 (TRBV10-3, TRBJ1-1)
CTSVPSVIPTGGVEAFF

SEQ ID NO: 640823 - protein, 17 aa, Homo sapiens
  CDR3 for alpha chain variable domain of TCR clone 320412 (TRAV3, TRAJ6)
CAVRDVPRAGGSYIPTF

SEQ ID NO: 640824 - protein, 13 aa, Homo sapiens
  CDR3 for beta chain variable domain of TCR clone 320412 (TRBV19, TRBJ1-1)
CASSITGESEAFF

SEQ ID NO: 640825 - protein, 12 aa, Homo sapiens
  CDR3 for alpha chain variable domain of TCR clone 320413 (TRAV21, TRAJ8)
CAVNTGFQKLVF

SEQ ID NO: 640826 - protein, 13 aa, Homo sapiens
  CDR3 for beta chain variable domain of TCR clone 320413 (TRBV6-3, TRBJ2-1)
CASSYDNYNEQVF

SEQ ID NO: 640827 - protein, 18 aa, Homo sapiens
  CDR3 for alpha chain variable domain of TCR clone 320414 (TRAV21, TRAJ52)
CAVRPSPAGGISYGRLTF

SEQ ID NO: 640828 - protein, 15 aa, Homo sapiens
  CDR3 for beta chain variable domain of TCR clone 320414 (TRBV20-1, TRBJ1-5)
CSAFKNGQRNQPQHF

SEQ ID NO: 640829 - protein, 13 aa, Homo sapiens
  CDR3 for alpha chain variable domain of TCR clone 320415 (TRAV21, TRAJ27)
CAARPGNAGKSTF

SEQ ID NO: 640830 - protein, 15 aa, Homo sapiens
  CDR3 for beta chain variable domain of TCR clone 320415 (TRBV11-2, TRBJ1-3)
CASSLDGTVGNTIYF

SEQ ID NO: 640831 - protein, 11 aa, Homo sapiens
  CDR3 for alpha chain variable domain of TCR clone 320416 (TRAV26-1, TRAJ37)
CIVRVGRKLIF

SEQ ID NO: 640832 - protein, 13 aa, Homo sapiens
  CDR3 for beta chain variable domain of TCR clone 320416 (TRBV20-1, TRBJ1-1)
CSARGGGDTEAFF

SEQ ID NO: 640833 - protein, 12 aa, Homo sapiens
  CDR3 for alpha chain variable domain of TCR clone 320417 (TRAV2, TRAJ5)
CALDPGRRALTF

SEQ ID NO: 640834 - protein, 15 aa, Homo sapiens
  CDR3 for beta chain variable domain of TCR clone 320417 (TRBV10-3, TRBJ2-1)
CAISDVQGRAYEQFF

SEQ ID NO: 640835 - protein, 13 aa, Homo sapiens
  CDR3 for alpha chain variable domain of TCR clone 320418 (TRAV4, TRAJ42)
CLVGGGSQGNLIF

SEQ ID NO: 640836 - protein, 14 aa, Homo sapiens
  CDR3 for beta chain variable domain of TCR clone 320418 (TRBV5-1, TRBJ1-1)
CASSLVSINTEAFF

SEQ ID NO: 640837 - protein, 17 aa, Homo sapiens
  CDR3 for alpha chain variable domain of TCR clone 320419 (TRAV13-1, TRAJ28)
CAASPPYSGAGSYQLTF

SEQ ID NO: 640838 - protein, 15 aa, Homo sapiens
  CDR3 for beta chain variable domain of TCR clone 320419 (TRBV6-3, TRBJ2-2)
CASSFLATLTGKLFL

SEQ ID NO: 640839 - protein, 16 aa, Homo sapiens
  CDR3 for alpha chain variable domain of TCR clone 320420 (TRAV8-6, TRAJ4)
CAVSPLKHGGYNKLIF

SEQ ID NO: 640840 - protein, 17 aa, Homo sapiens
  CDR3 for beta chain variable domain of TCR clone 320420 (TRBV13, TRBJ2-3)
CASSLPRVAGGRNTQYF

SEQ ID NO: 640841 - protein, 16 aa, Homo sapiens
  CDR3 for alpha chain variable domain of TCR clone 320421 (TRAV12-2, TRAJ6)
CAAPLAGYGGSYIPTF

SEQ ID NO: 640842 - protein, 10 aa, Homo sapiens
  CDR3 for beta chain variable domain of TCR clone 320421 (TRBV28, TRBJ1-2)
CASSSDRAVF

SEQ ID NO: 640843 - protein, 14 aa, Homo sapiens
  CDR3 for alpha chain variable domain of TCR clone 320422 (TRAV35, TRAJ41)
CAGQASVRRNALNF

SEQ ID NO: 640844 - protein, 14 aa, Homo sapiens
  CDR3 for beta chain variable domain of TCR clone 320422 (TRBV20-1, TRBJ1-2)
CSASEQGAVYGDTF

SEQ ID NO: 640845 - protein, 14 aa, Homo sapiens
  CDR3 for alpha chain variable domain of TCR clone 320423 (TRAV1-2, TRAJ16)
CAVNRFSDGQKVLF

SEQ ID NO: 640846 - protein, 15 aa, Homo sapiens
  CDR3 for beta chain variable domain of TCR clone 320423 (TRBV29-1, TRBJ2-7)
CSVEFFDRGSYEQYF

SEQ ID NO: 640847 - protein, 15 aa, Homo sapiens
  CDR3 for alpha chain variable domain of TCR clone 320424 (TRAV8-3, TRAJ45)
CASSYSGGGADGLTF

SEQ ID NO: 640848 - protein, 17 aa, Homo sapiens
  CDR3 for beta chain variable domain of TCR clone 320424 (TRBV7-8, TRBJ1-2)
CASSLRPLQAHLYGYTF

SEQ ID NO: 640849 - protein, 14 aa, Homo sapiens
  CDR3 for alpha chain variable domain of TCR clone 320425 (TRAV12-2, TRAJ40)
CAAKIPSGTYKYIF

SEQ ID NO: 640850 - protein, 12 aa, Homo sapiens
  CDR3 for beta chain variable domain of TCR clone 320425 (TRBV11-2, TRBJ2-2)
CASSLGGGELFF

SEQ ID NO: 640851 - protein, 13 aa, Homo sapiens
  CDR3 for alpha chain variable domain of TCR clone 320426 (TRAV3, TRAJ27)
CAVRPLGAGKSTL

SEQ ID NO: 640852 - protein, 13 aa, Homo sapiens
  CDR3 for beta chain variable domain of TCR clone 320426 (TRBV7-9, TRBJ2-3)
CASSPGSTETQYF

SEQ ID NO: 640853 - protein, 14 aa, Homo sapiens
  CDR3 for alpha chain variable domain of TCR clone 320427 (TRAV13-1, TRAJ35)
CAASKGGFGNVLHC

SEQ ID NO: 640854 - protein, 12 aa, Homo sapiens
  CDR3 for beta chain variable domain of TCR clone 320427 (TRBV12-4, TRBJ2-7)
CASSLGGYEQYF

SEQ ID NO: 640855 - protein, 12 aa, Homo sapiens
  CDR3 for alpha chain variable domain of TCR clone 320428 (TRAV12-3, TRAJ17)
CAMTLTGNKLTF

SEQ ID NO: 640856 - protein, 14 aa, Homo sapiens
  CDR3 for beta chain variable domain of TCR clone 320428 (TRBV7-2, TRBJ2-7)
CASSLDPGGGEQYF

SEQ ID NO: 640857 - protein, 16 aa, Homo sapiens
  CDR3 for alpha chain variable domain of TCR clone 320429 (TRAV8-3, TRAJ10)
CAVGPILTGGGNKLTF

SEQ ID NO: 640858 - protein, 14 aa, Homo sapiens
  CDR3 for beta chain variable domain of TCR clone 320429 (TRBV5-5, TRBJ1-2)
CASSLDPYNYGYTF

SEQ ID NO: 640859 - protein, 15 aa, Homo sapiens
  CDR3 for alpha chain variable domain of TCR clone 320430 (TRAV2, TRAJ39)
CAVEDRRNAGNMPPF

SEQ ID NO: 640860 - protein, 16 aa, Homo sapiens
  CDR3 for beta chain variable domain of TCR clone 320430 (TRBV7-8, TRBJ2-7)
CASSLASGTSVYEQYF

SEQ ID NO: 640861 - protein, 13 aa, Homo sapiens
  CDR3 for alpha chain variable domain of TCR clone 320431 (TRAV13-1, TRAJ11)
CPAVLAGYSTLTF

SEQ ID NO: 640862 - protein, 17 aa, Homo sapiens
  CDR3 for beta chain variable domain of TCR clone 320431 (TRBV25-1, TRBJ2-7)
CASSDARVVFSSYEQYF

SEQ ID NO: 640863 - protein, 14 aa, Homo sapiens
  CDR3 for alpha chain variable domain of TCR clone 320432 (TRAV26-1, TRAJ57)
CIRAGQGGSEKLVF

SEQ ID NO: 640864 - protein, 13 aa, Homo sapiens
  CDR3 for beta chain variable domain of TCR clone 320432 (TRBV19, TRBJ2-7)
CASSLTTTYEQYF

SEQ ID NO: 640865 - protein, 13 aa, Homo sapiens
  CDR3 for alpha chain variable domain of TCR clone 320433 (TRAV8-1, TRAJ32)
CAADGGATNKLIF

SEQ ID NO: 640866 - protein, 15 aa, Homo sapiens
  CDR3 for beta chain variable domain of TCR clone 320433 (TRBV7-9, TRBJ2-7)
CGSSLALAEAYEQYF

SEQ ID NO: 640867 - protein, 15 aa, Homo sapiens
  CDR3 for alpha chain variable domain of TCR clone 320434 (TRAV25, TRAJ10)
CAGPLLTGGGNKLTF

SEQ ID NO: 640868 - protein, 15 aa, Homo sapiens
  CDR3 for beta chain variable domain of TCR clone 320434 (TRBV9, TRBJ1-6)
CASSVAGTGDSPLHF

SEQ ID NO: 640869 - protein, 13 aa, Homo sapiens
  CDR3 for alpha chain variable domain of TCR clone 320435 (TRAV23/DV6, TRAJ58)
CAASEIGGPRLTF

SEQ ID NO: 640870 - protein, 14 aa, Homo sapiens
  CDR3 for beta chain variable domain of TCR clone 320435 (TRBV28, TRBJ2-5)
CASSRLAGGETQYF

SEQ ID NO: 640871 - protein, 12 aa, Homo sapiens
  CDR3 for alpha chain variable domain of TCR clone 320436 (TRAV13-2, TRAJ23)
FAERHRGGKLIF

SEQ ID NO: 640872 - protein, 13 aa, Homo sapiens
  CDR3 for beta chain variable domain of TCR clone 320436 (TRBV7-9, TRBJ1-2)
CASSLKQNYGYTF

SEQ ID NO: 640873 - protein, 14 aa, Homo sapiens
  CDR3 for alpha chain variable domain of TCR clone 320437 (TRAV2, TRAJ9)
CAVEDRSGGFKTIF

SEQ ID NO: 640874 - protein, 14 aa, Homo sapiens
  CDR3 for beta chain variable domain of TCR clone 320437 (TRBV10-3, TRBJ1-2)
CAISAGGRVDGYAF

SEQ ID NO: 640875 - protein, 14 aa, Homo sapiens
  CDR3 for alpha chain variable domain of TCR clone 320438 (TRAV12-1, TRAJ12)
CVVIAMDSSYKLIF

SEQ ID NO: 640876 - protein, 17 aa, Homo sapiens
  CDR3 for beta chain variable domain of TCR clone 320438 (TRBV20-1, TRBJ2-1)
CSASSSGLAGSYNEQFF

SEQ ID NO: 640877 - protein, 15 aa, Homo sapiens
  CDR3 for alpha chain variable domain of TCR clone 320439 (TRAV3, TRAJ20)
CAVRDIKLSDYKPSF

SEQ ID NO: 640878 - protein, 18 aa, Homo sapiens
  CDR3 for beta chain variable domain of TCR clone 320439 (TRBV20-1, TRBJ2-5)
CSQTGDSGRLGGKETQFF

SEQ ID NO: 640879 - protein, 13 aa, Homo sapiens
  CDR3 for alpha chain variable domain of TCR clone 320440 (TRAV13-2, TRAJ53)
CAANMGSNYKLTF

SEQ ID NO: 640880 - protein, 13 aa, Homo sapiens
  CDR3 for beta chain variable domain of TCR clone 320440 (TRBV4-1, TRBJ2-2)
CASSHENTGELFF

SEQ ID NO: 640881 - protein, 16 aa, Homo sapiens
  CDR3 for alpha chain variable domain of TCR clone 320441 (TRAV17, TRAJ35)
CATAEGGIGFGNVLHC

SEQ ID NO: 640882 - protein, 12 aa, Homo sapiens
  CDR3 for beta chain variable domain of TCR clone 320441 (TRBV11-2, TRBJ2-2)
CASSLGGGELFL

SEQ ID NO: 640883 - protein, 10 aa, Homo sapiens
  CDR3 for alpha chain variable domain of TCR clone 320442 (TRAV2, TRAJ34)
CAVVNDKLIF

SEQ ID NO: 640884 - protein, 20 aa, Homo sapiens
  CDR3 for beta chain variable domain of TCR clone 320442 (TRBV19, TRBJ2-1)
CASSISRTVTSTRLNTEQFF

SEQ ID NO: 640885 - protein, 15 aa, Homo sapiens
  CDR3 for alpha chain variable domain of TCR clone 320443 (TRAV12-3, TRAJ6)
CAMSATTGGSYIPTF

SEQ ID NO: 640886 - protein, 14 aa, Homo sapiens
  CDR3 for beta chain variable domain of TCR clone 320443 (TRBV7-8, TRBJ1-2)
CASSPDSLSYGYTF

SEQ ID NO: 640887 - protein, 14 aa, Homo sapiens
  CDR3 for alpha chain variable domain of TCR clone 320444 (TRAV23/DV6, TRAJ22)
CAASVSGSARQLTF

SEQ ID NO: 640888 - protein, 14 aa, Homo sapiens
  CDR3 for beta chain variable domain of TCR clone 320444 (TRBV7-9, TRBJ2-5)
CASSRWAVSETQYF

SEQ ID NO: 640889 - protein, 13 aa, Homo sapiens
  CDR3 for alpha chain variable domain of TCR clone 320445 (TRAV8-6, TRAJ49)
CSVITNTGNQFYF

SEQ ID NO: 640890 - protein, 17 aa, Homo sapiens
  CDR3 for beta chain variable domain of TCR clone 320445 (TRBV11-2, TRBJ2-1)
CASSLYPPGVEYNEQFF

SEQ ID NO: 640891 - protein, 15 aa, Homo sapiens
  CDR3 for alpha chain variable domain of TCR clone 320446 (TRAV1-2, TRAJ8)
TSVVREDTGFQKLVF

SEQ ID NO: 640892 - protein, 13 aa, Homo sapiens
  CDR3 for beta chain variable domain of TCR clone 320446 (TRBV7-3, TRBJ1-1)
CASSQDWGAEAFF

SEQ ID NO: 640893 - protein, 16 aa, Homo sapiens
  CDR3 for alpha chain variable domain of TCR clone 320447 (TRAV4, TRAJ9)
CLVGDPNRPGGFKTIF

SEQ ID NO: 640894 - protein, 15 aa, Homo sapiens
  CDR3 for beta chain variable domain of TCR clone 320447 (TRBV28, TRBJ2-1)
CASSIIAGGRSEQFF

SEQ ID NO: 640895 - protein, 14 aa, Homo sapiens
  CDR3 for alpha chain variable domain of TCR clone 320448 (TRAV12-2, TRAJ17)
CAVLFKAAGNKLTF

SEQ ID NO: 640896 - protein, 14 aa, Homo sapiens
  CDR3 for beta chain variable domain of TCR clone 320448 (TRBV7-3, TRBJ1-1)
CASSLKGGNTEDFF

SEQ ID NO: 640897 - protein, 16 aa, Homo sapiens
  CDR3 for alpha chain variable domain of TCR clone 320449 (TRAV21, TRAJ37)
CAVRTAGSSNTGKLIF

SEQ ID NO: 640898 - protein, 14 aa, Homo sapiens
  CDR3 for beta chain variable domain of TCR clone 320449 (TRBV11-2, TRBJ2-7)
CASSLGAGAYEQYF

SEQ ID NO: 640899 - protein, 14 aa, Homo sapiens
  CDR3 for alpha chain variable domain of TCR clone 320450 (TRAV1-2, TRAJ16)
CAVNRFSDGQKLLF

SEQ ID NO: 640900 - protein, 14 aa, Homo sapiens
  CDR3 for beta chain variable domain of TCR clone 320450 (TRBV7-2, TRBJ1-3)
CASSRLRSGNTIYF

SEQ ID NO: 640901 - protein, 14 aa, Homo sapiens
  CDR3 for alpha chain variable domain of TCR clone 320451 (TRAV24, TRAJ42)
CAQNYGGSQGHLIF

SEQ ID NO: 640902 - protein, 15 aa, Homo sapiens
  CDR3 for beta chain variable domain of TCR clone 320451 (TRBV19, TRBJ1-5)
CASSIPGGAGQPQHF

SEQ ID NO: 640903 - protein, 14 aa, Homo sapiens
  CDR3 for alpha chain variable domain of TCR clone 320452 (TRAV13-1, TRAJ35)
CAASKGGFGNVRHC

SEQ ID NO: 640904 - protein, 15 aa, Homo sapiens
  CDR3 for beta chain variable domain of TCR clone 320452 (TRBV28, TRBJ2-1)
CASSGLAEVDNEQFF

SEQ ID NO: 640905 - protein, 20 aa, Homo sapiens
  CDR3 for alpha chain variable domain of TCR clone 320453 (TRAV21, TRAJ4)
AASQPGDSATLAGGYNKLIF

SEQ ID NO: 640906 - protein, 13 aa, Homo sapiens
  CDR3 for beta chain variable domain of TCR clone 320453 (TRBV9, TRBJ2-3)
CASSVEKGHTQYF

SEQ ID NO: 640907 - protein, 10 aa, Homo sapiens
  CDR3 for alpha chain variable domain of TCR clone 320454 (TRAV12-1, TRAJ37)
CVGWAGKLIF

SEQ ID NO: 640908 - protein, 14 aa, Homo sapiens
  CDR3 for beta chain variable domain of TCR clone 320454 (TRBV7-2, TRBJ2-7)
CASSPKTSFYEQYF

SEQ ID NO: 640909 - protein, 14 aa, Homo sapiens
  CDR3 for alpha chain variable domain of TCR clone 320455 (TRAV3, TRAJ9)
CAVRANTGGFKTIF

SEQ ID NO: 640910 - protein, 16 aa, Homo sapiens
  CDR3 for beta chain variable domain of TCR clone 320455 (TRBV20-1, TRBJ1-4)
CSAPGQGLLTNEKLFF

SEQ ID NO: 640911 - protein, 11 aa, Homo sapiens
  CDR3 for alpha chain variable domain of TCR clone 320456 (TRAV12-1, TRAJ3)
CVVSSASKIIF

SEQ ID NO: 640912 - protein, 16 aa, Homo sapiens
  CDR3 for beta chain variable domain of TCR clone 320456 (TRBV20-1, TRBJ2-5)
SAVLGGLAGGGETQYF

SEQ ID NO: 640913 - protein, 14 aa, Homo sapiens
  CDR3 for alpha chain variable domain of TCR clone 320457 (TRAV23/DV6, TRAJ24)
CAASLSDSWGKLQF

SEQ ID NO: 640914 - protein, 17 aa, Homo sapiens
  CDR3 for beta chain variable domain of TCR clone 320457 (TRBV11-2, TRBJ2-1)
CASSLYPSGVEYNEQFF

SEQ ID NO: 640915 - protein, 14 aa, Homo sapiens
  CDR3 for alpha chain variable domain of TCR clone 320458 (TRAV1-2, TRAJ8)
CAVREDTGFQKLVF

SEQ ID NO: 640916 - protein, 17 aa, Homo sapiens
  CDR3 for beta chain variable domain of TCR clone 320458 (TRBV20-1, TRBJ2-2)
CSAIGSGQGGLTGELFF

SEQ ID NO: 640917 - protein, 12 aa, Homo sapiens
  CDR3 for alpha chain variable domain of TCR clone 320459 (TRAV12-3, TRAJ17)
CAMTLTGNKLTS

SEQ ID NO: 640918 - protein, 15 aa, Homo sapiens
  CDR3 for beta chain variable domain of TCR clone 320459 (TRBV20-1, TRBJ2-7)
CSARDLVSGMDEQYF

SEQ ID NO: 640919 - protein, 20 aa, Homo sapiens
  CDR3 for alpha chain variable domain of TCR clone 320460 (TRAV8-3, TRAJ44)
LGTSVLWVRLYTGTANKLTF

SEQ ID NO: 640920 - protein, 13 aa, Homo sapiens
  CDR3 for beta chain variable domain of TCR clone 320460 (TRBV3-1, TRBJ2-7)
CASSLRDGYEQYF

SEQ ID NO: 640921 - protein, 12 aa, Homo sapiens
  CDR3 for alpha chain variable domain of TCR clone 320461 (TRAV12-1, TRAJ31)
CVVSLWRARLMF

SEQ ID NO: 640922 - protein, 15 aa, Homo sapiens
  CDR3 for beta chain variable domain of TCR clone 320461 (TRBV3-1, TRBJ1-2)
CASSHTGQGGYGYTF

SEQ ID NO: 640923 - protein, 14 aa, Homo sapiens
  CDR3 for alpha chain variable domain of TCR clone 320462 (TRAV12-2, TRAJ5)
CAVNRSTGRRALTF

SEQ ID NO: 640924 - protein, 14 aa, Homo sapiens
  CDR3 for beta chain variable domain of TCR clone 320462 (TRBV28, TRBJ2-1)
CASSLNGRNNEQFF

SEQ ID NO: 640925 - protein, 12 aa, Homo sapiens
  CDR3 for alpha chain variable domain of TCR clone 320463 (TRAV29/DV5, TRAJ34)
CAARHDTDKLIF

SEQ ID NO: 640926 - protein, 12 aa, Homo sapiens
  CDR3 for beta chain variable domain of TCR clone 320463 (TRBV7-6, TRBJ2-3)
CASSTGTDTQYF

SEQ ID NO: 640927 - protein, 14 aa, Homo sapiens
  CDR3 for alpha chain variable domain of TCR clone 320464 (TRAV8-3, TRAJ34)
CAVGPPHNTDKLIF

SEQ ID NO: 640928 - protein, 12 aa, Homo sapiens
  CDR3 for beta chain variable domain of TCR clone 320464 (TRBV5-1, TRBJ1-2)
CASSQDTYGYTF

SEQ ID NO: 640929 - protein, 14 aa, Homo sapiens
  CDR3 for alpha chain variable domain of TCR clone 320465 (TRAV1-2, TRAJ8)
CAVREDTGFQQLVF

SEQ ID NO: 640930 - protein, 16 aa, Homo sapiens
  CDR3 for beta chain variable domain of TCR clone 320465 (TRBV7-9, TRBJ2-1)
CASSDVAGGSYNEQFF

SEQ ID NO: 640931 - protein, 14 aa, Homo sapiens
  CDR3 for alpha chain variable domain of TCR clone 320466 (TRAV12-3, TRAJ10)
SHLPLTGGGNTLTF

SEQ ID NO: 640932 - protein, 13 aa, Homo sapiens
  CDR3 for beta chain variable domain of TCR clone 320466 (TRBV4-2, TRBJ1-1)
CASSQAGNTEAFF

SEQ ID NO: 640933 - protein, 14 aa, Homo sapiens
  CDR3 for alpha chain variable domain of TCR clone 320467 (TRAV26-1, TRAJ38)
CIADNAGNNRKLIW

SEQ ID NO: 640934 - protein, 15 aa, Homo sapiens
  CDR3 for beta chain variable domain of TCR clone 320467 (TRBV20-1, TRBJ2-7)
CSASDRVSGMDEQYF

SEQ ID NO: 640935 - protein, 15 aa, Homo sapiens
  CDR3 for alpha chain variable domain of TCR clone 320468 (TRAV8-2, TRAJ15)
CVVTMGNQAGTALIF

SEQ ID NO: 640936 - protein, 12 aa, Homo sapiens
  CDR3 for beta chain variable domain of TCR clone 320468 (TRBV29-1, TRBJ2-3)
CNVTGGADTQYF

SEQ ID NO: 640937 - protein, 14 aa, Homo sapiens
  CDR3 for alpha chain variable domain of TCR clone 320469 (TRAV12-2, TRAJ13)
CAVKKTGGYQKVTF

SEQ ID NO: 640938 - protein, 15 aa, Homo sapiens
  CDR3 for beta chain variable domain of TCR clone 320469 (TRBV6-3, TRBJ2-7)
YASSSPGTVFYEQYF

SEQ ID NO: 640939 - protein, 13 aa, Homo sapiens
  CDR3 for alpha chain variable domain of TCR clone 320470 (TRAV2, TRAJ20)
CAVEDPSEYKLSF

SEQ ID NO: 640940 - protein, 16 aa, Homo sapiens
  CDR3 for beta chain variable domain of TCR clone 320470 (TRBV25-1, TRBJ2-7)
CASSELTGGGIYEQYL

SEQ ID NO: 640941 - protein, 12 aa, Homo sapiens
  CDR3 for alpha chain variable domain of TCR clone 320471 (TRAV1-2, TRAJ33)
CAALDSNYQLIW

SEQ ID NO: 640942 - protein, 15 aa, Homo sapiens
  CDR3 for beta chain variable domain of TCR clone 320471 (TRBV19, TRBJ2-1)
CASSHRDRGPNEQFF

SEQ ID NO: 640943 - protein, 17 aa, Homo sapiens
  CDR3 for alpha chain variable domain of TCR clone 320472 (TRAV4, )
CLVDIQNPDPAVYQLRN

SEQ ID NO: 640944 - protein, 16 aa, Homo sapiens
  CDR3 for beta chain variable domain of TCR clone 320472 (TRBV28, TRBJ1-1)
CASSLSGTGWNTEAFF

SEQ ID NO: 640945 - protein, 14 aa, Homo sapiens
  CDR3 for alpha chain variable domain of TCR clone 320473 (TRAV13-1, TRAJ35)
CAASKGGFGNVLHC

SEQ ID NO: 640946 - protein, 17 aa, Homo sapiens
  CDR3 for beta chain variable domain of TCR clone 320473 (TRBV7-3, TRBJ2-1)
CASSLVASYPSYNEQFF

SEQ ID NO: 640947 - protein, 14 aa, Homo sapiens
  CDR3 for alpha chain variable domain of TCR clone 320474 (TRAV1-2, TRAJ16)
CAVNRFSDGPKLLF

SEQ ID NO: 640948 - protein, 13 aa, Homo sapiens
  CDR3 for beta chain variable domain of TCR clone 320474 (TRBV20-1, TRBJ1-1)
CSARVSGNTEAFF

SEQ ID NO: 640949 - protein, 12 aa, Homo sapiens
  CDR3 for alpha chain variable domain of TCR clone 320475 (TRAV1-1, TRAJ40)
CAVRGRDDKIIF

SEQ ID NO: 640950 - protein, 14 aa, Homo sapiens
  CDR3 for beta chain variable domain of TCR clone 320475 (TRBV19, TRBJ2-1)
CASKDPGLANEQFF

SEQ ID NO: 640951 - protein, 14 aa, Homo sapiens
  CDR3 for alpha chain variable domain of TCR clone 320476 (TRAV1-2, TRAJ16)
CAVNRFSDGQKLLF

SEQ ID NO: 640952 - protein, 15 aa, Homo sapiens
  CDR3 for beta chain variable domain of TCR clone 320476 (TRBV20-1, TRBJ2-5)
CSAEGRGGLQETQYF

SEQ ID NO: 640953 - protein, 13 aa, Homo sapiens
  CDR3 for alpha chain variable domain of TCR clone 320477 (TRAV2, TRAJ10)
CAVESGGGNKLTF

SEQ ID NO: 640954 - protein, 14 aa, Homo sapiens
  CDR3 for beta chain variable domain of TCR clone 320477 (TRBV20-1, TRBJ2-3)
CSAGGRRGTDTQYF

SEQ ID NO: 640955 - protein, 12 aa, Homo sapiens
  CDR3 for alpha chain variable domain of TCR clone 320478 (TRAV12-2, TRAJ44)
CADTSTASKLTF

SEQ ID NO: 640956 - protein, 17 aa, Homo sapiens
  CDR3 for beta chain variable domain of TCR clone 320478 (TRBV20-1, TRBJ1-1)
CSARGTGGSYGNTGAFF

SEQ ID NO: 640957 - protein, 14 aa, Homo sapiens
  CDR3 for alpha chain variable domain of TCR clone 320479 (TRAV20, TRAJ56)
CAVLFGGANSKLPF

SEQ ID NO: 640958 - protein, 14 aa, Homo sapiens
  CDR3 for beta chain variable domain of TCR clone 320479 (TRBV20-1, TRBJ2-7)
CSAKRGRSSYEQYF

SEQ ID NO: 640959 - protein, 14 aa, Homo sapiens
  CDR3 for alpha chain variable domain of TCR clone 320480 (TRAV16, TRAJ29)
CALTRNSGNTPLVF

SEQ ID NO: 640960 - protein, 11 aa, Homo sapiens
  CDR3 for beta chain variable domain of TCR clone 320480 (TRBV2, TRBJ2-1)
CQAGGYNEQFF

SEQ ID NO: 640961 - protein, 14 aa, Homo sapiens
  CDR3 for alpha chain variable domain of TCR clone 320481 (TRAV26-1, TRAJ44)
CIVSNTGTASTLTF

SEQ ID NO: 640962 - protein, 11 aa, Homo sapiens
  CDR3 for beta chain variable domain of TCR clone 320481 (TRBV19, TRBJ2-7)
CASSILGEQYF

SEQ ID NO: 640963 - protein, 16 aa, Homo sapiens
  CDR3 for alpha chain variable domain of TCR clone 320482 (TRAV26-1, TRAJ47)
CIVRVVLSQYGNKLVF

SEQ ID NO: 640964 - protein, 16 aa, Homo sapiens
  CDR3 for beta chain variable domain of TCR clone 320482 (TRBV5-1, TRBJ2-1)
CASSFGVSASYNEQFF

SEQ ID NO: 640965 - protein, 18 aa, Homo sapiens
  CDR3 for alpha chain variable domain of TCR clone 320483 (TRAV26-2, TRAJ54)
CILRDVEVGLQGAQKLVF

SEQ ID NO: 640966 - protein, 13 aa, Homo sapiens
  CDR3 for beta chain variable domain of TCR clone 320483 (TRBV20-1, TRBJ2-7)
CSAQDRDSYEQYF

SEQ ID NO: 640967 - protein, 23 aa, Homo sapiens
  CDR3 for alpha chain variable domain of TCR clone 320484 (TRAV8-6, TRAJ38)
CAVRNAGNNHIQNPDPAEYQLRD

SEQ ID NO: 640968 - protein, 15 aa, Homo sapiens
  CDR3 for beta chain variable domain of TCR clone 320484 (TRBV4-1, TRBJ2-2)
CASSEGQGITGELFF

SEQ ID NO: 640969 - protein, 15 aa, Homo sapiens
  CDR3 for alpha chain variable domain of TCR clone 320485 (TRAV17, TRAJ28)
CATVDSGAGSYQLPL

SEQ ID NO: 640970 - protein, 13 aa, Homo sapiens
  CDR3 for beta chain variable domain of TCR clone 320485 (TRBV5-4, TRBJ2-5)
CASSRQEGETQYF

SEQ ID NO: 640971 - protein, 18 aa, Homo sapiens
  CDR3 for alpha chain variable domain of TCR clone 320486 (TRAV23/DV6, TRAJ21)
CAASSGGGTTATNLTLDL

SEQ ID NO: 640972 - protein, 11 aa, Homo sapiens
  CDR3 for beta chain variable domain of TCR clone 320486 (TRBV7-8, TRBJ2-7)
CASSLSLEQYF

SEQ ID NO: 640973 - protein, 13 aa, Homo sapiens
  CDR3 for alpha chain variable domain of TCR clone 320487 (TRAV12-1, TRAJ11)
CVVTRGGYSTPTF

SEQ ID NO: 640974 - protein, 13 aa, Homo sapiens
  CDR3 for beta chain variable domain of TCR clone 320487 (TRBV20-1, TRBJ1-2)
CSARDQGAYGYTF

SEQ ID NO: 640975 - protein, 11 aa, Homo sapiens
  CDR3 for alpha chain variable domain of TCR clone 320488 (TRAV12-3, TRAJ43)
CAMSVSNDMRF

SEQ ID NO: 640976 - protein, 16 aa, Homo sapiens
  CDR3 for beta chain variable domain of TCR clone 320488 (TRBV5-4, TRBJ2-3)
CASSWGTSGGTDTQYF

SEQ ID NO: 640977 - protein, 14 aa, Homo sapiens
  CDR3 for alpha chain variable domain of TCR clone 320489 (TRAV12-1, TRAJ30)
CVTTGTNRDDKIIF

SEQ ID NO: 640978 - protein, 11 aa, Homo sapiens
  CDR3 for beta chain variable domain of TCR clone 320489 (TRBV4-1, TRBJ2-2)
CASEHTGELFF

SEQ ID NO: 640979 - protein, 18 aa, Homo sapiens
  CDR3 for alpha chain variable domain of TCR clone 320490 (TRAV20, TRAJ4)
CAVQPYYMFSGGYHKLIF

SEQ ID NO: 640980 - protein, 13 aa, Homo sapiens
  CDR3 for beta chain variable domain of TCR clone 320490 (TRBV19, TRBJ2-3)
CATWDKITDTQYF

SEQ ID NO: 640981 - protein, 13 aa, Homo sapiens
  CDR3 for alpha chain variable domain of TCR clone 320491 (TRAV8-3, TRAJ44)
CAAVPGTASKLTF

SEQ ID NO: 640982 - protein, 12 aa, Homo sapiens
  CDR3 for beta chain variable domain of TCR clone 320491 (TRBV7-8, TRBJ2-7)
CASSLGDREQYF

SEQ ID NO: 640983 - protein, 17 aa, Homo sapiens
  CDR3 for alpha chain variable domain of TCR clone 320492 (TRAV3, TRAJ6)
CAVRDGPRAGGSYIPTF

SEQ ID NO: 640984 - protein, 12 aa, Homo sapiens
  CDR3 for beta chain variable domain of TCR clone 320492 (TRBV19, TRBJ2-5)
CATSRGGETQYF

SEQ ID NO: 640985 - protein, 12 aa, Homo sapiens
  CDR3 for alpha chain variable domain of TCR clone 320493 (TRAV12-3, TRAJ17)
CAMTLTGNKLTF

SEQ ID NO: 640986 - protein, 16 aa, Homo sapiens
  CDR3 for beta chain variable domain of TCR clone 320493 (TRBV12-4, TRBJ2-5)
CASSFFVRGRQKTQYF

SEQ ID NO: 640987 - protein, 16 aa, Homo sapiens
  CDR3 for alpha chain variable domain of TCR clone 320494 (TRAV21, TRAJ33)
CAVSPASMASNYQLIW

SEQ ID NO: 640988 - protein, 17 aa, Homo sapiens
  CDR3 for beta chain variable domain of TCR clone 320494 (TRBV2, TRBJ1-4)
CASSKRELTQGEEKLFF

SEQ ID NO: 640989 - protein, 13 aa, Homo sapiens
  CDR3 for alpha chain variable domain of TCR clone 320495 (TRAV13-1, TRAJ21)
CAASIYNFNKFYF

SEQ ID NO: 640990 - protein, 17 aa, Homo sapiens
  CDR3 for beta chain variable domain of TCR clone 320495 (TRBV3-1, TRBJ2-2)
CASSQDSQGPNTGELFF

SEQ ID NO: 640991 - protein, 13 aa, Homo sapiens
  CDR3 for alpha chain variable domain of TCR clone 320496 (TRAV13-1, TRAJ5)
CAASDTGRRALTF

SEQ ID NO: 640992 - protein, 12 aa, Homo sapiens
  CDR3 for beta chain variable domain of TCR clone 320496 (TRBV28, TRBJ2-3)
WASSLYRDTQYF

SEQ ID NO: 640993 - protein, 14 aa, Homo sapiens
  CDR3 for alpha chain variable domain of TCR clone 320497 (TRAV12-2, TRAJ40)
CAVKIPSGTYKYIF

SEQ ID NO: 640994 - protein, 14 aa, Homo sapiens
  CDR3 for beta chain variable domain of TCR clone 320497 (TRBV20-1, TRBJ1-1)
CSAQGRIGGTEAFF

SEQ ID NO: 640995 - protein, 12 aa, Homo sapiens
  CDR3 for alpha chain variable domain of TCR clone 320498 (TRAV13-2, TRAJ8)
CVPWLGFQKLVF

SEQ ID NO: 640996 - protein, 13 aa, Homo sapiens
  CDR3 for beta chain variable domain of TCR clone 320498 (TRBV12-4, TRBJ1-5)
CASSPDRAQPQHF

SEQ ID NO: 640997 - protein, 14 aa, Homo sapiens
  CDR3 for alpha chain variable domain of TCR clone 320499 (TRAV1-2, TRAJ6)
CAVRSSGGSYIPTF

SEQ ID NO: 640998 - protein, 15 aa, Homo sapiens
  CDR3 for beta chain variable domain of TCR clone 320499 (TRBV2, TRBJ2-7)
CASSEGLARSYEQYF

SEQ ID NO: 640999 - protein, 11 aa, Homo sapiens
  CDR3 for alpha chain variable domain of TCR clone 320500 (TRAV2, TRAJ13)
CASGGYQKVTF

SEQ ID NO: 641000 - protein, 13 aa, Homo sapiens
  CDR3 for beta chain variable domain of TCR clone 320500 (TRBV7-3, TRBJ1-2)
CASSLKRGYGYTF

SEQ ID NO: 641001 - protein, 11 aa, Homo sapiens
  CDR3 for alpha chain variable domain of TCR clone 320501 (TRAV26-1, TRAJ27)
CIDPNAGKSTF

SEQ ID NO: 641002 - protein, 18 aa, Homo sapiens
  CDR3 for beta chain variable domain of TCR clone 320501 (TRBV7-9, TRBJ2-6)
CASSFPGAGISGANDLSF

SEQ ID NO: 641003 - protein, 14 aa, Homo sapiens
  CDR3 for alpha chain variable domain of TCR clone 320502 (TRAV13-2, TRAJ52)
CAETGGTSYGKLTF

SEQ ID NO: 641004 - protein, 16 aa, Homo sapiens
  CDR3 for beta chain variable domain of TCR clone 320502 (TRBV7-2, TRBJ1-4)
CASSLAPGRRDEKLFF

SEQ ID NO: 641005 - protein, 11 aa, Homo sapiens
  CDR3 for alpha chain variable domain of TCR clone 320503 (TRAV2, TRAJ13)
CASGGYQKVTF

SEQ ID NO: 641006 - protein, 15 aa, Homo sapiens
  CDR3 for beta chain variable domain of TCR clone 320503 (TRBV29-1, TRBJ2-1)
CSVPTGLALYNEEFF

SEQ ID NO: 641007 - protein, 12 aa, Homo sapiens
  CDR3 for alpha chain variable domain of TCR clone 320504 (TRAV25, TRAJ11)
CAGASGYSTLTF

SEQ ID NO: 641008 - protein, 14 aa, Homo sapiens
  CDR3 for beta chain variable domain of TCR clone 320504 (TRBV7-2, TRBJ1-5)
CASSTQGAGQPQHF

SEQ ID NO: 641009 - protein, 23 aa, Homo sapiens
  CDR3 for alpha chain variable domain of TCR clone 320505 (TRAV30, TRAJ43)
CTLRPPSSVTQEPTSAALSDMRF

SEQ ID NO: 641010 - protein, 13 aa, Homo sapiens
  CDR3 for beta chain variable domain of TCR clone 320505 (TRBV19, TRBJ1-2)
CASSQGQVYGDTF

SEQ ID NO: 641011 - protein, 16 aa, Homo sapiens
  CDR3 for alpha chain variable domain of TCR clone 320506 (TRAV3, TRAJ21)
CAVRDIERGNFNKFYF

SEQ ID NO: 641012 - protein, 13 aa, Homo sapiens
  CDR3 for beta chain variable domain of TCR clone 320506 (TRBV27, TRBJ2-7)
CASSSTTGYEQYF

SEQ ID NO: 641013 - protein, 12 aa, Homo sapiens
  CDR3 for alpha chain variable domain of TCR clone 320507 (TRAV3, TRAJ27)
CAVRDSAGKSTF

SEQ ID NO: 641014 - protein, 13 aa, Homo sapiens
  CDR3 for beta chain variable domain of TCR clone 320507 (TRBV10-3, TRBJ1-2)
CAINADLNYGYTF

SEQ ID NO: 641015 - protein, 16 aa, Homo sapiens
  CDR3 for alpha chain variable domain of TCR clone 320508 (TRAV30, TRAJ24)
CGTEIVDADSWGKFQF

SEQ ID NO: 641016 - protein, 16 aa, Homo sapiens
  CDR3 for beta chain variable domain of TCR clone 320508 (TRBV7-3, TRBJ2-2)
CASSLKRGTLSGVLFF

SEQ ID NO: 641017 - protein, 13 aa, Homo sapiens
  CDR3 for alpha chain variable domain of TCR clone 320509 (TRAV1-2, TRAJ12)
CAVSMDSSYKLIF

SEQ ID NO: 641018 - protein, 17 aa, Homo sapiens
  CDR3 for beta chain variable domain of TCR clone 320509 (TRBV11-3, TRBJ2-1)
CASSLYPPGVEYNAQFF

SEQ ID NO: 641019 - protein, 13 aa, Homo sapiens
  CDR3 for alpha chain variable domain of TCR clone 320510 (TRAV17, TRAJ39)
CATDYGAGNMLTF

SEQ ID NO: 641020 - protein, 15 aa, Homo sapiens
  CDR3 for beta chain variable domain of TCR clone 320510 (TRBV10-1, TRBJ1-1)
CASSGSQGGNTEAFF

SEQ ID NO: 641021 - protein, 16 aa, Homo sapiens
  CDR3 for alpha chain variable domain of TCR clone 320511 (TRAV20, TRAJ10)
CAVLRGLTGGGNKLTF

SEQ ID NO: 641022 - protein, 18 aa, Homo sapiens
  CDR3 for beta chain variable domain of TCR clone 320511 (TRBV13, TRBJ2-4)
CAIIDQKHAVLRRRDPAL

SEQ ID NO: 641023 - protein, 14 aa, Homo sapiens
  CDR3 for alpha chain variable domain of TCR clone 320512 (TRAV12-2, TRAJ17)
CAVNIKAAGKKLTF

SEQ ID NO: 641024 - protein, 16 aa, Homo sapiens
  CDR3 for beta chain variable domain of TCR clone 320512 (TRBV5-1, TRBJ2-2)
CASSSRTGGRTGELFL

SEQ ID NO: 641025 - protein, 13 aa, Homo sapiens
  CDR3 for alpha chain variable domain of TCR clone 320513 (TRAV36/DV7, TRAJ7)
CAVERYGNNRLAF

SEQ ID NO: 641026 - protein, 16 aa, Homo sapiens
  CDR3 for beta chain variable domain of TCR clone 320513 (TRBV7-2, TRBJ2-3)
CASSLAGAGSGDTQYF

SEQ ID NO: 641027 - protein, 18 aa, Homo sapiens
  CDR3 for alpha chain variable domain of TCR clone 320514 (TRAV13-1, TRAJ52)
CAASKRSAGGTSNGKLTF

SEQ ID NO: 641028 - protein, 13 aa, Homo sapiens
  CDR3 for beta chain variable domain of TCR clone 320514 (TRBV7-2, TRBJ2-7)
CASSSPSGSEQYF

SEQ ID NO: 641029 - protein, 14 aa, Homo sapiens
  CDR3 for alpha chain variable domain of TCR clone 320515 (TRAV23/DV6, TRAJ57)
CAAALKGGSEKLVF

SEQ ID NO: 641030 - protein, 14 aa, Homo sapiens
  CDR3 for beta chain variable domain of TCR clone 320515 (TRBV5-1, TRBJ2-7)
CASSRGESLYEQYF

SEQ ID NO: 641031 - protein, 11 aa, Homo sapiens
  CDR3 for alpha chain variable domain of TCR clone 320516 (TRAV13-1, TRAJ49)
CACVGGNQFYY

SEQ ID NO: 641032 - protein, 16 aa, Homo sapiens
  CDR3 for beta chain variable domain of TCR clone 320516 (TRBV11-2, TRBJ2-2)
CASSLRTGNLIGELFF

SEQ ID NO: 641033 - protein, 15 aa, Homo sapiens
  CDR3 for alpha chain variable domain of TCR clone 320517 (TRAV12-1, TRAJ40)
CVVNMHFPGTYKYIF

SEQ ID NO: 641034 - protein, 16 aa, Homo sapiens
  CDR3 for beta chain variable domain of TCR clone 320517 (TRBV20-1, TRBJ2-3)
CSAVRDRGPIADTQYF

SEQ ID NO: 641035 - protein, 12 aa, Homo sapiens
  CDR3 for alpha chain variable domain of TCR clone 320518 (TRAV29/DV5, TRAJ15)
CASNQAGTALIF

SEQ ID NO: 641036 - protein, 20 aa, Homo sapiens
  CDR3 for beta chain variable domain of TCR clone 320518 (TRBV28, TRBJ2-1)
CASTPIGRSPGLAGGNEQFF

SEQ ID NO: 641037 - protein, 16 aa, Homo sapiens
  CDR3 for alpha chain variable domain of TCR clone 320519 (TRAV1-2, TRAJ6)
CAVRDQETGGSYIPTF

SEQ ID NO: 641038 - protein, 13 aa, Homo sapiens
  CDR3 for beta chain variable domain of TCR clone 320519 (TRBV28, TRBJ2-7)
CASTPGLAGEQYF

SEQ ID NO: 641039 - protein, 11 aa, Homo sapiens
  CDR3 for alpha chain variable domain of TCR clone 320520 (TRAV13-2, TRAJ47)
CAEIRGNKLVF

SEQ ID NO: 641040 - protein, 15 aa, Homo sapiens
  CDR3 for beta chain variable domain of TCR clone 320520 (TRBV10-3, TRBJ2-2)
CAISVATSNTGELFF

SEQ ID NO: 641041 - protein, 12 aa, Homo sapiens
  CDR3 for alpha chain variable domain of TCR clone 320521 (TRAV8-3, TRAJ26)
CAGDNYGQNFVS

SEQ ID NO: 641042 - protein, 13 aa, Homo sapiens
  CDR3 for beta chain variable domain of TCR clone 320521 (TRBV10-3, TRBJ2-7)
CASKLAVNYEQYF

SEQ ID NO: 641043 - protein, 15 aa, Homo sapiens
  CDR3 for alpha chain variable domain of TCR clone 320522 (TRAV2, TRAJ37)
TTVLDFTSNTGKLIF

SEQ ID NO: 641044 - protein, 20 aa, Homo sapiens
  CDR3 for beta chain variable domain of TCR clone 320522 (TRBV7-8, TRBJ2-2)
CASSHLFPGPTIHITGELFF

SEQ ID NO: 641045 - protein, 20 aa, Homo sapiens
  CDR3 for alpha chain variable domain of TCR clone 320523 (TRAV27, TRAJ30)
CAGEGEMTRSSLEKGHDFIF

SEQ ID NO: 641046 - protein, 16 aa, Homo sapiens
  CDR3 for beta chain variable domain of TCR clone 320523 (TRBV7-7, TRBJ2-1)
CASSLASGTSYNEQFF

SEQ ID NO: 641047 - protein, 10 aa, Homo sapiens
  CDR3 for alpha chain variable domain of TCR clone 320524 (TRAV12-1, TRAJ20)
CVVNPRKLSF

SEQ ID NO: 641048 - protein, 15 aa, Homo sapiens
  CDR3 for beta chain variable domain of TCR clone 320524 (TRBV28, TRBJ2-5)
CASSPGQGSIETQYF

SEQ ID NO: 641049 - protein, 14 aa, Homo sapiens
  CDR3 for alpha chain variable domain of TCR clone 320525 (TRAV1-2, TRAJ16)
CAVNRFSDGQKLLF

SEQ ID NO: 641050 - protein, 12 aa, Homo sapiens
  CDR3 for beta chain variable domain of TCR clone 320525 (TRBV19, TRBJ2-7)
CASTSGTYEQYF

SEQ ID NO: 641051 - protein, 13 aa, Homo sapiens
  CDR3 for alpha chain variable domain of TCR clone 320526 (TRAV13-1, TRAJ13)
CAASKGGYQRVTF

SEQ ID NO: 641052 - protein, 16 aa, Homo sapiens
  CDR3 for beta chain variable domain of TCR clone 320526 (TRBV18, TRBJ1-2)
CASSPPERVTIYGYTF

SEQ ID NO: 641053 - protein, 16 aa, Homo sapiens
  CDR3 for alpha chain variable domain of TCR clone 320527 (TRAV17, TRAJ28)
CASYAYSGAGSYQLTF

SEQ ID NO: 641054 - protein, 15 aa, Homo sapiens
  CDR3 for beta chain variable domain of TCR clone 320527 (TRBV4-2, TRBJ2-1)
CASSSSGGLYNEQFF

SEQ ID NO: 641055 - protein, 14 aa, Homo sapiens
  CDR3 for alpha chain variable domain of TCR clone 320528 (TRAV10, TRAJ48)
CVGVFHFGNEKLTF

SEQ ID NO: 641056 - protein, 13 aa, Homo sapiens
  CDR3 for beta chain variable domain of TCR clone 320528 (TRBV4-1, TRBJ2-7)
CASSQGQAYEQYF

SEQ ID NO: 641057 - protein, 14 aa, Homo sapiens
  CDR3 for alpha chain variable domain of TCR clone 320529 (TRAV4, TRAJ43)
CLVGPMYNNNDMRF

SEQ ID NO: 641058 - protein, 17 aa, Homo sapiens
  CDR3 for beta chain variable domain of TCR clone 320529 (TRBV11-2, TRBJ2-1)
CASSLYPPGVEYNEQFF

SEQ ID NO: 641059 - protein, 14 aa, Homo sapiens
  CDR3 for alpha chain variable domain of TCR clone 320530 (TRAV1-2, TRAJ16)
CAVNRFSDGQKLLF

SEQ ID NO: 641060 - protein, 13 aa, Homo sapiens
  CDR3 for beta chain variable domain of TCR clone 320530 (TRBV27, TRBJ1-1)
CAGSLSIGAEAFF

SEQ ID NO: 641061 - protein, 16 aa, Homo sapiens
  CDR3 for alpha chain variable domain of TCR clone 320531 (TRAV3, TRAJ18)
CAVRDGRGTALGRLYS

SEQ ID NO: 641062 - protein, 15 aa, Homo sapiens
  CDR3 for beta chain variable domain of TCR clone 320531 (TRBV7-9, TRBJ1-6)
CASSSPGRGNSPLHF

SEQ ID NO: 641063 - protein, 16 aa, Homo sapiens
  CDR3 for alpha chain variable domain of TCR clone 320532 (TRAV17, TRAJ28)
CASYAYSGTGSYQLTF

SEQ ID NO: 641064 - protein, 15 aa, Homo sapiens
  CDR3 for beta chain variable domain of TCR clone 320532 (TRBV4-2, TRBJ2-1)
CASSPSGGLYNEQFF

SEQ ID NO: 641065 - protein, 11 aa, Homo sapiens
  CDR3 for alpha chain variable domain of TCR clone 320533 (TRAV2, TRAJ13)
CASGGYQKVIF

SEQ ID NO: 641066 - protein, 15 aa, Homo sapiens
  CDR3 for beta chain variable domain of TCR clone 320533 (TRBV20-1, TRBJ2-7)
CSARDRVSGMDYQYF

SEQ ID NO: 641067 - protein, 15 aa, Homo sapiens
  CDR3 for alpha chain variable domain of TCR clone 320534 (TRAV25, TRAJ23)
CALAPNYNQGGKLIF

SEQ ID NO: 641068 - protein, 16 aa, Homo sapiens
  CDR3 for beta chain variable domain of TCR clone 320534 (TRBV19, TRBJ2-1)
CASSKAGPSSYNEQFF

SEQ ID NO: 641069 - protein, 14 aa, Homo sapiens
  CDR3 for alpha chain variable domain of TCR clone 320535 (TRAV2, TRAJ9)
CAVGDRSGGFKTIF

SEQ ID NO: 641070 - protein, 17 aa, Homo sapiens
  CDR3 for beta chain variable domain of TCR clone 320535 (TRBV20-1, TRBJ2-7)
CSATRAGGVAGVEEQYF

SEQ ID NO: 641071 - protein, 12 aa, Homo sapiens
  CDR3 for alpha chain variable domain of TCR clone 320536 (TRAV12-3, TRAJ17)
CAMTLTGNKLTF

SEQ ID NO: 641072 - protein, 16 aa, Homo sapiens
  CDR3 for beta chain variable domain of TCR clone 320536 (TRBV19, TRBJ1-5)
CASSTRRGGGNQPQHF

SEQ ID NO: 641073 - protein, 14 aa, Homo sapiens
  CDR3 for alpha chain variable domain of TCR clone 320537 (TRAV21, TRAJ35)
CAVMPIGFGNVLHC

SEQ ID NO: 641074 - protein, 12 aa, Homo sapiens
  CDR3 for beta chain variable domain of TCR clone 320537 (TRBV7-9, TRBJ2-7)
CASSIKREAQYF

SEQ ID NO: 641075 - protein, 12 aa, Homo sapiens
  CDR3 for alpha chain variable domain of TCR clone 320538 (TRAV12-1, TRAJ9)
CGVKYWGFKTIF

SEQ ID NO: 641076 - protein, 13 aa, Homo sapiens
  CDR3 for beta chain variable domain of TCR clone 320538 (TRBV20-1, TRBJ1-1)
CSARGGGNTEAFF

SEQ ID NO: 641077 - protein, 14 aa, Homo sapiens
  CDR3 for alpha chain variable domain of TCR clone 320539 (TRAV20, TRAJ42)
CAVQAGGSQGNLIF

SEQ ID NO: 641078 - protein, 16 aa, Homo sapiens
  CDR3 for beta chain variable domain of TCR clone 320539 (TRBV2, TRBJ2-3)
CASSTSVEGVTDTQYF

SEQ ID NO: 641079 - protein, 17 aa, Homo sapiens
  CDR3 for alpha chain variable domain of TCR clone 320540 (TRAV3, TRAJ6)
CAVRDGPRAGGSYIPTF

SEQ ID NO: 641080 - protein, 15 aa, Homo sapiens
  CDR3 for beta chain variable domain of TCR clone 320540 (TRBV7-6, TRBJ2-3)
CASSPIICSTDTQYF

SEQ ID NO: 641081 - protein, 14 aa, Homo sapiens
  CDR3 for alpha chain variable domain of TCR clone 320541 (TRAV17, TRAJ16)
CATADFSDGQKLLF

SEQ ID NO: 641082 - protein, 15 aa, Homo sapiens
  CDR3 for beta chain variable domain of TCR clone 320541 (TRBV7-9, TRBJ1-4)
CASSATGGNNEKLFF

SEQ ID NO: 641083 - protein, 14 aa, Homo sapiens
  CDR3 for alpha chain variable domain of TCR clone 320542 (TRAV20, TRAJ4)
CAVRLGGGYNKLLF

SEQ ID NO: 641084 - protein, 14 aa, Homo sapiens
  CDR3 for beta chain variable domain of TCR clone 320542 (TRBV7-3, TRBJ2-3)
CASSPGASRDTQYF

SEQ ID NO: 641085 - protein, 15 aa, Homo sapiens
  CDR3 for alpha chain variable domain of TCR clone 320543 (TRAV29/DV5, TRAJ42)
CAAKTDGGSQGNLIF

SEQ ID NO: 641086 - protein, 15 aa, Homo sapiens
  CDR3 for beta chain variable domain of TCR clone 320543 (TRBV7-9, TRBJ1-5)
CASSQGHQPNQPQHF

SEQ ID NO: 641087 - protein, 14 aa, Homo sapiens
  CDR3 for alpha chain variable domain of TCR clone 320544 (TRAV34, TRAJ22)
CGADTSGSARQLTF

SEQ ID NO: 641088 - protein, 16 aa, Homo sapiens
  CDR3 for beta chain variable domain of TCR clone 320544 (TRBV2, TRBJ2-3)
CQHRGTPRRWTDSQYF

SEQ ID NO: 641089 - protein, 14 aa, Homo sapiens
  CDR3 for alpha chain variable domain of TCR clone 320545 (TRAV23/DV6, TRAJ17)
CAASIGAAGNKLTF

SEQ ID NO: 641090 - protein, 11 aa, Homo sapiens
  CDR3 for beta chain variable domain of TCR clone 320545 (TRBV20-1, TRBJ2-5)
QCRGGWGAQYF

SEQ ID NO: 641091 - protein, 12 aa, Homo sapiens
  CDR3 for alpha chain variable domain of TCR clone 320546 (TRAV21, TRAJ11)
CAATSGYSTLTL

SEQ ID NO: 641092 - protein, 14 aa, Homo sapiens
  CDR3 for beta chain variable domain of TCR clone 320546 (TRBV20-1, TRBJ2-7)
CSAPELAGAGEQYF

SEQ ID NO: 641093 - protein, 14 aa, Homo sapiens
  CDR3 for alpha chain variable domain of TCR clone 320547 (TRAV8-3, TRAJ9)
CAVVYNTGGFKTIF

SEQ ID NO: 641094 - protein, 13 aa, Homo sapiens
  CDR3 for beta chain variable domain of TCR clone 320547 (TRBV7-3, TRBJ1-1)
CASSQDWGAEAFF

SEQ ID NO: 641095 - protein, 17 aa, Homo sapiens
  CDR3 for alpha chain variable domain of TCR clone 320548 (TRAV8-6, TRAJ58)
CAVSSWVGETSGSRFTF

SEQ ID NO: 641096 - protein, 17 aa, Homo sapiens
  CDR3 for beta chain variable domain of TCR clone 320548 (TRBV4-3, TRBJ1-2)
CASSSRLQAGGSVGYTF

SEQ ID NO: 641097 - protein, 12 aa, Homo sapiens
  CDR3 for alpha chain variable domain of TCR clone 320549 (TRAV12-3, TRAJ17)
CAMTLTGNKLTF

SEQ ID NO: 641098 - protein, 23 aa, Homo sapiens
  CDR3 for beta chain variable domain of TCR clone 320549 (TRBV4-1, TRBJ1-4)
CASSDTGGTNEKLFWQWNPALCL

SEQ ID NO: 641099 - protein, 13 aa, Homo sapiens
  CDR3 for alpha chain variable domain of TCR clone 320550 (TRAV13-1, TRAJ21)
CAASIYNFNKLYS

SEQ ID NO: 641100 - protein, 13 aa, Homo sapiens
  CDR3 for beta chain variable domain of TCR clone 320550 (TRBV27, TRBJ1-4)
CASSLMGDEKLFF

SEQ ID NO: 641101 - protein, 13 aa, Homo sapiens
  CDR3 for alpha chain variable domain of TCR clone 320551 (TRAV8-6, TRAJ48)
CAGVNFVNEKLTF

SEQ ID NO: 641102 - protein, 16 aa, Homo sapiens
  CDR3 for beta chain variable domain of TCR clone 320551 (TRBV4-2, TRBJ2-6)
CASSQARSSGANVLTF

SEQ ID NO: 641103 - protein, 11 aa, Homo sapiens
  CDR3 for alpha chain variable domain of TCR clone 320552 (TRAV2, TRAJ13)
CASGGYQKVTF

SEQ ID NO: 641104 - protein, 12 aa, Homo sapiens
  CDR3 for beta chain variable domain of TCR clone 320552 (TRBV27, TRBJ2-1)
CASRGFYNEQFF

SEQ ID NO: 641105 - protein, 15 aa, Homo sapiens
  CDR3 for alpha chain variable domain of TCR clone 320553 (TRAV26-1, TRAJ27)
CIVRVLTTMQANQPL

SEQ ID NO: 641106 - protein, 13 aa, Homo sapiens
  CDR3 for beta chain variable domain of TCR clone 320553 (TRBV20-1, TRBJ2-7)
CSATHTSGYEQYF

SEQ ID NO: 641107 - protein, 14 aa, Homo sapiens
  CDR3 for alpha chain variable domain of TCR clone 320554 (TRAV1-2, TRAJ16)
CAVNRFSDGQNLLF

SEQ ID NO: 641108 - protein, 13 aa, Homo sapiens
  CDR3 for beta chain variable domain of TCR clone 320554 (TRBV7-3, TRBJ2-1)
CASSPGSYNEQFF

SEQ ID NO: 641109 - protein, 18 aa, Homo sapiens
  CDR3 for alpha chain variable domain of TCR clone 320555 (TRAV13-1, TRAJ52)
CAAKNPNAGGTSYGKLTF

SEQ ID NO: 641110 - protein, 13 aa, Homo sapiens
  CDR3 for beta chain variable domain of TCR clone 320555 (TRBV7-9, TRBJ2-3)
CASSPGSTDTQYF

SEQ ID NO: 641111 - protein, 14 aa, Homo sapiens
  CDR3 for alpha chain variable domain of TCR clone 320556 (TRAV13-1, TRAJ35)
CAASKGGFGNVLHC

SEQ ID NO: 641112 - protein, 14 aa, Homo sapiens
  CDR3 for beta chain variable domain of TCR clone 320556 (TRBV10-2, TRBJ1-5)
CASSSTGRNQPQHF

SEQ ID NO: 641113 - protein, 12 aa, Homo sapiens
  CDR3 for alpha chain variable domain of TCR clone 320557 (TRAV13-1, TRAJ53)
AASGGSNYKLTF

SEQ ID NO: 641114 - protein, 15 aa, Homo sapiens
  CDR3 for beta chain variable domain of TCR clone 320557 (TRBV4-1, TRBJ1-4)
CASSDTGGTNEKLFF

SEQ ID NO: 641115 - protein, 17 aa, Homo sapiens
  CDR3 for alpha chain variable domain of TCR clone 320558 (TRAV23/DV6, TRAJ9)
CAASLSPPNTGGFKTIF

SEQ ID NO: 641116 - protein, 18 aa, Homo sapiens
  CDR3 for beta chain variable domain of TCR clone 320558 (TRBV4-1, TRBJ2-7)
CASSQDTGGGSGLNEQYF

SEQ ID NO: 641117 - protein, 15 aa, Homo sapiens
  CDR3 for alpha chain variable domain of TCR clone 320559 (TRAV26-2, TRAJ50)
CILRDEETSYDKVIF

SEQ ID NO: 641118 - protein, 12 aa, Homo sapiens
  CDR3 for beta chain variable domain of TCR clone 320559 (TRBV5-7, TRBJ1-2)
CASSDGPCGYTF

SEQ ID NO: 641119 - protein, 14 aa, Homo sapiens
  CDR3 for alpha chain variable domain of TCR clone 320560 (TRAV12-2, TRAJ24)
CAVTPADSWGKLQF

SEQ ID NO: 641120 - protein, 16 aa, Homo sapiens
  CDR3 for beta chain variable domain of TCR clone 320560 (TRBV11-2, TRBJ2-7)
CASSTVTAPKTYEQYF

SEQ ID NO: 641121 - protein, 11 aa, Homo sapiens
  CDR3 for alpha chain variable domain of TCR clone 320561 (TRAV1-2, TRAJ20)
CAVSNDYKLSF

SEQ ID NO: 641122 - protein, 15 aa, Homo sapiens
  CDR3 for beta chain variable domain of TCR clone 320561 (TRBV12-4, TRBJ2-5)
CASSPPTGLQETQYF

SEQ ID NO: 641123 - protein, 14 aa, Homo sapiens
  CDR3 for alpha chain variable domain of TCR clone 320562 (TRAV13-1, TRAJ44)
CAAMATGTASKLTF

SEQ ID NO: 641124 - protein, 17 aa, Homo sapiens
  CDR3 for beta chain variable domain of TCR clone 320562 (TRBV7-3, TRBJ2-3)
RASSLMKRMRGADTQYF

SEQ ID NO: 641125 - protein, 14 aa, Homo sapiens
  CDR3 for alpha chain variable domain of TCR clone 320563 (TRAV1-2, TRAJ8)
CAVREDTGFQKLVF

SEQ ID NO: 641126 - protein, 14 aa, Homo sapiens
  CDR3 for beta chain variable domain of TCR clone 320563 (TRBV2, TRBJ1-5)
CASSENRGGQPQHF

SEQ ID NO: 641127 - protein, 17 aa, Homo sapiens
  CDR3 for alpha chain variable domain of TCR clone 320564 (TRAV1-1, TRAJ10)
EASNTVILTGGGNKLTF

SEQ ID NO: 641128 - protein, 16 aa, Homo sapiens
  CDR3 for beta chain variable domain of TCR clone 320564 (TRBV2, TRBJ2-4)
CASSKGTGMDKNIQYF

SEQ ID NO: 641129 - protein, 15 aa, Homo sapiens
  CDR3 for alpha chain variable domain of TCR clone 320565 (TRAV35, TRAJ50)
CAGQLRKTSYDKVIF

SEQ ID NO: 641130 - protein, 17 aa, Homo sapiens
  CDR3 for beta chain variable domain of TCR clone 320565 (TRBV15, TRBJ1-1)
CATSRVGGADGDTEAFL

SEQ ID NO: 641131 - protein, 15 aa, Homo sapiens
  CDR3 for alpha chain variable domain of TCR clone 320566 (TRAV23/DV6, TRAJ57)
CAASSTLSQGGSEKL

SEQ ID NO: 641132 - protein, 14 aa, Homo sapiens
  CDR3 for beta chain variable domain of TCR clone 320566 (TRBV25-1, TRBJ1-1)
CASTPLGGNTEAFF

SEQ ID NO: 641133 - protein, 16 aa, Homo sapiens
  CDR3 for alpha chain variable domain of TCR clone 320567 (TRAV22, TRAJ45)
CAVERGKRGGADGRTF

SEQ ID NO: 641134 - protein, 16 aa, Homo sapiens
  CDR3 for beta chain variable domain of TCR clone 320567 (TRBV5-1, TRBJ2-5)
CASSLRRTSGQETQYF

SEQ ID NO: 641135 - protein, 12 aa, Homo sapiens
  CDR3 for alpha chain variable domain of TCR clone 320568 (TRAV1-1, TRAJ20)
CAVREDDYKLSF

SEQ ID NO: 641136 - protein, 14 aa, Homo sapiens
  CDR3 for beta chain variable domain of TCR clone 320568 (TRBV6-1, TRBJ1-3)
CASVQGGGGNTIYF

SEQ ID NO: 641137 - protein, 15 aa, Homo sapiens
  CDR3 for alpha chain variable domain of TCR clone 320569 (TRAV8-3, TRAJ32)
CAVGPYGGATNKLIF

SEQ ID NO: 641138 - protein, 14 aa, Homo sapiens
  CDR3 for beta chain variable domain of TCR clone 320569 (TRBV29-1, TRBJ2-2)
CSVLAVTNTGELFF

SEQ ID NO: 641139 - protein, 13 aa, Homo sapiens
  CDR3 for alpha chain variable domain of TCR clone 320570 (TRAV2, TRAJ40)
CAVVTSGTYKYIF

SEQ ID NO: 641140 - protein, 16 aa, Homo sapiens
  CDR3 for beta chain variable domain of TCR clone 320570 (TRBV27, TRBJ1-6)
CASSLGGQGLYSPLHF

SEQ ID NO: 641141 - protein, 18 aa, Homo sapiens
  CDR3 for alpha chain variable domain of TCR clone 320571 (TRAV3, TRAJ17)
CAVRASRGGRSCRQQANF

SEQ ID NO: 641142 - protein, 14 aa, Homo sapiens
  CDR3 for beta chain variable domain of TCR clone 320571 (TRBV4-1, TRBJ2-2)
CASSQAVNTGELFF

SEQ ID NO: 641143 - protein, 13 aa, Homo sapiens
  CDR3 for alpha chain variable domain of TCR clone 320572 (TRAV13-1, TRAJ39)
CSKYSNAGNMLTF

SEQ ID NO: 641144 - protein, 16 aa, Homo sapiens
  CDR3 for beta chain variable domain of TCR clone 320572 (TRBV20-1, TRBJ1-4)
CSAPGHGLLTNEKLFF

SEQ ID NO: 641145 - protein, 17 aa, Homo sapiens
  CDR3 for alpha chain variable domain of TCR clone 320573 (TRAV16, TRAJ37)
CAFWPKNGSSNTGKLIF

SEQ ID NO: 641146 - protein, 15 aa, Homo sapiens
  CDR3 for beta chain variable domain of TCR clone 320573 (TRBV4-1, TRBJ1-4)
CASSDTGGTNEKLFF

SEQ ID NO: 641147 - protein, 21 aa, Homo sapiens
  CDR3 for alpha chain variable domain of TCR clone 320574 (TRAV1-1, TRAJ6)
CLLLLRCERLERTGGSYIPTF

SEQ ID NO: 641148 - protein, 14 aa, Homo sapiens
  CDR3 for beta chain variable domain of TCR clone 320574 (TRBV7-2, TRBJ2-7)
CASSPKASFYEQYF

SEQ ID NO: 641149 - protein, 19 aa, Homo sapiens
  CDR3 for alpha chain variable domain of TCR clone 320575 (TRAV9-2, TRAJ26)
CQTQRCTSALRGYGQNFVF

SEQ ID NO: 641150 - protein, 12 aa, Homo sapiens
  CDR3 for beta chain variable domain of TCR clone 320575 (TRBV29-1, TRBJ2-3)
CSVTGGADTQYF

SEQ ID NO: 641151 - protein, 17 aa, Homo sapiens
  CDR3 for alpha chain variable domain of TCR clone 320576 (TRAV23/DV6, TRAJ57)
CAASSTLSQGGSEKLVF

SEQ ID NO: 641152 - protein, 14 aa, Homo sapiens
  CDR3 for beta chain variable domain of TCR clone 320576 (TRBV25-1, TRBJ1-1)
CASSHLGGNTEAFF

SEQ ID NO: 641153 - protein, 15 aa, Homo sapiens
  CDR3 for alpha chain variable domain of TCR clone 320577 (TRAV13-1, TRAJ44)
CAASRNTGTASKLTF

SEQ ID NO: 641154 - protein, 14 aa, Homo sapiens
  CDR3 for beta chain variable domain of TCR clone 320577 (TRBV11-2, TRBJ1-2)
CASSLYRGNYGYAV

SEQ ID NO: 641155 - protein, 14 aa, Homo sapiens
  CDR3 for alpha chain variable domain of TCR clone 320578 (TRAV12-2, TRAJ17)
CAVLFKAAGNKLTF

SEQ ID NO: 641156 - protein, 15 aa, Homo sapiens
  CDR3 for beta chain variable domain of TCR clone 320578 (TRBV28, TRBJ2-7)
CASSPGGRGFYEQYF

SEQ ID NO: 641157 - protein, 11 aa, Homo sapiens
  CDR3 for alpha chain variable domain of TCR clone 320579 (TRAV3, TRAJ33)
CAVRRNYQLIW

SEQ ID NO: 641158 - protein, 13 aa, Homo sapiens
  CDR3 for beta chain variable domain of TCR clone 320579 (TRBV7-9, TRBJ2-5)
CASLSPGQETQYF

SEQ ID NO: 641159 - protein, 16 aa, Homo sapiens
  CDR3 for alpha chain variable domain of TCR clone 320580 (TRAV1-2, TRAJ16)
CAVNRFQMARSCSLQG

SEQ ID NO: 641160 - protein, 15 aa, Homo sapiens
  CDR3 for beta chain variable domain of TCR clone 320580 (TRBV7-8, TRBJ2-1)
CASSLHGGPYNEQFF

SEQ ID NO: 641161 - protein, 14 aa, Homo sapiens
  CDR3 for alpha chain variable domain of TCR clone 320581 (TRAV17, TRAJ22)
CATAISGSARQLTF

SEQ ID NO: 641162 - protein, 13 aa, Homo sapiens
  CDR3 for beta chain variable domain of TCR clone 320581 (TRBV6-3, TRBJ1-2)
CASSLDKSSGYTF

SEQ ID NO: 641163 - protein, 18 aa, Homo sapiens
  CDR3 for alpha chain variable domain of TCR clone 320582 (TRAV13-1, TRAJ52)
CAAKNPNAGGTSYGKMTF

SEQ ID NO: 641164 - protein, 14 aa, Homo sapiens
  CDR3 for beta chain variable domain of TCR clone 320582 (TRBV7-2, TRBJ2-7)
CASSPKTSFYEQYF

SEQ ID NO: 641165 - protein, 14 aa, Homo sapiens
  CDR3 for alpha chain variable domain of TCR clone 320583 (TRAV26-1, TRAJ54)
CIVRRTQGAQKLVF

SEQ ID NO: 641166 - protein, 15 aa, Homo sapiens
  CDR3 for beta chain variable domain of TCR clone 320583 (TRBV7-9, TRBJ1-6)
CASSSPGRGNSPLHF

SEQ ID NO: 641167 - protein, 17 aa, Homo sapiens
  CDR3 for alpha chain variable domain of TCR clone 320584 (TRAV8-6, TRAJ58)
CAVSSWVGETSGSRLTF

SEQ ID NO: 641168 - protein, 14 aa, Homo sapiens
  CDR3 for beta chain variable domain of TCR clone 320584 (TRBV7-2, TRBJ2-7)
CASSLPPGQGPQYF

SEQ ID NO: 641169 - protein, 14 aa, Homo sapiens
  CDR3 for alpha chain variable domain of TCR clone 320585 (TRAV3, TRAJ22)
CAVRDYGSARQLTF

SEQ ID NO: 641170 - protein, 16 aa, Homo sapiens
  CDR3 for beta chain variable domain of TCR clone 320585 (TRBV15, TRBJ2-3)
CATSRDPGIVTDTQYF

SEQ ID NO: 641171 - protein, 13 aa, Homo sapiens
  CDR3 for alpha chain variable domain of TCR clone 320586 (TRAV2, TRAJ40)
CAVVTSGTYKYIF

SEQ ID NO: 641172 - protein, 19 aa, Homo sapiens
  CDR3 for beta chain variable domain of TCR clone 320586 (TRBV7-2, TRBJ2-3)
CASSSQGGPRLAGADTQYF

SEQ ID NO: 641173 - protein, 12 aa, Homo sapiens
  CDR3 for alpha chain variable domain of TCR clone 320587 (TRAV25, TRAJ38)
CAGTGNNRKLIW

SEQ ID NO: 641174 - protein, 17 aa, Homo sapiens
  CDR3 for beta chain variable domain of TCR clone 320587 (TRBV11-1, TRBJ2-7)
CASSLTGSFGLDYEQYF

SEQ ID NO: 641175 - protein, 14 aa, Homo sapiens
  CDR3 for alpha chain variable domain of TCR clone 320588 (TRAV9-2, TRAJ24)
CALNPRGSWGKLQF

SEQ ID NO: 641176 - protein, 19 aa, Homo sapiens
  CDR3 for beta chain variable domain of TCR clone 320588 (TRBV25-1, TRBJ2-2)
CAILVYRVDRGRKTGELFF

SEQ ID NO: 641177 - protein, 16 aa, Homo sapiens
  CDR3 for alpha chain variable domain of TCR clone 320589 (TRAV30, TRAJ24)
CGTEIVDADSWGKFQF

SEQ ID NO: 641178 - protein, 14 aa, Homo sapiens
  CDR3 for beta chain variable domain of TCR clone 320589 (TRBV7-2, TRBJ1-2)
CASSPTGSTDGYTF

SEQ ID NO: 641179 - protein, 12 aa, Homo sapiens
  CDR3 for alpha chain variable domain of TCR clone 320590 (TRAV12-3, TRAJ20)
CAMVRGDYKLSF

SEQ ID NO: 641180 - protein, 18 aa, Homo sapiens
  CDR3 for beta chain variable domain of TCR clone 320590 (TRBV7-2, TRBJ2-3)
CASSLKREGSGITDTQYF

SEQ ID NO: 641181 - protein, 13 aa, Homo sapiens
  CDR3 for alpha chain variable domain of TCR clone 320591 (TRAV2, TRAJ26)
CAVVGNYGQNFVF

SEQ ID NO: 641182 - protein, 13 aa, Homo sapiens
  CDR3 for beta chain variable domain of TCR clone 320591 (TRBV19, TRBJ1-2)
CASSVPGQDGYTF

SEQ ID NO: 641183 - protein, 10 aa, Homo sapiens
  CDR3 for alpha chain variable domain of TCR clone 320592 (TRAV23/DV6, TRAJ57)
CASSSTLSQG

SEQ ID NO: 641184 - protein, 14 aa, Homo sapiens
  CDR3 for beta chain variable domain of TCR clone 320592 (TRBV25-1, TRBJ1-1)
CAGTHLGGNTEAFF

SEQ ID NO: 641185 - protein, 19 aa, Homo sapiens
  CDR3 for alpha chain variable domain of TCR clone 320593 (TRAV1-2, TRAJ18)
CLLPPCCERRGSTLGRLYF

SEQ ID NO: 641186 - protein, 13 aa, Homo sapiens
  CDR3 for beta chain variable domain of TCR clone 320593 (TRBV20-1, TRBJ1-1)
CSARVGGNTEAFF

SEQ ID NO: 641187 - protein, 13 aa, Homo sapiens
  CDR3 for alpha chain variable domain of TCR clone 320594 (TRAV13-2, TRAJ49)
CAENTNTGNQSYF

SEQ ID NO: 641188 - protein, 12 aa, Homo sapiens
  CDR3 for beta chain variable domain of TCR clone 320594 (TRBV6-6, TRBJ2-3)
CASSSRGDTQYF

SEQ ID NO: 641189 - protein, 15 aa, Homo sapiens
  CDR3 for alpha chain variable domain of TCR clone 320595 (TRAV27, TRAJ37)
CAGIHGSSNTGQLIF

SEQ ID NO: 641190 - protein, 13 aa, Homo sapiens
  CDR3 for beta chain variable domain of TCR clone 320595 (TRBV19, TRBJ2-1)
CASSIRSSWEQFF

SEQ ID NO: 641191 - protein, 16 aa, Homo sapiens
  CDR3 for alpha chain variable domain of TCR clone 320596 (TRAV30, TRAJ24)
CGTEIVDADSLGKFQF

SEQ ID NO: 641192 - protein, 14 aa, Homo sapiens
  CDR3 for beta chain variable domain of TCR clone 320596 (TRBV12-5, TRBJ2-5)
CASGARTHQETQYF

SEQ ID NO: 641193 - protein, 14 aa, Homo sapiens
  CDR3 for alpha chain variable domain of TCR clone 320597 (TRAV8-3, TRAJ4)
CAVSAAGGYNKLIF

SEQ ID NO: 641194 - protein, 13 aa, Homo sapiens
  CDR3 for beta chain variable domain of TCR clone 320597 (TRBV3-1, TRBJ1-1)
CASSPGVITEAFF

SEQ ID NO: 641195 - protein, 13 aa, Homo sapiens
  CDR3 for alpha chain variable domain of TCR clone 320598 (TRAV36/DV7, TRAJ21)
CAVEAYDFNKFYF

SEQ ID NO: 641196 - protein, 14 aa, Homo sapiens
  CDR3 for beta chain variable domain of TCR clone 320598 (TRBV6-1, TRBJ1-1)
CASSGTGLNTEAFF

SEQ ID NO: 641197 - protein, 14 aa, Homo sapiens
  CDR3 for alpha chain variable domain of TCR clone 320599 (TRAV35, TRAJ33)
CAGSSQDSNYQLIR

SEQ ID NO: 641198 - protein, 14 aa, Homo sapiens
  CDR3 for beta chain variable domain of TCR clone 320599 (TRBV20-1, TRBJ2-1)
CSAQIGGSANEQFF

SEQ ID NO: 641199 - protein, 17 aa, Homo sapiens
  CDR3 for alpha chain variable domain of TCR clone 320600 (TRAV3, TRAJ6)
CAVRDGPRAGGSYIPTF

SEQ ID NO: 641200 - protein, 14 aa, Homo sapiens
  CDR3 for beta chain variable domain of TCR clone 320600 (TRBV7-2, TRBJ2-7)
CASNPKTSFYEQYS

SEQ ID NO: 641201 - protein, 11 aa, Homo sapiens
  CDR3 for alpha chain variable domain of TCR clone 320601 (TRAV17, TRAJ36)
CAPTGANNLFF

SEQ ID NO: 641202 - protein, 15 aa, Homo sapiens
  CDR3 for beta chain variable domain of TCR clone 320601 (TRBV20-1, TRBJ2-2)
CSAIPGHSNTGELFF

SEQ ID NO: 641203 - protein, 12 aa, Homo sapiens
  CDR3 for alpha chain variable domain of TCR clone 320602 (TRAV12-1, TRAJ40)
CVVYSGTCKYIF

SEQ ID NO: 641204 - protein, 18 aa, Homo sapiens
  CDR3 for beta chain variable domain of TCR clone 320602 (TRBV11-2, TRBJ2-3)
CVSSLGGASRGAPNTQYF

SEQ ID NO: 641205 - protein, 10 aa, Homo sapiens
  CDR3 for alpha chain variable domain of TCR clone 320603 (TRAV26-2, TRAJ49)
CILLGNQFYF

SEQ ID NO: 641206 - protein, 14 aa, Homo sapiens
  CDR3 for beta chain variable domain of TCR clone 320603 (TRBV19, TRBJ2-1)
CASPTFVLSGEQYF

SEQ ID NO: 641207 - protein, 14 aa, Homo sapiens
  CDR3 for alpha chain variable domain of TCR clone 320604 (TRAV17, TRAJ17)
CATDHRAAGNKLTF

SEQ ID NO: 641208 - protein, 16 aa, Homo sapiens
  CDR3 for beta chain variable domain of TCR clone 320604 (TRBV4-2, TRBJ2-3)
CASSQELAGDTDTQYF

SEQ ID NO: 641209 - protein, 18 aa, Homo sapiens
  CDR3 for alpha chain variable domain of TCR clone 320605 (TRAV3, TRAJ17)
CAVRARRGGRSCRRKANF

SEQ ID NO: 641210 - protein, 14 aa, Homo sapiens
  CDR3 for beta chain variable domain of TCR clone 320605 (TRBV4-1, TRBJ2-2)
CASSQAVNTGELFF

SEQ ID NO: 641211 - protein, 12 aa, Homo sapiens
  CDR3 for alpha chain variable domain of TCR clone 320606 (TRAV36/DV7, TRAJ54)
CAVVRGAQKLVF

SEQ ID NO: 641212 - protein, 14 aa, Homo sapiens
  CDR3 for beta chain variable domain of TCR clone 320606 (TRBV7-3, TRBJ1-1)
CASSLKGGNTVAFF

SEQ ID NO: 641213 - protein, 16 aa, Homo sapiens
  CDR3 for alpha chain variable domain of TCR clone 320607 (TRAV13-2, TRAJ32)
CAENMNYGGATNKLIF

SEQ ID NO: 641214 - protein, 14 aa, Homo sapiens
  CDR3 for beta chain variable domain of TCR clone 320607 (TRBV15, TRBJ2-5)
CATSSRGYQETQYF

SEQ ID NO: 641215 - protein, 15 aa, Homo sapiens
  CDR3 for alpha chain variable domain of TCR clone 320608 (TRAV20, TRAJ43)
CAVQAGKSSNNEVRF

SEQ ID NO: 641216 - protein, 14 aa, Homo sapiens
  CDR3 for beta chain variable domain of TCR clone 320608 (TRBV27, TRBJ2-1)
CASRHLGGGKEQFF

SEQ ID NO: 641217 - protein, 13 aa, Homo sapiens
  CDR3 for alpha chain variable domain of TCR clone 320609 (TRAV12-3, TRAJ33)
CAMSVNSNYQLIW

SEQ ID NO: 641218 - protein, 11 aa, Homo sapiens
  CDR3 for beta chain variable domain of TCR clone 320609 (TRBV7-3, TRBJ2-5)
CASSVSETQYF

SEQ ID NO: 641219 - protein, 12 aa, Homo sapiens
  CDR3 for alpha chain variable domain of TCR clone 320610 (TRAV1-1, TRAJ16)
CAEMARSCSLQG

SEQ ID NO: 641220 - protein, 18 aa, Homo sapiens
  CDR3 for beta chain variable domain of TCR clone 320610 (TRBV2, TRBJ2-1)
CASRGLAGGPRTYNEQFF

SEQ ID NO: 641221 - protein, 12 aa, Homo sapiens
  CDR3 for alpha chain variable domain of TCR clone 320611 (TRAV12-1, TRAJ40)
CVVYSGTYKYIF

SEQ ID NO: 641222 - protein, 14 aa, Homo sapiens
  CDR3 for beta chain variable domain of TCR clone 320611 (TRBV20-1, TRBJ2-1)
CSAKQGVAVNEQFF

SEQ ID NO: 641223 - protein, 13 aa, Homo sapiens
  CDR3 for alpha chain variable domain of TCR clone 320612 (TRAV29/DV5, TRAJ58)
CAAVETSGSRLTF

SEQ ID NO: 641224 - protein, 16 aa, Homo sapiens
  CDR3 for beta chain variable domain of TCR clone 320612 (TRBV12-5, TRBJ2-5)
CASGPRTSGNQETQYF

SEQ ID NO: 641225 - protein, 16 aa, Homo sapiens
  CDR3 for alpha chain variable domain of TCR clone 320613 (TRAV14/DV4, TRAJ15)
CAMREGSFQAGTALTF

SEQ ID NO: 641226 - protein, 18 aa, Homo sapiens
  CDR3 for beta chain variable domain of TCR clone 320613 (TRBV12-4, TRBJ2-4)
CASSRTGAVDVAKNIQYF

SEQ ID NO: 641227 - protein, 11 aa, Homo sapiens
  CDR3 for alpha chain variable domain of TCR clone 320614 (TRAV3, TRAJ21)
CAVGNFNKFYF

SEQ ID NO: 641228 - protein, 15 aa, Homo sapiens
  CDR3 for beta chain variable domain of TCR clone 320614 (TRBV19, TRBJ2-4)
CASRGPRRGENMQYF

SEQ ID NO: 641229 - protein, 17 aa, Homo sapiens
  CDR3 for alpha chain variable domain of TCR clone 320615 (TRAV4, )
CLVDIQNPDPAVYQLRD

SEQ ID NO: 641230 - protein, 11 aa, Homo sapiens
  CDR3 for beta chain variable domain of TCR clone 320615 (TRBV23-1, TRBJ2-7)
SSSGTGLEQYF

SEQ ID NO: 641231 - protein, 13 aa, Homo sapiens
  CDR3 for alpha chain variable domain of TCR clone 320616 (TRAV12-2, TRAJ52)
CNAGGTSYGKLTF

SEQ ID NO: 641232 - protein, 13 aa, Homo sapiens
  CDR3 for beta chain variable domain of TCR clone 320616 (TRBV19, TRBJ1-3)
CASRLSLGNTIYF

SEQ ID NO: 641233 - protein, 10 aa, Homo sapiens
  CDR3 for alpha chain variable domain of TCR clone 320617 (TRAV1-2, TRAJ20)
CALNDYKLSF

SEQ ID NO: 641234 - protein, 16 aa, Homo sapiens
  CDR3 for beta chain variable domain of TCR clone 320617 (TRBV6-1, TRBJ2-1)
CASILRQGSSYNEQFF

SEQ ID NO: 641235 - protein, 12 aa, Homo sapiens
  CDR3 for alpha chain variable domain of TCR clone 320618 (TRAV16, TRAJ10)
CSRTGGGNKLTF

SEQ ID NO: 641236 - protein, 15 aa, Homo sapiens
  CDR3 for beta chain variable domain of TCR clone 320618 (TRBV5-1, TRBJ2-7)
CASSLDLTSSYEQYF

SEQ ID NO: 641237 - protein, 14 aa, Homo sapiens
  CDR3 for alpha chain variable domain of TCR clone 320619 (TRAV26-1, TRAJ38)
CIADNAGNNRKMIW

SEQ ID NO: 641238 - protein, 17 aa, Homo sapiens
  CDR3 for beta chain variable domain of TCR clone 320619 (TRBV7-9, TRBJ2-3)
CASSPTVAGDLTDTQYF

SEQ ID NO: 641239 - protein, 16 aa, Homo sapiens
  CDR3 for alpha chain variable domain of TCR clone 320620 (TRAV3, TRAJ10)
CAVRDMRAGGGNKLTC

SEQ ID NO: 641240 - protein, 16 aa, Homo sapiens
  CDR3 for beta chain variable domain of TCR clone 320620 (TRBV19, TRBJ2-2)
CASSFPGQGLAGELFF

SEQ ID NO: 641241 - protein, 14 aa, Homo sapiens
  CDR3 for alpha chain variable domain of TCR clone 320621 (TRAV13-1, TRAJ35)
CAASKGGFGTVLHC

SEQ ID NO: 641242 - protein, 13 aa, Homo sapiens
  CDR3 for beta chain variable domain of TCR clone 320621 (TRBV7-9, TRBJ2-5)
CASLPSGRETQYF

SEQ ID NO: 641243 - protein, 11 aa, Homo sapiens
  CDR3 for alpha chain variable domain of TCR clone 320622 (TRAV8-4, TRAJ34)
CAVSWTDKLIF

SEQ ID NO: 641244 - protein, 15 aa, Homo sapiens
  CDR3 for beta chain variable domain of TCR clone 320622 (TRBV7-9, TRBJ1-5)
CASSQGHQPNQPQHF

SEQ ID NO: 641245 - protein, 14 aa, Homo sapiens
  CDR3 for alpha chain variable domain of TCR clone 320623 (TRAV2, TRAJ9)
CAVEDLSGGFKTIF

SEQ ID NO: 641246 - protein, 11 aa, Homo sapiens
  CDR3 for beta chain variable domain of TCR clone 320623 (TRBV12-4, TRBJ2-3)
CASTATDTQYF

SEQ ID NO: 641247 - protein, 13 aa, Homo sapiens
  CDR3 for alpha chain variable domain of TCR clone 320624 (TRAV2, TRAJ40)
CAVVTSGTYKYIF

SEQ ID NO: 641248 - protein, 14 aa, Homo sapiens
  CDR3 for beta chain variable domain of TCR clone 320624 (TRBV11-3, TRBJ2-1)
CASSLAGGTNEQFF

SEQ ID NO: 641249 - protein, 11 aa, Homo sapiens
  CDR3 for alpha chain variable domain of TCR clone 320625 (TRAV2, TRAJ33)
CAVDSHYQLIW

SEQ ID NO: 641250 - protein, 15 aa, Homo sapiens
  CDR3 for beta chain variable domain of TCR clone 320625 (TRBV19, TRBJ1-2)
CASSVGQVLNYGYTF

SEQ ID NO: 641251 - protein, 18 aa, Homo sapiens
  CDR3 for alpha chain variable domain of TCR clone 320626 (TRAV35, TRAJ28)
CTGHNYPLSGAGSYQLTF

SEQ ID NO: 641252 - protein, 12 aa, Homo sapiens
  CDR3 for beta chain variable domain of TCR clone 320626 (TRBV7-9, TRBJ1-1)
CASSLEGTEAFF

SEQ ID NO: 641253 - protein, 13 aa, Homo sapiens
  CDR3 for alpha chain variable domain of TCR clone 320627 (TRAV1-2, TRAJ9)
CAALNTGGFNTIF

SEQ ID NO: 641254 - protein, 13 aa, Homo sapiens
  CDR3 for beta chain variable domain of TCR clone 320627 (TRBV19, TRBJ1-2)
CASSVPGQDGYSF

SEQ ID NO: 641255 - protein, 15 aa, Homo sapiens
  CDR3 for alpha chain variable domain of TCR clone 320628 (TRAV12-3, TRAJ18)
CAMSGGGSTLGRLYF

SEQ ID NO: 641256 - protein, 16 aa, Homo sapiens
  CDR3 for beta chain variable domain of TCR clone 320628 (TRBV2, TRBJ2-3)
CASSTSVEGVTDTQYF

SEQ ID NO: 641257 - protein, 10 aa, Homo sapiens
  CDR3 for alpha chain variable domain of TCR clone 320629 (TRAV38-2/DV8, TRAJ40)
CASGTYKYIF

SEQ ID NO: 641258 - protein, 14 aa, Homo sapiens
  CDR3 for beta chain variable domain of TCR clone 320629 (TRBV7-9, TRBJ2-1)
CASSPGDSLYEQFF

SEQ ID NO: 641259 - protein, 15 aa, Homo sapiens
  CDR3 for alpha chain variable domain of TCR clone 320630 (TRAV3, TRAJ5)
CAVRDRQTGRRALTF

SEQ ID NO: 641260 - protein, 15 aa, Homo sapiens
  CDR3 for beta chain variable domain of TCR clone 320630 (TRBV7-8, TRBJ2-1)
CASSLADSLYNEQLF

SEQ ID NO: 641261 - protein, 12 aa, Homo sapiens
  CDR3 for alpha chain variable domain of TCR clone 320631 (TRAV12-3, TRAJ40)
CAMSSGTYKYIF

SEQ ID NO: 641262 - protein, 14 aa, Homo sapiens
  CDR3 for beta chain variable domain of TCR clone 320631 (TRBV15, TRBJ2-4)
CATEGGQGANIQYF

SEQ ID NO: 641263 - protein, 14 aa, Homo sapiens
  CDR3 for alpha chain variable domain of TCR clone 320632 (TRAV12-3, TRAJ9)
CAMSVETGGFKTIF

SEQ ID NO: 641264 - protein, 14 aa, Homo sapiens
  CDR3 for beta chain variable domain of TCR clone 320632 (TRBV7-2, TRBJ2-7)
CASRSEGAAYEQYF

SEQ ID NO: 641265 - protein, 15 aa, Homo sapiens
  CDR3 for alpha chain variable domain of TCR clone 320633 (TRAV17, TRAJ41)
CATDPPSNYGYALNF

SEQ ID NO: 641266 - protein, 15 aa, Homo sapiens
  CDR3 for beta chain variable domain of TCR clone 320633 (TRBV20-1, TRBJ2-7)
CSARDRVSGMDEQYF

SEQ ID NO: 641267 - protein, 13 aa, Homo sapiens
  CDR3 for alpha chain variable domain of TCR clone 320634 (TRAV35, TRAJ43)
CAGYPSNNNDMRF

SEQ ID NO: 641268 - protein, 15 aa, Homo sapiens
  CDR3 for beta chain variable domain of TCR clone 320634 (TRBV25-1, TRBJ1-4)
CASSKRIATNEKLFF

SEQ ID NO: 641269 - protein, 16 aa, Homo sapiens
  CDR3 for alpha chain variable domain of TCR clone 320635 (TRAV13-1, TRAJ18)
CAASRMRGSTLGRLYF

SEQ ID NO: 641270 - protein, 18 aa, Homo sapiens
  CDR3 for beta chain variable domain of TCR clone 320635 (TRBV11-2, TRBJ2-3)
CASSLGGASRGAPNTQYF

SEQ ID NO: 641271 - protein, 14 aa, Homo sapiens
  CDR3 for alpha chain variable domain of TCR clone 320636 (TRAV29/DV5, TRAJ36)
CAARRKTGANHLFF

SEQ ID NO: 641272 - protein, 12 aa, Homo sapiens
  CDR3 for beta chain variable domain of TCR clone 320636 (TRBV12-5, TRBJ2-5)
CASGQGVETQYF

SEQ ID NO: 641273 - protein, 10 aa, Homo sapiens
  CDR3 for alpha chain variable domain of TCR clone 320637 (TRAV8-6, TRAJ26)
CGGDGQNFVF

SEQ ID NO: 641274 - protein, 18 aa, Homo sapiens
  CDR3 for beta chain variable domain of TCR clone 320637 (TRBV23-1, TRBJ2-3)
CISAPAVNRPASTDTQYF

SEQ ID NO: 641275 - protein, 14 aa, Homo sapiens
  CDR3 for alpha chain variable domain of TCR clone 320638 (TRAV3, TRAJ7)
CAVREEEREQQTRF

SEQ ID NO: 641276 - protein, 12 aa, Homo sapiens
  CDR3 for beta chain variable domain of TCR clone 320638 (TRBV7-8, TRBJ2-7)
CASCLGDREQYF

SEQ ID NO: 641277 - protein, 12 aa, Homo sapiens
  CDR3 for alpha chain variable domain of TCR clone 320639 (TRAV1-1, TRAJ24)
CAVRGSWGKFQF

SEQ ID NO: 641278 - protein, 15 aa, Homo sapiens
  CDR3 for beta chain variable domain of TCR clone 320639 (TRBV28, TRBJ1-5)
CASRHGTGFNQPQHF

SEQ ID NO: 641279 - protein, 14 aa, Homo sapiens
  CDR3 for alpha chain variable domain of TCR clone 320640 (TRAV3, TRAJ21)
CAVRDKYNFNKFYF

SEQ ID NO: 641280 - protein, 14 aa, Homo sapiens
  CDR3 for beta chain variable domain of TCR clone 320640 (TRBV27, TRBJ2-3)
CASRDSPITDTHYF

SEQ ID NO: 641281 - protein, 19 aa, Homo sapiens
  CDR3 for alpha chain variable domain of TCR clone 320641 (TRAV26-1, TRAJ28)
CIVRVAHAYSGAGSYQLTF

SEQ ID NO: 641282 - protein, 16 aa, Homo sapiens
  CDR3 for beta chain variable domain of TCR clone 320641 (TRBV20-1, TRBJ2-2)
CSASASGIPGAGELFF

SEQ ID NO: 641283 - protein, 13 aa, Homo sapiens
  CDR3 for alpha chain variable domain of TCR clone 320642 (TRAV30, TRAJ24)
CGTETDSWGKLQF

SEQ ID NO: 641284 - protein, 15 aa, Homo sapiens
  CDR3 for beta chain variable domain of TCR clone 320642 (TRBV19, TRBJ1-1)
CASTSGQIQNTEAFF

SEQ ID NO: 641285 - protein, 12 aa, Homo sapiens
  CDR3 for alpha chain variable domain of TCR clone 320643 (TRAV26-1, TRAJ54)
CIGGWGAQKLVF

SEQ ID NO: 641286 - protein, 14 aa, Homo sapiens
  CDR3 for beta chain variable domain of TCR clone 320643 (TRBV11-2, TRBJ1-2)
CASSSGQAGDGYSF

SEQ ID NO: 641287 - protein, 15 aa, Homo sapiens
  CDR3 for alpha chain variable domain of TCR clone 320644 (TRAV4, TRAJ39)
CLVGPHNNAGNMLTF

SEQ ID NO: 641288 - protein, 16 aa, Homo sapiens
  CDR3 for beta chain variable domain of TCR clone 320644 (TRBV13, TRBJ2-2)
CASSPRTGEHTGELFF

SEQ ID NO: 641289 - protein, 14 aa, Homo sapiens
  CDR3 for alpha chain variable domain of TCR clone 320645 (TRAV12-1, TRAJ17)
CVVNYKAAGNKLTF

SEQ ID NO: 641290 - protein, 14 aa, Homo sapiens
  CDR3 for beta chain variable domain of TCR clone 320645 (TRBV7-8, TRBJ2-3)
CASSVEAGTDTQYL

SEQ ID NO: 641291 - protein, 18 aa, Homo sapiens
  CDR3 for alpha chain variable domain of TCR clone 320646 (TRAV8-4, TRAJ52)
CAVTRANAGGTSYGKLTF

SEQ ID NO: 641292 - protein, 20 aa, Homo sapiens
  CDR3 for beta chain variable domain of TCR clone 320646 (TRBV19, TRBJ2-1)
CASSISRTVTSTRLNNEQFS

SEQ ID NO: 641293 - protein, 11 aa, Homo sapiens
  CDR3 for alpha chain variable domain of TCR clone 320647 (TRAV2, TRAJ21)
CAVFNFNKFYF

SEQ ID NO: 641294 - protein, 14 aa, Homo sapiens
  CDR3 for beta chain variable domain of TCR clone 320647 (TRBV15, TRBJ2-3)
CTTRSGTSTDTQYF

SEQ ID NO: 641295 - protein, 17 aa, Homo sapiens
  CDR3 for alpha chain variable domain of TCR clone 320648 (TRAV12-2, TRAJ6)
CAPQGPPRAGGSYIPTF

SEQ ID NO: 641296 - protein, 16 aa, Homo sapiens
  CDR3 for beta chain variable domain of TCR clone 320648 (TRBV19, TRBJ2-2)
CASSTARASNPGELFF

SEQ ID NO: 641297 - protein, 12 aa, Homo sapiens
  CDR3 for alpha chain variable domain of TCR clone 320649 (TRAV1-2, TRAJ33)
CAALDSNYHLIW

SEQ ID NO: 641298 - protein, 17 aa, Homo sapiens
  CDR3 for beta chain variable domain of TCR clone 320649 (TRBV25-1, TRBJ1-2)
CASSEFGSATTNYGYTF

SEQ ID NO: 641299 - protein, 13 aa, Homo sapiens
  CDR3 for alpha chain variable domain of TCR clone 320650 (TRAV24, TRAJ42)
CAFSTGSQGNLIF

SEQ ID NO: 641300 - protein, 14 aa, Homo sapiens
  CDR3 for beta chain variable domain of TCR clone 320650 (TRBV12-4, TRBJ1-1)
CASSLGTGGTEAFF

SEQ ID NO: 641301 - protein, 12 aa, Homo sapiens
  CDR3 for alpha chain variable domain of TCR clone 320651 (TRAV29/DV5, TRAJ34)
CAARHNTDKLIF

SEQ ID NO: 641302 - protein, 12 aa, Homo sapiens
  CDR3 for beta chain variable domain of TCR clone 320651 (TRBV28, TRBJ1-6)
CASLSVPGPLHF

SEQ ID NO: 641303 - protein, 11 aa, Homo sapiens
  CDR3 for alpha chain variable domain of TCR clone 320652 (TRAV6, TRAJ4)
PISGGYNKLIF

SEQ ID NO: 641304 - protein, 13 aa, Homo sapiens
  CDR3 for beta chain variable domain of TCR clone 320652 (TRBV11-3, TRBJ2-7)
CASSLDKLYEQYV

SEQ ID NO: 641305 - protein, 16 aa, Homo sapiens
  CDR3 for alpha chain variable domain of TCR clone 320653 (TRAV3, TRAJ10)
CAVRDMRAGGGNKLTF

SEQ ID NO: 641306 - protein, 13 aa, Homo sapiens
  CDR3 for beta chain variable domain of TCR clone 320653 (TRBV20-1, TRBJ1-1)
CSARGGGNTEDFF

SEQ ID NO: 641307 - protein, 18 aa, Homo sapiens
  CDR3 for alpha chain variable domain of TCR clone 320654 (TRAV21, TRAJ52)
CDVRPSPAGGTSYGKLTF

SEQ ID NO: 641308 - protein, 16 aa, Homo sapiens
  CDR3 for beta chain variable domain of TCR clone 320654 (TRBV7-3, TRBJ2-1)
CASGLEGYRSYNEQFF

SEQ ID NO: 641309 - protein, 14 aa, Homo sapiens
  CDR3 for alpha chain variable domain of TCR clone 320655 (TRAV12-3, TRAJ10)
SHLPLTGGGNKLTF

SEQ ID NO: 641310 - protein, 14 aa, Homo sapiens
  CDR3 for beta chain variable domain of TCR clone 320655 (TRBV7-7, TRBJ2-2)
CATRQDSDTGELFF

SEQ ID NO: 641311 - protein, 13 aa, Homo sapiens
  CDR3 for alpha chain variable domain of TCR clone 320656 (TRAV16, TRAJ11)
CALMNSGYSILTF

SEQ ID NO: 641312 - protein, 15 aa, Homo sapiens
  CDR3 for beta chain variable domain of TCR clone 320656 (TRBV11-3, TRBJ2-1)
CASSGGTSSLDEQFF

SEQ ID NO: 641313 - protein, 13 aa, Homo sapiens
  CDR3 for alpha chain variable domain of TCR clone 320657 (TRAV8-3, TRAJ28)
CAVGAVGSYQLTF

SEQ ID NO: 641314 - protein, 19 aa, Homo sapiens
  CDR3 for beta chain variable domain of TCR clone 320657 (TRBV25-1, TRBJ2-2)
CAILVYRVDRGRKTGELCF

SEQ ID NO: 641315 - protein, 16 aa, Homo sapiens
  CDR3 for alpha chain variable domain of TCR clone 320658 (TRAV13-1, TRAJ10)
CAAGYILTGGGNRLTF

SEQ ID NO: 641316 - protein, 15 aa, Homo sapiens
  CDR3 for beta chain variable domain of TCR clone 320658 (TRBV12-4, TRBJ2-7)
CASSQTGAISYEQYF

SEQ ID NO: 641317 - protein, 13 aa, Homo sapiens
  CDR3 for alpha chain variable domain of TCR clone 320659 (TRAV12-1, TRAJ22)
CVVPSGSARQLTS

SEQ ID NO: 641318 - protein, 15 aa, Homo sapiens
  CDR3 for beta chain variable domain of TCR clone 320659 (TRBV11-3, TRBJ2-7)
CASSPGPASSYEQYF

SEQ ID NO: 641319 - protein, 17 aa, Homo sapiens
  CDR3 for alpha chain variable domain of TCR clone 320660 (TRAV23/DV6, TRAJ12)
CAAIALGAMDSSYKLIF

SEQ ID NO: 641320 - protein, 12 aa, Homo sapiens
  CDR3 for beta chain variable domain of TCR clone 320660 (TRBV10-3, TRBJ2-2)
CAIRENTGELFF

SEQ ID NO: 641321 - protein, 11 aa, Homo sapiens
  CDR3 for alpha chain variable domain of TCR clone 320661 (TRAV8-4, TRAJ34)
CAVSWTDKLIF

SEQ ID NO: 641322 - protein, 13 aa, Homo sapiens
  CDR3 for beta chain variable domain of TCR clone 320661 (TRBV7-9, TRBJ2-1)
CASSWESYNEQFF

SEQ ID NO: 641323 - protein, 15 aa, Homo sapiens
  CDR3 for alpha chain variable domain of TCR clone 320662 (TRAV26-1, TRAJ44)
CIVRIGTGTASKLTF

SEQ ID NO: 641324 - protein, 16 aa, Homo sapiens
  CDR3 for beta chain variable domain of TCR clone 320662 (TRBV19, TRBJ2-1)
CASSKAGPSSYNEQFF

SEQ ID NO: 641325 - protein, 11 aa, Homo sapiens
  CDR3 for alpha chain variable domain of TCR clone 320663 (TRAV12-2, TRAJ33)
CAVTSNYQLIW

SEQ ID NO: 641326 - protein, 15 aa, Homo sapiens
  CDR3 for beta chain variable domain of TCR clone 320663 (TRBV4-1, TRBJ1-4)
CASSDTGGTNEKLFF

SEQ ID NO: 641327 - protein, 14 aa, Homo sapiens
  CDR3 for alpha chain variable domain of TCR clone 320664 (TRAV8-2, TRAJ36)
CVVGGGTGANNLFF

SEQ ID NO: 641328 - protein, 13 aa, Homo sapiens
  CDR3 for beta chain variable domain of TCR clone 320664 (TRBV7-2, TRBJ2-7)
CQQVTGAAYEQYF

SEQ ID NO: 641329 - protein, 12 aa, Homo sapiens
  CDR3 for alpha chain variable domain of TCR clone 320665 (TRAV13-1, TRAJ21)
CAAFFNFNEFYF

SEQ ID NO: 641330 - protein, 14 aa, Homo sapiens
  CDR3 for beta chain variable domain of TCR clone 320665 (TRBV4-1, TRBJ2-7)
CASRLTSGSYEQYF

SEQ ID NO: 641331 - protein, 16 aa, Homo sapiens
  CDR3 for alpha chain variable domain of TCR clone 320666 (TRAV14/DV4, TRAJ54)
CAMREGRIQGAQKLVF

SEQ ID NO: 641332 - protein, 15 aa, Homo sapiens
  CDR3 for beta chain variable domain of TCR clone 320666 (TRBV7-2, TRBJ1-2)
CASSLVSGGDYGYTF

SEQ ID NO: 641333 - protein, 15 aa, Homo sapiens
  CDR3 for alpha chain variable domain of TCR clone 320667 (TRAV3, TRAJ3)
CAVRDRRSRASKISF

SEQ ID NO: 641334 - protein, 13 aa, Homo sapiens
  CDR3 for beta chain variable domain of TCR clone 320667 (TRBV9, TRBJ2-5)
CASSPAGLGTQYF

SEQ ID NO: 641335 - protein, 16 aa, Homo sapiens
  CDR3 for alpha chain variable domain of TCR clone 320668 (TRAV38-1, TRAJ32)
CAFMKGGGGATNKLIF

SEQ ID NO: 641336 - protein, 14 aa, Homo sapiens
  CDR3 for beta chain variable domain of TCR clone 320668 (TRBV19, TRBJ2-2)
CASSGQGIAGELFF

SEQ ID NO: 641337 - protein, 12 aa, Homo sapiens
  CDR3 for alpha chain variable domain of TCR clone 320669 (TRAV13-1, TRAJ9)
CASHTGGFKTIF

SEQ ID NO: 641338 - protein, 18 aa, Homo sapiens
  CDR3 for beta chain variable domain of TCR clone 320669 (TRBV11-2, TRBJ2-3)
CASSLWGASRGAPNTQYF

SEQ ID NO: 641339 - protein, 13 aa, Homo sapiens
  CDR3 for alpha chain variable domain of TCR clone 320670 (TRAV16, TRAJ58)
CALSIPSGSRLTF

SEQ ID NO: 641340 - protein, 14 aa, Homo sapiens
  CDR3 for beta chain variable domain of TCR clone 320670 (TRBV12-4, TRBJ1-2)
CASSLTGQGKGYTF

SEQ ID NO: 641341 - protein, 12 aa, Homo sapiens
  CDR3 for alpha chain variable domain of TCR clone 320671 (TRAV13-1, TRAJ21)
CAAKEGFNKFYF

SEQ ID NO: 641342 - protein, 15 aa, Homo sapiens
  CDR3 for beta chain variable domain of TCR clone 320671 (TRBV7-2, TRBJ2-3)
CASSSTGLETDTQYF

SEQ ID NO: 641343 - protein, 18 aa, Homo sapiens
  CDR3 for alpha chain variable domain of TCR clone 320672 (TRAV8-3, TRAJ4)
WVGDPTSNDPGGYNKLIF

SEQ ID NO: 641344 - protein, 13 aa, Homo sapiens
  CDR3 for beta chain variable domain of TCR clone 320672 (TRBV20-1, TRBJ1-2)
CSATGIQGSGYTF

SEQ ID NO: 641345 - protein, 16 aa, Homo sapiens
  CDR3 for alpha chain variable domain of TCR clone 320673 (TRAV16, TRAJ52)
CALSAAGGTSYGKRTF

SEQ ID NO: 641346 - protein, 15 aa, Homo sapiens
  CDR3 for beta chain variable domain of TCR clone 320673 (TRBV19, TRBJ2-2)
CASSPRTGWTGELFF

SEQ ID NO: 641347 - protein, 14 aa, Homo sapiens
  CDR3 for alpha chain variable domain of TCR clone 320674 (TRAV12-1, TRAJ42)
CVVIYGGSQGNLIF

SEQ ID NO: 641348 - protein, 13 aa, Homo sapiens
  CDR3 for beta chain variable domain of TCR clone 320674 (TRBV18, TRBJ2-5)
CASSPPGKETQYV

SEQ ID NO: 641349 - protein, 18 aa, Homo sapiens
  CDR3 for alpha chain variable domain of TCR clone 320675 (TRAV13-1, TRAJ52)
CAASKRSAGGTSYGKLTF

SEQ ID NO: 641350 - protein, 15 aa, Homo sapiens
  CDR3 for beta chain variable domain of TCR clone 320675 (TRBV7-3, TRBJ2-1)
CASSSLAGVHNEQFF

SEQ ID NO: 641351 - protein, 13 aa, Homo sapiens
  CDR3 for alpha chain variable domain of TCR clone 320676 (TRAV20, TRAJ21)
CAVEGYNFNKFYF

SEQ ID NO: 641352 - protein, 14 aa, Homo sapiens
  CDR3 for beta chain variable domain of TCR clone 320676 (TRBV12-5, TRBJ2-5)
CASGSRTYQETQYF

SEQ ID NO: 641353 - protein, 10 aa, Homo sapiens
  CDR3 for alpha chain variable domain of TCR clone 320677 (TRAV1-2, TRAJ31)
CAFFDARLMF

SEQ ID NO: 641354 - protein, 15 aa, Homo sapiens
  CDR3 for beta chain variable domain of TCR clone 320677 (TRBV12-4, TRBJ2-5)
CASSPPTGLQETLYF

SEQ ID NO: 641355 - protein, 14 aa, Homo sapiens
  CDR3 for alpha chain variable domain of TCR clone 320678 (TRAV16, TRAJ29)
CALTRNSGNTPLVF

SEQ ID NO: 641356 - protein, 12 aa, Homo sapiens
  CDR3 for beta chain variable domain of TCR clone 320678 (TRBV2, TRBJ2-1)
CDKREGYNEQFF

SEQ ID NO: 641357 - protein, 16 aa, Homo sapiens
  CDR3 for alpha chain variable domain of TCR clone 320679 (TRAV12-3, TRAJ53)
CAMSPGSGGSNYKLTF

SEQ ID NO: 641358 - protein, 13 aa, Homo sapiens
  CDR3 for beta chain variable domain of TCR clone 320679 (TRBV7-9, TRBJ2-1)
CASSSSNFNEQFF

SEQ ID NO: 641359 - protein, 15 aa, Homo sapiens
  CDR3 for alpha chain variable domain of TCR clone 320680 (TRAV26-1, TRAJ27)
CIVRVLTPMKANQPL

SEQ ID NO: 641360 - protein, 13 aa, Homo sapiens
  CDR3 for beta chain variable domain of TCR clone 320680 (TRBV20-1, TRBJ2-7)
CSATHTSGYEQYF

SEQ ID NO: 641361 - protein, 14 aa, Homo sapiens
  CDR3 for alpha chain variable domain of TCR clone 320681 (TRAV14/DV4, TRAJ26)
CAMREGTYGQNFVF

SEQ ID NO: 641362 - protein, 16 aa, Homo sapiens
  CDR3 for beta chain variable domain of TCR clone 320681 (TRBV6-4, TRBJ1-2)
CASSEAVGDPNYGYTF

SEQ ID NO: 641363 - protein, 14 aa, Homo sapiens
  CDR3 for alpha chain variable domain of TCR clone 320682 (TRAV2, TRAJ37)
CAVDFTSNTGKLIF

SEQ ID NO: 641364 - protein, 16 aa, Homo sapiens
  CDR3 for beta chain variable domain of TCR clone 320682 (TRBV27, TRBJ2-7)
CASSSERRASAYEQYF

SEQ ID NO: 641365 - protein, 12 aa, Homo sapiens
  CDR3 for alpha chain variable domain of TCR clone 320683 (TRAV12-3, TRAJ17)
CAMTLTGNKLTL

SEQ ID NO: 641366 - protein, 15 aa, Homo sapiens
  CDR3 for beta chain variable domain of TCR clone 320683 (TRBV20-1, TRBJ2-7)
CSARDQVSGMDEQYF

SEQ ID NO: 641367 - protein, 13 aa, Homo sapiens
  CDR3 for alpha chain variable domain of TCR clone 320684 (TRAV3, TRAJ11)
CAVRASGYSTLTF

SEQ ID NO: 641368 - protein, 13 aa, Homo sapiens
  CDR3 for beta chain variable domain of TCR clone 320684 (TRBV11-2, TRBJ2-2)
CASSLLASGELFF

SEQ ID NO: 641369 - protein, 16 aa, Homo sapiens
  CDR3 for alpha chain variable domain of TCR clone 320685 (TRAV26-1, TRAJ37)
CIVRGDGSGNTGKLIF

SEQ ID NO: 641370 - protein, 11 aa, Homo sapiens
  CDR3 for beta chain variable domain of TCR clone 320685 (TRBV11-2, TRBJ2-1)
PPGVEYNEQFF

SEQ ID NO: 641371 - protein, 12 aa, Homo sapiens
  CDR3 for alpha chain variable domain of TCR clone 320686 (TRAV12-1, TRAJ40)
CVVYSETYKYIF

SEQ ID NO: 641372 - protein, 18 aa, Homo sapiens
  CDR3 for beta chain variable domain of TCR clone 320686 (TRBV11-2, TRBJ2-3)
CASSLGEASRGAPNTQYF

SEQ ID NO: 641373 - protein, 15 aa, Homo sapiens
  CDR3 for alpha chain variable domain of TCR clone 320687 (TRAV8-3, TRAJ32)
CAVGPYGGATNKLIF

SEQ ID NO: 641374 - protein, 15 aa, Homo sapiens
  CDR3 for beta chain variable domain of TCR clone 320687 (TRBV6-1, TRBJ2-3)
CASSERGGITDTQYF

SEQ ID NO: 641375 - protein, 13 aa, Homo sapiens
  CDR3 for alpha chain variable domain of TCR clone 320688 (TRAV12-3, TRAJ7)
CAMTPYGNNRLAF

SEQ ID NO: 641376 - protein, 14 aa, Homo sapiens
  CDR3 for beta chain variable domain of TCR clone 320688 (TRBV7-3, TRBJ2-1)
CASSLAGGTNEQFF

SEQ ID NO: 641377 - protein, 13 aa, Homo sapiens
  CDR3 for alpha chain variable domain of TCR clone 320689 (TRAV13-1, TRAJ5)
CAASDTGRRALTF

SEQ ID NO: 641378 - protein, 12 aa, Homo sapiens
  CDR3 for beta chain variable domain of TCR clone 320689 (TRBV28, TRBJ2-3)
CGGGLWGDAVYF

SEQ ID NO: 641379 - protein, 16 aa, Homo sapiens
  CDR3 for alpha chain variable domain of TCR clone 320690 (TRAV3, TRAJ37)
CAVRGKGAGNTGKLIF

SEQ ID NO: 641380 - protein, 12 aa, Homo sapiens
  CDR3 for beta chain variable domain of TCR clone 320690 (TRBV11-2, TRBJ2-2)
CASSLGGGELFF

SEQ ID NO: 641381 - protein, 13 aa, Homo sapiens
  CDR3 for alpha chain variable domain of TCR clone 320691 (TRAV12-2, TRAJ52)
CAVGGTSSGKLTF

SEQ ID NO: 641382 - protein, 15 aa, Homo sapiens
  CDR3 for beta chain variable domain of TCR clone 320691 (TRBV5-4, TRBJ2-6)
CASSSGRTGANVLTF

SEQ ID NO: 641383 - protein, 14 aa, Homo sapiens
  CDR3 for alpha chain variable domain of TCR clone 320692 (TRAV13-1, TRAJ35)
CAASKGGFGNVLHL

SEQ ID NO: 641384 - protein, 13 aa, Homo sapiens
  CDR3 for beta chain variable domain of TCR clone 320692 (TRBV7-3, TRBJ1-1)
CASSQDWGAEAFF

SEQ ID NO: 641385 - protein, 13 aa, Homo sapiens
  CDR3 for alpha chain variable domain of TCR clone 320693 (TRAV13-2, TRAJ13)
CAERPGGYQKVTF

SEQ ID NO: 641386 - protein, 16 aa, Homo sapiens
  CDR3 for beta chain variable domain of TCR clone 320693 (TRBV12-4, TRBJ1-5)
CASSSGPRGSNQPQHF

SEQ ID NO: 641387 - protein, 15 aa, Homo sapiens
  CDR3 for alpha chain variable domain of TCR clone 320694 (TRAV26-1, TRAJ56)
CIVRVDNGANSKLTF

SEQ ID NO: 641388 - protein, 14 aa, Homo sapiens
  CDR3 for beta chain variable domain of TCR clone 320694 (TRBV12-5, TRBJ2-5)
CASGSRTHQETQYF

SEQ ID NO: 641389 - protein, 16 aa, Homo sapiens
  CDR3 for alpha chain variable domain of TCR clone 320695 (TRAV36/DV7, TRAJ33)
WRPGNKVQGSNYQLIW

SEQ ID NO: 641390 - protein, 15 aa, Homo sapiens
  CDR3 for beta chain variable domain of TCR clone 320695 (TRBV29-1, TRBJ2-1)
CSVGRHALFYNEQFF

SEQ ID NO: 641391 - protein, 14 aa, Homo sapiens
  CDR3 for alpha chain variable domain of TCR clone 320696 (TRAV17, TRAJ53)
CATDAGGSNYKLTF

SEQ ID NO: 641392 - protein, 16 aa, Homo sapiens
  CDR3 for beta chain variable domain of TCR clone 320696 (TRBV4-1, TRBJ1-1)
CASSRDAGMGNTEAFF

SEQ ID NO: 641393 - protein, 13 aa, Homo sapiens
  CDR3 for alpha chain variable domain of TCR clone 320697 (TRAV16, TRAJ34)
CALRTWNTDKLIL

SEQ ID NO: 641394 - protein, 16 aa, Homo sapiens
  CDR3 for beta chain variable domain of TCR clone 320697 (TRBV2, TRBJ1-3)
CASSERGVNSGNTIYF

SEQ ID NO: 641395 - protein, 13 aa, Homo sapiens
  CDR3 for alpha chain variable domain of TCR clone 320698 (TRAV38-1, TRAJ33)
CAFDMDSNYQLIW

SEQ ID NO: 641396 - protein, 12 aa, Homo sapiens
  CDR3 for beta chain variable domain of TCR clone 320698 (TRBV5-1, TRBJ1-2)
CASSQDTYGYTF

SEQ ID NO: 641397 - protein, 13 aa, Homo sapiens
  CDR3 for alpha chain variable domain of TCR clone 320699 (TRAV26-2, TRAJ43)
CILRAVNNNDMRF

SEQ ID NO: 641398 - protein, 18 aa, Homo sapiens
  CDR3 for beta chain variable domain of TCR clone 320699 (TRBV4-1, TRBJ2-3)
CASSHQLAGGRSTDTQYF

SEQ ID NO: 641399 - protein, 16 aa, Homo sapiens
  CDR3 for alpha chain variable domain of TCR clone 320700 (TRAV22, TRAJ45)
CAVERGKRGGADGLTF

SEQ ID NO: 641400 - protein, 14 aa, Homo sapiens
  CDR3 for beta chain variable domain of TCR clone 320700 (TRBV7-2, TRBJ2-7)
CASSPKTSFYEQYF

SEQ ID NO: 641401 - protein, 17 aa, Homo sapiens
  CDR3 for alpha chain variable domain of TCR clone 320701 (TRAV3, TRAJ6)
CAVSRRTDTGGSYIPTF

SEQ ID NO: 641402 - protein, 18 aa, Homo sapiens
  CDR3 for beta chain variable domain of TCR clone 320701 (TRBV7-2, TRBJ2-3)
CASSLKTSRGRKADTQYF

SEQ ID NO: 641403 - protein, 15 aa, Homo sapiens
  CDR3 for alpha chain variable domain of TCR clone 320702 (TRAV12-3, TRAJ5)
CAMSVLGTGRRALTF

SEQ ID NO: 641404 - protein, 16 aa, Homo sapiens
  CDR3 for beta chain variable domain of TCR clone 320702 (TRBV20-1, TRBJ2-3)
CSARLHSAGAIDTQYF

SEQ ID NO: 641405 - protein, 13 aa, Homo sapiens
  CDR3 for alpha chain variable domain of TCR clone 320703 (TRAV38-2/DV8, TRAJ43)
CAYRSAASPAAIT

SEQ ID NO: 641406 - protein, 13 aa, Homo sapiens
  CDR3 for beta chain variable domain of TCR clone 320703 (TRBV7-9, TRBJ1-2)
CASSLKQNYGYTF

SEQ ID NO: 641407 - protein, 11 aa, Homo sapiens
  CDR3 for alpha chain variable domain of TCR clone 320704 (TRAV27, TRAJ43)
CVRYNNNDMRF

SEQ ID NO: 641408 - protein, 14 aa, Homo sapiens
  CDR3 for beta chain variable domain of TCR clone 320704 (TRBV7-2, TRBJ2-7)
CASRSQGAAYEQYF

SEQ ID NO: 641409 - protein, 13 aa, Homo sapiens
  CDR3 for alpha chain variable domain of TCR clone 320705 (TRAV30, TRAJ26)
CGTEIPLGQNFVF

SEQ ID NO: 641410 - protein, 16 aa, Homo sapiens
  CDR3 for beta chain variable domain of TCR clone 320705 (TRBV11-2, TRBJ2-2)
CASSLRTGNLIGELFF

SEQ ID NO: 641411 - protein, 15 aa, Homo sapiens
  CDR3 for alpha chain variable domain of TCR clone 320706 (TRAV25, TRAJ52)
CAGRPGGTSYGKLTF

SEQ ID NO: 641412 - protein, 16 aa, Homo sapiens
  CDR3 for beta chain variable domain of TCR clone 320706 (TRBV2, TRBJ2-1)
CASSVGGSLSYNEQFF

SEQ ID NO: 641413 - protein, 23 aa, Homo sapiens
  CDR3 for alpha chain variable domain of TCR clone 320707 (TRAV8-3, )
CAVVTTRIPDIQNPDPAVYQLRD

SEQ ID NO: 641414 - protein, 14 aa, Homo sapiens
  CDR3 for beta chain variable domain of TCR clone 320707 (TRBV11-2, TRBJ2-7)
CASSPSTTSDEQYF

SEQ ID NO: 641415 - protein, 10 aa, Homo sapiens
  CDR3 for alpha chain variable domain of TCR clone 320708 (TRAV1-2, TRAJ20)
CALNDYKLSF

SEQ ID NO: 641416 - protein, 15 aa, Homo sapiens
  CDR3 for beta chain variable domain of TCR clone 320708 (TRBV6-6, TRBJ2-7)
CASSYSYGGSYEQYF

SEQ ID NO: 641417 - protein, 14 aa, Homo sapiens
  CDR3 for alpha chain variable domain of TCR clone 320709 (TRAV13-1, TRAJ35)
CAASKGGFGNVLHC

SEQ ID NO: 641418 - protein, 16 aa, Homo sapiens
  CDR3 for beta chain variable domain of TCR clone 320709 (TRBV7-9, TRBJ1-2)
CASSLGFSSGEDGYTF

SEQ ID NO: 641419 - protein, 14 aa, Homo sapiens
  CDR3 for alpha chain variable domain of TCR clone 320710 (TRAV17, TRAJ54)
CATDANQGAQKLGF

SEQ ID NO: 641420 - protein, 13 aa, Homo sapiens
  CDR3 for beta chain variable domain of TCR clone 320710 (TRBV7-3, TRBJ1-1)
CASSQDWGAEAFF

SEQ ID NO: 641421 - protein, 16 aa, Homo sapiens
  CDR3 for alpha chain variable domain of TCR clone 320711 (TRAV12-1, TRAJ12)
CVVNTLLRDSSYKLIF

SEQ ID NO: 641422 - protein, 13 aa, Homo sapiens
  CDR3 for beta chain variable domain of TCR clone 320711 (TRBV11-2, TRBJ2-1)
CASSSEAYNEQFF

SEQ ID NO: 641423 - protein, 13 aa, Homo sapiens
  CDR3 for alpha chain variable domain of TCR clone 320712 (TRAV2, TRAJ15)
CAVASQAGTALIF

SEQ ID NO: 641424 - protein, 14 aa, Homo sapiens
  CDR3 for beta chain variable domain of TCR clone 320712 (TRBV19, TRBJ1-5)
CASSKMTGPQPQHF

SEQ ID NO: 641425 - protein, 15 aa, Homo sapiens
  CDR3 for alpha chain variable domain of TCR clone 320713 (TRAV8-6, TRAJ38)
CAVSSNAGNNRKRIW

SEQ ID NO: 641426 - protein, 15 aa, Homo sapiens
  CDR3 for beta chain variable domain of TCR clone 320713 (TRBV6-4, TRBJ2-1)
CASSSGTSGYNEQFF

SEQ ID NO: 641427 - protein, 16 aa, Homo sapiens
  CDR3 for alpha chain variable domain of TCR clone 320714 (TRAV26-2, TRAJ45)
CTTASPIGGCADGLTF

SEQ ID NO: 641428 - protein, 20 aa, Homo sapiens
  CDR3 for beta chain variable domain of TCR clone 320714 (TRBV28, TRBJ2-1)
CASTPIGRSPGLAGGNEQFF

SEQ ID NO: 641429 - protein, 16 aa, Homo sapiens
  CDR3 for alpha chain variable domain of TCR clone 320715 (TRAV8-4, TRAJ9)
CAVTFNTGGFKNYLWS

SEQ ID NO: 641430 - protein, 16 aa, Homo sapiens
  CDR3 for beta chain variable domain of TCR clone 320715 (TRBV2, TRBJ2-1)
CASSVGGSLSYNEQFF

SEQ ID NO: 641431 - protein, 13 aa, Homo sapiens
  CDR3 for alpha chain variable domain of TCR clone 320716 (TRAV13-1, TRAJ6)
RARRSGGSYIPTF

SEQ ID NO: 641432 - protein, 17 aa, Homo sapiens
  CDR3 for beta chain variable domain of TCR clone 320716 (TRBV7-8, TRBJ2-1)
CASSPPTGTLSYNEQFF

SEQ ID NO: 641433 - protein, 14 aa, Homo sapiens
  CDR3 for alpha chain variable domain of TCR clone 320717 (TRAV8-2, TRAJ37)
CVVSISGNTGKLIF

SEQ ID NO: 641434 - protein, 14 aa, Homo sapiens
  CDR3 for beta chain variable domain of TCR clone 320717 (TRBV7-9, TRBJ2-1)
CASSPRDSLYEQFF

SEQ ID NO: 641435 - protein, 14 aa, Homo sapiens
  CDR3 for alpha chain variable domain of TCR clone 320718 (TRAV8-4, TRAJ39)
CAVSLNNAGNMLTF

SEQ ID NO: 641436 - protein, 19 aa, Homo sapiens
  CDR3 for beta chain variable domain of TCR clone 320718 (TRBV25-1, TRBJ2-2)
CAILVYRVDRGRKTGELFF

SEQ ID NO: 641437 - protein, 14 aa, Homo sapiens
  CDR3 for alpha chain variable domain of TCR clone 320719 (TRAV8-6, TRAJ30)
CAVRPMNRDDKIIF

SEQ ID NO: 641438 - protein, 17 aa, Homo sapiens
  CDR3 for beta chain variable domain of TCR clone 320719 (TRBV7-8, TRBJ2-6)
CASSAGTGGAGANVLTF

SEQ ID NO: 641439 - protein, 13 aa, Homo sapiens
  CDR3 for alpha chain variable domain of TCR clone 320720 (TRAV24, TRAJ42)
CAFSTGSQGNLIF

SEQ ID NO: 641440 - protein, 13 aa, Homo sapiens
  CDR3 for beta chain variable domain of TCR clone 320720 (TRBV4-1, TRBJ2-1)
CASSQAGGDEQFF

SEQ ID NO: 641441 - protein, 13 aa, Homo sapiens
  CDR3 for alpha chain variable domain of TCR clone 320721 (TRAV12-3, TRAJ9)
CAMRNTGGFKTIF

SEQ ID NO: 641442 - protein, 14 aa, Homo sapiens
  CDR3 for beta chain variable domain of TCR clone 320721 (TRBV11-2, TRBJ2-7)
CASSSTGEGFEQYF

SEQ ID NO: 641443 - protein, 16 aa, Homo sapiens
  CDR3 for alpha chain variable domain of TCR clone 320722 (TRAV26-1, TRAJ32)
CIVRTNYGGATNKLIF

SEQ ID NO: 641444 - protein, 16 aa, Homo sapiens
  CDR3 for beta chain variable domain of TCR clone 320722 (TRBV19, TRBJ2-2)
CASSPSGGLNTGELFF

SEQ ID NO: 641445 - protein, 18 aa, Homo sapiens
  CDR3 for alpha chain variable domain of TCR clone 320723 (TRAV21, TRAJ52)
CAVRPSPAGGTSYGKLTF

SEQ ID NO: 641446 - protein, 13 aa, Homo sapiens
  CDR3 for beta chain variable domain of TCR clone 320723 (TRBV2, TRBJ1-5)
CTTAGPGNQPQHF

SEQ ID NO: 641447 - protein, 18 aa, Homo sapiens
  CDR3 for alpha chain variable domain of TCR clone 320724 (TRAV8-4, TRAJ52)
CAVTRANAGGTSYGTLIF

SEQ ID NO: 641448 - protein, 12 aa, Homo sapiens
  CDR3 for beta chain variable domain of TCR clone 320724 (TRBV14, TRBJ2-5)
CASSQLKETQYF

SEQ ID NO: 641449 - protein, 17 aa, Homo sapiens
  CDR3 for alpha chain variable domain of TCR clone 320725 (TRAV3, TRAJ12)
CAVRDGGRMDSSYILIF

SEQ ID NO: 641450 - protein, 15 aa, Homo sapiens
  CDR3 for beta chain variable domain of TCR clone 320725 (TRBV4-1, TRBJ1-4)
CASSDTGGTNEKLFF

SEQ ID NO: 641451 - protein, 18 aa, Homo sapiens
  CDR3 for alpha chain variable domain of TCR clone 320726 (TRAV26-2, TRAJ54)
CILRDGEVGIQGAQKLVF

SEQ ID NO: 641452 - protein, 17 aa, Homo sapiens
  CDR3 for beta chain variable domain of TCR clone 320726 (TRBV20-1, TRBJ1-5)
CSASLSPGQGGNQPQHF

SEQ ID NO: 641453 - protein, 13 aa, Homo sapiens
  CDR3 for alpha chain variable domain of TCR clone 320727 (TRAV20, TRAJ54)
CAVQAGGAQKLVF

SEQ ID NO: 641454 - protein, 14 aa, Homo sapiens
  CDR3 for beta chain variable domain of TCR clone 320727 (TRBV20-1, TRBJ2-7)
CSAKTGTGVYEQYF

SEQ ID NO: 641455 - protein, 13 aa, Homo sapiens
  CDR3 for alpha chain variable domain of TCR clone 320728 (TRAV17, TRAJ9)
CATFLTGGFKTIF

SEQ ID NO: 641456 - protein, 16 aa, Homo sapiens
  CDR3 for beta chain variable domain of TCR clone 320728 (TRBV5-7, TRBJ1-4)
CASSPSGGLKTEKLCF

SEQ ID NO: 641457 - protein, 12 aa, Homo sapiens
  CDR3 for alpha chain variable domain of TCR clone 320729 (TRAV13-1, TRAJ42)
VNYGGSQGNLIF

SEQ ID NO: 641458 - protein, 15 aa, Homo sapiens
  CDR3 for beta chain variable domain of TCR clone 320729 (TRBV20-1, TRBJ2-1)
CNASSAGSSDNEQFF

SEQ ID NO: 641459 - protein, 16 aa, Homo sapiens
  CDR3 for alpha chain variable domain of TCR clone 320730 (TRAV13-1, TRAJ48)
CAASIFGNFGNEKLTF

SEQ ID NO: 641460 - protein, 17 aa, Homo sapiens
  CDR3 for beta chain variable domain of TCR clone 320730 (TRBV18, TRBJ2-3)
CASSSRGPASSTDTQYF

SEQ ID NO: 641461 - protein, 13 aa, Homo sapiens
  CDR3 for alpha chain variable domain of TCR clone 320731 (TRAV12-3, TRAJ33)
CAMSVNSNYQLIW

SEQ ID NO: 641462 - protein, 16 aa, Homo sapiens
  CDR3 for beta chain variable domain of TCR clone 320731 (TRBV19, TRBJ2-1)
CASSKAGPSSYNEQFF

SEQ ID NO: 641463 - protein, 11 aa, Homo sapiens
  CDR3 for alpha chain variable domain of TCR clone 320732 (TRAV12-2, TRAJ43)
CASPIGNDVRF

SEQ ID NO: 641464 - protein, 13 aa, Homo sapiens
  CDR3 for beta chain variable domain of TCR clone 320732 (TRBV7-3, TRBJ1-2)
CASSLKRGYGYTF

SEQ ID NO: 641465 - protein, 12 aa, Homo sapiens
  CDR3 for alpha chain variable domain of TCR clone 320733 (TRAV1-1, TRAJ23)
CAVTNQGGKLIF

SEQ ID NO: 641466 - protein, 14 aa, Homo sapiens
  CDR3 for beta chain variable domain of TCR clone 320733 (TRBV11-2, TRBJ1-2)
CASSLGTANYGYTF

SEQ ID NO: 641467 - protein, 14 aa, Homo sapiens
  CDR3 for alpha chain variable domain of TCR clone 320734 (TRAV1-2, TRAJ16)
CAVNRFSYGQKLLF

SEQ ID NO: 641468 - protein, 16 aa, Homo sapiens
  CDR3 for beta chain variable domain of TCR clone 320734 (TRBV12-4, TRBJ1-5)
CASSRPVGGSNQPQHF

SEQ ID NO: 641469 - protein, 10 aa, Homo sapiens
  CDR3 for alpha chain variable domain of TCR clone 320735 (TRAV12-2, TRAJ43)
CAGDDMRFGA

SEQ ID NO: 641470 - protein, 14 aa, Homo sapiens
  CDR3 for beta chain variable domain of TCR clone 320735 (TRBV19, TRBJ2-1)
CASPTFVLSGEQFF

SEQ ID NO: 641471 - protein, 15 aa, Homo sapiens
  CDR3 for alpha chain variable domain of TCR clone 320736 (TRAV38-1, TRAJ37)
CAFIFGSGNTGKLIF

SEQ ID NO: 641472 - protein, 14 aa, Homo sapiens
  CDR3 for beta chain variable domain of TCR clone 320736 (TRBV15, TRBJ1-1)
CATSRDLRVTEAFF

SEQ ID NO: 641473 - protein, 17 aa, Homo sapiens
  CDR3 for alpha chain variable domain of TCR clone 320737 (TRAV20, TRAJ57)
CAVQAIVAQGGSEKLVF

SEQ ID NO: 641474 - protein, 13 aa, Homo sapiens
  CDR3 for beta chain variable domain of TCR clone 320737 (TRBV20-1, TRBJ2-5)
CSASVGGGDTQYF

SEQ ID NO: 641475 - protein, 16 aa, Homo sapiens
  CDR3 for alpha chain variable domain of TCR clone 320738 (TRAV1-2, TRAJ10)
CAVRGALTGGGNKLTF

SEQ ID NO: 641476 - protein, 15 aa, Homo sapiens
  CDR3 for beta chain variable domain of TCR clone 320738 (TRBV5-1, TRBJ2-1)
CASSPPRAPYNEQFF

SEQ ID NO: 641477 - protein, 12 aa, Homo sapiens
  CDR3 for alpha chain variable domain of TCR clone 320739 (TRAV16, TRAJ12)
CALKDSSYKLIF

SEQ ID NO: 641478 - protein, 14 aa, Homo sapiens
  CDR3 for beta chain variable domain of TCR clone 320739 (TRBV12-4, TRBJ1-5)
CASSPTGPRGGTYF

SEQ ID NO: 641479 - protein, 13 aa, Homo sapiens
  CDR3 for alpha chain variable domain of TCR clone 320740 (TRAV20, TRAJ34)
FAVSSYNTDKLIL

SEQ ID NO: 641480 - protein, 13 aa, Homo sapiens
  CDR3 for beta chain variable domain of TCR clone 320740 (TRBV7-9, TRBJ1-2)
CASSLKQNYGYTF

SEQ ID NO: 641481 - protein, 15 aa, Homo sapiens
  CDR3 for alpha chain variable domain of TCR clone 320741 (TRAV17, TRAJ56)
CATEPFTGPNSKLTF

SEQ ID NO: 641482 - protein, 14 aa, Homo sapiens
  CDR3 for beta chain variable domain of TCR clone 320741 (TRBV19, TRBJ2-1)
CASPTFVLSGEQFF

SEQ ID NO: 641483 - protein, 14 aa, Homo sapiens
  CDR3 for alpha chain variable domain of TCR clone 320742 (TRAV27, TRAJ12)
CAGARMDSSYKLIL

SEQ ID NO: 641484 - protein, 18 aa, Homo sapiens
  CDR3 for beta chain variable domain of TCR clone 320742 (TRBV10-3, TRBJ2-7)
CAISESGRPSGGRVEQYF

SEQ ID NO: 641485 - protein, 13 aa, Homo sapiens
  CDR3 for alpha chain variable domain of TCR clone 320743 (TRAV3, TRAJ30)
CAARDRGDDKIIF

SEQ ID NO: 641486 - protein, 16 aa, Homo sapiens
  CDR3 for beta chain variable domain of TCR clone 320743 (TRBV7-3, TRBJ2-2)
CVSSLKRGTLSGELFF

SEQ ID NO: 641487 - protein, 14 aa, Homo sapiens
  CDR3 for alpha chain variable domain of TCR clone 320744 (TRAV12-1, TRAJ13)
CVVIDSGGYRKVTF

SEQ ID NO: 641488 - protein, 12 aa, Homo sapiens
  CDR3 for beta chain variable domain of TCR clone 320744 (TRBV29-1, TRBJ2-3)
CSVTGGADTQYF

SEQ ID NO: 641489 - protein, 14 aa, Homo sapiens
  CDR3 for alpha chain variable domain of TCR clone 320745 (TRAV3, TRAJ8)
CAVSLNTGFQKLVF

SEQ ID NO: 641490 - protein, 19 aa, Homo sapiens
  CDR3 for beta chain variable domain of TCR clone 320745 (TRBV2, TRBJ2-7)
CASSDDETSGRANDYEQYF

SEQ ID NO: 641491 - protein, 17 aa, Homo sapiens
  CDR3 for alpha chain variable domain of TCR clone 320746 (TRAV17, TRAJ52)
CATDANAGGTSYGKLTF

SEQ ID NO: 641492 - protein, 17 aa, Homo sapiens
  CDR3 for beta chain variable domain of TCR clone 320746 (TRBV20-1, TRBJ2-1)
CSARSPSGGPPTMSSSS

SEQ ID NO: 641493 - protein, 16 aa, Homo sapiens
  CDR3 for alpha chain variable domain of TCR clone 320747 (TRAV17, TRAJ52)
CATSNAGGTSSGKLTF

SEQ ID NO: 641494 - protein, 15 aa, Homo sapiens
  CDR3 for beta chain variable domain of TCR clone 320747 (TRBV11-2, TRBJ2-1)
CASSRNRGLMYEQFF

SEQ ID NO: 641495 - protein, 14 aa, Homo sapiens
  CDR3 for alpha chain variable domain of TCR clone 320748 (TRAV26-1, TRAJ44)
CISPLPGTASKLTF

SEQ ID NO: 641496 - protein, 16 aa, Homo sapiens
  CDR3 for beta chain variable domain of TCR clone 320748 (TRBV19, TRBJ2-1)
CASSKAGPSSYNAQFF

SEQ ID NO: 641497 - protein, 14 aa, Homo sapiens
  CDR3 for alpha chain variable domain of TCR clone 320749 (TRAV1-2, TRAJ16)
CAVNRFSDGQKLLF

SEQ ID NO: 641498 - protein, 14 aa, Homo sapiens
  CDR3 for beta chain variable domain of TCR clone 320749 (TRBV11-2, TRBJ1-3)
CASSLTQGRNTIYF

SEQ ID NO: 641499 - protein, 13 aa, Homo sapiens
  CDR3 for alpha chain variable domain of TCR clone 320750 (TRAV12-2, TRAJ18)
CAVRGSTLGRLYF

SEQ ID NO: 641500 - protein, 14 aa, Homo sapiens
  CDR3 for beta chain variable domain of TCR clone 320750 (TRBV7-2, TRBJ2-7)
CASSLPPGQGPQYF

SEQ ID NO: 641501 - protein, 14 aa, Homo sapiens
  CDR3 for alpha chain variable domain of TCR clone 320751 (TRAV35, TRAJ40)
CAGSTTSGTYKYIF

SEQ ID NO: 641502 - protein, 14 aa, Homo sapiens
  CDR3 for beta chain variable domain of TCR clone 320751 (TRBV12-4, TRBJ2-7)
CASSPAGLKYEQYF

SEQ ID NO: 641503 - protein, 13 aa, Homo sapiens
  CDR3 for alpha chain variable domain of TCR clone 320752 (TRAV34, TRAJ22)
CGAGAGSARHLTF

SEQ ID NO: 641504 - protein, 16 aa, Homo sapiens
  CDR3 for beta chain variable domain of TCR clone 320752 (TRBV7-3, TRBJ2-1)
CASSKPLAGGYNEQFF

SEQ ID NO: 641505 - protein, 15 aa, Homo sapiens
  CDR3 for alpha chain variable domain of TCR clone 320753 (TRAV12-2, TRAJ22)
CAVSFRVHPGPPIVS

SEQ ID NO: 641506 - protein, 13 aa, Homo sapiens
  CDR3 for beta chain variable domain of TCR clone 320753 (TRBV12-4, TRBJ1-2)
CASSLDSNYGYTF

SEQ ID NO: 641507 - protein, 14 aa, Homo sapiens
  CDR3 for alpha chain variable domain of TCR clone 320754 (TRAV22, TRAJ6)
CAGVGPGGSYIPTF

SEQ ID NO: 641508 - protein, 13 aa, Homo sapiens
  CDR3 for beta chain variable domain of TCR clone 320754 (TRBV12-4, TRBJ1-1)
CASSPGTGFEAFF

SEQ ID NO: 641509 - protein, 14 aa, Homo sapiens
  CDR3 for alpha chain variable domain of TCR clone 320755 (TRAV1-2, TRAJ6)
CAVRSSGGSYIPTF

SEQ ID NO: 641510 - protein, 18 aa, Homo sapiens
  CDR3 for beta chain variable domain of TCR clone 320755 (TRBV6-6, TRBJ1-3)
CASSYSKWDSISGNTIYF

SEQ ID NO: 641511 - protein, 14 aa, Homo sapiens
  CDR3 for alpha chain variable domain of TCR clone 320756 (TRAV9-2, TRAJ39)
CALYIYNAGNMLTF

SEQ ID NO: 641512 - protein, 16 aa, Homo sapiens
  CDR3 for beta chain variable domain of TCR clone 320756 (TRBV19, TRBJ2-2)
CASRSPGTGAIGELFF

SEQ ID NO: 641513 - protein, 15 aa, Homo sapiens
  CDR3 for alpha chain variable domain of TCR clone 320757 (TRAV3, TRAJ36)
CAVRASQTGANNLFF

SEQ ID NO: 641514 - protein, 17 aa, Homo sapiens
  CDR3 for beta chain variable domain of TCR clone 320757 (TRBV11-2, TRBJ2-3)
CQQLRGASRGAPNTQYF

SEQ ID NO: 641515 - protein, 14 aa, Homo sapiens
  CDR3 for alpha chain variable domain of TCR clone 320758 (TRAV12-2, TRAJ9)
CAVNMECGGFKTIF

SEQ ID NO: 641516 - protein, 14 aa, Homo sapiens
  CDR3 for beta chain variable domain of TCR clone 320758 (TRBV2, TRBJ2-5)
CASSEVLAQETQYF

SEQ ID NO: 641517 - protein, 17 aa, Homo sapiens
  CDR3 for alpha chain variable domain of TCR clone 320759 (TRAV1-1, TRAJ10)
EASNTVILTGGGNKLTF

SEQ ID NO: 641518 - protein, 20 aa, Homo sapiens
  CDR3 for beta chain variable domain of TCR clone 320759 (TRBV7-8, TRBJ2-2)
CASSHLFPGPTIHITGELFF

SEQ ID NO: 641519 - protein, 16 aa, Homo sapiens
  CDR3 for alpha chain variable domain of TCR clone 320760 (TRAV12-3, TRAJ53)
CAMSPGSGGSNYKLTF

SEQ ID NO: 641520 - protein, 14 aa, Homo sapiens
  CDR3 for beta chain variable domain of TCR clone 320760 (TRBV23-1, TRBJ2-5)
CASSFLRSQETQYF

SEQ ID NO: 641521 - protein, 15 aa, Homo sapiens
  CDR3 for alpha chain variable domain of TCR clone 320761 (TRAV27, TRAJ38)
CAARRNDGNNRKLIW

SEQ ID NO: 641522 - protein, 14 aa, Homo sapiens
  CDR3 for beta chain variable domain of TCR clone 320761 (TRBV7-8, TRBJ2-3)
CASSLEAGTDTQYF

SEQ ID NO: 641523 - protein, 17 aa, Homo sapiens
  CDR3 for alpha chain variable domain of TCR clone 320762 (TRAV3, TRAJ6)
CAVRDGPRAGGSYIPTF

SEQ ID NO: 641524 - protein, 14 aa, Homo sapiens
  CDR3 for beta chain variable domain of TCR clone 320762 (TRBV3-1, TRBJ2-1)
CASNHGTRSNEQFF

SEQ ID NO: 641525 - protein, 13 aa, Homo sapiens
  CDR3 for alpha chain variable domain of TCR clone 320763 (TRAV3, TRAJ20)
CAVRLSNDYKLSF

SEQ ID NO: 641526 - protein, 16 aa, Homo sapiens
  CDR3 for beta chain variable domain of TCR clone 320763 (TRBV2, TRBJ2-1)
CASSVGGSLSYNEQFF

SEQ ID NO: 641527 - protein, 14 aa, Homo sapiens
  CDR3 for alpha chain variable domain of TCR clone 320764 (TRAV17, TRAJ54)
CATDANQGAQKLVF

SEQ ID NO: 641528 - protein, 13 aa, Homo sapiens
  CDR3 for beta chain variable domain of TCR clone 320764 (TRBV19, TRBJ2-1)
CASSMYRVNEQFF

SEQ ID NO: 641529 - protein, 15 aa, Homo sapiens
  CDR3 for alpha chain variable domain of TCR clone 320765 (TRAV26-1, TRAJ27)
CIVRVLTPMQANQTL

SEQ ID NO: 641530 - protein, 13 aa, Homo sapiens
  CDR3 for beta chain variable domain of TCR clone 320765 (TRBV20-1, TRBJ2-7)
CSATHTSGYEQYF

SEQ ID NO: 641531 - protein, 13 aa, Homo sapiens
  CDR3 for alpha chain variable domain of TCR clone 320766 (TRAV3, TRAJ29)
CAVRGIIDTALVF

SEQ ID NO: 641532 - protein, 14 aa, Homo sapiens
  CDR3 for beta chain variable domain of TCR clone 320766 (TRBV27, TRBJ2-1)
CASSATGGYNEQFF

SEQ ID NO: 641533 - protein, 14 aa, Homo sapiens
  CDR3 for alpha chain variable domain of TCR clone 320767 (TRAV12-2, TRAJ4)
CAADLSGGYNKLIF

SEQ ID NO: 641534 - protein, 13 aa, Homo sapiens
  CDR3 for beta chain variable domain of TCR clone 320767 (TRBV7-9, TRBJ1-2)
CASSLKQNYGYTF

SEQ ID NO: 641535 - protein, 12 aa, Homo sapiens
  CDR3 for alpha chain variable domain of TCR clone 320768 (TRAV12-3, TRAJ17)
CAMTLTGNKLTF

SEQ ID NO: 641536 - protein, 14 aa, Homo sapiens
  CDR3 for beta chain variable domain of TCR clone 320768 (TRBV7-9, TRBJ1-2)
CASKRGTLTYGYTF

SEQ ID NO: 641537 - protein, 14 aa, Homo sapiens
  CDR3 for alpha chain variable domain of TCR clone 320769 (TRAV38-1, TRAJ45)
CAYYSGGGADGLTF

SEQ ID NO: 641538 - protein, 14 aa, Homo sapiens
  CDR3 for beta chain variable domain of TCR clone 320769 (TRBV28, TRBJ2-7)
CARSLLGQGVEQYF

SEQ ID NO: 641539 - protein, 17 aa, Homo sapiens
  CDR3 for alpha chain variable domain of TCR clone 320770 (TRAV17, TRAJ28)
CATDPRRGGAGSYQLTF

SEQ ID NO: 641540 - protein, 16 aa, Homo sapiens
  CDR3 for beta chain variable domain of TCR clone 320770 (TRBV25-1, TRBJ1-1)
YASSGDRDRGRIEAFF

SEQ ID NO: 641541 - protein, 13 aa, Homo sapiens
  CDR3 for alpha chain variable domain of TCR clone 320771 (TRAV27, TRAJ40)
CAGPPSGTYKYIF

SEQ ID NO: 641542 - protein, 14 aa, Homo sapiens
  CDR3 for beta chain variable domain of TCR clone 320771 (TRBV23-1, TRBJ2-5)
CASSFLRSQETQYS

SEQ ID NO: 641543 - protein, 16 aa, Homo sapiens
  CDR3 for alpha chain variable domain of TCR clone 320772 (TRAV30, TRAJ24)
CGTEIVDADSWGKFQF

SEQ ID NO: 641544 - protein, 22 aa, Homo sapiens
  CDR3 for beta chain variable domain of TCR clone 320772 (TRBV11-2, TRBJ1-4)
CASSLDITRRGIPRKDNEKLFF

SEQ ID NO: 641545 - protein, 13 aa, Homo sapiens
  CDR3 for alpha chain variable domain of TCR clone 320773 (TRAV25, TRAJ35)
CAGGGGFGNVLHC

SEQ ID NO: 641546 - protein, 14 aa, Homo sapiens
  CDR3 for beta chain variable domain of TCR clone 320773 (TRBV6-1, TRBJ2-1)
CASAGGAIKNEQLF

SEQ ID NO: 641547 - protein, 18 aa, Homo sapiens
  CDR3 for alpha chain variable domain of TCR clone 320774 (TRAV13-1, TRAJ52)
CAAKNPNAGGTSYGKLTF

SEQ ID NO: 641548 - protein, 18 aa, Homo sapiens
  CDR3 for beta chain variable domain of TCR clone 320774 (TRBV12-4, TRBJ2-4)
CASSRTWAVDVAKNIQYF

SEQ ID NO: 641549 - protein, 14 aa, Homo sapiens
  CDR3 for alpha chain variable domain of TCR clone 320775 (TRAV12-2, TRAJ17)
CAVLFQAAGNKLTF

SEQ ID NO: 641550 - protein, 17 aa, Homo sapiens
  CDR3 for beta chain variable domain of TCR clone 320775 (TRBV20-1, TRBJ2-2)
CSASGSGQGGLTGELFF

SEQ ID NO: 641551 - protein, 13 aa, Homo sapiens
  CDR3 for alpha chain variable domain of TCR clone 320776 (TRAV17, TRAJ9)
SATDYTGGFKTIF

SEQ ID NO: 641552 - protein, 14 aa, Homo sapiens
  CDR3 for beta chain variable domain of TCR clone 320776 (TRBV19, TRBJ2-5)
CASSMTGQQENQYF

SEQ ID NO: 641553 - protein, 13 aa, Homo sapiens
  CDR3 for alpha chain variable domain of TCR clone 320777 (TRAV3, TRAJ21)
CAVREPDFNKFYF

SEQ ID NO: 641554 - protein, 13 aa, Homo sapiens
  CDR3 for beta chain variable domain of TCR clone 320777 (TRBV9, TRBJ2-1)
SANSPSGGNEQFF

SEQ ID NO: 641555 - protein, 16 aa, Homo sapiens
  CDR3 for alpha chain variable domain of TCR clone 320778 (TRAV3, TRAJ28)
CAVLPRSGAGSYQLTF

SEQ ID NO: 641556 - protein, 13 aa, Homo sapiens
  CDR3 for beta chain variable domain of TCR clone 320778 (TRBV12-4, TRBJ2-5)
CASRLAVQETHYF

SEQ ID NO: 641557 - protein, 13 aa, Homo sapiens
  CDR3 for alpha chain variable domain of TCR clone 320779 (TRAV21, TRAJ57)
CAVTQGGSEKLVF

SEQ ID NO: 641558 - protein, 15 aa, Homo sapiens
  CDR3 for beta chain variable domain of TCR clone 320779 (TRBV7-3, TRBJ2-1)
CQQLQTSGRYNEQFF

SEQ ID NO: 641559 - protein, 14 aa, Homo sapiens
  CDR3 for alpha chain variable domain of TCR clone 320780 (TRAV1-2, TRAJ16)
CAVNRFSDGQKLLF

SEQ ID NO: 641560 - protein, 15 aa, Homo sapiens
  CDR3 for beta chain variable domain of TCR clone 320780 (TRBV12-4, TRBJ2-5)
CASSPTTGLQETQYF

SEQ ID NO: 641561 - protein, 18 aa, Homo sapiens
  CDR3 for alpha chain variable domain of TCR clone 320781 (TRAV21, TRAJ52)
CAVRPSPAGGTSYGKLTF

SEQ ID NO: 641562 - protein, 15 aa, Homo sapiens
  CDR3 for beta chain variable domain of TCR clone 320781 (TRBV28, TRBJ2-4)
CAAGSGTLLMGIQYF

SEQ ID NO: 641563 - protein, 12 aa, Homo sapiens
  CDR3 for alpha chain variable domain of TCR clone 320782 (TRAV13-2, TRAJ58)
CAERRLDSRLTF

SEQ ID NO: 641564 - protein, 13 aa, Homo sapiens
  CDR3 for beta chain variable domain of TCR clone 320782 (TRBV7-3, TRBJ1-1)
CASSQDWGAEAFF

SEQ ID NO: 641565 - protein, 11 aa, Homo sapiens
  CDR3 for alpha chain variable domain of TCR clone 320783 (TRAV1-1, TRAJ23)
CAVRQGGELIF

SEQ ID NO: 641566 - protein, 14 aa, Homo sapiens
  CDR3 for beta chain variable domain of TCR clone 320783 (TRBV12-5, TRBJ2-5)
CASGSRTHQETQYF

SEQ ID NO: 641567 - protein, 15 aa, Homo sapiens
  CDR3 for alpha chain variable domain of TCR clone 320784 (TRAV23/DV6, TRAJ30)
CAASSQERRDDKIIF

SEQ ID NO: 641568 - protein, 13 aa, Homo sapiens
  CDR3 for beta chain variable domain of TCR clone 320784 (TRBV27, TRBJ1-1)
CASSLSIGAEAFF

SEQ ID NO: 641569 - protein, 14 aa, Homo sapiens
  CDR3 for alpha chain variable domain of TCR clone 320785 (TRAV8-2, TRAJ45)
WVVSAGGGADGLTF

SEQ ID NO: 641570 - protein, 12 aa, Homo sapiens
  CDR3 for beta chain variable domain of TCR clone 320785 (TRBV12-4, TRBJ2-1)
CASSLVRVEQFF

SEQ ID NO: 641571 - protein, 19 aa, Homo sapiens
  CDR3 for alpha chain variable domain of TCR clone 320786 (TRAV26-1, TRAJ28)
CIVRVAHAYSGAGSYQLTF

SEQ ID NO: 641572 - protein, 15 aa, Homo sapiens
  CDR3 for beta chain variable domain of TCR clone 320786 (TRBV25-1, TRBJ1-4)
CASSPGDSTNEKLFF

SEQ ID NO: 641573 - protein, 12 aa, Homo sapiens
  CDR3 for alpha chain variable domain of TCR clone 320787 (TRAV8-3, TRAJ26)
CAGYNYGQNFVF

SEQ ID NO: 641574 - protein, 15 aa, Homo sapiens
  CDR3 for beta chain variable domain of TCR clone 320787 (TRBV9, TRBJ2-1)
CASSLAGSSYNEQFC

SEQ ID NO: 641575 - protein, 12 aa, Homo sapiens
  CDR3 for alpha chain variable domain of TCR clone 320788 (TRAV9-2, TRAJ26)
CALRGYGQNFVF

SEQ ID NO: 641576 - protein, 15 aa, Homo sapiens
  CDR3 for beta chain variable domain of TCR clone 320788 (TRBV11-3, TRBJ2-1)
CASSRVADSYNEQFF

SEQ ID NO: 641577 - protein, 18 aa, Homo sapiens
  CDR3 for alpha chain variable domain of TCR clone 320789 (TRAV26-1, TRAJ23)
CIVRVGLEVWNQGGKLIF

SEQ ID NO: 641578 - protein, 15 aa, Homo sapiens
  CDR3 for beta chain variable domain of TCR clone 320789 (TRBV10-3, TRBJ2-3)
CAISDWDRYTDTQYF

SEQ ID NO: 641579 - protein, 13 aa, Homo sapiens
  CDR3 for alpha chain variable domain of TCR clone 320790 (TRAV12-1, TRAJ26)
CVVRRNYGQNFVF

SEQ ID NO: 641580 - protein, 15 aa, Homo sapiens
  CDR3 for beta chain variable domain of TCR clone 320790 (TRBV11-2, TRBJ2-1)
CASSLGTSGLNEQFF

SEQ ID NO: 641581 - protein, 13 aa, Homo sapiens
  CDR3 for alpha chain variable domain of TCR clone 320791 (TRAV8-4, TRAJ49)
CAVRTLTGNQFYF

SEQ ID NO: 641582 - protein, 16 aa, Homo sapiens
  CDR3 for beta chain variable domain of TCR clone 320791 (TRBV5-7, TRBJ2-5)
CAGTLAPAGGRETQYF

SEQ ID NO: 641583 - protein, 14 aa, Homo sapiens
  CDR3 for alpha chain variable domain of TCR clone 320792 (TRAV1-2, TRAJ8)
CAVREDTGFQKLVF

SEQ ID NO: 641584 - protein, 15 aa, Homo sapiens
  CDR3 for beta chain variable domain of TCR clone 320792 (TRBV7-8, TRBJ2-3)
CASSLSADSGGAQYF

SEQ ID NO: 641585 - protein, 13 aa, Homo sapiens
  CDR3 for alpha chain variable domain of TCR clone 320793 (TRAV1-2, TRAJ9)
CAALNTGGFKTIF

SEQ ID NO: 641586 - protein, 15 aa, Homo sapiens
  CDR3 for beta chain variable domain of TCR clone 320793 (TRBV7-9, TRBJ1-4)
CASSRTGGFNEKLFF

SEQ ID NO: 641587 - protein, 15 aa, Homo sapiens
  CDR3 for alpha chain variable domain of TCR clone 320794 (TRAV38-2/DV8, TRAJ48)
CSYRSGGFGNEKLTF

SEQ ID NO: 641588 - protein, 16 aa, Homo sapiens
  CDR3 for beta chain variable domain of TCR clone 320794 (TRBV28, TRBJ2-7)
CASSTWVATGDISQYF

SEQ ID NO: 641589 - protein, 14 aa, Homo sapiens
  CDR3 for alpha chain variable domain of TCR clone 320795 (TRAV20, TRAJ22)
CAVALGGSARQLTF

SEQ ID NO: 641590 - protein, 15 aa, Homo sapiens
  CDR3 for beta chain variable domain of TCR clone 320795 (TRBV15, TRBJ1-4)
CATSRDMGSYEKLFF

SEQ ID NO: 641591 - protein, 16 aa, Homo sapiens
  CDR3 for alpha chain variable domain of TCR clone 320796 (TRAV12-3, TRAJ53)
CAMSPGSGGSNYKLTF

SEQ ID NO: 641592 - protein, 12 aa, Homo sapiens
  CDR3 for beta chain variable domain of TCR clone 320796 (TRBV11-2, TRBJ2-2)
CASSRGGGELFF

SEQ ID NO: 641593 - protein, 17 aa, Homo sapiens
  CDR3 for alpha chain variable domain of TCR clone 320797 (TRAV36/DV7, TRAJ52)
CAVAQRAGGTSYGKLTF

SEQ ID NO: 641594 - protein, 14 aa, Homo sapiens
  CDR3 for beta chain variable domain of TCR clone 320797 (TRBV19, TRBJ2-1)
YASPTFVLSGEQFF

SEQ ID NO: 641595 - protein, 17 aa, Homo sapiens
  CDR3 for alpha chain variable domain of TCR clone 320798 (TRAV8-3, TRAJ44)
EASNTVIFTGGGNKLTF

SEQ ID NO: 641596 - protein, 16 aa, Homo sapiens
  CDR3 for beta chain variable domain of TCR clone 320798 (TRBV7-9, TRBJ1-2)
CASSLGFSSGEDGYTF

SEQ ID NO: 641597 - protein, 13 aa, Homo sapiens
  CDR3 for alpha chain variable domain of TCR clone 320799 (TRAV20, TRAJ9)
CSVPDTGGFKTIF

SEQ ID NO: 641598 - protein, 14 aa, Homo sapiens
  CDR3 for beta chain variable domain of TCR clone 320799 (TRBV7-2, TRBJ2-5)
CASSPRGSSETQYF

SEQ ID NO: 641599 - protein, 11 aa, Homo sapiens
  CDR3 for alpha chain variable domain of TCR clone 320800 (TRAV1-2, TRAJ20)
CAVANDYKLSF

SEQ ID NO: 641600 - protein, 16 aa, Homo sapiens
  CDR3 for beta chain variable domain of TCR clone 320800 (TRBV4-3, TRBJ1-6)
CASSQDPGVYNTPLHF

SEQ ID NO: 641601 - protein, 14 aa, Homo sapiens
  CDR3 for alpha chain variable domain of TCR clone 320801 (TRAV27, TRAJ42)
CAGGDGGSRGNLIF

SEQ ID NO: 641602 - protein, 14 aa, Homo sapiens
  CDR3 for beta chain variable domain of TCR clone 320801 (TRBV19, TRBJ1-2)
CASSRQGSSIGYTF

SEQ ID NO: 641603 - protein, 14 aa, Homo sapiens
  CDR3 for alpha chain variable domain of TCR clone 320802 (TRAV12-3, TRAJ10)
SHLPLTGGGNKLTF

SEQ ID NO: 641604 - protein, 13 aa, Homo sapiens
  CDR3 for beta chain variable domain of TCR clone 320802 (TRBV7-3, TRBJ2-1)
CASSSIDRGEQFF

SEQ ID NO: 641605 - protein, 19 aa, Homo sapiens
  CDR3 for alpha chain variable domain of TCR clone 320803 (TRAV8-3, TRAJ45)
STSVLWGSYSGGGADGLTF

SEQ ID NO: 641606 - protein, 11 aa, Homo sapiens
  CDR3 for beta chain variable domain of TCR clone 320803 (TRBV20-1, TRBJ2-5)
CSADRAETQYF

SEQ ID NO: 641607 - protein, 11 aa, Homo sapiens
  CDR3 for alpha chain variable domain of TCR clone 320804 (TRAV13-2, TRAJ31)
CAENMDARLMF

SEQ ID NO: 641608 - protein, 15 aa, Homo sapiens
  CDR3 for beta chain variable domain of TCR clone 320804 (TRBV7-8, TRBJ1-2)
CAGSLVRDGRLGYTF

SEQ ID NO: 641609 - protein, 13 aa, Homo sapiens
  CDR3 for alpha chain variable domain of TCR clone 320805 (TRAV21, TRAJ36)
CAVIKTGANNLFF

SEQ ID NO: 641610 - protein, 14 aa, Homo sapiens
  CDR3 for beta chain variable domain of TCR clone 320805 (TRBV18, TRBJ2-7)
CASSPRGGAYEQYF

SEQ ID NO: 641611 - protein, 11 aa, Homo sapiens
  CDR3 for alpha chain variable domain of TCR clone 320806 (TRAV1-2, TRAJ31)
CAVNNNARLMF

SEQ ID NO: 641612 - protein, 15 aa, Homo sapiens
  CDR3 for beta chain variable domain of TCR clone 320806 (TRBV28, TRBJ2-1)
CASRIIAGGRSEQFF

SEQ ID NO: 641613 - protein, 13 aa, Homo sapiens
  CDR3 for alpha chain variable domain of TCR clone 320807 (TRAV14/DV4, TRAJ4)
CAMKAGGYNKLIF

SEQ ID NO: 641614 - protein, 16 aa, Homo sapiens
  CDR3 for beta chain variable domain of TCR clone 320807 (TRBV27, TRBJ2-2)
CASSFRGLVRTGELFF

SEQ ID NO: 641615 - protein, 16 aa, Homo sapiens
  CDR3 for alpha chain variable domain of TCR clone 320808 (TRAV8-3, TRAJ18)
CAVGGRQRPNPGEAIL

SEQ ID NO: 641616 - protein, 12 aa, Homo sapiens
  CDR3 for beta chain variable domain of TCR clone 320808 (TRBV28, TRBJ2-6)
CAIQAGANVLTF

SEQ ID NO: 641617 - protein, 15 aa, Homo sapiens
  CDR3 for alpha chain variable domain of TCR clone 320809 (TRAV3, TRAJ20)
CAVRDIKLSDYKLSF

SEQ ID NO: 641618 - protein, 15 aa, Homo sapiens
  CDR3 for beta chain variable domain of TCR clone 320809 (TRBV28, TRBJ2-1)
CASSIIAGGRSEQFF

SEQ ID NO: 641619 - protein, 15 aa, Homo sapiens
  CDR3 for alpha chain variable domain of TCR clone 320810 (TRAV2, TRAJ15)
CAVEDREQAGTALIF

SEQ ID NO: 641620 - protein, 13 aa, Homo sapiens
  CDR3 for beta chain variable domain of TCR clone 320810 (TRBV11-2, TRBJ2-2)
CASGRDREEELFF

SEQ ID NO: 641621 - protein, 14 aa, Homo sapiens
  CDR3 for alpha chain variable domain of TCR clone 320811 (TRAV26-1, TRAJ39)
CIVRANNAGNMLTF

SEQ ID NO: 641622 - protein, 13 aa, Homo sapiens
  CDR3 for beta chain variable domain of TCR clone 320811 (TRBV7-3, TRBJ1-1)
CASSKDWGAEAFF

SEQ ID NO: 641623 - protein, 11 aa, Homo sapiens
  CDR3 for alpha chain variable domain of TCR clone 320812 (TRAV17, TRAJ9)
CGFTGGFKTIF

SEQ ID NO: 641624 - protein, 14 aa, Homo sapiens
  CDR3 for beta chain variable domain of TCR clone 320812 (TRBV7-9, TRBJ2-2)
CASSLVQDTGELFI

SEQ ID NO: 641625 - protein, 12 aa, Homo sapiens
  CDR3 for alpha chain variable domain of TCR clone 320813 (TRAV35, TRAJ30)
CAGLNRDDKIIF

SEQ ID NO: 641626 - protein, 15 aa, Homo sapiens
  CDR3 for beta chain variable domain of TCR clone 320813 (TRBV18, TRBJ2-3)
CASSTLAGETDTQYF

SEQ ID NO: 641627 - protein, 12 aa, Homo sapiens
  CDR3 for alpha chain variable domain of TCR clone 320814 (TRAV1-2, TRAJ29)
CAVPSGNTPLVF

SEQ ID NO: 641628 - protein, 21 aa, Homo sapiens
  CDR3 for beta chain variable domain of TCR clone 320814 (TRBV28, TRBJ1-5)
CASSLSGPGRGPRLRNQTQHF

SEQ ID NO: 641629 - protein, 17 aa, Homo sapiens
  CDR3 for alpha chain variable domain of TCR clone 320815 (TRAV20, TRAJ28)
CAVQGGYSGSGSYQLTF

SEQ ID NO: 641630 - protein, 15 aa, Homo sapiens
  CDR3 for beta chain variable domain of TCR clone 320815 (TRBV7-2, TRBJ2-7)
CASSLSSGRTYEQYF

SEQ ID NO: 641631 - protein, 16 aa, Homo sapiens
  CDR3 for alpha chain variable domain of TCR clone 320816 (TRAV1-1, TRAJ8)
CLLLLRGGHRLSETLF

SEQ ID NO: 641632 - protein, 15 aa, Homo sapiens
  CDR3 for beta chain variable domain of TCR clone 320816 (TRBV7-9, TRBJ1-4)
CASSRTGGFNEKLFF

SEQ ID NO: 641633 - protein, 15 aa, Homo sapiens
  CDR3 for alpha chain variable domain of TCR clone 320817 (TRAV21, TRAJ53)
CATLNSGGSNYKLTF

SEQ ID NO: 641634 - protein, 15 aa, Homo sapiens
  CDR3 for beta chain variable domain of TCR clone 320817 (TRBV5-1, TRBJ2-3)
CSSSYTSGSTDTQYF

SEQ ID NO: 641635 - protein, 17 aa, Homo sapiens
  CDR3 for alpha chain variable domain of TCR clone 320818 (TRAV27, TRAJ26)
CAGARAPLDNYGQNFVF

SEQ ID NO: 641636 - protein, 15 aa, Homo sapiens
  CDR3 for beta chain variable domain of TCR clone 320818 (TRBV11-2, TRBJ2-5)
CAGSPRSGGLETQYF

SEQ ID NO: 641637 - protein, 15 aa, Homo sapiens
  CDR3 for alpha chain variable domain of TCR clone 320819 (TRAV17, TRAJ52)
CATEAGGTSYGKLTF

SEQ ID NO: 641638 - protein, 14 aa, Homo sapiens
  CDR3 for beta chain variable domain of TCR clone 320819 (TRBV28, TRBJ1-5)
CASILGVLVKPQHF

SEQ ID NO: 641639 - protein, 17 aa, Homo sapiens
  CDR3 for alpha chain variable domain of TCR clone 320820 (TRAV3, TRAJ6)
YAVRDGSRVGGSYIPTF

SEQ ID NO: 641640 - protein, 12 aa, Homo sapiens
  CDR3 for beta chain variable domain of TCR clone 320820 (TRBV11-2, TRBJ2-2)
CASSLGGGELFF

SEQ ID NO: 641641 - protein, 14 aa, Homo sapiens
  CDR3 for alpha chain variable domain of TCR clone 320821 (TRAV12-1, TRAJ9)
CLVNRRTGGFKTIF

SEQ ID NO: 641642 - protein, 14 aa, Homo sapiens
  CDR3 for beta chain variable domain of TCR clone 320821 (TRBV7-6, TRBJ2-3)
CASSLGTVTDTQYF

SEQ ID NO: 641643 - protein, 11 aa, Homo sapiens
  CDR3 for alpha chain variable domain of TCR clone 320822 (TRAV1-2, TRAJ31)
CAVNNNARLMF

SEQ ID NO: 641644 - protein, 12 aa, Homo sapiens
  CDR3 for beta chain variable domain of TCR clone 320822 (TRBV28, TRBJ2-7)
CASTGNHYEQYF

SEQ ID NO: 641645 - protein, 17 aa, Homo sapiens
  CDR3 for alpha chain variable domain of TCR clone 320823 (TRAV23/DV6, TRAJ12)
CAAIDLGAVDSSYKLIF

SEQ ID NO: 641646 - protein, 12 aa, Homo sapiens
  CDR3 for beta chain variable domain of TCR clone 320823 (TRBV10-3, TRBJ2-2)
CAIRENTGELFF

SEQ ID NO: 641647 - protein, 13 aa, Homo sapiens
  CDR3 for alpha chain variable domain of TCR clone 320824 (TRAV13-1, TRAJ6)
CAASKGGSYIPTF

SEQ ID NO: 641648 - protein, 13 aa, Homo sapiens
  CDR3 for beta chain variable domain of TCR clone 320824 (TRBV7-9, TRBJ2-5)
CASLPAGRETQYF

SEQ ID NO: 641649 - protein, 18 aa, Homo sapiens
  CDR3 for alpha chain variable domain of TCR clone 320825 (TRAV9-2, TRAJ52)
CALIRHNAGGTSYGKLTF

SEQ ID NO: 641650 - protein, 13 aa, Homo sapiens
  CDR3 for beta chain variable domain of TCR clone 320825 (TRBV7-9, TRBJ1-2)
CASSLRQNYGYTF

SEQ ID NO: 641651 - protein, 12 aa, Homo sapiens
  CDR3 for alpha chain variable domain of TCR clone 320826 (TRAV23/DV6, TRAJ12)
CAVMDSSYKLIF

SEQ ID NO: 641652 - protein, 15 aa, Homo sapiens
  CDR3 for beta chain variable domain of TCR clone 320826 (TRBV7-9, TRBJ1-6)
CASSSPGRGNSPLHF

SEQ ID NO: 641653 - protein, 14 aa, Homo sapiens
  CDR3 for alpha chain variable domain of TCR clone 320827 (TRAV16, TRAJ32)
CALKSGGATNKLIF

SEQ ID NO: 641654 - protein, 17 aa, Homo sapiens
  CDR3 for beta chain variable domain of TCR clone 320827 (TRBV20-1, TRBJ2-1)
CSASSSGLAGSYNEQFV

SEQ ID NO: 641655 - protein, 12 aa, Homo sapiens
  CDR3 for alpha chain variable domain of TCR clone 320828 (TRAV21, TRAJ39)
CAADNAGNMLTF

SEQ ID NO: 641656 - protein, 12 aa, Homo sapiens
  CDR3 for beta chain variable domain of TCR clone 320828 (TRBV5-4, TRBJ2-7)
CASSGAGQGENF

SEQ ID NO: 641657 - protein, 14 aa, Homo sapiens
  CDR3 for alpha chain variable domain of TCR clone 320829 (TRAV13-2, TRAJ17)
CAENSKAAGNKLTF

SEQ ID NO: 641658 - protein, 12 aa, Homo sapiens
  CDR3 for beta chain variable domain of TCR clone 320829 (TRBV12-4, TRBJ1-2)
CASSFIWLHLRF

SEQ ID NO: 641659 - protein, 13 aa, Homo sapiens
  CDR3 for alpha chain variable domain of TCR clone 320830 (TRAV35, TRAJ42)
CAGFPGSQGNLIF

SEQ ID NO: 641660 - protein, 14 aa, Homo sapiens
  CDR3 for beta chain variable domain of TCR clone 320830 (TRBV4-1, TRBJ2-2)
CASSQVVNTGELFF

SEQ ID NO: 641661 - protein, 14 aa, Homo sapiens
  CDR3 for alpha chain variable domain of TCR clone 320831 (TRAV13-1, TRAJ45)
CAAIGGGGADGLTF

SEQ ID NO: 641662 - protein, 16 aa, Homo sapiens
  CDR3 for beta chain variable domain of TCR clone 320831 (TRBV7-2, TRBJ1-1)
CASSLGAGSTNTEAFF

SEQ ID NO: 641663 - protein, 13 aa, Homo sapiens
  CDR3 for alpha chain variable domain of TCR clone 320832 (TRAV13-2, TRAJ13)
CAERPGGYQKVTF

SEQ ID NO: 641664 - protein, 15 aa, Homo sapiens
  CDR3 for beta chain variable domain of TCR clone 320832 (TRBV7-9, TRBJ1-5)
CASSQGHQPNQPQHF

SEQ ID NO: 641665 - protein, 12 aa, Homo sapiens
  CDR3 for alpha chain variable domain of TCR clone 320833 (TRAV13-1, TRAJ21)
CAAKEGFNKFYF

SEQ ID NO: 641666 - protein, 17 aa, Homo sapiens
  CDR3 for beta chain variable domain of TCR clone 320833 (TRBV20-1, TRBJ2-1)
CSASSSGLAGSYYEQFF

SEQ ID NO: 641667 - protein, 14 aa, Homo sapiens
  CDR3 for alpha chain variable domain of TCR clone 320834 (TRAV12-2, TRAJ4)
CAEDLSGGYNQLIL

SEQ ID NO: 641668 - protein, 13 aa, Homo sapiens
  CDR3 for beta chain variable domain of TCR clone 320834 (TRBV7-9, TRBJ1-2)
CASSLKQNYGDTF

SEQ ID NO: 641669 - protein, 14 aa, Homo sapiens
  CDR3 for alpha chain variable domain of TCR clone 320835 (TRAV30, TRAJ33)
CGTVAPRSNYQLIW

SEQ ID NO: 641670 - protein, 14 aa, Homo sapiens
  CDR3 for beta chain variable domain of TCR clone 320835 (TRBV12-4, TRBJ2-7)
CASTFGLSTYEQYF

SEQ ID NO: 641671 - protein, 22 aa, Homo sapiens
  CDR3 for alpha chain variable domain of TCR clone 320836 (TRAV8-2, TRAJ45)
HLTKPSAHMSDAAEYSDDGLTF

SEQ ID NO: 641672 - protein, 13 aa, Homo sapiens
  CDR3 for beta chain variable domain of TCR clone 320836 (TRBV7-3, TRBJ2-1)
CASSPVAYNEQFF

SEQ ID NO: 641673 - protein, 14 aa, Homo sapiens
  CDR3 for alpha chain variable domain of TCR clone 320837 (TRAV1-2, TRAJ33)
CAVRAPDSNYQLIW

SEQ ID NO: 641674 - protein, 19 aa, Homo sapiens
  CDR3 for beta chain variable domain of TCR clone 320837 (TRBV2, TRBJ2-7)
CASSDDETSGRANDYEQYF

SEQ ID NO: 641675 - protein, 15 aa, Homo sapiens
  CDR3 for alpha chain variable domain of TCR clone 320838 (TRAV26-1, TRAJ40)
CIVRAVPSGAYKYIF

SEQ ID NO: 641676 - protein, 14 aa, Homo sapiens
  CDR3 for beta chain variable domain of TCR clone 320838 (TRBV19, TRBJ2-1)
CASKDPGLANEQFF

SEQ ID NO: 641677 - protein, 12 aa, Homo sapiens
  CDR3 for alpha chain variable domain of TCR clone 320839 (TRAV12-3, TRAJ17)
CAMTLSGNKLTF

SEQ ID NO: 641678 - protein, 13 aa, Homo sapiens
  CDR3 for beta chain variable domain of TCR clone 320839 (TRBV10-3, TRBJ2-7)
CASKLAVNYEQYF

SEQ ID NO: 641679 - protein, 11 aa, Homo sapiens
  CDR3 for alpha chain variable domain of TCR clone 320840 (TRAV2, TRAJ34)
CAHYNTDKLIF

SEQ ID NO: 641680 - protein, 16 aa, Homo sapiens
  CDR3 for beta chain variable domain of TCR clone 320840 (TRBV4-1, TRBJ2-3)
CASSQRAGGLTDTQYF

SEQ ID NO: 641681 - protein, 12 aa, Homo sapiens
  CDR3 for alpha chain variable domain of TCR clone 320841 (TRAV16, TRAJ13)
CITLRGYQKVTF

SEQ ID NO: 641682 - protein, 15 aa, Homo sapiens
  CDR3 for beta chain variable domain of TCR clone 320841 (TRBV6-5, TRBJ2-1)
CASSYDAGAGNEQFF

SEQ ID NO: 641683 - protein, 12 aa, Homo sapiens
  CDR3 for alpha chain variable domain of TCR clone 320842 (TRAV16, TRAJ10)
CSRTGGGNKLTF

SEQ ID NO: 641684 - protein, 14 aa, Homo sapiens
  CDR3 for beta chain variable domain of TCR clone 320842 (TRBV19, TRBJ2-1)
CASPTFVLSGDQFF

SEQ ID NO: 641685 - protein, 11 aa, Homo sapiens
  CDR3 for alpha chain variable domain of TCR clone 320843 (TRAV12-1, TRAJ43)
CVEYDKNDMRF

SEQ ID NO: 641686 - protein, 14 aa, Homo sapiens
  CDR3 for beta chain variable domain of TCR clone 320843 (TRBV10-2, TRBJ2-1)
CASSEGTSEDEQFF

SEQ ID NO: 641687 - protein, 14 aa, Homo sapiens
  CDR3 for alpha chain variable domain of TCR clone 320844 (TRAV12-3, TRAJ10)
SHLPLTGGGNKLTF

SEQ ID NO: 641688 - protein, 14 aa, Homo sapiens
  CDR3 for beta chain variable domain of TCR clone 320844 (TRBV6-1, TRBJ1-3)
CASVQGGGGNTIFF

SEQ ID NO: 641689 - protein, 14 aa, Homo sapiens
  CDR3 for alpha chain variable domain of TCR clone 320845 (TRAV1-2, TRAJ8)
CAVREDTGFQKLVF

SEQ ID NO: 641690 - protein, 15 aa, Homo sapiens
  CDR3 for beta chain variable domain of TCR clone 320845 (TRBV7-3, TRBJ2-2)
CDSSETGQGTGELFF

SEQ ID NO: 641691 - protein, 15 aa, Homo sapiens
  CDR3 for alpha chain variable domain of TCR clone 320846 (TRAV25, TRAJ52)
CAGRPGGTSYGKLTF

SEQ ID NO: 641692 - protein, 14 aa, Homo sapiens
  CDR3 for beta chain variable domain of TCR clone 320846 (TRBV27, TRBJ2-5)
CASSSLKGWETQYF

SEQ ID NO: 641693 - protein, 13 aa, Homo sapiens
  CDR3 for alpha chain variable domain of TCR clone 320847 (TRAV35, TRAJ42)
CAGFPGSQGNLIF

SEQ ID NO: 641694 - protein, 15 aa, Homo sapiens
  CDR3 for beta chain variable domain of TCR clone 320847 (TRBV11-3, TRBJ2-3)
CAGLKDGREGDTQYF

SEQ ID NO: 641695 - protein, 13 aa, Homo sapiens
  CDR3 for alpha chain variable domain of TCR clone 320848 (TRAV16, TRAJ54)
CALMVQGAQKLVF

SEQ ID NO: 641696 - protein, 14 aa, Homo sapiens
  CDR3 for beta chain variable domain of TCR clone 320848 (TRBV19, TRBJ2-1)
CASPTFVLSGEQFF

SEQ ID NO: 641697 - protein, 16 aa, Homo sapiens
  CDR3 for alpha chain variable domain of TCR clone 320849 (TRAV8-3, TRAJ18)
CAVALDRGSTLGRLYF

SEQ ID NO: 641698 - protein, 15 aa, Homo sapiens
  CDR3 for beta chain variable domain of TCR clone 320849 (TRBV6-6, TRBJ2-5)
CASSPGGGLEETQYF

SEQ ID NO: 641699 - protein, 14 aa, Homo sapiens
  CDR3 for alpha chain variable domain of TCR clone 320850 (TRAV1-2, TRAJ8)
CAVREDTGFQKLVF

SEQ ID NO: 641700 - protein, 17 aa, Homo sapiens
  CDR3 for beta chain variable domain of TCR clone 320850 (TRBV3-1, TRBJ2-3)
RASSQGPLGAGTDTQYF

SEQ ID NO: 641701 - protein, 13 aa, Homo sapiens
  CDR3 for alpha chain variable domain of TCR clone 320851 (TRAV3, TRAJ20)
CCEAFCNDYKLSF

SEQ ID NO: 641702 - protein, 13 aa, Homo sapiens
  CDR3 for beta chain variable domain of TCR clone 320851 (TRBV11-2, TRBJ2-5)
CASSSTTQETQYF

SEQ ID NO: 641703 - protein, 16 aa, Homo sapiens
  CDR3 for alpha chain variable domain of TCR clone 320852 (TRAV21, TRAJ17)
CAVRPGEEAAGNKLTF

SEQ ID NO: 641704 - protein, 16 aa, Homo sapiens
  CDR3 for beta chain variable domain of TCR clone 320852 (TRBV2, TRBJ2-7)
CASSEPWTGPSYEQSF

SEQ ID NO: 641705 - protein, 14 aa, Homo sapiens
  CDR3 for alpha chain variable domain of TCR clone 320853 (TRAV8-2, TRAJ37)
CVVSISGNTGKLIF

SEQ ID NO: 641706 - protein, 17 aa, Homo sapiens
  CDR3 for beta chain variable domain of TCR clone 320853 (TRBV5-1, TRBJ2-7)
FAPAADNPGQIPYEQYF

SEQ ID NO: 641707 - protein, 16 aa, Homo sapiens
  CDR3 for alpha chain variable domain of TCR clone 320854 (TRAV17, TRAJ52)
CATGIIGGTSYGKLTF

SEQ ID NO: 641708 - protein, 13 aa, Homo sapiens
  CDR3 for beta chain variable domain of TCR clone 320854 (TRBV7-9, TRBJ1-2)
CASSLKQNYGYTF

SEQ ID NO: 641709 - protein, 14 aa, Homo sapiens
  CDR3 for alpha chain variable domain of TCR clone 320855 (TRAV13-1, TRAJ26)
CAAPKGPDGQNFVF

SEQ ID NO: 641710 - protein, 17 aa, Homo sapiens
  CDR3 for beta chain variable domain of TCR clone 320855 (TRBV28, TRBJ2-5)
CTSASSFRQGALETQYF

SEQ ID NO: 641711 - protein, 14 aa, Homo sapiens
  CDR3 for alpha chain variable domain of TCR clone 320856 (TRAV17, TRAJ16)
CATADFSDGQKLLF

SEQ ID NO: 641712 - protein, 14 aa, Homo sapiens
  CDR3 for beta chain variable domain of TCR clone 320856 (TRBV7-9, TRBJ2-5)
CASSLVGGEETQYF

SEQ ID NO: 641713 - protein, 14 aa, Homo sapiens
  CDR3 for alpha chain variable domain of TCR clone 320857 (TRAV13-1, TRAJ6)
CAASITGGSYIPTF

SEQ ID NO: 641714 - protein, 15 aa, Homo sapiens
  CDR3 for beta chain variable domain of TCR clone 320857 (TRBV5-1, TRBJ2-7)
CASSLDLTSSYEQYF

SEQ ID NO: 641715 - protein, 13 aa, Homo sapiens
  CDR3 for alpha chain variable domain of TCR clone 320858 (TRAV12-3, TRAJ4)
CAMTERGYNKLIF

SEQ ID NO: 641716 - protein, 17 aa, Homo sapiens
  CDR3 for beta chain variable domain of TCR clone 320858 (TRBV28, TRBJ2-3)
CASSLQVGPSSTDTQHF

SEQ ID NO: 641717 - protein, 16 aa, Homo sapiens
  CDR3 for alpha chain variable domain of TCR clone 320859 (TRAV16, TRAJ42)
CARKMNYGGSQGNLIF

SEQ ID NO: 641718 - protein, 15 aa, Homo sapiens
  CDR3 for beta chain variable domain of TCR clone 320859 (TRBV19, TRBJ2-1)
CASSRPGQNYNEQFF

SEQ ID NO: 641719 - protein, 16 aa, Homo sapiens
  CDR3 for alpha chain variable domain of TCR clone 320860 (TRAV30, TRAJ24)
CGTEIVDADSWGKFQF

SEQ ID NO: 641720 - protein, 20 aa, Homo sapiens
  CDR3 for beta chain variable domain of TCR clone 320860 (TRBV11-2, TRBJ2-7)
CASSPVGRERAGGPSYEQYF

SEQ ID NO: 641721 - protein, 15 aa, Homo sapiens
  CDR3 for alpha chain variable domain of TCR clone 320861 (TRAV3, TRAJ20)
WAVRDIKLSDYKRSV

SEQ ID NO: 641722 - protein, 15 aa, Homo sapiens
  CDR3 for beta chain variable domain of TCR clone 320861 (TRBV7-9, TRBJ1-6)
RASSSPGRGNSPLHF

SEQ ID NO: 641723 - protein, 14 aa, Homo sapiens
  CDR3 for alpha chain variable domain of TCR clone 320862 (TRAV13-1, TRAJ10)
CAASSTGGRSKLTF

SEQ ID NO: 641724 - protein, 11 aa, Homo sapiens
  CDR3 for beta chain variable domain of TCR clone 320862 (TRBV28, TRBJ2-7)
CASGPLPEQYF

SEQ ID NO: 641725 - protein, 15 aa, Homo sapiens
  CDR3 for alpha chain variable domain of TCR clone 320863 (TRAV23/DV6, TRAJ18)
CAASFRGSTLGRLYF

SEQ ID NO: 641726 - protein, 13 aa, Homo sapiens
  CDR3 for beta chain variable domain of TCR clone 320863 (TRBV28, TRBJ2-7)
CAILDRAGGEQYL

SEQ ID NO: 641727 - protein, 13 aa, Homo sapiens
  CDR3 for alpha chain variable domain of TCR clone 320864 (TRAV3, TRAJ20)
CAVRSLNDYKLSF

SEQ ID NO: 641728 - protein, 13 aa, Homo sapiens
  CDR3 for beta chain variable domain of TCR clone 320864 (TRBV7-3, TRBJ1-1)
RASSQDWGAEAFF

SEQ ID NO: 641729 - protein, 14 aa, Homo sapiens
  CDR3 for alpha chain variable domain of TCR clone 320865 (TRAV35, TRAJ13)
CAGRSPGGYQKLTF

SEQ ID NO: 641730 - protein, 14 aa, Homo sapiens
  CDR3 for beta chain variable domain of TCR clone 320865 (TRBV19, TRBJ2-2)
CASSMVGLSGELFF

SEQ ID NO: 641731 - protein, 12 aa, Homo sapiens
  CDR3 for alpha chain variable domain of TCR clone 320866 (TRAV12-1, TRAJ23)
CVVNIPGGKLIF

SEQ ID NO: 641732 - protein, 15 aa, Homo sapiens
  CDR3 for beta chain variable domain of TCR clone 320866 (TRBV7-2, TRBJ2-7)
CASSLVSSGSYEKYF

SEQ ID NO: 641733 - protein, 12 aa, Homo sapiens
  CDR3 for alpha chain variable domain of TCR clone 320867 (TRAV12-3, TRAJ17)
CAMTITGNKLTF

SEQ ID NO: 641734 - protein, 11 aa, Homo sapiens
  CDR3 for beta chain variable domain of TCR clone 320867 (TRBV28, TRBJ2-1)
CASRRVNEQFF

SEQ ID NO: 641735 - protein, 14 aa, Homo sapiens
  CDR3 for alpha chain variable domain of TCR clone 320868 (TRAV9-2, TRAJ39)
CALYIYNAGNMLTF

SEQ ID NO: 641736 - protein, 16 aa, Homo sapiens
  CDR3 for beta chain variable domain of TCR clone 320868 (TRBV18, TRBJ2-7)
CASSPMGNRRAHEQYF

SEQ ID NO: 641737 - protein, 15 aa, Homo sapiens
  CDR3 for alpha chain variable domain of TCR clone 320869 (TRAV26-1, TRAJ22)
CNVRVSFWFCKATDL

SEQ ID NO: 641738 - protein, 13 aa, Homo sapiens
  CDR3 for beta chain variable domain of TCR clone 320869 (TRBV7-9, TRBJ1-2)
CAGSLKQNYGYTF

SEQ ID NO: 641739 - protein, 14 aa, Homo sapiens
  CDR3 for alpha chain variable domain of TCR clone 320870 (TRAV23/DV6, TRAJ8)
CAASKATGFQKLVF

SEQ ID NO: 641740 - protein, 15 aa, Homo sapiens
  CDR3 for beta chain variable domain of TCR clone 320870 (TRBV28, TRBJ2-3)
CARSPDRRGANTQYF

SEQ ID NO: 641741 - protein, 17 aa, Homo sapiens
  CDR3 for alpha chain variable domain of TCR clone 320871 (TRAV4, TRAJ42)
RLVGVLNSGGSQGNLIF

SEQ ID NO: 641742 - protein, 12 aa, Homo sapiens
  CDR3 for beta chain variable domain of TCR clone 320871 (TRBV20-1, TRBJ2-1)
CSAQYTYNEQFF

SEQ ID NO: 641743 - protein, 14 aa, Homo sapiens
  CDR3 for alpha chain variable domain of TCR clone 320872 (TRAV8-4, TRAJ4)
CALSPSGGYNKLIF

SEQ ID NO: 641744 - protein, 15 aa, Homo sapiens
  CDR3 for beta chain variable domain of TCR clone 320872 (TRBV7-8, TRBJ2-3)
CASSLSADSGGAQYF

SEQ ID NO: 641745 - protein, 12 aa, Homo sapiens
  CDR3 for alpha chain variable domain of TCR clone 320873 (TRAV13-2, TRAJ23)
CAERHRGGRLIF

SEQ ID NO: 641746 - protein, 16 aa, Homo sapiens
  CDR3 for beta chain variable domain of TCR clone 320873 (TRBV20-1, TRBJ1-4)
CNAPGQGLLTNEKLFF

SEQ ID NO: 641747 - protein, 13 aa, Homo sapiens
  CDR3 for alpha chain variable domain of TCR clone 320874 (TRAV5, TRAJ30)
CVEIANRDDKIIF

SEQ ID NO: 641748 - protein, 14 aa, Homo sapiens
  CDR3 for beta chain variable domain of TCR clone 320874 (TRBV4-1, TRBJ2-2)
CASSQAVNTGELFF

SEQ ID NO: 641749 - protein, 13 aa, Homo sapiens
  CDR3 for alpha chain variable domain of TCR clone 320875 (TRAV21, TRAJ57)
CAVTQGGSEKLVF

SEQ ID NO: 641750 - protein, 14 aa, Homo sapiens
  CDR3 for beta chain variable domain of TCR clone 320875 (TRBV2, TRBJ1-5)
CASSGTVSNQPQHF

SEQ ID NO: 641751 - protein, 11 aa, Homo sapiens
  CDR3 for alpha chain variable domain of TCR clone 320876 (TRAV1-2, TRAJ20)
CAVAHDYKLSF

SEQ ID NO: 641752 - protein, 16 aa, Homo sapiens
  CDR3 for beta chain variable domain of TCR clone 320876 (TRBV7-7, TRBJ2-1)
CASSLASGTSYNEQFF

SEQ ID NO: 641753 - protein, 12 aa, Homo sapiens
  CDR3 for alpha chain variable domain of TCR clone 320877 (TRAV2, TRAJ10)
CASTGGGNKLTF

SEQ ID NO: 641754 - protein, 14 aa, Homo sapiens
  CDR3 for beta chain variable domain of TCR clone 320877 (TRBV7-2, TRBJ2-2)
CPSRGQGAAGELFF

SEQ ID NO: 641755 - protein, 14 aa, Homo sapiens
  CDR3 for alpha chain variable domain of TCR clone 320878 (TRAV17, TRAJ39)
CATDPVRAGNMLTF

SEQ ID NO: 641756 - protein, 15 aa, Homo sapiens
  CDR3 for beta chain variable domain of TCR clone 320878 (TRBV13, TRBJ1-5)
CASSFGQGGFQPQHF

SEQ ID NO: 641757 - protein, 18 aa, Homo sapiens
  CDR3 for alpha chain variable domain of TCR clone 320879 (TRAV29/DV5, TRAJ52)
CAAGFRDAGGTSYGKLTF

SEQ ID NO: 641758 - protein, 16 aa, Homo sapiens
  CDR3 for beta chain variable domain of TCR clone 320879 (TRBV7-3, TRBJ2-2)
CASSLKRGTLSGELSF

SEQ ID NO: 641759 - protein, 14 aa, Homo sapiens
  CDR3 for alpha chain variable domain of TCR clone 320880 (TRAV29/DV5, TRAJ36)
CAARRKTGANNLFF

SEQ ID NO: 641760 - protein, 13 aa, Homo sapiens
  CDR3 for beta chain variable domain of TCR clone 320880 (TRBV25-1, TRBJ2-5)
CASSESGRETQYF

SEQ ID NO: 641761 - protein, 11 aa, Homo sapiens
  CDR3 for alpha chain variable domain of TCR clone 320881 (TRAV2, TRAJ13)
CASGGYQKVTF

SEQ ID NO: 641762 - protein, 14 aa, Homo sapiens
  CDR3 for beta chain variable domain of TCR clone 320881 (TRBV7-9, TRBJ2-5)
CASSLAFGQETQYF

SEQ ID NO: 641763 - protein, 11 aa, Homo sapiens
  CDR3 for alpha chain variable domain of TCR clone 320882 (TRAV35, TRAJ34)
CWARNTDKLIF

SEQ ID NO: 641764 - protein, 14 aa, Homo sapiens
  CDR3 for beta chain variable domain of TCR clone 320882 (TRBV19, TRBJ2-7)
CASSIRLGDHEQYF

SEQ ID NO: 641765 - protein, 16 aa, Homo sapiens
  CDR3 for alpha chain variable domain of TCR clone 320883 (TRAV21, TRAJ52)
CAVTNAGGTSYGKLSF

SEQ ID NO: 641766 - protein, 11 aa, Homo sapiens
  CDR3 for beta chain variable domain of TCR clone 320883 (TRBV2, TRBJ1-1)
CASREGTEAFF

SEQ ID NO: 641767 - protein, 16 aa, Homo sapiens
  CDR3 for alpha chain variable domain of TCR clone 320884 (TRAV1-1, TRAJ27)
CAVIYNTMQANQPLVM

SEQ ID NO: 641768 - protein, 15 aa, Homo sapiens
  CDR3 for beta chain variable domain of TCR clone 320884 (TRBV7-2, TRBJ2-1)
CASSSGLAGSNEQFF

SEQ ID NO: 641769 - protein, 15 aa, Homo sapiens
  CDR3 for alpha chain variable domain of TCR clone 320885 (TRAV26-1, TRAJ38)
CIVRAEGDNNRKLIW

SEQ ID NO: 641770 - protein, 14 aa, Homo sapiens
  CDR3 for beta chain variable domain of TCR clone 320885 (TRBV7-6, TRBJ2-5)
CASSSPSGSETQYF

SEQ ID NO: 641771 - protein, 14 aa, Homo sapiens
  CDR3 for alpha chain variable domain of TCR clone 320886 (TRAV26-1, TRAJ38)
CIADNAGNNRKLIC

SEQ ID NO: 641772 - protein, 13 aa, Homo sapiens
  CDR3 for beta chain variable domain of TCR clone 320886 (TRBV20-1, TRBJ1-1)
CSARGGGNTESFF

SEQ ID NO: 641773 - protein, 14 aa, Homo sapiens
  CDR3 for alpha chain variable domain of TCR clone 320887 (TRAV1-2, TRAJ8)
YAVREDAGFQKLVF

SEQ ID NO: 641774 - protein, 15 aa, Homo sapiens
  CDR3 for beta chain variable domain of TCR clone 320887 (TRBV6-3, TRBJ2-7)
CASSSPGTVFYEQYF

SEQ ID NO: 641775 - protein, 14 aa, Homo sapiens
  CDR3 for alpha chain variable domain of TCR clone 320888 (TRAV35, TRAJ13)
CAGSPSGGYQKVTF

SEQ ID NO: 641776 - protein, 17 aa, Homo sapiens
  CDR3 for beta chain variable domain of TCR clone 320888 (TRBV7-6, TRBJ2-7)
CASSPGLADPWGETQYF

SEQ ID NO: 641777 - protein, 16 aa, Homo sapiens
  CDR3 for alpha chain variable domain of TCR clone 320889 (TRAV23/DV6, TRAJ21)
CAASSGGGTTSTHFTL

SEQ ID NO: 641778 - protein, 11 aa, Homo sapiens
  CDR3 for beta chain variable domain of TCR clone 320889 (TRBV7-8, TRBJ2-7)
CASSLSLEQYF

SEQ ID NO: 641779 - protein, 10 aa, Homo sapiens
  CDR3 for alpha chain variable domain of TCR clone 320890 (TRAV8-6, TRAJ34)
CAVNTDKLIF

SEQ ID NO: 641780 - protein, 15 aa, Homo sapiens
  CDR3 for beta chain variable domain of TCR clone 320890 (TRBV7-2, TRBJ1-2)
CASSPRAGWNYGYTF

SEQ ID NO: 641781 - protein, 14 aa, Homo sapiens
  CDR3 for alpha chain variable domain of TCR clone 320891 (TRAV12-1, TRAJ3)
CVVILYSSASKIIF

SEQ ID NO: 641782 - protein, 12 aa, Homo sapiens
  CDR3 for beta chain variable domain of TCR clone 320891 (TRBV12-4, TRBJ2-7)
CASSLGGYEQYF

SEQ ID NO: 641783 - protein, 15 aa, Homo sapiens
  CDR3 for alpha chain variable domain of TCR clone 320892 (TRAV8-3, TRAJ45)
CASTYSGGGADGLTF

SEQ ID NO: 641784 - protein, 17 aa, Homo sapiens
  CDR3 for beta chain variable domain of TCR clone 320892 (TRBV7-8, TRBJ1-2)
CASSLRPLQGHLYGYTF

SEQ ID NO: 641785 - protein, 16 aa, Homo sapiens
  CDR3 for alpha chain variable domain of TCR clone 320893 (TRAV12-3, TRAJ53)
CAMSPGSGGSNYKLTF

SEQ ID NO: 641786 - protein, 14 aa, Homo sapiens
  CDR3 for beta chain variable domain of TCR clone 320893 (TRBV4-1, TRBJ1-6)
CASSPGSDSSPLHF

SEQ ID NO: 641787 - protein, 17 aa, Homo sapiens
  CDR3 for alpha chain variable domain of TCR clone 320894 (TRAV13-1, )
CAANIQNPDPAVYQLRD

SEQ ID NO: 641788 - protein, 14 aa, Homo sapiens
  CDR3 for beta chain variable domain of TCR clone 320894 (TRBV19, TRBJ2-7)
CASSIWPNSYEQYF

SEQ ID NO: 641789 - protein, 16 aa, Homo sapiens
  CDR3 for alpha chain variable domain of TCR clone 320895 (TRAV35, TRAJ28)
CAGQKYSGAGSYQLTF

SEQ ID NO: 641790 - protein, 13 aa, Homo sapiens
  CDR3 for beta chain variable domain of TCR clone 320895 (TRBV19, TRBJ1-2)
CTSSQGQVYGYTF

SEQ ID NO: 641791 - protein, 14 aa, Homo sapiens
  CDR3 for alpha chain variable domain of TCR clone 320896 (TRAV35, TRAJ50)
CAGHRKTSYDKVIF

SEQ ID NO: 641792 - protein, 13 aa, Homo sapiens
  CDR3 for beta chain variable domain of TCR clone 320896 (TRBV7-7, TRBJ2-3)
CASSLNRADTQYF

SEQ ID NO: 641793 - protein, 12 aa, Homo sapiens
  CDR3 for alpha chain variable domain of TCR clone 320897 (TRAV23/DV6, TRAJ30)
CAASKGDDKIIF

SEQ ID NO: 641794 - protein, 13 aa, Homo sapiens
  CDR3 for beta chain variable domain of TCR clone 320897 (TRBV19, TRBJ1-2)
CASSVPGQDGCTF

SEQ ID NO: 641795 - protein, 12 aa, Homo sapiens
  CDR3 for alpha chain variable domain of TCR clone 320898 (TRAV8-4, TRAJ43)
CAVSVNNNDMRF

SEQ ID NO: 641796 - protein, 17 aa, Homo sapiens
  CDR3 for beta chain variable domain of TCR clone 320898 (TRBV28, TRBJ1-5)
CASSLSWLVSSNQPQHF

SEQ ID NO: 641797 - protein, 16 aa, Homo sapiens
  CDR3 for alpha chain variable domain of TCR clone 320899 (TRAV1-1, TRAJ29)
CAVRSTSNSGNTPLVF

SEQ ID NO: 641798 - protein, 16 aa, Homo sapiens
  CDR3 for beta chain variable domain of TCR clone 320899 (TRBV27, TRBJ1-1)
CASSSRGRTGYTEAFF

SEQ ID NO: 641799 - protein, 15 aa, Homo sapiens
  CDR3 for alpha chain variable domain of TCR clone 320900 (TRAV2, TRAJ11)
CAVEGPNSGYSTLTF

SEQ ID NO: 641800 - protein, 15 aa, Homo sapiens
  CDR3 for beta chain variable domain of TCR clone 320900 (TRBV20-1, TRBJ2-7)
CSARDRVSGMDEQYF

SEQ ID NO: 641801 - protein, 17 aa, Homo sapiens
  CDR3 for alpha chain variable domain of TCR clone 320901 (TRAV21, TRAJ45)
CAVGALGSGGGADGLTF

SEQ ID NO: 641802 - protein, 11 aa, Homo sapiens
  CDR3 for beta chain variable domain of TCR clone 320901 (TRBV13, TRBJ2-2)
CASSLDGELFF

SEQ ID NO: 641803 - protein, 14 aa, Homo sapiens
  CDR3 for alpha chain variable domain of TCR clone 320902 (TRAV16, TRAJ42)
CALLAGGSQGILIF

SEQ ID NO: 641804 - protein, 15 aa, Homo sapiens
  CDR3 for beta chain variable domain of TCR clone 320902 (TRBV2, TRBJ2-7)
CASSEGLARSYEQYF

SEQ ID NO: 641805 - protein, 14 aa, Homo sapiens
  CDR3 for alpha chain variable domain of TCR clone 320903 (TRAV2, TRAJ9)
CAVDPNTGGFKTIF

SEQ ID NO: 641806 - protein, 14 aa, Homo sapiens
  CDR3 for beta chain variable domain of TCR clone 320903 (TRBV7-2, TRBJ2-7)
CANSPKTSFYEQYF

SEQ ID NO: 641807 - protein, 14 aa, Homo sapiens
  CDR3 for alpha chain variable domain of TCR clone 320904 (TRAV29/DV5, TRAJ40)
CAAAVASGAYKYIF

SEQ ID NO: 641808 - protein, 13 aa, Homo sapiens
  CDR3 for beta chain variable domain of TCR clone 320904 (TRBV7-9, TRBJ2-7)
CASSFAGAYEQYF

SEQ ID NO: 641809 - protein, 13 aa, Homo sapiens
  CDR3 for alpha chain variable domain of TCR clone 320905 (TRAV4, TRAJ34)
CLVGDYNTDKLIF

SEQ ID NO: 641810 - protein, 16 aa, Homo sapiens
  CDR3 for beta chain variable domain of TCR clone 320905 (TRBV4-2, TRBJ1-1)
CASSQAGFGMNTEAFF

SEQ ID NO: 641811 - protein, 15 aa, Homo sapiens
  CDR3 for alpha chain variable domain of TCR clone 320906 (TRAV26-1, TRAJ44)
CIVRANTGTASKLTF

SEQ ID NO: 641812 - protein, 16 aa, Homo sapiens
  CDR3 for beta chain variable domain of TCR clone 320906 (TRBV7-7, TRBJ2-1)
CASSLASGTSYNDQFF

SEQ ID NO: 641813 - protein, 20 aa, Homo sapiens
  CDR3 for alpha chain variable domain of TCR clone 320907 (TRAV12-3, TRAJ41)
SLFIRDSQPSASATPEALNF

SEQ ID NO: 641814 - protein, 15 aa, Homo sapiens
  CDR3 for beta chain variable domain of TCR clone 320907 (TRBV5-1, TRBJ2-7)
CASSLDLTSSYEQYF

SEQ ID NO: 641815 - protein, 13 aa, Homo sapiens
  CDR3 for alpha chain variable domain of TCR clone 320908 (TRAV27, TRAJ41)
CAGEGNSGYALNF

SEQ ID NO: 641816 - protein, 14 aa, Homo sapiens
  CDR3 for beta chain variable domain of TCR clone 320908 (TRBV25-1, TRBJ1-1)
CASTHLWGNTEAFF

SEQ ID NO: 641817 - protein, 12 aa, Homo sapiens
  CDR3 for alpha chain variable domain of TCR clone 320909 (TRAV20, TRAJ39)
CAVGNAGNMLTF

SEQ ID NO: 641818 - protein, 16 aa, Homo sapiens
  CDR3 for beta chain variable domain of TCR clone 320909 (TRBV15, TRBJ1-2)
CDTSRGPRTGGGGYTF

SEQ ID NO: 641819 - protein, 14 aa, Homo sapiens
  CDR3 for alpha chain variable domain of TCR clone 320910 (TRAV35, TRAJ22)
CAGLRPGPATQLPF

SEQ ID NO: 641820 - protein, 15 aa, Homo sapiens
  CDR3 for beta chain variable domain of TCR clone 320910 (TRBV12-4, TRBJ2-5)
CASSPPTGLQETQYF

SEQ ID NO: 641821 - protein, 15 aa, Homo sapiens
  CDR3 for alpha chain variable domain of TCR clone 320911 (TRAV25, TRAJ52)
CAGRPVGTSYGKLTF

SEQ ID NO: 641822 - protein, 17 aa, Homo sapiens
  CDR3 for beta chain variable domain of TCR clone 320911 (TRBV7-8, TRBJ2-6)
CASSAGTGGAGANVLTF

SEQ ID NO: 641823 - protein, 15 aa, Homo sapiens
  CDR3 for alpha chain variable domain of TCR clone 320912 (TRAV2, TRAJ37)
CAVEDGSSNTGKLIF

SEQ ID NO: 641824 - protein, 14 aa, Homo sapiens
  CDR3 for beta chain variable domain of TCR clone 320912 (TRBV7-2, TRBJ2-5)
CASSFTQGQETQYF

SEQ ID NO: 641825 - protein, 14 aa, Homo sapiens
  CDR3 for alpha chain variable domain of TCR clone 320913 (TRAV12-3, TRAJ22)
CAMSLFGSAWQLTF

SEQ ID NO: 641826 - protein, 11 aa, Homo sapiens
  CDR3 for beta chain variable domain of TCR clone 320913 (TRBV12-4, TRBJ2-2)
CASSSAGELFF

SEQ ID NO: 641827 - protein, 14 aa, Homo sapiens
  CDR3 for alpha chain variable domain of TCR clone 320914 (TRAV1-2, TRAJ16)
CAVNRFSDGQTLLF

SEQ ID NO: 641828 - protein, 13 aa, Homo sapiens
  CDR3 for beta chain variable domain of TCR clone 320914 (TRBV10-2, TRBJ2-7)
CASGASGGYEQYF

SEQ ID NO: 641829 - protein, 15 aa, Homo sapiens
  CDR3 for alpha chain variable domain of TCR clone 320915 (TRAV8-3, TRAJ6)
CAVGPLGGGSYIPTF

SEQ ID NO: 641830 - protein, 14 aa, Homo sapiens
  CDR3 for beta chain variable domain of TCR clone 320915 (TRBV19, TRBJ2-2)
CASSTGQAAGELFF

SEQ ID NO: 641831 - protein, 12 aa, Homo sapiens
  CDR3 for alpha chain variable domain of TCR clone 320916 (TRAV27, TRAJ13)
CAGVRGYQKVTL

SEQ ID NO: 641832 - protein, 16 aa, Homo sapiens
  CDR3 for beta chain variable domain of TCR clone 320916 (TRBV28, TRBJ2-1)
CASSSSYSGSLNEQFF

SEQ ID NO: 641833 - protein, 14 aa, Homo sapiens
  CDR3 for alpha chain variable domain of TCR clone 320917 (TRAV12-2, TRAJ38)
CAPQTAGNNRKLIL

SEQ ID NO: 641834 - protein, 18 aa, Homo sapiens
  CDR3 for beta chain variable domain of TCR clone 320917 (TRBV28, TRBJ1-3)
CASKTPVGQIGSGNTIYF

SEQ ID NO: 641835 - protein, 11 aa, Homo sapiens
  CDR3 for alpha chain variable domain of TCR clone 320918 (TRAV35, TRAJ34)
CWARNTDKLIF

SEQ ID NO: 641836 - protein, 13 aa, Homo sapiens
  CDR3 for beta chain variable domain of TCR clone 320918 (TRBV19, TRBJ2-7)
CASSIDRIYEQYF

SEQ ID NO: 641837 - protein, 14 aa, Homo sapiens
  CDR3 for alpha chain variable domain of TCR clone 320919 (TRAV12-2, TRAJ44)
CAVNPAGTDSKLTF

SEQ ID NO: 641838 - protein, 16 aa, Homo sapiens
  CDR3 for beta chain variable domain of TCR clone 320919 (TRBV2, TRBJ2-1)
CASSVGGSLSYNEQFF

SEQ ID NO: 641839 - protein, 11 aa, Homo sapiens
  CDR3 for alpha chain variable domain of TCR clone 320920 (TRAV35, TRAJ30)
CAGPGDDKFIF

SEQ ID NO: 641840 - protein, 18 aa, Homo sapiens
  CDR3 for beta chain variable domain of TCR clone 320920 (TRBV7-6, TRBJ2-1)
CASSPRTSGMSSYNEQFF

SEQ ID NO: 641841 - protein, 14 aa, Homo sapiens
  CDR3 for alpha chain variable domain of TCR clone 320921 (TRAV3, TRAJ9)
CAVRLNTGGFKTIF

SEQ ID NO: 641842 - protein, 15 aa, Homo sapiens
  CDR3 for beta chain variable domain of TCR clone 320921 (TRBV7-2, TRBJ2-7)
CASSLKGALTYEQYF

SEQ ID NO: 641843 - protein, 13 aa, Homo sapiens
  CDR3 for alpha chain variable domain of TCR clone 320922 (TRAV26-2, TRAJ43)
CILRAVNNNDLRF

SEQ ID NO: 641844 - protein, 15 aa, Homo sapiens
  CDR3 for beta chain variable domain of TCR clone 320922 (TRBV7-2, TRBJ2-1)
CASTHGTGIYNEQFF

SEQ ID NO: 641845 - protein, 15 aa, Homo sapiens
  CDR3 for alpha chain variable domain of TCR clone 320923 (TRAV27, TRAJ38)
CEARRNADNNRKLIW

SEQ ID NO: 641846 - protein, 13 aa, Homo sapiens
  CDR3 for beta chain variable domain of TCR clone 320923 (TRBV12-5, TRBJ2-3)
CASGDRQSDTQYF

SEQ ID NO: 641847 - protein, 15 aa, Homo sapiens
  CDR3 for alpha chain variable domain of TCR clone 320924 (TRAV12-1, TRAJ45)
CVVLSGGGGADGVTF

SEQ ID NO: 641848 - protein, 16 aa, Homo sapiens
  CDR3 for beta chain variable domain of TCR clone 320924 (TRBV6-5, TRBJ2-1)
CASSETLAGHYNEQFF

SEQ ID NO: 641849 - protein, 13 aa, Homo sapiens
  CDR3 for alpha chain variable domain of TCR clone 320925 (TRAV23/DV6, TRAJ22)
CSASGGSARQLTF

SEQ ID NO: 641850 - protein, 14 aa, Homo sapiens
  CDR3 for beta chain variable domain of TCR clone 320925 (TRBV20-1, TRBJ2-1)
CSAQIGGSANEQFF

SEQ ID NO: 641851 - protein, 14 aa, Homo sapiens
  CDR3 for alpha chain variable domain of TCR clone 320926 (TRAV27, TRAJ23)
CAGAFDNQGGKLLF

SEQ ID NO: 641852 - protein, 15 aa, Homo sapiens
  CDR3 for beta chain variable domain of TCR clone 320926 (TRBV7-3, TRBJ2-7)
CASSLTGQGKYEQYF

SEQ ID NO: 641853 - protein, 10 aa, Homo sapiens
  CDR3 for alpha chain variable domain of TCR clone 320927 (TRAV26-1, TRAJ22)
RSGSARQLTF

SEQ ID NO: 641854 - protein, 13 aa, Homo sapiens
  CDR3 for beta chain variable domain of TCR clone 320927 (TRBV7-9, TRBJ1-2)
CASSLKQNHGYTF

SEQ ID NO: 641855 - protein, 13 aa, Homo sapiens
  CDR3 for alpha chain variable domain of TCR clone 320928 (TRAV12-3, TRAJ9)
CAMRNTGGFKTIF

SEQ ID NO: 641856 - protein, 15 aa, Homo sapiens
  CDR3 for beta chain variable domain of TCR clone 320928 (TRBV7-8, TRBJ2-1)
CASSLAGGLYNEQFF

SEQ ID NO: 641857 - protein, 11 aa, Homo sapiens
  CDR3 for alpha chain variable domain of TCR clone 320929 (TRAV21, TRAJ17)
CAAPAGNKLTF

SEQ ID NO: 641858 - protein, 13 aa, Homo sapiens
  CDR3 for beta chain variable domain of TCR clone 320929 (TRBV12-5, TRBJ2-3)
CASGDRQSDTQYF

SEQ ID NO: 641859 - protein, 15 aa, Homo sapiens
  CDR3 for alpha chain variable domain of TCR clone 320930 (TRAV13-1, TRAJ44)
CAASRGGGTASKITF

SEQ ID NO: 641860 - protein, 14 aa, Homo sapiens
  CDR3 for beta chain variable domain of TCR clone 320930 (TRBV7-2, TRBJ2-5)
CASSPRGSSETPYF

SEQ ID NO: 641861 - protein, 15 aa, Homo sapiens
  CDR3 for alpha chain variable domain of TCR clone 320931 (TRAV23/DV6, TRAJ4)
CAASPLRGGYIKLIF

SEQ ID NO: 641862 - protein, 15 aa, Homo sapiens
  CDR3 for beta chain variable domain of TCR clone 320931 (TRBV7-9, TRBJ1-6)
CASSSPGRGNSPLHF

SEQ ID NO: 641863 - protein, 16 aa, Homo sapiens
  CDR3 for alpha chain variable domain of TCR clone 320932 (TRAV3, TRAJ37)
CAVRPHGSGNAGKLIF

SEQ ID NO: 641864 - protein, 16 aa, Homo sapiens
  CDR3 for beta chain variable domain of TCR clone 320932 (TRBV7-3, TRBJ2-2)
CASSLKRGTLSGELFF

SEQ ID NO: 641865 - protein, 11 aa, Homo sapiens
  CDR3 for alpha chain variable domain of TCR clone 320933 (TRAV4, TRAJ21)
CLIYNFNKFYL

SEQ ID NO: 641866 - protein, 17 aa, Homo sapiens
  CDR3 for beta chain variable domain of TCR clone 320933 (TRBV23-1, TRBJ2-1)
CISAPAVNRDQGGEKFF

SEQ ID NO: 641867 - protein, 14 aa, Homo sapiens
  CDR3 for alpha chain variable domain of TCR clone 320934 (TRAV16, TRAJ3)
CALSQYSSASKIIF

SEQ ID NO: 641868 - protein, 12 aa, Homo sapiens
  CDR3 for beta chain variable domain of TCR clone 320934 (TRBV19, TRBJ2-1)
CASSRQGAEQFF

SEQ ID NO: 641869 - protein, 21 aa, Homo sapiens
  CDR3 for alpha chain variable domain of TCR clone 320935 (TRAV17, TRAJ9)
CATDYTEASKLSLEQEQDYLL

SEQ ID NO: 641870 - protein, 14 aa, Homo sapiens
  CDR3 for beta chain variable domain of TCR clone 320935 (TRBV19, TRBJ2-5)
CASSMTGQQETQYF

SEQ ID NO: 641871 - protein, 13 aa, Homo sapiens
  CDR3 for alpha chain variable domain of TCR clone 320936 (TRAV38-1, TRAJ42)
CARWGGSQVNLIF

SEQ ID NO: 641872 - protein, 17 aa, Homo sapiens
  CDR3 for beta chain variable domain of TCR clone 320936 (TRBV20-1, TRBJ2-1)
CSASDPLAGVWDNEQFF

SEQ ID NO: 641873 - protein, 15 aa, Homo sapiens
  CDR3 for alpha chain variable domain of TCR clone 320937 (TRAV8-6, TRAJ6)
CAVSGESGGGYIPTF

SEQ ID NO: 641874 - protein, 13 aa, Homo sapiens
  CDR3 for beta chain variable domain of TCR clone 320937 (TRBV5-1, TRBJ2-7)
CASSATGGNEQYF

SEQ ID NO: 641875 - protein, 12 aa, Homo sapiens
  CDR3 for alpha chain variable domain of TCR clone 320938 (TRAV27, TRAJ41)
CAGRNSGYALNF

SEQ ID NO: 641876 - protein, 14 aa, Homo sapiens
  CDR3 for beta chain variable domain of TCR clone 320938 (TRBV12-5, TRBJ2-5)
CASGSRTHQETQYF

SEQ ID NO: 641877 - protein, 15 aa, Homo sapiens
  CDR3 for alpha chain variable domain of TCR clone 320939 (TRAV25, TRAJ53)
CPTSNSGGSNYKLTF

SEQ ID NO: 641878 - protein, 14 aa, Homo sapiens
  CDR3 for beta chain variable domain of TCR clone 320939 (TRBV11-2, TRBJ2-3)
CASIRLARTDTQYF

SEQ ID NO: 641879 - protein, 13 aa, Homo sapiens
  CDR3 for alpha chain variable domain of TCR clone 320940 (TRAV23/DV6, TRAJ58)
CAARLIRGSWLTF

SEQ ID NO: 641880 - protein, 13 aa, Homo sapiens
  CDR3 for beta chain variable domain of TCR clone 320940 (TRBV2, TRBJ1-6)
CADSGSYNSPLHF

SEQ ID NO: 641881 - protein, 12 aa, Homo sapiens
  CDR3 for alpha chain variable domain of TCR clone 320941 (TRAV21, TRAJ33)
CAIMDSNYQLIW

SEQ ID NO: 641882 - protein, 14 aa, Homo sapiens
  CDR3 for beta chain variable domain of TCR clone 320941 (TRBV2, TRBJ2-7)
CASSLTSGGYEQYF

SEQ ID NO: 641883 - protein, 16 aa, Homo sapiens
  CDR3 for alpha chain variable domain of TCR clone 320942 (TRAV30, TRAJ24)
CGTEIVDADSWGKFQF

SEQ ID NO: 641884 - protein, 15 aa, Homo sapiens
  CDR3 for beta chain variable domain of TCR clone 320942 (TRBV7-3, TRBJ2-1)
CASSLDGNAYNEQFF

SEQ ID NO: 641885 - protein, 15 aa, Homo sapiens
  CDR3 for alpha chain variable domain of TCR clone 320943 (TRAV2, TRAJ15)
CAVEDRGQAGTALIF

SEQ ID NO: 641886 - protein, 12 aa, Homo sapiens
  CDR3 for beta chain variable domain of TCR clone 320943 (TRBV12-4, TRBJ2-7)
CASSLGGYEQYF

SEQ ID NO: 641887 - protein, 14 aa, Homo sapiens
  CDR3 for alpha chain variable domain of TCR clone 320944 (TRAV8-4, TRAJ13)
CAVTLSGGYQKVTF

SEQ ID NO: 641888 - protein, 15 aa, Homo sapiens
  CDR3 for beta chain variable domain of TCR clone 320944 (TRBV7-2, TRBJ2-1)
CASSLADSLYNEQFF

SEQ ID NO: 641889 - protein, 12 aa, Homo sapiens
  CDR3 for alpha chain variable domain of TCR clone 320945 (TRAV8-3, TRAJ20)
CAVGANDYKLSF

SEQ ID NO: 641890 - protein, 14 aa, Homo sapiens
  CDR3 for beta chain variable domain of TCR clone 320945 (TRBV7-8, TRBJ1-2)
CASSPDSLSYGYTF

SEQ ID NO: 641891 - protein, 16 aa, Homo sapiens
  CDR3 for alpha chain variable domain of TCR clone 320946 (TRAV23/DV6, TRAJ57)
CAASSTLSQGGSVKLF

SEQ ID NO: 641892 - protein, 13 aa, Homo sapiens
  CDR3 for beta chain variable domain of TCR clone 320946 (TRBV11-2, TRBJ2-5)
CASSSTGEETQYF

SEQ ID NO: 641893 - protein, 10 aa, Homo sapiens
  CDR3 for alpha chain variable domain of TCR clone 320947 (TRAV25, TRAJ21)
CLYNFNKFYF

SEQ ID NO: 641894 - protein, 15 aa, Homo sapiens
  CDR3 for beta chain variable domain of TCR clone 320947 (TRBV28, TRBJ2-7)
CASSPGGRGFYEQYF

SEQ ID NO: 641895 - protein, 14 aa, Homo sapiens
  CDR3 for alpha chain variable domain of TCR clone 320948 (TRAV29/DV5, TRAJ36)
CAARRKTGANNLFF

SEQ ID NO: 641896 - protein, 19 aa, Homo sapiens
  CDR3 for beta chain variable domain of TCR clone 320948 (TRBV7-2, TRBJ2-3)
CASSFLSRNWSGGTDTQYF

SEQ ID NO: 641897 - protein, 12 aa, Homo sapiens
  CDR3 for alpha chain variable domain of TCR clone 320949 (TRAV2, TRAJ31)
CAVEDNYARLMF

SEQ ID NO: 641898 - protein, 16 aa, Homo sapiens
  CDR3 for beta chain variable domain of TCR clone 320949 (TRBV10-3, TRBJ2-1)
CAISGVGDGGGGEQFF

SEQ ID NO: 641899 - protein, 15 aa, Homo sapiens
  CDR3 for alpha chain variable domain of TCR clone 320950 (TRAV17, TRAJ28)
CATIDSGAGSYQLTF

SEQ ID NO: 641900 - protein, 13 aa, Homo sapiens
  CDR3 for beta chain variable domain of TCR clone 320950 (TRBV5-4, TRBJ2-5)
CASSRQEGETQYF

SEQ ID NO: 641901 - protein, 15 aa, Homo sapiens
  CDR3 for alpha chain variable domain of TCR clone 320951 (TRAV8-3, TRAJ45)
CASSYSGGGADGLTF

SEQ ID NO: 641902 - protein, 14 aa, Homo sapiens
  CDR3 for beta chain variable domain of TCR clone 320951 (TRBV7-3, TRBJ2-1)
CASSLGTSANEQFF

SEQ ID NO: 641903 - protein, 14 aa, Homo sapiens
  CDR3 for alpha chain variable domain of TCR clone 320952 (TRAV8-1, TRAJ34)
SAVITTYNTDKLIF

SEQ ID NO: 641904 - protein, 14 aa, Homo sapiens
  CDR3 for beta chain variable domain of TCR clone 320952 (TRBV11-3, TRBJ1-3)
CASSHNGQGNTIYF

SEQ ID NO: 641905 - protein, 15 aa, Homo sapiens
  CDR3 for alpha chain variable domain of TCR clone 320953 (TRAV8-3, TRAJ32)
WAVGPYGGATNKLIF

SEQ ID NO: 641906 - protein, 14 aa, Homo sapiens
  CDR3 for beta chain variable domain of TCR clone 320953 (TRBV29-1, TRBJ2-2)
CSVLAETNTGELFF

SEQ ID NO: 641907 - protein, 14 aa, Homo sapiens
  CDR3 for alpha chain variable domain of TCR clone 320954 (TRAV12-1, TRAJ30)
CVVNIGGRDYKIIF

SEQ ID NO: 641908 - protein, 14 aa, Homo sapiens
  CDR3 for beta chain variable domain of TCR clone 320954 (TRBV7-6, TRBJ2-3)
CASSLGTVTDTQYF

SEQ ID NO: 641909 - protein, 14 aa, Homo sapiens
  CDR3 for alpha chain variable domain of TCR clone 320955 (TRAV8-3, TRAJ39)
CAVGANNAGNMLTF

SEQ ID NO: 641910 - protein, 15 aa, Homo sapiens
  CDR3 for beta chain variable domain of TCR clone 320955 (TRBV4-3, TRBJ1-1)
FASSQELGRGTEAFF

SEQ ID NO: 641911 - protein, 13 aa, Homo sapiens
  CDR3 for alpha chain variable domain of TCR clone 320956 (TRAV1-2, TRAJ9)
CAALNTGVFKTLF

SEQ ID NO: 641912 - protein, 13 aa, Homo sapiens
  CDR3 for beta chain variable domain of TCR clone 320956 (TRBV19, TRBJ1-2)
CASSVPGQDGYTF

SEQ ID NO: 641913 - protein, 11 aa, Homo sapiens
  CDR3 for alpha chain variable domain of TCR clone 320957 (TRAV17, TRAJ31)
CATDRTARLMF

SEQ ID NO: 641914 - protein, 13 aa, Homo sapiens
  CDR3 for beta chain variable domain of TCR clone 320957 (TRBV4-1, TRBJ1-1)
CASSRKMNTEAFF

SEQ ID NO: 641915 - protein, 15 aa, Homo sapiens
  CDR3 for alpha chain variable domain of TCR clone 320958 (TRAV25, TRAJ52)
CAGRPGGTSYGKLTC

SEQ ID NO: 641916 - protein, 17 aa, Homo sapiens
  CDR3 for beta chain variable domain of TCR clone 320958 (TRBV7-8, TRBJ2-6)
CASSAGTGGAGANVLTF

SEQ ID NO: 641917 - protein, 14 aa, Homo sapiens
  CDR3 for alpha chain variable domain of TCR clone 320959 (TRAV17, TRAJ16)
CATADFSDGQKLLF

SEQ ID NO: 641918 - protein, 15 aa, Homo sapiens
  CDR3 for beta chain variable domain of TCR clone 320959 (TRBV18, TRBJ2-1)
CASSPPSASYKEQFF

SEQ ID NO: 641919 - protein, 16 aa, Homo sapiens
  CDR3 for alpha chain variable domain of TCR clone 320960 (TRAV23/DV6, TRAJ48)
CSASGVVNFGNEKLTF

SEQ ID NO: 641920 - protein, 16 aa, Homo sapiens
  CDR3 for beta chain variable domain of TCR clone 320960 (TRBV4-2, TRBJ2-5)
CASSQELVGSQETQYF

SEQ ID NO: 641921 - protein, 12 aa, Homo sapiens
  CDR3 for alpha chain variable domain of TCR clone 320961 (TRAV27, TRAJ23)
CALYNQGGKLIF

SEQ ID NO: 641922 - protein, 14 aa, Homo sapiens
  CDR3 for beta chain variable domain of TCR clone 320961 (TRBV2, TRBJ1-5)
CASRETGGSQPQHF

SEQ ID NO: 641923 - protein, 14 aa, Homo sapiens
  CDR3 for alpha chain variable domain of TCR clone 320962 (TRAV16, TRAJ21)
CACGWATTSTNFTL

SEQ ID NO: 641924 - protein, 15 aa, Homo sapiens
  CDR3 for beta chain variable domain of TCR clone 320962 (TRBV19, TRBJ2-1)
CASSIQATSCNEQFF

SEQ ID NO: 641925 - protein, 15 aa, Homo sapiens
  CDR3 for alpha chain variable domain of TCR clone 320963 (TRAV35, TRAJ38)
CAGFSNAGNNRKLIW

SEQ ID NO: 641926 - protein, 16 aa, Homo sapiens
  CDR3 for beta chain variable domain of TCR clone 320963 (TRBV5-1, TRBJ1-3)
CASSRSGEDSGNTIYF

SEQ ID NO: 641927 - protein, 22 aa, Homo sapiens
  CDR3 for alpha chain variable domain of TCR clone 320964 (TRAV3, TRAJ38)
CAVRDCLNAGNNHIQNPDPAVY

SEQ ID NO: 641928 - protein, 15 aa, Homo sapiens
  CDR3 for beta chain variable domain of TCR clone 320964 (TRBV3-1, TRBJ2-1)
CASSQVVDDGEEQFF

SEQ ID NO: 641929 - protein, 14 aa, Homo sapiens
  CDR3 for alpha chain variable domain of TCR clone 320965 (TRAV35, TRAJ13)
CAGSPSGGYQKVTF

SEQ ID NO: 641930 - protein, 13 aa, Homo sapiens
  CDR3 for beta chain variable domain of TCR clone 320965 (TRBV29-1, TRBJ1-1)
SAALDSRNTEAFF

SEQ ID NO: 641931 - protein, 14 aa, Homo sapiens
  CDR3 for alpha chain variable domain of TCR clone 320966 (TRAV1-2, TRAJ16)
CAVNRFSDGQKLLF

SEQ ID NO: 641932 - protein, 15 aa, Homo sapiens
  CDR3 for beta chain variable domain of TCR clone 320966 (TRBV7-9, IGHJ2)
CASSARTGGNDKLFF

SEQ ID NO: 641933 - protein, 13 aa, Homo sapiens
  CDR3 for alpha chain variable domain of TCR clone 320967 (TRAV17, TRAJ9)
CATDYTGGFKTIF

SEQ ID NO: 641934 - protein, 14 aa, Homo sapiens
  CDR3 for beta chain variable domain of TCR clone 320967 (TRBV19, TRBJ2-7)
CASSMGQGAIEQYF

SEQ ID NO: 641935 - protein, 15 aa, Homo sapiens
  CDR3 for alpha chain variable domain of TCR clone 320968 (TRAV12-1, TRAJ44)
CVVDTPQGNASKLTF

SEQ ID NO: 641936 - protein, 14 aa, Homo sapiens
  CDR3 for beta chain variable domain of TCR clone 320968 (TRBV7-9, TRBJ2-1)
CASSPRDSLYEQFF

SEQ ID NO: 641937 - protein, 17 aa, Homo sapiens
  CDR3 for alpha chain variable domain of TCR clone 320969 (TRAV26-2, TRAJ42)
CILRDVGDGGSQGNPIF

SEQ ID NO: 641938 - protein, 16 aa, Homo sapiens
  CDR3 for beta chain variable domain of TCR clone 320969 (TRBV12-4, TRBJ2-7)
CASSLIGGTGTYEQYF

SEQ ID NO: 641939 - protein, 11 aa, Homo sapiens
  CDR3 for alpha chain variable domain of TCR clone 320970 (TRAV2, TRAJ33)
CAVDSNYQLIW

SEQ ID NO: 641940 - protein, 15 aa, Homo sapiens
  CDR3 for beta chain variable domain of TCR clone 320970 (TRBV19, TRBJ1-2)
CASSVGQVLNYGYTF

SEQ ID NO: 641941 - protein, 14 aa, Homo sapiens
  CDR3 for alpha chain variable domain of TCR clone 320971 (TRAV38-1, TRAJ45)
CAYYSGGGADGVTF

SEQ ID NO: 641942 - protein, 20 aa, Homo sapiens
  CDR3 for beta chain variable domain of TCR clone 320971 (TRBV28, TRBJ2-1)
CASTPIGRSPGLTGGNEQFF

SEQ ID NO: 641943 - protein, 14 aa, Homo sapiens
  CDR3 for alpha chain variable domain of TCR clone 320972 (TRAV1-2, TRAJ8)
CAVREDTGFQKLVF

SEQ ID NO: 641944 - protein, 15 aa, Homo sapiens
  CDR3 for beta chain variable domain of TCR clone 320972 (TRBV6-3, TRBJ2-7)
CASSSVGTVFYEQYF

SEQ ID NO: 641945 - protein, 13 aa, Homo sapiens
  CDR3 for alpha chain variable domain of TCR clone 320973 (TRAV1-2, TRAJ9)
CAALNTGGFKTTF

SEQ ID NO: 641946 - protein, 13 aa, Homo sapiens
  CDR3 for beta chain variable domain of TCR clone 320973 (TRBV19, TRBJ1-2)
CASSVPGQDGYTS

SEQ ID NO: 641947 - protein, 13 aa, Homo sapiens
  CDR3 for alpha chain variable domain of TCR clone 320974 (TRAV12-2, TRAJ52)
CAVSGTSYGKLTF

SEQ ID NO: 641948 - protein, 12 aa, Homo sapiens
  CDR3 for beta chain variable domain of TCR clone 320974 (TRBV7-6, TRBJ2-5)
CASSLSQETQYF

SEQ ID NO: 641949 - protein, 10 aa, Homo sapiens
  CDR3 for alpha chain variable domain of TCR clone 320975 (TRAV23/DV6, TRAJ57)
CAARSTLSQA

SEQ ID NO: 641950 - protein, 14 aa, Homo sapiens
  CDR3 for beta chain variable domain of TCR clone 320975 (TRBV25-1, TRBJ1-1)
CASTHLGGNTEAFF

SEQ ID NO: 641951 - protein, 15 aa, Homo sapiens
  CDR3 for alpha chain variable domain of TCR clone 320976 (TRAV21, TRAJ32)
GAWNSYGGATNKLIF

SEQ ID NO: 641952 - protein, 14 aa, Homo sapiens
  CDR3 for beta chain variable domain of TCR clone 320976 (TRBV7-2, TRBJ2-7)
CASSPKTSFYEQYF

SEQ ID NO: 641953 - protein, 13 aa, Homo sapiens
  CDR3 for alpha chain variable domain of TCR clone 320977 (TRAV13-1, TRAJ9)
CAARGTGGFKTIF

SEQ ID NO: 641954 - protein, 12 aa, Homo sapiens
  CDR3 for beta chain variable domain of TCR clone 320977 (TRBV28, TRBJ2-7)
CASSTPGGEQYF

SEQ ID NO: 641955 - protein, 14 aa, Homo sapiens
  CDR3 for alpha chain variable domain of TCR clone 320978 (TRAV17, TRAJ22)
CATVLSGSARQLTF

SEQ ID NO: 641956 - protein, 15 aa, Homo sapiens
  CDR3 for beta chain variable domain of TCR clone 320978 (TRBV15, TRBJ1-6)
CATSGALIHPSTLGT

SEQ ID NO: 641957 - protein, 13 aa, Homo sapiens
  CDR3 for alpha chain variable domain of TCR clone 320979 (TRAV26-1, TRAJ29)
CIVRRSGNTPLVF

SEQ ID NO: 641958 - protein, 13 aa, Homo sapiens
  CDR3 for beta chain variable domain of TCR clone 320979 (TRBV19, TRBJ1-2)
CASSVPGQDGYTF

SEQ ID NO: 641959 - protein, 13 aa, Homo sapiens
  CDR3 for alpha chain variable domain of TCR clone 320980 (TRAV13-1, TRAJ39)
CSKYSNAGNMLTF

SEQ ID NO: 641960 - protein, 15 aa, Homo sapiens
  CDR3 for beta chain variable domain of TCR clone 320980 (TRBV20-1, TRBJ2-7)
CSARDLGGSAYEQYF

SEQ ID NO: 641961 - protein, 14 aa, Homo sapiens
  CDR3 for alpha chain variable domain of TCR clone 320981 (TRAV20, TRAJ13)
CAVQVSGGYQKVTF

SEQ ID NO: 641962 - protein, 12 aa, Homo sapiens
  CDR3 for beta chain variable domain of TCR clone 320981 (TRBV11-2, TRBJ2-2)
CASSLGGGELFF

SEQ ID NO: 641963 - protein, 13 aa, Homo sapiens
  CDR3 for alpha chain variable domain of TCR clone 320982 (TRAV12-1, TRAJ12)
CEVNIESSYKLIF

SEQ ID NO: 641964 - protein, 15 aa, Homo sapiens
  CDR3 for beta chain variable domain of TCR clone 320982 (TRBV2, TRBJ2-5)
CASSSSVAGGETQYF

SEQ ID NO: 641965 - protein, 14 aa, Homo sapiens
  CDR3 for alpha chain variable domain of TCR clone 320983 (TRAV12-2, TRAJ44)
CAVNKAGTASKLTF

SEQ ID NO: 641966 - protein, 12 aa, Homo sapiens
  CDR3 for beta chain variable domain of TCR clone 320983 (TRBV19, TRBJ1-4)
CASKDWPGVLFF

SEQ ID NO: 641967 - protein, 17 aa, Homo sapiens
  CDR3 for alpha chain variable domain of TCR clone 320984 (TRAV26-1, TRAJ37)
CIVRVITVSSNTGKLIF

SEQ ID NO: 641968 - protein, 14 aa, Homo sapiens
  CDR3 for beta chain variable domain of TCR clone 320984 (TRBV6-1, TRBJ1-3)
CASVQGGGGNTIYF

SEQ ID NO: 641969 - protein, 15 aa, Homo sapiens
  CDR3 for alpha chain variable domain of TCR clone 320985 (TRAV8-3, TRAJ27)
CAVGPSKPNAGNSTF

SEQ ID NO: 641970 - protein, 15 aa, Homo sapiens
  CDR3 for beta chain variable domain of TCR clone 320985 (TRBV7-2, TRBJ2-1)
CASSSGLAGGNEQFF

SEQ ID NO: 641971 - protein, 12 aa, Homo sapiens
  CDR3 for alpha chain variable domain of TCR clone 320986 (TRAV21, TRAJ33)
CAKMDSNYQLIW

SEQ ID NO: 641972 - protein, 15 aa, Homo sapiens
  CDR3 for beta chain variable domain of TCR clone 320986 (TRBV5-1, TRBJ1-1)
CASSLIRGTYTEAFF

SEQ ID NO: 641973 - protein, 14 aa, Homo sapiens
  CDR3 for alpha chain variable domain of TCR clone 320987 (TRAV26-1, TRAJ40)
CIVRVARGTYKYNF

SEQ ID NO: 641974 - protein, 14 aa, Homo sapiens
  CDR3 for beta chain variable domain of TCR clone 320987 (TRBV7-3, TRBJ2-7)
CASSLKADSYEQYF

SEQ ID NO: 641975 - protein, 17 aa, Homo sapiens
  CDR3 for alpha chain variable domain of TCR clone 320988 (TRAV3, TRAJ12)
CAVRDGGRMYSSYKLIF

SEQ ID NO: 641976 - protein, 13 aa, Homo sapiens
  CDR3 for beta chain variable domain of TCR clone 320988 (TRBV15, TRBJ1-6)
CATSGGLNSPLHF

SEQ ID NO: 641977 - protein, 14 aa, Homo sapiens
  CDR3 for alpha chain variable domain of TCR clone 320989 (TRAV12-2, TRAJ13)
CAVKKTGGYQEVTF

SEQ ID NO: 641978 - protein, 17 aa, Homo sapiens
  CDR3 for beta chain variable domain of TCR clone 320989 (TRBV20-1, TRBJ2-2)
CSASGSGQGGLTGELVF

SEQ ID NO: 641979 - protein, 13 aa, Homo sapiens
  CDR3 for alpha chain variable domain of TCR clone 320990 (TRAV12-3, TRAJ33)
CAMSVNSNYQLIW

SEQ ID NO: 641980 - protein, 14 aa, Homo sapiens
  CDR3 for beta chain variable domain of TCR clone 320990 (TRBV4-1, TRBJ2-2)
RASSQAVNTGELFF

SEQ ID NO: 641981 - protein, 14 aa, Homo sapiens
  CDR3 for alpha chain variable domain of TCR clone 320991 (TRAV12-2, TRAJ6)
CASKWGGGSYIPTF

SEQ ID NO: 641982 - protein, 15 aa, Homo sapiens
  CDR3 for beta chain variable domain of TCR clone 320991 (TRBV12-4, TRBJ2-5)
CASSPPTGLQETQYF

SEQ ID NO: 641983 - protein, 19 aa, Homo sapiens
  CDR3 for alpha chain variable domain of TCR clone 320992 (TRAV2, TRAJ20)
ILQVREADAAVYRDCKLSF

SEQ ID NO: 641984 - protein, 16 aa, Homo sapiens
  CDR3 for beta chain variable domain of TCR clone 320992 (TRBV7-9, TRBJ2-1)
CASSSLRQPDYNEQFF

SEQ ID NO: 641985 - protein, 16 aa, Homo sapiens
  CDR3 for alpha chain variable domain of TCR clone 320993 (TRAV3, TRAJ10)
CAVRDMRAGGGNTLTF

SEQ ID NO: 641986 - protein, 12 aa, Homo sapiens
  CDR3 for beta chain variable domain of TCR clone 320993 (TRBV20-1, TRBJ2-7)
CSAGLKMGEQYF

SEQ ID NO: 641987 - protein, 12 aa, Homo sapiens
  CDR3 for alpha chain variable domain of TCR clone 320994 (TRAV16, TRAJ22)
CALDVSARQLTF

SEQ ID NO: 641988 - protein, 14 aa, Homo sapiens
  CDR3 for beta chain variable domain of TCR clone 320994 (TRBV11-2, TRBJ2-3)
CASSSIASTDTQYF

SEQ ID NO: 641989 - protein, 12 aa, Homo sapiens
  CDR3 for alpha chain variable domain of TCR clone 320995 (TRAV12-3, TRAJ17)
CAMTLTGNKLTF

SEQ ID NO: 641990 - protein, 13 aa, Homo sapiens
  CDR3 for beta chain variable domain of TCR clone 320995 (TRBV20-1, TRBJ2-5)
CSAKADYQETQYF

SEQ ID NO: 641991 - protein, 16 aa, Homo sapiens
  CDR3 for alpha chain variable domain of TCR clone 320996 (TRAV30, TRAJ24)
CGTEIVDADSWGKFQF

SEQ ID NO: 641992 - protein, 20 aa, Homo sapiens
  CDR3 for beta chain variable domain of TCR clone 320996 (TRBV7-8, TRBJ2-1)
WASSLAHRLAGVRSYNEQFF

SEQ ID NO: 641993 - protein, 16 aa, Homo sapiens
  CDR3 for alpha chain variable domain of TCR clone 320997 (TRAV27, TRAJ13)
CAGAKSDSGGYQKVTL

SEQ ID NO: 641994 - protein, 15 aa, Homo sapiens
  CDR3 for beta chain variable domain of TCR clone 320997 (TRBV9, TRBJ1-6)
CASSGAGTGDSPLHF

SEQ ID NO: 641995 - protein, 14 aa, Homo sapiens
  CDR3 for alpha chain variable domain of TCR clone 320998 (TRAV13-1, TRAJ40)
CAASMTSGTYKYIF

SEQ ID NO: 641996 - protein, 13 aa, Homo sapiens
  CDR3 for beta chain variable domain of TCR clone 320998 (TRBV4-1, TRBJ2-5)
CASSQAVQETQYF

SEQ ID NO: 641997 - protein, 13 aa, Homo sapiens
  CDR3 for alpha chain variable domain of TCR clone 320999 (TRAV12-2, TRAJ20)
CAVNRFDDYKPSF

SEQ ID NO: 641998 - protein, 15 aa, Homo sapiens
  CDR3 for beta chain variable domain of TCR clone 320999 (TRBV9, TRBJ1-6)
CASSVAGTGDSPLHF

SEQ ID NO: 641999 - protein, 12 aa, Homo sapiens
  CDR3 for alpha chain variable domain of TCR clone 321000 (TRAV8-6, TRAJ11)
CAVSSGYSTLTF

SEQ ID NO: 642000 - protein, 11 aa, Homo sapiens
  CDR3 for beta chain variable domain of TCR clone 321000 (TRBV20-1, TRBJ1-5)
CSAQGDKPQHF

SEQ ID NO: 642001 - protein, 13 aa, Homo sapiens
  CDR3 for alpha chain variable domain of TCR clone 321001 (TRAV17, TRAJ5)
CALRGTGRRALTF

SEQ ID NO: 642002 - protein, 16 aa, Homo sapiens
  CDR3 for beta chain variable domain of TCR clone 321001 (TRBV7-8, TRBJ2-1)
CASSLQGTGRYNEQFF

SEQ ID NO: 642003 - protein, 13 aa, Homo sapiens
  CDR3 for alpha chain variable domain of TCR clone 321002 (TRAV8-3, TRAJ48)
CAVVPFGNEKLTF

SEQ ID NO: 642004 - protein, 14 aa, Homo sapiens
  CDR3 for beta chain variable domain of TCR clone 321002 (TRBV25-1, TRBJ1-1)
CASTHQGGNTEAFF

SEQ ID NO: 642005 - protein, 12 aa, Homo sapiens
  CDR3 for alpha chain variable domain of TCR clone 321003 (TRAV12-3, TRAJ17)
CAMTLTCNKLTF

SEQ ID NO: 642006 - protein, 15 aa, Homo sapiens
  CDR3 for beta chain variable domain of TCR clone 321003 (TRBV20-1, TRBJ2-7)
CSARGWVSGMDEQYF

SEQ ID NO: 642007 - protein, 17 aa, Homo sapiens
  CDR3 for alpha chain variable domain of TCR clone 321004 (TRAV36/DV7, TRAJ52)
CAVAQRAGGTSYGKLTF

SEQ ID NO: 642008 - protein, 15 aa, Homo sapiens
  CDR3 for beta chain variable domain of TCR clone 321004 (TRBV27, TRBJ2-2)
CASSLSGFWVTGELF

SEQ ID NO: 642009 - protein, 13 aa, Homo sapiens
  CDR3 for alpha chain variable domain of TCR clone 321005 (TRAV27, TRAJ45)
CRSSGGGADGLTF

SEQ ID NO: 642010 - protein, 14 aa, Homo sapiens
  CDR3 for beta chain variable domain of TCR clone 321005 (TRBV7-9, TRBJ1-1)
CASTPLQSYTEAFF

SEQ ID NO: 642011 - protein, 13 aa, Homo sapiens
  CDR3 for alpha chain variable domain of TCR clone 321006 (TRAV2, TRAJ20)
CAVEGPSEYKLSF

SEQ ID NO: 642012 - protein, 16 aa, Homo sapiens
  CDR3 for beta chain variable domain of TCR clone 321006 (TRBV7-3, TRBJ2-1)
CASSLEGYRSYNEQFF

SEQ ID NO: 642013 - protein, 12 aa, Homo sapiens
  CDR3 for alpha chain variable domain of TCR clone 321007 (TRAV8-6, TRAJ11)
CAVSEGYSTPTF

SEQ ID NO: 642014 - protein, 15 aa, Homo sapiens
  CDR3 for beta chain variable domain of TCR clone 321007 (TRBV7-2, TRBJ2-5)
CASTSRSGFVETQYF

SEQ ID NO: 642015 - protein, 13 aa, Homo sapiens
  CDR3 for alpha chain variable domain of TCR clone 321008 (TRAV2, TRAJ40)
CAVVTSGTYKYIF

SEQ ID NO: 642016 - protein, 16 aa, Homo sapiens
  CDR3 for beta chain variable domain of TCR clone 321008 (TRBV7-7, TRBJ2-1)
CASSPRTGSSYNEQFF

SEQ ID NO: 642017 - protein, 14 aa, Homo sapiens
  CDR3 for alpha chain variable domain of TCR clone 321009 (TRAV14/DV4, TRAJ57)
CAMREEGGSEKLVI

SEQ ID NO: 642018 - protein, 17 aa, Homo sapiens
  CDR3 for beta chain variable domain of TCR clone 321009 (TRBV10-3, TRBJ1-2)
CAISETRDRGLEYGYTF

SEQ ID NO: 642019 - protein, 13 aa, Homo sapiens
  CDR3 for alpha chain variable domain of TCR clone 321010 (TRAV27, TRAJ45)
CRSSGGGADGLIF

SEQ ID NO: 642020 - protein, 16 aa, Homo sapiens
  CDR3 for beta chain variable domain of TCR clone 321010 (TRBV11-2, TRBJ2-1)
CQQLIPPGVEYNEQFF

SEQ ID NO: 642021 - protein, 12 aa, Homo sapiens
  CDR3 for alpha chain variable domain of TCR clone 321011 (TRAV2, TRAJ9)
CAVGAGGFKTIF

SEQ ID NO: 642022 - protein, 12 aa, Homo sapiens
  CDR3 for beta chain variable domain of TCR clone 321011 (TRBV12-4, TRBJ2-3)
CASSSTTDTQYF

SEQ ID NO: 642023 - protein, 14 aa, Homo sapiens
  CDR3 for alpha chain variable domain of TCR clone 321012 (TRAV12-1, TRAJ3)
CVVNPGSSASKIIF

SEQ ID NO: 642024 - protein, 18 aa, Homo sapiens
  CDR3 for beta chain variable domain of TCR clone 321012 (TRBV4-2, TRBJ1-2)
CASSHDKVGHTVNYGYTF

SEQ ID NO: 642025 - protein, 15 aa, Homo sapiens
  CDR3 for alpha chain variable domain of TCR clone 321013 (TRAV12-2, TRAJ42)
CSVNSHGGSQGNLSL

SEQ ID NO: 642026 - protein, 13 aa, Homo sapiens
  CDR3 for beta chain variable domain of TCR clone 321013 (TRBV27, TRBJ1-1)
CASSVSANTEAFF

SEQ ID NO: 642027 - protein, 15 aa, Homo sapiens
  CDR3 for alpha chain variable domain of TCR clone 321014 (TRAV1-2, TRAJ36)
CAASAAPTGANNLFF

SEQ ID NO: 642028 - protein, 15 aa, Homo sapiens
  CDR3 for beta chain variable domain of TCR clone 321014 (TRBV5-1, TRBJ2-7)
CASSFSTDSVYEQYF

SEQ ID NO: 642029 - protein, 12 aa, Homo sapiens
  CDR3 for alpha chain variable domain of TCR clone 321015 (TRAV3, TRAJ20)
CAVRDPDYKLSF

SEQ ID NO: 642030 - protein, 13 aa, Homo sapiens
  CDR3 for beta chain variable domain of TCR clone 321015 (TRBV7-9, TRBJ1-2)
CASSLKRNYGYTF

SEQ ID NO: 642031 - protein, 11 aa, Homo sapiens
  CDR3 for alpha chain variable domain of TCR clone 321016 (TRAV12-2, TRAJ23)
CAHGRGGKLIF

SEQ ID NO: 642032 - protein, 14 aa, Homo sapiens
  CDR3 for beta chain variable domain of TCR clone 321016 (TRBV28, TRBJ2-5)
CASSLGDRAETQYF

SEQ ID NO: 642033 - protein, 14 aa, Homo sapiens
  CDR3 for alpha chain variable domain of TCR clone 321017 (TRAV8-1, TRAJ6)
CAVNASGGSYIPTF

SEQ ID NO: 642034 - protein, 16 aa, Homo sapiens
  CDR3 for beta chain variable domain of TCR clone 321017 (TRBV28, TRBJ1-6)
CASSPLGGEDNSPLHF

SEQ ID NO: 642035 - protein, 15 aa, Homo sapiens
  CDR3 for alpha chain variable domain of TCR clone 321018 (TRAV3, TRAJ23)
CAVRDRGNQGGKLIF

SEQ ID NO: 642036 - protein, 15 aa, Homo sapiens
  CDR3 for beta chain variable domain of TCR clone 321018 (TRBV29-1, TRBJ2-7)
CSVEFFDRGSYEQYF

SEQ ID NO: 642037 - protein, 14 aa, Homo sapiens
  CDR3 for alpha chain variable domain of TCR clone 321019 (TRAV1-2, TRAJ8)
CAVREDTGFQKLVF

SEQ ID NO: 642038 - protein, 18 aa, Homo sapiens
  CDR3 for beta chain variable domain of TCR clone 321019 (TRBV20-1, TRBJ2-6)
CSAESTPTHGSGANVLTF

SEQ ID NO: 642039 - protein, 14 aa, Homo sapiens
  CDR3 for alpha chain variable domain of TCR clone 321020 (TRAV1-2, TRAJ6)
CAVSLSGGSYIPTF

SEQ ID NO: 642040 - protein, 14 aa, Homo sapiens
  CDR3 for beta chain variable domain of TCR clone 321020 (TRBV4-1, TRBJ1-1)
CASSRSGQSFEAFF

SEQ ID NO: 642041 - protein, 12 aa, Homo sapiens
  CDR3 for alpha chain variable domain of TCR clone 321021 (TRAV12-3, TRAJ40)
CAMSTETYKYIF

SEQ ID NO: 642042 - protein, 15 aa, Homo sapiens
  CDR3 for beta chain variable domain of TCR clone 321021 (TRBV7-3, TRBJ2-2)
CGSSETGQGTGELFF

SEQ ID NO: 642043 - protein, 16 aa, Homo sapiens
  CDR3 for alpha chain variable domain of TCR clone 321022 (TRAV8-4, TRAJ5)
CAVSPLTDSGRRALTF

SEQ ID NO: 642044 - protein, 14 aa, Homo sapiens
  CDR3 for beta chain variable domain of TCR clone 321022 (TRBV19, TRBJ1-6)
CASSTDGWNSPLHF

SEQ ID NO: 642045 - protein, 14 aa, Homo sapiens
  CDR3 for alpha chain variable domain of TCR clone 321023 (TRAV2, TRAJ37)
CAVDFTSNTGKLII

SEQ ID NO: 642046 - protein, 14 aa, Homo sapiens
  CDR3 for beta chain variable domain of TCR clone 321023 (TRBV7-3, TRBJ1-1)
CASSLKGGNTEAFF

SEQ ID NO: 642047 - protein, 12 aa, Homo sapiens
  CDR3 for alpha chain variable domain of TCR clone 321024 (TRAV2, TRAJ10)
CASTGGGNKLSF

SEQ ID NO: 642048 - protein, 14 aa, Homo sapiens
  CDR3 for beta chain variable domain of TCR clone 321024 (TRBV7-2, TRBJ2-2)
CVSRGQGAAGELFF

SEQ ID NO: 642049 - protein, 12 aa, Homo sapiens
  CDR3 for alpha chain variable domain of TCR clone 321025 (TRAV23/DV6, TRAJ30)
CAASKGDDKIIF

SEQ ID NO: 642050 - protein, 15 aa, Homo sapiens
  CDR3 for beta chain variable domain of TCR clone 321025 (TRBV12-4, TRBJ2-1)
CASRPTRTGYNESSS

SEQ ID NO: 642051 - protein, 11 aa, Homo sapiens
  CDR3 for alpha chain variable domain of TCR clone 321026 (TRAV22, TRAJ20)
CAPLHDYKLSF

SEQ ID NO: 642052 - protein, 17 aa, Homo sapiens
  CDR3 for beta chain variable domain of TCR clone 321026 (TRBV13, TRBJ2-3)
CASSLSRVAGGRNTQYF

SEQ ID NO: 642053 - protein, 14 aa, Homo sapiens
  CDR3 for alpha chain variable domain of TCR clone 321027 (TRAV13-1, TRAJ35)
CAASKGGFGNVLHC

SEQ ID NO: 642054 - protein, 13 aa, Homo sapiens
  CDR3 for beta chain variable domain of TCR clone 321027 (TRBV7-9, TRBJ2-2)
CASSLDPTGELFF

SEQ ID NO: 642055 - protein, 18 aa, Homo sapiens
  CDR3 for alpha chain variable domain of TCR clone 321028 (TRAV13-1, TRAJ52)
CAAKNPNAGGTSYGKLTC

SEQ ID NO: 642056 - protein, 17 aa, Homo sapiens
  CDR3 for beta chain variable domain of TCR clone 321028 (TRBV11-2, TRBJ2-1)
CASSLYPPGVEYNEQFF

SEQ ID NO: 642057 - protein, 13 aa, Homo sapiens
  CDR3 for alpha chain variable domain of TCR clone 321029 (TRAV12-1, TRAJ11)
CVVNRAGYSSLTF

SEQ ID NO: 642058 - protein, 15 aa, Homo sapiens
  CDR3 for beta chain variable domain of TCR clone 321029 (TRBV7-3, TRBJ2-2)
CASSETGQGTGELFF

SEQ ID NO: 642059 - protein, 11 aa, Homo sapiens
  CDR3 for alpha chain variable domain of TCR clone 321030 (TRAV2, TRAJ33)
CAVDSNDQLIW

SEQ ID NO: 642060 - protein, 15 aa, Homo sapiens
  CDR3 for beta chain variable domain of TCR clone 321030 (TRBV19, TRBJ1-1)
CASTSGQIQNTEAFF

SEQ ID NO: 642061 - protein, 14 aa, Homo sapiens
  CDR3 for alpha chain variable domain of TCR clone 321031 (TRAV16, TRAJ37)
CSLDISGNTGKLIF

SEQ ID NO: 642062 - protein, 14 aa, Homo sapiens
  CDR3 for beta chain variable domain of TCR clone 321031 (TRBV7-6, TRBJ2-7)
CASSFRQGADEQYF

SEQ ID NO: 642063 - protein, 13 aa, Homo sapiens
  CDR3 for alpha chain variable domain of TCR clone 321032 (TRAV12-3, TRAJ41)
CAIAPNSGYALNF

SEQ ID NO: 642064 - protein, 16 aa, Homo sapiens
  CDR3 for beta chain variable domain of TCR clone 321032 (TRBV3-1, TRBJ2-1)
CASSQVGGTSYNEQFF

SEQ ID NO: 642065 - protein, 14 aa, Homo sapiens
  CDR3 for alpha chain variable domain of TCR clone 321033 (TRAV35, TRAJ13)
CPGSPSGGYQKVTF

SEQ ID NO: 642066 - protein, 13 aa, Homo sapiens
  CDR3 for beta chain variable domain of TCR clone 321033 (TRBV29-1, TRBJ1-1)
CSVGDSRNTEAFF

SEQ ID NO: 642067 - protein, 15 aa, Homo sapiens
  CDR3 for alpha chain variable domain of TCR clone 321034 (TRAV8-4, TRAJ40)
CAVSDDTPGTYKYIF

SEQ ID NO: 642068 - protein, 11 aa, Homo sapiens
  CDR3 for beta chain variable domain of TCR clone 321034 (TRBV19, TRBJ1-2)
CASSISSGYTF

SEQ ID NO: 642069 - protein, 16 aa, Homo sapiens
  CDR3 for alpha chain variable domain of TCR clone 321035 (TRAV13-1, TRAJ13)
CTAFFLGVTRQLPLEL

SEQ ID NO: 642070 - protein, 15 aa, Homo sapiens
  CDR3 for beta chain variable domain of TCR clone 321035 (TRBV7-8, TRBJ2-1)
CASSLADSLYNEQFF

SEQ ID NO: 642071 - protein, 17 aa, Homo sapiens
  CDR3 for alpha chain variable domain of TCR clone 321036 (TRAV8-6, TRAJ58)
CAVSSWVGETSGSRLTF

SEQ ID NO: 642072 - protein, 14 aa, Homo sapiens
  CDR3 for beta chain variable domain of TCR clone 321036 (TRBV4-2, TRBJ2-1)
CASGLDRAYNEQCF

SEQ ID NO: 642073 - protein, 15 aa, Homo sapiens
  CDR3 for alpha chain variable domain of TCR clone 321037 (TRAV12-1, TRAJ45)
RVVLSGGGGADGLTF

SEQ ID NO: 642074 - protein, 13 aa, Homo sapiens
  CDR3 for beta chain variable domain of TCR clone 321037 (TRBV9, TRBJ1-1)
CASSPTGSTEAFF

SEQ ID NO: 642075 - protein, 14 aa, Homo sapiens
  CDR3 for alpha chain variable domain of TCR clone 321038 (TRAV4, TRAJ17)
CLVGDTAAGNKLTF

SEQ ID NO: 642076 - protein, 13 aa, Homo sapiens
  CDR3 for beta chain variable domain of TCR clone 321038 (TRBV18, TRBJ2-7)
CASQSGGGYEQYF

SEQ ID NO: 642077 - protein, 14 aa, Homo sapiens
  CDR3 for alpha chain variable domain of TCR clone 321039 (TRAV17, TRAJ34)
CATDSLEGTDKLIF

SEQ ID NO: 642078 - protein, 15 aa, Homo sapiens
  CDR3 for beta chain variable domain of TCR clone 321039 (TRBV12-4, TRBJ1-2)
CASSPFTGGGYGYTF

SEQ ID NO: 642079 - protein, 17 aa, Homo sapiens
  CDR3 for alpha chain variable domain of TCR clone 321040 (TRAV26-2, TRAJ54)
CCVLLHPERPGSQKLVF

SEQ ID NO: 642080 - protein, 15 aa, Homo sapiens
  CDR3 for beta chain variable domain of TCR clone 321040 (TRBV28, TRBJ1-5)
CASSFSGYSNQPQHF

SEQ ID NO: 642081 - protein, 15 aa, Homo sapiens
  CDR3 for alpha chain variable domain of TCR clone 321041 (TRAV29/DV5, TRAJ29)
CAASERSSGNTPLVF

SEQ ID NO: 642082 - protein, 14 aa, Homo sapiens
  CDR3 for beta chain variable domain of TCR clone 321041 (TRBV12-4, TRBJ2-3)
CASSGQGSTDTQYF

SEQ ID NO: 642083 - protein, 12 aa, Homo sapiens
  CDR3 for alpha chain variable domain of TCR clone 321042 (TRAV13-1, TRAJ49)
CAASIWGNQVYF

SEQ ID NO: 642084 - protein, 14 aa, Homo sapiens
  CDR3 for beta chain variable domain of TCR clone 321042 (TRBV12-4, TRBJ1-1)
CASSLDGLNTEAFF

SEQ ID NO: 642085 - protein, 14 aa, Homo sapiens
  CDR3 for alpha chain variable domain of TCR clone 321043 (TRAV3, TRAJ20)
CAVRDSFNDYKLSS

SEQ ID NO: 642086 - protein, 14 aa, Homo sapiens
  CDR3 for beta chain variable domain of TCR clone 321043 (TRBV4-1, TRBJ2-2)
CASSQAVNTGELFF

SEQ ID NO: 642087 - protein, 20 aa, Homo sapiens
  CDR3 for alpha chain variable domain of TCR clone 321044 (TRAV26-1, TRAJ42)
CCVLLHRQTYYGGSQGNLIF

SEQ ID NO: 642088 - protein, 18 aa, Homo sapiens
  CDR3 for beta chain variable domain of TCR clone 321044 (TRBV7-7, TRBJ2-1)
CASSLALTSGRSYNEQFF

SEQ ID NO: 642089 - protein, 13 aa, Homo sapiens
  CDR3 for alpha chain variable domain of TCR clone 321045 (TRAV13-1, TRAJ37)
CAARSGNTGKLIF

SEQ ID NO: 642090 - protein, 14 aa, Homo sapiens
  CDR3 for beta chain variable domain of TCR clone 321045 (TRBV7-2, TRBJ2-7)
CASSPKTSFYEQYF

SEQ ID NO: 642091 - protein, 19 aa, Homo sapiens
  CDR3 for alpha chain variable domain of TCR clone 321046 (TRAV12-1, TRAJ26)
SSVIQPPTSVWRGGQNFVF

SEQ ID NO: 642092 - protein, 10 aa, Homo sapiens
  CDR3 for beta chain variable domain of TCR clone 321046 (TRBV20-1, TRBJ2-7)
CSATSYEQYF

SEQ ID NO: 642093 - protein, 13 aa, Homo sapiens
  CDR3 for alpha chain variable domain of TCR clone 321047 (TRAV21, TRAJ27)
YAARPGNAGKSTF

SEQ ID NO: 642094 - protein, 20 aa, Homo sapiens
  CDR3 for beta chain variable domain of TCR clone 321047 (TRBV4-2, TRBJ2-7)
CASSQASGGNLRAVLRAGHQ

SEQ ID NO: 642095 - protein, 14 aa, Homo sapiens
  CDR3 for alpha chain variable domain of TCR clone 321048 (TRAV13-2, TRAJ29)
CAEGTFETNTPLVF

SEQ ID NO: 642096 - protein, 14 aa, Homo sapiens
  CDR3 for beta chain variable domain of TCR clone 321048 (TRBV2, TRBJ2-3)
CASSEGQNTDTQYF

SEQ ID NO: 642097 - protein, 12 aa, Homo sapiens
  CDR3 for alpha chain variable domain of TCR clone 321049 (TRAV27, TRAJ13)
CAWAGGYQKVTF

SEQ ID NO: 642098 - protein, 15 aa, Homo sapiens
  CDR3 for beta chain variable domain of TCR clone 321049 (TRBV20-1, TRBJ2-6)
CSARDRGPGANVLTF

SEQ ID NO: 642099 - protein, 10 aa, Homo sapiens
  CDR3 for alpha chain variable domain of TCR clone 321050 (TRAV38-1, TRAJ34)
CAFMDDKLIF

SEQ ID NO: 642100 - protein, 17 aa, Homo sapiens
  CDR3 for beta chain variable domain of TCR clone 321050 (TRBV7-8, TRBJ2-6)
CASSAGTGGAGANVLTF

SEQ ID NO: 642101 - protein, 17 aa, Homo sapiens
  CDR3 for alpha chain variable domain of TCR clone 321051 (TRAV26-1, TRAJ37)
CIVRVLTVSRNTGKLIF

SEQ ID NO: 642102 - protein, 14 aa, Homo sapiens
  CDR3 for beta chain variable domain of TCR clone 321051 (TRBV19, TRBJ2-1)
CASPTFVLSGEQFF

SEQ ID NO: 642103 - protein, 13 aa, Homo sapiens
  CDR3 for alpha chain variable domain of TCR clone 321052 (TRAV27, TRAJ39)
CAGVNNAGNMLTF

SEQ ID NO: 642104 - protein, 19 aa, Homo sapiens
  CDR3 for beta chain variable domain of TCR clone 321052 (TRBV5-1, TRBJ2-3)
CASSFWLAGGITTTDTQYF

SEQ ID NO: 642105 - protein, 13 aa, Homo sapiens
  CDR3 for alpha chain variable domain of TCR clone 321053 (TRAV35, TRAJ58)
CSGLETSGSRLTF

SEQ ID NO: 642106 - protein, 15 aa, Homo sapiens
  CDR3 for beta chain variable domain of TCR clone 321053 (TRBV20-1, TRBJ2-1)
CSARFSAGGLNEQFF

SEQ ID NO: 642107 - protein, 11 aa, Homo sapiens
  CDR3 for alpha chain variable domain of TCR clone 321054 (TRAV12-1, TRAJ21)
GVVNNFNKFYF

SEQ ID NO: 642108 - protein, 17 aa, Homo sapiens
  CDR3 for beta chain variable domain of TCR clone 321054 (TRBV7-8, TRBJ2-1)
CASSPPTGTLAYNEQFF

SEQ ID NO: 642109 - protein, 14 aa, Homo sapiens
  CDR3 for alpha chain variable domain of TCR clone 321055 (TRAV14/DV4, TRAJ26)
CAMREGTYGQNFVF

SEQ ID NO: 642110 - protein, 17 aa, Homo sapiens
  CDR3 for beta chain variable domain of TCR clone 321055 (TRBV11-2, TRBJ2-1)
CASSLYPPGVEYNEQFF

SEQ ID NO: 642111 - protein, 14 aa, Homo sapiens
  CDR3 for alpha chain variable domain of TCR clone 321056 (TRAV1-2, TRAJ16)
CAVNRFSDGQKLLF

SEQ ID NO: 642112 - protein, 13 aa, Homo sapiens
  CDR3 for beta chain variable domain of TCR clone 321056 (TRBV19, TRBJ1-2)
CASSVPGQDDYTF

SEQ ID NO: 642113 - protein, 14 aa, Homo sapiens
  CDR3 for alpha chain variable domain of TCR clone 321057 (TRAV17, TRAJ36)
CATDALSGANNLFF

SEQ ID NO: 642114 - protein, 13 aa, Homo sapiens
  CDR3 for beta chain variable domain of TCR clone 321057 (TRBV12-4, TRBJ1-2)
CASSSGLTVISTF

SEQ ID NO: 642115 - protein, 15 aa, Homo sapiens
  CDR3 for alpha chain variable domain of TCR clone 321058 (TRAV4, TRAJ32)
CLVGEDVGATNKLIF

SEQ ID NO: 642116 - protein, 14 aa, Homo sapiens
  CDR3 for beta chain variable domain of TCR clone 321058 (TRBV7-2, TRBJ2-5)
CASSPRGSSETQYF

SEQ ID NO: 642117 - protein, 14 aa, Homo sapiens
  CDR3 for alpha chain variable domain of TCR clone 321059 (TRAV23/DV6, TRAJ17)
CAARGRAAGNKLTF

SEQ ID NO: 642118 - protein, 13 aa, Homo sapiens
  CDR3 for beta chain variable domain of TCR clone 321059 (TRBV7-6, TRBJ1-2)
CASSLVADYGDTF

SEQ ID NO: 642119 - protein, 15 aa, Homo sapiens
  CDR3 for alpha chain variable domain of TCR clone 321060 (TRAV12-2, TRAJ56)
CAVNPFTGANSKLTF

SEQ ID NO: 642120 - protein, 15 aa, Homo sapiens
  CDR3 for beta chain variable domain of TCR clone 321060 (TRBV7-8, TRBJ1-5)
CASSLEGSGNQPQHF

SEQ ID NO: 642121 - protein, 15 aa, Homo sapiens
  CDR3 for alpha chain variable domain of TCR clone 321061 (TRAV8-3, TRAJ9)
CALEDRGTGGFKTIF

SEQ ID NO: 642122 - protein, 16 aa, Homo sapiens
  CDR3 for beta chain variable domain of TCR clone 321061 (TRBV24-1, TRBJ2-3)
CATSDPGTGATDTQYF

SEQ ID NO: 642123 - protein, 17 aa, Homo sapiens
  CDR3 for alpha chain variable domain of TCR clone 321062 (TRAV17, TRAJ7)
CATLGRLAFGKGNQVVC

SEQ ID NO: 642124 - protein, 13 aa, Homo sapiens
  CDR3 for beta chain variable domain of TCR clone 321062 (TRBV12-4, TRBJ2-7)
CASSLERVREQYF

SEQ ID NO: 642125 - protein, 13 aa, Homo sapiens
  CDR3 for alpha chain variable domain of TCR clone 321063 (TRAV26-1, TRAJ30)
CIVRVESNDKIIF

SEQ ID NO: 642126 - protein, 14 aa, Homo sapiens
  CDR3 for beta chain variable domain of TCR clone 321063 (TRBV20-1, TRBJ2-7)
CSAKRGRSSYEQYF

SEQ ID NO: 642127 - protein, 15 aa, Homo sapiens
  CDR3 for alpha chain variable domain of TCR clone 321064 (TRAV8-3, TRAJ45)
CASSYSGGGADGLTF

SEQ ID NO: 642128 - protein, 15 aa, Homo sapiens
  CDR3 for beta chain variable domain of TCR clone 321064 (TRBV7-9, TRBJ2-7)
CASSFAGVTSSTSGR

SEQ ID NO: 642129 - protein, 11 aa, Homo sapiens
  CDR3 for alpha chain variable domain of TCR clone 321065 (TRAV4, TRAJ23)
CLVGRKAYLRT

SEQ ID NO: 642130 - protein, 15 aa, Homo sapiens
  CDR3 for beta chain variable domain of TCR clone 321065 (TRBV28, TRBJ2-3)
CASSPDRQGANTQYF

SEQ ID NO: 642131 - protein, 15 aa, Homo sapiens
  CDR3 for alpha chain variable domain of TCR clone 321066 (TRAV8-4, TRAJ15)
CAVSEPVQAGTALIF

SEQ ID NO: 642132 - protein, 14 aa, Homo sapiens
  CDR3 for beta chain variable domain of TCR clone 321066 (TRBV7-2, TRBJ2-7)
CASSPKTSFYEQYF

SEQ ID NO: 642133 - protein, 16 aa, Homo sapiens
  CDR3 for alpha chain variable domain of TCR clone 321067 (TRAV4, TRAJ9)
CLVGDPNRPGGFKTIY

SEQ ID NO: 642134 - protein, 16 aa, Homo sapiens
  CDR3 for beta chain variable domain of TCR clone 321067 (TRBV28, TRBJ1-4)
CASSPPYRGRSEKLFF

SEQ ID NO: 642135 - protein, 11 aa, Homo sapiens
  CDR3 for alpha chain variable domain of TCR clone 321068 (TRAV3, TRAJ21)
CAVGNFNKFYF

SEQ ID NO: 642136 - protein, 15 aa, Homo sapiens
  CDR3 for beta chain variable domain of TCR clone 321068 (TRBV19, TRBJ2-4)
CASRGPRRGENIQYF

SEQ ID NO: 642137 - protein, 10 aa, Homo sapiens
  CDR3 for alpha chain variable domain of TCR clone 321069 (TRAV27, TRAJ37)
CAGGVGTLIF

SEQ ID NO: 642138 - protein, 13 aa, Homo sapiens
  CDR3 for beta chain variable domain of TCR clone 321069 (TRBV27, TRBJ1-2)
CASSRGLVYGYTF

SEQ ID NO: 642139 - protein, 11 aa, Homo sapiens
  CDR3 for alpha chain variable domain of TCR clone 321070 (TRAV1-2, TRAJ40)
CAVPGTYKYIF

SEQ ID NO: 642140 - protein, 13 aa, Homo sapiens
  CDR3 for beta chain variable domain of TCR clone 321070 (TRBV27, TRBJ1-4)
CASSLMGDEKLFV

SEQ ID NO: 642141 - protein, 13 aa, Homo sapiens
  CDR3 for alpha chain variable domain of TCR clone 321071 (TRAV1-2, TRAJ33)
CAVSEDSNYHLIW

SEQ ID NO: 642142 - protein, 16 aa, Homo sapiens
  CDR3 for beta chain variable domain of TCR clone 321071 (TRBV4-2, TRBJ2-7)
CASSQDGVERGYEQYF

SEQ ID NO: 642143 - protein, 13 aa, Homo sapiens
  CDR3 for alpha chain variable domain of TCR clone 321072 (TRAV26-1, TRAJ38)
IAANAGNNRKLIW

SEQ ID NO: 642144 - protein, 13 aa, Homo sapiens
  CDR3 for beta chain variable domain of TCR clone 321072 (TRBV20-1, TRBJ1-1)
CSARGGGNTEAFF

SEQ ID NO: 642145 - protein, 16 aa, Homo sapiens
  CDR3 for alpha chain variable domain of TCR clone 321073 (TRAV8-3, TRAJ13)
CAVVLMNSGGYQKVTF

SEQ ID NO: 642146 - protein, 13 aa, Homo sapiens
  CDR3 for beta chain variable domain of TCR clone 321073 (TRBV28, TRBJ2-5)
CASSFAGGETQYF

SEQ ID NO: 642147 - protein, 14 aa, Homo sapiens
  CDR3 for alpha chain variable domain of TCR clone 321074 (TRAV1-2, TRAJ27)
CAVRYNTNAGKSTF

SEQ ID NO: 642148 - protein, 16 aa, Homo sapiens
  CDR3 for beta chain variable domain of TCR clone 321074 (TRBV15, TRBJ2-3)
CATSRSRQGGTDTQYF

SEQ ID NO: 642149 - protein, 13 aa, Homo sapiens
  CDR3 for alpha chain variable domain of TCR clone 321075 (TRAV21, TRAJ27)
CAARPGNAGKSTF

SEQ ID NO: 642150 - protein, 14 aa, Homo sapiens
  CDR3 for beta chain variable domain of TCR clone 321075 (TRBV5-4, TRBJ1-1)
CASSVDSRRDEAFF

SEQ ID NO: 642151 - protein, 14 aa, Homo sapiens
  CDR3 for alpha chain variable domain of TCR clone 321076 (TRAV17, TRAJ39)
CATDPVRAGNMLNF

SEQ ID NO: 642152 - protein, 15 aa, Homo sapiens
  CDR3 for beta chain variable domain of TCR clone 321076 (TRBV13, TRBJ1-5)
CASSFGQGGVQPQHF

SEQ ID NO: 642153 - protein, 18 aa, Homo sapiens
  CDR3 for alpha chain variable domain of TCR clone 321077 (TRAV13-1, TRAJ52)
CAASKRSAGGTRYGKMTF

SEQ ID NO: 642154 - protein, 13 aa, Homo sapiens
  CDR3 for beta chain variable domain of TCR clone 321077 (TRBV12-4, TRBJ1-2)
CASSLRQGNGYTF

SEQ ID NO: 642155 - protein, 17 aa, Homo sapiens
  CDR3 for alpha chain variable domain of TCR clone 321078 (TRAV1-1, TRAJ9)
CLLLLRCHNTGGFKTIF

SEQ ID NO: 642156 - protein, 14 aa, Homo sapiens
  CDR3 for beta chain variable domain of TCR clone 321078 (TRBV20-1, TRBJ2-1)
CSAQIGGSANEQFF

SEQ ID NO: 642157 - protein, 10 aa, Homo sapiens
  CDR3 for alpha chain variable domain of TCR clone 321079 (TRAV21, TRAJ9)
CAVPYWRLQN

SEQ ID NO: 642158 - protein, 15 aa, Homo sapiens
  CDR3 for beta chain variable domain of TCR clone 321079 (TRBV4-1, TRBJ2-5)
CASSQWDLYQETQYF

SEQ ID NO: 642159 - protein, 15 aa, Homo sapiens
  CDR3 for alpha chain variable domain of TCR clone 321080 (TRAV13-1, TRAJ44)
CAASRNTGTASKITF

SEQ ID NO: 642160 - protein, 14 aa, Homo sapiens
  CDR3 for beta chain variable domain of TCR clone 321080 (TRBV11-2, TRBJ1-2)
CASSLYRGNYGYTF

SEQ ID NO: 642161 - protein, 14 aa, Homo sapiens
  CDR3 for alpha chain variable domain of TCR clone 321081 (TRAV1-2, TRAJ8)
CAVREDTCFQKLVF

SEQ ID NO: 642162 - protein, 17 aa, Homo sapiens
  CDR3 for beta chain variable domain of TCR clone 321081 (TRBV11-2, TRBJ2-1)
CASSLYPPGVEYNEQFF

SEQ ID NO: 642163 - protein, 15 aa, Homo sapiens
  CDR3 for alpha chain variable domain of TCR clone 321082 (TRAV3, TRAJ22)
CAVRDRGGSARQLTF

SEQ ID NO: 642164 - protein, 16 aa, Homo sapiens
  CDR3 for beta chain variable domain of TCR clone 321082 (TRBV12-4, TRBJ2-3)
CASSIPSGGGTDTQYF

SEQ ID NO: 642165 - protein, 14 aa, Homo sapiens
  CDR3 for alpha chain variable domain of TCR clone 321083 (TRAV13-1, TRAJ20)
CAARPGSNDYQLSF

SEQ ID NO: 642166 - protein, 15 aa, Homo sapiens
  CDR3 for beta chain variable domain of TCR clone 321083 (TRBV4-1, TRBJ2-7)
CASSQQGQGFDEQYF

SEQ ID NO: 642167 - protein, 16 aa, Homo sapiens
  CDR3 for alpha chain variable domain of TCR clone 321084 (TRAV8-4, TRAJ52)
CAVSGPGGTSYGKLTF

SEQ ID NO: 642168 - protein, 15 aa, Homo sapiens
  CDR3 for beta chain variable domain of TCR clone 321084 (TRBV12-4, TRBJ2-7)
CASSQRTSGNYEQYF

SEQ ID NO: 642169 - protein, 15 aa, Homo sapiens
  CDR3 for alpha chain variable domain of TCR clone 321085 (TRAV12-2, TRAJ32)
CAVNHYGGATNKLIF

SEQ ID NO: 642170 - protein, 14 aa, Homo sapiens
  CDR3 for beta chain variable domain of TCR clone 321085 (TRBV27, TRBJ2-1)
CSSSFGREANEQFF

SEQ ID NO: 642171 - protein, 15 aa, Homo sapiens
  CDR3 for alpha chain variable domain of TCR clone 321086 (TRAV8-2, TRAJ44)
DAAEYFDGTASKLPF

SEQ ID NO: 642172 - protein, 14 aa, Homo sapiens
  CDR3 for beta chain variable domain of TCR clone 321086 (TRBV7-8, TRBJ2-3)
CASSLDRGTDTQYF

SEQ ID NO: 642173 - protein, 13 aa, Homo sapiens
  CDR3 for alpha chain variable domain of TCR clone 321087 (TRAV12-2, TRAJ4)
CAVFSGGYNKLIF

SEQ ID NO: 642174 - protein, 13 aa, Homo sapiens
  CDR3 for beta chain variable domain of TCR clone 321087 (TRBV19, TRBJ1-5)
CASGIDRDQPQHF

SEQ ID NO: 642175 - protein, 12 aa, Homo sapiens
  CDR3 for alpha chain variable domain of TCR clone 321088 (TRAV26-1, TRAJ35)
CIGLSFGNVLHR

SEQ ID NO: 642176 - protein, 12 aa, Homo sapiens
  CDR3 for beta chain variable domain of TCR clone 321088 (TRBV7-9, TRBJ1-5)
CASSPQGQPQHF

SEQ ID NO: 642177 - protein, 17 aa, Homo sapiens
  CDR3 for alpha chain variable domain of TCR clone 321089 (TRAV13-1, TRAJ52)
CAAGRNAGGTSYVKLTF

SEQ ID NO: 642178 - protein, 12 aa, Homo sapiens
  CDR3 for beta chain variable domain of TCR clone 321089 (TRBV29-1, TRBJ1-3)
CSTRDSGNTIYF

SEQ ID NO: 642179 - protein, 13 aa, Homo sapiens
  CDR3 for alpha chain variable domain of TCR clone 321090 (TRAV1-2, TRAJ9)
CAALNTGGFKTIF

SEQ ID NO: 642180 - protein, 16 aa, Homo sapiens
  CDR3 for beta chain variable domain of TCR clone 321090 (TRBV27, TRBJ2-2)
CASSSSGVSNTGELFF

SEQ ID NO: 642181 - protein, 14 aa, Homo sapiens
  CDR3 for alpha chain variable domain of TCR clone 321091 (TRAV26-1, TRAJ15)
CIVRANQAGTALIF

SEQ ID NO: 642182 - protein, 16 aa, Homo sapiens
  CDR3 for beta chain variable domain of TCR clone 321091 (TRBV20-1, TRBJ1-4)
YSAIGGPRGANEKLFF

SEQ ID NO: 642183 - protein, 14 aa, Homo sapiens
  CDR3 for alpha chain variable domain of TCR clone 321092 (TRAV35, TRAJ13)
CAGSPSGGYQKVTF

SEQ ID NO: 642184 - protein, 12 aa, Homo sapiens
  CDR3 for beta chain variable domain of TCR clone 321092 (TRBV19, TRBJ1-5)
CASSIAQQPQHF

SEQ ID NO: 642185 - protein, 13 aa, Homo sapiens
  CDR3 for alpha chain variable domain of TCR clone 321093 (TRAV8-1, TRAJ34)
CAVRPYNTDKLIF

SEQ ID NO: 642186 - protein, 15 aa, Homo sapiens
  CDR3 for beta chain variable domain of TCR clone 321093 (TRBV7-9, TRBJ1-3)
CASSLRSGSGNTLYF

SEQ ID NO: 642187 - protein, 14 aa, Homo sapiens
  CDR3 for alpha chain variable domain of TCR clone 321094 (TRAV12-2, TRAJ13)
CAVKKTGGYQTVTF

SEQ ID NO: 642188 - protein, 17 aa, Homo sapiens
  CDR3 for beta chain variable domain of TCR clone 321094 (TRBV13, TRBJ2-3)
CASSLSRVAGGRNTQYF

SEQ ID NO: 642189 - protein, 12 aa, Homo sapiens
  CDR3 for alpha chain variable domain of TCR clone 321095 (TRAV12-2, TRAJ21)
CAVRYNFNKFYF

SEQ ID NO: 642190 - protein, 15 aa, Homo sapiens
  CDR3 for beta chain variable domain of TCR clone 321095 (TRBV7-9, TRBJ2-3)
CASSHGDRVPDTQYF

SEQ ID NO: 642191 - protein, 12 aa, Homo sapiens
  CDR3 for alpha chain variable domain of TCR clone 321096 (TRAV1-1, TRAJ39)
CAVPVVGNMLTF

SEQ ID NO: 642192 - protein, 15 aa, Homo sapiens
  CDR3 for beta chain variable domain of TCR clone 321096 (TRBV19, TRBJ2-4)
CASRGPRRGENIQYF

SEQ ID NO: 642193 - protein, 11 aa, Homo sapiens
  CDR3 for alpha chain variable domain of TCR clone 321097 (TRAV2, TRAJ13)
CASGGYQKVTF

SEQ ID NO: 642194 - protein, 14 aa, Homo sapiens
  CDR3 for beta chain variable domain of TCR clone 321097 (TRBV7-8, TRBJ2-3)
CASSLGAGTDTQYF

SEQ ID NO: 642195 - protein, 13 aa, Homo sapiens
  CDR3 for alpha chain variable domain of TCR clone 321098 (TRAV9-2, TRAJ53)
CALSGGSNYKLTF

SEQ ID NO: 642196 - protein, 13 aa, Homo sapiens
  CDR3 for beta chain variable domain of TCR clone 321098 (TRBV12-5, TRBJ2-3)
CASGDRQSDTQYF

SEQ ID NO: 642197 - protein, 12 aa, Homo sapiens
  CDR3 for alpha chain variable domain of TCR clone 321099 (TRAV13-2, TRAJ23)
CAERHRGGKLIF

SEQ ID NO: 642198 - protein, 14 aa, Homo sapiens
  CDR3 for beta chain variable domain of TCR clone 321099 (TRBV5-1, TRBJ1-2)
CASGPQGANYGYTF

SEQ ID NO: 642199 - protein, 12 aa, Homo sapiens
  CDR3 for alpha chain variable domain of TCR clone 321100 (TRAV3, TRAJ20)
CAVRDPDYKLSF

SEQ ID NO: 642200 - protein, 16 aa, Homo sapiens
  CDR3 for beta chain variable domain of TCR clone 321100 (TRBV19, TRBJ2-1)
CASSSKGTRSYNEQFF

SEQ ID NO: 642201 - protein, 15 aa, Homo sapiens
  CDR3 for alpha chain variable domain of TCR clone 321101 (TRAV3, TRAJ9)
CAVRDSNTGGFKTIS

SEQ ID NO: 642202 - protein, 16 aa, Homo sapiens
  CDR3 for beta chain variable domain of TCR clone 321101 (TRBV15, TRBJ2-5)
CATSPTTGQGMETQYF

SEQ ID NO: 642203 - protein, 13 aa, Homo sapiens
  CDR3 for alpha chain variable domain of TCR clone 321102 (TRAV30, TRAJ24)
CGTVTDSWGKLQF

SEQ ID NO: 642204 - protein, 15 aa, Homo sapiens
  CDR3 for beta chain variable domain of TCR clone 321102 (TRBV5-1, TRBJ2-1)
CASSPPRAPYNEQLF

SEQ ID NO: 642205 - protein, 16 aa, Homo sapiens
  CDR3 for alpha chain variable domain of TCR clone 321103 (TRAV3, TRAJ13)
CAVRDENSGGYQKVTF

SEQ ID NO: 642206 - protein, 14 aa, Homo sapiens
  CDR3 for beta chain variable domain of TCR clone 321103 (TRBV7-3, TRBJ1-5)
RASSFSGCNQPQHF

SEQ ID NO: 642207 - protein, 12 aa, Homo sapiens
  CDR3 for alpha chain variable domain of TCR clone 321104 (TRAV36/DV7, TRAJ54)
CAVVRGAQKLVF

SEQ ID NO: 642208 - protein, 16 aa, Homo sapiens
  CDR3 for beta chain variable domain of TCR clone 321104 (TRBV28, TRBJ2-2)
CASSLEGGSNTGELFF

SEQ ID NO: 642209 - protein, 18 aa, Homo sapiens
  CDR3 for alpha chain variable domain of TCR clone 321105 (TRAV26-1, TRAJ24)
CCVLLHRQKSRGLGKFQF

SEQ ID NO: 642210 - protein, 16 aa, Homo sapiens
  CDR3 for beta chain variable domain of TCR clone 321105 (TRBV6-3, TRBJ2-1)
CASSYRRGDSYNEQFF

SEQ ID NO: 642211 - protein, 13 aa, Homo sapiens
  CDR3 for alpha chain variable domain of TCR clone 321106 (TRAV36/DV7, TRAJ38)
CVANAGNNRKLIW

SEQ ID NO: 642212 - protein, 13 aa, Homo sapiens
  CDR3 for beta chain variable domain of TCR clone 321106 (TRBV12-4, TRBJ1-2)
CASSSGLTVISTF

SEQ ID NO: 642213 - protein, 11 aa, Homo sapiens
  CDR3 for alpha chain variable domain of TCR clone 321107 (TRAV39, TRAJ33)
CAVDPWIATTS

SEQ ID NO: 642214 - protein, 14 aa, Homo sapiens
  CDR3 for beta chain variable domain of TCR clone 321107 (TRBV12-5, TRBJ2-5)
CASGSRTHQETQYF

SEQ ID NO: 642215 - protein, 12 aa, Homo sapiens
  CDR3 for alpha chain variable domain of TCR clone 321108 (TRAV17, TRAJ12)
CATLRSSYKLIF

SEQ ID NO: 642216 - protein, 16 aa, Homo sapiens
  CDR3 for beta chain variable domain of TCR clone 321108 (TRBV28, TRBJ2-7)
CASSLFFETGGTEQYV

SEQ ID NO: 642217 - protein, 14 aa, Homo sapiens
  CDR3 for alpha chain variable domain of TCR clone 321109 (TRAV1-1, TRAJ27)
CAVTYNTNAGKSTF

SEQ ID NO: 642218 - protein, 15 aa, Homo sapiens
  CDR3 for beta chain variable domain of TCR clone 321109 (TRBV7-2, TRBJ2-1)
CASSSGLAGGNERFF

SEQ ID NO: 642219 - protein, 15 aa, Homo sapiens
  CDR3 for alpha chain variable domain of TCR clone 321110 (TRAV8-3, TRAJ45)
CASAYSGGGADGLTF

SEQ ID NO: 642220 - protein, 14 aa, Homo sapiens
  CDR3 for beta chain variable domain of TCR clone 321110 (TRBV27, TRBJ2-7)
CASATGTERREQYF

SEQ ID NO: 642221 - protein, 14 aa, Homo sapiens
  CDR3 for alpha chain variable domain of TCR clone 321111 (TRAV1-2, TRAJ16)
CAVNRFSDDQKLLF

SEQ ID NO: 642222 - protein, 16 aa, Homo sapiens
  CDR3 for beta chain variable domain of TCR clone 321111 (TRBV12-4, TRBJ2-5)
CASSFFVRGRQETQYF

SEQ ID NO: 642223 - protein, 14 aa, Homo sapiens
  CDR3 for alpha chain variable domain of TCR clone 321112 (TRAV25, TRAJ22)
CAVRSSGSARQLTF

SEQ ID NO: 642224 - protein, 16 aa, Homo sapiens
  CDR3 for beta chain variable domain of TCR clone 321112 (TRBV4-2, TRBJ1-1)
CASSPSPGRDAPEAFF

SEQ ID NO: 642225 - protein, 15 aa, Homo sapiens
  CDR3 for alpha chain variable domain of TCR clone 321113 (TRAV20, TRAJ53)
CAVQASGGSNYKPTF

SEQ ID NO: 642226 - protein, 12 aa, Homo sapiens
  CDR3 for beta chain variable domain of TCR clone 321113 (TRBV7-8, TRBJ2-7)
CASSLGDREQYF

SEQ ID NO: 642227 - protein, 14 aa, Homo sapiens
  CDR3 for alpha chain variable domain of TCR clone 321114 (TRAV29/DV5, TRAJ36)
CAARRKTGANNLFF

SEQ ID NO: 642228 - protein, 14 aa, Homo sapiens
  CDR3 for beta chain variable domain of TCR clone 321114 (TRBV29-1, TRBJ2-1)
CSVGAVAGGNEQFF

SEQ ID NO: 642229 - protein, 14 aa, Homo sapiens
  CDR3 for alpha chain variable domain of TCR clone 321115 (TRAV1-2, TRAJ16)
CAVNRFSDGQKLLF

SEQ ID NO: 642230 - protein, 17 aa, Homo sapiens
  CDR3 for beta chain variable domain of TCR clone 321115 (TRBV5-1, TRBJ2-2)
CASSLAGLSGGTGELFV

SEQ ID NO: 642231 - protein, 14 aa, Homo sapiens
  CDR3 for alpha chain variable domain of TCR clone 321116 (TRAV12-2, TRAJ13)
CAVKKTGGYQKVTF

SEQ ID NO: 642232 - protein, 11 aa, Homo sapiens
  CDR3 for beta chain variable domain of TCR clone 321116 (TRBV7-9, TRBJ2-5)
CASSLGETQYF

SEQ ID NO: 642233 - protein, 15 aa, Homo sapiens
  CDR3 for alpha chain variable domain of TCR clone 321117 (TRAV12-1, TRAJ5)
CVVNMLETGRRALTF

SEQ ID NO: 642234 - protein, 16 aa, Homo sapiens
  CDR3 for beta chain variable domain of TCR clone 321117 (TRBV19, TRBJ2-2)
CASRSPGTGATGELFF

SEQ ID NO: 642235 - protein, 15 aa, Homo sapiens
  CDR3 for alpha chain variable domain of TCR clone 321118 (TRAV23/DV6, TRAJ13)
CAAWPGGGGYQKVTF

SEQ ID NO: 642236 - protein, 17 aa, Homo sapiens
  CDR3 for beta chain variable domain of TCR clone 321118 (TRBV11-2, TRBJ2-1)
CASSLYPPGVEYNEQFF

SEQ ID NO: 642237 - protein, 17 aa, Homo sapiens
  CDR3 for alpha chain variable domain of TCR clone 321119 (TRAV13-1, TRAJ52)
CAASSGAGGTSYGKLTF

SEQ ID NO: 642238 - protein, 13 aa, Homo sapiens
  CDR3 for beta chain variable domain of TCR clone 321119 (TRBV2, TRBJ1-4)
CASSDLFNEKLFF

SEQ ID NO: 642239 - protein, 15 aa, Homo sapiens
  CDR3 for alpha chain variable domain of TCR clone 321120 (TRAV12-3, TRAJ11)
CTMSEENSGYSTLTF

SEQ ID NO: 642240 - protein, 13 aa, Homo sapiens
  CDR3 for beta chain variable domain of TCR clone 321120 (TRBV6-1, TRBJ1-1)
CASSRQGNTEAFF

SEQ ID NO: 642241 - protein, 15 aa, Homo sapiens
  CDR3 for alpha chain variable domain of TCR clone 321121 (TRAV27, TRAJ17)
CRSTMIKAAGNKLTF

SEQ ID NO: 642242 - protein, 13 aa, Homo sapiens
  CDR3 for beta chain variable domain of TCR clone 321121 (TRBV18, TRBJ2-1)
CASQSGGGYEQYF

SEQ ID NO: 642243 - protein, 14 aa, Homo sapiens
  CDR3 for alpha chain variable domain of TCR clone 321122 (TRAV12-2, TRAJ17)
CAALFKAAGNKLTF

SEQ ID NO: 642244 - protein, 15 aa, Homo sapiens
  CDR3 for beta chain variable domain of TCR clone 321122 (TRBV18, TRBJ2-3)
CASSPRAGETDTQYF

SEQ ID NO: 642245 - protein, 15 aa, Homo sapiens
  CDR3 for alpha chain variable domain of TCR clone 321123 (TRAV16, TRAJ17)
CALSQIKAAGNKLTF

SEQ ID NO: 642246 - protein, 15 aa, Homo sapiens
  CDR3 for beta chain variable domain of TCR clone 321123 (TRBV7-3, TRBJ1-1)
CASSPRADRNTEAFF

SEQ ID NO: 642247 - protein, 12 aa, Homo sapiens
  CDR3 for alpha chain variable domain of TCR clone 321124 (TRAV21, TRAJ33)
CPKMDSNYQLIW

SEQ ID NO: 642248 - protein, 18 aa, Homo sapiens
  CDR3 for beta chain variable domain of TCR clone 321124 (TRBV15, TRBJ2-3)
CATSRDGARSWDTDTQYF

SEQ ID NO: 642249 - protein, 14 aa, Homo sapiens
  CDR3 for alpha chain variable domain of TCR clone 321125 (TRAV13-1, TRAJ6)
CAASITGGSYMPTF

SEQ ID NO: 642250 - protein, 14 aa, Homo sapiens
  CDR3 for beta chain variable domain of TCR clone 321125 (TRBV7-3, TRBJ2-1)
CASSLSGSYNEQFF

SEQ ID NO: 642251 - protein, 11 aa, Homo sapiens
  CDR3 for alpha chain variable domain of TCR clone 321126 (TRAV2, TRAJ13)
CASGGYQKVTF

SEQ ID NO: 642252 - protein, 20 aa, Homo sapiens
  CDR3 for beta chain variable domain of TCR clone 321126 (TRBV28, TRBJ2-1)
CASNPIGRSPGLAGGNEQFF

SEQ ID NO: 642253 - protein, 16 aa, Homo sapiens
  CDR3 for alpha chain variable domain of TCR clone 321127 (TRAV3, TRAJ37)
CAVRGKGSGNTVKLIF

SEQ ID NO: 642254 - protein, 12 aa, Homo sapiens
  CDR3 for beta chain variable domain of TCR clone 321127 (TRBV11-2, TRBJ2-2)
CASSLGGGELFF

SEQ ID NO: 642255 - protein, 14 aa, Homo sapiens
  CDR3 for alpha chain variable domain of TCR clone 321128 (TRAV12-2, TRAJ13)
CAVKKTGGYQQITF

SEQ ID NO: 642256 - protein, 15 aa, Homo sapiens
  CDR3 for beta chain variable domain of TCR clone 321128 (TRBV27, TRBJ2-1)
CASSNGGGSSNEQFF

SEQ ID NO: 642257 - protein, 15 aa, Homo sapiens
  CDR3 for alpha chain variable domain of TCR clone 321129 (TRAV3, TRAJ22)
CAVRDRGGSARQLTF

SEQ ID NO: 642258 - protein, 14 aa, Homo sapiens
  CDR3 for beta chain variable domain of TCR clone 321129 (TRBV19, TRBJ2-1)
CASSRLASINEQFL

SEQ ID NO: 642259 - protein, 16 aa, Homo sapiens
  CDR3 for alpha chain variable domain of TCR clone 321130 (TRAV26-1, TRAJ37)
CIVREDGSGNTGKLIF

SEQ ID NO: 642260 - protein, 17 aa, Homo sapiens
  CDR3 for beta chain variable domain of TCR clone 321130 (TRBV4-1, TRBJ2-7)
CASSRDPLGVRGGEQYF

SEQ ID NO: 642261 - protein, 11 aa, Homo sapiens
  CDR3 for alpha chain variable domain of TCR clone 321131 (TRAV3, TRAJ21)
CAVGNFNKFYF

SEQ ID NO: 642262 - protein, 16 aa, Homo sapiens
  CDR3 for beta chain variable domain of TCR clone 321131 (TRBV19, TRBJ2-1)
CASSKAGPSPFNEQFF

SEQ ID NO: 642263 - protein, 14 aa, Homo sapiens
  CDR3 for alpha chain variable domain of TCR clone 321132 (TRAV13-2, TRAJ29)
CAENIEPGNTPLVF

SEQ ID NO: 642264 - protein, 14 aa, Homo sapiens
  CDR3 for beta chain variable domain of TCR clone 321132 (TRBV19, TRBJ2-2)
CATTGHANTGELLF

SEQ ID NO: 642265 - protein, 13 aa, Homo sapiens
  CDR3 for alpha chain variable domain of TCR clone 321133 (TRAV21, TRAJ20)
CAVGLRVDYKLSF

SEQ ID NO: 642266 - protein, 13 aa, Homo sapiens
  CDR3 for beta chain variable domain of TCR clone 321133 (TRBV27, TRBJ1-1)
CASSLSIGAEAFF

SEQ ID NO: 642267 - protein, 13 aa, Homo sapiens
  CDR3 for alpha chain variable domain of TCR clone 321134 (TRAV13-2, TRAJ5)
WAESDTGRRALTF

SEQ ID NO: 642268 - protein, 14 aa, Homo sapiens
  CDR3 for beta chain variable domain of TCR clone 321134 (TRBV2, TRBJ1-1)
CASTQVGENTEAFF

SEQ ID NO: 642269 - protein, 14 aa, Homo sapiens
  CDR3 for alpha chain variable domain of TCR clone 321135 (TRAV1-2, TRAJ16)
CAVNRFSDGQKLLF

SEQ ID NO: 642270 - protein, 17 aa, Homo sapiens
  CDR3 for beta chain variable domain of TCR clone 321135 (TRBV28, TRBJ2-7)
CASSPLRGRRWKGGQYF

SEQ ID NO: 642271 - protein, 13 aa, Homo sapiens
  CDR3 for alpha chain variable domain of TCR clone 321136 (TRAV27, TRAJ42)
CAGARGSQGNLIF

SEQ ID NO: 642272 - protein, 14 aa, Homo sapiens
  CDR3 for beta chain variable domain of TCR clone 321136 (TRBV12-4, TRBJ2-3)
CASSGQGSTDTQYF

SEQ ID NO: 642273 - protein, 17 aa, Homo sapiens
  CDR3 for alpha chain variable domain of TCR clone 321137 (TRAV3, TRAJ6)
CAVRDGPRAGGSYIPNF

SEQ ID NO: 642274 - protein, 15 aa, Homo sapiens
  CDR3 for beta chain variable domain of TCR clone 321137 (TRBV5-1, TRBJ2-3)
CASSVTSGSTDTQYF

SEQ ID NO: 642275 - protein, 13 aa, Homo sapiens
  CDR3 for alpha chain variable domain of TCR clone 321138 (TRAV12-3, TRAJ47)
CARKKEYGNKLVF

SEQ ID NO: 642276 - protein, 17 aa, Homo sapiens
  CDR3 for beta chain variable domain of TCR clone 321138 (TRBV11-2, TRBJ2-1)
CASSLYPPGVEYNEQFF

SEQ ID NO: 642277 - protein, 12 aa, Homo sapiens
  CDR3 for alpha chain variable domain of TCR clone 321139 (TRAV27, TRAJ20)
CAGASNDYKLSF

SEQ ID NO: 642278 - protein, 15 aa, Homo sapiens
  CDR3 for beta chain variable domain of TCR clone 321139 (TRBV4-1, TRBJ1-2)
CASSQGQGAAYGYTF

SEQ ID NO: 642279 - protein, 16 aa, Homo sapiens
  CDR3 for alpha chain variable domain of TCR clone 321140 (TRAV20, TRAJ10)
CAVRFFLTGGGNKLTF

SEQ ID NO: 642280 - protein, 15 aa, Homo sapiens
  CDR3 for beta chain variable domain of TCR clone 321140 (TRBV7-3, TRBJ2-7)
CASSLNAQGAYEQYF

SEQ ID NO: 642281 - protein, 13 aa, Homo sapiens
  CDR3 for alpha chain variable domain of TCR clone 321141 (TRAV27, TRAJ29)
CAGAHSGNTPLVF

SEQ ID NO: 642282 - protein, 13 aa, Homo sapiens
  CDR3 for beta chain variable domain of TCR clone 321141 (TRBV11-2, TRBJ2-7)
CASSVTRQGEQYF

SEQ ID NO: 642283 - protein, 11 aa, Homo sapiens
  CDR3 for alpha chain variable domain of TCR clone 321142 (TRAV35, TRAJ30)
CAGPGDDKIIF

SEQ ID NO: 642284 - protein, 13 aa, Homo sapiens
  CDR3 for beta chain variable domain of TCR clone 321142 (TRBV19, TRBJ2-2)
CASSGRGTGELFF

SEQ ID NO: 642285 - protein, 12 aa, Homo sapiens
  CDR3 for alpha chain variable domain of TCR clone 321143 (TRAV3, TRAJ20)
CAVRDPDYKLSL

SEQ ID NO: 642286 - protein, 11 aa, Homo sapiens
  CDR3 for beta chain variable domain of TCR clone 321143 (TRBV28, TRBJ2-5)
CASSLKETQYF

SEQ ID NO: 642287 - protein, 12 aa, Homo sapiens
  CDR3 for alpha chain variable domain of TCR clone 321144 (TRAV23/DV6, TRAJ33)
CAAEDSNYQLIW

SEQ ID NO: 642288 - protein, 13 aa, Homo sapiens
  CDR3 for beta chain variable domain of TCR clone 321144 (TRBV19, TRBJ2-7)
CASSAGHGYEQYF

SEQ ID NO: 642289 - protein, 16 aa, Homo sapiens
  CDR3 for alpha chain variable domain of TCR clone 321145 (TRAV3, TRAJ5)
CAVRNLMDTVRRALTF

SEQ ID NO: 642290 - protein, 16 aa, Homo sapiens
  CDR3 for beta chain variable domain of TCR clone 321145 (TRBV4-2, TRBJ2-7)
CASSQEGLAISYEQYF

SEQ ID NO: 642291 - protein, 12 aa, Homo sapiens
  CDR3 for alpha chain variable domain of TCR clone 321146 (TRAV17, TRAJ20)
CATDGDDYKLSL

SEQ ID NO: 642292 - protein, 18 aa, Homo sapiens
  CDR3 for beta chain variable domain of TCR clone 321146 (TRBV6-5, TRBJ2-5)
CASSYSQAGGSYQETQYF

SEQ ID NO: 642293 - protein, 13 aa, Homo sapiens
  CDR3 for alpha chain variable domain of TCR clone 321147 (TRAV12-2, TRAJ10)
CAVPTGGGNKLTF

SEQ ID NO: 642294 - protein, 15 aa, Homo sapiens
  CDR3 for beta chain variable domain of TCR clone 321147 (TRBV28, TRBJ2-1)
CASSIIAGGRSEQFF

SEQ ID NO: 642295 - protein, 13 aa, Homo sapiens
  CDR3 for alpha chain variable domain of TCR clone 321148 (TRAV8-3, TRAJ44)
CAVVPGTASKLTF

SEQ ID NO: 642296 - protein, 15 aa, Homo sapiens
  CDR3 for beta chain variable domain of TCR clone 321148 (TRBV7-2, TRBJ2-7)
CASSLDPAQGQEQYF

SEQ ID NO: 642297 - protein, 14 aa, Homo sapiens
  CDR3 for alpha chain variable domain of TCR clone 321149 (TRAV38-1, TRAJ40)
CASRPTSGTYTYIF

SEQ ID NO: 642298 - protein, 14 aa, Homo sapiens
  CDR3 for beta chain variable domain of TCR clone 321149 (TRBV25-1, TRBJ1-1)
CASTHLGGNTEAFF

SEQ ID NO: 642299 - protein, 11 aa, Homo sapiens
  CDR3 for alpha chain variable domain of TCR clone 321150 (TRAV23/DV6, TRAJ48)
CPPRWGEKLTL

SEQ ID NO: 642300 - protein, 13 aa, Homo sapiens
  CDR3 for beta chain variable domain of TCR clone 321150 (TRBV12-4, TRBJ2-5)
CASSPGTEETQYF

SEQ ID NO: 642301 - protein, 18 aa, Homo sapiens
  CDR3 for alpha chain variable domain of TCR clone 321151 (TRAV8-3, TRAJ4)
WVRDPTSNDPGGYNKLIF

SEQ ID NO: 642302 - protein, 13 aa, Homo sapiens
  CDR3 for beta chain variable domain of TCR clone 321151 (TRBV20-1, TRBJ1-2)
CSAAGIQGSGYTF

SEQ ID NO: 642303 - protein, 16 aa, Homo sapiens
  CDR3 for alpha chain variable domain of TCR clone 321152 (TRAV30, TRAJ24)
CGTEIVDADSWGKFQI

SEQ ID NO: 642304 - protein, 16 aa, Homo sapiens
  CDR3 for beta chain variable domain of TCR clone 321152 (TRBV2, TRBJ1-3)
CASSGGAGRSGNTIYF

SEQ ID NO: 642305 - protein, 16 aa, Homo sapiens
  CDR3 for alpha chain variable domain of TCR clone 321153 (TRAV30, TRAJ24)
CGTEIVDADSWGKFQL

SEQ ID NO: 642306 - protein, 18 aa, Homo sapiens
  CDR3 for beta chain variable domain of TCR clone 321153 (TRBV11-2, TRBJ2-6)
CASSLNPFLGTGANVLTF

SEQ ID NO: 642307 - protein, 13 aa, Homo sapiens
  CDR3 for alpha chain variable domain of TCR clone 321154 (TRAV20, TRAJ29)
CAVQAVGNTPLVF

SEQ ID NO: 642308 - protein, 11 aa, Homo sapiens
  CDR3 for beta chain variable domain of TCR clone 321154 (TRBV7-9, TRBJ2-3)
CASSGPDTQYF

SEQ ID NO: 642309 - protein, 11 aa, Homo sapiens
  CDR3 for alpha chain variable domain of TCR clone 321155 (TRAV3, TRAJ21)
CAVCNFNKFYF

SEQ ID NO: 642310 - protein, 14 aa, Homo sapiens
  CDR3 for beta chain variable domain of TCR clone 321155 (TRBV20-1, TRBJ2-2)
CSAPDTANTGELFF

SEQ ID NO: 642311 - protein, 14 aa, Homo sapiens
  CDR3 for alpha chain variable domain of TCR clone 321156 (TRAV1-2, TRAJ16)
CAVNRFSDGHKLLF

SEQ ID NO: 642312 - protein, 12 aa, Homo sapiens
  CDR3 for beta chain variable domain of TCR clone 321156 (TRBV6-5, TRBJ2-5)
CASSEGSETQYF

SEQ ID NO: 642313 - protein, 14 aa, Homo sapiens
  CDR3 for alpha chain variable domain of TCR clone 321157 (TRAV12-2, TRAJ17)
CAALFKAAGNKLTF

SEQ ID NO: 642314 - protein, 16 aa, Homo sapiens
  CDR3 for beta chain variable domain of TCR clone 321157 (TRBV20-1, TRBJ2-2)
CSASASGISGAGELFF

SEQ ID NO: 642315 - protein, 13 aa, Homo sapiens
  CDR3 for alpha chain variable domain of TCR clone 321158 (TRAV12-2, TRAJ7)
CSGLIYGNNRLAF

SEQ ID NO: 642316 - protein, 14 aa, Homo sapiens
  CDR3 for beta chain variable domain of TCR clone 321158 (TRBV6-1, TRBJ2-1)
CATFTSGQNNEQFF

SEQ ID NO: 642317 - protein, 13 aa, Homo sapiens
  CDR3 for alpha chain variable domain of TCR clone 321159 (TRAV13-1, TRAJ20)
CAARVSNDYKLSF

SEQ ID NO: 642318 - protein, 12 aa, Homo sapiens
  CDR3 for beta chain variable domain of TCR clone 321159 (TRBV20-1, TRBJ2-1)
CSATLGTDEQFF

SEQ ID NO: 642319 - protein, 15 aa, Homo sapiens
  CDR3 for alpha chain variable domain of TCR clone 321160 (TRAV13-1, TRAJ52)
SYYNAGGTSYGKLTC

SEQ ID NO: 642320 - protein, 15 aa, Homo sapiens
  CDR3 for beta chain variable domain of TCR clone 321160 (TRBV5-1, TRBJ2-1)
CASSPPRAPYNEQFF

SEQ ID NO: 642321 - protein, 12 aa, Homo sapiens
  CDR3 for alpha chain variable domain of TCR clone 321161 (TRAV13-2, TRAJ23)
CAERHRGGELIF

SEQ ID NO: 642322 - protein, 11 aa, Homo sapiens
  CDR3 for beta chain variable domain of TCR clone 321161 (TRBV29-1, TRBJ2-5)
CSEDRTGTQYF

SEQ ID NO: 642323 - protein, 16 aa, Homo sapiens
  CDR3 for alpha chain variable domain of TCR clone 321162 (TRAV16, TRAJ52)
CALIAAGGTSDGKLTF

SEQ ID NO: 642324 - protein, 12 aa, Homo sapiens
  CDR3 for beta chain variable domain of TCR clone 321162 (TRBV12-4, TRBJ1-3)
CASSVSGNTMYF

SEQ ID NO: 642325 - protein, 11 aa, Homo sapiens
  CDR3 for alpha chain variable domain of TCR clone 321163 (TRAV12-1, TRAJ21)
CVVNNFNKFYF

SEQ ID NO: 642326 - protein, 13 aa, Homo sapiens
  CDR3 for beta chain variable domain of TCR clone 321163 (TRBV28, TRBJ1-5)
CASSDRGNQPQHF

SEQ ID NO: 642327 - protein, 13 aa, Homo sapiens
  CDR3 for alpha chain variable domain of TCR clone 321164 (TRAV17, TRAJ5)
CALRGTGRRALTF

SEQ ID NO: 642328 - protein, 14 aa, Homo sapiens
  CDR3 for beta chain variable domain of TCR clone 321164 (TRBV6-1, TRBJ1-5)
CQSELREGNQPQHF

SEQ ID NO: 642329 - protein, 14 aa, Homo sapiens
  CDR3 for alpha chain variable domain of TCR clone 321165 (TRAV1-2, TRAJ16)
CAVNRVSDGQKLLF

SEQ ID NO: 642330 - protein, 14 aa, Homo sapiens
  CDR3 for beta chain variable domain of TCR clone 321165 (TRBV11-2, TRBJ2-7)
CASSRGGGLYEQYF

SEQ ID NO: 642331 - protein, 12 aa, Homo sapiens
  CDR3 for alpha chain variable domain of TCR clone 321166 (TRAV12-2, TRAJ21)
CAVNRNFNKFYF

SEQ ID NO: 642332 - protein, 14 aa, Homo sapiens
  CDR3 for beta chain variable domain of TCR clone 321166 (TRBV12-4, TRBJ2-3)
CASSLSGATDTQNF

SEQ ID NO: 642333 - protein, 15 aa, Homo sapiens
  CDR3 for alpha chain variable domain of TCR clone 321167 (TRAV8-1, TRAJ6)
CAVNANPGGSYIPTF

SEQ ID NO: 642334 - protein, 16 aa, Homo sapiens
  CDR3 for beta chain variable domain of TCR clone 321167 (TRBV9, TRBJ2-7)
CASSAGPDRSPYEQYF

SEQ ID NO: 642335 - protein, 15 aa, Homo sapiens
  CDR3 for alpha chain variable domain of TCR clone 321168 (TRAV3, TRAJ3)
CAVRDGHSSASKIIF

SEQ ID NO: 642336 - protein, 14 aa, Homo sapiens
  CDR3 for beta chain variable domain of TCR clone 321168 (TRBV28, TRBJ1-4)
CASSFGTCDEKLFF

SEQ ID NO: 642337 - protein, 16 aa, Homo sapiens
  CDR3 for alpha chain variable domain of TCR clone 321169 (TRAV17, TRAJ52)
CATGIIGGTSYGKLTF

SEQ ID NO: 642338 - protein, 15 aa, Homo sapiens
  CDR3 for beta chain variable domain of TCR clone 321169 (TRBV5-7, TRBJ1-5)
CAGSYGKLWDQPQHF

SEQ ID NO: 642339 - protein, 13 aa, Homo sapiens
  CDR3 for alpha chain variable domain of TCR clone 321170 (TRAV8-6, TRAJ40)
CAVSVTGTYKYIF

SEQ ID NO: 642340 - protein, 15 aa, Homo sapiens
  CDR3 for beta chain variable domain of TCR clone 321170 (TRBV4-1, TRBJ2-3)
CASSRGHGIPDTQYF

SEQ ID NO: 642341 - protein, 16 aa, Homo sapiens
  CDR3 for alpha chain variable domain of TCR clone 321171 (TRAV3, TRAJ37)
CAVRPHGSGNTGKQIF

SEQ ID NO: 642342 - protein, 17 aa, Homo sapiens
  CDR3 for beta chain variable domain of TCR clone 321171 (TRBV20-1, TRBJ2-1)
CSASSSGLAGSYNEQFF

SEQ ID NO: 642343 - protein, 11 aa, Homo sapiens
  CDR3 for alpha chain variable domain of TCR clone 321172 (TRAV17, TRAJ31)
CATSNNARLMF

SEQ ID NO: 642344 - protein, 13 aa, Homo sapiens
  CDR3 for beta chain variable domain of TCR clone 321172 (TRBV10-3, TRBJ1-2)
CAINADLNYGYTF

SEQ ID NO: 642345 - protein, 15 aa, Homo sapiens
  CDR3 for alpha chain variable domain of TCR clone 321173 (TRAV3, TRAJ3)
CAVRDRDSSASKIIF

SEQ ID NO: 642346 - protein, 14 aa, Homo sapiens
  CDR3 for beta chain variable domain of TCR clone 321173 (TRBV3-1, TRBJ2-5)
CASSQGPDQETQYF

SEQ ID NO: 642347 - protein, 17 aa, Homo sapiens
  CDR3 for alpha chain variable domain of TCR clone 321174 (TRAV3, TRAJ6)
CAVRDGPRAGGSYLTTF

SEQ ID NO: 642348 - protein, 14 aa, Homo sapiens
  CDR3 for beta chain variable domain of TCR clone 321174 (TRBV7-2, TRBJ2-7)
CASTPKTSFYEQYF

SEQ ID NO: 642349 - protein, 14 aa, Homo sapiens
  CDR3 for alpha chain variable domain of TCR clone 321175 (TRAV2, TRAJ9)
CAVEDRSGGFKTIF

SEQ ID NO: 642350 - protein, 17 aa, Homo sapiens
  CDR3 for beta chain variable domain of TCR clone 321175 (TRBV7-6, TRBJ2-5)
CASSPGLADPWGETQYF

SEQ ID NO: 642351 - protein, 23 aa, Homo sapiens
  CDR3 for alpha chain variable domain of TCR clone 321176 (TRAV12-2, TRAJ22)
CAVSFRVHPGPPIVSGSARQLTF

SEQ ID NO: 642352 - protein, 15 aa, Homo sapiens
  CDR3 for beta chain variable domain of TCR clone 321176 (TRBV4-1, TRBJ2-7)
CASSQQGQGFDEQYF

SEQ ID NO: 642353 - protein, 18 aa, Homo sapiens
  CDR3 for alpha chain variable domain of TCR clone 321177 (TRAV21, TRAJ52)
CAVRPSPAGGTSYGKLTF

SEQ ID NO: 642354 - protein, 16 aa, Homo sapiens
  CDR3 for beta chain variable domain of TCR clone 321177 (TRBV16, TRBJ2-7)
CASSRPAGGSSYEQYF

SEQ ID NO: 642355 - protein, 12 aa, Homo sapiens
  CDR3 for alpha chain variable domain of TCR clone 321178 (TRAV8-6, TRAJ31)
CAVSPNNARLMF

SEQ ID NO: 642356 - protein, 15 aa, Homo sapiens
  CDR3 for beta chain variable domain of TCR clone 321178 (TRBV19, TRBJ1-2)
CASNDETGKDYGYTF

SEQ ID NO: 642357 - protein, 17 aa, Homo sapiens
  CDR3 for alpha chain variable domain of TCR clone 321179 (TRAV13-1, TRAJ5)
CSNPSLSRDTGRRALTF

SEQ ID NO: 642358 - protein, 17 aa, Homo sapiens
  CDR3 for beta chain variable domain of TCR clone 321179 (TRBV24-1, TRBJ2-1)
CAASDVSTSGTYNEQFF

SEQ ID NO: 642359 - protein, 11 aa, Homo sapiens
  CDR3 for alpha chain variable domain of TCR clone 321180 (TRAV2, TRAJ13)
CASGGYQKVAF

SEQ ID NO: 642360 - protein, 13 aa, Homo sapiens
  CDR3 for beta chain variable domain of TCR clone 321180 (TRBV7-9, TRBJ1-2)
CASSLKQNYGYTF

SEQ ID NO: 642361 - protein, 15 aa, Homo sapiens
  CDR3 for alpha chain variable domain of TCR clone 321181 (TRAV21, TRAJ32)
FAVNSYGGATNKLIF

SEQ ID NO: 642362 - protein, 18 aa, Homo sapiens
  CDR3 for beta chain variable domain of TCR clone 321181 (TRBV7-9, TRBJ2-1)
CASSTGLAEGSSYNEQFF

SEQ ID NO: 642363 - protein, 13 aa, Homo sapiens
  CDR3 for alpha chain variable domain of TCR clone 321182 (TRAV29/DV5, TRAJ29)
CAASAAGNTPLVF

SEQ ID NO: 642364 - protein, 14 aa, Homo sapiens
  CDR3 for beta chain variable domain of TCR clone 321182 (TRBV27, TRBJ2-3)
CASRKGGRTDTQYF

SEQ ID NO: 642365 - protein, 11 aa, Homo sapiens
  CDR3 for alpha chain variable domain of TCR clone 321183 (TRAV12-1, TRAJ31)
CVVNGDARLMF

SEQ ID NO: 642366 - protein, 15 aa, Homo sapiens
  CDR3 for beta chain variable domain of TCR clone 321183 (TRBV11-3, TRBJ2-3)
CASLKDGREGDTQYF

SEQ ID NO: 642367 - protein, 12 aa, Homo sapiens
  CDR3 for alpha chain variable domain of TCR clone 321184 (TRAV12-1, TRAJ15)
CVVNQAGTALIF

SEQ ID NO: 642368 - protein, 14 aa, Homo sapiens
  CDR3 for beta chain variable domain of TCR clone 321184 (TRBV28, TRBJ2-5)
CASSLGDRAETQYF

SEQ ID NO: 642369 - protein, 14 aa, Homo sapiens
  CDR3 for alpha chain variable domain of TCR clone 321185 (TRAV1-2, TRAJ16)
CAVNRFSDGQKLLS

SEQ ID NO: 642370 - protein, 16 aa, Homo sapiens
  CDR3 for beta chain variable domain of TCR clone 321185 (TRBV3-1, TRBJ2-5)
CASSPGQFNGFGTQYF

SEQ ID NO: 642371 - protein, 16 aa, Homo sapiens
  CDR3 for alpha chain variable domain of TCR clone 321186 (TRAV16, TRAJ4)
CALSRMFSGGYNKLIF

SEQ ID NO: 642372 - protein, 16 aa, Homo sapiens
  CDR3 for beta chain variable domain of TCR clone 321186 (TRBV4-2, TRBJ2-1)
CASSQDGTGGYNEQFF

SEQ ID NO: 642373 - protein, 13 aa, Homo sapiens
  CDR3 for alpha chain variable domain of TCR clone 321187 (TRAV12-1, TRAJ9)
CVVLNTGGFKTIF

SEQ ID NO: 642374 - protein, 13 aa, Homo sapiens
  CDR3 for beta chain variable domain of TCR clone 321187 (TRBV20-1, TRBJ1-1)
RSARGGGNNEAFF

SEQ ID NO: 642375 - protein, 18 aa, Homo sapiens
  CDR3 for alpha chain variable domain of TCR clone 321188 (TRAV21, TRAJ52)
CAVRPSPAGGTSYGKLTF

SEQ ID NO: 642376 - protein, 14 aa, Homo sapiens
  CDR3 for beta chain variable domain of TCR clone 321188 (TRBV6-1, TRBJ2-2)
CASRELAYTGELFF

SEQ ID NO: 642377 - protein, 10 aa, Homo sapiens
  CDR3 for alpha chain variable domain of TCR clone 321189 (TRAV25, TRAJ20)
CAGNDYKLSF

SEQ ID NO: 642378 - protein, 13 aa, Homo sapiens
  CDR3 for beta chain variable domain of TCR clone 321189 (TRBV6-3, TRBJ2-7)
CASSFSGGYEQYF

SEQ ID NO: 642379 - protein, 18 aa, Homo sapiens
  CDR3 for alpha chain variable domain of TCR clone 321190 (TRAV17, TRAJ45)
CATSLDLYSGGGAGGLTF

SEQ ID NO: 642380 - protein, 13 aa, Homo sapiens
  CDR3 for beta chain variable domain of TCR clone 321190 (TRBV10-3, TRBJ2-7)
CASKLAVNYEQYF

SEQ ID NO: 642381 - protein, 12 aa, Homo sapiens
  CDR3 for alpha chain variable domain of TCR clone 321191 (TRAV25, TRAJ11)
CAGASGYSTLTF

SEQ ID NO: 642382 - protein, 16 aa, Homo sapiens
  CDR3 for beta chain variable domain of TCR clone 321191 (TRBV15, TRBJ1-2)
CATSRGPRTGGGGYAF

SEQ ID NO: 642383 - protein, 21 aa, Homo sapiens
  CDR3 for alpha chain variable domain of TCR clone 321192 (TRAV1-2, TRAJ37)
CLLPLCCERFHGSGNTGNLIF

SEQ ID NO: 642384 - protein, 14 aa, Homo sapiens
  CDR3 for beta chain variable domain of TCR clone 321192 (TRBV2, TRBJ2-5)
CASSEVLAQETQYF

SEQ ID NO: 642385 - protein, 14 aa, Homo sapiens
  CDR3 for alpha chain variable domain of TCR clone 321193 (TRAV3, TRAJ20)
CAVRDSCNDYKLSF

SEQ ID NO: 642386 - protein, 14 aa, Homo sapiens
  CDR3 for beta chain variable domain of TCR clone 321193 (TRBV12-4, TRBJ2-5)
CASSYSGYFETQYF

SEQ ID NO: 642387 - protein, 18 aa, Homo sapiens
  CDR3 for alpha chain variable domain of TCR clone 321194 (TRAV13-1, TRAJ52)
CAAKNPNAGVTSYGKLTF

SEQ ID NO: 642388 - protein, 17 aa, Homo sapiens
  CDR3 for beta chain variable domain of TCR clone 321194 (TRBV20-1, TRBJ2-1)
CSASSSGLAGSYNEQFF

SEQ ID NO: 642389 - protein, 11 aa, Homo sapiens
  CDR3 for alpha chain variable domain of TCR clone 321195 (TRAV12-2, TRAJ31)
CAILNNARLMC

SEQ ID NO: 642390 - protein, 13 aa, Homo sapiens
  CDR3 for beta chain variable domain of TCR clone 321195 (TRBV20-1, TRBJ1-1)
CSARLGQGTEAFF

SEQ ID NO: 642391 - protein, 20 aa, Homo sapiens
  CDR3 for alpha chain variable domain of TCR clone 321196 (TRAV1-2, TRAJ34)
LLKELQMKDSASPNTDKLIF

SEQ ID NO: 642392 - protein, 19 aa, Homo sapiens
  CDR3 for beta chain variable domain of TCR clone 321196 (TRBV25-1, TRBJ2-2)
CAILVYRVDRGRKTGELFF

SEQ ID NO: 642393 - protein, 14 aa, Homo sapiens
  CDR3 for alpha chain variable domain of TCR clone 321197 (TRAV1-2, TRAJ16)
CAVNRCSDGQTLLF

SEQ ID NO: 642394 - protein, 14 aa, Homo sapiens
  CDR3 for beta chain variable domain of TCR clone 321197 (TRBV4-1, TRBJ2-2)
CASSQAVNTGELFF

SEQ ID NO: 642395 - protein, 14 aa, Homo sapiens
  CDR3 for alpha chain variable domain of TCR clone 321198 (TRAV1-2, TRAJ16)
CAVNRFSDGQTLLF

SEQ ID NO: 642396 - protein, 13 aa, Homo sapiens
  CDR3 for beta chain variable domain of TCR clone 321198 (TRBV7-2, TRBJ2-2)
CASSLAVTGELFF

SEQ ID NO: 642397 - protein, 17 aa, Homo sapiens
  CDR3 for alpha chain variable domain of TCR clone 321199 (TRAV3, TRAJ28)
CAVRPLYSGAGSYQLTF

SEQ ID NO: 642398 - protein, 15 aa, Homo sapiens
  CDR3 for beta chain variable domain of TCR clone 321199 (TRBV20-1, TRBJ2-7)
CSARDRVSGMDEQYF

SEQ ID NO: 642399 - protein, 16 aa, Homo sapiens
  CDR3 for alpha chain variable domain of TCR clone 321200 (TRAV23/DV6, TRAJ9)
CAASIGGNTGGFKTLF

SEQ ID NO: 642400 - protein, 18 aa, Homo sapiens
  CDR3 for beta chain variable domain of TCR clone 321200 (TRBV7-9, TRBJ2-7)
CASSLTTSGSRTWYEQYF

SEQ ID NO: 642401 - protein, 13 aa, Homo sapiens
  CDR3 for alpha chain variable domain of TCR clone 321201 (TRAV6, TRAJ33)
CALPMDSNYQLIW

SEQ ID NO: 642402 - protein, 10 aa, Homo sapiens
  CDR3 for beta chain variable domain of TCR clone 321201 (TRBV11-2, TRBJ2-2)
CASRGLAANT

SEQ ID NO: 642403 - protein, 12 aa, Homo sapiens
  CDR3 for alpha chain variable domain of TCR clone 321202 (TRAV12-3, TRAJ17)
CAMTLTGNTLTF

SEQ ID NO: 642404 - protein, 15 aa, Homo sapiens
  CDR3 for beta chain variable domain of TCR clone 321202 (TRBV7-9, TRBJ1-6)
CASSSPGRGNSPLHF

SEQ ID NO: 642405 - protein, 17 aa, Homo sapiens
  CDR3 for alpha chain variable domain of TCR clone 321203 (TRAV26-1, TRAJ28)
CIVRALYSGAGSYQPTF

SEQ ID NO: 642406 - protein, 12 aa, Homo sapiens
  CDR3 for beta chain variable domain of TCR clone 321203 (TRBV12-4, TRBJ2-1)
CASRQTENEQFF

SEQ ID NO: 642407 - protein, 15 aa, Homo sapiens
  CDR3 for alpha chain variable domain of TCR clone 321204 (TRAV27, TRAJ38)
CAARRNAGNNRKLIW

SEQ ID NO: 642408 - protein, 17 aa, Homo sapiens
  CDR3 for beta chain variable domain of TCR clone 321204 (TRBV6-3, TRBJ2-7)
CASSYNSLRDGPYEQYF

SEQ ID NO: 642409 - protein, 13 aa, Homo sapiens
  CDR3 for alpha chain variable domain of TCR clone 321205 (TRAV12-2, TRAJ15)
CAVLNQAGTALLF

SEQ ID NO: 642410 - protein, 14 aa, Homo sapiens
  CDR3 for beta chain variable domain of TCR clone 321205 (TRBV7-8, TRBJ1-5)
CQQPGGGADQPQHF

SEQ ID NO: 642411 - protein, 13 aa, Homo sapiens
  CDR3 for alpha chain variable domain of TCR clone 321206 (TRAV21, TRAJ27)
CAARPGNAGKSTL

SEQ ID NO: 642412 - protein, 15 aa, Homo sapiens
  CDR3 for beta chain variable domain of TCR clone 321206 (TRBV7-2, TRBJ1-2)
CASSPRAGWNYGYTF

SEQ ID NO: 642413 - protein, 15 aa, Homo sapiens
  CDR3 for alpha chain variable domain of TCR clone 321207 (TRAV12-2, TRAJ45)
CAVLLGGGGADGLTF

SEQ ID NO: 642414 - protein, 15 aa, Homo sapiens
  CDR3 for beta chain variable domain of TCR clone 321207 (TRBV7-6, TRBJ2-7)
CASSLGTISSYEQYF

SEQ ID NO: 642415 - protein, 17 aa, Homo sapiens
  CDR3 for alpha chain variable domain of TCR clone 321208 (TRAV3, TRAJ42)
CALRDRDYGGSQGNLIF

SEQ ID NO: 642416 - protein, 18 aa, Homo sapiens
  CDR3 for beta chain variable domain of TCR clone 321208 (TRBV20-1, TRBJ2-3)
CSASGLAGGPGTTDTQYF

SEQ ID NO: 642417 - protein, 12 aa, Homo sapiens
  CDR3 for alpha chain variable domain of TCR clone 321209 (TRAV22, TRAJ29)
CGPPSGNTPVVF

SEQ ID NO: 642418 - protein, 14 aa, Homo sapiens
  CDR3 for beta chain variable domain of TCR clone 321209 (TRBV11-2, TRBJ2-7)
CASSLGAGAYEQYF

SEQ ID NO: 642419 - protein, 12 aa, Homo sapiens
  CDR3 for alpha chain variable domain of TCR clone 321210 (TRAV2, TRAJ9)
CAVGAGGFKTIF

SEQ ID NO: 642420 - protein, 14 aa, Homo sapiens
  CDR3 for beta chain variable domain of TCR clone 321210 (TRBV6-1, TRBJ1-3)
CASVQGGGGNTIYL

SEQ ID NO: 642421 - protein, 10 aa, Homo sapiens
  CDR3 for alpha chain variable domain of TCR clone 321211 (TRAV9-2, TRAJ49)
CALTGNQFYC

SEQ ID NO: 642422 - protein, 16 aa, Homo sapiens
  CDR3 for beta chain variable domain of TCR clone 321211 (TRBV19, TRBJ2-3)
CASSPGAASRTDTQYF

SEQ ID NO: 642423 - protein, 16 aa, Homo sapiens
  CDR3 for alpha chain variable domain of TCR clone 321212 (TRAV12-2, TRAJ10)
CAVNRVLTGGRNKLTF

SEQ ID NO: 642424 - protein, 14 aa, Homo sapiens
  CDR3 for beta chain variable domain of TCR clone 321212 (TRBV9, TRBJ2-1)
CASSVALAVNEQFF

SEQ ID NO: 642425 - protein, 18 aa, Homo sapiens
  CDR3 for alpha chain variable domain of TCR clone 321213 (TRAV21, TRAJ52)
CAVRPSPAGGTSYGKLTF

SEQ ID NO: 642426 - protein, 15 aa, Homo sapiens
  CDR3 for beta chain variable domain of TCR clone 321213 (TRBV5-7, TRBJ1-2)
CASSLAWTGGYGYTF

SEQ ID NO: 642427 - protein, 13 aa, Homo sapiens
  CDR3 for alpha chain variable domain of TCR clone 321214 (TRAV3, TRAJ21)
CAVREPDFNEFYF

SEQ ID NO: 642428 - protein, 14 aa, Homo sapiens
  CDR3 for beta chain variable domain of TCR clone 321214 (TRBV19, TRBJ2-2)
CASSTLHRSGELFF

SEQ ID NO: 642429 - protein, 18 aa, Homo sapiens
  CDR3 for alpha chain variable domain of TCR clone 321215 (TRAV9-2, TRAJ52)
CALSRHNAGGTSYGKLTF

SEQ ID NO: 642430 - protein, 12 aa, Homo sapiens
  CDR3 for beta chain variable domain of TCR clone 321215 (TRBV7-8, TRBJ2-7)
CASSLGDREQYF

SEQ ID NO: 642431 - protein, 12 aa, Homo sapiens
  CDR3 for alpha chain variable domain of TCR clone 321216 (TRAV21, TRAJ11)
CAATSGYSTLTF

SEQ ID NO: 642432 - protein, 16 aa, Homo sapiens
  CDR3 for beta chain variable domain of TCR clone 321216 (TRBV12-5, TRBJ2-5)
CASGPRTSGNQETQYF

SEQ ID NO: 642433 - protein, 13 aa, Homo sapiens
  CDR3 for alpha chain variable domain of TCR clone 321217 (TRAV12-2, TRAJ22)
SALYSGSARQLTF

SEQ ID NO: 642434 - protein, 13 aa, Homo sapiens
  CDR3 for beta chain variable domain of TCR clone 321217 (TRBV19, TRBJ2-1)
CASMEFRSNEQFF

SEQ ID NO: 642435 - protein, 12 aa, Homo sapiens
  CDR3 for alpha chain variable domain of TCR clone 321218 (TRAV1-1, TRAJ39)
CSVPVVGNMLTF

SEQ ID NO: 642436 - protein, 15 aa, Homo sapiens
  CDR3 for beta chain variable domain of TCR clone 321218 (TRBV19, TRBJ1-6)
CASSTRGAVGSPLHF

SEQ ID NO: 642437 - protein, 13 aa, Homo sapiens
  CDR3 for alpha chain variable domain of TCR clone 321219 (TRAV21, TRAJ10)
CAVPTGGGNKLTF

SEQ ID NO: 642438 - protein, 22 aa, Homo sapiens
  CDR3 for beta chain variable domain of TCR clone 321219 (TRBV19, TRBJ2-1)
CASSVRDRVTGTSGRIYNVQFF

SEQ ID NO: 642439 - protein, 13 aa, Homo sapiens
  CDR3 for alpha chain variable domain of TCR clone 321220 (TRAV21, TRAJ10)
CAVPTGGGNKLTF

SEQ ID NO: 642440 - protein, 22 aa, Homo sapiens
  CDR3 for beta chain variable domain of TCR clone 321220 (TRBV19, TRBJ2-1)
CASSVRDRATGTSGRIYNEQFF

SEQ ID NO: 642441 - protein, 14 aa, Homo sapiens
  CDR3 for alpha chain variable domain of TCR clone 321221 (TRAV1-2, TRAJ16)
CAVNRVSDGQKLLF

SEQ ID NO: 642442 - protein, 20 aa, Homo sapiens
  CDR3 for beta chain variable domain of TCR clone 321221 (TRBV28, TRBJ2-1)
CASTPIGRSPGLAGGNEQFF

SEQ ID NO: 642443 - protein, 15 aa, Homo sapiens
  CDR3 for alpha chain variable domain of TCR clone 321222 (TRAV2, TRAJ9)
CAVEDRGTGGFKTIF

SEQ ID NO: 642444 - protein, 14 aa, Homo sapiens
  CDR3 for beta chain variable domain of TCR clone 321222 (TRBV6-1, TRBJ1-3)
CASVQGGGWKHHIF

SEQ ID NO: 642445 - protein, 13 aa, Homo sapiens
  CDR3 for alpha chain variable domain of TCR clone 321223 (TRAV12-2, TRAJ6)
CALNVSRKLHTYI

SEQ ID NO: 642446 - protein, 12 aa, Homo sapiens
  CDR3 for beta chain variable domain of TCR clone 321223 (TRBV29-1, TRBJ2-3)
CSVTGGADTQYF

SEQ ID NO: 642447 - protein, 11 aa, Homo sapiens
  CDR3 for alpha chain variable domain of TCR clone 321224 (TRAV3, TRAJ21)
CAVGNFNKFYF

SEQ ID NO: 642448 - protein, 16 aa, Homo sapiens
  CDR3 for beta chain variable domain of TCR clone 321224 (TRBV15, TRBJ1-2)
CATSRGPRTGGGGYTF

SEQ ID NO: 642449 - protein, 17 aa, Homo sapiens
  CDR3 for alpha chain variable domain of TCR clone 321225 (TRAV13-2, TRAJ42)
CSEKGKNYGGSQGNLIF

SEQ ID NO: 642450 - protein, 16 aa, Homo sapiens
  CDR3 for beta chain variable domain of TCR clone 321225 (TRBV7-9, TRBJ2-1)
CASSLGTGWDYNEQFF

SEQ ID NO: 642451 - protein, 14 aa, Homo sapiens
  CDR3 for alpha chain variable domain of TCR clone 321226 (TRAV12-2, TRAJ13)
CSVKKTGGYQKVTF

SEQ ID NO: 642452 - protein, 17 aa, Homo sapiens
  CDR3 for beta chain variable domain of TCR clone 321226 (TRBV24-1, TRBJ2-1)
CATSDVSTSGTYNEQFF

SEQ ID NO: 642453 - protein, 15 aa, Homo sapiens
  CDR3 for alpha chain variable domain of TCR clone 321227 (TRAV4, TRAJ10)
CLVGDGSGGGNKLTF

SEQ ID NO: 642454 - protein, 14 aa, Homo sapiens
  CDR3 for beta chain variable domain of TCR clone 321227 (TRBV5-1, TRBJ2-5)
CASSLAGKQETQYF

SEQ ID NO: 642455 - protein, 16 aa, Homo sapiens
  CDR3 for alpha chain variable domain of TCR clone 321228 (TRAV30, TRAJ24)
CGTEIVDADSWGKFQF

SEQ ID NO: 642456 - protein, 13 aa, Homo sapiens
  CDR3 for beta chain variable domain of TCR clone 321228 (TRBV7-2, TRBJ2-1)
CASSLGVYNEQFF

SEQ ID NO: 642457 - protein, 13 aa, Homo sapiens
  CDR3 for alpha chain variable domain of TCR clone 321229 (TRAV20, TRAJ3)
CARRYSSASKIIF

SEQ ID NO: 642458 - protein, 12 aa, Homo sapiens
  CDR3 for beta chain variable domain of TCR clone 321229 (TRBV28, TRBJ2-1)
CASSFRGNEQLF

SEQ ID NO: 642459 - protein, 14 aa, Homo sapiens
  CDR3 for alpha chain variable domain of TCR clone 321230 (TRAV20, TRAJ37)
CAVQSSSNTGKLIF

SEQ ID NO: 642460 - protein, 14 aa, Homo sapiens
  CDR3 for beta chain variable domain of TCR clone 321230 (TRBV20-1, TRBJ1-1)
CSAQTRIGGTEAFF

SEQ ID NO: 642461 - protein, 18 aa, Homo sapiens
  CDR3 for alpha chain variable domain of TCR clone 321231 (TRAV12-3, TRAJ52)
CAMSVGGAGGTSYGKLTF

SEQ ID NO: 642462 - protein, 15 aa, Homo sapiens
  CDR3 for beta chain variable domain of TCR clone 321231 (TRBV27, TRBJ1-6)
CASSCDRGLGSPLLF

SEQ ID NO: 642463 - protein, 15 aa, Homo sapiens
  CDR3 for alpha chain variable domain of TCR clone 321232 (TRAV38-1, TRAJ37)
CAFIFRSGNTGKLIF

SEQ ID NO: 642464 - protein, 12 aa, Homo sapiens
  CDR3 for beta chain variable domain of TCR clone 321232 (TRBV7-9, TRBJ2-7)
CASSLEGYEQYF

SEQ ID NO: 642465 - protein, 18 aa, Homo sapiens
  CDR3 for alpha chain variable domain of TCR clone 321233 (TRAV21, TRAJ52)
CAVRPSPAGGTSNGKLTF

SEQ ID NO: 642466 - protein, 18 aa, Homo sapiens
  CDR3 for beta chain variable domain of TCR clone 321233 (TRBV4-1, TRBJ1-5)
CASSQDPRGQGLNQPQHF

SEQ ID NO: 642467 - protein, 15 aa, Homo sapiens
  CDR3 for alpha chain variable domain of TCR clone 321234 (TRAV36/DV7, TRAJ53)
CAVEGSGGSNYKLTF

SEQ ID NO: 642468 - protein, 14 aa, Homo sapiens
  CDR3 for beta chain variable domain of TCR clone 321234 (TRBV7-6, TRBJ2-3)
CASSVAGGTDTQYF

SEQ ID NO: 642469 - protein, 10 aa, Homo sapiens
  CDR3 for alpha chain variable domain of TCR clone 321235 (TRAV1-2, TRAJ34)
CAVNTDKLIF

SEQ ID NO: 642470 - protein, 12 aa, Homo sapiens
  CDR3 for beta chain variable domain of TCR clone 321235 (TRBV14, TRBJ2-5)
CASSHLKETQYF

SEQ ID NO: 642471 - protein, 13 aa, Homo sapiens
  CDR3 for alpha chain variable domain of TCR clone 321236 (TRAV1-1, TRAJ9)
CAAKNTGGFKTIF

SEQ ID NO: 642472 - protein, 13 aa, Homo sapiens
  CDR3 for beta chain variable domain of TCR clone 321236 (TRBV7-9, TRBJ2-2)
CASSLDPTGELFF

SEQ ID NO: 642473 - protein, 14 aa, Homo sapiens
  CDR3 for alpha chain variable domain of TCR clone 321237 (TRAV26-1, TRAJ21)
CIVRPPYNFNKFYF

SEQ ID NO: 642474 - protein, 16 aa, Homo sapiens
  CDR3 for beta chain variable domain of TCR clone 321237 (TRBV6-1, TRBJ2-5)
CASSETLDRGAETQYF

SEQ ID NO: 642475 - protein, 12 aa, Homo sapiens
  CDR3 for alpha chain variable domain of TCR clone 321238 (TRAV22, TRAJ36)
CAVGTGANNLFF

SEQ ID NO: 642476 - protein, 13 aa, Homo sapiens
  CDR3 for beta chain variable domain of TCR clone 321238 (TRBV12-4, TRBJ1-2)
CASSFIWLHLRFW

SEQ ID NO: 642477 - protein, 12 aa, Homo sapiens
  CDR3 for alpha chain variable domain of TCR clone 321239 (TRAV1-1, TRAJ8)
CAGGTGFQKLVF

SEQ ID NO: 642478 - protein, 13 aa, Homo sapiens
  CDR3 for beta chain variable domain of TCR clone 321239 (TRBV5-1, TRBJ1-5)
CASSLGSNQPQHF

SEQ ID NO: 642479 - protein, 14 aa, Homo sapiens
  CDR3 for alpha chain variable domain of TCR clone 321240 (TRAV13-1, TRAJ12)
CAASYMDSSYKLIF

SEQ ID NO: 642480 - protein, 13 aa, Homo sapiens
  CDR3 for beta chain variable domain of TCR clone 321240 (TRBV2, TRBJ2-5)
CASSDGIKETQYF

SEQ ID NO: 642481 - protein, 15 aa, Homo sapiens
  CDR3 for alpha chain variable domain of TCR clone 321241 (TRAV26-1, TRAJ17)
CIVSSFKAAGNKLNF

SEQ ID NO: 642482 - protein, 14 aa, Homo sapiens
  CDR3 for beta chain variable domain of TCR clone 321241 (TRBV6-1, TRBJ2-2)
CASTWQGNTGELFF

SEQ ID NO: 642483 - protein, 14 aa, Homo sapiens
  CDR3 for alpha chain variable domain of TCR clone 321242 (TRAV26-1, TRAJ34)
CIVRVAYNTDKLIF

SEQ ID NO: 642484 - protein, 14 aa, Homo sapiens
  CDR3 for beta chain variable domain of TCR clone 321242 (TRBV11-2, TRBJ2-7)
CASSLGAGAYEQYF

SEQ ID NO: 642485 - protein, 17 aa, Homo sapiens
  CDR3 for alpha chain variable domain of TCR clone 321243 (TRAV26-1, TRAJ53)
CIVRVDDSGVSNYKLTF

SEQ ID NO: 642486 - protein, 14 aa, Homo sapiens
  CDR3 for beta chain variable domain of TCR clone 321243 (TRBV7-6, TRBJ2-2)
CASRDRGNTGELFF

SEQ ID NO: 642487 - protein, 12 aa, Homo sapiens
  CDR3 for alpha chain variable domain of TCR clone 321244 (TRAV13-2, TRAJ31)
CAESYNNASLMF

SEQ ID NO: 642488 - protein, 13 aa, Homo sapiens
  CDR3 for beta chain variable domain of TCR clone 321244 (TRBV24-1, TRBJ1-3)
CATMADSGNTIYF

SEQ ID NO: 642489 - protein, 13 aa, Homo sapiens
  CDR3 for alpha chain variable domain of TCR clone 321245 (TRAV2, TRAJ40)
CAAVTSGTYEYIF

SEQ ID NO: 642490 - protein, 14 aa, Homo sapiens
  CDR3 for beta chain variable domain of TCR clone 321245 (TRBV19, TRBJ2-1)
CASPTFVLSGEQFF

SEQ ID NO: 642491 - protein, 13 aa, Homo sapiens
  CDR3 for alpha chain variable domain of TCR clone 321246 (TRAV2, TRAJ16)
CAGEFGDGQKLLF

SEQ ID NO: 642492 - protein, 14 aa, Homo sapiens
  CDR3 for beta chain variable domain of TCR clone 321246 (TRBV6-3, TRBJ2-5)
CASSYSLREKTQYF

SEQ ID NO: 642493 - protein, 13 aa, Homo sapiens
  CDR3 for alpha chain variable domain of TCR clone 321247 (TRAV21, TRAJ20)
CAVGLSVDYKLSF

SEQ ID NO: 642494 - protein, 15 aa, Homo sapiens
  CDR3 for beta chain variable domain of TCR clone 321247 (TRBV2, TRBJ1-5)
CASSPGPTGNQPQHF

SEQ ID NO: 642495 - protein, 13 aa, Homo sapiens
  CDR3 for alpha chain variable domain of TCR clone 321248 (TRAV41, TRAJ49)
CADSGTPGNQFYF

SEQ ID NO: 642496 - protein, 18 aa, Homo sapiens
  CDR3 for beta chain variable domain of TCR clone 321248 (TRBV12-4, TRBJ2-5)
CASSSGGGRDPVLRARHA

SEQ ID NO: 642497 - protein, 14 aa, Homo sapiens
  CDR3 for alpha chain variable domain of TCR clone 321249 (TRAV29/DV5, TRAJ22)
CAASATGSARHLTV

SEQ ID NO: 642498 - protein, 14 aa, Homo sapiens
  CDR3 for beta chain variable domain of TCR clone 321249 (TRBV19, TRBJ2-1)
CASSPGLAPNEQFF

SEQ ID NO: 642499 - protein, 13 aa, Homo sapiens
  CDR3 for alpha chain variable domain of TCR clone 321250 (TRAV2, TRAJ15)
CAVASQAGTALIF

SEQ ID NO: 642500 - protein, 12 aa, Homo sapiens
  CDR3 for beta chain variable domain of TCR clone 321250 (TRBV5-7, TRBJ1-2)
CASSLVQNGYTF

SEQ ID NO: 642501 - protein, 13 aa, Homo sapiens
  CDR3 for alpha chain variable domain of TCR clone 321251 (TRAV13-1, TRAJ11)
CSASKEGYSILTF

SEQ ID NO: 642502 - protein, 21 aa, Homo sapiens
  CDR3 for beta chain variable domain of TCR clone 321251 (TRBV23-1, TRBJ2-5)
CASTPPGQGPGGDPVLRARHA

SEQ ID NO: 642503 - protein, 14 aa, Homo sapiens
  CDR3 for alpha chain variable domain of TCR clone 321252 (TRAV12-3, TRAJ56)
CAMSMTGANSKLTF

SEQ ID NO: 642504 - protein, 17 aa, Homo sapiens
  CDR3 for beta chain variable domain of TCR clone 321252 (TRBV20-1, TRBJ2-3)
CSASLLGRGGSADTQYF

SEQ ID NO: 642505 - protein, 13 aa, Homo sapiens
  CDR3 for alpha chain variable domain of TCR clone 321253 (TRAV16, TRAJ10)
CAPAREEETNSPL

SEQ ID NO: 642506 - protein, 14 aa, Homo sapiens
  CDR3 for beta chain variable domain of TCR clone 321253 (TRBV7-2, TRBJ2-7)
CASRSQGAAYEQYF

SEQ ID NO: 642507 - protein, 16 aa, Homo sapiens
  CDR3 for alpha chain variable domain of TCR clone 321254 (TRAV30, TRAJ24)
CGTEIVDADSWGKFQF

SEQ ID NO: 642508 - protein, 17 aa, Homo sapiens
  CDR3 for beta chain variable domain of TCR clone 321254 (TRBV13, TRBJ2-3)
CASSLPRVAGGRNTQYF

SEQ ID NO: 642509 - protein, 16 aa, Homo sapiens
  CDR3 for alpha chain variable domain of TCR clone 321255 (TRAV3, TRAJ37)
CAVRPHGSGNTGKLIL

SEQ ID NO: 642510 - protein, 13 aa, Homo sapiens
  CDR3 for beta chain variable domain of TCR clone 321255 (TRBV2, TRBJ1-5)
CASGTGGYQPQHL

SEQ ID NO: 642511 - protein, 13 aa, Homo sapiens
  CDR3 for alpha chain variable domain of TCR clone 321256 (TRAV2, TRAJ15)
CAVASQAGTALIF

SEQ ID NO: 642512 - protein, 14 aa, Homo sapiens
  CDR3 for beta chain variable domain of TCR clone 321256 (TRBV7-2, TRBJ2-2)
CASRGQGAAGELFF

SEQ ID NO: 642513 - protein, 13 aa, Homo sapiens
  CDR3 for alpha chain variable domain of TCR clone 321257 (TRAV8-4, TRAJ10)
CAAFTGRGNKLAF

SEQ ID NO: 642514 - protein, 15 aa, Homo sapiens
  CDR3 for beta chain variable domain of TCR clone 321257 (TRBV2, TRBJ2-3)
CASSDFEKATDTQYF

SEQ ID NO: 642515 - protein, 12 aa, Homo sapiens
  CDR3 for alpha chain variable domain of TCR clone 321258 (TRAV1-1, TRAJ15)
CAVGQAGTALIF

SEQ ID NO: 642516 - protein, 16 aa, Homo sapiens
  CDR3 for beta chain variable domain of TCR clone 321258 (TRBV5-1, TRBJ1-1)
CASSSGGNSLNTEAFF

SEQ ID NO: 642517 - protein, 13 aa, Homo sapiens
  CDR3 for alpha chain variable domain of TCR clone 321259 (TRAV12-3, TRAJ13)
CAMTSGGYQKVTF

SEQ ID NO: 642518 - protein, 11 aa, Homo sapiens
  CDR3 for beta chain variable domain of TCR clone 321259 (TRBV12-4, TRBJ2-3)
CASTATDTQYF

SEQ ID NO: 642519 - protein, 17 aa, Homo sapiens
  CDR3 for alpha chain variable domain of TCR clone 321260 (TRAV3, TRAJ6)
CAVIDGPRVGGSYIPTF

SEQ ID NO: 642520 - protein, 20 aa, Homo sapiens
  CDR3 for beta chain variable domain of TCR clone 321260 (TRBV28, TRBJ2-1)
CASTPIGRSPGLAGGNEQFF

SEQ ID NO: 642521 - protein, 17 aa, Homo sapiens
  CDR3 for alpha chain variable domain of TCR clone 321261 (TRAV3, TRAJ6)
CSVRDGPRAGGSYIPTF

SEQ ID NO: 642522 - protein, 14 aa, Homo sapiens
  CDR3 for beta chain variable domain of TCR clone 321261 (TRBV7-2, TRBJ2-7)
CASSPKTSFYEQCF

SEQ ID NO: 642523 - protein, 16 aa, Homo sapiens
  CDR3 for alpha chain variable domain of TCR clone 321262 (TRAV30, TRAJ24)
CGTEIVDADSWGKLQF

SEQ ID NO: 642524 - protein, 14 aa, Homo sapiens
  CDR3 for beta chain variable domain of TCR clone 321262 (TRBV19, TRBJ2-1)
CASPTFVLSGEQFF

SEQ ID NO: 642525 - protein, 16 aa, Homo sapiens
  CDR3 for alpha chain variable domain of TCR clone 321263 (TRAV8-2, TRAJ48)
CVVSDVSNFGNEKLTF

SEQ ID NO: 642526 - protein, 16 aa, Homo sapiens
  CDR3 for beta chain variable domain of TCR clone 321263 (TRBV24-1, TRBJ2-1)
CATSCVTGADYNEQFF

SEQ ID NO: 642527 - protein, 18 aa, Homo sapiens
  CDR3 for alpha chain variable domain of TCR clone 321264 (TRAV12-3, TRAJ52)
CAMSRTNAGGTSYGKLTF

SEQ ID NO: 642528 - protein, 17 aa, Homo sapiens
  CDR3 for beta chain variable domain of TCR clone 321264 (TRBV7-3, TRBJ2-3)
CASSLVKRMRGADTQYV

SEQ ID NO: 642529 - protein, 15 aa, Homo sapiens
  CDR3 for alpha chain variable domain of TCR clone 321265 (TRAV2, TRAJ9)
CAVEDRGTGGFKTIF

SEQ ID NO: 642530 - protein, 14 aa, Homo sapiens
  CDR3 for beta chain variable domain of TCR clone 321265 (TRBV19, TRBJ2-7)
CASSTTRSSYGQYF

SEQ ID NO: 642531 - protein, 13 aa, Homo sapiens
  CDR3 for alpha chain variable domain of TCR clone 321266 (TRAV3, TRAJ36)
CAVRDTGANNLFF

SEQ ID NO: 642532 - protein, 16 aa, Homo sapiens
  CDR3 for beta chain variable domain of TCR clone 321266 (TRBV27, TRBJ2-2)
CASSFRGLVRTGELFF

SEQ ID NO: 642533 - protein, 11 aa, Homo sapiens
  CDR3 for alpha chain variable domain of TCR clone 321267 (TRAV12-3, TRAJ41)
CAMNAREALNS

SEQ ID NO: 642534 - protein, 16 aa, Homo sapiens
  CDR3 for beta chain variable domain of TCR clone 321267 (TRBV7-8, TRBJ2-3)
CASSTEGQRETDTQYF

SEQ ID NO: 642535 - protein, 13 aa, Homo sapiens
  CDR3 for alpha chain variable domain of TCR clone 321268 (TRAV1-1, TRAJ9)
CAAKNIGGFKTIF

SEQ ID NO: 642536 - protein, 13 aa, Homo sapiens
  CDR3 for beta chain variable domain of TCR clone 321268 (TRBV19, TRBJ1-2)
CASSVPGQDGYTF

SEQ ID NO: 642537 - protein, 20 aa, Homo sapiens
  CDR3 for alpha chain variable domain of TCR clone 321269 (TRAV12-1, TRAJ42)
SSVIQPPTSVKGGSQGNLIF

SEQ ID NO: 642538 - protein, 14 aa, Homo sapiens
  CDR3 for beta chain variable domain of TCR clone 321269 (TRBV18, TRBJ2-7)
CASSPRGGAYEQYF

SEQ ID NO: 642539 - protein, 15 aa, Homo sapiens
  CDR3 for alpha chain variable domain of TCR clone 321270 (TRAV26-1, TRAJ44)
CIVRIGTGTASKLTF

SEQ ID NO: 642540 - protein, 18 aa, Homo sapiens
  CDR3 for beta chain variable domain of TCR clone 321270 (TRBV2, TRBJ2-2)
CQQSTGTSGGGNTGELFF

SEQ ID NO: 642541 - protein, 15 aa, Homo sapiens
  CDR3 for alpha chain variable domain of TCR clone 321271 (TRAV12-3, TRAJ53)
CASNASGGSNYKLTF

SEQ ID NO: 642542 - protein, 15 aa, Homo sapiens
  CDR3 for beta chain variable domain of TCR clone 321271 (TRBV4-2, TRBJ1-1)
CASSQEDLPRTEAFF

SEQ ID NO: 642543 - protein, 16 aa, Homo sapiens
  CDR3 for alpha chain variable domain of TCR clone 321272 (TRAV12-2, TRAJ18)
CAVTTDRGSTLGRPYF

SEQ ID NO: 642544 - protein, 14 aa, Homo sapiens
  CDR3 for beta chain variable domain of TCR clone 321272 (TRBV4-2, TRBJ1-5)
CAGSQDSINQPQHF

SEQ ID NO: 642545 - protein, 14 aa, Homo sapiens
  CDR3 for alpha chain variable domain of TCR clone 321273 (TRAV1-2, TRAJ8)
CAVREDTGFQKLVF

SEQ ID NO: 642546 - protein, 22 aa, Homo sapiens
  CDR3 for beta chain variable domain of TCR clone 321273 (TRBV7-3, TRBJ2-2)
GGTQPCISVPAAQEDTPGRCFF

SEQ ID NO: 642547 - protein, 14 aa, Homo sapiens
  CDR3 for alpha chain variable domain of TCR clone 321274 (TRAV35, TRAJ33)
CAGPSQDSNYQLIW

SEQ ID NO: 642548 - protein, 15 aa, Homo sapiens
  CDR3 for beta chain variable domain of TCR clone 321274 (TRBV20-1, TRBJ2-7)
GSAESGTGGAYEQYF

SEQ ID NO: 642549 - protein, 12 aa, Homo sapiens
  CDR3 for alpha chain variable domain of TCR clone 321275 (TRAV12-3, TRAJ17)
CTMTLTGNKLTF

SEQ ID NO: 642550 - protein, 13 aa, Homo sapiens
  CDR3 for beta chain variable domain of TCR clone 321275 (TRBV7-2, TRBJ2-2)
CASSLAVTGELFF

SEQ ID NO: 642551 - protein, 14 aa, Homo sapiens
  CDR3 for alpha chain variable domain of TCR clone 321276 (TRAV1-2, TRAJ8)
CAVREDTGFQKLVF

SEQ ID NO: 642552 - protein, 16 aa, Homo sapiens
  CDR3 for beta chain variable domain of TCR clone 321276 (TRBV29-1, TRBJ1-2)
CSVEANRDIANYGYSF

SEQ ID NO: 642553 - protein, 14 aa, Homo sapiens
  CDR3 for alpha chain variable domain of TCR clone 321277 (TRAV26-1, TRAJ34)
CIVRVAYNTDKLIF

SEQ ID NO: 642554 - protein, 16 aa, Homo sapiens
  CDR3 for beta chain variable domain of TCR clone 321277 (TRBV7-3, TRBJ2-2)
CASGLKRGTLSGELFF

SEQ ID NO: 642555 - protein, 13 aa, Homo sapiens
  CDR3 for alpha chain variable domain of TCR clone 321278 (TRAV8-3, TRAJ28)
CAVGAVGSYQLTF

SEQ ID NO: 642556 - protein, 15 aa, Homo sapiens
  CDR3 for beta chain variable domain of TCR clone 321278 (TRBV28, TRBJ2-5)
CASSPGQGSIQTQYF

SEQ ID NO: 642557 - protein, 14 aa, Homo sapiens
  CDR3 for alpha chain variable domain of TCR clone 321279 (TRAV26-1, TRAJ21)
CIVRPPYNFNKFYF

SEQ ID NO: 642558 - protein, 15 aa, Homo sapiens
  CDR3 for beta chain variable domain of TCR clone 321279 (TRBV7-3, TRBJ2-2)
CASKANGANTGELFF

SEQ ID NO: 642559 - protein, 13 aa, Homo sapiens
  CDR3 for alpha chain variable domain of TCR clone 321280 (TRAV8-3, TRAJ36)
CAVGATGANNLFF

SEQ ID NO: 642560 - protein, 13 aa, Homo sapiens
  CDR3 for beta chain variable domain of TCR clone 321280 (TRBV28, TRBJ2-7)
CASSLPSRYEQYF

SEQ ID NO: 642561 - protein, 13 aa, Homo sapiens
  CDR3 for alpha chain variable domain of TCR clone 321281 (TRAV8-4, TRAJ4)
CAVSDIGYNTLIF

SEQ ID NO: 642562 - protein, 13 aa, Homo sapiens
  CDR3 for beta chain variable domain of TCR clone 321281 (TRBV19, TRBJ1-2)
CASSQGQVCGYTF

SEQ ID NO: 642563 - protein, 11 aa, Homo sapiens
  CDR3 for alpha chain variable domain of TCR clone 321282 (TRAV3, TRAJ49)
CAPITGNQFYF

SEQ ID NO: 642564 - protein, 16 aa, Homo sapiens
  CDR3 for beta chain variable domain of TCR clone 321282 (TRBV19, TRBJ2-1)
CASSKAGPSSYNEQFF

SEQ ID NO: 642565 - protein, 18 aa, Homo sapiens
  CDR3 for alpha chain variable domain of TCR clone 321283 (TRAV21, TRAJ52)
CAVRPSPAGGTSYGRLTF

SEQ ID NO: 642566 - protein, 15 aa, Homo sapiens
  CDR3 for beta chain variable domain of TCR clone 321283 (TRBV20-1, TRBJ1-5)
CSAFKNGQRNQPQHC

SEQ ID NO: 642567 - protein, 14 aa, Homo sapiens
  CDR3 for alpha chain variable domain of TCR clone 321284 (TRAV27, TRAJ49)
CAGRPEGTGNQFYF

SEQ ID NO: 642568 - protein, 14 aa, Homo sapiens
  CDR3 for beta chain variable domain of TCR clone 321284 (TRBV10-2, TRBJ1-5)
CASSSTGRNQPQHF

SEQ ID NO: 642569 - protein, 15 aa, Homo sapiens
  CDR3 for alpha chain variable domain of TCR clone 321285 (TRAV8-2, TRAJ9)
CVVSDPGTGGFKTIF

SEQ ID NO: 642570 - protein, 13 aa, Homo sapiens
  CDR3 for beta chain variable domain of TCR clone 321285 (TRBV7-2, TRBJ1-1)
CASNLKGAKVAFF

SEQ ID NO: 642571 - protein, 12 aa, Homo sapiens
  CDR3 for alpha chain variable domain of TCR clone 321286 (TRAV12-3, TRAJ4)
CAMTGAGTRLAV

SEQ ID NO: 642572 - protein, 16 aa, Homo sapiens
  CDR3 for beta chain variable domain of TCR clone 321286 (TRBV28, TRBJ2-7)
CASSSPQGRDVYEQYF

SEQ ID NO: 642573 - protein, 13 aa, Homo sapiens
  CDR3 for alpha chain variable domain of TCR clone 321287 (TRAV12-2, TRAJ4)
CAGFSGGYYKLIF

SEQ ID NO: 642574 - protein, 14 aa, Homo sapiens
  CDR3 for beta chain variable domain of TCR clone 321287 (TRBV24-1, TRBJ1-1)
CATSIPRGDTEAFF

SEQ ID NO: 642575 - protein, 14 aa, Homo sapiens
  CDR3 for alpha chain variable domain of TCR clone 321288 (TRAV3, TRAJ34)
CAVRGINNTDKLIF

SEQ ID NO: 642576 - protein, 15 aa, Homo sapiens
  CDR3 for beta chain variable domain of TCR clone 321288 (TRBV20-1, TRBJ2-7)
CSARDRVSGMDEQYF

SEQ ID NO: 642577 - protein, 14 aa, Homo sapiens
  CDR3 for alpha chain variable domain of TCR clone 321289 (TRAV13-1, TRAJ44)
CAAKATGTARKLTF

SEQ ID NO: 642578 - protein, 14 aa, Homo sapiens
  CDR3 for beta chain variable domain of TCR clone 321289 (TRBV25-1, TRBJ1-1)
CASTHLGGNTEAFF

SEQ ID NO: 642579 - protein, 12 aa, Homo sapiens
  CDR3 for alpha chain variable domain of TCR clone 321290 (TRAV1-2, TRAJ29)
CAVPSGNTPLVF

SEQ ID NO: 642580 - protein, 12 aa, Homo sapiens
  CDR3 for beta chain variable domain of TCR clone 321290 (TRBV2, TRBJ2-5)
CASKEYGETQYF

SEQ ID NO: 642581 - protein, 13 aa, Homo sapiens
  CDR3 for alpha chain variable domain of TCR clone 321291 (TRAV12-1, TRAJ33)
CGDAPESNYQLIW

SEQ ID NO: 642582 - protein, 15 aa, Homo sapiens
  CDR3 for beta chain variable domain of TCR clone 321291 (TRBV27, TRBJ2-1)
CASSNGGGSSNEQFF

SEQ ID NO: 642583 - protein, 16 aa, Homo sapiens
  CDR3 for alpha chain variable domain of TCR clone 321292 (TRAV3, TRAJ10)
CAVRDMRAGGGNKLTF

SEQ ID NO: 642584 - protein, 13 aa, Homo sapiens
  CDR3 for beta chain variable domain of TCR clone 321292 (TRBV12-4, TRBJ2-7)
CASNPTETYEQYF

SEQ ID NO: 642585 - protein, 18 aa, Homo sapiens
  CDR3 for alpha chain variable domain of TCR clone 321293 (TRAV14/DV4, TRAJ3)
CAMREGSGGYSSASKIIF

SEQ ID NO: 642586 - protein, 15 aa, Homo sapiens
  CDR3 for beta chain variable domain of TCR clone 321293 (TRBV29-1, TRBJ2-7)
CSVEFFDRGSYEQYF

SEQ ID NO: 642587 - protein, 11 aa, Homo sapiens
  CDR3 for alpha chain variable domain of TCR clone 321294 (TRAV13-2, TRAJ31)
CAENMDARLMF

SEQ ID NO: 642588 - protein, 14 aa, Homo sapiens
  CDR3 for beta chain variable domain of TCR clone 321294 (TRBV11-2, TRBJ2-7)
CASSLGAGAYEQYF

SEQ ID NO: 642589 - protein, 13 aa, Homo sapiens
  CDR3 for alpha chain variable domain of TCR clone 321295 (TRAV12-1, TRAJ37)
CAGCSSNTGKLIF

SEQ ID NO: 642590 - protein, 13 aa, Homo sapiens
  CDR3 for beta chain variable domain of TCR clone 321295 (TRBV18, TRBJ1-1)
CASSGGRNTEAFF

SEQ ID NO: 642591 - protein, 13 aa, Homo sapiens
  CDR3 for alpha chain variable domain of TCR clone 321296 (TRAV27, TRAJ49)
CAPRPYTGNLFYF

SEQ ID NO: 642592 - protein, 18 aa, Homo sapiens
  CDR3 for beta chain variable domain of TCR clone 321296 (TRBV7-3, TRBJ2-5)
CASSLGGAAQGRWETQYF

SEQ ID NO: 642593 - protein, 17 aa, Homo sapiens
  CDR3 for alpha chain variable domain of TCR clone 321297 (TRAV3, TRAJ28)
CAVGEAYSGAGRYQLTF

SEQ ID NO: 642594 - protein, 18 aa, Homo sapiens
  CDR3 for beta chain variable domain of TCR clone 321297 (TRBV27, TRBJ2-1)
CASGNRAVGVGSKNEQFF

SEQ ID NO: 642595 - protein, 12 aa, Homo sapiens
  CDR3 for alpha chain variable domain of TCR clone 321298 (TRAV20, TRAJ20)
CAVRFNDYKLSF

SEQ ID NO: 642596 - protein, 14 aa, Homo sapiens
  CDR3 for beta chain variable domain of TCR clone 321298 (TRBV20-1, TRBJ2-1)
CSAQIGGSANEQFF

SEQ ID NO: 642597 - protein, 12 aa, Homo sapiens
  CDR3 for alpha chain variable domain of TCR clone 321299 (TRAV12-3, TRAJ17)
CAMTLTVNKLTL

SEQ ID NO: 642598 - protein, 15 aa, Homo sapiens
  CDR3 for beta chain variable domain of TCR clone 321299 (TRBV20-1, TRBJ2-7)
CSARDRVSGMDEQYF

SEQ ID NO: 642599 - protein, 14 aa, Homo sapiens
  CDR3 for alpha chain variable domain of TCR clone 321300 (TRAV2, TRAJ33)
RAVEDQGSNYQLIW

SEQ ID NO: 642600 - protein, 15 aa, Homo sapiens
  CDR3 for beta chain variable domain of TCR clone 321300 (TRBV9, TRBJ2-3)
CASSEQGAGRDTQYF

SEQ ID NO: 642601 - protein, 13 aa, Homo sapiens
  CDR3 for alpha chain variable domain of TCR clone 321301 (TRAV27, TRAJ42)
CAGARGSQGNLIF

SEQ ID NO: 642602 - protein, 14 aa, Homo sapiens
  CDR3 for beta chain variable domain of TCR clone 321301 (TRBV20-1, TRBJ1-1)
CSAETRIGGTEAFF

SEQ ID NO: 642603 - protein, 15 aa, Homo sapiens
  CDR3 for alpha chain variable domain of TCR clone 321302 (TRAV12-2, TRAJ45)
CAVKRTGGSADGLTF

SEQ ID NO: 642604 - protein, 16 aa, Homo sapiens
  CDR3 for beta chain variable domain of TCR clone 321302 (TRBV28, TRBJ2-3)
CASSSFGTGGTDTQYF

SEQ ID NO: 642605 - protein, 12 aa, Homo sapiens
  CDR3 for alpha chain variable domain of TCR clone 321303 (TRAV12-3, TRAJ17)
CAMTLTGNKLTF

SEQ ID NO: 642606 - protein, 15 aa, Homo sapiens
  CDR3 for beta chain variable domain of TCR clone 321303 (TRBV20-1, TRBJ2-7)
CSARDRIAGMDEQYF

SEQ ID NO: 642607 - protein, 13 aa, Homo sapiens
  CDR3 for alpha chain variable domain of TCR clone 321304 (TRAV27, TRAJ49)
CAPRPYTGNQFYF

SEQ ID NO: 642608 - protein, 14 aa, Homo sapiens
  CDR3 for beta chain variable domain of TCR clone 321304 (TRBV7-2, TRBJ1-1)
CASSFLTGTTEALF

SEQ ID NO: 642609 - protein, 18 aa, Homo sapiens
  CDR3 for alpha chain variable domain of TCR clone 321305 (TRAV21, TRAJ52)
CAVRPSPAGGTSYGKLTF

SEQ ID NO: 642610 - protein, 13 aa, Homo sapiens
  CDR3 for beta chain variable domain of TCR clone 321305 (TRBV7-7, TRBJ2-3)
CASSLSRADTQCF

SEQ ID NO: 642611 - protein, 16 aa, Homo sapiens
  CDR3 for alpha chain variable domain of TCR clone 321306 (TRAV30, TRAJ24)
CGTEIVDADSWVKFQF

SEQ ID NO: 642612 - protein, 16 aa, Homo sapiens
  CDR3 for beta chain variable domain of TCR clone 321306 (TRBV12-5, TRBJ2-5)
CASGPRTSGNQETQYF

SEQ ID NO: 642613 - protein, 19 aa, Homo sapiens
  CDR3 for alpha chain variable domain of TCR clone 321307 (TRAV1-1, TRAJ6)
CAVRDWRGQEEATYLHLEE

SEQ ID NO: 642614 - protein, 13 aa, Homo sapiens
  CDR3 for beta chain variable domain of TCR clone 321307 (TRBV10-2, TRBJ2-7)
CASGASGGYEQYF

SEQ ID NO: 642615 - protein, 14 aa, Homo sapiens
  CDR3 for alpha chain variable domain of TCR clone 321308 (TRAV12-2, TRAJ29)
CAVRRNSGNTPLVF

SEQ ID NO: 642616 - protein, 13 aa, Homo sapiens
  CDR3 for beta chain variable domain of TCR clone 321308 (TRBV12-4, TRBJ2-1)
YASSHYTDNEQFF

SEQ ID NO: 642617 - protein, 10 aa, Homo sapiens
  CDR3 for alpha chain variable domain of TCR clone 321309 (TRAV27, TRAJ49)
CVVPVTSSIL

SEQ ID NO: 642618 - protein, 15 aa, Homo sapiens
  CDR3 for beta chain variable domain of TCR clone 321309 (TRBV19, TRBJ2-7)
CASSIRQGARYEQYF

SEQ ID NO: 642619 - protein, 14 aa, Homo sapiens
  CDR3 for alpha chain variable domain of TCR clone 321310 (TRAV1-2, TRAJ16)
CAVNRFSDGQKLLL

SEQ ID NO: 642620 - protein, 11 aa, Homo sapiens
  CDR3 for beta chain variable domain of TCR clone 321310 (TRBV7-8, TRBJ2-7)
CASSLSLEQYF

SEQ ID NO: 642621 - protein, 14 aa, Homo sapiens
  CDR3 for alpha chain variable domain of TCR clone 321311 (TRAV13-2, TRAJ43)
CAEIPTFNNNDMRF

SEQ ID NO: 642622 - protein, 15 aa, Homo sapiens
  CDR3 for beta chain variable domain of TCR clone 321311 (TRBV7-9, TRBJ2-2)
CASGPLDTFPGELFF

SEQ ID NO: 642623 - protein, 14 aa, Homo sapiens
  CDR3 for alpha chain variable domain of TCR clone 321312 (TRAV12-1, TRAJ17)
CVVNYKAAGNELTF

SEQ ID NO: 642624 - protein, 12 aa, Homo sapiens
  CDR3 for beta chain variable domain of TCR clone 321312 (TRBV12-4, TRBJ2-1)
CASSSSYNEQFF

SEQ ID NO: 642625 - protein, 13 aa, Homo sapiens
  CDR3 for alpha chain variable domain of TCR clone 321313 (TRAV12-1, TRAJ16)
CVVNGPDGQKLLF

SEQ ID NO: 642626 - protein, 13 aa, Homo sapiens
  CDR3 for beta chain variable domain of TCR clone 321313 (TRBV2, TRBJ1-1)
CARNPTGGFNAFF

SEQ ID NO: 642627 - protein, 14 aa, Homo sapiens
  CDR3 for alpha chain variable domain of TCR clone 321314 (TRAV26-1, TRAJ44)
CIVSNTGPASKLTF

SEQ ID NO: 642628 - protein, 11 aa, Homo sapiens
  CDR3 for beta chain variable domain of TCR clone 321314 (TRBV19, TRBJ2-7)
CASSILGEQYF

SEQ ID NO: 642629 - protein, 20 aa, Homo sapiens
  CDR3 for alpha chain variable domain of TCR clone 321315 (TRAV1-1, TRAJ4)
CLLLLRCEGFLSGGYNKLIF

SEQ ID NO: 642630 - protein, 16 aa, Homo sapiens
  CDR3 for beta chain variable domain of TCR clone 321315 (TRBV28, TRBJ1-4)
CASSPPYRGRSEELFF

SEQ ID NO: 642631 - protein, 10 aa, Homo sapiens
  CDR3 for alpha chain variable domain of TCR clone 321316 (TRAV23/DV6, TRAJ57)
CAASSTLSQG

SEQ ID NO: 642632 - protein, 14 aa, Homo sapiens
  CDR3 for beta chain variable domain of TCR clone 321316 (TRBV25-1, TRBJ1-1)
CASTYLGGNTEAFF

SEQ ID NO: 642633 - protein, 14 aa, Homo sapiens
  CDR3 for alpha chain variable domain of TCR clone 321317 (TRAV23/DV6, TRAJ6)
CAASRSGGSYIPTF

SEQ ID NO: 642634 - protein, 17 aa, Homo sapiens
  CDR3 for beta chain variable domain of TCR clone 321317 (TRBV20-1, TRBJ2-1)
CSASASGLAGSYNEQFS

SEQ ID NO: 642635 - protein, 16 aa, Homo sapiens
  CDR3 for alpha chain variable domain of TCR clone 321318 (TRAV30, TRAJ24)
CGTEIVDADSWGKFQF

SEQ ID NO: 642636 - protein, 16 aa, Homo sapiens
  CDR3 for beta chain variable domain of TCR clone 321318 (TRBV28, TRBJ2-7)
CASSFPYRRLTYEQYF

SEQ ID NO: 642637 - protein, 21 aa, Homo sapiens
  CDR3 for alpha chain variable domain of TCR clone 321319 (TRAV1-1, TRAJ6)
CAVRREEATYLHLAEEPALLF

SEQ ID NO: 642638 - protein, 15 aa, Homo sapiens
  CDR3 for beta chain variable domain of TCR clone 321319 (TRBV6-6, TRBJ2-1)
CATRQGVSSYNEQFF

SEQ ID NO: 642639 - protein, 17 aa, Homo sapiens
  CDR3 for alpha chain variable domain of TCR clone 321320 (TRAV3, TRAJ6)
CAVRDGPRAGGSYIPTF

SEQ ID NO: 642640 - protein, 17 aa, Homo sapiens
  CDR3 for beta chain variable domain of TCR clone 321320 (TRBV5-1, TRBJ2-1)
CASSTGTSGYSYNEQFF

SEQ ID NO: 642641 - protein, 14 aa, Homo sapiens
  CDR3 for alpha chain variable domain of TCR clone 321321 (TRAV13-1, TRAJ20)
CAARPGSNDYKFSF

SEQ ID NO: 642642 - protein, 13 aa, Homo sapiens
  CDR3 for beta chain variable domain of TCR clone 321321 (TRBV20-1, TRBJ1-1)
CSAPPGGHTEAFF

SEQ ID NO: 642643 - protein, 13 aa, Homo sapiens
  CDR3 for alpha chain variable domain of TCR clone 321322 (TRAV27, TRAJ41)
CAGEGNSGYALNF

SEQ ID NO: 642644 - protein, 16 aa, Homo sapiens
  CDR3 for beta chain variable domain of TCR clone 321322 (TRBV7-8, TRBJ2-5)
CASSFGGQPAQETQYF

SEQ ID NO: 642645 - protein, 12 aa, Homo sapiens
  CDR3 for alpha chain variable domain of TCR clone 321323 (TRAV38-1, TRAJ20)
CAFIWNDYKLSF

SEQ ID NO: 642646 - protein, 11 aa, Homo sapiens
  CDR3 for beta chain variable domain of TCR clone 321323 (TRBV29-1, TRBJ2-5)
CSEDRTETQYF

SEQ ID NO: 642647 - protein, 13 aa, Homo sapiens
  CDR3 for alpha chain variable domain of TCR clone 321324 (TRAV13-1, TRAJ39)
CSKYSNAGNMLTF

SEQ ID NO: 642648 - protein, 15 aa, Homo sapiens
  CDR3 for beta chain variable domain of TCR clone 321324 (TRBV12-4, TRBJ2-5)
CASSPPTGLQETQYF

SEQ ID NO: 642649 - protein, 13 aa, Homo sapiens
  CDR3 for alpha chain variable domain of TCR clone 321325 (TRAV35, TRAJ27)
CAGQEGDAGKSTF

SEQ ID NO: 642650 - protein, 16 aa, Homo sapiens
  CDR3 for beta chain variable domain of TCR clone 321325 (TRBV7-2, TRBJ2-5)
CASSYKTGISLETQNF

SEQ ID NO: 642651 - protein, 13 aa, Homo sapiens
  CDR3 for alpha chain variable domain of TCR clone 321326 (TRAV2, TRAJ40)
CAVVTSGTYKYIF

SEQ ID NO: 642652 - protein, 12 aa, Homo sapiens
  CDR3 for beta chain variable domain of TCR clone 321326 (TRBV5-1, TRBJ2-5)
CASSFSWETQYF

SEQ ID NO: 642653 - protein, 12 aa, Homo sapiens
  CDR3 for alpha chain variable domain of TCR clone 321327 (TRAV35, TRAJ49)
CAGWNTGNQFYF

SEQ ID NO: 642654 - protein, 16 aa, Homo sapiens
  CDR3 for beta chain variable domain of TCR clone 321327 (TRBV5-1, TRBJ2-2)
CASSLWDTTHTGELFF

SEQ ID NO: 642655 - protein, 12 aa, Homo sapiens
  CDR3 for alpha chain variable domain of TCR clone 321328 (TRAV8-4, TRAJ31)
CAVSDSNARLMF

SEQ ID NO: 642656 - protein, 16 aa, Homo sapiens
  CDR3 for beta chain variable domain of TCR clone 321328 (TRBV4-1, TRBJ2-3)
CASSQRAGGLTDTQYF

SEQ ID NO: 642657 - protein, 12 aa, Homo sapiens
  CDR3 for alpha chain variable domain of TCR clone 321329 (TRAV21, TRAJ23)
CAVLLQGGKLIF

SEQ ID NO: 642658 - protein, 13 aa, Homo sapiens
  CDR3 for beta chain variable domain of TCR clone 321329 (TRBV6-6, TRBJ2-1)
CASSLHQGDEQFF

SEQ ID NO: 642659 - protein, 15 aa, Homo sapiens
  CDR3 for alpha chain variable domain of TCR clone 321330 (TRAV14/DV4, TRAJ12)
CAMREERDSSYKLIF

SEQ ID NO: 642660 - protein, 16 aa, Homo sapiens
  CDR3 for beta chain variable domain of TCR clone 321330 (TRBV11-2, TRBJ1-2)
CASSLDTGGEDYGYTF

SEQ ID NO: 642661 - protein, 13 aa, Homo sapiens
  CDR3 for alpha chain variable domain of TCR clone 321331 (TRAV26-1, TRAJ33)
CIVRVEGNYQLIW

SEQ ID NO: 642662 - protein, 16 aa, Homo sapiens
  CDR3 for beta chain variable domain of TCR clone 321331 (TRBV15, TRBJ2-7)
CATSRDRGRKRGEQYF

SEQ ID NO: 642663 - protein, 12 aa, Homo sapiens
  CDR3 for alpha chain variable domain of TCR clone 321332 (TRAV13-1, TRAJ44)
VGGGGTASKLTF

SEQ ID NO: 642664 - protein, 12 aa, Homo sapiens
  CDR3 for beta chain variable domain of TCR clone 321332 (TRBV12-4, TRBJ2-5)
CASSSAQETQYF

SEQ ID NO: 642665 - protein, 16 aa, Homo sapiens
  CDR3 for alpha chain variable domain of TCR clone 321333 (TRAV30, TRAJ24)
CGTEIVDADSWGKSQF

SEQ ID NO: 642666 - protein, 15 aa, Homo sapiens
  CDR3 for beta chain variable domain of TCR clone 321333 (TRBV20-1, TRBJ2-4)
CSARDLTGGPNMQYF

SEQ ID NO: 642667 - protein, 13 aa, Homo sapiens
  CDR3 for alpha chain variable domain of TCR clone 321334 (TRAV14/DV4, TRAJ23)
CAMREVNGGKLIF

SEQ ID NO: 642668 - protein, 15 aa, Homo sapiens
  CDR3 for beta chain variable domain of TCR clone 321334 (TRBV6-3, TRBJ2-1)
CASSYASDSYNEQFF

SEQ ID NO: 642669 - protein, 23 aa, Homo sapiens
  CDR3 for alpha chain variable domain of TCR clone 321335 (TRAV26-1, TRAJ38)
CIADNAGNNHIPNPDPAVYQLRD

SEQ ID NO: 642670 - protein, 13 aa, Homo sapiens
  CDR3 for beta chain variable domain of TCR clone 321335 (TRBV20-1, TRBJ1-1)
CSARGGGSTEAFF

SEQ ID NO: 642671 - protein, 14 aa, Homo sapiens
  CDR3 for alpha chain variable domain of TCR clone 321336 (TRAV12-3, TRAJ57)
CARALEGGSEKLVF

SEQ ID NO: 642672 - protein, 16 aa, Homo sapiens
  CDR3 for beta chain variable domain of TCR clone 321336 (TRBV5-1, TRBJ2-1)
CASSIRSGGSYNEQFF

SEQ ID NO: 642673 - protein, 14 aa, Homo sapiens
  CDR3 for alpha chain variable domain of TCR clone 321337 (TRAV35, TRAJ22)
CAGLRPGSARQLTF

SEQ ID NO: 642674 - protein, 12 aa, Homo sapiens
  CDR3 for beta chain variable domain of TCR clone 321337 (TRBV7-8, TRBJ2-7)
CASSLGDREQYF

SEQ ID NO: 642675 - protein, 16 aa, Homo sapiens
  CDR3 for alpha chain variable domain of TCR clone 321338 (TRAV13-1, TRAJ45)
CAARGSRKGGADGLTF

SEQ ID NO: 642676 - protein, 13 aa, Homo sapiens
  CDR3 for beta chain variable domain of TCR clone 321338 (TRBV12-4, TRBJ2-5)
CASRKRGKETQFF

SEQ ID NO: 642677 - protein, 16 aa, Homo sapiens
  CDR3 for alpha chain variable domain of TCR clone 321339 (TRAV30, TRAJ24)
CGTEILDADSWGKFQF

SEQ ID NO: 642678 - protein, 13 aa, Homo sapiens
  CDR3 for beta chain variable domain of TCR clone 321339 (TRBV11-2, TRBJ2-5)
CASSSTGEETQYF

SEQ ID NO: 642679 - protein, 15 aa, Homo sapiens
  CDR3 for alpha chain variable domain of TCR clone 321340 (TRAV12-2, TRAJ53)
CAVNGGGGSNYKLTF

SEQ ID NO: 642680 - protein, 13 aa, Homo sapiens
  CDR3 for beta chain variable domain of TCR clone 321340 (TRBV3-1, TRBJ1-1)
CAISPGVITEGFL

SEQ ID NO: 642681 - protein, 11 aa, Homo sapiens
  CDR3 for alpha chain variable domain of TCR clone 321341 (TRAV3, TRAJ21)
FAVGNFKKFYF

SEQ ID NO: 642682 - protein, 13 aa, Homo sapiens
  CDR3 for beta chain variable domain of TCR clone 321341 (TRBV7-9, TRBJ1-2)
CASSLKQNYGYTF

SEQ ID NO: 642683 - protein, 16 aa, Homo sapiens
  CDR3 for alpha chain variable domain of TCR clone 321342 (TRAV3, TRAJ6)
CAERRPQGRRKLHTYI

SEQ ID NO: 642684 - protein, 20 aa, Homo sapiens
  CDR3 for beta chain variable domain of TCR clone 321342 (TRBV28, TRBJ2-1)
CASTPIGRSPGLAGGNEQFF

SEQ ID NO: 642685 - protein, 14 aa, Homo sapiens
  CDR3 for alpha chain variable domain of TCR clone 321343 (TRAV8-4, TRAJ9)
CAVGINTGGFKTTF

SEQ ID NO: 642686 - protein, 15 aa, Homo sapiens
  CDR3 for beta chain variable domain of TCR clone 321343 (TRBV10-2, TRBJ2-6)
CASSEQGTGANVLTF

SEQ ID NO: 642687 - protein, 18 aa, Homo sapiens
  CDR3 for alpha chain variable domain of TCR clone 321344 (TRAV21, TRAJ52)
CAVRPSPAGGTSSGKLTF

SEQ ID NO: 642688 - protein, 17 aa, Homo sapiens
  CDR3 for beta chain variable domain of TCR clone 321344 (TRBV13, TRBJ2-3)
CASSLSRVEGGRNTQYF

SEQ ID NO: 642689 - protein, 14 aa, Homo sapiens
  CDR3 for alpha chain variable domain of TCR clone 321345 (TRAV23/DV6, TRAJ17)
CAARGRAAGNKLTF

SEQ ID NO: 642690 - protein, 13 aa, Homo sapiens
  CDR3 for beta chain variable domain of TCR clone 321345 (TRBV11-2, TRBJ2-5)
CASGHGAKETQYF

SEQ ID NO: 642691 - protein, 13 aa, Homo sapiens
  CDR3 for alpha chain variable domain of TCR clone 321346 (TRAV27, TRAJ41)
CAGEGNSGYALNF

SEQ ID NO: 642692 - protein, 14 aa, Homo sapiens
  CDR3 for beta chain variable domain of TCR clone 321346 (TRBV7-3, TRBJ1-1)
CASSLKGGNTEACF

SEQ ID NO: 642693 - protein, 14 aa, Homo sapiens
  CDR3 for alpha chain variable domain of TCR clone 321347 (TRAV1-2, TRAJ16)
CAVNRFSDGQKLLF

SEQ ID NO: 642694 - protein, 15 aa, Homo sapiens
  CDR3 for beta chain variable domain of TCR clone 321347 (TRBV7-9, TRBJ1-4)
CGSSARTGCNEKLFF

SEQ ID NO: 642695 - protein, 14 aa, Homo sapiens
  CDR3 for alpha chain variable domain of TCR clone 321348 (TRAV8-4, TRAJ9)
WAVRINTGGFKTIF

SEQ ID NO: 642696 - protein, 15 aa, Homo sapiens
  CDR3 for beta chain variable domain of TCR clone 321348 (TRBV10-2, TRBJ2-6)
CAGSEQGTGANDLTF

SEQ ID NO: 642697 - protein, 14 aa, Homo sapiens
  CDR3 for alpha chain variable domain of TCR clone 321349 (TRAV1-2, TRAJ27)
CAVIYNTNAGKSTF

SEQ ID NO: 642698 - protein, 15 aa, Homo sapiens
  CDR3 for beta chain variable domain of TCR clone 321349 (TRBV7-2, TRBJ2-1)
CASSAGLAGGNEQFF

SEQ ID NO: 642699 - protein, 16 aa, Homo sapiens
  CDR3 for alpha chain variable domain of TCR clone 321350 (TRAV1-2, TRAJ6)
CAVRDQGTGGSYIPTF

SEQ ID NO: 642700 - protein, 13 aa, Homo sapiens
  CDR3 for beta chain variable domain of TCR clone 321350 (TRBV28, TRBJ2-7)
CASTPGLAGGQYF

SEQ ID NO: 642701 - protein, 16 aa, Homo sapiens
  CDR3 for alpha chain variable domain of TCR clone 321351 (TRAV4, TRAJ22)
CLVGDLYSGCARQLTF

SEQ ID NO: 642702 - protein, 15 aa, Homo sapiens
  CDR3 for beta chain variable domain of TCR clone 321351 (TRBV7-9, TRBJ1-4)
CASSRTGGFNEKLFF

SEQ ID NO: 642703 - protein, 11 aa, Homo sapiens
  CDR3 for alpha chain variable domain of TCR clone 321352 (TRAV1-2, TRAJ40)
CAVPGTYKYIF

SEQ ID NO: 642704 - protein, 16 aa, Homo sapiens
  CDR3 for beta chain variable domain of TCR clone 321352 (TRBV29-1, TRBJ2-7)
CSVEDVGTSGSYEQYF

SEQ ID NO: 642705 - protein, 12 aa, Homo sapiens
  CDR3 for alpha chain variable domain of TCR clone 321353 (TRAV12-3, TRAJ31)
CAMSVPNARLMF

SEQ ID NO: 642706 - protein, 12 aa, Homo sapiens
  CDR3 for beta chain variable domain of TCR clone 321353 (TRBV11-2, TRBJ2-1)
CASSVQREWQFF

SEQ ID NO: 642707 - protein, 15 aa, Homo sapiens
  CDR3 for alpha chain variable domain of TCR clone 321354 (TRAV3, TRAJ5)
CAVRDLDTGRRALTF

SEQ ID NO: 642708 - protein, 14 aa, Homo sapiens
  CDR3 for beta chain variable domain of TCR clone 321354 (TRBV12-4, TRBJ2-3)
CASSLGTVTDTQYF

SEQ ID NO: 642709 - protein, 12 aa, Homo sapiens
  CDR3 for alpha chain variable domain of TCR clone 321355 (TRAV1-2, TRAJ33)
CAALDSNYQLIW

SEQ ID NO: 642710 - protein, 14 aa, Homo sapiens
  CDR3 for beta chain variable domain of TCR clone 321355 (TRBV20-1, TRBJ2-1)
CSAQIGGSPNEQFF

SEQ ID NO: 642711 - protein, 14 aa, Homo sapiens
  CDR3 for alpha chain variable domain of TCR clone 321356 (TRAV12-3, TRAJ10)
SHLPLTGGGNKLTF

SEQ ID NO: 642712 - protein, 17 aa, Homo sapiens
  CDR3 for beta chain variable domain of TCR clone 321356 (TRBV18, TRBJ1-5)
CASSPTMGQGTNQPQHF

SEQ ID NO: 642713 - protein, 14 aa, Homo sapiens
  CDR3 for alpha chain variable domain of TCR clone 321357 (TRAV13-1, TRAJ16)
CAAAYFFRWPEAAL

SEQ ID NO: 642714 - protein, 15 aa, Homo sapiens
  CDR3 for beta chain variable domain of TCR clone 321357 (TRBV28, TRBJ2-5)
CASSPGQGSIETQYF

SEQ ID NO: 642715 - protein, 11 aa, Homo sapiens
  CDR3 for alpha chain variable domain of TCR clone 321358 (TRAV12-2, TRAJ43)
CASPIGNAMRF

SEQ ID NO: 642716 - protein, 13 aa, Homo sapiens
  CDR3 for beta chain variable domain of TCR clone 321358 (TRBV7-3, TRBJ1-2)
CASSLKRGYGYTF

SEQ ID NO: 642717 - protein, 13 aa, Homo sapiens
  CDR3 for alpha chain variable domain of TCR clone 321359 (TRAV2, TRAJ40)
CAVVTSGTYKYIF

SEQ ID NO: 642718 - protein, 16 aa, Homo sapiens
  CDR3 for beta chain variable domain of TCR clone 321359 (TRBV5-1, TRBJ2-3)
CASSLQGRVGADTQYF

SEQ ID NO: 642719 - protein, 12 aa, Homo sapiens
  CDR3 for alpha chain variable domain of TCR clone 321360 (TRAV13-2, TRAJ23)
CAERHRGGKLIF

SEQ ID NO: 642720 - protein, 12 aa, Homo sapiens
  CDR3 for beta chain variable domain of TCR clone 321360 (TRBV14, TRBJ2-7)
CASSLYKDEQYF

SEQ ID NO: 642721 - protein, 13 aa, Homo sapiens
  CDR3 for alpha chain variable domain of TCR clone 321361 (TRAV22, TRAJ29)
CAVGGSGNTPLVF

SEQ ID NO: 642722 - protein, 15 aa, Homo sapiens
  CDR3 for beta chain variable domain of TCR clone 321361 (TRBV12-4, TRBJ2-5)
CASSLSGAFQETQYF

SEQ ID NO: 642723 - protein, 14 aa, Homo sapiens
  CDR3 for alpha chain variable domain of TCR clone 321362 (TRAV12-3, TRAJ58)
CAMSTGTSVSRLTF

SEQ ID NO: 642724 - protein, 11 aa, Homo sapiens
  CDR3 for beta chain variable domain of TCR clone 321362 (TRBV29-1, TRBJ2-5)
CSEDRTGTQYF

SEQ ID NO: 642725 - protein, 14 aa, Homo sapiens
  CDR3 for alpha chain variable domain of TCR clone 321363 (TRAV26-1, TRAJ34)
FIVRVAYNTDKLIF

SEQ ID NO: 642726 - protein, 16 aa, Homo sapiens
  CDR3 for beta chain variable domain of TCR clone 321363 (TRBV7-3, TRBJ2-2)
CASSLKRGTLSGELFF

SEQ ID NO: 642727 - protein, 14 aa, Homo sapiens
  CDR3 for alpha chain variable domain of TCR clone 321364 (TRAV38-1, TRAJ45)
CAYYSGGGADGLTF

SEQ ID NO: 642728 - protein, 20 aa, Homo sapiens
  CDR3 for beta chain variable domain of TCR clone 321364 (TRBV28, TRBJ2-1)
CASTPIGRSPGLAGANEQFF

SEQ ID NO: 642729 - protein, 15 aa, Homo sapiens
  CDR3 for alpha chain variable domain of TCR clone 321365 (TRAV4, TRAJ36)
CLVGDRQTGANNLFF

SEQ ID NO: 642730 - protein, 15 aa, Homo sapiens
  CDR3 for beta chain variable domain of TCR clone 321365 (TRBV7-6, TRBJ2-1)
CASSYLAGEGNEQFF

SEQ ID NO: 642731 - protein, 13 aa, Homo sapiens
  CDR3 for alpha chain variable domain of TCR clone 321366 (TRAV12-3, TRAJ20)
CAMSATNDYKLSF

SEQ ID NO: 642732 - protein, 16 aa, Homo sapiens
  CDR3 for beta chain variable domain of TCR clone 321366 (TRBV18, TRBJ2-7)
WASSPYRDGQTYEQYF

SEQ ID NO: 642733 - protein, 16 aa, Homo sapiens
  CDR3 for alpha chain variable domain of TCR clone 321367 (TRAV30, TRAJ24)
CGTEIVDADSWGKFQF

SEQ ID NO: 642734 - protein, 17 aa, Homo sapiens
  CDR3 for beta chain variable domain of TCR clone 321367 (TRBV13, TRBJ2-3)
CASSLSRVAGGGNTQYF

SEQ ID NO: 642735 - protein, 16 aa, Homo sapiens
  CDR3 for alpha chain variable domain of TCR clone 321368 (TRAV30, TRAJ24)
CGTEIVDADSWGKFQF

SEQ ID NO: 642736 - protein, 12 aa, Homo sapiens
  CDR3 for beta chain variable domain of TCR clone 321368 (TRBV11-2, TRBJ2-7)
CASSPPADEQYF

SEQ ID NO: 642737 - protein, 14 aa, Homo sapiens
  CDR3 for alpha chain variable domain of TCR clone 321369 (TRAV12-3, TRAJ22)
CAMSLFGSARQLTF

SEQ ID NO: 642738 - protein, 15 aa, Homo sapiens
  CDR3 for beta chain variable domain of TCR clone 321369 (TRBV6-1, TRBJ2-3)
CASSERGGITDTQYF

SEQ ID NO: 642739 - protein, 15 aa, Homo sapiens
  CDR3 for alpha chain variable domain of TCR clone 321370 (TRAV3, TRAJ20)
CAVRGIKLSDYKLSF

SEQ ID NO: 642740 - protein, 18 aa, Homo sapiens
  CDR3 for beta chain variable domain of TCR clone 321370 (TRBV20-1, TRBJ2-5)
CSQTGDSGRLGGKETQYF

SEQ ID NO: 642741 - protein, 15 aa, Homo sapiens
  CDR3 for alpha chain variable domain of TCR clone 321371 (TRAV12-2, TRAJ22)
CAVNGASGSARQLTF

SEQ ID NO: 642742 - protein, 15 aa, Homo sapiens
  CDR3 for beta chain variable domain of TCR clone 321371 (TRBV18, TRBJ2-2)
CASSPPVGFTGELFC

SEQ ID NO: 642743 - protein, 12 aa, Homo sapiens
  CDR3 for alpha chain variable domain of TCR clone 321372 (TRAV1-2, TRAJ29)
CAVPSGNTPLVF

SEQ ID NO: 642744 - protein, 14 aa, Homo sapiens
  CDR3 for beta chain variable domain of TCR clone 321372 (TRBV19, TRBJ1-2)
CASSLQGQAYGYTV

SEQ ID NO: 642745 - protein, 13 aa, Homo sapiens
  CDR3 for alpha chain variable domain of TCR clone 321373 (TRAV38-1, TRAJ42)
CARWGGSQGNLIF

SEQ ID NO: 642746 - protein, 10 aa, Homo sapiens
  CDR3 for beta chain variable domain of TCR clone 321373 (TRBV2, TRBJ2-5)
CASSAATKYF

SEQ ID NO: 642747 - protein, 11 aa, Homo sapiens
  CDR3 for alpha chain variable domain of TCR clone 321374 (TRAV27, TRAJ20)
CAGLNDYKLSF

SEQ ID NO: 642748 - protein, 16 aa, Homo sapiens
  CDR3 for beta chain variable domain of TCR clone 321374 (TRBV27, TRBJ2-2)
CASSFWGLVRTGELFF

SEQ ID NO: 642749 - protein, 14 aa, Homo sapiens
  CDR3 for alpha chain variable domain of TCR clone 321375 (TRAV2, TRAJ9)
CAVEDRSGGFKTIF

SEQ ID NO: 642750 - protein, 16 aa, Homo sapiens
  CDR3 for beta chain variable domain of TCR clone 321375 (TRBV11-2, TRBJ2-1)
CASSLYPPGVEYNEQF

SEQ ID NO: 642751 - protein, 18 aa, Homo sapiens
  CDR3 for alpha chain variable domain of TCR clone 321376 (TRAV4, TRAJ29)
CLVGAYRSQATHLLSLEM

SEQ ID NO: 642752 - protein, 17 aa, Homo sapiens
  CDR3 for beta chain variable domain of TCR clone 321376 (TRBV25-1, TRBJ2-7)
CASSDARVVFSSYEQYF

SEQ ID NO: 642753 - protein, 14 aa, Homo sapiens
  CDR3 for alpha chain variable domain of TCR clone 321377 (TRAV13-1, TRAJ44)
CAAKATGTASKLTF

SEQ ID NO: 642754 - protein, 13 aa, Homo sapiens
  CDR3 for beta chain variable domain of TCR clone 321377 (TRBV5-5, TRBJ1-2)
CASSLWRGEDNTF

SEQ ID NO: 642755 - protein, 15 aa, Homo sapiens
  CDR3 for alpha chain variable domain of TCR clone 321378 (TRAV14/DV4, TRAJ46)
CAMREEKSSGDKLTF

SEQ ID NO: 642756 - protein, 13 aa, Homo sapiens
  CDR3 for beta chain variable domain of TCR clone 321378 (TRBV7-3, TRBJ1-2)
CASSLKRGYGYTF

SEQ ID NO: 642757 - protein, 16 aa, Homo sapiens
  CDR3 for alpha chain variable domain of TCR clone 321379 (TRAV1-2, TRAJ10)
CAVRGELTGGGNKLTF

SEQ ID NO: 642758 - protein, 20 aa, Homo sapiens
  CDR3 for beta chain variable domain of TCR clone 321379 (TRBV7-8, TRBJ2-2)
CASSHLFPGPTIHITGELFF

SEQ ID NO: 642759 - protein, 14 aa, Homo sapiens
  CDR3 for alpha chain variable domain of TCR clone 321380 (TRAV35, TRAJ22)
CAGLRPGSARQLTL

SEQ ID NO: 642760 - protein, 15 aa, Homo sapiens
  CDR3 for beta chain variable domain of TCR clone 321380 (TRBV20-1, TRBJ2-7)
CSDRDRVSGMDEQYF

SEQ ID NO: 642761 - protein, 14 aa, Homo sapiens
  CDR3 for alpha chain variable domain of TCR clone 321381 (TRAV1-2, TRAJ8)
CAVREDTGFRKLVF

SEQ ID NO: 642762 - protein, 15 aa, Homo sapiens
  CDR3 for beta chain variable domain of TCR clone 321381 (TRBV19, TRBJ2-7)
CASRPTPGLSIEQYF

SEQ ID NO: 642763 - protein, 13 aa, Homo sapiens
  CDR3 for alpha chain variable domain of TCR clone 321382 (TRAV2, TRAJ15)
CAVASQAGTALIC

SEQ ID NO: 642764 - protein, 16 aa, Homo sapiens
  CDR3 for beta chain variable domain of TCR clone 321382 (TRBV5-1, TRBJ1-1)
CASSSGGNSLNTEAFF

SEQ ID NO: 642765 - protein, 18 aa, Homo sapiens
  CDR3 for alpha chain variable domain of TCR clone 321383 (TRAV21, TRAJ52)
CAVRPYPAGGTSYGKLTF

SEQ ID NO: 642766 - protein, 15 aa, Homo sapiens
  CDR3 for beta chain variable domain of TCR clone 321383 (TRBV20-1, TRBJ2-7)
CSARKGLAESYEQYF

SEQ ID NO: 642767 - protein, 18 aa, Homo sapiens
  CDR3 for alpha chain variable domain of TCR clone 321384 (TRAV29/DV5, TRAJ52)
CAAGFMGAGGTSYGKLTF

SEQ ID NO: 642768 - protein, 13 aa, Homo sapiens
  CDR3 for beta chain variable domain of TCR clone 321384 (TRBV29-1, TRBJ1-1)
CSVGDSRNTEAFF

SEQ ID NO: 642769 - protein, 13 aa, Homo sapiens
  CDR3 for alpha chain variable domain of TCR clone 321385 (TRAV12-2, TRAJ7)
CAGLIYGNNRLPF

SEQ ID NO: 642770 - protein, 14 aa, Homo sapiens
  CDR3 for beta chain variable domain of TCR clone 321385 (TRBV6-1, TRBJ2-1)
CATFTSGQNNEQFF

SEQ ID NO: 642771 - protein, 14 aa, Homo sapiens
  CDR3 for alpha chain variable domain of TCR clone 321386 (TRAV26-1, TRAJ45)
CIEVTGGGADGLTF

SEQ ID NO: 642772 - protein, 15 aa, Homo sapiens
  CDR3 for beta chain variable domain of TCR clone 321386 (TRBV27, TRBJ2-7)
CASRFWGQGADEQYF

SEQ ID NO: 642773 - protein, 14 aa, Homo sapiens
  CDR3 for alpha chain variable domain of TCR clone 321387 (TRAV21, TRAJ35)
CAVMPIGFGNVLHC

SEQ ID NO: 642774 - protein, 13 aa, Homo sapiens
  CDR3 for beta chain variable domain of TCR clone 321387 (TRBV20-1, TRBJ1-1)
CSARGGGSTEAFF

SEQ ID NO: 642775 - protein, 16 aa, Homo sapiens
  CDR3 for alpha chain variable domain of TCR clone 321388 (TRAV8-1, TRAJ42)
CAVTSRYGGSQGNLIF

SEQ ID NO: 642776 - protein, 12 aa, Homo sapiens
  CDR3 for beta chain variable domain of TCR clone 321388 (TRBV6-3, TRBJ2-7)
CASSLGRWGLYF

SEQ ID NO: 642777 - protein, 15 aa, Homo sapiens
  CDR3 for alpha chain variable domain of TCR clone 321389 (TRAV25, TRAJ52)
CAGTSGGTSYGKLTF

SEQ ID NO: 642778 - protein, 14 aa, Homo sapiens
  CDR3 for beta chain variable domain of TCR clone 321389 (TRBV7-2, TRBJ1-1)
CASSFLTGTTEAFF

SEQ ID NO: 642779 - protein, 14 aa, Homo sapiens
  CDR3 for alpha chain variable domain of TCR clone 321390 (TRAV26-1, TRAJ21)
CIVRPPYTFNKFYF

SEQ ID NO: 642780 - protein, 14 aa, Homo sapiens
  CDR3 for beta chain variable domain of TCR clone 321390 (TRBV19, TRBJ2-1)
CASPTFVLSGEQFF

SEQ ID NO: 642781 - protein, 13 aa, Homo sapiens
  CDR3 for alpha chain variable domain of TCR clone 321391 (TRAV8-6, TRAJ21)
CAVSPSSLNKFYF

SEQ ID NO: 642782 - protein, 15 aa, Homo sapiens
  CDR3 for beta chain variable domain of TCR clone 321391 (TRBV7-9, TRBJ1-4)
CASSRTGGFNEKLFF

SEQ ID NO: 642783 - protein, 14 aa, Homo sapiens
  CDR3 for alpha chain variable domain of TCR clone 321392 (TRAV12-3, TRAJ9)
CAMSVETGGFKTIF

SEQ ID NO: 642784 - protein, 14 aa, Homo sapiens
  CDR3 for beta chain variable domain of TCR clone 321392 (TRBV19, TRBJ2-1)
CASPTFVLSGEQFF

SEQ ID NO: 642785 - protein, 13 aa, Homo sapiens
  CDR3 for alpha chain variable domain of TCR clone 321393 (TRAV21, TRAJ20)
CAVGLRVDYKLSF

SEQ ID NO: 642786 - protein, 15 aa, Homo sapiens
  CDR3 for beta chain variable domain of TCR clone 321393 (TRBV18, TRBJ2-3)
CASSPLAGETDTQYF

SEQ ID NO: 642787 - protein, 18 aa, Homo sapiens
  CDR3 for alpha chain variable domain of TCR clone 321394 (TRAV12-3, TRAJ52)
CAMSRTNAGGTSYGKLTF

SEQ ID NO: 642788 - protein, 11 aa, Homo sapiens
  CDR3 for beta chain variable domain of TCR clone 321394 (TRBV29-1, TRBJ2-5)
CSEDRTGTQYF

SEQ ID NO: 642789 - protein, 13 aa, Homo sapiens
  CDR3 for alpha chain variable domain of TCR clone 321395 (TRAV12-2, TRAJ39)
CAVNNNAGTMLTF

SEQ ID NO: 642790 - protein, 13 aa, Homo sapiens
  CDR3 for beta chain variable domain of TCR clone 321395 (TRBV2, TRBJ1-5)
CATAGPGNQPQHF

SEQ ID NO: 642791 - protein, 12 aa, Homo sapiens
  CDR3 for alpha chain variable domain of TCR clone 321396 (TRAV16, TRAJ9)
CALSSGGFKTIF

SEQ ID NO: 642792 - protein, 14 aa, Homo sapiens
  CDR3 for beta chain variable domain of TCR clone 321396 (TRBV7-9, TRBJ2-1)
CASSLAGPYNVQFF

SEQ ID NO: 642793 - protein, 14 aa, Homo sapiens
  CDR3 for alpha chain variable domain of TCR clone 321397 (TRAV1-2, TRAJ8)
CAVREDTGFQKLVF

SEQ ID NO: 642794 - protein, 16 aa, Homo sapiens
  CDR3 for beta chain variable domain of TCR clone 321397 (TRBV9, TRBJ2-3)
CASSGTSGKDTDTQYF

SEQ ID NO: 642795 - protein, 13 aa, Homo sapiens
  CDR3 for alpha chain variable domain of TCR clone 321398 (TRAV8-3, TRAJ43)
CAVGPDNNNYIRF

SEQ ID NO: 642796 - protein, 12 aa, Homo sapiens
  CDR3 for beta chain variable domain of TCR clone 321398 (TRBV7-2, TRBJ1-6)
CASSLSSSPLHF

SEQ ID NO: 642797 - protein, 14 aa, Homo sapiens
  CDR3 for alpha chain variable domain of TCR clone 321399 (TRAV8-4, TRAJ13)
CAVTLSGGYQKVTF

SEQ ID NO: 642798 - protein, 16 aa, Homo sapiens
  CDR3 for beta chain variable domain of TCR clone 321399 (TRBV5-6, TRBJ1-4)
CASSPSGGLKTENLFF

SEQ ID NO: 642799 - protein, 11 aa, Homo sapiens
  CDR3 for alpha chain variable domain of TCR clone 321400 (TRAV1-1, TRAJ23)
CAVRQGGKLIF

SEQ ID NO: 642800 - protein, 15 aa, Homo sapiens
  CDR3 for beta chain variable domain of TCR clone 321400 (TRBV27, TRBJ2-1)
CAISNGGGSSNEQFF

SEQ ID NO: 642801 - protein, 13 aa, Homo sapiens
  CDR3 for alpha chain variable domain of TCR clone 321401 (TRAV27, TRAJ45)
CRSSGGGADGLTF

SEQ ID NO: 642802 - protein, 13 aa, Homo sapiens
  CDR3 for beta chain variable domain of TCR clone 321401 (TRBV7-2, TRBJ1-4)
CASSLAGLEKLFF

SEQ ID NO: 642803 - protein, 17 aa, Homo sapiens
  CDR3 for alpha chain variable domain of TCR clone 321402 (TRAV3, TRAJ28)
CAVREAYSGAWSYRLTF

SEQ ID NO: 642804 - protein, 18 aa, Homo sapiens
  CDR3 for beta chain variable domain of TCR clone 321402 (TRBV27, TRBJ2-1)
CASGNRAVGVGSKNEQFF

SEQ ID NO: 642805 - protein, 13 aa, Homo sapiens
  CDR3 for alpha chain variable domain of TCR clone 321403 (TRAV12-1, TRAJ16)
CVVNGPDGQKLLF

SEQ ID NO: 642806 - protein, 13 aa, Homo sapiens
  CDR3 for beta chain variable domain of TCR clone 321403 (TRBV15, TRBJ1-6)
CATSGGLNSPLHF

SEQ ID NO: 642807 - protein, 11 aa, Homo sapiens
  CDR3 for alpha chain variable domain of TCR clone 321404 (TRAV21, TRAJ20)
CAVRDDYKLSF

SEQ ID NO: 642808 - protein, 14 aa, Homo sapiens
  CDR3 for beta chain variable domain of TCR clone 321404 (TRBV7-2, TRBJ2-7)
CASSPKTSFYEQYS

SEQ ID NO: 642809 - protein, 13 aa, Homo sapiens
  CDR3 for alpha chain variable domain of TCR clone 321405 (TRAV21, TRAJ27)
FAARPGNAGKSPF

SEQ ID NO: 642810 - protein, 13 aa, Homo sapiens
  CDR3 for beta chain variable domain of TCR clone 321405 (TRBV13, TRBJ2-1)
CASILGGRGEQFF

SEQ ID NO: 642811 - protein, 12 aa, Homo sapiens
  CDR3 for alpha chain variable domain of TCR clone 321406 (TRAV2, TRAJ5)
CALDTGKRALTF

SEQ ID NO: 642812 - protein, 15 aa, Homo sapiens
  CDR3 for beta chain variable domain of TCR clone 321406 (TRBV10-3, TRBJ2-1)
CAISDVQDRAYEQFF

SEQ ID NO: 642813 - protein, 18 aa, Homo sapiens
  CDR3 for alpha chain variable domain of TCR clone 321407 (TRAV26-1, TRAJ23)
CIVRVGLEVWNQGGKLIF

SEQ ID NO: 642814 - protein, 16 aa, Homo sapiens
  CDR3 for beta chain variable domain of TCR clone 321407 (TRBV24-1, TRBJ2-3)
CATSDPGTGATDTQYF

SEQ ID NO: 642815 - protein, 11 aa, Homo sapiens
  CDR3 for alpha chain variable domain of TCR clone 321408 (TRAV17, TRAJ9)
CATTGGFKTIF

SEQ ID NO: 642816 - protein, 15 aa, Homo sapiens
  CDR3 for beta chain variable domain of TCR clone 321408 (TRBV7-3, TRBJ2-1)
CASSPTGGGEVEQFF

SEQ ID NO: 642817 - protein, 15 aa, Homo sapiens
  CDR3 for alpha chain variable domain of TCR clone 321409 (TRAV27, TRAJ38)
CAVRRNAGNNRKLIW

SEQ ID NO: 642818 - protein, 13 aa, Homo sapiens
  CDR3 for beta chain variable domain of TCR clone 321409 (TRBV7-3, TRBJ2-1)
CASSLDSYNEQFF

SEQ ID NO: 642819 - protein, 22 aa, Homo sapiens
  CDR3 for alpha chain variable domain of TCR clone 321410 (TRAV13-1, TRAJ35)
CAASKGGFGNVRHCGSGTPVIV

SEQ ID NO: 642820 - protein, 13 aa, Homo sapiens
  CDR3 for beta chain variable domain of TCR clone 321410 (TRBV7-3, TRBJ1-1)
CASSQDWGAEAFF

SEQ ID NO: 642821 - protein, 12 aa, Homo sapiens
  CDR3 for alpha chain variable domain of TCR clone 321411 (TRAV16, TRAJ10)
CSRTGGGNKLTF

SEQ ID NO: 642822 - protein, 15 aa, Homo sapiens
  CDR3 for beta chain variable domain of TCR clone 321411 (TRBV6-3, TRBJ2-7)
CASSCPGTVFYEQYF

SEQ ID NO: 642823 - protein, 12 aa, Homo sapiens
  CDR3 for alpha chain variable domain of TCR clone 321412 (TRAV27, TRAJ9)
CAGESGGFKTIF

SEQ ID NO: 642824 - protein, 18 aa, Homo sapiens
  CDR3 for beta chain variable domain of TCR clone 321412 (TRBV12-4, TRBJ2-2)
CASSLVAGTRGRTGELFF

SEQ ID NO: 642825 - protein, 12 aa, Homo sapiens
  CDR3 for alpha chain variable domain of TCR clone 321413 (TRAV12-3, TRAJ17)
CAMTLTGNKLTF

SEQ ID NO: 642826 - protein, 15 aa, Homo sapiens
  CDR3 for beta chain variable domain of TCR clone 321413 (TRBV20-1, TRBJ2-7)
GSTRDRVSGMDEQYF

SEQ ID NO: 642827 - protein, 12 aa, Homo sapiens
  CDR3 for alpha chain variable domain of TCR clone 321414 (TRAV27, TRAJ11)
CAGASGYSTLTF

SEQ ID NO: 642828 - protein, 15 aa, Homo sapiens
  CDR3 for beta chain variable domain of TCR clone 321414 (TRBV4-1, TRBJ2-5)
CASSQWDLYQETQYF

SEQ ID NO: 642829 - protein, 13 aa, Homo sapiens
  CDR3 for alpha chain variable domain of TCR clone 321415 (TRAV13-1, TRAJ45)
WVNSGGGADGLTF

SEQ ID NO: 642830 - protein, 13 aa, Homo sapiens
  CDR3 for beta chain variable domain of TCR clone 321415 (TRBV7-9, TRBJ1-2)
CASSLKQNYGYTF

SEQ ID NO: 642831 - protein, 13 aa, Homo sapiens
  CDR3 for alpha chain variable domain of TCR clone 321416 (TRAV3, TRAJ20)
CCEAFRNDYKLSF

SEQ ID NO: 642832 - protein, 15 aa, Homo sapiens
  CDR3 for beta chain variable domain of TCR clone 321416 (TRBV19, TRBJ2-6)
CASVRRDSGANVLTF

SEQ ID NO: 642833 - protein, 13 aa, Homo sapiens
  CDR3 for alpha chain variable domain of TCR clone 321417 (TRAV16, TRAJ26)
CITVLCLGQNFVF

SEQ ID NO: 642834 - protein, 12 aa, Homo sapiens
  CDR3 for beta chain variable domain of TCR clone 321417 (TRBV11-2, TRBJ2-1)
CASSPGNNEQFY

SEQ ID NO: 642835 - protein, 15 aa, Homo sapiens
  CDR3 for alpha chain variable domain of TCR clone 321418 (TRAV1-2, TRAJ38)
CAVRENAGNNRKLIW

SEQ ID NO: 642836 - protein, 13 aa, Homo sapiens
  CDR3 for beta chain variable domain of TCR clone 321418 (TRBV27, TRBJ1-2)
CASSPSHRGRYSF

SEQ ID NO: 642837 - protein, 12 aa, Homo sapiens
  CDR3 for alpha chain variable domain of TCR clone 321419 (TRAV30, TRAJ43)
CGTEERGNDMRF

SEQ ID NO: 642838 - protein, 15 aa, Homo sapiens
  CDR3 for beta chain variable domain of TCR clone 321419 (TRBV11-3, TRBJ2-3)
CASLKDGREGDTQYF

SEQ ID NO: 642839 - protein, 14 aa, Homo sapiens
  CDR3 for alpha chain variable domain of TCR clone 321420 (TRAV17, TRAJ57)
CATDASGGYEKLVF

SEQ ID NO: 642840 - protein, 14 aa, Homo sapiens
  CDR3 for beta chain variable domain of TCR clone 321420 (TRBV4-2, TRBJ2-1)
CASGLDRAYNEQFF

SEQ ID NO: 642841 - protein, 14 aa, Homo sapiens
  CDR3 for alpha chain variable domain of TCR clone 321421 (TRAV1-2, TRAJ8)
CAVREDTCCQKLVF

SEQ ID NO: 642842 - protein, 15 aa, Homo sapiens
  CDR3 for beta chain variable domain of TCR clone 321421 (TRBV6-1, TRBJ2-3)
CASSERGGITDTQYF

SEQ ID NO: 642843 - protein, 15 aa, Homo sapiens
  CDR3 for alpha chain variable domain of TCR clone 321422 (TRAV12-3, TRAJ6)
CAMSASSGGSYIPTF

SEQ ID NO: 642844 - protein, 13 aa, Homo sapiens
  CDR3 for beta chain variable domain of TCR clone 321422 (TRBV20-1, TRBJ1-2)
CSASPEFNYGYTF

SEQ ID NO: 642845 - protein, 11 aa, Homo sapiens
  CDR3 for alpha chain variable domain of TCR clone 321423 (TRAV35, TRAJ34)
CWARNTDKLIF

SEQ ID NO: 642846 - protein, 16 aa, Homo sapiens
  CDR3 for beta chain variable domain of TCR clone 321423 (TRBV3-1, TRBJ2-3)
CASSQERGTGADTQYF

SEQ ID NO: 642847 - protein, 13 aa, Homo sapiens
  CDR3 for alpha chain variable domain of TCR clone 321424 (TRAV17, TRAJ22)
CAHHSGPARQLTF

SEQ ID NO: 642848 - protein, 16 aa, Homo sapiens
  CDR3 for beta chain variable domain of TCR clone 321424 (TRBV4-1, TRBJ1-2)
CASSQDAGQVLYGYTF

SEQ ID NO: 642849 - protein, 14 aa, Homo sapiens
  CDR3 for alpha chain variable domain of TCR clone 321425 (TRAV23/DV6, TRAJ22)
CAASVSGSARQLTF

SEQ ID NO: 642850 - protein, 15 aa, Homo sapiens
  CDR3 for beta chain variable domain of TCR clone 321425 (TRBV6-1, TRBJ2-5)
CASSEGWGIQETQYF

SEQ ID NO: 642851 - protein, 13 aa, Homo sapiens
  CDR3 for alpha chain variable domain of TCR clone 321426 (TRAV36/DV7, TRAJ37)
CAVFSSNTGKLIF

SEQ ID NO: 642852 - protein, 15 aa, Homo sapiens
  CDR3 for beta chain variable domain of TCR clone 321426 (TRBV10-2, TRBJ2-6)
CASSEQGTGANVLTF

SEQ ID NO: 642853 - protein, 16 aa, Homo sapiens
  CDR3 for alpha chain variable domain of TCR clone 321427 (TRAV8-3, TRAJ44)
CAVGTLMTGTASKLTF

SEQ ID NO: 642854 - protein, 13 aa, Homo sapiens
  CDR3 for beta chain variable domain of TCR clone 321427 (TRBV11-2, TRBJ2-1)
CASSLRLTYEQFF

SEQ ID NO: 642855 - protein, 11 aa, Homo sapiens
  CDR3 for alpha chain variable domain of TCR clone 321428 (TRAV12-3, TRAJ43)
CAMSVSNDKRF

SEQ ID NO: 642856 - protein, 20 aa, Homo sapiens
  CDR3 for beta chain variable domain of TCR clone 321428 (TRBV28, TRBJ2-1)
CASTPIGRSPGLAGGNEQFF

SEQ ID NO: 642857 - protein, 17 aa, Homo sapiens
  CDR3 for alpha chain variable domain of TCR clone 321429 (TRAV3, TRAJ6)
CAVRDGPRAGGSYIPTV

SEQ ID NO: 642858 - protein, 18 aa, Homo sapiens
  CDR3 for beta chain variable domain of TCR clone 321429 (TRBV7-3, TRBJ2-3)
CASSSTGTYPGSTDTQYF

SEQ ID NO: 642859 - protein, 13 aa, Homo sapiens
  CDR3 for alpha chain variable domain of TCR clone 321430 (TRAV30, TRAJ31)
CGTERTNNARLMF

SEQ ID NO: 642860 - protein, 13 aa, Homo sapiens
  CDR3 for beta chain variable domain of TCR clone 321430 (TRBV12-5, TRBJ2-3)
CASGDRQSDTQYF

SEQ ID NO: 642861 - protein, 15 aa, Homo sapiens
  CDR3 for alpha chain variable domain of TCR clone 321431 (TRAV17, TRAJ56)
CATDATPGANSKLTF

SEQ ID NO: 642862 - protein, 15 aa, Homo sapiens
  CDR3 for beta chain variable domain of TCR clone 321431 (TRBV6-3, TRBJ2-2)
CASSRFGGNAGELFF

SEQ ID NO: 642863 - protein, 15 aa, Homo sapiens
  CDR3 for alpha chain variable domain of TCR clone 321432 (TRAV26-2, TRAJ13)
CILRDLSGGYQKVTF

SEQ ID NO: 642864 - protein, 15 aa, Homo sapiens
  CDR3 for beta chain variable domain of TCR clone 321432 (TRBV7-9, TRBJ1-6)
CASSSPGRGNSPLHF

SEQ ID NO: 642865 - protein, 13 aa, Homo sapiens
  CDR3 for alpha chain variable domain of TCR clone 321433 (TRAV1-2, TRAJ20)
CAVPRSTDYKLSF

SEQ ID NO: 642866 - protein, 14 aa, Homo sapiens
  CDR3 for beta chain variable domain of TCR clone 321433 (TRBV20-1, TRBJ2-7)
CSARYGTTYYEQYF

SEQ ID NO: 642867 - protein, 12 aa, Homo sapiens
  CDR3 for alpha chain variable domain of TCR clone 321434 (TRAV20, TRAJ34)
CAVKDNTDKLIF

SEQ ID NO: 642868 - protein, 14 aa, Homo sapiens
  CDR3 for beta chain variable domain of TCR clone 321434 (TRBV7-9, TRBJ2-7)
CASSRPGGTYEQYV

SEQ ID NO: 642869 - protein, 14 aa, Homo sapiens
  CDR3 for alpha chain variable domain of TCR clone 321435 (TRAV35, TRAJ33)
CAGSSQDSNYQLIW

SEQ ID NO: 642870 - protein, 16 aa, Homo sapiens
  CDR3 for beta chain variable domain of TCR clone 321435 (TRBV5-1, TRBJ2-3)
CASSLGLAVYTDTQYF

SEQ ID NO: 642871 - protein, 21 aa, Homo sapiens
  CDR3 for alpha chain variable domain of TCR clone 321436 (TRAV8-3, TRAJ10)
CAVGHTHGRRKQTHLLDRHSA

SEQ ID NO: 642872 - protein, 10 aa, Homo sapiens
  CDR3 for beta chain variable domain of TCR clone 321436 (TRBV20-1, TRBJ2-5)
CSARFETQYF

SEQ ID NO: 642873 - protein, 16 aa, Homo sapiens
  CDR3 for alpha chain variable domain of TCR clone 321437 (TRAV12-2, TRAJ52)
CAVNNRGGTSYGKLTF

SEQ ID NO: 642874 - protein, 14 aa, Homo sapiens
  CDR3 for beta chain variable domain of TCR clone 321437 (TRBV25-1, TRBJ1-1)
CASTHLGGNTEAFF

SEQ ID NO: 642875 - protein, 16 aa, Homo sapiens
  CDR3 for alpha chain variable domain of TCR clone 321438 (TRAV30, TRAJ24)
CGTEIVDADSWGKFQF

SEQ ID NO: 642876 - protein, 18 aa, Homo sapiens
  CDR3 for beta chain variable domain of TCR clone 321438 (TRBV12-5, TRBJ2-5)
CASGSRTPRDPVLRARHA

SEQ ID NO: 642877 - protein, 15 aa, Homo sapiens
  CDR3 for alpha chain variable domain of TCR clone 321439 (TRAV38-1, TRAJ45)
CAFMKGGGVADGLTF

SEQ ID NO: 642878 - protein, 13 aa, Homo sapiens
  CDR3 for beta chain variable domain of TCR clone 321439 (TRBV7-9, TRBJ1-2)
CASSLKQNYGYTF

SEQ ID NO: 642879 - protein, 15 aa, Homo sapiens
  CDR3 for alpha chain variable domain of TCR clone 321440 (TRAV8-3, TRAJ45)
CASSYSGGGADGHTF

SEQ ID NO: 642880 - protein, 16 aa, Homo sapiens
  CDR3 for beta chain variable domain of TCR clone 321440 (TRBV27, TRBJ2-2)
CASSFRGLVRTGELFF

SEQ ID NO: 642881 - protein, 11 aa, Homo sapiens
  CDR3 for alpha chain variable domain of TCR clone 321441 (TRAV12-3, TRAJ43)
CAMSVSNDMRF

SEQ ID NO: 642882 - protein, 13 aa, Homo sapiens
  CDR3 for beta chain variable domain of TCR clone 321441 (TRBV7-9, TRBJ2-5)
CASLPSGRETQYF

SEQ ID NO: 642883 - protein, 13 aa, Homo sapiens
  CDR3 for alpha chain variable domain of TCR clone 321442 (TRAV26-2, TRAJ43)
CILRAVNNNDMRF

SEQ ID NO: 642884 - protein, 14 aa, Homo sapiens
  CDR3 for beta chain variable domain of TCR clone 321442 (TRBV5-8, TRBJ2-3)
CASSLGQGTDTQYF

SEQ ID NO: 642885 - protein, 15 aa, Homo sapiens
  CDR3 for alpha chain variable domain of TCR clone 321443 (TRAV38-2/DV8, TRAJ48)
CAYRSPESGNEKLNF

SEQ ID NO: 642886 - protein, 17 aa, Homo sapiens
  CDR3 for beta chain variable domain of TCR clone 321443 (TRBV20-1, TRBJ2-1)
CSASSSGLAGSYNEQFF

SEQ ID NO: 642887 - protein, 13 aa, Homo sapiens
  CDR3 for alpha chain variable domain of TCR clone 321444 (TRAV2, TRAJ40)
CAVVTSGTNKYIF

SEQ ID NO: 642888 - protein, 14 aa, Homo sapiens
  CDR3 for beta chain variable domain of TCR clone 321444 (TRBV19, TRBJ2-1)
CASPTVVLSGEQFF

SEQ ID NO: 642889 - protein, 17 aa, Homo sapiens
  CDR3 for alpha chain variable domain of TCR clone 321445 (TRAV8-3, TRAJ42)
CAVGKGNYGGSQGNLIF

SEQ ID NO: 642890 - protein, 13 aa, Homo sapiens
  CDR3 for beta chain variable domain of TCR clone 321445 (TRBV10-3, TRBJ2-7)
CASKLAVNYEQYF

SEQ ID NO: 642891 - protein, 14 aa, Homo sapiens
  CDR3 for alpha chain variable domain of TCR clone 321446 (TRAV2, TRAJ9)
CAVEDRSGGFKTIF

SEQ ID NO: 642892 - protein, 15 aa, Homo sapiens
  CDR3 for beta chain variable domain of TCR clone 321446 (TRBV7-6, TRBJ2-7)
CASSLGTISSYEQYF

SEQ ID NO: 642893 - protein, 14 aa, Homo sapiens
  CDR3 for alpha chain variable domain of TCR clone 321447 (TRAV1-2, TRAJ8)
CAVREDTGFEKLVF

SEQ ID NO: 642894 - protein, 13 aa, Homo sapiens
  CDR3 for beta chain variable domain of TCR clone 321447 (TRBV12-4, TRBJ1-5)
CASSPDRAQPQHF

SEQ ID NO: 642895 - protein, 12 aa, Homo sapiens
  CDR3 for alpha chain variable domain of TCR clone 321448 (TRAV20, TRAJ36)
CAQVTGANNLFF

SEQ ID NO: 642896 - protein, 14 aa, Homo sapiens
  CDR3 for beta chain variable domain of TCR clone 321448 (TRBV6-1, TRBJ2-2)
CGSSQRQATGELFF

SEQ ID NO: 642897 - protein, 10 aa, Homo sapiens
  CDR3 for alpha chain variable domain of TCR clone 321449 (TRAV26-1, TRAJ22)
CIVSLNFFWF

SEQ ID NO: 642898 - protein, 12 aa, Homo sapiens
  CDR3 for beta chain variable domain of TCR clone 321449 (TRBV11-2, TRBJ2-2)
CASSLGGGELFF

SEQ ID NO: 642899 - protein, 13 aa, Homo sapiens
  CDR3 for alpha chain variable domain of TCR clone 321450 (TRAV21, TRAJ57)
CAVTQGGSEKLVF

SEQ ID NO: 642900 - protein, 17 aa, Homo sapiens
  CDR3 for beta chain variable domain of TCR clone 321450 (TRBV20-1, TRBJ2-2)
CSASGSGQGGLTGELFY

SEQ ID NO: 642901 - protein, 14 aa, Homo sapiens
  CDR3 for alpha chain variable domain of TCR clone 321451 (TRAV12-2, TRAJ13)
CAVKKTGGYQKVTF

SEQ ID NO: 642902 - protein, 12 aa, Homo sapiens
  CDR3 for beta chain variable domain of TCR clone 321451 (TRBV29-1, TRBJ2-7)
CSARDRPYEQYF

SEQ ID NO: 642903 - protein, 13 aa, Homo sapiens
  CDR3 for alpha chain variable domain of TCR clone 321452 (TRAV12-3, TRAJ21)
CAPGPHNFNKFYF

SEQ ID NO: 642904 - protein, 15 aa, Homo sapiens
  CDR3 for beta chain variable domain of TCR clone 321452 (TRBV10-3, TRBJ2-3)
CAISLTSGGTDTQYC

SEQ ID NO: 642905 - protein, 13 aa, Homo sapiens
  CDR3 for alpha chain variable domain of TCR clone 321453 (TRAV17, TRAJ29)
CATDAFRKDTSCL

SEQ ID NO: 642906 - protein, 13 aa, Homo sapiens
  CDR3 for beta chain variable domain of TCR clone 321453 (TRBV5-7, TRBJ2-6)
CASTSSGANVLTF

SEQ ID NO: 642907 - protein, 10 aa, Homo sapiens
  CDR3 for alpha chain variable domain of TCR clone 321454 (TRAV30, TRAJ48)
CGIGNEKLTF

SEQ ID NO: 642908 - protein, 15 aa, Homo sapiens
  CDR3 for beta chain variable domain of TCR clone 321454 (TRBV20-1, TRBJ2-5)
CSAGRLPSGQETQYF

SEQ ID NO: 642909 - protein, 15 aa, Homo sapiens
  CDR3 for alpha chain variable domain of TCR clone 321455 (TRAV3, TRAJ5)
CAVRDLDTGRRALTF

SEQ ID NO: 642910 - protein, 14 aa, Homo sapiens
  CDR3 for beta chain variable domain of TCR clone 321455 (TRBV25-1, TRBJ1-1)
CASTHLGGDTEAFF

SEQ ID NO: 642911 - protein, 16 aa, Homo sapiens
  CDR3 for alpha chain variable domain of TCR clone 321456 (TRAV20, TRAJ10)
CAVLRGLTGGGNKLTF

SEQ ID NO: 642912 - protein, 14 aa, Homo sapiens
  CDR3 for beta chain variable domain of TCR clone 321456 (TRBV19, TRBJ1-5)
CASSAPDSFLSQHF

SEQ ID NO: 642913 - protein, 14 aa, Homo sapiens
  CDR3 for alpha chain variable domain of TCR clone 321457 (TRAV29/DV5, TRAJ36)
CAARRKTGANNRFV

SEQ ID NO: 642914 - protein, 15 aa, Homo sapiens
  CDR3 for beta chain variable domain of TCR clone 321457 (TRBV27, TRBJ2-1)
CASSNGGGSSNEQFF

SEQ ID NO: 642915 - protein, 13 aa, Homo sapiens
  CDR3 for alpha chain variable domain of TCR clone 321458 (TRAV12-2, TRAJ50)
CAVIVTSYHKVIF

SEQ ID NO: 642916 - protein, 14 aa, Homo sapiens
  CDR3 for beta chain variable domain of TCR clone 321458 (TRBV9, TRBJ2-1)
CASSVDPRGKEQFF

SEQ ID NO: 642917 - protein, 11 aa, Homo sapiens
  CDR3 for alpha chain variable domain of TCR clone 321459 (TRAV12-2, TRAJ31)
CTILNNARLMF

SEQ ID NO: 642918 - protein, 13 aa, Homo sapiens
  CDR3 for beta chain variable domain of TCR clone 321459 (TRBV20-1, TRBJ1-1)
CSARLGQGTEAFF

SEQ ID NO: 642919 - protein, 12 aa, Homo sapiens
  CDR3 for alpha chain variable domain of TCR clone 321460 (TRAV8-1, TRAJ3)
CAVNARQQCFQD

SEQ ID NO: 642920 - protein, 13 aa, Homo sapiens
  CDR3 for beta chain variable domain of TCR clone 321460 (TRBV11-2, TRBJ2-5)
CASSFSSQETQYF

SEQ ID NO: 642921 - protein, 15 aa, Homo sapiens
  CDR3 for alpha chain variable domain of TCR clone 321461 (TRAV3, TRAJ15)
CAVRPATQAGTALIF

SEQ ID NO: 642922 - protein, 15 aa, Homo sapiens
  CDR3 for beta chain variable domain of TCR clone 321461 (TRBV7-7, TRBJ1-3)
CASSQGEHSGNTIYF

SEQ ID NO: 642923 - protein, 14 aa, Homo sapiens
  CDR3 for alpha chain variable domain of TCR clone 321462 (TRAV30, TRAJ26)
CGTEIVSYGQNFVF

SEQ ID NO: 642924 - protein, 13 aa, Homo sapiens
  CDR3 for beta chain variable domain of TCR clone 321462 (TRBV2, TRBJ1-1)
CARNPTGGFHAFF

SEQ ID NO: 642925 - protein, 15 aa, Homo sapiens
  CDR3 for alpha chain variable domain of TCR clone 321463 (TRAV12-1, TRAJ6)
CVVNCPLRRKLHTYI

SEQ ID NO: 642926 - protein, 15 aa, Homo sapiens
  CDR3 for beta chain variable domain of TCR clone 321463 (TRBV7-9, TRBJ1-6)
CASSSPGRGNSPLHF

SEQ ID NO: 642927 - protein, 11 aa, Homo sapiens
  CDR3 for alpha chain variable domain of TCR clone 321464 (TRAV12-3, TRAJ16)
CAIRDDQKLLF

SEQ ID NO: 642928 - protein, 14 aa, Homo sapiens
  CDR3 for beta chain variable domain of TCR clone 321464 (TRBV7-2, TRBJ2-7)
CASSPKTSFYEQYF

SEQ ID NO: 642929 - protein, 17 aa, Homo sapiens
  CDR3 for alpha chain variable domain of TCR clone 321465 (TRAV3, TRAJ6)
CAVRDGPRAGGSYIPTF

SEQ ID NO: 642930 - protein, 18 aa, Homo sapiens
  CDR3 for beta chain variable domain of TCR clone 321465 (TRBV7-3, TRBJ2-3)
CASSSTGTYPGSTDTQNF

SEQ ID NO: 642931 - protein, 13 aa, Homo sapiens
  CDR3 for alpha chain variable domain of TCR clone 321466 (TRAV21, TRAJ20)
CAVGLRVDYKLSF

SEQ ID NO: 642932 - protein, 17 aa, Homo sapiens
  CDR3 for beta chain variable domain of TCR clone 321466 (TRBV11-2, TRBJ2-6)
CASSQRDIFSGANVLTF

SEQ ID NO: 642933 - protein, 15 aa, Homo sapiens
  CDR3 for alpha chain variable domain of TCR clone 321467 (TRAV8-3, TRAJ45)
CASSYSGGGADGLIF

SEQ ID NO: 642934 - protein, 13 aa, Homo sapiens
  CDR3 for beta chain variable domain of TCR clone 321467 (TRBV20-1, TRBJ2-2)
CSASAAGTGELFF

SEQ ID NO: 642935 - protein, 14 aa, Homo sapiens
  CDR3 for alpha chain variable domain of TCR clone 321468 (TRAV38-1, TRAJ40)
CALRPTPGTYKYIF

SEQ ID NO: 642936 - protein, 14 aa, Homo sapiens
  CDR3 for beta chain variable domain of TCR clone 321468 (TRBV25-1, TRBJ1-1)
CDSTHLGGNTEAFF

SEQ ID NO: 642937 - protein, 14 aa, Homo sapiens
  CDR3 for alpha chain variable domain of TCR clone 321469 (TRAV10, TRAJ32)
CGEPRGGATNKLIF

SEQ ID NO: 642938 - protein, 13 aa, Homo sapiens
  CDR3 for beta chain variable domain of TCR clone 321469 (TRBV2, TRBJ2-7)
CASTGGSSYEQYF

SEQ ID NO: 642939 - protein, 13 aa, Homo sapiens
  CDR3 for alpha chain variable domain of TCR clone 321470 (TRAV12-2, TRAJ7)
CAGLIYGNNRLAF

SEQ ID NO: 642940 - protein, 13 aa, Homo sapiens
  CDR3 for beta chain variable domain of TCR clone 321470 (TRBV2, TRBJ1-1)
CASSEGGNTEAFF

SEQ ID NO: 642941 - protein, 14 aa, Homo sapiens
  CDR3 for alpha chain variable domain of TCR clone 321471 (TRAV12-2, TRAJ13)
CAVKKTGGYQKVTF

SEQ ID NO: 642942 - protein, 10 aa, Homo sapiens
  CDR3 for beta chain variable domain of TCR clone 321471 (TRBV2, TRBJ2-5)
CASSAATQYF

SEQ ID NO: 642943 - protein, 13 aa, Homo sapiens
  CDR3 for alpha chain variable domain of TCR clone 321472 (TRAV12-1, TRAJ21)
CVVIPYNFNKFYF

SEQ ID NO: 642944 - protein, 16 aa, Homo sapiens
  CDR3 for beta chain variable domain of TCR clone 321472 (TRBV12-4, TRBJ1-2)
CASSVEPGTGTGGDTF

SEQ ID NO: 642945 - protein, 13 aa, Homo sapiens
  CDR3 for alpha chain variable domain of TCR clone 321473 (TRAV12-3, TRAJ43)
CAMRPYNNNDMRF

SEQ ID NO: 642946 - protein, 16 aa, Homo sapiens
  CDR3 for beta chain variable domain of TCR clone 321473 (TRBV11-2, TRBJ2-1)
CAGSLLLLSSYNEQFF

SEQ ID NO: 642947 - protein, 11 aa, Homo sapiens
  CDR3 for alpha chain variable domain of TCR clone 321474 (TRAV12-1, TRAJ8)
CVVTGFQKLVF

SEQ ID NO: 642948 - protein, 14 aa, Homo sapiens
  CDR3 for beta chain variable domain of TCR clone 321474 (TRBV16, TRBJ2-7)
CASSQWGRLYEQYF

SEQ ID NO: 642949 - protein, 15 aa, Homo sapiens
  CDR3 for alpha chain variable domain of TCR clone 321475 (TRAV12-1, TRAJ9)
CVVSFGDTGGVKTIF

SEQ ID NO: 642950 - protein, 12 aa, Homo sapiens
  CDR3 for beta chain variable domain of TCR clone 321475 (TRBV12-4, TRBJ2-7)
CASSLGGYEQYF

SEQ ID NO: 642951 - protein, 13 aa, Homo sapiens
  CDR3 for alpha chain variable domain of TCR clone 321476 (TRAV35, TRAJ58)
CAGLETSGSMLTF

SEQ ID NO: 642952 - protein, 15 aa, Homo sapiens
  CDR3 for beta chain variable domain of TCR clone 321476 (TRBV20-1, TRBJ2-1)
CSARFSAGGLNEQFF

SEQ ID NO: 642953 - protein, 14 aa, Homo sapiens
  CDR3 for alpha chain variable domain of TCR clone 321477 (TRAV4, TRAJ26)
CLVGPPNYGQNFVF

SEQ ID NO: 642954 - protein, 15 aa, Homo sapiens
  CDR3 for beta chain variable domain of TCR clone 321477 (TRBV19, TRBJ1-6)
CASSTQGAVGSPLHF

SEQ ID NO: 642955 - protein, 14 aa, Homo sapiens
  CDR3 for alpha chain variable domain of TCR clone 321478 (TRAV26-1, TRAJ38)
CIADNAGNNRKLIW

SEQ ID NO: 642956 - protein, 14 aa, Homo sapiens
  CDR3 for beta chain variable domain of TCR clone 321478 (TRBV20-1, TRBJ1-1)
CSAQTRIGGTGAFF

SEQ ID NO: 642957 - protein, 10 aa, Homo sapiens
  CDR3 for alpha chain variable domain of TCR clone 321479 (TRAV12-3, TRAJ30)
CALPEDKIIF

SEQ ID NO: 642958 - protein, 15 aa, Homo sapiens
  CDR3 for beta chain variable domain of TCR clone 321479 (TRBV11-1, TRBJ2-7)
CASSLNYGASYEQYF

SEQ ID NO: 642959 - protein, 16 aa, Homo sapiens
  CDR3 for alpha chain variable domain of TCR clone 321480 (TRAV38-1, TRAJ43)
CISVLSWSITAGDMRF

SEQ ID NO: 642960 - protein, 11 aa, Homo sapiens
  CDR3 for beta chain variable domain of TCR clone 321480 (TRBV7-9, TRBJ2-3)
CASSYTDTQYF

SEQ ID NO: 642961 - protein, 12 aa, Homo sapiens
  CDR3 for alpha chain variable domain of TCR clone 321481 (TRAV8-6, TRAJ10)
SDQAGGGNKLTF

SEQ ID NO: 642962 - protein, 14 aa, Homo sapiens
  CDR3 for beta chain variable domain of TCR clone 321481 (TRBV4-1, TRBJ2-2)
CASSQAVNTGELFF

SEQ ID NO: 642963 - protein, 15 aa, Homo sapiens
  CDR3 for alpha chain variable domain of TCR clone 321482 (TRAV12-3, TRAJ49)
CAMAVTPNTGNQFYF

SEQ ID NO: 642964 - protein, 18 aa, Homo sapiens
  CDR3 for beta chain variable domain of TCR clone 321482 (TRBV4-1, TRBJ1-5)
CASSQDPRGQGLNQSQHF

SEQ ID NO: 642965 - protein, 15 aa, Homo sapiens
  CDR3 for alpha chain variable domain of TCR clone 321483 (TRAV21, TRAJ40)
CAVRPQTSGTYKYLF

SEQ ID NO: 642966 - protein, 15 aa, Homo sapiens
  CDR3 for beta chain variable domain of TCR clone 321483 (TRBV5-1, TRBJ2-1)
CASSPPRAPYNEQSF

SEQ ID NO: 642967 - protein, 15 aa, Homo sapiens
  CDR3 for alpha chain variable domain of TCR clone 321484 (TRAV13-1, TRAJ44)
CAESRNTGTASKLTF

SEQ ID NO: 642968 - protein, 14 aa, Homo sapiens
  CDR3 for beta chain variable domain of TCR clone 321484 (TRBV11-2, TRBJ1-2)
CASSLYRGNYGYTF

SEQ ID NO: 642969 - protein, 13 aa, Homo sapiens
  CDR3 for alpha chain variable domain of TCR clone 321485 (TRAV38-1, TRAJ7)
CAFMMDGNNILAF

SEQ ID NO: 642970 - protein, 14 aa, Homo sapiens
  CDR3 for beta chain variable domain of TCR clone 321485 (TRBV4-2, TRBJ2-3)
CASRETRAPGMQYF

SEQ ID NO: 642971 - protein, 12 aa, Homo sapiens
  CDR3 for alpha chain variable domain of TCR clone 321486 (TRAV12-2, TRAJ10)
WGVTGGGNKLTF

SEQ ID NO: 642972 - protein, 14 aa, Homo sapiens
  CDR3 for beta chain variable domain of TCR clone 321486 (TRBV27, TRBJ2-7)
CASATETERREQYF

SEQ ID NO: 642973 - protein, 17 aa, Homo sapiens
  CDR3 for alpha chain variable domain of TCR clone 321487 (TRAV23/DV6, TRAJ57)
CAASSALSQGGSEKLVF

SEQ ID NO: 642974 - protein, 14 aa, Homo sapiens
  CDR3 for beta chain variable domain of TCR clone 321487 (TRBV25-1, TRBJ1-1)
CASTHLGGKTEAFF

SEQ ID NO: 642975 - protein, 23 aa, Homo sapiens
  CDR3 for alpha chain variable domain of TCR clone 321488 (TRAV30, TRAJ43)
CTLRPPSSVTQEPTSAALSDMRF

SEQ ID NO: 642976 - protein, 11 aa, Homo sapiens
  CDR3 for beta chain variable domain of TCR clone 321488 (TRBV27, TRBJ2-3)
CASSLGDTQYF

SEQ ID NO: 642977 - protein, 13 aa, Homo sapiens
  CDR3 for alpha chain variable domain of TCR clone 321489 (TRAV21, TRAJ27)
CAARPGNAGKSTF

SEQ ID NO: 642978 - protein, 15 aa, Homo sapiens
  CDR3 for beta chain variable domain of TCR clone 321489 (TRBV7-8, TRBJ1-5)
CASSLALGGQQPQHF

SEQ ID NO: 642979 - protein, 16 aa, Homo sapiens
  CDR3 for alpha chain variable domain of TCR clone 321490 (TRAV17, TRAJ28)
CATASVSGPGSYQLTF

SEQ ID NO: 642980 - protein, 11 aa, Homo sapiens
  CDR3 for beta chain variable domain of TCR clone 321490 (TRBV7-9, TRBJ2-5)
CASSLGETQYF

SEQ ID NO: 642981 - protein, 10 aa, Homo sapiens
  CDR3 for alpha chain variable domain of TCR clone 321491 (TRAV3, TRAJ30)
CAVSEIDIIF

SEQ ID NO: 642982 - protein, 14 aa, Homo sapiens
  CDR3 for beta chain variable domain of TCR clone 321491 (TRBV15, TRBJ2-3)
CATRSGTSTDTQYF

SEQ ID NO: 642983 - protein, 14 aa, Homo sapiens
  CDR3 for alpha chain variable domain of TCR clone 321492 (TRAV17, TRAJ54)
CATEVVHGAQKLVF

SEQ ID NO: 642984 - protein, 18 aa, Homo sapiens
  CDR3 for beta chain variable domain of TCR clone 321492 (TRBV12-4, TRBJ2-2)
CASSLVAGTRGRTGELFF

SEQ ID NO: 642985 - protein, 14 aa, Homo sapiens
  CDR3 for alpha chain variable domain of TCR clone 321493 (TRAV13-1, TRAJ10)
CAAKEPGGGNKLTF

SEQ ID NO: 642986 - protein, 17 aa, Homo sapiens
  CDR3 for beta chain variable domain of TCR clone 321493 (TRBV19, TRBJ2-7)
CASSISFYDSYPYEQYF

SEQ ID NO: 642987 - protein, 14 aa, Homo sapiens
  CDR3 for alpha chain variable domain of TCR clone 321494 (TRAV23/DV6, TRAJ58)
CAAAKETSGPRLTF

SEQ ID NO: 642988 - protein, 14 aa, Homo sapiens
  CDR3 for beta chain variable domain of TCR clone 321494 (TRBV5-1, TRBJ2-7)
CASSLFTGTHEQYF

SEQ ID NO: 642989 - protein, 13 aa, Homo sapiens
  CDR3 for alpha chain variable domain of TCR clone 321495 (TRAV2, TRAJ40)
CAVVTSGTYKYIF

SEQ ID NO: 642990 - protein, 16 aa, Homo sapiens
  CDR3 for beta chain variable domain of TCR clone 321495 (TRBV29-1, TRBJ2-6)
CSVEDITYPGANGLTF

SEQ ID NO: 642991 - protein, 15 aa, Homo sapiens
  CDR3 for alpha chain variable domain of TCR clone 321496 (TRAV21, TRAJ52)
CAVRGGGTSYGKLQF

SEQ ID NO: 642992 - protein, 15 aa, Homo sapiens
  CDR3 for beta chain variable domain of TCR clone 321496 (TRBV18, TRBJ1-5)
CASSPSDRSNQPQHF

SEQ ID NO: 642993 - protein, 15 aa, Homo sapiens
  CDR3 for alpha chain variable domain of TCR clone 321497 (TRAV8-2, TRAJ44)
CVVSPNTGTASKLTF

SEQ ID NO: 642994 - protein, 12 aa, Homo sapiens
  CDR3 for beta chain variable domain of TCR clone 321497 (TRBV11-3, TRBJ2-2)
CAVPRNTGELFF

SEQ ID NO: 642995 - protein, 14 aa, Homo sapiens
  CDR3 for alpha chain variable domain of TCR clone 321498 (TRAV17, TRAJ57)
CATDPQGRSEKLVF

SEQ ID NO: 642996 - protein, 16 aa, Homo sapiens
  CDR3 for beta chain variable domain of TCR clone 321498 (TRBV13, TRBJ2-5)
CASSRGAGIRQETQYF

SEQ ID NO: 642997 - protein, 15 aa, Homo sapiens
  CDR3 for alpha chain variable domain of TCR clone 321499 (TRAV25, TRAJ53)
CPTSNSGGSNYKPTF

SEQ ID NO: 642998 - protein, 13 aa, Homo sapiens
  CDR3 for beta chain variable domain of TCR clone 321499 (TRBV18, TRBJ2-1)
CASSPPSSNEQFF

SEQ ID NO: 642999 - protein, 11 aa, Homo sapiens
  CDR3 for alpha chain variable domain of TCR clone 321500 (TRAV17, TRAJ36)
CAPTGANNLFF

SEQ ID NO: 643000 - protein, 12 aa, Homo sapiens
  CDR3 for beta chain variable domain of TCR clone 321500 (TRBV29-1, TRBJ2-3)
CSVTGGADTQCF

SEQ ID NO: 643001 - protein, 11 aa, Homo sapiens
  CDR3 for alpha chain variable domain of TCR clone 321501 (TRAV2, TRAJ13)
CAFGGYQKVTF

SEQ ID NO: 643002 - protein, 15 aa, Homo sapiens
  CDR3 for beta chain variable domain of TCR clone 321501 (TRBV7-2, TRBJ2-1)
CVSSSGLAGGNEQFF

SEQ ID NO: 643003 - protein, 14 aa, Homo sapiens
  CDR3 for alpha chain variable domain of TCR clone 321502 (TRAV4, TRAJ26)
CLVGPHNYGQNFVF

SEQ ID NO: 643004 - protein, 17 aa, Homo sapiens
  CDR3 for beta chain variable domain of TCR clone 321502 (TRBV24-1, TRBJ2-1)
CATSAVSTSGTYNEHFF

SEQ ID NO: 643005 - protein, 14 aa, Homo sapiens
  CDR3 for alpha chain variable domain of TCR clone 321503 (TRAV16, TRAJ54)
CALSGLQGAQKLVL

SEQ ID NO: 643006 - protein, 15 aa, Homo sapiens
  CDR3 for beta chain variable domain of TCR clone 321503 (TRBV3-1, TRBJ2-7)
CASSQVAGAQYEQYF

SEQ ID NO: 643007 - protein, 14 aa, Homo sapiens
  CDR3 for alpha chain variable domain of TCR clone 321504 (TRAV8-4, TRAJ13)
CAVTLSGGYHKVTF

SEQ ID NO: 643008 - protein, 14 aa, Homo sapiens
  CDR3 for beta chain variable domain of TCR clone 321504 (TRBV7-2, TRBJ1-2)
CASSQTGSTHGYTF

SEQ ID NO: 643009 - protein, 16 aa, Homo sapiens
  CDR3 for alpha chain variable domain of TCR clone 321505 (TRAV12-2, TRAJ18)
CAVTTDRGSTLGRLYF

SEQ ID NO: 643010 - protein, 11 aa, Homo sapiens
  CDR3 for beta chain variable domain of TCR clone 321505 (TRBV27, TRBJ2-3)
CASSLGDTQYF

SEQ ID NO: 643011 - protein, 10 aa, Homo sapiens
  CDR3 for alpha chain variable domain of TCR clone 321506 (TRAV2, TRAJ34)
CAVVNDKLIF

SEQ ID NO: 643012 - protein, 15 aa, Homo sapiens
  CDR3 for beta chain variable domain of TCR clone 321506 (TRBV3-1, TRBJ2-2)
CASSQDWTRAGQLFF

SEQ ID NO: 643013 - protein, 14 aa, Homo sapiens
  CDR3 for alpha chain variable domain of TCR clone 321507 (TRAV13-1, TRAJ24)
CAASRTDSWGKLQF

SEQ ID NO: 643014 - protein, 17 aa, Homo sapiens
  CDR3 for beta chain variable domain of TCR clone 321507 (TRBV20-1, TRBJ2-2)
CSASGSGQGGLTGELFF

SEQ ID NO: 643015 - protein, 14 aa, Homo sapiens
  CDR3 for alpha chain variable domain of TCR clone 321508 (TRAV1-1, TRAJ27)
CAVIYNTNAGKSTF

SEQ ID NO: 643016 - protein, 18 aa, Homo sapiens
  CDR3 for beta chain variable domain of TCR clone 321508 (TRBV25-1, TRBJ1-2)
CASSGLQNGQGLIFGYTF

SEQ ID NO: 643017 - protein, 12 aa, Homo sapiens
  CDR3 for alpha chain variable domain of TCR clone 321509 (TRAV12-3, TRAJ41)
CAMSYPGYALNF

SEQ ID NO: 643018 - protein, 13 aa, Homo sapiens
  CDR3 for beta chain variable domain of TCR clone 321509 (TRBV7-3, TRBJ2-1)
CASSLDSYNEQFF

SEQ ID NO: 643019 - protein, 14 aa, Homo sapiens
  CDR3 for alpha chain variable domain of TCR clone 321510 (TRAV2, TRAJ9)
CAVEDRSGGVKTIF

SEQ ID NO: 643020 - protein, 15 aa, Homo sapiens
  CDR3 for beta chain variable domain of TCR clone 321510 (TRBV12-4, TRBJ2-5)
CASSPPTGLQETQYF

SEQ ID NO: 643021 - protein, 16 aa, Homo sapiens
  CDR3 for alpha chain variable domain of TCR clone 321511 (TRAV12-2, TRAJ32)
CAVTLGQGGATNKLIF

SEQ ID NO: 643022 - protein, 12 aa, Homo sapiens
  CDR3 for beta chain variable domain of TCR clone 321511 (TRBV29-1, TRBJ2-3)
CSVTGGADTQYF

SEQ ID NO: 643023 - protein, 11 aa, Homo sapiens
  CDR3 for alpha chain variable domain of TCR clone 321512 (TRAV25, TRAJ49)
CAGGTGNQFYF

SEQ ID NO: 643024 - protein, 13 aa, Homo sapiens
  CDR3 for beta chain variable domain of TCR clone 321512 (TRBV7-2, TRBJ1-5)
CASSFARNQPQHF

SEQ ID NO: 643025 - protein, 20 aa, Homo sapiens
  CDR3 for alpha chain variable domain of TCR clone 321513 (TRAV13-1, TRAJ27)
CAAHTNAGKSTFGDVTTLTF

SEQ ID NO: 643026 - protein, 14 aa, Homo sapiens
  CDR3 for beta chain variable domain of TCR clone 321513 (TRBV19, TRBJ2-2)
CASSGQGIAGELFF

SEQ ID NO: 643027 - protein, 17 aa, Homo sapiens
  CDR3 for alpha chain variable domain of TCR clone 321514 (TRAV3, TRAJ42)
CAVRDRDCGGSQGNLIF

SEQ ID NO: 643028 - protein, 15 aa, Homo sapiens
  CDR3 for beta chain variable domain of TCR clone 321514 (TRBV2, TRBJ2-7)
CASSEGLARSYEQYF

SEQ ID NO: 643029 - protein, 20 aa, Homo sapiens
  CDR3 for alpha chain variable domain of TCR clone 321515 (TRAV8-3, TRAJ44)
LSTSVLWVRLYTGTASKLTF

SEQ ID NO: 643030 - protein, 16 aa, Homo sapiens
  CDR3 for beta chain variable domain of TCR clone 321515 (TRBV6-1, TRBJ2-5)
CASSETLDRGAETQYF

SEQ ID NO: 643031 - protein, 14 aa, Homo sapiens
  CDR3 for alpha chain variable domain of TCR clone 321516 (TRAV1-1, TRAJ27)
CAVIYNTNAGKSTF

SEQ ID NO: 643032 - protein, 17 aa, Homo sapiens
  CDR3 for beta chain variable domain of TCR clone 321516 (TRBV5-5, TRBJ2-7)
CASSLLFRGTSSYEQYF

SEQ ID NO: 643033 - protein, 17 aa, Homo sapiens
  CDR3 for alpha chain variable domain of TCR clone 321517 (TRAV3, TRAJ6)
CAVRDGARAGGSYIPTS

SEQ ID NO: 643034 - protein, 20 aa, Homo sapiens
  CDR3 for beta chain variable domain of TCR clone 321517 (TRBV28, TRBJ2-1)
CASTPIGRSPGLAGGNEQFF

SEQ ID NO: 643035 - protein, 14 aa, Homo sapiens
  CDR3 for alpha chain variable domain of TCR clone 321518 (TRAV16, TRAJ39)
CALSKNNAGNMLTF

SEQ ID NO: 643036 - protein, 12 aa, Homo sapiens
  CDR3 for beta chain variable domain of TCR clone 321518 (TRBV7-8, TRBJ2-7)
CASSLGDREQYF

SEQ ID NO: 643037 - protein, 12 aa, Homo sapiens
  CDR3 for alpha chain variable domain of TCR clone 321519 (TRAV8-3, TRAJ26)
CAGDNYGQNFVF

SEQ ID NO: 643038 - protein, 18 aa, Homo sapiens
  CDR3 for beta chain variable domain of TCR clone 321519 (TRBV7-2, TRBJ2-2)
CASSLESGPRMNTGELFF

SEQ ID NO: 643039 - protein, 14 aa, Homo sapiens
  CDR3 for alpha chain variable domain of TCR clone 321520 (TRAV16, TRAJ57)
CALSGQVGSEKLVF

SEQ ID NO: 643040 - protein, 13 aa, Homo sapiens
  CDR3 for beta chain variable domain of TCR clone 321520 (TRBV5-4, TRBJ2-1)
CASSLQGPREQFF

SEQ ID NO: 643041 - protein, 11 aa, Homo sapiens
  CDR3 for alpha chain variable domain of TCR clone 321521 (TRAV12-1, TRAJ30)
CVVNGQDKIIF

SEQ ID NO: 643042 - protein, 15 aa, Homo sapiens
  CDR3 for beta chain variable domain of TCR clone 321521 (TRBV6-1, TRBJ2-5)
CASSEGWGIQETQYF

SEQ ID NO: 643043 - protein, 14 aa, Homo sapiens
  CDR3 for alpha chain variable domain of TCR clone 321522 (TRAV9-2, TRAJ13)
CALSDSGGYQKVTF

SEQ ID NO: 643044 - protein, 11 aa, Homo sapiens
  CDR3 for beta chain variable domain of TCR clone 321522 (TRBV11-2, TRBJ2-2)
CASSLPGELFF

SEQ ID NO: 643045 - protein, 13 aa, Homo sapiens
  CDR3 for alpha chain variable domain of TCR clone 321523 (TRAV13-2, TRAJ48)
CAEMDFGNEKLTF

SEQ ID NO: 643046 - protein, 15 aa, Homo sapiens
  CDR3 for beta chain variable domain of TCR clone 321523 (TRBV6-5, TRBJ2-1)
CASSYDAGAGNEQFF

SEQ ID NO: 643047 - protein, 13 aa, Homo sapiens
  CDR3 for alpha chain variable domain of TCR clone 321524 (TRAV8-6, TRAJ32)
CAVSDRATNKLIL

SEQ ID NO: 643048 - protein, 13 aa, Homo sapiens
  CDR3 for beta chain variable domain of TCR clone 321524 (TRBV11-2, TRBJ2-7)
CASSLDLGYEQYF

SEQ ID NO: 643049 - protein, 11 aa, Homo sapiens
  CDR3 for alpha chain variable domain of TCR clone 321525 (TRAV13-2, TRAJ23)
CAESPRGKLIF

SEQ ID NO: 643050 - protein, 18 aa, Homo sapiens
  CDR3 for beta chain variable domain of TCR clone 321525 (TRBV6-5, TRBJ1-1)
CASSYSAPRGTGGTEAFF

SEQ ID NO: 643051 - protein, 11 aa, Homo sapiens
  CDR3 for alpha chain variable domain of TCR clone 321526 (TRAV13-1, TRAJ47)
CAAAPRNKLVF

SEQ ID NO: 643052 - protein, 16 aa, Homo sapiens
  CDR3 for beta chain variable domain of TCR clone 321526 (TRBV9, TRBJ2-2)
CASSAMGKGNTGELFF

SEQ ID NO: 643053 - protein, 15 aa, Homo sapiens
  CDR3 for alpha chain variable domain of TCR clone 321527 (TRAV26-1, TRAJ23)
CIVRVAGYQGGKLIF

SEQ ID NO: 643054 - protein, 18 aa, Homo sapiens
  CDR3 for beta chain variable domain of TCR clone 321527 (TRBV28, TRBJ2-1)
CASSSTSGTANSYNEQFF

SEQ ID NO: 643055 - protein, 14 aa, Homo sapiens
  CDR3 for alpha chain variable domain of TCR clone 321528 (TRAV12-3, TRAJ10)
SHLPLTGGGNKLTF

SEQ ID NO: 643056 - protein, 13 aa, Homo sapiens
  CDR3 for beta chain variable domain of TCR clone 321528 (TRBV28, TRBJ2-7)
CASSVTWDREMYF

SEQ ID NO: 643057 - protein, 14 aa, Homo sapiens
  CDR3 for alpha chain variable domain of TCR clone 321529 (TRAV17, TRAJ57)
CATDAKGGSEKLVF

SEQ ID NO: 643058 - protein, 13 aa, Homo sapiens
  CDR3 for beta chain variable domain of TCR clone 321529 (TRBV7-9, TRBJ2-7)
CASSFAGAYEQYF

SEQ ID NO: 643059 - protein, 15 aa, Homo sapiens
  CDR3 for alpha chain variable domain of TCR clone 321530 (TRAV35, TRAJ20)
CAGQLVGSSDYKLSF

SEQ ID NO: 643060 - protein, 13 aa, Homo sapiens
  CDR3 for beta chain variable domain of TCR clone 321530 (TRBV19, TRBJ2-7)
CASSKTGTHEQYF

SEQ ID NO: 643061 - protein, 18 aa, Homo sapiens
  CDR3 for alpha chain variable domain of TCR clone 321531 (TRAV21, TRAJ52)
CAVRPSPAGGTSYGKLTF

SEQ ID NO: 643062 - protein, 14 aa, Homo sapiens
  CDR3 for beta chain variable domain of TCR clone 321531 (TRBV4-3, TRBJ1-5)
CASSQGGQGWPQHF

SEQ ID NO: 643063 - protein, 15 aa, Homo sapiens
  CDR3 for alpha chain variable domain of TCR clone 321532 (TRAV12-3, TRAJ48)
CAMSASNFGNEKLTF

SEQ ID NO: 643064 - protein, 13 aa, Homo sapiens
  CDR3 for beta chain variable domain of TCR clone 321532 (TRBV7-2, TRBJ2-5)
CASSQTSVETQYF

SEQ ID NO: 643065 - protein, 15 aa, Homo sapiens
  CDR3 for alpha chain variable domain of TCR clone 321533 (TRAV26-1, TRAJ29)
CIVRVEGSGNTPLVF

SEQ ID NO: 643066 - protein, 14 aa, Homo sapiens
  CDR3 for beta chain variable domain of TCR clone 321533 (TRBV7-9, TRBJ2-5)
CASSLDTAQETQYF

SEQ ID NO: 643067 - protein, 14 aa, Homo sapiens
  CDR3 for alpha chain variable domain of TCR clone 321534 (TRAV25, TRAJ22)
CAVRPSGSARQLTF

SEQ ID NO: 643068 - protein, 16 aa, Homo sapiens
  CDR3 for beta chain variable domain of TCR clone 321534 (TRBV4-2, TRBJ1-1)
CASSTSPGRAAPEAFF

SEQ ID NO: 643069 - protein, 16 aa, Homo sapiens
  CDR3 for alpha chain variable domain of TCR clone 321535 (TRAV36/DV7, TRAJ30)
CAVETYGLDRDDKIIV

SEQ ID NO: 643070 - protein, 13 aa, Homo sapiens
  CDR3 for beta chain variable domain of TCR clone 321535 (TRBV7-9, TRBJ2-3)
CASSPGSTDTQYF

SEQ ID NO: 643071 - protein, 12 aa, Homo sapiens
  CDR3 for alpha chain variable domain of TCR clone 321536 (TRAV1-1, TRAJ39)
CAVPVVGNMLTF

SEQ ID NO: 643072 - protein, 15 aa, Homo sapiens
  CDR3 for beta chain variable domain of TCR clone 321536 (TRBV7-9, TRBJ1-6)
CASSSPGRGNSPLHF

SEQ ID NO: 643073 - protein, 13 aa, Homo sapiens
  CDR3 for alpha chain variable domain of TCR clone 321537 (TRAV2, TRAJ9)
CAVESTGGFKTIF

SEQ ID NO: 643074 - protein, 15 aa, Homo sapiens
  CDR3 for beta chain variable domain of TCR clone 321537 (TRBV10-3, TRBJ2-1)
CAITFGGGTDNEEFF

SEQ ID NO: 643075 - protein, 18 aa, Homo sapiens
  CDR3 for alpha chain variable domain of TCR clone 321538 (TRAV17, TRAJ45)
CATSLDLYSGGGADGLTF

SEQ ID NO: 643076 - protein, 13 aa, Homo sapiens
  CDR3 for beta chain variable domain of TCR clone 321538 (TRBV4-2, TRBJ1-1)
CASSQAGNTEAFF

SEQ ID NO: 643077 - protein, 13 aa, Homo sapiens
  CDR3 for alpha chain variable domain of TCR clone 321539 (TRAV13-2, TRAJ53)
CAENMGSNYKLTF

SEQ ID NO: 643078 - protein, 15 aa, Homo sapiens
  CDR3 for beta chain variable domain of TCR clone 321539 (TRBV7-2, TRBJ2-2)
CASRRPGQNTGELFF

SEQ ID NO: 643079 - protein, 15 aa, Homo sapiens
  CDR3 for alpha chain variable domain of TCR clone 321540 (TRAV27, TRAJ53)
CAGVVGGGSKYKLTF

SEQ ID NO: 643080 - protein, 14 aa, Homo sapiens
  CDR3 for beta chain variable domain of TCR clone 321540 (TRBV13, TRBJ2-3)
CASSRPSSTDTQYF

SEQ ID NO: 643081 - protein, 12 aa, Homo sapiens
  CDR3 for alpha chain variable domain of TCR clone 321541 (TRAV21, TRAJ13)
PGPSGGYHKVTF

SEQ ID NO: 643082 - protein, 15 aa, Homo sapiens
  CDR3 for beta chain variable domain of TCR clone 321541 (TRBV7-9, TRBJ1-6)
CASSSPGRGNSPLHF

SEQ ID NO: 643083 - protein, 17 aa, Homo sapiens
  CDR3 for alpha chain variable domain of TCR clone 321542 (TRAV3, TRAJ6)
CAVRDGPRAGGSYIPTF

SEQ ID NO: 643084 - protein, 18 aa, Homo sapiens
  CDR3 for beta chain variable domain of TCR clone 321542 (TRBV7-9, TRBJ2-7)
CASSLTTSGSMTWYEQYF

SEQ ID NO: 643085 - protein, 14 aa, Homo sapiens
  CDR3 for alpha chain variable domain of TCR clone 321543 (TRAV12-2, TRAJ13)
CAVKKTGGFQKVTF

SEQ ID NO: 643086 - protein, 16 aa, Homo sapiens
  CDR3 for beta chain variable domain of TCR clone 321543 (TRBV4-1, TRBJ2-3)
CASSQSTSGAEDTQYF

SEQ ID NO: 643087 - protein, 15 aa, Homo sapiens
  CDR3 for alpha chain variable domain of TCR clone 321544 (TRAV12-1, TRAJ15)
CVLTRANQAGTALIF

SEQ ID NO: 643088 - protein, 14 aa, Homo sapiens
  CDR3 for beta chain variable domain of TCR clone 321544 (TRBV5-1, TRBJ1-1)
CASSLVSINTEAFF

SEQ ID NO: 643089 - protein, 13 aa, Homo sapiens
  CDR3 for alpha chain variable domain of TCR clone 321545 (TRAV21, TRAJ27)
CAARPGNAGNSTF

SEQ ID NO: 643090 - protein, 14 aa, Homo sapiens
  CDR3 for beta chain variable domain of TCR clone 321545 (TRBV7-6, TRBJ2-3)
CASSVGTVTDTQYF

SEQ ID NO: 643091 - protein, 14 aa, Homo sapiens
  CDR3 for alpha chain variable domain of TCR clone 321546 (TRAV12-2, TRAJ17)
CAVNIKAAGNKLTF

SEQ ID NO: 643092 - protein, 16 aa, Homo sapiens
  CDR3 for beta chain variable domain of TCR clone 321546 (TRBV20-1, TRBJ2-6)
CSARSQGYDGANVLTF

SEQ ID NO: 643093 - protein, 12 aa, Homo sapiens
  CDR3 for alpha chain variable domain of TCR clone 321547 (TRAV25, TRAJ11)
RAGYSGYSTLTF

SEQ ID NO: 643094 - protein, 13 aa, Homo sapiens
  CDR3 for beta chain variable domain of TCR clone 321547 (TRBV7-9, TRBJ1-2)
CASSLKQNYGDTF

SEQ ID NO: 643095 - protein, 14 aa, Homo sapiens
  CDR3 for alpha chain variable domain of TCR clone 321548 (TRAV25, TRAJ45)
CRAGSGGGADGLTF

SEQ ID NO: 643096 - protein, 16 aa, Homo sapiens
  CDR3 for beta chain variable domain of TCR clone 321548 (TRBV4-3, TRBJ2-1)
CASSPALDRGVNEQFF

SEQ ID NO: 643097 - protein, 14 aa, Homo sapiens
  CDR3 for alpha chain variable domain of TCR clone 321549 (TRAV26-1, TRAJ21)
CIVRPPYNFNKFYF

SEQ ID NO: 643098 - protein, 11 aa, Homo sapiens
  CDR3 for beta chain variable domain of TCR clone 321549 (TRBV10-3, TRBJ2-7)
CAISEGREQYF

SEQ ID NO: 643099 - protein, 12 aa, Homo sapiens
  CDR3 for alpha chain variable domain of TCR clone 321550 (TRAV21, TRAJ13)
PGPSGGYQKVTF

SEQ ID NO: 643100 - protein, 16 aa, Homo sapiens
  CDR3 for beta chain variable domain of TCR clone 321550 (TRBV12-5, TRBJ2-5)
CASGPRTSGNQETQYF

SEQ ID NO: 643101 - protein, 14 aa, Homo sapiens
  CDR3 for alpha chain variable domain of TCR clone 321551 (TRAV13-2, TRAJ17)
CAENSKAAGNKLTF

SEQ ID NO: 643102 - protein, 13 aa, Homo sapiens
  CDR3 for beta chain variable domain of TCR clone 321551 (TRBV19, TRBJ2-7)
CASSPRQSYEQYF

SEQ ID NO: 643103 - protein, 14 aa, Homo sapiens
  CDR3 for alpha chain variable domain of TCR clone 321552 (TRAV38-1, TRAJ40)
CALRPTSGTSKYIF

SEQ ID NO: 643104 - protein, 16 aa, Homo sapiens
  CDR3 for beta chain variable domain of TCR clone 321552 (TRBV6-1, TRBJ1-2)
CASSGAWQGRSHGYTF

SEQ ID NO: 643105 - protein, 13 aa, Homo sapiens
  CDR3 for alpha chain variable domain of TCR clone 321553 (TRAV17, TRAJ40)
CATAFSGTYKYIF

SEQ ID NO: 643106 - protein, 18 aa, Homo sapiens
  CDR3 for beta chain variable domain of TCR clone 321553 (TRBV28, TRBJ2-1)
CASSSGLAGGGSYNEQYF

SEQ ID NO: 643107 - protein, 13 aa, Homo sapiens
  CDR3 for alpha chain variable domain of TCR clone 321554 (TRAV3, TRAJ41)
CAVSSNSGYALNF

SEQ ID NO: 643108 - protein, 14 aa, Homo sapiens
  CDR3 for beta chain variable domain of TCR clone 321554 (TRBV7-2, TRBJ2-7)
CASSPKTSIYEQYF

SEQ ID NO: 643109 - protein, 16 aa, Homo sapiens
  CDR3 for alpha chain variable domain of TCR clone 321555 (TRAV30, TRAJ24)
CGTEIVDADSWGKFQF

SEQ ID NO: 643110 - protein, 15 aa, Homo sapiens
  CDR3 for beta chain variable domain of TCR clone 321555 (TRBV28, TRBJ2-1)
CASSFGLAVSMKQFF

SEQ ID NO: 643111 - protein, 15 aa, Homo sapiens
  CDR3 for alpha chain variable domain of TCR clone 321556 (TRAV12-3, TRAJ6)
CTMSATTGGRYIPTF

SEQ ID NO: 643112 - protein, 16 aa, Homo sapiens
  CDR3 for beta chain variable domain of TCR clone 321556 (TRBV20-1, TRBJ1-2)
CSASMGQGVANYGYTF

SEQ ID NO: 643113 - protein, 15 aa, Homo sapiens
  CDR3 for alpha chain variable domain of TCR clone 321557 (TRAV12-1, TRAJ42)
CVVTRDGGSPGNLIF

SEQ ID NO: 643114 - protein, 13 aa, Homo sapiens
  CDR3 for beta chain variable domain of TCR clone 321557 (TRBV27, TRBJ2-7)
CASSLTTGYEQYS

SEQ ID NO: 643115 - protein, 12 aa, Homo sapiens
  CDR3 for alpha chain variable domain of TCR clone 321558 (TRAV38-2/DV8, TRAJ48)
CSLLSGNEKLTF

SEQ ID NO: 643116 - protein, 15 aa, Homo sapiens
  CDR3 for beta chain variable domain of TCR clone 321558 (TRBV6-1, TRBJ2-1)
CASSELRGQYNEQFF

SEQ ID NO: 643117 - protein, 12 aa, Homo sapiens
  CDR3 for alpha chain variable domain of TCR clone 321559 (TRAV1-2, TRAJ42)
CVAGGSQGNLIF

SEQ ID NO: 643118 - protein, 13 aa, Homo sapiens
  CDR3 for beta chain variable domain of TCR clone 321559 (TRBV19, TRBJ2-1)
CASSMYRVNEQFF

SEQ ID NO: 643119 - protein, 15 aa, Homo sapiens
  CDR3 for alpha chain variable domain of TCR clone 321560 (TRAV17, TRAJ57)
CATGPSQVGSEKLVF

SEQ ID NO: 643120 - protein, 18 aa, Homo sapiens
  CDR3 for beta chain variable domain of TCR clone 321560 (TRBV7-9, TRBJ2-7)
CASSLTTSGSRTWYEQYF

SEQ ID NO: 643121 - protein, 14 aa, Homo sapiens
  CDR3 for alpha chain variable domain of TCR clone 321561 (TRAV12-2, TRAJ17)
CAVLFKDAGNKLTF

SEQ ID NO: 643122 - protein, 17 aa, Homo sapiens
  CDR3 for beta chain variable domain of TCR clone 321561 (TRBV20-1, TRBJ2-2)
CSASGSGQGGLTGELFL

SEQ ID NO: 643123 - protein, 13 aa, Homo sapiens
  CDR3 for alpha chain variable domain of TCR clone 321562 (TRAV21, TRAJ27)
CAARPGNAGKSTF

SEQ ID NO: 643124 - protein, 15 aa, Homo sapiens
  CDR3 for beta chain variable domain of TCR clone 321562 (TRBV19, TRBJ2-7)
CASSTGLAGTYEQYF

SEQ ID NO: 643125 - protein, 11 aa, Homo sapiens
  CDR3 for alpha chain variable domain of TCR clone 321563 (TRAV13-1, TRAJ8)
CASGGFQKLVF

SEQ ID NO: 643126 - protein, 14 aa, Homo sapiens
  CDR3 for beta chain variable domain of TCR clone 321563 (TRBV7-8, TRBJ2-3)
CASSLEAGTDTQYF

SEQ ID NO: 643127 - protein, 21 aa, Homo sapiens
  CDR3 for alpha chain variable domain of TCR clone 321564 (TRAV1-1, TRAJ6)
CLLLLRCERLERTGGSYIPTF

SEQ ID NO: 643128 - protein, 13 aa, Homo sapiens
  CDR3 for beta chain variable domain of TCR clone 321564 (TRBV10-2, TRBJ2-7)
CARGASGGYEQYF

SEQ ID NO: 643129 - protein, 14 aa, Homo sapiens
  CDR3 for alpha chain variable domain of TCR clone 321565 (TRAV16, TRAJ22)
CALSGRGSARQLTF

SEQ ID NO: 643130 - protein, 19 aa, Homo sapiens
  CDR3 for beta chain variable domain of TCR clone 321565 (TRBV25-1, TRBJ2-2)
CAILVYRVDRGRKTGELFF

SEQ ID NO: 643131 - protein, 14 aa, Homo sapiens
  CDR3 for alpha chain variable domain of TCR clone 321566 (TRAV1-2, TRAJ8)
CAVREDTGFQKLVL

SEQ ID NO: 643132 - protein, 14 aa, Homo sapiens
  CDR3 for beta chain variable domain of TCR clone 321566 (TRBV29-1, TRBJ2-5)
CSVETSGSGETQYF

SEQ ID NO: 643133 - protein, 13 aa, Homo sapiens
  CDR3 for alpha chain variable domain of TCR clone 321567 (TRAV35, TRAJ48)
CWVSNFGNEKLTF

SEQ ID NO: 643134 - protein, 16 aa, Homo sapiens
  CDR3 for beta chain variable domain of TCR clone 321567 (TRBV12-4, TRBJ1-5)
CASSRPVGGSNQPQHF

SEQ ID NO: 643135 - protein, 13 aa, Homo sapiens
  CDR3 for alpha chain variable domain of TCR clone 321568 (TRAV13-1, TRAJ21)
CAASKGNFNKFYF

SEQ ID NO: 643136 - protein, 16 aa, Homo sapiens
  CDR3 for beta chain variable domain of TCR clone 321568 (TRBV5-4, TRBJ2-3)
YASSWGTSGGTDTQYF

SEQ ID NO: 643137 - protein, 13 aa, Homo sapiens
  CDR3 for alpha chain variable domain of TCR clone 321569 (TRAV27, TRAJ49)
CAPRPYTGNQFYF

SEQ ID NO: 643138 - protein, 16 aa, Homo sapiens
  CDR3 for beta chain variable domain of TCR clone 321569 (TRBV4-1, TRBJ1-2)
CASSQDAGQVHYGYTF

SEQ ID NO: 643139 - protein, 14 aa, Homo sapiens
  CDR3 for alpha chain variable domain of TCR clone 321570 (TRAV40, TRAJ41)
CLLGPPNSGYALNF

SEQ ID NO: 643140 - protein, 14 aa, Homo sapiens
  CDR3 for beta chain variable domain of TCR clone 321570 (TRBV19, TRBJ2-1)
CASPTFVLSGEQFF

SEQ ID NO: 643141 - protein, 14 aa, Homo sapiens
  CDR3 for alpha chain variable domain of TCR clone 321571 (TRAV12-3, TRAJ56)
CAMSVTGANSKLTF

SEQ ID NO: 643142 - protein, 15 aa, Homo sapiens
  CDR3 for beta chain variable domain of TCR clone 321571 (TRBV7-3, TRBJ2-1)
CASSLAGAGADEQFF

SEQ ID NO: 643143 - protein, 13 aa, Homo sapiens
  CDR3 for alpha chain variable domain of TCR clone 321572 (TRAV17, TRAJ45)
CATPGGGADGLTF

SEQ ID NO: 643144 - protein, 17 aa, Homo sapiens
  CDR3 for beta chain variable domain of TCR clone 321572 (TRBV5-7, TRBJ2-1)
CASSFGLAGPAYNEQFF

SEQ ID NO: 643145 - protein, 14 aa, Homo sapiens
  CDR3 for alpha chain variable domain of TCR clone 321573 (TRAV38-1, TRAJ45)
CAYYSGGGADGLTL

SEQ ID NO: 643146 - protein, 20 aa, Homo sapiens
  CDR3 for beta chain variable domain of TCR clone 321573 (TRBV28, TRBJ2-1)
CASIPIGRSPGLAGGNEQFF

SEQ ID NO: 643147 - protein, 17 aa, Homo sapiens
  CDR3 for alpha chain variable domain of TCR clone 321574 (TRAV21, TRAJ13)
CAVPRSFWGLPESYLWN

SEQ ID NO: 643148 - protein, 16 aa, Homo sapiens
  CDR3 for beta chain variable domain of TCR clone 321574 (TRBV6-1, TRBJ2-5)
CASSETLDRGAETQYF

SEQ ID NO: 643149 - protein, 12 aa, Homo sapiens
  CDR3 for alpha chain variable domain of TCR clone 321575 (TRAV12-3, TRAJ17)
CAMTLTGNKLTF

SEQ ID NO: 643150 - protein, 15 aa, Homo sapiens
  CDR3 for beta chain variable domain of TCR clone 321575 (TRBV11-3, TRBJ2-3)
CASLEGGREGDTQYF

SEQ ID NO: 643151 - protein, 13 aa, Homo sapiens
  CDR3 for alpha chain variable domain of TCR clone 321576 (TRAV3, TRAJ21)
CALREPDFNKFYF

SEQ ID NO: 643152 - protein, 15 aa, Homo sapiens
  CDR3 for beta chain variable domain of TCR clone 321576 (TRBV2, TRBJ2-1)
CASSELAGGYNEQFF

SEQ ID NO: 643153 - protein, 14 aa, Homo sapiens
  CDR3 for alpha chain variable domain of TCR clone 321577 (TRAV12-2, TRAJ41)
CAVNRANSGYAINF

SEQ ID NO: 643154 - protein, 13 aa, Homo sapiens
  CDR3 for beta chain variable domain of TCR clone 321577 (TRBV7-9, TRBJ1-2)
CASSLKQNYGYTF

SEQ ID NO: 643155 - protein, 20 aa, Homo sapiens
  CDR3 for alpha chain variable domain of TCR clone 321578 (TRAV21, TRAJ4)
AASQPGDSATLAGGYNKLIF

SEQ ID NO: 643156 - protein, 15 aa, Homo sapiens
  CDR3 for beta chain variable domain of TCR clone 321578 (TRBV7-2, TRBJ2-3)
CASTPTSGETDTQYF

SEQ ID NO: 643157 - protein, 17 aa, Homo sapiens
  CDR3 for alpha chain variable domain of TCR clone 321579 (TRAV36/DV7, TRAJ52)
CAVAQRAGGTSYGKLTF

SEQ ID NO: 643158 - protein, 13 aa, Homo sapiens
  CDR3 for beta chain variable domain of TCR clone 321579 (TRBV7-7, TRBJ2-5)
CASSRSGQETQYF

SEQ ID NO: 643159 - protein, 16 aa, Homo sapiens
  CDR3 for alpha chain variable domain of TCR clone 321580 (TRAV30, TRAJ24)
CGTEIVDADSWGKFQF

SEQ ID NO: 643160 - protein, 16 aa, Homo sapiens
  CDR3 for beta chain variable domain of TCR clone 321580 (TRBV2, TRBJ1-3)
CASSGGACRSGNTIYF

SEQ ID NO: 643161 - protein, 13 aa, Homo sapiens
  CDR3 for alpha chain variable domain of TCR clone 321581 (TRAV26-1, TRAJ33)
CIVRVDSNYQVIW

SEQ ID NO: 643162 - protein, 15 aa, Homo sapiens
  CDR3 for beta chain variable domain of TCR clone 321581 (TRBV7-2, TRBJ1-5)
CASSFSAGINQPQHF

SEQ ID NO: 643163 - protein, 13 aa, Homo sapiens
  CDR3 for alpha chain variable domain of TCR clone 321582 (TRAV21, TRAJ57)
YAVTQGGSEKLVF

SEQ ID NO: 643164 - protein, 16 aa, Homo sapiens
  CDR3 for beta chain variable domain of TCR clone 321582 (TRBV29-1, TRBJ2-7)
CSVEDAEDGTAYEQFF

SEQ ID NO: 643165 - protein, 13 aa, Homo sapiens
  CDR3 for alpha chain variable domain of TCR clone 321583 (TRAV8-3, TRAJ36)
CAGGATGANNFFF

SEQ ID NO: 643166 - protein, 15 aa, Homo sapiens
  CDR3 for beta chain variable domain of TCR clone 321583 (TRBV7-2, TRBJ1-2)
CASSPRAGWNYGYTF

SEQ ID NO: 643167 - protein, 14 aa, Homo sapiens
  CDR3 for alpha chain variable domain of TCR clone 321584 (TRAV30, TRAJ33)
CGTERRFSNYQLMW

SEQ ID NO: 643168 - protein, 16 aa, Homo sapiens
  CDR3 for beta chain variable domain of TCR clone 321584 (TRBV7-3, TRBJ2-2)
CASSLKRGTLSGELFF

SEQ ID NO: 643169 - protein, 13 aa, Homo sapiens
  CDR3 for alpha chain variable domain of TCR clone 321585 (TRAV12-2, TRAJ52)
CAVGGTSYGKLTF

SEQ ID NO: 643170 - protein, 14 aa, Homo sapiens
  CDR3 for beta chain variable domain of TCR clone 321585 (TRBV19, TRBJ2-1)
CASPTFVLSGEHFF

SEQ ID NO: 643171 - protein, 14 aa, Homo sapiens
  CDR3 for alpha chain variable domain of TCR clone 321586 (TRAV29/DV5, TRAJ22)
CAASDSGSARQLTF

SEQ ID NO: 643172 - protein, 17 aa, Homo sapiens
  CDR3 for beta chain variable domain of TCR clone 321586 (TRBV7-9, TRBJ1-1)
CASSLLEQGALKLSLDK

SEQ ID NO: 643173 - protein, 11 aa, Homo sapiens
  CDR3 for alpha chain variable domain of TCR clone 321587 (TRAV1-1, TRAJ23)
CAVRQGGKLIF

SEQ ID NO: 643174 - protein, 19 aa, Homo sapiens
  CDR3 for beta chain variable domain of TCR clone 321587 (TRBV7-8, TRBJ2-2)
CASHLFPGPTIHITGELFF

SEQ ID NO: 643175 - protein, 17 aa, Homo sapiens
  CDR3 for alpha chain variable domain of TCR clone 321588 (TRAV26-1, TRAJ58)
CIVSVGAEETSGSRLTF

SEQ ID NO: 643176 - protein, 13 aa, Homo sapiens
  CDR3 for beta chain variable domain of TCR clone 321588 (TRBV12-5, TRBJ1-2)
CASGVRTGNGYTF

SEQ ID NO: 643177 - protein, 10 aa, Homo sapiens
  CDR3 for alpha chain variable domain of TCR clone 321589 (TRAV39, TRAJ49)
CAVAGNQFYF

SEQ ID NO: 643178 - protein, 17 aa, Homo sapiens
  CDR3 for beta chain variable domain of TCR clone 321589 (TRBV20-1, TRBJ2-2)
CSASGSGQGGLTGELFF

SEQ ID NO: 643179 - protein, 16 aa, Homo sapiens
  CDR3 for alpha chain variable domain of TCR clone 321590 (TRAV20, TRAJ22)
CAVQASSSGSARQLTF

SEQ ID NO: 643180 - protein, 17 aa, Homo sapiens
  CDR3 for beta chain variable domain of TCR clone 321590 (TRBV7-2, TRBJ2-5)
CASSQTSVDPVLRARHA

SEQ ID NO: 643181 - protein, 14 aa, Homo sapiens
  CDR3 for alpha chain variable domain of TCR clone 321591 (TRAV8-2, TRAJ37)
CVVSISGNTGKLIF

SEQ ID NO: 643182 - protein, 17 aa, Homo sapiens
  CDR3 for beta chain variable domain of TCR clone 321591 (TRBV7-9, TRBJ2-3)
CASSPTVAGDLTDTQYC

SEQ ID NO: 643183 - protein, 14 aa, Homo sapiens
  CDR3 for alpha chain variable domain of TCR clone 321592 (TRAV1-2, TRAJ16)
RAVNRFSDGQKLLF

SEQ ID NO: 643184 - protein, 18 aa, Homo sapiens
  CDR3 for beta chain variable domain of TCR clone 321592 (TRBV20-1, TRBJ2-6)
CSAETTPTHGSGANVLTF

SEQ ID NO: 643185 - protein, 17 aa, Homo sapiens
  CDR3 for alpha chain variable domain of TCR clone 321593 (TRAV4, TRAJ18)
CLVGERSVGSTLGRLYF

SEQ ID NO: 643186 - protein, 11 aa, Homo sapiens
  CDR3 for beta chain variable domain of TCR clone 321593 (TRBV29-1, TRBJ2-5)
RSEDRTGTQYF

SEQ ID NO: 643187 - protein, 15 aa, Homo sapiens
  CDR3 for alpha chain variable domain of TCR clone 321594 (TRAV2, TRAJ9)
CAVEDRGTGGFKTIF

SEQ ID NO: 643188 - protein, 12 aa, Homo sapiens
  CDR3 for beta chain variable domain of TCR clone 321594 (TRBV6-3, TRBJ2-1)
CASSGSYNEQFF

SEQ ID NO: 643189 - protein, 15 aa, Homo sapiens
  CDR3 for alpha chain variable domain of TCR clone 321595 (TRAV2, TRAJ24)
CAVEVLTDSWGKFQF

SEQ ID NO: 643190 - protein, 12 aa, Homo sapiens
  CDR3 for beta chain variable domain of TCR clone 321595 (TRBV6-3, TRBJ2-7)
CASSEPGFEQYF

SEQ ID NO: 643191 - protein, 14 aa, Homo sapiens
  CDR3 for alpha chain variable domain of TCR clone 321596 (TRAV17, TRAJ12)
CATDEKDSSYKLIF

SEQ ID NO: 643192 - protein, 16 aa, Homo sapiens
  CDR3 for beta chain variable domain of TCR clone 321596 (TRBV11-2, TRBJ2-1)
CASRPRLAGVYNEQFF

SEQ ID NO: 643193 - protein, 17 aa, Homo sapiens
  CDR3 for alpha chain variable domain of TCR clone 321597 (TRAV12-2, TRAJ48)
CASNEKLTFGTGTRLTI

SEQ ID NO: 643194 - protein, 15 aa, Homo sapiens
  CDR3 for beta chain variable domain of TCR clone 321597 (TRBV6-3, TRBJ2-7)
CASSSPGTVFYEQYF

SEQ ID NO: 643195 - protein, 13 aa, Homo sapiens
  CDR3 for alpha chain variable domain of TCR clone 321598 (TRAV12-3, TRAJ9)
CTMRNTGGFKTIF

SEQ ID NO: 643196 - protein, 16 aa, Homo sapiens
  CDR3 for beta chain variable domain of TCR clone 321598 (TRBV19, TRBJ2-1)
CASSIDGSFAYNEQFF

SEQ ID NO: 643197 - protein, 13 aa, Homo sapiens
  CDR3 for alpha chain variable domain of TCR clone 321599 (TRAV13-2, TRAJ53)
CAENMGSNYRLTF

SEQ ID NO: 643198 - protein, 13 aa, Homo sapiens
  CDR3 for beta chain variable domain of TCR clone 321599 (TRBV4-1, TRBJ2-2)
CASSQENTGELFF

SEQ ID NO: 643199 - protein, 14 aa, Homo sapiens
  CDR3 for alpha chain variable domain of TCR clone 321600 (TRAV4, TRAJ12)
CLMGYMDSSYKLIF

SEQ ID NO: 643200 - protein, 14 aa, Homo sapiens
  CDR3 for beta chain variable domain of TCR clone 321600 (TRBV27, TRBJ1-1)
CASSPGGGATEAFF

SEQ ID NO: 643201 - protein, 13 aa, Homo sapiens
  CDR3 for alpha chain variable domain of TCR clone 321601 (TRAV21, TRAJ27)
CAARPGNAGKSTF

SEQ ID NO: 643202 - protein, 13 aa, Homo sapiens
  CDR3 for beta chain variable domain of TCR clone 321601 (TRBV14, TRBJ1-1)
CASSQEAGTEAFF

SEQ ID NO: 643203 - protein, 13 aa, Homo sapiens
  CDR3 for alpha chain variable domain of TCR clone 321602 (TRAV13-1, TRAJ33)
CAAWTDSNYQLIW

SEQ ID NO: 643204 - protein, 13 aa, Homo sapiens
  CDR3 for beta chain variable domain of TCR clone 321602 (TRBV7-2, TRBJ1-6)
CASSLNLDSPLHF

SEQ ID NO: 643205 - protein, 16 aa, Homo sapiens
  CDR3 for alpha chain variable domain of TCR clone 321603 (TRAV3, TRAJ10)
CAVRDMRAGGGNKLTF

SEQ ID NO: 643206 - protein, 14 aa, Homo sapiens
  CDR3 for beta chain variable domain of TCR clone 321603 (TRBV7-2, TRBJ1-1)
CASSFLTVTTEAFF

SEQ ID NO: 643207 - protein, 13 aa, Homo sapiens
  CDR3 for alpha chain variable domain of TCR clone 321604 (TRAV23/DV6, TRAJ58)
CAASEIGGSRLTF

SEQ ID NO: 643208 - protein, 15 aa, Homo sapiens
  CDR3 for beta chain variable domain of TCR clone 321604 (TRBV19, TRBJ1-1)
CANTSGQIQNTEAFF

SEQ ID NO: 643209 - protein, 16 aa, Homo sapiens
  CDR3 for alpha chain variable domain of TCR clone 321605 (TRAV3, TRAJ10)
CAVRDMRAGGGNKLTF

SEQ ID NO: 643210 - protein, 14 aa, Homo sapiens
  CDR3 for beta chain variable domain of TCR clone 321605 (TRBV7-2, TRBJ1-4)
CASSVVGGGEKLFF

SEQ ID NO: 643211 - protein, 14 aa, Homo sapiens
  CDR3 for alpha chain variable domain of TCR clone 321606 (TRAV12-2, TRAJ13)
CAVKKTGGYQKDTF

SEQ ID NO: 643212 - protein, 16 aa, Homo sapiens
  CDR3 for beta chain variable domain of TCR clone 321606 (TRBV2, TRBJ2-1)
CASRSPAGGKYNEQFF

SEQ ID NO: 643213 - protein, 23 aa, Homo sapiens
  CDR3 for alpha chain variable domain of TCR clone 321607 (TRAV26-1, TRAJ38)
CIADNAGNNHIQNPDPAAYQLRD

SEQ ID NO: 643214 - protein, 14 aa, Homo sapiens
  CDR3 for beta chain variable domain of TCR clone 321607 (TRBV7-3, TRBJ1-1)
CASSLKGGNTEAFF

SEQ ID NO: 643215 - protein, 15 aa, Homo sapiens
  CDR3 for alpha chain variable domain of TCR clone 321608 (TRAV38-2/DV8, TRAJ45)
CAYWDSRGGADGLTF

SEQ ID NO: 643216 - protein, 14 aa, Homo sapiens
  CDR3 for beta chain variable domain of TCR clone 321608 (TRBV7-2, TRBJ2-7)
CASRSQGAAYEQYF

SEQ ID NO: 643217 - protein, 12 aa, Homo sapiens
  CDR3 for alpha chain variable domain of TCR clone 321609 (TRAV36/DV7, TRAJ50)
CAVEPENLLRQG

SEQ ID NO: 643218 - protein, 16 aa, Homo sapiens
  CDR3 for beta chain variable domain of TCR clone 321609 (TRBV11-2, TRBJ1-2)
CASSLDTGGADYGYTF

SEQ ID NO: 643219 - protein, 15 aa, Homo sapiens
  CDR3 for alpha chain variable domain of TCR clone 321610 (TRAV12-3, TRAJ27)
CSMRAYNTNAGKSTF

SEQ ID NO: 643220 - protein, 13 aa, Homo sapiens
  CDR3 for beta chain variable domain of TCR clone 321610 (TRBV11-2, TRBJ2-5)
CARSRGPSETQYF

SEQ ID NO: 643221 - protein, 15 aa, Homo sapiens
  CDR3 for alpha chain variable domain of TCR clone 321611 (TRAV24, TRAJ42)
CAPMNYGGSQGNLIF

SEQ ID NO: 643222 - protein, 11 aa, Homo sapiens
  CDR3 for beta chain variable domain of TCR clone 321611 (TRBV19, TRBJ1-1)
CASSIGSEAFF

SEQ ID NO: 643223 - protein, 13 aa, Homo sapiens
  CDR3 for alpha chain variable domain of TCR clone 321612 (TRAV12-1, TRAJ31)
CVVIPNNNARLMF

SEQ ID NO: 643224 - protein, 16 aa, Homo sapiens
  CDR3 for beta chain variable domain of TCR clone 321612 (TRBV2, TRBJ2-3)
CASSTSVEGVTDTQYF

SEQ ID NO: 643225 - protein, 13 aa, Homo sapiens
  CDR3 for alpha chain variable domain of TCR clone 321613 (TRAV29/DV5, TRAJ31)
CAASRNNNARLIV

SEQ ID NO: 643226 - protein, 14 aa, Homo sapiens
  CDR3 for beta chain variable domain of TCR clone 321613 (TRBV12-4, TRBJ1-1)
CASSLGTGGTEAFF

SEQ ID NO: 643227 - protein, 13 aa, Homo sapiens
  CDR3 for alpha chain variable domain of TCR clone 321614 (TRAV1-2, TRAJ9)
CAVLNTGGFKTIF

SEQ ID NO: 643228 - protein, 17 aa, Homo sapiens
  CDR3 for beta chain variable domain of TCR clone 321614 (TRBV7-2, TRBJ2-3)
CASSLAGGLAGTVGQYF

SEQ ID NO: 643229 - protein, 15 aa, Homo sapiens
  CDR3 for alpha chain variable domain of TCR clone 321615 (TRAV3, TRAJ4)
CAVRDGTGGYNKLIF

SEQ ID NO: 643230 - protein, 16 aa, Homo sapiens
  CDR3 for beta chain variable domain of TCR clone 321615 (TRBV27, TRBJ2-2)
CASSSRGVSNTGELFF

SEQ ID NO: 643231 - protein, 14 aa, Homo sapiens
  CDR3 for alpha chain variable domain of TCR clone 321616 (TRAV2, TRAJ9)
CAVEDRSGGFKTIF

SEQ ID NO: 643232 - protein, 15 aa, Homo sapiens
  CDR3 for beta chain variable domain of TCR clone 321616 (TRBV20-1, TRBJ2-7)
CSARVPAAYFYKQYF

SEQ ID NO: 643233 - protein, 14 aa, Homo sapiens
  CDR3 for alpha chain variable domain of TCR clone 321617 (TRAV12-2, TRAJ24)
CAVTPADSRGKLQF

SEQ ID NO: 643234 - protein, 15 aa, Homo sapiens
  CDR3 for beta chain variable domain of TCR clone 321617 (TRBV15, TRBJ2-1)
CATSRPGQGLHEQFF

SEQ ID NO: 643235 - protein, 16 aa, Homo sapiens
  CDR3 for alpha chain variable domain of TCR clone 321618 (TRAV12-3, TRAJ53)
CAMSPGSGGGNYKLTF

SEQ ID NO: 643236 - protein, 14 aa, Homo sapiens
  CDR3 for beta chain variable domain of TCR clone 321618 (TRBV15, TRBJ2-5)
CATSIGGLGETQYF

SEQ ID NO: 643237 - protein, 13 aa, Homo sapiens
  CDR3 for alpha chain variable domain of TCR clone 321619 (TRAV35, TRAJ50)
CAGHRKTSYKVIF

SEQ ID NO: 643238 - protein, 13 aa, Homo sapiens
  CDR3 for beta chain variable domain of TCR clone 321619 (TRBV7-7, TRBJ2-3)
CASSLSRADTQYF

SEQ ID NO: 643239 - protein, 12 aa, Homo sapiens
  CDR3 for alpha chain variable domain of TCR clone 321620 (TRAV12-3, TRAJ20)
CAMVRGDYKLSF

SEQ ID NO: 643240 - protein, 12 aa, Homo sapiens
  CDR3 for beta chain variable domain of TCR clone 321620 (TRBV11-2, TRBJ2-5)
CASSLDTQTQYF

SEQ ID NO: 643241 - protein, 11 aa, Homo sapiens
  CDR3 for alpha chain variable domain of TCR clone 321621 (TRAV21, TRAJ11)
CAVNGCSTLTF

SEQ ID NO: 643242 - protein, 11 aa, Homo sapiens
  CDR3 for beta chain variable domain of TCR clone 321621 (TRBV19, TRBJ1-1)
CASSIGSESFF

SEQ ID NO: 643243 - protein, 11 aa, Homo sapiens
  CDR3 for alpha chain variable domain of TCR clone 321622 (TRAV2, TRAJ23)
CAVETRGKLIF

SEQ ID NO: 643244 - protein, 16 aa, Homo sapiens
  CDR3 for beta chain variable domain of TCR clone 321622 (TRBV20-1, TRBJ1-4)
CSAPGQGLLTNEKLFF

SEQ ID NO: 643245 - protein, 12 aa, Homo sapiens
  CDR3 for alpha chain variable domain of TCR clone 321623 (TRAV13-1, TRAJ9)
CASHTGGFKTIV

SEQ ID NO: 643246 - protein, 13 aa, Homo sapiens
  CDR3 for beta chain variable domain of TCR clone 321623 (TRBV12-4, TRBJ1-2)
CASSSGSKDGYTF

SEQ ID NO: 643247 - protein, 14 aa, Homo sapiens
  CDR3 for alpha chain variable domain of TCR clone 321624 (TRAV1-2, TRAJ8)
CAAREDTGFQKLVF

SEQ ID NO: 643248 - protein, 13 aa, Homo sapiens
  CDR3 for beta chain variable domain of TCR clone 321624 (TRBV27, TRBJ1-1)
CASSLSIGAEAFF

SEQ ID NO: 643249 - protein, 14 aa, Homo sapiens
  CDR3 for alpha chain variable domain of TCR clone 321625 (TRAV1-2, TRAJ8)
CAVREDTGFTKLVF

SEQ ID NO: 643250 - protein, 16 aa, Homo sapiens
  CDR3 for beta chain variable domain of TCR clone 321625 (TRBV12-4, TRBJ1-5)
CASSRPVGGSNQPQHF

SEQ ID NO: 643251 - protein, 16 aa, Homo sapiens
  CDR3 for alpha chain variable domain of TCR clone 321626 (TRAV30, TRAJ24)
CGREIVDADSWGKSQF

SEQ ID NO: 643252 - protein, 14 aa, Homo sapiens
  CDR3 for beta chain variable domain of TCR clone 321626 (TRBV12-5, TRBJ2-5)
CASGSRTHQETQYF

SEQ ID NO: 643253 - protein, 12 aa, Homo sapiens
  CDR3 for alpha chain variable domain of TCR clone 321627 (TRAV8-3, TRAJ26)
CAGDNYGQNFVF

SEQ ID NO: 643254 - protein, 11 aa, Homo sapiens
  CDR3 for beta chain variable domain of TCR clone 321627 (TRBV7-2, TRBJ2-3)
CASSSSDTQYF

SEQ ID NO: 643255 - protein, 14 aa, Homo sapiens
  CDR3 for alpha chain variable domain of TCR clone 321628 (TRAV1-1, TRAJ27)
CAVIYNTNAGKSTF

SEQ ID NO: 643256 - protein, 14 aa, Homo sapiens
  CDR3 for beta chain variable domain of TCR clone 321628 (TRBV25-1, TRBJ1-1)
CASTHLGGNTEAFL

SEQ ID NO: 643257 - protein, 14 aa, Homo sapiens
  CDR3 for alpha chain variable domain of TCR clone 321629 (TRAV35, TRAJ50)
CAGHRKTSYDKVIF

SEQ ID NO: 643258 - protein, 13 aa, Homo sapiens
  CDR3 for beta chain variable domain of TCR clone 321629 (TRBV7-7, TRBJ2-3)
CARSVSRADTQYF

SEQ ID NO: 643259 - protein, 14 aa, Homo sapiens
  CDR3 for alpha chain variable domain of TCR clone 321630 (TRAV16, TRAJ26)
CALSSANYGKNFVF

SEQ ID NO: 643260 - protein, 12 aa, Homo sapiens
  CDR3 for beta chain variable domain of TCR clone 321630 (TRBV6-5, TRBJ2-2)
CASRTGTGELFF

SEQ ID NO: 643261 - protein, 12 aa, Homo sapiens
  CDR3 for alpha chain variable domain of TCR clone 321631 (TRAV1-2, TRAJ29)
CAVPSGNTPLVF

SEQ ID NO: 643262 - protein, 17 aa, Homo sapiens
  CDR3 for beta chain variable domain of TCR clone 321631 (TRBV3-1, TRBJ2-2)
CASSQFRDKVDTGELFF

SEQ ID NO: 643263 - protein, 14 aa, Homo sapiens
  CDR3 for alpha chain variable domain of TCR clone 321632 (TRAV1-2, TRAJ8)
CAVREDTGFQKLVF

SEQ ID NO: 643264 - protein, 17 aa, Homo sapiens
  CDR3 for beta chain variable domain of TCR clone 321632 (TRBV6-5, TRBJ2-7)
GASRPSVGEVQHYEQYF

SEQ ID NO: 643265 - protein, 14 aa, Homo sapiens
  CDR3 for alpha chain variable domain of TCR clone 321633 (TRAV2, TRAJ8)
CAGRGNKGFQKLVF

SEQ ID NO: 643266 - protein, 13 aa, Homo sapiens
  CDR3 for beta chain variable domain of TCR clone 321633 (TRBV6-5, TRBJ2-7)
CASRTSGIHEQYF

SEQ ID NO: 643267 - protein, 18 aa, Homo sapiens
  CDR3 for alpha chain variable domain of TCR clone 321634 (TRAV13-1, TRAJ52)
CAAKNPNAGGTSYGKLTF

SEQ ID NO: 643268 - protein, 13 aa, Homo sapiens
  CDR3 for beta chain variable domain of TCR clone 321634 (TRBV10-2, TRBJ2-3)
CASSESGDHTQYF

SEQ ID NO: 643269 - protein, 11 aa, Homo sapiens
  CDR3 for alpha chain variable domain of TCR clone 321635 (TRAV12-3, TRAJ43)
CAMSVSNDMRF

SEQ ID NO: 643270 - protein, 17 aa, Homo sapiens
  CDR3 for beta chain variable domain of TCR clone 321635 (TRBV7-9, TRBJ2-2)
CASSLGVAGMNTGELFF

SEQ ID NO: 643271 - protein, 14 aa, Homo sapiens
  CDR3 for alpha chain variable domain of TCR clone 321636 (TRAV26-1, TRAJ40)
CIVRVARGTYKYIF

SEQ ID NO: 643272 - protein, 11 aa, Homo sapiens
  CDR3 for beta chain variable domain of TCR clone 321636 (TRBV25-1, TRBJ1-1)
PTWGGNTEAFF

SEQ ID NO: 643273 - protein, 11 aa, Homo sapiens
  CDR3 for alpha chain variable domain of TCR clone 321637 (TRAV2, TRAJ13)
CASGGYQKVTF

SEQ ID NO: 643274 - protein, 13 aa, Homo sapiens
  CDR3 for beta chain variable domain of TCR clone 321637 (TRBV24-1, TRBJ2-1)
CATSAGPYNEQFF

SEQ ID NO: 643275 - protein, 16 aa, Homo sapiens
  CDR3 for alpha chain variable domain of TCR clone 321638 (TRAV3, TRAJ37)
CAVRPHGSGNTGKLIF

SEQ ID NO: 643276 - protein, 14 aa, Homo sapiens
  CDR3 for beta chain variable domain of TCR clone 321638 (TRBV12-4, TRBJ1-1)
CASTWTGHDTEAFF

SEQ ID NO: 643277 - protein, 13 aa, Homo sapiens
  CDR3 for alpha chain variable domain of TCR clone 321639 (TRAV23/DV6, TRAJ58)
CAASEIGGSGLTF

SEQ ID NO: 643278 - protein, 14 aa, Homo sapiens
  CDR3 for beta chain variable domain of TCR clone 321639 (TRBV28, TRBJ2-5)
CASSRLAGGETQYF

SEQ ID NO: 643279 - protein, 10 aa, Homo sapiens
  CDR3 for alpha chain variable domain of TCR clone 321640 (TRAV13-1, TRAJ41)
CAASGPRRTQ

SEQ ID NO: 643280 - protein, 16 aa, Homo sapiens
  CDR3 for beta chain variable domain of TCR clone 321640 (TRBV19, TRBJ2-1)
CASSKAGPSSYNEQFF

SEQ ID NO: 643281 - protein, 17 aa, Homo sapiens
  CDR3 for alpha chain variable domain of TCR clone 321641 (TRAV3, TRAJ6)
CAVRDGPRAGGSYIPTF

SEQ ID NO: 643282 - protein, 19 aa, Homo sapiens
  CDR3 for beta chain variable domain of TCR clone 321641 (TRBV7-9, TRBJ2-1)
CASSHNRGALLRSYNEQFF

SEQ ID NO: 643283 - protein, 18 aa, Homo sapiens
  CDR3 for alpha chain variable domain of TCR clone 321642 (TRAV13-1, TRAJ52)
CAASKRSAGGTSYGKLTF

SEQ ID NO: 643284 - protein, 13 aa, Homo sapiens
  CDR3 for beta chain variable domain of TCR clone 321642 (TRBV7-8, TRBJ2-1)
CASTRDAVDEQFF

SEQ ID NO: 643285 - protein, 12 aa, Homo sapiens
  CDR3 for alpha chain variable domain of TCR clone 321643 (TRAV12-1, TRAJ40)
CVVYSGTYKYIF

SEQ ID NO: 643286 - protein, 18 aa, Homo sapiens
  CDR3 for beta chain variable domain of TCR clone 321643 (TRBV11-2, TRBJ2-3)
CASSLGGASRGAPITQYF

SEQ ID NO: 643287 - protein, 13 aa, Homo sapiens
  CDR3 for alpha chain variable domain of TCR clone 321644 (TRAV36/DV7, TRAJ38)
CVANAGNNRRLIW

SEQ ID NO: 643288 - protein, 14 aa, Homo sapiens
  CDR3 for beta chain variable domain of TCR clone 321644 (TRBV7-2, TRBJ2-7)
CASSLRWEVNKQYF

SEQ ID NO: 643289 - protein, 16 aa, Homo sapiens
  CDR3 for alpha chain variable domain of TCR clone 321645 (TRAV30, TRAJ24)
CGTEIVDADSWGKFQF

SEQ ID NO: 643290 - protein, 15 aa, Homo sapiens
  CDR3 for beta chain variable domain of TCR clone 321645 (TRBV15, TRBJ1-5)
CATSRDPVSNQPQQF

SEQ ID NO: 643291 - protein, 13 aa, Homo sapiens
  CDR3 for alpha chain variable domain of TCR clone 321646 (TRAV24, TRAJ13)
CAFDSGGYQKVTF

SEQ ID NO: 643292 - protein, 14 aa, Homo sapiens
  CDR3 for beta chain variable domain of TCR clone 321646 (TRBV28, TRBJ2-7)
CASSPYGMAYEQYF

SEQ ID NO: 643293 - protein, 14 aa, Homo sapiens
  CDR3 for alpha chain variable domain of TCR clone 321647 (TRAV17, TRAJ39)
CATDPVRAGNMLTF

SEQ ID NO: 643294 - protein, 15 aa, Homo sapiens
  CDR3 for beta chain variable domain of TCR clone 321647 (TRBV6-3, TRBJ2-1)
CASSYASDSYNEQFF

SEQ ID NO: 643295 - protein, 14 aa, Homo sapiens
  CDR3 for alpha chain variable domain of TCR clone 321648 (TRAV12-2, TRAJ44)
CAVNPAGTASKLTF

SEQ ID NO: 643296 - protein, 14 aa, Homo sapiens
  CDR3 for beta chain variable domain of TCR clone 321648 (TRBV25-1, TRBJ1-1)
CASTHPGGNTEAFF

SEQ ID NO: 643297 - protein, 14 aa, Homo sapiens
  CDR3 for alpha chain variable domain of TCR clone 321649 (TRAV17, TRAJ31)
CATVLRNNNARLMF

SEQ ID NO: 643298 - protein, 16 aa, Homo sapiens
  CDR3 for beta chain variable domain of TCR clone 321649 (TRBV19, TRBJ1-5)
CASSTWTGGGNQPQHF

SEQ ID NO: 643299 - protein, 14 aa, Homo sapiens
  CDR3 for alpha chain variable domain of TCR clone 321650 (TRAV30, TRAJ26)
CGTEIVSYGQNFVF

SEQ ID NO: 643300 - protein, 13 aa, Homo sapiens
  CDR3 for beta chain variable domain of TCR clone 321650 (TRBV19, TRBJ1-3)
CASRLSLGNNIYF

SEQ ID NO: 643301 - protein, 15 aa, Homo sapiens
  CDR3 for alpha chain variable domain of TCR clone 321651 (TRAV26-1, TRAJ44)
CIVRANDGTASKLTF

SEQ ID NO: 643302 - protein, 16 aa, Homo sapiens
  CDR3 for beta chain variable domain of TCR clone 321651 (TRBV7-7, TRBJ2-1)
CASSLASGTSYNEQFF

SEQ ID NO: 643303 - protein, 15 aa, Homo sapiens
  CDR3 for alpha chain variable domain of TCR clone 321652 (TRAV12-3, TRAJ6)
CAMSATSGGSYIPTF

SEQ ID NO: 643304 - protein, 14 aa, Homo sapiens
  CDR3 for beta chain variable domain of TCR clone 321652 (TRBV13, TRBJ2-5)
CASYRRLAEETQYF

SEQ ID NO: 643305 - protein, 15 aa, Homo sapiens
  CDR3 for alpha chain variable domain of TCR clone 321653 (TRAV26-1, TRAJ22)
CIVRVSFWFCKATDL

SEQ ID NO: 643306 - protein, 16 aa, Homo sapiens
  CDR3 for beta chain variable domain of TCR clone 321653 (TRBV4-2, TRBJ2-1)
CASSQETATPYNEQFF

SEQ ID NO: 643307 - protein, 17 aa, Homo sapiens
  CDR3 for alpha chain variable domain of TCR clone 321654 (TRAV3, TRAJ6)
RAVRDGPRAGGSYIPTF

SEQ ID NO: 643308 - protein, 20 aa, Homo sapiens
  CDR3 for beta chain variable domain of TCR clone 321654 (TRBV28, TRBJ2-1)
CASTPIGQSPGLAGGNEQFF

SEQ ID NO: 643309 - protein, 11 aa, Homo sapiens
  CDR3 for alpha chain variable domain of TCR clone 321655 (TRAV27, TRAJ20)
CAGADDYKLSF

SEQ ID NO: 643310 - protein, 14 aa, Homo sapiens
  CDR3 for beta chain variable domain of TCR clone 321655 (TRBV11-3, TRBJ2-7)
CASSPKTSFYEQYF

SEQ ID NO: 643311 - protein, 13 aa, Homo sapiens
  CDR3 for alpha chain variable domain of TCR clone 321656 (TRAV29/DV5, TRAJ31)
CAASRNNNARLMF

SEQ ID NO: 643312 - protein, 15 aa, Homo sapiens
  CDR3 for beta chain variable domain of TCR clone 321656 (TRBV2, TRBJ2-1)
CASSQLAGSYNEQFF

SEQ ID NO: 643313 - protein, 11 aa, Homo sapiens
  CDR3 for alpha chain variable domain of TCR clone 321657 (TRAV21, TRAJ39)
LLVNAGNMLTF

SEQ ID NO: 643314 - protein, 13 aa, Homo sapiens
  CDR3 for beta chain variable domain of TCR clone 321657 (TRBV12-5, TRBJ2-3)
CASGDRQSDTQYF

SEQ ID NO: 643315 - protein, 14 aa, Homo sapiens
  CDR3 for alpha chain variable domain of TCR clone 321658 (TRAV26-1, TRAJ11)
CIVPLYSGYSTITF

SEQ ID NO: 643316 - protein, 16 aa, Homo sapiens
  CDR3 for beta chain variable domain of TCR clone 321658 (TRBV5-1, TRBJ1-1)
CASSSGGNSLNTEAFF

SEQ ID NO: 643317 - protein, 15 aa, Homo sapiens
  CDR3 for alpha chain variable domain of TCR clone 321659 (TRAV3, TRAJ22)
CAVRDRGGSARQITF

SEQ ID NO: 643318 - protein, 14 aa, Homo sapiens
  CDR3 for beta chain variable domain of TCR clone 321659 (TRBV19, TRBJ1-5)
CASSLGLIGQPQHF

SEQ ID NO: 643319 - protein, 16 aa, Homo sapiens
  CDR3 for alpha chain variable domain of TCR clone 321660 (TRAV8-3, TRAJ10)
CAVGPILTGGGNKLTF

SEQ ID NO: 643320 - protein, 16 aa, Homo sapiens
  CDR3 for beta chain variable domain of TCR clone 321660 (TRBV7-2, TRBJ2-5)
CASNSKWLSGQETRYF

SEQ ID NO: 643321 - protein, 13 aa, Homo sapiens
  CDR3 for alpha chain variable domain of TCR clone 321661 (TRAV27, TRAJ6)
CAGGTRGSYIPTF

SEQ ID NO: 643322 - protein, 13 aa, Homo sapiens
  CDR3 for beta chain variable domain of TCR clone 321661 (TRBV12-5, TRBJ2-3)
CASGYRQSDTQYF

SEQ ID NO: 643323 - protein, 12 aa, Homo sapiens
  CDR3 for alpha chain variable domain of TCR clone 321662 (TRAV12-3, TRAJ17)
GAMTLTGNKLTF

SEQ ID NO: 643324 - protein, 15 aa, Homo sapiens
  CDR3 for beta chain variable domain of TCR clone 321662 (TRBV20-1, TRBJ2-7)
CSARDRVSGMDEHYF

SEQ ID NO: 643325 - protein, 12 aa, Homo sapiens
  CDR3 for alpha chain variable domain of TCR clone 321663 (TRAV12-1, TRAJ40)
CVVYSGTYKYIF

SEQ ID NO: 643326 - protein, 13 aa, Homo sapiens
  CDR3 for beta chain variable domain of TCR clone 321663 (TRBV5-5, TRBJ1-2)
CASSFWRGEDYTF

SEQ ID NO: 643327 - protein, 11 aa, Homo sapiens
  CDR3 for alpha chain variable domain of TCR clone 321664 (TRAV12-3, TRAJ49)
CAANTGNQFYF

SEQ ID NO: 643328 - protein, 13 aa, Homo sapiens
  CDR3 for beta chain variable domain of TCR clone 321664 (TRBV27, TRBJ1-1)
CASSLSIGAEAFF

SEQ ID NO: 643329 - protein, 13 aa, Homo sapiens
  CDR3 for alpha chain variable domain of TCR clone 321665 (TRAV12-1, TRAJ34)
CVVTGYNTDKLIL

SEQ ID NO: 643330 - protein, 13 aa, Homo sapiens
  CDR3 for beta chain variable domain of TCR clone 321665 (TRBV28, TRBJ2-7)
CASKAGGVYEQYF

SEQ ID NO: 643331 - protein, 12 aa, Homo sapiens
  CDR3 for alpha chain variable domain of TCR clone 321666 (TRAV8-1, TRAJ26)
CAVNNYGQNFDF

SEQ ID NO: 643332 - protein, 12 aa, Homo sapiens
  CDR3 for beta chain variable domain of TCR clone 321666 (TRBV5-5, TRBJ2-5)
CASSYFAETQYF

SEQ ID NO: 643333 - protein, 13 aa, Homo sapiens
  CDR3 for alpha chain variable domain of TCR clone 321667 (TRAV16, TRAJ28)
CAPTGAGRYQLTF

SEQ ID NO: 643334 - protein, 16 aa, Homo sapiens
  CDR3 for beta chain variable domain of TCR clone 321667 (TRBV28, TRBJ1-5)
CASSLTGQGWNQPQHF

SEQ ID NO: 643335 - protein, 16 aa, Homo sapiens
  CDR3 for alpha chain variable domain of TCR clone 321668 (TRAV19, TRAJ24)
SSSPLSTTDSWGKLQF

SEQ ID NO: 643336 - protein, 13 aa, Homo sapiens
  CDR3 for beta chain variable domain of TCR clone 321668 (TRBV12-5, TRBJ2-3)
CASGDRQSDTQYF

SEQ ID NO: 643337 - protein, 11 aa, Homo sapiens
  CDR3 for alpha chain variable domain of TCR clone 321669 (TRAV3, TRAJ21)
CAVGNSNKFYF

SEQ ID NO: 643338 - protein, 13 aa, Homo sapiens
  CDR3 for beta chain variable domain of TCR clone 321669 (TRBV7-9, TRBJ1-2)
CASSLKQNYGYTF

SEQ ID NO: 643339 - protein, 11 aa, Homo sapiens
  CDR3 for alpha chain variable domain of TCR clone 321670 (TRAV1-1, TRAJ23)
CAVRQGGKLTF

SEQ ID NO: 643340 - protein, 13 aa, Homo sapiens
  CDR3 for beta chain variable domain of TCR clone 321670 (TRBV15, TRBJ1-6)
CATSGGLNPPLHF

SEQ ID NO: 643341 - protein, 12 aa, Homo sapiens
  CDR3 for alpha chain variable domain of TCR clone 321671 (TRAV26-2, TRAJ21)
CILKGNFNKFCF

SEQ ID NO: 643342 - protein, 16 aa, Homo sapiens
  CDR3 for beta chain variable domain of TCR clone 321671 (TRBV7-3, TRBJ2-1)
RASSLLVGELVDVQFF

SEQ ID NO: 643343 - protein, 14 aa, Homo sapiens
  CDR3 for alpha chain variable domain of TCR clone 321672 (TRAV30, TRAJ33)
CGTVAPRSNYQLIW

SEQ ID NO: 643344 - protein, 14 aa, Homo sapiens
  CDR3 for beta chain variable domain of TCR clone 321672 (TRBV7-2, TRBJ1-1)
CASSFLTGTTEAFF

SEQ ID NO: 643345 - protein, 17 aa, Homo sapiens
  CDR3 for alpha chain variable domain of TCR clone 321673 (TRAV17, TRAJ28)
CATDPRRGGAGSYQLTF

SEQ ID NO: 643346 - protein, 15 aa, Homo sapiens
  CDR3 for beta chain variable domain of TCR clone 321673 (TRBV18, TRBJ2-7)
CASSPSSTGNYEQYF

SEQ ID NO: 643347 - protein, 13 aa, Homo sapiens
  CDR3 for alpha chain variable domain of TCR clone 321674 (TRAV2, TRAJ29)
FAAGNSGNTPLVF

SEQ ID NO: 643348 - protein, 16 aa, Homo sapiens
  CDR3 for beta chain variable domain of TCR clone 321674 (TRBV7-9, TRBJ1-2)
CASSPGGGAINYGYTF

SEQ ID NO: 643349 - protein, 11 aa, Homo sapiens
  CDR3 for alpha chain variable domain of TCR clone 321675 (TRAV2, TRAJ33)
CAVDSNYQLIW

SEQ ID NO: 643350 - protein, 17 aa, Homo sapiens
  CDR3 for beta chain variable domain of TCR clone 321675 (TRBV20-1, TRBJ2-3)
CSARDGWNAKERVTQYF

SEQ ID NO: 643351 - protein, 13 aa, Homo sapiens
  CDR3 for alpha chain variable domain of TCR clone 321676 (TRAV12-3, TRAJ40)
CAMSARGTYKYIF

SEQ ID NO: 643352 - protein, 15 aa, Homo sapiens
  CDR3 for beta chain variable domain of TCR clone 321676 (TRBV7-9, TRBJ1-5)
CASSQGHQPNQPQHF

SEQ ID NO: 643353 - protein, 10 aa, Homo sapiens
  CDR3 for alpha chain variable domain of TCR clone 321677 (TRAV8-4, TRAJ43)
CAVSADDMRF

SEQ ID NO: 643354 - protein, 12 aa, Homo sapiens
  CDR3 for beta chain variable domain of TCR clone 321677 (TRBV11-2, TRBJ2-7)
CASSLPTYEQYF

SEQ ID NO: 643355 - protein, 14 aa, Homo sapiens
  CDR3 for alpha chain variable domain of TCR clone 321678 (TRAV13-2, TRAJ17)
CAENSKAAGNKLTF

SEQ ID NO: 643356 - protein, 15 aa, Homo sapiens
  CDR3 for beta chain variable domain of TCR clone 321678 (TRBV20-1, TRBJ2-7)
CSARDRVSGLDEQYF

SEQ ID NO: 643357 - protein, 17 aa, Homo sapiens
  CDR3 for alpha chain variable domain of TCR clone 321679 (TRAV3, TRAJ42)
CAVRDRAYGGSQGNLIF

SEQ ID NO: 643358 - protein, 13 aa, Homo sapiens
  CDR3 for beta chain variable domain of TCR clone 321679 (TRBV10-3, TRBJ2-7)
CASKLAVNYEQYF

SEQ ID NO: 643359 - protein, 13 aa, Homo sapiens
  CDR3 for alpha chain variable domain of TCR clone 321680 (TRAV35, TRAJ42)
CAGFPGNQGNLIF

SEQ ID NO: 643360 - protein, 14 aa, Homo sapiens
  CDR3 for beta chain variable domain of TCR clone 321680 (TRBV29-1, TRBJ2-2)
CSVLAETNTGELFF

SEQ ID NO: 643361 - protein, 14 aa, Homo sapiens
  CDR3 for alpha chain variable domain of TCR clone 321681 (TRAV17, TRAJ31)
CATDAEDNNARLMV

SEQ ID NO: 643362 - protein, 16 aa, Homo sapiens
  CDR3 for beta chain variable domain of TCR clone 321681 (TRBV24-1, TRBJ2-5)
CATRLAEDCWEKTQYF

SEQ ID NO: 643363 - protein, 13 aa, Homo sapiens
  CDR3 for alpha chain variable domain of TCR clone 321682 (TRAV17, TRAJ9)
CATFLTGGFKTIF

SEQ ID NO: 643364 - protein, 16 aa, Homo sapiens
  CDR3 for beta chain variable domain of TCR clone 321682 (TRBV5-7, TRBJ1-4)
CASSPSGGLKTGKLFF

SEQ ID NO: 643365 - protein, 14 aa, Homo sapiens
  CDR3 for alpha chain variable domain of TCR clone 321683 (TRAV12-3, TRAJ10)
SHLPLTGGGHKLTF

SEQ ID NO: 643366 - protein, 15 aa, Homo sapiens
  CDR3 for beta chain variable domain of TCR clone 321683 (TRBV4-1, TRBJ1-4)
CASSDTGGTNEKLFF

SEQ ID NO: 643367 - protein, 13 aa, Homo sapiens
  CDR3 for alpha chain variable domain of TCR clone 321684 (TRAV12-1, TRAJ34)
CVVTGYNTDKLIF

SEQ ID NO: 643368 - protein, 13 aa, Homo sapiens
  CDR3 for beta chain variable domain of TCR clone 321684 (TRBV28, TRBJ2-7)
CASKAGGVYEQYV

SEQ ID NO: 643369 - protein, 13 aa, Homo sapiens
  CDR3 for alpha chain variable domain of TCR clone 321685 (TRAV12-3, TRAJ5)
FAMRPTGRRALTF

SEQ ID NO: 643370 - protein, 13 aa, Homo sapiens
  CDR3 for beta chain variable domain of TCR clone 321685 (TRBV2, TRBJ2-7)
CASSVVEAYEQYF

SEQ ID NO: 643371 - protein, 13 aa, Homo sapiens
  CDR3 for alpha chain variable domain of TCR clone 321686 (TRAV2, TRAJ23)
CAVMGNQGGKLIF

SEQ ID NO: 643372 - protein, 13 aa, Homo sapiens
  CDR3 for beta chain variable domain of TCR clone 321686 (TRBV2, TRBJ2-7)
CASSVGGSGEQYF

SEQ ID NO: 643373 - protein, 11 aa, Homo sapiens
  CDR3 for alpha chain variable domain of TCR clone 321687 (TRAV29/DV5, TRAJ30)
CAVREVDKIIF

SEQ ID NO: 643374 - protein, 14 aa, Homo sapiens
  CDR3 for beta chain variable domain of TCR clone 321687 (TRBV19, TRBJ2-1)
CASPTVVLSGEQFF

SEQ ID NO: 643375 - protein, 16 aa, Homo sapiens
  CDR3 for alpha chain variable domain of TCR clone 321688 (TRAV8-2, TRAJ7)
CVVSEGPYYGNTRLAF

SEQ ID NO: 643376 - protein, 13 aa, Homo sapiens
  CDR3 for beta chain variable domain of TCR clone 321688 (TRBV19, TRBJ2-1)
CASSMYRVNEQFF

SEQ ID NO: 643377 - protein, 15 aa, Homo sapiens
  CDR3 for alpha chain variable domain of TCR clone 321689 (TRAV35, TRAJ40)
CAGQLGTSGTYRYIF

SEQ ID NO: 643378 - protein, 11 aa, Homo sapiens
  CDR3 for beta chain variable domain of TCR clone 321689 (TRBV23-1, TRBJ2-7)
SSSGTGLEQYF

SEQ ID NO: 643379 - protein, 10 aa, Homo sapiens
  CDR3 for alpha chain variable domain of TCR clone 321690 (TRAV16, TRAJ26)
CAPEELWSEF

SEQ ID NO: 643380 - protein, 15 aa, Homo sapiens
  CDR3 for beta chain variable domain of TCR clone 321690 (TRBV7-2, TRBJ2-3)
CASSLTGSSTDTQYF

SEQ ID NO: 643381 - protein, 15 aa, Homo sapiens
  CDR3 for alpha chain variable domain of TCR clone 321691 (TRAV23/DV6, TRAJ18)
CAARYRGSTLGRLCF

SEQ ID NO: 643382 - protein, 13 aa, Homo sapiens
  CDR3 for beta chain variable domain of TCR clone 321691 (TRBV7-2, TRBJ2-7)
CASSSPSGSEQYF

SEQ ID NO: 643383 - protein, 12 aa, Homo sapiens
  CDR3 for alpha chain variable domain of TCR clone 321692 (TRAV12-1, TRAJ40)
CVVYSGTYKYIF

SEQ ID NO: 643384 - protein, 18 aa, Homo sapiens
  CDR3 for beta chain variable domain of TCR clone 321692 (TRBV11-2, TRBJ2-3)
CASSFGGASRWAPNTQYF

SEQ ID NO: 643385 - protein, 14 aa, Homo sapiens
  CDR3 for alpha chain variable domain of TCR clone 321693 (TRAV12-3, TRAJ10)
SHLPLPGGGNKLTF

SEQ ID NO: 643386 - protein, 14 aa, Homo sapiens
  CDR3 for beta chain variable domain of TCR clone 321693 (TRBV12-4, TRBJ1-1)
CASSLGTGGTEAFF

SEQ ID NO: 643387 - protein, 13 aa, Homo sapiens
  CDR3 for alpha chain variable domain of TCR clone 321694 (TRAV12-3, TRAJ7)
CAMTPYGNNRLAF

SEQ ID NO: 643388 - protein, 15 aa, Homo sapiens
  CDR3 for beta chain variable domain of TCR clone 321694 (TRBV6-1, TRBJ2-3)
CASSERGGITDTQYF

SEQ ID NO: 643389 - protein, 12 aa, Homo sapiens
  CDR3 for alpha chain variable domain of TCR clone 321695 (TRAV17, TRAJ30)
GATDARDDKIIF

SEQ ID NO: 643390 - protein, 15 aa, Homo sapiens
  CDR3 for beta chain variable domain of TCR clone 321695 (TRBV4-1, TRBJ2-1)
CASSQGGELYNEQFF

SEQ ID NO: 643391 - protein, 14 aa, Homo sapiens
  CDR3 for alpha chain variable domain of TCR clone 321696 (TRAV8-4, TRAJ48)
CAVSETFGNEKLTF

SEQ ID NO: 643392 - protein, 11 aa, Homo sapiens
  CDR3 for beta chain variable domain of TCR clone 321696 (TRBV29-1, TRBJ2-5)
CGEDRTGTQYF

SEQ ID NO: 643393 - protein, 12 aa, Homo sapiens
  CDR3 for alpha chain variable domain of TCR clone 321697 (TRAV27, TRAJ13)
CAGVGGYQKVTF

SEQ ID NO: 643394 - protein, 16 aa, Homo sapiens
  CDR3 for beta chain variable domain of TCR clone 321697 (TRBV28, TRBJ2-1)
CASSSSYSGSLNEQFF

SEQ ID NO: 643395 - protein, 16 aa, Homo sapiens
  CDR3 for alpha chain variable domain of TCR clone 321698 (TRAV30, TRAJ24)
CGTEIVDADSWGKFQF

SEQ ID NO: 643396 - protein, 13 aa, Homo sapiens
  CDR3 for beta chain variable domain of TCR clone 321698 (TRBV7-9, TRBJ1-2)
CVSSLKQNYGYTF

SEQ ID NO: 643397 - protein, 11 aa, Homo sapiens
  CDR3 for alpha chain variable domain of TCR clone 321699 (TRAV2, TRAJ20)
CAVKNDYKLSF

SEQ ID NO: 643398 - protein, 14 aa, Homo sapiens
  CDR3 for beta chain variable domain of TCR clone 321699 (TRBV19, TRBJ2-5)
CASSMTGQQETQYF

SEQ ID NO: 643399 - protein, 17 aa, Homo sapiens
  CDR3 for alpha chain variable domain of TCR clone 321700 (TRAV17, TRAJ52)
CATERPSGGTSYGKLKF

SEQ ID NO: 643400 - protein, 15 aa, Homo sapiens
  CDR3 for beta chain variable domain of TCR clone 321700 (TRBV5-1, TRBJ2-1)
CASSLVANSYNEQFF

SEQ ID NO: 643401 - protein, 14 aa, Homo sapiens
  CDR3 for alpha chain variable domain of TCR clone 321701 (TRAV12-2, TRAJ17)
CAVLFKAAGNKLTF

SEQ ID NO: 643402 - protein, 13 aa, Homo sapiens
  CDR3 for beta chain variable domain of TCR clone 321701 (TRBV12-4, TRBJ2-2)
CASSPLPPGELFF

SEQ ID NO: 643403 - protein, 15 aa, Homo sapiens
  CDR3 for alpha chain variable domain of TCR clone 321702 (TRAV25, TRAJ53)
CAATGGGGSNYKLTF

SEQ ID NO: 643404 - protein, 15 aa, Homo sapiens
  CDR3 for beta chain variable domain of TCR clone 321702 (TRBV18, TRBJ2-1)
CASSPPSASYNEQFF

SEQ ID NO: 643405 - protein, 14 aa, Homo sapiens
  CDR3 for alpha chain variable domain of TCR clone 321703 (TRAV1-2, TRAJ16)
WAVNRFSDGQKLLF

SEQ ID NO: 643406 - protein, 15 aa, Homo sapiens
  CDR3 for beta chain variable domain of TCR clone 321703 (TRBV11-3, TRBJ2-3)
CASLKDGREGDTQYF

SEQ ID NO: 643407 - protein, 12 aa, Homo sapiens
  CDR3 for alpha chain variable domain of TCR clone 321704 (TRAV1-2, TRAJ9)
CAGYTGGFKTIF

SEQ ID NO: 643408 - protein, 15 aa, Homo sapiens
  CDR3 for beta chain variable domain of TCR clone 321704 (TRBV11-2, TRBJ2-1)
YASSPAGQSLNEQFF

SEQ ID NO: 643409 - protein, 16 aa, Homo sapiens
  CDR3 for alpha chain variable domain of TCR clone 321705 (TRAV8-4, TRAJ5)
CAVSLLTDTGRRALTF

SEQ ID NO: 643410 - protein, 14 aa, Homo sapiens
  CDR3 for beta chain variable domain of TCR clone 321705 (TRBV19, TRBJ1-6)
CASSTDGWNSPLHF

SEQ ID NO: 643411 - protein, 13 aa, Homo sapiens
  CDR3 for alpha chain variable domain of TCR clone 321706 (TRAV12-3, TRAJ54)
CALVPQGAQKLVF

SEQ ID NO: 643412 - protein, 15 aa, Homo sapiens
  CDR3 for beta chain variable domain of TCR clone 321706 (TRBV4-1, TRBJ2-2)
CASSQDARGTGELFS

SEQ ID NO: 643413 - protein, 13 aa, Homo sapiens
  CDR3 for alpha chain variable domain of TCR clone 321707 (TRAV8-3, TRAJ44)
CAVVPGTASKLTF

SEQ ID NO: 643414 - protein, 15 aa, Homo sapiens
  CDR3 for beta chain variable domain of TCR clone 321707 (TRBV15, TRBJ1-2)
CATSRVRASGSGYTF

SEQ ID NO: 643415 - protein, 16 aa, Homo sapiens
  CDR3 for alpha chain variable domain of TCR clone 321708 (TRAV30, TRAJ24)
CGTEIVDANSWGKFQF

SEQ ID NO: 643416 - protein, 12 aa, Homo sapiens
  CDR3 for beta chain variable domain of TCR clone 321708 (TRBV11-2, TRBJ2-2)
CASSRGGGELFF

SEQ ID NO: 643417 - protein, 14 aa, Homo sapiens
  CDR3 for alpha chain variable domain of TCR clone 321709 (TRAV12-3, TRAJ10)
SHLPLTGGGNNLTF

SEQ ID NO: 643418 - protein, 15 aa, Homo sapiens
  CDR3 for beta chain variable domain of TCR clone 321709 (TRBV7-3, TRBJ2-2)
CASSETGQGTGELFF

SEQ ID NO: 643419 - protein, 14 aa, Homo sapiens
  CDR3 for alpha chain variable domain of TCR clone 321710 (TRAV1-2, TRAJ16)
CAVNRFSDGRKLLF

SEQ ID NO: 643420 - protein, 12 aa, Homo sapiens
  CDR3 for beta chain variable domain of TCR clone 321710 (TRBV7-9, TRBJ2-7)
CASSLEGYEQYF

SEQ ID NO: 643421 - protein, 14 aa, Homo sapiens
  CDR3 for alpha chain variable domain of TCR clone 321711 (TRAV38-1, TRAJ45)
CAYYSGGGADGLTF

SEQ ID NO: 643422 - protein, 17 aa, Homo sapiens
  CDR3 for beta chain variable domain of TCR clone 321711 (TRBV7-9, TRBJ2-6)
CASSFGAGYSGANVLTF

SEQ ID NO: 643423 - protein, 13 aa, Homo sapiens
  CDR3 for alpha chain variable domain of TCR clone 321712 (TRAV8-3, TRAJ28)
CAVGAVGSYQLTF

SEQ ID NO: 643424 - protein, 13 aa, Homo sapiens
  CDR3 for beta chain variable domain of TCR clone 321712 (TRBV4-1, TRBJ2-2)
CASSQENTWELFF

SEQ ID NO: 643425 - protein, 12 aa, Homo sapiens
  CDR3 for alpha chain variable domain of TCR clone 321713 (TRAV12-3, TRAJ4)
CAMTGAGTRLAV

SEQ ID NO: 643426 - protein, 14 aa, Homo sapiens
  CDR3 for beta chain variable domain of TCR clone 321713 (TRBV10-3, TRBJ1-1)
FAISDTDRGVEAFF

SEQ ID NO: 643427 - protein, 12 aa, Homo sapiens
  CDR3 for alpha chain variable domain of TCR clone 321714 (TRAV1-1, TRAJ8)
CAGGTGFQKLVF

SEQ ID NO: 643428 - protein, 16 aa, Homo sapiens
  CDR3 for beta chain variable domain of TCR clone 321714 (TRBV7-9, TRBJ2-7)
CASSNHGGQEKYEQYF

SEQ ID NO: 643429 - protein, 12 aa, Homo sapiens
  CDR3 for alpha chain variable domain of TCR clone 321715 (TRAV14/DV4, TRAJ50)
CAMREGNSKVIF

SEQ ID NO: 643430 - protein, 16 aa, Homo sapiens
  CDR3 for beta chain variable domain of TCR clone 321715 (TRBV28, TRBJ2-3)
CDSSLSGQTSTDTQYF

SEQ ID NO: 643431 - protein, 14 aa, Homo sapiens
  CDR3 for alpha chain variable domain of TCR clone 321716 (TRAV1-2, TRAJ16)
CAVNRFSDGQKLLF

SEQ ID NO: 643432 - protein, 15 aa, Homo sapiens
  CDR3 for beta chain variable domain of TCR clone 321716 (TRBV6-3, TRBJ2-3)
CASSTRTFYTDTQYF

SEQ ID NO: 643433 - protein, 14 aa, Homo sapiens
  CDR3 for alpha chain variable domain of TCR clone 321717 (TRAV2, TRAJ11)
CAVVPNSGYSTLTF

SEQ ID NO: 643434 - protein, 15 aa, Homo sapiens
  CDR3 for beta chain variable domain of TCR clone 321717 (TRBV4-1, TRBJ1-3)
CAGSQDLRVGNTMYF

SEQ ID NO: 643435 - protein, 13 aa, Homo sapiens
  CDR3 for alpha chain variable domain of TCR clone 321718 (TRAV21, TRAJ27)
CTARPGNAGKSTF

SEQ ID NO: 643436 - protein, 13 aa, Homo sapiens
  CDR3 for beta chain variable domain of TCR clone 321718 (TRBV20-1, TRBJ1-1)
CSARGGGNTEAFF

SEQ ID NO: 643437 - protein, 15 aa, Homo sapiens
  CDR3 for alpha chain variable domain of TCR clone 321719 (TRAV23/DV6, TRAJ18)
CAARYRASTLGRLYF

SEQ ID NO: 643438 - protein, 13 aa, Homo sapiens
  CDR3 for beta chain variable domain of TCR clone 321719 (TRBV7-2, TRBJ2-7)
CASSSPSGSEQYF

SEQ ID NO: 643439 - protein, 14 aa, Homo sapiens
  CDR3 for alpha chain variable domain of TCR clone 321720 (TRAV16, TRAJ42)
CALLAGGSQGNLIF

SEQ ID NO: 643440 - protein, 15 aa, Homo sapiens
  CDR3 for beta chain variable domain of TCR clone 321720 (TRBV28, TRBJ2-1)
CASSIIAGGRSEQFF

SEQ ID NO: 643441 - protein, 12 aa, Homo sapiens
  CDR3 for alpha chain variable domain of TCR clone 321721 (TRAV22, TRAJ22)
CAPGGSARQLTF

SEQ ID NO: 643442 - protein, 10 aa, Homo sapiens
  CDR3 for beta chain variable domain of TCR clone 321721 (TRBV10-3, TRBJ2-7)
CAAASNEQYF

SEQ ID NO: 643443 - protein, 13 aa, Homo sapiens
  CDR3 for alpha chain variable domain of TCR clone 321722 (TRAV17, TRAJ40)
CAGALGGTYQYIF

SEQ ID NO: 643444 - protein, 16 aa, Homo sapiens
  CDR3 for beta chain variable domain of TCR clone 321722 (TRBV11-2, TRBJ1-2)
CASSLDTGGADYGYTF

SEQ ID NO: 643445 - protein, 13 aa, Homo sapiens
  CDR3 for alpha chain variable domain of TCR clone 321723 (TRAV27, TRAJ27)
CAGKDTNAGKSTF

SEQ ID NO: 643446 - protein, 12 aa, Homo sapiens
  CDR3 for beta chain variable domain of TCR clone 321723 (TRBV11-2, TRBJ2-2)
CASSLGGGELFF

SEQ ID NO: 643447 - protein, 14 aa, Homo sapiens
  CDR3 for alpha chain variable domain of TCR clone 321724 (TRAV2, TRAJ37)
CSVDFTSNKGTLIF

SEQ ID NO: 643448 - protein, 15 aa, Homo sapiens
  CDR3 for beta chain variable domain of TCR clone 321724 (TRBV20-1, TRBJ1-1)
CSASRGVTGNTEAFF

SEQ ID NO: 643449 - protein, 14 aa, Homo sapiens
  CDR3 for alpha chain variable domain of TCR clone 321725 (TRAV12-3, TRAJ10)
SHLPLTGGGNTLTF

SEQ ID NO: 643450 - protein, 15 aa, Homo sapiens
  CDR3 for beta chain variable domain of TCR clone 321725 (TRBV25-1, TRBJ2-4)
CASSETESAKNIQYF

SEQ ID NO: 643451 - protein, 13 aa, Homo sapiens
  CDR3 for alpha chain variable domain of TCR clone 321726 (TRAV8-1, TRAJ30)
CAVIMNRDDKIIF

SEQ ID NO: 643452 - protein, 16 aa, Homo sapiens
  CDR3 for beta chain variable domain of TCR clone 321726 (TRBV4-2, TRBJ2-7)
CASSQDGVERGYEQYF

SEQ ID NO: 643453 - protein, 12 aa, Homo sapiens
  CDR3 for alpha chain variable domain of TCR clone 321727 (TRAV29/DV5, TRAJ49)
CAATDPGNQFYF

SEQ ID NO: 643454 - protein, 15 aa, Homo sapiens
  CDR3 for beta chain variable domain of TCR clone 321727 (TRBV19, TRBJ2-2)
CASRQTGADTGELFF

SEQ ID NO: 643455 - protein, 14 aa, Homo sapiens
  CDR3 for alpha chain variable domain of TCR clone 321728 (TRAV12-2, TRAJ13)
CAVKKTGGYQNVTF

SEQ ID NO: 643456 - protein, 13 aa, Homo sapiens
  CDR3 for beta chain variable domain of TCR clone 321728 (TRBV6-5, TRBJ2-5)
CATAPSPQETQYF

SEQ ID NO: 643457 - protein, 12 aa, Homo sapiens
  CDR3 for alpha chain variable domain of TCR clone 321729 (TRAV17, TRAJ12)
CATLRSSYKLIF

SEQ ID NO: 643458 - protein, 14 aa, Homo sapiens
  CDR3 for beta chain variable domain of TCR clone 321729 (TRBV20-1, TRBJ2-1)
CSPNDEASYNEQFF

SEQ ID NO: 643459 - protein, 14 aa, Homo sapiens
  CDR3 for alpha chain variable domain of TCR clone 321730 (TRAV12-3, TRAJ10)
SHLPLTGGGNKLTF

SEQ ID NO: 643460 - protein, 16 aa, Homo sapiens
  CDR3 for beta chain variable domain of TCR clone 321730 (TRBV5-6, TRBJ1-5)
CASSLQQDREYQPQHF

SEQ ID NO: 643461 - protein, 14 aa, Homo sapiens
  CDR3 for alpha chain variable domain of TCR clone 321731 (TRAV29/DV5, TRAJ36)
CAARRTSGANNLFF

SEQ ID NO: 643462 - protein, 14 aa, Homo sapiens
  CDR3 for beta chain variable domain of TCR clone 321731 (TRBV12-5, TRBJ2-5)
CASGSRTHQETQYF

SEQ ID NO: 643463 - protein, 16 aa, Homo sapiens
  CDR3 for alpha chain variable domain of TCR clone 321732 (TRAV30, TRAJ24)
CGTEIVDADSWGKFQF

SEQ ID NO: 643464 - protein, 14 aa, Homo sapiens
  CDR3 for beta chain variable domain of TCR clone 321732 (TRBV18, TRBJ2-3)
CASSPRTSPDTQYF

SEQ ID NO: 643465 - protein, 17 aa, Homo sapiens
  CDR3 for alpha chain variable domain of TCR clone 321733 (TRAV12-2, TRAJ4)
CAVNVRPVSGGYNKLIF

SEQ ID NO: 643466 - protein, 17 aa, Homo sapiens
  CDR3 for beta chain variable domain of TCR clone 321733 (TRBV7-2, TRBJ2-3)
CASSLEARGTSTDTQYF

SEQ ID NO: 643467 - protein, 13 aa, Homo sapiens
  CDR3 for alpha chain variable domain of TCR clone 321734 (TRAV8-3, TRAJ28)
CAVGAVGSYQLTF

SEQ ID NO: 643468 - protein, 14 aa, Homo sapiens
  CDR3 for beta chain variable domain of TCR clone 321734 (TRBV7-2, TRBJ2-7)
CASMSQGAAYEQYF

SEQ ID NO: 643469 - protein, 15 aa, Homo sapiens
  CDR3 for alpha chain variable domain of TCR clone 321735 (TRAV35, TRAJ23)
CAGPLGNNQGGKLMF

SEQ ID NO: 643470 - protein, 14 aa, Homo sapiens
  CDR3 for beta chain variable domain of TCR clone 321735 (TRBV7-9, TRBJ1-1)
CASTPLQSYTEAFF

SEQ ID NO: 643471 - protein, 14 aa, Homo sapiens
  CDR3 for alpha chain variable domain of TCR clone 321736 (TRAV13-2, TRAJ17)
CAENSKAAGNKLTF

SEQ ID NO: 643472 - protein, 16 aa, Homo sapiens
  CDR3 for beta chain variable domain of TCR clone 321736 (TRBV28, TRBJ1-5)
CASSLTGQGWNQPQHF

SEQ ID NO: 643473 - protein, 14 aa, Homo sapiens
  CDR3 for alpha chain variable domain of TCR clone 321737 (TRAV26-1, TRAJ39)
CIVRGSRAGNMLTF

SEQ ID NO: 643474 - protein, 15 aa, Homo sapiens
  CDR3 for beta chain variable domain of TCR clone 321737 (TRBV7-9, TRBJ1-6)
CASSSPGRGNSPLHF

SEQ ID NO: 643475 - protein, 15 aa, Homo sapiens
  CDR3 for alpha chain variable domain of TCR clone 321738 (TRAV3, TRAJ22)
CAVRDRGGSARQLTF

SEQ ID NO: 643476 - protein, 17 aa, Homo sapiens
  CDR3 for beta chain variable domain of TCR clone 321738 (TRBV13, TRBJ2-3)
CASTLSRVAGGRNTQYF

SEQ ID NO: 643477 - protein, 15 aa, Homo sapiens
  CDR3 for alpha chain variable domain of TCR clone 321739 (TRAV26-1, TRAJ17)
CIFRVVKAAGNKLNF

SEQ ID NO: 643478 - protein, 16 aa, Homo sapiens
  CDR3 for beta chain variable domain of TCR clone 321739 (TRBV7-9, TRBJ2-1)
CASSLVSGPSYNEQFF

SEQ ID NO: 643479 - protein, 15 aa, Homo sapiens
  CDR3 for alpha chain variable domain of TCR clone 321740 (TRAV13-1, TRAJ44)
CAASRGGGTASKLTF

SEQ ID NO: 643480 - protein, 15 aa, Homo sapiens
  CDR3 for beta chain variable domain of TCR clone 321740 (TRBV18, TRBJ2-1)
CASSPPSASYNEQSF

SEQ ID NO: 643481 - protein, 16 aa, Homo sapiens
  CDR3 for alpha chain variable domain of TCR clone 321741 (TRAV3, TRAJ37)
CAVRGKGSGNTGKLIF

SEQ ID NO: 643482 - protein, 13 aa, Homo sapiens
  CDR3 for beta chain variable domain of TCR clone 321741 (TRBV19, TRBJ1-2)
CASSVPGQDGCAF

SEQ ID NO: 643483 - protein, 19 aa, Homo sapiens
  CDR3 for alpha chain variable domain of TCR clone 321742 (TRAV1-2, TRAJ26)
CLLPLCCERPDNYSQNFVF

SEQ ID NO: 643484 - protein, 17 aa, Homo sapiens
  CDR3 for beta chain variable domain of TCR clone 321742 (TRBV13, TRBJ2-3)
CASSLSRVAGGRNTQYF

SEQ ID NO: 643485 - protein, 11 aa, Homo sapiens
  CDR3 for alpha chain variable domain of TCR clone 321743 (TRAV1-2, TRAJ34)
CAGYNPDKLIF

SEQ ID NO: 643486 - protein, 16 aa, Homo sapiens
  CDR3 for beta chain variable domain of TCR clone 321743 (TRBV10-3, TRBJ2-1)
CAISGVGDGGGGEQFF

SEQ ID NO: 643487 - protein, 13 aa, Homo sapiens
  CDR3 for alpha chain variable domain of TCR clone 321744 (TRAV17, TRAJ54)
CATGIQGAQKLVF

SEQ ID NO: 643488 - protein, 15 aa, Homo sapiens
  CDR3 for beta chain variable domain of TCR clone 321744 (TRBV13, TRBJ2-1)
CASSLLSGLNNEQFF

SEQ ID NO: 643489 - protein, 14 aa, Homo sapiens
  CDR3 for alpha chain variable domain of TCR clone 321745 (TRAV20, TRAJ22)
CAVALDGSARQLTF

SEQ ID NO: 643490 - protein, 15 aa, Homo sapiens
  CDR3 for beta chain variable domain of TCR clone 321745 (TRBV7-2, TRBJ1-1)
CASSFAGDRDTEAFF

SEQ ID NO: 643491 - protein, 13 aa, Homo sapiens
  CDR3 for alpha chain variable domain of TCR clone 321746 (TRAV13-2, TRAJ48)
CAEMDFGNVKLTF

SEQ ID NO: 643492 - protein, 15 aa, Homo sapiens
  CDR3 for beta chain variable domain of TCR clone 321746 (TRBV7-9, TRBJ1-6)
CASSSPGRGNSPLHF

SEQ ID NO: 643493 - protein, 15 aa, Homo sapiens
  CDR3 for alpha chain variable domain of TCR clone 321747 (TRAV20, TRAJ4)
CAVEGSSGGYNRLLF

SEQ ID NO: 643494 - protein, 14 aa, Homo sapiens
  CDR3 for beta chain variable domain of TCR clone 321747 (TRBV7-8, TRBJ2-7)
CASTLGGALGEQYF

SEQ ID NO: 643495 - protein, 13 aa, Homo sapiens
  CDR3 for alpha chain variable domain of TCR clone 321748 (TRAV16, TRAJ58)
CALRWARGSRLTF

SEQ ID NO: 643496 - protein, 13 aa, Homo sapiens
  CDR3 for beta chain variable domain of TCR clone 321748 (TRBV12-5, TRBJ2-3)
CASGNRQSDTQYF

SEQ ID NO: 643497 - protein, 14 aa, Homo sapiens
  CDR3 for alpha chain variable domain of TCR clone 321749 (TRAV12-2, TRAJ17)
CAVNIKAAGNKLTF

SEQ ID NO: 643498 - protein, 14 aa, Homo sapiens
  CDR3 for beta chain variable domain of TCR clone 321749 (TRBV20-1, TRBJ1-1)
SAVLHLGGGTEAFF

SEQ ID NO: 643499 - protein, 14 aa, Homo sapiens
  CDR3 for alpha chain variable domain of TCR clone 321750 (TRAV2, TRAJ45)
CAVEDLFQEDVLTD

SEQ ID NO: 643500 - protein, 16 aa, Homo sapiens
  CDR3 for beta chain variable domain of TCR clone 321750 (TRBV19, TRBJ2-2)
CASRSPGTGATGELFF

SEQ ID NO: 643501 - protein, 12 aa, Homo sapiens
  CDR3 for alpha chain variable domain of TCR clone 321751 (TRAV13-2, TRAJ39)
CAESRPVNMLTF

SEQ ID NO: 643502 - protein, 15 aa, Homo sapiens
  CDR3 for beta chain variable domain of TCR clone 321751 (TRBV9, TRBJ1-6)
CASSVAGTGDSPLHF

SEQ ID NO: 643503 - protein, 14 aa, Homo sapiens
  CDR3 for alpha chain variable domain of TCR clone 321752 (TRAV17, TRAJ57)
CATDPQGRSEKLVF

SEQ ID NO: 643504 - protein, 16 aa, Homo sapiens
  CDR3 for beta chain variable domain of TCR clone 321752 (TRBV13, TRBJ2-2)
CASSPRTGEHTGELFF

SEQ ID NO: 643505 - protein, 17 aa, Homo sapiens
  CDR3 for alpha chain variable domain of TCR clone 321753 (TRAV13-1, TRAJ52)
CAASSGAGGTRYGKLTF

SEQ ID NO: 643506 - protein, 15 aa, Homo sapiens
  CDR3 for beta chain variable domain of TCR clone 321753 (TRBV28, TRBJ2-4)
CAAGSGTLLMGIQYF

SEQ ID NO: 643507 - protein, 14 aa, Homo sapiens
  CDR3 for alpha chain variable domain of TCR clone 321754 (TRAV36/DV7, TRAJ46)
CAVDFKSSGDKLTF

SEQ ID NO: 643508 - protein, 15 aa, Homo sapiens
  CDR3 for beta chain variable domain of TCR clone 321754 (TRBV7-2, TRBJ2-7)
CASSLKGALTYEQYF

SEQ ID NO: 643509 - protein, 15 aa, Homo sapiens
  CDR3 for alpha chain variable domain of TCR clone 321755 (TRAV13-2, TRAJ10)
CAENKIGGGGNKLTF

SEQ ID NO: 643510 - protein, 15 aa, Homo sapiens
  CDR3 for beta chain variable domain of TCR clone 321755 (TRBV5-1, TRBJ1-2)
CASSPGDRGSYGCTF

SEQ ID NO: 643511 - protein, 15 aa, Homo sapiens
  CDR3 for alpha chain variable domain of TCR clone 321756 (TRAV8-6, TRAJ23)
CAVSPRGNQGGKLIF

SEQ ID NO: 643512 - protein, 14 aa, Homo sapiens
  CDR3 for beta chain variable domain of TCR clone 321756 (TRBV19, TRBJ2-5)
CASSMTGQQETQYF

SEQ ID NO: 643513 - protein, 11 aa, Homo sapiens
  CDR3 for alpha chain variable domain of TCR clone 321757 (TRAV13-2, TRAJ23)
CAESPRGKLIF

SEQ ID NO: 643514 - protein, 19 aa, Homo sapiens
  CDR3 for beta chain variable domain of TCR clone 321757 (TRBV25-1, TRBJ2-2)
CAILVYRVDRGRKTGELFF

SEQ ID NO: 643515 - protein, 11 aa, Homo sapiens
  CDR3 for alpha chain variable domain of TCR clone 321758 (TRAV2, TRAJ33)
CAVESNYQLIW

SEQ ID NO: 643516 - protein, 13 aa, Homo sapiens
  CDR3 for beta chain variable domain of TCR clone 321758 (TRBV7-7, TRBJ2-1)
CASSLYLGNEQFF

SEQ ID NO: 643517 - protein, 16 aa, Homo sapiens
  CDR3 for alpha chain variable domain of TCR clone 321759 (TRAV16, TRAJ21)
CACGWATTSTNFTLDL

SEQ ID NO: 643518 - protein, 15 aa, Homo sapiens
  CDR3 for beta chain variable domain of TCR clone 321759 (TRBV19, TRBJ2-1)
CASSIQATSYNAQFF

SEQ ID NO: 643519 - protein, 13 aa, Homo sapiens
  CDR3 for alpha chain variable domain of TCR clone 321760 (TRAV2, TRAJ20)
CDVEDPSEYKLSF

SEQ ID NO: 643520 - protein, 16 aa, Homo sapiens
  CDR3 for beta chain variable domain of TCR clone 321760 (TRBV25-1, TRBJ2-7)
CASSELTGGGIYEQYF

SEQ ID NO: 643521 - protein, 11 aa, Homo sapiens
  CDR3 for alpha chain variable domain of TCR clone 321761 (TRAV21, TRAJ39)
LLVTAGNMLTF

SEQ ID NO: 643522 - protein, 16 aa, Homo sapiens
  CDR3 for beta chain variable domain of TCR clone 321761 (TRBV9, TRBJ2-7)
CASSVGLGGGTYEQYF

SEQ ID NO: 643523 - protein, 12 aa, Homo sapiens
  CDR3 for alpha chain variable domain of TCR clone 321762 (TRAV38-2/DV8, TRAJ48)
CALLSGNEKLTF

SEQ ID NO: 643524 - protein, 11 aa, Homo sapiens
  CDR3 for beta chain variable domain of TCR clone 321762 (TRBV10-1, TRBJ2-3)
CASSDSDTQYF

SEQ ID NO: 643525 - protein, 14 aa, Homo sapiens
  CDR3 for alpha chain variable domain of TCR clone 321763 (TRAV4, TRAJ30)
CLVGDFRRDDKVIF

SEQ ID NO: 643526 - protein, 14 aa, Homo sapiens
  CDR3 for beta chain variable domain of TCR clone 321763 (TRBV7-2, TRBJ2-7)
CASSPKTSFYEQYF

SEQ ID NO: 643527 - protein, 16 aa, Homo sapiens
  CDR3 for alpha chain variable domain of TCR clone 321764 (TRAV3, TRAJ21)
FAVRDIGRGNFNKFYF

SEQ ID NO: 643528 - protein, 16 aa, Homo sapiens
  CDR3 for beta chain variable domain of TCR clone 321764 (TRBV12-4, TRBJ1-5)
CASSRPVGGSNQPQHF

SEQ ID NO: 643529 - protein, 15 aa, Homo sapiens
  CDR3 for alpha chain variable domain of TCR clone 321765 (TRAV3, TRAJ22)
CAVRDRGGSARQLTF

SEQ ID NO: 643530 - protein, 16 aa, Homo sapiens
  CDR3 for beta chain variable domain of TCR clone 321765 (TRBV5-4, TRBJ2-3)
CASHQPGAGGADTQYF

SEQ ID NO: 643531 - protein, 14 aa, Homo sapiens
  CDR3 for alpha chain variable domain of TCR clone 321766 (TRAV26-1, TRAJ49)
CIFRPSNTGNQFYF

SEQ ID NO: 643532 - protein, 15 aa, Homo sapiens
  CDR3 for beta chain variable domain of TCR clone 321766 (TRBV19, TRBJ1-1)
CASMGFRDVNTEAFF

SEQ ID NO: 643533 - protein, 12 aa, Homo sapiens
  CDR3 for alpha chain variable domain of TCR clone 321767 (TRAV21, TRAJ33)
CAKMDSNYQLIW

SEQ ID NO: 643534 - protein, 17 aa, Homo sapiens
  CDR3 for beta chain variable domain of TCR clone 321767 (TRBV3-1, TRBJ2-2)
CASSQCRDKVDTGELFF

SEQ ID NO: 643535 - protein, 16 aa, Homo sapiens
  CDR3 for alpha chain variable domain of TCR clone 321768 (TRAV30, TRAJ24)
CGTAIVDADSWGKFQF

SEQ ID NO: 643536 - protein, 13 aa, Homo sapiens
  CDR3 for beta chain variable domain of TCR clone 321768 (TRBV7-9, TRBJ2-3)
CASSPGSTDTQYF

SEQ ID NO: 643537 - protein, 16 aa, Homo sapiens
  CDR3 for alpha chain variable domain of TCR clone 321769 (TRAV13-1, TRAJ48)
CSKYRESNFGNEQLTF

SEQ ID NO: 643538 - protein, 15 aa, Homo sapiens
  CDR3 for beta chain variable domain of TCR clone 321769 (TRBV19, TRBJ2-3)
CAAGDTNAPNDTQYF

SEQ ID NO: 643539 - protein, 12 aa, Homo sapiens
  CDR3 for alpha chain variable domain of TCR clone 321770 (TRAV12-3, TRAJ17)
CAMTLTGNKLTF

SEQ ID NO: 643540 - protein, 17 aa, Homo sapiens
  CDR3 for beta chain variable domain of TCR clone 321770 (TRBV20-1, TRBJ2-7)
CSARDPEGDHREYEQYF

SEQ ID NO: 643541 - protein, 15 aa, Homo sapiens
  CDR3 for alpha chain variable domain of TCR clone 321771 (TRAV13-1, TRAJ9)
CAASTLNTGGFKTIF

SEQ ID NO: 643542 - protein, 12 aa, Homo sapiens
  CDR3 for beta chain variable domain of TCR clone 321771 (TRBV7-8, TRBJ2-7)
CASSLGDREQYF

SEQ ID NO: 643543 - protein, 15 aa, Homo sapiens
  CDR3 for alpha chain variable domain of TCR clone 321772 (TRAV12-3, TRAJ6)
CAMSATTGGSYIPTF

SEQ ID NO: 643544 - protein, 13 aa, Homo sapiens
  CDR3 for beta chain variable domain of TCR clone 321772 (TRBV18, TRBJ2-1)
CASSPPSSNEQFF

SEQ ID NO: 643545 - protein, 14 aa, Homo sapiens
  CDR3 for alpha chain variable domain of TCR clone 321773 (TRAV1-2, TRAJ8)
CAVREDTGFQKLVF

SEQ ID NO: 643546 - protein, 14 aa, Homo sapiens
  CDR3 for beta chain variable domain of TCR clone 321773 (TRBV19, TRBJ2-1)
CASSMGSGATEQFF

SEQ ID NO: 643547 - protein, 12 aa, Homo sapiens
  CDR3 for alpha chain variable domain of TCR clone 321774 (TRAV26-2, TRAJ21)
CILKGNFNKFYF

SEQ ID NO: 643548 - protein, 14 aa, Homo sapiens
  CDR3 for beta chain variable domain of TCR clone 321774 (TRBV7-9, TRBJ1-1)
CASTPLQSYTDAFF

SEQ ID NO: 643549 - protein, 11 aa, Homo sapiens
  CDR3 for alpha chain variable domain of TCR clone 321775 (TRAV8-4, TRAJ34)
CAVSWTDKLIF

SEQ ID NO: 643550 - protein, 15 aa, Homo sapiens
  CDR3 for beta chain variable domain of TCR clone 321775 (TRBV20-1, TRBJ2-7)
CSARDRVSGMDEQYF

SEQ ID NO: 643551 - protein, 14 aa, Homo sapiens
  CDR3 for alpha chain variable domain of TCR clone 321776 (TRAV12-3, TRAJ13)
CAMKNSGGYQKVTF

SEQ ID NO: 643552 - protein, 14 aa, Homo sapiens
  CDR3 for beta chain variable domain of TCR clone 321776 (TRBV20-1, TRBJ1-1)
CSAQTRIGGTEALF

SEQ ID NO: 643553 - protein, 12 aa, Homo sapiens
  CDR3 for alpha chain variable domain of TCR clone 321777 (TRAV13-2, TRAJ41)
CAKNIGRYALNF

SEQ ID NO: 643554 - protein, 12 aa, Homo sapiens
  CDR3 for beta chain variable domain of TCR clone 321777 (TRBV7-9, TRBJ1-1)
CASSLGGGGAFF

SEQ ID NO: 643555 - protein, 14 aa, Homo sapiens
  CDR3 for alpha chain variable domain of TCR clone 321778 (TRAV12-2, TRAJ40)
YAVKIPSGTNKYIF

SEQ ID NO: 643556 - protein, 13 aa, Homo sapiens
  CDR3 for beta chain variable domain of TCR clone 321778 (TRBV7-9, TRBJ1-2)
CASSLKQNYGYTF

SEQ ID NO: 643557 - protein, 14 aa, Homo sapiens
  CDR3 for alpha chain variable domain of TCR clone 321779 (TRAV13-2, TRAJ26)
CAENLGNYGQNFVF

SEQ ID NO: 643558 - protein, 14 aa, Homo sapiens
  CDR3 for beta chain variable domain of TCR clone 321779 (TRBV7-2, TRBJ2-7)
CASSPKTSFYEQYF

SEQ ID NO: 643559 - protein, 14 aa, Homo sapiens
  CDR3 for alpha chain variable domain of TCR clone 321780 (TRAV20, TRAJ37)
CAVQSSSKTGKLIF

SEQ ID NO: 643560 - protein, 16 aa, Homo sapiens
  CDR3 for beta chain variable domain of TCR clone 321780 (TRBV12-4, TRBJ1-5)
CASSRPVGGSNQPQHF

SEQ ID NO: 643561 - protein, 17 aa, Homo sapiens
  CDR3 for alpha chain variable domain of TCR clone 321781 (TRAV19, TRAJ28)
CALSEESSGAGSYQLTF

SEQ ID NO: 643562 - protein, 20 aa, Homo sapiens
  CDR3 for beta chain variable domain of TCR clone 321781 (TRBV28, TRBJ2-1)
CASTPIGRSPGLAGGNEQFF

SEQ ID NO: 643563 - protein, 12 aa, Homo sapiens
  CDR3 for alpha chain variable domain of TCR clone 321782 (TRAV29/DV5, TRAJ15)
CASNQAGTALIF

SEQ ID NO: 643564 - protein, 15 aa, Homo sapiens
  CDR3 for beta chain variable domain of TCR clone 321782 (TRBV11-2, TRBJ2-2)
CASSSGRGNAGELFF

SEQ ID NO: 643565 - protein, 11 aa, Homo sapiens
  CDR3 for alpha chain variable domain of TCR clone 321783 (TRAV27, TRAJ47)
SIVEYGNKLVF

SEQ ID NO: 643566 - protein, 18 aa, Homo sapiens
  CDR3 for beta chain variable domain of TCR clone 321783 (TRBV2, TRBJ2-1)
CASKGLAGGPRTYNEQFF

SEQ ID NO: 643567 - protein, 14 aa, Homo sapiens
  CDR3 for alpha chain variable domain of TCR clone 321784 (TRAV16, TRAJ33)
CALSAMDSNYQLIW

SEQ ID NO: 643568 - protein, 12 aa, Homo sapiens
  CDR3 for beta chain variable domain of TCR clone 321784 (TRBV5-1, TRBJ1-2)
GASSQDTYGYTF

SEQ ID NO: 643569 - protein, 17 aa, Homo sapiens
  CDR3 for alpha chain variable domain of TCR clone 321785 (TRAV13-1, TRAJ52)
CAASSSAGCTSYGKLTF

SEQ ID NO: 643570 - protein, 14 aa, Homo sapiens
  CDR3 for beta chain variable domain of TCR clone 321785 (TRBV12-4, TRBJ2-3)
CASTIAGWGDTQYF

SEQ ID NO: 643571 - protein, 16 aa, Homo sapiens
  CDR3 for alpha chain variable domain of TCR clone 321786 (TRAV30, TRAJ24)
CGTEIVDADSWGKFQF

SEQ ID NO: 643572 - protein, 14 aa, Homo sapiens
  CDR3 for beta chain variable domain of TCR clone 321786 (TRBV28, TRBJ2-1)
CASSLGEGYNEQFF

SEQ ID NO: 643573 - protein, 14 aa, Homo sapiens
  CDR3 for alpha chain variable domain of TCR clone 321787 (TRAV13-2, TRAJ16)
CAENNWEDGQKLLF

SEQ ID NO: 643574 - protein, 14 aa, Homo sapiens
  CDR3 for beta chain variable domain of TCR clone 321787 (TRBV7-9, TRBJ1-1)
CASSLGELKTEAFF

SEQ ID NO: 643575 - protein, 13 aa, Homo sapiens
  CDR3 for alpha chain variable domain of TCR clone 321788 (TRAV35, TRAJ42)
CAGFPGSQGNLIF

SEQ ID NO: 643576 - protein, 14 aa, Homo sapiens
  CDR3 for beta chain variable domain of TCR clone 321788 (TRBV4-1, TRBJ2-2)
CASSQAENTGELFF

SEQ ID NO: 643577 - protein, 16 aa, Homo sapiens
  CDR3 for alpha chain variable domain of TCR clone 321789 (TRAV3, TRAJ21)
CAVRDIERGNFNKFYF

SEQ ID NO: 643578 - protein, 13 aa, Homo sapiens
  CDR3 for beta chain variable domain of TCR clone 321789 (TRBV20-1, TRBJ1-1)
CSAGTVGNTEAFF

SEQ ID NO: 643579 - protein, 16 aa, Homo sapiens
  CDR3 for alpha chain variable domain of TCR clone 321790 (TRAV16, TRAJ52)
CALSAAGVTSYGKLTF

SEQ ID NO: 643580 - protein, 12 aa, Homo sapiens
  CDR3 for beta chain variable domain of TCR clone 321790 (TRBV12-4, TRBJ1-3)
CASSFSGNTLYF

SEQ ID NO: 643581 - protein, 14 aa, Homo sapiens
  CDR3 for alpha chain variable domain of TCR clone 321791 (TRAV1-2, TRAJ10)
CAVRGGTHGRRKQT

SEQ ID NO: 643582 - protein, 15 aa, Homo sapiens
  CDR3 for beta chain variable domain of TCR clone 321791 (TRBV6-3, TRBJ2-7)
CASSSPGTVFYEQYF

SEQ ID NO: 643583 - protein, 14 aa, Homo sapiens
  CDR3 for alpha chain variable domain of TCR clone 321792 (TRAV1-1, TRAJ27)
CAVIYNTNAGKSTF

SEQ ID NO: 643584 - protein, 20 aa, Homo sapiens
  CDR3 for beta chain variable domain of TCR clone 321792 (TRBV7-3, TRBJ2-1)
CASSLTLASGRAMVSSSSGQ

SEQ ID NO: 643585 - protein, 13 aa, Homo sapiens
  CDR3 for alpha chain variable domain of TCR clone 321793 (TRAV38-1, TRAJ52)
CAFRGTSYGKLTF

SEQ ID NO: 643586 - protein, 15 aa, Homo sapiens
  CDR3 for beta chain variable domain of TCR clone 321793 (TRBV7-8, TRBJ2-5)
CASSDAAGSRETQYF

SEQ ID NO: 643587 - protein, 14 aa, Homo sapiens
  CDR3 for alpha chain variable domain of TCR clone 321794 (TRAV26-1, TRAJ34)
CIVRVAYNTAKLIF

SEQ ID NO: 643588 - protein, 15 aa, Homo sapiens
  CDR3 for beta chain variable domain of TCR clone 321794 (TRBV20-1, TRBJ2-7)
CSAIVPAAYFYEQYF

SEQ ID NO: 643589 - protein, 14 aa, Homo sapiens
  CDR3 for alpha chain variable domain of TCR clone 321795 (TRAV8-2, TRAJ11)
CVVSENSGYSTLPF

SEQ ID NO: 643590 - protein, 16 aa, Homo sapiens
  CDR3 for beta chain variable domain of TCR clone 321795 (TRBV28, TRBJ2-1)
CASSSPEYPRDNEQFF

SEQ ID NO: 643591 - protein, 13 aa, Homo sapiens
  CDR3 for alpha chain variable domain of TCR clone 321796 (TRAV27, TRAJ49)
CAPRPYTGNPFSF

SEQ ID NO: 643592 - protein, 16 aa, Homo sapiens
  CDR3 for beta chain variable domain of TCR clone 321796 (TRBV4-1, TRBJ1-2)
CASSQDAGQVLYGYTF

SEQ ID NO: 643593 - protein, 12 aa, Homo sapiens
  CDR3 for alpha chain variable domain of TCR clone 321797 (TRAV8-3, TRAJ26)
CAGDNYGQNFVF

SEQ ID NO: 643594 - protein, 15 aa, Homo sapiens
  CDR3 for beta chain variable domain of TCR clone 321797 (TRBV6-5, TRBJ2-1)
CASSYDAGEGNEQFF

SEQ ID NO: 643595 - protein, 13 aa, Homo sapiens
  CDR3 for alpha chain variable domain of TCR clone 321798 (TRAV36/DV7, TRAJ49)
CAGDSNTGNQFYF

SEQ ID NO: 643596 - protein, 12 aa, Homo sapiens
  CDR3 for beta chain variable domain of TCR clone 321798 (TRBV11-2, TRBJ2-2)
YASSLGGGELFF

SEQ ID NO: 643597 - protein, 16 aa, Homo sapiens
  CDR3 for alpha chain variable domain of TCR clone 321799 (TRAV3, TRAJ37)
CAVRVKGSGNTGKLIF

SEQ ID NO: 643598 - protein, 13 aa, Homo sapiens
  CDR3 for beta chain variable domain of TCR clone 321799 (TRBV7-3, TRBJ1-1)
CASSQDWGAEAFF

SEQ ID NO: 643599 - protein, 15 aa, Homo sapiens
  CDR3 for alpha chain variable domain of TCR clone 321800 (TRAV8-3, TRAJ45)
CASSYSGGGADGLTF

SEQ ID NO: 643600 - protein, 16 aa, Homo sapiens
  CDR3 for beta chain variable domain of TCR clone 321800 (TRBV7-3, TRBJ2-1)
CASSLVSGSSNNEQFF

SEQ ID NO: 643601 - protein, 14 aa, Homo sapiens
  CDR3 for alpha chain variable domain of TCR clone 321801 (TRAV17, TRAJ54)
CATDANQGAQKLVF

SEQ ID NO: 643602 - protein, 15 aa, Homo sapiens
  CDR3 for beta chain variable domain of TCR clone 321801 (TRBV7-2, TRBJ2-3)
CASSLNLRDTDTQYF

SEQ ID NO: 643603 - protein, 14 aa, Homo sapiens
  CDR3 for alpha chain variable domain of TCR clone 321802 (TRAV1-2, TRAJ16)
CAVNRFSDGQKLFF

SEQ ID NO: 643604 - protein, 18 aa, Homo sapiens
  CDR3 for beta chain variable domain of TCR clone 321802 (TRBV20-1, TRBJ2-6)
CSAETTPTHGSGANVLTF

SEQ ID NO: 643605 - protein, 11 aa, Homo sapiens
  CDR3 for alpha chain variable domain of TCR clone 321803 (TRAV1-1, TRAJ23)
CAARQGGKLIF

SEQ ID NO: 643606 - protein, 20 aa, Homo sapiens
  CDR3 for beta chain variable domain of TCR clone 321803 (TRBV7-8, TRBJ2-2)
CASSHLFPGPTTHITGELFF

SEQ ID NO: 643607 - protein, 15 aa, Homo sapiens
  CDR3 for alpha chain variable domain of TCR clone 321804 (TRAV17, TRAJ57)
CATGPSQGGTEKLVF

SEQ ID NO: 643608 - protein, 15 aa, Homo sapiens
  CDR3 for beta chain variable domain of TCR clone 321804 (TRBV25-1, TRBJ1-4)
CASSPGDSTNEKLFF

SEQ ID NO: 643609 - protein, 14 aa, Homo sapiens
  CDR3 for alpha chain variable domain of TCR clone 321805 (TRAV23/DV6, TRAJ11)
CAASLESGYSTLTF

SEQ ID NO: 643610 - protein, 13 aa, Homo sapiens
  CDR3 for beta chain variable domain of TCR clone 321805 (TRBV4-1, TRBJ2-5)
CASSLIRGETQYF

SEQ ID NO: 643611 - protein, 14 aa, Homo sapiens
  CDR3 for alpha chain variable domain of TCR clone 321806 (TRAV13-1, TRAJ35)
CAASKGGFGNVLHC

SEQ ID NO: 643612 - protein, 13 aa, Homo sapiens
  CDR3 for beta chain variable domain of TCR clone 321806 (TRBV7-3, TRBJ1-1)
CARSQDWGAEAFL

SEQ ID NO: 643613 - protein, 10 aa, Homo sapiens
  CDR3 for alpha chain variable domain of TCR clone 321807 (TRAV36/DV7, TRAJ48)
CAVGNEKLTF

SEQ ID NO: 643614 - protein, 15 aa, Homo sapiens
  CDR3 for beta chain variable domain of TCR clone 321807 (TRBV6-5)
CASSSVGGAGEKLFF

SEQ ID NO: 643615 - protein, 11 aa, Homo sapiens
  CDR3 for alpha chain variable domain of TCR clone 321808 (TRAV12-3, TRAJ43)
CAMSVSNDMRF

SEQ ID NO: 643616 - protein, 14 aa, Homo sapiens
  CDR3 for beta chain variable domain of TCR clone 321808 (TRBV29-1, TRBJ2-2)
CSALGGVGAGELFF

SEQ ID NO: 643617 - protein, 13 aa, Homo sapiens
  CDR3 for alpha chain variable domain of TCR clone 321809 (TRAV27, TRAJ56)
CAGKPGANGKLTF

SEQ ID NO: 643618 - protein, 18 aa, Homo sapiens
  CDR3 for beta chain variable domain of TCR clone 321809 (TRBV11-2, TRBJ2-3)
CASSLGGASRGAPNTQYF

SEQ ID NO: 643619 - protein, 16 aa, Homo sapiens
  CDR3 for alpha chain variable domain of TCR clone 321810 (TRAV3, TRAJ13)
CAVRDFESGVYQKVTF

SEQ ID NO: 643620 - protein, 16 aa, Homo sapiens
  CDR3 for beta chain variable domain of TCR clone 321810 (TRBV27, TRBJ2-5)
CASSYGPGGQKETQYF

SEQ ID NO: 643621 - protein, 13 aa, Homo sapiens
  CDR3 for alpha chain variable domain of TCR clone 321811 (TRAV17, TRAJ9)
CATDYTGGFKTTF

SEQ ID NO: 643622 - protein, 13 aa, Homo sapiens
  CDR3 for beta chain variable domain of TCR clone 321811 (TRBV7-9, TRBJ1-2)
CASSLKQNYGYTF

SEQ ID NO: 643623 - protein, 12 aa, Homo sapiens
  CDR3 for alpha chain variable domain of TCR clone 321812 (TRAV25, TRAJ20)
CAGRSNDYKLSF

SEQ ID NO: 643624 - protein, 12 aa, Homo sapiens
  CDR3 for beta chain variable domain of TCR clone 321812 (TRBV5-5, TRBJ2-5)
CASSYFGETQYF

SEQ ID NO: 643625 - protein, 12 aa, Homo sapiens
  CDR3 for alpha chain variable domain of TCR clone 321813 (TRAV21, TRAJ31)
CVLAGNNARLML

SEQ ID NO: 643626 - protein, 16 aa, Homo sapiens
  CDR3 for beta chain variable domain of TCR clone 321813 (TRBV27, TRBJ2-5)
FASSCGPGGTKETQYF

SEQ ID NO: 643627 - protein, 12 aa, Homo sapiens
  CDR3 for alpha chain variable domain of TCR clone 321814 (TRAV17, TRAJ39)
CATDGAGNMLTF

SEQ ID NO: 643628 - protein, 15 aa, Homo sapiens
  CDR3 for beta chain variable domain of TCR clone 321814 (TRBV12-4, TRBJ2-1)
CASSLLATGNNEQFF

SEQ ID NO: 643629 - protein, 14 aa, Homo sapiens
  CDR3 for alpha chain variable domain of TCR clone 321815 (TRAV8-3, TRAJ4)
CAVGAAGGYNKLIF

SEQ ID NO: 643630 - protein, 18 aa, Homo sapiens
  CDR3 for beta chain variable domain of TCR clone 321815 (TRBV4-1, TRBJ1-1)
CASSQDSSGGGFWTEAFF

SEQ ID NO: 643631 - protein, 14 aa, Homo sapiens
  CDR3 for alpha chain variable domain of TCR clone 321816 (TRAV20, TRAJ33)
CAVLTRDSNYQLIW

SEQ ID NO: 643632 - protein, 14 aa, Homo sapiens
  CDR3 for beta chain variable domain of TCR clone 321816 (TRBV7-2, TRBJ2-5)
CASSPRGSSETQYF

SEQ ID NO: 643633 - protein, 14 aa, Homo sapiens
  CDR3 for alpha chain variable domain of TCR clone 321817 (TRAV2, TRAJ9)
CAVEDRSGGFKNIF

SEQ ID NO: 643634 - protein, 12 aa, Homo sapiens
  CDR3 for beta chain variable domain of TCR clone 321817 (TRBV11-2, TRBJ2-1)
CASSPGNNEQFF

SEQ ID NO: 643635 - protein, 14 aa, Homo sapiens
  CDR3 for alpha chain variable domain of TCR clone 321818 (TRAV12-2, TRAJ13)
CAVKKTGGYQKVTF

SEQ ID NO: 643636 - protein, 16 aa, Homo sapiens
  CDR3 for beta chain variable domain of TCR clone 321818 (TRBV9, TRBJ1-2)
CASSVEEKVSPYGYTV

SEQ ID NO: 643637 - protein, 14 aa, Homo sapiens
  CDR3 for alpha chain variable domain of TCR clone 321819 (TRAV20, TRAJ35)
CAVQAIGFGNVLHC

SEQ ID NO: 643638 - protein, 14 aa, Homo sapiens
  CDR3 for beta chain variable domain of TCR clone 321819 (TRBV25-1, TRBJ1-1)
CASTHLGGNTEAFF

SEQ ID NO: 643639 - protein, 11 aa, Homo sapiens
  CDR3 for alpha chain variable domain of TCR clone 321820 (TRAV21, TRAJ48)
CAVDGNEKLTF

SEQ ID NO: 643640 - protein, 12 aa, Homo sapiens
  CDR3 for beta chain variable domain of TCR clone 321820 (TRBV11-2, TRBJ2-5)
CASSLGQETQYF

SEQ ID NO: 643641 - protein, 16 aa, Homo sapiens
  CDR3 for alpha chain variable domain of TCR clone 321821 (TRAV3, TRAJ3)
CAVRDRAKSSASKIIF

SEQ ID NO: 643642 - protein, 14 aa, Homo sapiens
  CDR3 for beta chain variable domain of TCR clone 321821 (TRBV19, TRBJ2-1)
CASPTFVLSGEQLF

SEQ ID NO: 643643 - protein, 14 aa, Homo sapiens
  CDR3 for alpha chain variable domain of TCR clone 321822 (TRAV12-3, TRAJ42)
RAMNYGGSQGNLIV

SEQ ID NO: 643644 - protein, 15 aa, Homo sapiens
  CDR3 for beta chain variable domain of TCR clone 321822 (TRBV5-7, TRBJ1-5)
CASSYGKLWDQPQHF

SEQ ID NO: 643645 - protein, 11 aa, Homo sapiens
  CDR3 for alpha chain variable domain of TCR clone 321823 (TRAV12-1, TRAJ26)
CVVAYGQNFVF

SEQ ID NO: 643646 - protein, 15 aa, Homo sapiens
  CDR3 for beta chain variable domain of TCR clone 321823 (TRBV28, TRBJ2-1)
CASSIIAGGRSEQFF

SEQ ID NO: 643647 - protein, 15 aa, Homo sapiens
  CDR3 for alpha chain variable domain of TCR clone 321824 (TRAV8-2, TRAJ40)
CVVSDRGSGTYKYIF

SEQ ID NO: 643648 - protein, 16 aa, Homo sapiens
  CDR3 for beta chain variable domain of TCR clone 321824 (TRBV7-9, TRBJ1-2)
CASSLGFSSGEDGYTF

SEQ ID NO: 643649 - protein, 16 aa, Homo sapiens
  CDR3 for alpha chain variable domain of TCR clone 321825 (TRAV30, TRAJ24)
CGTEIVDADSWGKFQF

SEQ ID NO: 643650 - protein, 17 aa, Homo sapiens
  CDR3 for beta chain variable domain of TCR clone 321825 (TRBV20-1, TRBJ2-7)
CSARLGLAAPGNYEQYF

SEQ ID NO: 643651 - protein, 14 aa, Homo sapiens
  CDR3 for alpha chain variable domain of TCR clone 321826 (TRAV12-2, TRAJ40)
CAVKIPSGTYKYIF

SEQ ID NO: 643652 - protein, 14 aa, Homo sapiens
  CDR3 for beta chain variable domain of TCR clone 321826 (TRBV7-2, TRBJ2-7)
CASSPKTSLYEQYF

SEQ ID NO: 643653 - protein, 13 aa, Homo sapiens
  CDR3 for alpha chain variable domain of TCR clone 321827 (TRAV21, TRAJ29)
CAVRSSGNTPLVF

SEQ ID NO: 643654 - protein, 16 aa, Homo sapiens
  CDR3 for beta chain variable domain of TCR clone 321827 (TRBV4-1, TRBJ2-1)
CASSQDWADTLNEQFF

SEQ ID NO: 643655 - protein, 18 aa, Homo sapiens
  CDR3 for alpha chain variable domain of TCR clone 321828 (TRAV21, TRAJ52)
CAVRPSPAGGTSYVKLTF

SEQ ID NO: 643656 - protein, 17 aa, Homo sapiens
  CDR3 for beta chain variable domain of TCR clone 321828 (TRBV13, TRBJ2-3)
CASGLSRVAGGRNTQYF

SEQ ID NO: 643657 - protein, 13 aa, Homo sapiens
  CDR3 for alpha chain variable domain of TCR clone 321829 (TRAV14/DV4, TRAJ22)
CAMRDLSARQLTF

SEQ ID NO: 643658 - protein, 15 aa, Homo sapiens
  CDR3 for beta chain variable domain of TCR clone 321829 (TRBV7-2, TRBJ2-7)
CASSWGQGAIYEQYF

SEQ ID NO: 643659 - protein, 15 aa, Homo sapiens
  CDR3 for alpha chain variable domain of TCR clone 321830 (TRAV26-1, TRAJ22)
CIVRVSFWFCKATNL

SEQ ID NO: 643660 - protein, 13 aa, Homo sapiens
  CDR3 for beta chain variable domain of TCR clone 321830 (TRBV7-9, TRBJ1-2)
CSSSLKQNYGYTF

SEQ ID NO: 643661 - protein, 14 aa, Homo sapiens
  CDR3 for alpha chain variable domain of TCR clone 321831 (TRAV38-1, TRAJ43)
CAFMKHNNNNDMRF

SEQ ID NO: 643662 - protein, 16 aa, Homo sapiens
  CDR3 for beta chain variable domain of TCR clone 321831 (TRBV7-9, TRBJ1-2)
CASSLGFSSGEDGYTF

SEQ ID NO: 643663 - protein, 17 aa, Homo sapiens
  CDR3 for alpha chain variable domain of TCR clone 321832 (TRAV26-2, TRAJ42)
CILRDVGYGGSQGNLIF

SEQ ID NO: 643664 - protein, 16 aa, Homo sapiens
  CDR3 for beta chain variable domain of TCR clone 321832 (TRBV12-4, TRBJ2-7)
CASSLIGGTGTYDQYF

SEQ ID NO: 643665 - protein, 14 aa, Homo sapiens
  CDR3 for alpha chain variable domain of TCR clone 321833 (TRAV17, TRAJ11)
CATDTSRGYSTLTF

SEQ ID NO: 643666 - protein, 15 aa, Homo sapiens
  CDR3 for beta chain variable domain of TCR clone 321833 (TRBV14, TRBJ1-1)
CASSQDGMGRREAFF

SEQ ID NO: 643667 - protein, 12 aa, Homo sapiens
  CDR3 for alpha chain variable domain of TCR clone 321834 (TRAV6, TRAJ34)
CALHRGTDKLIF

SEQ ID NO: 643668 - protein, 11 aa, Homo sapiens
  CDR3 for beta chain variable domain of TCR clone 321834 (TRBV20-1, TRBJ2-1)
CSLYSGSEQFF

SEQ ID NO: 643669 - protein, 16 aa, Homo sapiens
  CDR3 for alpha chain variable domain of TCR clone 321835 (TRAV30, TRAJ24)
CGTEIVDADSWGTFPF

SEQ ID NO: 643670 - protein, 16 aa, Homo sapiens
  CDR3 for beta chain variable domain of TCR clone 321835 (TRBV7-3, TRBJ2-2)
CASSLKRGTLSGELFF

SEQ ID NO: 643671 - protein, 12 aa, Homo sapiens
  CDR3 for alpha chain variable domain of TCR clone 321836 (TRAV12-2, TRAJ47)
CAVAEYGNKLDF

SEQ ID NO: 643672 - protein, 15 aa, Homo sapiens
  CDR3 for beta chain variable domain of TCR clone 321836 (TRBV28, TRBJ2-1)
CASSIIAGGRSEQFF

SEQ ID NO: 643673 - protein, 14 aa, Homo sapiens
  CDR3 for alpha chain variable domain of TCR clone 321837 (TRAV12-3, TRAJ57)
CAMSAWGGSEKLVF

SEQ ID NO: 643674 - protein, 14 aa, Homo sapiens
  CDR3 for beta chain variable domain of TCR clone 321837 (TRBV12-5, TRBJ2-5)
CASGSRTHQETQYF

SEQ ID NO: 643675 - protein, 12 aa, Homo sapiens
  CDR3 for alpha chain variable domain of TCR clone 321838 (TRAV29/DV5, TRAJ49)
CAASRSGNQFYF

SEQ ID NO: 643676 - protein, 16 aa, Homo sapiens
  CDR3 for beta chain variable domain of TCR clone 321838 (TRBV19, TRBJ2-1)
CASSKAGPSSYNEQFF

SEQ ID NO: 643677 - protein, 14 aa, Homo sapiens
  CDR3 for alpha chain variable domain of TCR clone 321839 (TRAV1-2, TRAJ8)
CAVREDTGFQTLVF

SEQ ID NO: 643678 - protein, 15 aa, Homo sapiens
  CDR3 for beta chain variable domain of TCR clone 321839 (TRBV19, TRBJ2-1)
CASSIQATSYNEQFF

SEQ ID NO: 643679 - protein, 13 aa, Homo sapiens
  CDR3 for alpha chain variable domain of TCR clone 321840 (TRAV23/DV6, TRAJ30)
CAAPSNRDDKIIF

SEQ ID NO: 643680 - protein, 13 aa, Homo sapiens
  CDR3 for beta chain variable domain of TCR clone 321840 (TRBV20-1, TRBJ1-6)
CSAPLGVGSPLHF

SEQ ID NO: 643681 - protein, 14 aa, Homo sapiens
  CDR3 for alpha chain variable domain of TCR clone 321841 (TRAV8-1, TRAJ22)
CAAPSFGSARQLTF

SEQ ID NO: 643682 - protein, 14 aa, Homo sapiens
  CDR3 for beta chain variable domain of TCR clone 321841 (TRBV18, TRBJ1-5)
CASSPGNSNQPQHF

SEQ ID NO: 643683 - protein, 13 aa, Homo sapiens
  CDR3 for alpha chain variable domain of TCR clone 321842 (TRAV29/DV5, TRAJ29)
CAASAAGNTPLVF

SEQ ID NO: 643684 - protein, 13 aa, Homo sapiens
  CDR3 for beta chain variable domain of TCR clone 321842 (TRBV4-1, TRBJ2-2)
CASSQENTGELFF

SEQ ID NO: 643685 - protein, 18 aa, Homo sapiens
  CDR3 for alpha chain variable domain of TCR clone 321843 (TRAV12-2, )
CAVDDIQNPDPAVYQLRE

SEQ ID NO: 643686 - protein, 16 aa, Homo sapiens
  CDR3 for beta chain variable domain of TCR clone 321843 (TRBV6-1, TRBJ1-2)
CASSGAWQGRSHGYTF

SEQ ID NO: 643687 - protein, 15 aa, Homo sapiens
  CDR3 for alpha chain variable domain of TCR clone 321844 (TRAV8-2, TRAJ16)
CVVCDGFSDGQKLLF

SEQ ID NO: 643688 - protein, 14 aa, Homo sapiens
  CDR3 for beta chain variable domain of TCR clone 321844 (TRBV7-3, TRBJ1-1)
CASSLGTGYTEAFF

SEQ ID NO: 643689 - protein, 15 aa, Homo sapiens
  CDR3 for alpha chain variable domain of TCR clone 321845 (TRAV16, TRAJ16)
CALQGGGSDGQKLLF

SEQ ID NO: 643690 - protein, 14 aa, Homo sapiens
  CDR3 for beta chain variable domain of TCR clone 321845 (TRBV6-1, TRBJ2-7)
CASSERVNPFEQYF

SEQ ID NO: 643691 - protein, 18 aa, Homo sapiens
  CDR3 for alpha chain variable domain of TCR clone 321846 (TRAV9-2, TRAJ52)
CALSRHNAGGTSYGKLTF

SEQ ID NO: 643692 - protein, 16 aa, Homo sapiens
  CDR3 for beta chain variable domain of TCR clone 321846 (TRBV6-1, TRBJ1-2)
CASSGAWQGRSHGYTF

SEQ ID NO: 643693 - protein, 13 aa, Homo sapiens
  CDR3 for alpha chain variable domain of TCR clone 321847 (TRAV16, TRAJ52)
CALRGTSYGKLTF

SEQ ID NO: 643694 - protein, 15 aa, Homo sapiens
  CDR3 for beta chain variable domain of TCR clone 321847 (TRBV5-1, TRBJ2-3)
CASSVTSGSTDTQYF

SEQ ID NO: 643695 - protein, 18 aa, Homo sapiens
  CDR3 for alpha chain variable domain of TCR clone 321848 (TRAV21, TRAJ52)
CAVRPSPAGGTSYGKLTF

SEQ ID NO: 643696 - protein, 17 aa, Homo sapiens
  CDR3 for beta chain variable domain of TCR clone 321848 (TRBV13, TRBJ2-3)
CVSSLSRVAGGRDTQYF

SEQ ID NO: 643697 - protein, 21 aa, Homo sapiens
  CDR3 for alpha chain variable domain of TCR clone 321849 (TRAV3, )
CAVRPTPDVQNPDPAVYQLRD

SEQ ID NO: 643698 - protein, 15 aa, Homo sapiens
  CDR3 for beta chain variable domain of TCR clone 321849 (TRBV11-3, TRBJ2-5)
CASSDTSGGIETQYF

SEQ ID NO: 643699 - protein, 23 aa, Homo sapiens
  CDR3 for alpha chain variable domain of TCR clone 321850 (TRAV12-1, TRAJ37)
CVVNGGLWQHRQTNLWARDNFTS

SEQ ID NO: 643700 - protein, 12 aa, Homo sapiens
  CDR3 for beta chain variable domain of TCR clone 321850 (TRBV20-1, TRBJ1-2)
CSAPGFNYGYTF

SEQ ID NO: 643701 - protein, 12 aa, Homo sapiens
  CDR3 for alpha chain variable domain of TCR clone 321851 (TRAV21, TRAJ33)
RAKMESNYQLIW

SEQ ID NO: 643702 - protein, 14 aa, Homo sapiens
  CDR3 for beta chain variable domain of TCR clone 321851 (TRBV2, TRBJ2-7)
CASSLTSGGYEQYF

SEQ ID NO: 643703 - protein, 13 aa, Homo sapiens
  CDR3 for alpha chain variable domain of TCR clone 321852 (TRAV26-1, )
CIVSHRGEGVWNQ

SEQ ID NO: 643704 - protein, 14 aa, Homo sapiens
  CDR3 for beta chain variable domain of TCR clone 321852 (TRBV20-1, TRBJ2-7)
CSAWTALSSYEQYF

SEQ ID NO: 643705 - protein, 17 aa, Homo sapiens
  CDR3 for alpha chain variable domain of TCR clone 321853 (TRAV3, TRAJ42)
CAVRDRDYGGSQGNLIF

SEQ ID NO: 643706 - protein, 12 aa, Homo sapiens
  CDR3 for beta chain variable domain of TCR clone 321853 (TRBV20-1, TRBJ2-1)
CSAQYTYNEQFF

SEQ ID NO: 643707 - protein, 17 aa, Homo sapiens
  CDR3 for alpha chain variable domain of TCR clone 321854 (TRAV3, TRAJ38)
CAVRDCLNAGNNRKLIW

SEQ ID NO: 643708 - protein, 16 aa, Homo sapiens
  CDR3 for beta chain variable domain of TCR clone 321854 (TRBV20-1, TRBJ1-4)
CSARPYGGELNEKLFF

SEQ ID NO: 643709 - protein, 15 aa, Homo sapiens
  CDR3 for alpha chain variable domain of TCR clone 321855 (TRAV12-1, TRAJ45)
CVVLSGGGGADGLTF

SEQ ID NO: 643710 - protein, 15 aa, Homo sapiens
  CDR3 for beta chain variable domain of TCR clone 321855 (TRBV12-5, TRBJ2-5)
CASGPGLAGRETQYF

SEQ ID NO: 643711 - protein, 13 aa, Homo sapiens
  CDR3 for alpha chain variable domain of TCR clone 321856 (TRAV8-6, TRAJ13)
CAVSSGGYQKVTF

SEQ ID NO: 643712 - protein, 15 aa, Homo sapiens
  CDR3 for beta chain variable domain of TCR clone 321856 (TRBV7-9, TRBJ2-7)
CASSLPTGQANEQYF

SEQ ID NO: 643713 - protein, 16 aa, Homo sapiens
  CDR3 for alpha chain variable domain of TCR clone 321857 (TRAV14/DV4, TRAJ20)
CAMRECRSRDDYKLSF

SEQ ID NO: 643714 - protein, 17 aa, Homo sapiens
  CDR3 for beta chain variable domain of TCR clone 321857 (TRBV13, TRBJ2-3)
CASSLSRVAGGRNTQYF

SEQ ID NO: 643715 - protein, 15 aa, Homo sapiens
  CDR3 for alpha chain variable domain of TCR clone 321858 (TRAV3, TRAJ22)
CAVRDRGGSARHLTF

SEQ ID NO: 643716 - protein, 13 aa, Homo sapiens
  CDR3 for beta chain variable domain of TCR clone 321858 (TRBV7-3, TRBJ2-1)
CASSPVAYSEQFF

SEQ ID NO: 643717 - protein, 12 aa, Homo sapiens
  CDR3 for alpha chain variable domain of TCR clone 321859 (TRAV16, TRAJ10)
CSRTGGGNKITF

SEQ ID NO: 643718 - protein, 12 aa, Homo sapiens
  CDR3 for beta chain variable domain of TCR clone 321859 (TRBV11-3, TRBJ1-1)
CASSHRQGEAFF

SEQ ID NO: 643719 - protein, 11 aa, Homo sapiens
  CDR3 for alpha chain variable domain of TCR clone 321860 (TRAV3, TRAJ17)
PRGDAGNKLTF

SEQ ID NO: 643720 - protein, 12 aa, Homo sapiens
  CDR3 for beta chain variable domain of TCR clone 321860 (TRBV11-2, TRBJ2-2)
CASSLGGGELFF

SEQ ID NO: 643721 - protein, 14 aa, Homo sapiens
  CDR3 for alpha chain variable domain of TCR clone 321861 (TRAV8-3, TRAJ43)
CAVGSEFFNNDMRF

SEQ ID NO: 643722 - protein, 13 aa, Homo sapiens
  CDR3 for beta chain variable domain of TCR clone 321861 (TRBV19, TRBJ2-1)
CASSMYRVNEQFF

SEQ ID NO: 643723 - protein, 12 aa, Homo sapiens
  CDR3 for alpha chain variable domain of TCR clone 321862 (TRAV8-3, TRAJ41)
CAVGALGSALNF

SEQ ID NO: 643724 - protein, 16 aa, Homo sapiens
  CDR3 for beta chain variable domain of TCR clone 321862 (TRBV7-6, TRBJ2-3)
CASSDSRGEGTDTQYF

SEQ ID NO: 643725 - protein, 12 aa, Homo sapiens
  CDR3 for alpha chain variable domain of TCR clone 321863 (TRAV13-1, TRAJ53)
CAAGGSNYKLTF

SEQ ID NO: 643726 - protein, 10 aa, Homo sapiens
  CDR3 for beta chain variable domain of TCR clone 321863 (TRBV2, TRBJ1-1)
CSREGTEAFF

SEQ ID NO: 643727 - protein, 14 aa, Homo sapiens
  CDR3 for alpha chain variable domain of TCR clone 321864 (TRAV35, TRAJ33)
CAGSAQDSNYQLIW

SEQ ID NO: 643728 - protein, 15 aa, Homo sapiens
  CDR3 for beta chain variable domain of TCR clone 321864 (TRBV20-1, TRBJ2-7)
CSAESGTSGAYEQYF

SEQ ID NO: 643729 - protein, 14 aa, Homo sapiens
  CDR3 for alpha chain variable domain of TCR clone 321865 (TRAV21, TRAJ15)
YAVSLNQAGTALIF

SEQ ID NO: 643730 - protein, 11 aa, Homo sapiens
  CDR3 for beta chain variable domain of TCR clone 321865 (TRBV20-1, TRBJ2-7)
CSARTSYEQYF

SEQ ID NO: 643731 - protein, 13 aa, Homo sapiens
  CDR3 for alpha chain variable domain of TCR clone 321866 (TRAV8-3, TRAJ36)
CAVGATGANNLFF

SEQ ID NO: 643732 - protein, 12 aa, Homo sapiens
  CDR3 for beta chain variable domain of TCR clone 321866 (TRBV18, TRBJ2-5)
CASSPSKETQFF

SEQ ID NO: 643733 - protein, 13 aa, Homo sapiens
  CDR3 for alpha chain variable domain of TCR clone 321867 (TRAV2, TRAJ24)
CDLQLTAGGNSSL

SEQ ID NO: 643734 - protein, 13 aa, Homo sapiens
  CDR3 for beta chain variable domain of TCR clone 321867 (TRBV7-9, TRBJ1-2)
CASSVKQNYGYTF

SEQ ID NO: 643735 - protein, 16 aa, Homo sapiens
  CDR3 for alpha chain variable domain of TCR clone 321868 (TRAV3, TRAJ32)
CCEPQGNGGAINKLIF

SEQ ID NO: 643736 - protein, 15 aa, Homo sapiens
  CDR3 for beta chain variable domain of TCR clone 321868 (TRBV28, TRBJ2-1)
CASSIIAGGRSEQFF

SEQ ID NO: 643737 - protein, 16 aa, Homo sapiens
  CDR3 for alpha chain variable domain of TCR clone 321869 (TRAV4, TRAJ22)
CLVGDLYSGSARQLTF

SEQ ID NO: 643738 - protein, 15 aa, Homo sapiens
  CDR3 for beta chain variable domain of TCR clone 321869 (TRBV10-2, TRBJ2-6)
CASSEQGTGANVLTF

SEQ ID NO: 643739 - protein, 14 aa, Homo sapiens
  CDR3 for alpha chain variable domain of TCR clone 321870 (TRAV12-2, TRAJ40)
CAVKIPSGTYKYIF

SEQ ID NO: 643740 - protein, 11 aa, Homo sapiens
  CDR3 for beta chain variable domain of TCR clone 321870 (TRBV7-8, TRBJ2-7)
CASSLSLEQYF

SEQ ID NO: 643741 - protein, 14 aa, Homo sapiens
  CDR3 for alpha chain variable domain of TCR clone 321871 (TRAV12-2, TRAJ45)
CAVNSGGGAVGLTF

SEQ ID NO: 643742 - protein, 18 aa, Homo sapiens
  CDR3 for beta chain variable domain of TCR clone 321871 (TRBV7-2, TRBJ2-7)
CASSLAQGLRDSSYEQYF

SEQ ID NO: 643743 - protein, 12 aa, Homo sapiens
  CDR3 for alpha chain variable domain of TCR clone 321872 (TRAV30, TRAJ43)
CGTEERGNAMRF

SEQ ID NO: 643744 - protein, 13 aa, Homo sapiens
  CDR3 for beta chain variable domain of TCR clone 321872 (TRBV27, TRBJ2-7)
CASSFPQGYEHYF

SEQ ID NO: 643745 - protein, 13 aa, Homo sapiens
  CDR3 for alpha chain variable domain of TCR clone 321873 (TRAV21, TRAJ27)
CAARHGNAGKSTF

SEQ ID NO: 643746 - protein, 15 aa, Homo sapiens
  CDR3 for beta chain variable domain of TCR clone 321873 (TRBV2, TRBJ2-3)
CASSDAGGPPDTQYF

SEQ ID NO: 643747 - protein, 11 aa, Homo sapiens
  CDR3 for alpha chain variable domain of TCR clone 321874 (TRAV21, TRAJ34)
CSHYNTDKLIF

SEQ ID NO: 643748 - protein, 11 aa, Homo sapiens
  CDR3 for beta chain variable domain of TCR clone 321874 (TRBV29-1, TRBJ2-5)
CSEDRTGTQFF

SEQ ID NO: 643749 - protein, 12 aa, Homo sapiens
  CDR3 for alpha chain variable domain of TCR clone 321875 (TRAV12-3, TRAJ17)
CAMTLTGNKRTF

SEQ ID NO: 643750 - protein, 14 aa, Homo sapiens
  CDR3 for beta chain variable domain of TCR clone 321875 (TRBV7-2, TRBJ1-2)
CASSQTGSTYGYTF

SEQ ID NO: 643751 - protein, 18 aa, Homo sapiens
  CDR3 for alpha chain variable domain of TCR clone 321876 (TRAV12-3, TRAJ52)
CAMSVGGAGGTSYGKLTF

SEQ ID NO: 643752 - protein, 15 aa, Homo sapiens
  CDR3 for beta chain variable domain of TCR clone 321876 (TRBV20-1, TRBJ1-1)
CSARPRQGAPTEAFF

SEQ ID NO: 643753 - protein, 14 aa, Homo sapiens
  CDR3 for alpha chain variable domain of TCR clone 321877 (TRAV1-2, TRAJ8)
CAVREDTGVQKLVF

SEQ ID NO: 643754 - protein, 12 aa, Homo sapiens
  CDR3 for beta chain variable domain of TCR clone 321877 (TRBV11-2, TRBJ2-2)
CASSLGGGELFF

SEQ ID NO: 643755 - protein, 16 aa, Homo sapiens
  CDR3 for alpha chain variable domain of TCR clone 321878 (TRAV26-1, TRAJ31)
CIVRPPVLNNNARLMF

SEQ ID NO: 643756 - protein, 14 aa, Homo sapiens
  CDR3 for beta chain variable domain of TCR clone 321878 (TRBV7-3, TRBJ2-1)
CASSLAGGTNEQFF

SEQ ID NO: 643757 - protein, 16 aa, Homo sapiens
  CDR3 for alpha chain variable domain of TCR clone 321879 (TRAV30, TRAJ24)
CGTAIVDADSWGKFQF

SEQ ID NO: 643758 - protein, 15 aa, Homo sapiens
  CDR3 for beta chain variable domain of TCR clone 321879 (TRBV12-4, TRBJ2-7)
CASSQRTSGNYEQYF

SEQ ID NO: 643759 - protein, 12 aa, Homo sapiens
  CDR3 for alpha chain variable domain of TCR clone 321880 (TRAV1-1, TRAJ8)
CAGGKGLQKLVF

SEQ ID NO: 643760 - protein, 15 aa, Homo sapiens
  CDR3 for beta chain variable domain of TCR clone 321880 (TRBV7-9, TRBJ1-4)
CASSRTGGFNEKLFF

SEQ ID NO: 643761 - protein, 15 aa, Homo sapiens
  CDR3 for alpha chain variable domain of TCR clone 321881 (TRAV26-1, TRAJ44)
CIARVPFGTASKLTF

SEQ ID NO: 643762 - protein, 16 aa, Homo sapiens
  CDR3 for beta chain variable domain of TCR clone 321881 (TRBV7-3, TRBJ2-3)
CASSLSGYRPEDTQYF

SEQ ID NO: 643763 - protein, 12 aa, Homo sapiens
  CDR3 for alpha chain variable domain of TCR clone 321882 (TRAV21, TRAJ23)
CAVMLQGGKLIF

SEQ ID NO: 643764 - protein, 14 aa, Homo sapiens
  CDR3 for beta chain variable domain of TCR clone 321882 (TRBV7-9, TRBJ1-4)
CAITEGKANEKLFF

SEQ ID NO: 643765 - protein, 11 aa, Homo sapiens
  CDR3 for alpha chain variable domain of TCR clone 321883 (TRAV2, TRAJ40)
CAVEGTYKYIF

SEQ ID NO: 643766 - protein, 15 aa, Homo sapiens
  CDR3 for beta chain variable domain of TCR clone 321883 (TRBV5-1, TRBJ2-1)
CASSPPRAPYNEQFF

SEQ ID NO: 643767 - protein, 14 aa, Homo sapiens
  CDR3 for alpha chain variable domain of TCR clone 321884 (TRAV1-1, TRAJ30)
CAVRYLNRDDKSIF

SEQ ID NO: 643768 - protein, 14 aa, Homo sapiens
  CDR3 for beta chain variable domain of TCR clone 321884 (TRBV7-8, TRBJ2-3)
CASSLEAGTDTQYF

SEQ ID NO: 643769 - protein, 17 aa, Homo sapiens
  CDR3 for alpha chain variable domain of TCR clone 321885 (TRAV2, TRAJ22)
ILQVREADAAEQRQLTF

SEQ ID NO: 643770 - protein, 14 aa, Homo sapiens
  CDR3 for beta chain variable domain of TCR clone 321885 (TRBV11-2, TRBJ1-2)
CASSLGTANYGYTF

SEQ ID NO: 643771 - protein, 10 aa, Homo sapiens
  CDR3 for alpha chain variable domain of TCR clone 321886 (TRAV2, TRAJ34)
CAVVNDKLIF

SEQ ID NO: 643772 - protein, 15 aa, Homo sapiens
  CDR3 for beta chain variable domain of TCR clone 321886 (TRBV3-1, TRBJ2-2)
CASSQDWTRAGELFL

SEQ ID NO: 643773 - protein, 16 aa, Homo sapiens
  CDR3 for alpha chain variable domain of TCR clone 321887 (TRAV12-3, TRAJ53)
CAMSPGSGGSNYKMTF

SEQ ID NO: 643774 - protein, 17 aa, Homo sapiens
  CDR3 for beta chain variable domain of TCR clone 321887 (TRBV28, TRBJ2-7)
CASSPLRGRRWKGGQYF

SEQ ID NO: 643775 - protein, 15 aa, Homo sapiens
  CDR3 for alpha chain variable domain of TCR clone 321888 (TRAV12-1, TRAJ22)
CVVRVSSGSARQLTF

SEQ ID NO: 643776 - protein, 13 aa, Homo sapiens
  CDR3 for beta chain variable domain of TCR clone 321888 (TRBV6-3, TRBJ1-1)
CASSYSRTDAAFF

SEQ ID NO: 643777 - protein, 14 aa, Homo sapiens
  CDR3 for alpha chain variable domain of TCR clone 321889 (TRAV29/DV5, TRAJ49)
CAASAKNTGNQIYF

SEQ ID NO: 643778 - protein, 16 aa, Homo sapiens
  CDR3 for beta chain variable domain of TCR clone 321889 (TRBV12-4, TRBJ1-5)
CASRQPVEGSNQPQHF

SEQ ID NO: 643779 - protein, 15 aa, Homo sapiens
  CDR3 for alpha chain variable domain of TCR clone 321890 (TRAV3, TRAJ9)
CAVRDSNNGGFKTIF

SEQ ID NO: 643780 - protein, 16 aa, Homo sapiens
  CDR3 for beta chain variable domain of TCR clone 321890 (TRBV15, TRBJ2-5)
CATSPTTGQGMETQYF

SEQ ID NO: 643781 - protein, 14 aa, Homo sapiens
  CDR3 for alpha chain variable domain of TCR clone 321891 (TRAV2, TRAJ9)
CAVDPNTGGFKTIF

SEQ ID NO: 643782 - protein, 14 aa, Homo sapiens
  CDR3 for beta chain variable domain of TCR clone 321891 (TRBV4-1, TRBJ2-2)
CASSQAVNTGELCF

SEQ ID NO: 643783 - protein, 11 aa, Homo sapiens
  CDR3 for alpha chain variable domain of TCR clone 321892 (TRAV21, TRAJ11)
CAVNGNSTLTF

SEQ ID NO: 643784 - protein, 11 aa, Homo sapiens
  CDR3 for beta chain variable domain of TCR clone 321892 (TRBV19, TRBJ1-1)
CASSIGSEAFF

SEQ ID NO: 643785 - protein, 16 aa, Homo sapiens
  CDR3 for alpha chain variable domain of TCR clone 321893 (TRAV27, TRAJ13)
CAGAKSDSGGYQKVTF

SEQ ID NO: 643786 - protein, 11 aa, Homo sapiens
  CDR3 for beta chain variable domain of TCR clone 321893 (TRBV20-1, TRBJ2-7)
CSGRQGHEQYF

SEQ ID NO: 643787 - protein, 17 aa, Homo sapiens
  CDR3 for alpha chain variable domain of TCR clone 321894 (TRAV3, TRAJ6)
CAVRDGPSAGGSYTPTF

SEQ ID NO: 643788 - protein, 14 aa, Homo sapiens
  CDR3 for beta chain variable domain of TCR clone 321894 (TRBV7-2, TRBJ2-7)
CASSPKTSFYEQYV

SEQ ID NO: 643789 - protein, 11 aa, Homo sapiens
  CDR3 for alpha chain variable domain of TCR clone 321895 (TRAV23/DV6, TRAJ17)
CKWAAGNKLTF

SEQ ID NO: 643790 - protein, 15 aa, Homo sapiens
  CDR3 for beta chain variable domain of TCR clone 321895 (TRBV6-1, TRBJ2-5)
CASPRWGTEGQTQYF

SEQ ID NO: 643791 - protein, 15 aa, Homo sapiens
  CDR3 for alpha chain variable domain of TCR clone 321896 (TRAV8-3, TRAJ27)
CAVGPSKTNAGKSTF

SEQ ID NO: 643792 - protein, 13 aa, Homo sapiens
  CDR3 for beta chain variable domain of TCR clone 321896 (TRBV7-2, TRBJ2-4)
CASSREHANIQYF

SEQ ID NO: 643793 - protein, 12 aa, Homo sapiens
  CDR3 for alpha chain variable domain of TCR clone 321897 (TRAV12-3, TRAJ17)
CAMTLTGNKLTF

SEQ ID NO: 643794 - protein, 15 aa, Homo sapiens
  CDR3 for beta chain variable domain of TCR clone 321897 (TRBV20-1, TRBJ2-7)
CSARDRVSEMGEQYF

SEQ ID NO: 643795 - protein, 16 aa, Homo sapiens
  CDR3 for alpha chain variable domain of TCR clone 321898 (TRAV13-1, TRAJ44)
CAASIGRTGTASKLTF

SEQ ID NO: 643796 - protein, 14 aa, Homo sapiens
  CDR3 for beta chain variable domain of TCR clone 321898 (TRBV2, TRBJ2-1)
CASSDRAYYNEQFF

SEQ ID NO: 643797 - protein, 19 aa, Homo sapiens
  CDR3 for alpha chain variable domain of TCR clone 321899 (TRAV26-1, TRAJ52)
CIVRAHRNAGGTSYGKLTF

SEQ ID NO: 643798 - protein, 15 aa, Homo sapiens
  CDR3 for beta chain variable domain of TCR clone 321899 (TRBV12-4, TRBJ2-5)
CSSSPPTGLQETQYF

SEQ ID NO: 643799 - protein, 12 aa, Homo sapiens
  CDR3 for alpha chain variable domain of TCR clone 321900 (TRAV12-3, TRAJ17)
CAMTLTGNKLTF

SEQ ID NO: 643800 - protein, 14 aa, Homo sapiens
  CDR3 for beta chain variable domain of TCR clone 321900 (TRBV11-1, TRBJ2-7)
CASSLEREWGEQYF

SEQ ID NO: 643801 - protein, 13 aa, Homo sapiens
  CDR3 for alpha chain variable domain of TCR clone 321901 (TRAV21, TRAJ40)
CAVRPSRAYKYIF

SEQ ID NO: 643802 - protein, 11 aa, Homo sapiens
  CDR3 for beta chain variable domain of TCR clone 321901 (TRBV14, TRBJ2-5)
CQQQLKETQYF

SEQ ID NO: 643803 - protein, 14 aa, Homo sapiens
  CDR3 for alpha chain variable domain of TCR clone 321902 (TRAV1-2, TRAJ8)
CAVREDTGFQKLVF

SEQ ID NO: 643804 - protein, 14 aa, Homo sapiens
  CDR3 for beta chain variable domain of TCR clone 321902 (TRBV18, TRBJ2-7)
CASSPTSGGYEQYF

SEQ ID NO: 643805 - protein, 13 aa, Homo sapiens
  CDR3 for alpha chain variable domain of TCR clone 321903 (TRAV26-1, TRAJ48)
CIVRVVGDEKLTF

SEQ ID NO: 643806 - protein, 19 aa, Homo sapiens
  CDR3 for beta chain variable domain of TCR clone 321903 (TRBV11-3, TRBJ2-2)
CASSTSPGAKTTNTGELFF

SEQ ID NO: 643807 - protein, 14 aa, Homo sapiens
  CDR3 for alpha chain variable domain of TCR clone 321904 (TRAV12-1, TRAJ30)
CVVNIGGRDDKIIF

SEQ ID NO: 643808 - protein, 12 aa, Homo sapiens
  CDR3 for beta chain variable domain of TCR clone 321904 (TRBV18, TRBJ2-3)
CASSPLSDTQYF

SEQ ID NO: 643809 - protein, 12 aa, Homo sapiens
  CDR3 for alpha chain variable domain of TCR clone 321905 (TRAV12-3, TRAJ43)
CAISSNNNDMRF

SEQ ID NO: 643810 - protein, 15 aa, Homo sapiens
  CDR3 for beta chain variable domain of TCR clone 321905 (TRBV27, TRBJ1-4)
CASSPRHATNEKQFF

SEQ ID NO: 643811 - protein, 12 aa, Homo sapiens
  CDR3 for alpha chain variable domain of TCR clone 321906 (TRAV12-1, TRAJ6)
CVVSARSYIPTF

SEQ ID NO: 643812 - protein, 21 aa, Homo sapiens
  CDR3 for beta chain variable domain of TCR clone 321906 (TRBV7-3, TRBJ2-1)
GGTQPCISVPAADGLAGAQFF

SEQ ID NO: 643813 - protein, 13 aa, Homo sapiens
  CDR3 for alpha chain variable domain of TCR clone 321907 (TRAV21, TRAJ57)
CAVTQGGSEKLVF

SEQ ID NO: 643814 - protein, 19 aa, Homo sapiens
  CDR3 for beta chain variable domain of TCR clone 321907 (TRBV18, TRBJ2-1)
CASSPTGGLLAGVYNEQFF

SEQ ID NO: 643815 - protein, 13 aa, Homo sapiens
  CDR3 for alpha chain variable domain of TCR clone 321908 (TRAV12-1, TRAJ40)
CVVKEAGTYKYIF

SEQ ID NO: 643816 - protein, 14 aa, Homo sapiens
  CDR3 for beta chain variable domain of TCR clone 321908 (TRBV7-2, TRBJ2-1)
CASSLGVGYNEQFF

SEQ ID NO: 643817 - protein, 12 aa, Homo sapiens
  CDR3 for alpha chain variable domain of TCR clone 321909 (TRAV2, TRAJ31)
CAVEDNNARIMF

SEQ ID NO: 643818 - protein, 16 aa, Homo sapiens
  CDR3 for beta chain variable domain of TCR clone 321909 (TRBV11-3, TRBJ2-5)
CASSSVVAGSTETQYF

SEQ ID NO: 643819 - protein, 17 aa, Homo sapiens
  CDR3 for alpha chain variable domain of TCR clone 321910 (TRAV17, TRAJ7)
CATLGRLAFGKGNQVVG

SEQ ID NO: 643820 - protein, 15 aa, Homo sapiens
  CDR3 for beta chain variable domain of TCR clone 321910 (TRBV7-3, TRBJ2-1)
CASSLSSGSFDEQFF

SEQ ID NO: 643821 - protein, 10 aa, Homo sapiens
  CDR3 for alpha chain variable domain of TCR clone 321911 (TRAV8-4, TRAJ43)
CAVSADDMRF

SEQ ID NO: 643822 - protein, 15 aa, Homo sapiens
  CDR3 for beta chain variable domain of TCR clone 321911 (TRBV5-1, TRBJ2-3)
CASSVTSGSTDTQYF

SEQ ID NO: 643823 - protein, 12 aa, Homo sapiens
  CDR3 for alpha chain variable domain of TCR clone 321912 (TRAV12-2, TRAJ44)
CADTGTASKITF

SEQ ID NO: 643824 - protein, 17 aa, Homo sapiens
  CDR3 for beta chain variable domain of TCR clone 321912 (TRBV20-1, TRBJ1-1)
CSARGTGGSYGNTGAFF

SEQ ID NO: 643825 - protein, 13 aa, Homo sapiens
  CDR3 for alpha chain variable domain of TCR clone 321913 (TRAV12-2, TRAJ52)
CAVGGTSYGKLTF

SEQ ID NO: 643826 - protein, 14 aa, Homo sapiens
  CDR3 for beta chain variable domain of TCR clone 321913 (TRBV19, TRBJ2-1)
CASSTFVLSGEQFF

SEQ ID NO: 643827 - protein, 16 aa, Homo sapiens
  CDR3 for alpha chain variable domain of TCR clone 321914 (TRAV3, TRAJ21)
CAVRDIERGNFNKFYF

SEQ ID NO: 643828 - protein, 16 aa, Homo sapiens
  CDR3 for beta chain variable domain of TCR clone 321914 (TRBV4-1, TRBJ2-7)
CASSRGDILNSYEQYF

SEQ ID NO: 643829 - protein, 14 aa, Homo sapiens
  CDR3 for alpha chain variable domain of TCR clone 321915 (TRAV1-1, TRAJ23)
CAVSIYNQGGKLIF

SEQ ID NO: 643830 - protein, 15 aa, Homo sapiens
  CDR3 for beta chain variable domain of TCR clone 321915 (TRBV11-3, TRBJ2-3)
CASLKDGREGDTQYF

SEQ ID NO: 643831 - protein, 12 aa, Homo sapiens
  CDR3 for alpha chain variable domain of TCR clone 321916 (TRAV6, TRAJ27)
CSRIRGAGKSTF

SEQ ID NO: 643832 - protein, 14 aa, Homo sapiens
  CDR3 for beta chain variable domain of TCR clone 321916 (TRBV28, TRBJ1-3)
CASSFRDRVNTIYF

SEQ ID NO: 643833 - protein, 14 aa, Homo sapiens
  CDR3 for alpha chain variable domain of TCR clone 321917 (TRAV21, TRAJ9)
CCGGGGTGGSKTIF

SEQ ID NO: 643834 - protein, 13 aa, Homo sapiens
  CDR3 for beta chain variable domain of TCR clone 321917 (TRBV12-4, TRBJ1-2)
CASSSGLTVISTF

SEQ ID NO: 643835 - protein, 13 aa, Homo sapiens
  CDR3 for alpha chain variable domain of TCR clone 321918 (TRAV8-2, TRAJ49)
CVVTPNTGNQFYF

SEQ ID NO: 643836 - protein, 15 aa, Homo sapiens
  CDR3 for beta chain variable domain of TCR clone 321918 (TRBV11-2, TRBJ2-1)
CASSLPSGGTMSSSS

SEQ ID NO: 643837 - protein, 14 aa, Homo sapiens
  CDR3 for alpha chain variable domain of TCR clone 321919 (TRAV12-2, TRAJ40)
CAVKIPSGTYKYIF

SEQ ID NO: 643838 - protein, 13 aa, Homo sapiens
  CDR3 for beta chain variable domain of TCR clone 321919 (TRBV7-3, TRBJ1-1)
CASSQDWGAEDFF

SEQ ID NO: 643839 - protein, 15 aa, Homo sapiens
  CDR3 for alpha chain variable domain of TCR clone 321920 (TRAV12-1, TRAJ42)
CVVPRDGGSQGNLIF

SEQ ID NO: 643840 - protein, 14 aa, Homo sapiens
  CDR3 for beta chain variable domain of TCR clone 321920 (TRBV11-2, TRBJ2-3)
CASSLGGGANTQYF

SEQ ID NO: 643841 - protein, 16 aa, Homo sapiens
  CDR3 for alpha chain variable domain of TCR clone 321921 (TRAV30, TRAJ24)
CGTAIVDDDSWGKFQF

SEQ ID NO: 643842 - protein, 17 aa, Homo sapiens
  CDR3 for beta chain variable domain of TCR clone 321921 (TRBV11-2, TRBJ2-1)
CASSLYPPGVEYNEQFF

SEQ ID NO: 643843 - protein, 15 aa, Homo sapiens
  CDR3 for alpha chain variable domain of TCR clone 321922 (TRAV26-1, TRAJ29)
CIVRVEGSGNTPLVF

SEQ ID NO: 643844 - protein, 12 aa, Homo sapiens
  CDR3 for beta chain variable domain of TCR clone 321922 (TRBV19, TRBJ2-1)
CASSRQGAEQFF

SEQ ID NO: 643845 - protein, 14 aa, Homo sapiens
  CDR3 for alpha chain variable domain of TCR clone 321923 (TRAV1-2, TRAJ16)
CAVNRFSDGQKLLF

SEQ ID NO: 643846 - protein, 19 aa, Homo sapiens
  CDR3 for beta chain variable domain of TCR clone 321923 (TRBV7-2, TRBJ2-3)
CASSFLSRNWGGGTDTQYC

SEQ ID NO: 643847 - protein, 13 aa, Homo sapiens
  CDR3 for alpha chain variable domain of TCR clone 321924 (TRAV21, TRAJ27)
CAALPGNAGKSTF

SEQ ID NO: 643848 - protein, 13 aa, Homo sapiens
  CDR3 for beta chain variable domain of TCR clone 321924 (TRBV20-1, TRBJ1-1)
CSARGGGNTEAFF

SEQ ID NO: 643849 - protein, 14 aa, Homo sapiens
  CDR3 for alpha chain variable domain of TCR clone 321925 (TRAV13-1, TRAJ37)
CAARATRNTGKLIF

SEQ ID NO: 643850 - protein, 13 aa, Homo sapiens
  CDR3 for beta chain variable domain of TCR clone 321925 (TRBV7-9, TRBJ1-2)
CASSLKQNYGYTF

SEQ ID NO: 643851 - protein, 15 aa, Homo sapiens
  CDR3 for alpha chain variable domain of TCR clone 321926 (TRAV8-3, TRAJ40)
CAAPSLSSGTYKYIF

SEQ ID NO: 643852 - protein, 16 aa, Homo sapiens
  CDR3 for beta chain variable domain of TCR clone 321926 (TRBV7-3, TRBJ2-3)
CASSLSGYRPEDTQYF

SEQ ID NO: 643853 - protein, 16 aa, Homo sapiens
  CDR3 for alpha chain variable domain of TCR clone 321927 (TRAV12-2, TRAJ40)
CAVIRGGTSGTYKYIF

SEQ ID NO: 643854 - protein, 14 aa, Homo sapiens
  CDR3 for beta chain variable domain of TCR clone 321927 (TRBV20-1, TRBJ2-5)
FSARDGRAGETQYF

SEQ ID NO: 643855 - protein, 14 aa, Homo sapiens
  CDR3 for alpha chain variable domain of TCR clone 321928 (TRAV4, TRAJ20)
CPVGRRSNDCKLSF

SEQ ID NO: 643856 - protein, 13 aa, Homo sapiens
  CDR3 for beta chain variable domain of TCR clone 321928 (TRBV19, TRBJ1-2)
CASSVPGQDGYTF

SEQ ID NO: 643857 - protein, 12 aa, Homo sapiens
  CDR3 for alpha chain variable domain of TCR clone 321929 (TRAV13-2, TRAJ8)
CAPWLGFQKLVF

SEQ ID NO: 643858 - protein, 15 aa, Homo sapiens
  CDR3 for beta chain variable domain of TCR clone 321929 (TRBV7-2, TRBJ2-7)
CASSLALGSAYEQYF

SEQ ID NO: 643859 - protein, 14 aa, Homo sapiens
  CDR3 for alpha chain variable domain of TCR clone 321930 (TRAV1-2, TRAJ8)
CAVREDTGFQKLGS

SEQ ID NO: 643860 - protein, 15 aa, Homo sapiens
  CDR3 for beta chain variable domain of TCR clone 321930 (TRBV6-3, TRBJ2-7)
CASSSPGTVFYEQYF

SEQ ID NO: 643861 - protein, 13 aa, Homo sapiens
  CDR3 for alpha chain variable domain of TCR clone 321931 (TRAV8-4, TRAJ48)
CAVSLFGNEKLTF

SEQ ID NO: 643862 - protein, 15 aa, Homo sapiens
  CDR3 for beta chain variable domain of TCR clone 321931 (TRBV20-1, TRBJ2-7)
CSAGKGLAESYEKYF

SEQ ID NO: 643863 - protein, 13 aa, Homo sapiens
  CDR3 for alpha chain variable domain of TCR clone 321932 (TRAV21, TRAJ15)
CAVANQAGTALIF

SEQ ID NO: 643864 - protein, 14 aa, Homo sapiens
  CDR3 for beta chain variable domain of TCR clone 321932 (TRBV12-4, TRBJ2-3)
CASSLSGFTDTQYF

SEQ ID NO: 643865 - protein, 14 aa, Homo sapiens
  CDR3 for alpha chain variable domain of TCR clone 321933 (TRAV12-1, TRAJ12)
CVVTRMDSSYKLIF

SEQ ID NO: 643866 - protein, 16 aa, Homo sapiens
  CDR3 for beta chain variable domain of TCR clone 321933 (TRBV20-1, TRBJ1-2)
CSASMGQGVANYGYTF

SEQ ID NO: 643867 - protein, 14 aa, Homo sapiens
  CDR3 for alpha chain variable domain of TCR clone 321934 (TRAV1-2, TRAJ16)
CAVNRFSDGQKLLF

SEQ ID NO: 643868 - protein, 14 aa, Homo sapiens
  CDR3 for beta chain variable domain of TCR clone 321934 (TRBV7-9, TRBJ2-3)
CASSLEDGIDTQYF

SEQ ID NO: 643869 - protein, 12 aa, Homo sapiens
  CDR3 for alpha chain variable domain of TCR clone 321935 (TRAV1-2, TRAJ26)
CAVRYYGQNFVF

SEQ ID NO: 643870 - protein, 17 aa, Homo sapiens
  CDR3 for beta chain variable domain of TCR clone 321935 (TRBV28, TRBJ2-5)
CASSTPEGDALQETQYF

SEQ ID NO: 643871 - protein, 11 aa, Homo sapiens
  CDR3 for alpha chain variable domain of TCR clone 321936 (TRAV35, TRAJ30)
CAGERDDKIIF

SEQ ID NO: 643872 - protein, 14 aa, Homo sapiens
  CDR3 for beta chain variable domain of TCR clone 321936 (TRBV15, TRBJ2-5)
CATSGDRGQESQYF

SEQ ID NO: 643873 - protein, 18 aa, Homo sapiens
  CDR3 for alpha chain variable domain of TCR clone 321937 (TRAV12-1, TRAJ52)
CVVKLINAGGTSYGKLTF

SEQ ID NO: 643874 - protein, 12 aa, Homo sapiens
  CDR3 for beta chain variable domain of TCR clone 321937 (TRBV5-1, TRBJ1-1)
CASSFGNTEAFF

SEQ ID NO: 643875 - protein, 13 aa, Homo sapiens
  CDR3 for alpha chain variable domain of TCR clone 321938 (TRAV8-4, TRAJ30)
CAVSVNRDDKIIF

SEQ ID NO: 643876 - protein, 13 aa, Homo sapiens
  CDR3 for beta chain variable domain of TCR clone 321938 (TRBV29-1, TRBJ2-1)
CSVEGGRVNEQFF

SEQ ID NO: 643877 - protein, 14 aa, Homo sapiens
  CDR3 for alpha chain variable domain of TCR clone 321939 (TRAV17, TRAJ57)
CATDPQGGSEKRVL

SEQ ID NO: 643878 - protein, 16 aa, Homo sapiens
  CDR3 for beta chain variable domain of TCR clone 321939 (TRBV13, TRBJ2-2)
CASSPRTGEHTGELFF

SEQ ID NO: 643879 - protein, 15 aa, Homo sapiens
  CDR3 for alpha chain variable domain of TCR clone 321940 (TRAV12-3, TRAJ10)
CASYILTGGGNKLTF

SEQ ID NO: 643880 - protein, 15 aa, Homo sapiens
  CDR3 for beta chain variable domain of TCR clone 321940 (TRBV7-2, TRBJ1-6)
CASSLGPDRGMALLF

SEQ ID NO: 643881 - protein, 14 aa, Homo sapiens
  CDR3 for alpha chain variable domain of TCR clone 321941 (TRAV8-4, TRAJ34)
CAVSDPGDTDQLIF

SEQ ID NO: 643882 - protein, 14 aa, Homo sapiens
  CDR3 for beta chain variable domain of TCR clone 321941 (TRBV20-1, TRBJ2-5)
CSARDGRAGETQYF

SEQ ID NO: 643883 - protein, 10 aa, Homo sapiens
  CDR3 for alpha chain variable domain of TCR clone 321942 (TRAV30, TRAJ48)
CGIGNEKLTF

SEQ ID NO: 643884 - protein, 14 aa, Homo sapiens
  CDR3 for beta chain variable domain of TCR clone 321942 (TRBV9, TRBJ2-7)
CASSVGVGSYEQYF

SEQ ID NO: 643885 - protein, 18 aa, Homo sapiens
  CDR3 for alpha chain variable domain of TCR clone 321943 (TRAV12-3, TRAJ52)
CAMSRTNAGGTSYGKLTF

SEQ ID NO: 643886 - protein, 15 aa, Homo sapiens
  CDR3 for beta chain variable domain of TCR clone 321943 (TRBV4-1, TRBJ2-3)
CASSRGQGIPDTQYF

SEQ ID NO: 643887 - protein, 15 aa, Homo sapiens
  CDR3 for alpha chain variable domain of TCR clone 321944 (TRAV21, TRAJ24)
CAVRSSTDSWGKLQF

SEQ ID NO: 643888 - protein, 14 aa, Homo sapiens
  CDR3 for beta chain variable domain of TCR clone 321944 (TRBV11-3, TRBJ2-5)
CASSRTGGIETQYF

SEQ ID NO: 643889 - protein, 15 aa, Homo sapiens
  CDR3 for alpha chain variable domain of TCR clone 321945 (TRAV4, TRAJ39)
CLVGPNNNAGNMLTF

SEQ ID NO: 643890 - protein, 15 aa, Homo sapiens
  CDR3 for beta chain variable domain of TCR clone 321945 (TRBV5-1, TRBJ2-7)
CASSLGDFTTYEQYF

SEQ ID NO: 643891 - protein, 12 aa, Homo sapiens
  CDR3 for alpha chain variable domain of TCR clone 321946 (TRAV1-1, TRAJ39)
CAVPVVGNMLTF

SEQ ID NO: 643892 - protein, 18 aa, Homo sapiens
  CDR3 for beta chain variable domain of TCR clone 321946 (TRBV7-9, TRBJ2-7)
WASSLTTSGSRTWYEQYF

SEQ ID NO: 643893 - protein, 12 aa, Homo sapiens
  CDR3 for alpha chain variable domain of TCR clone 321947 (TRAV1-2, TRAJ33)
CAALDSNYQLIW

SEQ ID NO: 643894 - protein, 10 aa, Homo sapiens
  CDR3 for beta chain variable domain of TCR clone 321947 (TRBV2, TRBJ2-7)
CASSVYEQYF

SEQ ID NO: 643895 - protein, 15 aa, Homo sapiens
  CDR3 for alpha chain variable domain of TCR clone 321948 (TRAV3, TRAJ12)
CAVRDIRDSSYKLIF

SEQ ID NO: 643896 - protein, 12 aa, Homo sapiens
  CDR3 for beta chain variable domain of TCR clone 321948 (TRBV7-8, TRBJ2-1)
CASSLGHNEQFF

SEQ ID NO: 643897 - protein, 13 aa, Homo sapiens
  CDR3 for alpha chain variable domain of TCR clone 321949 (TRAV12-2, TRAJ20)
CAAYPSNDYKLSF

SEQ ID NO: 643898 - protein, 15 aa, Homo sapiens
  CDR3 for beta chain variable domain of TCR clone 321949 (TRBV27, TRBJ2-5)
CASSLYRRGGETQYF

SEQ ID NO: 643899 - protein, 11 aa, Homo sapiens
  CDR3 for alpha chain variable domain of TCR clone 321950 (TRAV12-1, TRAJ34)
CVVNKGRELIF

SEQ ID NO: 643900 - protein, 12 aa, Homo sapiens
  CDR3 for beta chain variable domain of TCR clone 321950 (TRBV11-3, TRBJ2-2)
CASSLGGGELFF

SEQ ID NO: 643901 - protein, 12 aa, Homo sapiens
  CDR3 for alpha chain variable domain of TCR clone 321951 (TRAV16, TRAJ56)
CAPTGANSKLTF

SEQ ID NO: 643902 - protein, 13 aa, Homo sapiens
  CDR3 for beta chain variable domain of TCR clone 321951 (TRBV3-1, TRBJ2-2)
CASLARGSGELFF

SEQ ID NO: 643903 - protein, 12 aa, Homo sapiens
  CDR3 for alpha chain variable domain of TCR clone 321952 (TRAV12-3, TRAJ17)
CAMTLTGNKLTF

SEQ ID NO: 643904 - protein, 17 aa, Homo sapiens
  CDR3 for beta chain variable domain of TCR clone 321952 (TRBV5-1, TRBJ2-1)
CASSLRQISFSYNEQFF

SEQ ID NO: 643905 - protein, 10 aa, Homo sapiens
  CDR3 for alpha chain variable domain of TCR clone 321953 (TRAV30, TRAJ16)
CGTGGQKLLF

SEQ ID NO: 643906 - protein, 14 aa, Homo sapiens
  CDR3 for beta chain variable domain of TCR clone 321953 (TRBV19, TRBJ2-1)
CASSRLASINEQFF

SEQ ID NO: 643907 - protein, 15 aa, Homo sapiens
  CDR3 for alpha chain variable domain of TCR clone 321954 (TRAV8-3, TRAJ23)
CAVGDRYNQGGKLIF

SEQ ID NO: 643908 - protein, 22 aa, Homo sapiens
  CDR3 for beta chain variable domain of TCR clone 321954 (TRBV29-1, TRBJ2-5)
TVSNMSPEDSSIYLCSARTQYF

SEQ ID NO: 643909 - protein, 13 aa, Homo sapiens
  CDR3 for alpha chain variable domain of TCR clone 321955 (TRAV1-1, TRAJ9)
CAAKNTGGFKTIF

SEQ ID NO: 643910 - protein, 15 aa, Homo sapiens
  CDR3 for beta chain variable domain of TCR clone 321955 (TRBV4-1, TRBJ1-4)
CASSDTGGTNEKLFF

SEQ ID NO: 643911 - protein, 14 aa, Homo sapiens
  CDR3 for alpha chain variable domain of TCR clone 321956 (TRAV12-3, TRAJ15)
CAMIPPQAGTALIF

SEQ ID NO: 643912 - protein, 17 aa, Homo sapiens
  CDR3 for beta chain variable domain of TCR clone 321956 (TRBV20-1, TRBJ1-5)
CSASLSPGQGGNQPQHF

SEQ ID NO: 643913 - protein, 15 aa, Homo sapiens
  CDR3 for alpha chain variable domain of TCR clone 321957 (TRAV1-2, TRAJ38)
CAVSENAGNNRKLIW

SEQ ID NO: 643914 - protein, 16 aa, Homo sapiens
  CDR3 for beta chain variable domain of TCR clone 321957 (TRBV4-1, TRBJ2-7)
CASSLTAGQAIYEQYF

SEQ ID NO: 643915 - protein, 10 aa, Homo sapiens
  CDR3 for alpha chain variable domain of TCR clone 321958 (TRAV12-1, TRAJ37)
ARGNTGKLIY

SEQ ID NO: 643916 - protein, 15 aa, Homo sapiens
  CDR3 for beta chain variable domain of TCR clone 321958 (TRBV7-2, TRBJ2-3)
CASSLEQGGTDTQYF

SEQ ID NO: 643917 - protein, 16 aa, Homo sapiens
  CDR3 for alpha chain variable domain of TCR clone 321959 (TRAV3, TRAJ10)
CAVRDTRAGGGNKLTF

SEQ ID NO: 643918 - protein, 12 aa, Homo sapiens
  CDR3 for beta chain variable domain of TCR clone 321959 (TRBV20-1, TRBJ2-7)
CSAGLKMGEQYF

SEQ ID NO: 643919 - protein, 16 aa, Homo sapiens
  CDR3 for alpha chain variable domain of TCR clone 321960 (TRAV12-3, TRAJ53)
CAMSPGSGGSNYKQTF

SEQ ID NO: 643920 - protein, 16 aa, Homo sapiens
  CDR3 for beta chain variable domain of TCR clone 321960 (TRBV5-1, TRBJ2-3)
CASSLEGGSVTDTQYF

SEQ ID NO: 643921 - protein, 13 aa, Homo sapiens
  CDR3 for alpha chain variable domain of TCR clone 321961 (TRAV3, TRAJ21)
CAVREPDFNKFYF

SEQ ID NO: 643922 - protein, 14 aa, Homo sapiens
  CDR3 for beta chain variable domain of TCR clone 321961 (TRBV13, TRBJ2-7)
CASSLKGASYEQYF

SEQ ID NO: 643923 - protein, 15 aa, Homo sapiens
  CDR3 for alpha chain variable domain of TCR clone 321962 (TRAV25, TRAJ52)
CAGRPGGTSYGKLTF

SEQ ID NO: 643924 - protein, 17 aa, Homo sapiens
  CDR3 for beta chain variable domain of TCR clone 321962 (TRBV7-8, TRBJ2-6)
CASSAGTGGAGANDLIF

SEQ ID NO: 643925 - protein, 13 aa, Homo sapiens
  CDR3 for alpha chain variable domain of TCR clone 321963 (TRAV1-1, TRAJ9)
CAAKNTGCFKTIF

SEQ ID NO: 643926 - protein, 15 aa, Homo sapiens
  CDR3 for beta chain variable domain of TCR clone 321963 (TRBV20-1, TRBJ2-7)
CSAESVTIGAYEQYF

SEQ ID NO: 643927 - protein, 12 aa, Homo sapiens
  CDR3 for alpha chain variable domain of TCR clone 321964 (TRAV16, TRAJ56)
CAPTGANSKLTF

SEQ ID NO: 643928 - protein, 14 aa, Homo sapiens
  CDR3 for beta chain variable domain of TCR clone 321964 (TRBV6-1, TRBJ1-3)
CASVQGGGGNTIYF

SEQ ID NO: 643929 - protein, 12 aa, Homo sapiens
  CDR3 for alpha chain variable domain of TCR clone 321965 (TRAV12-3, TRAJ17)
CAMTLTGNELNF

SEQ ID NO: 643930 - protein, 15 aa, Homo sapiens
  CDR3 for beta chain variable domain of TCR clone 321965 (TRBV4-2, TRBJ2-7)
CASSQVDRSSYEQYF

SEQ ID NO: 643931 - protein, 16 aa, Homo sapiens
  CDR3 for alpha chain variable domain of TCR clone 321966 (TRAV3, TRAJ28)
CAVLPRSGAGSYQLTF

SEQ ID NO: 643932 - protein, 16 aa, Homo sapiens
  CDR3 for beta chain variable domain of TCR clone 321966 (TRBV12-4, TRBJ2-1)
CASSAVGQGNGDEQFF

SEQ ID NO: 643933 - protein, 14 aa, Homo sapiens
  CDR3 for alpha chain variable domain of TCR clone 321967 (TRAV13-1, TRAJ44)
CAAKATGTPSKLTF

SEQ ID NO: 643934 - protein, 16 aa, Homo sapiens
  CDR3 for beta chain variable domain of TCR clone 321967 (TRBV15, TRBJ1-2)
CATSRGPRTGGGGYTF

SEQ ID NO: 643935 - protein, 16 aa, Homo sapiens
  CDR3 for alpha chain variable domain of TCR clone 321968 (TRAV27, TRAJ52)
CAGAPAGGTSYGKLTF

SEQ ID NO: 643936 - protein, 12 aa, Homo sapiens
  CDR3 for beta chain variable domain of TCR clone 321968 (TRBV27, TRBJ2-1)
CPSRGFYNEQFF

SEQ ID NO: 643937 - protein, 14 aa, Homo sapiens
  CDR3 for alpha chain variable domain of TCR clone 321969 (TRAV12-2, TRAJ40)
CAVKIPSGTYNYIF

SEQ ID NO: 643938 - protein, 15 aa, Homo sapiens
  CDR3 for beta chain variable domain of TCR clone 321969 (TRBV2, TRBJ2-7)
CASSEGLARSYEQYF

SEQ ID NO: 643939 - protein, 15 aa, Homo sapiens
  CDR3 for alpha chain variable domain of TCR clone 321970 (TRAV35, TRAJ40)
CAGQLGTTGTYKYIF

SEQ ID NO: 643940 - protein, 14 aa, Homo sapiens
  CDR3 for beta chain variable domain of TCR clone 321970 (TRBV7-3, TRBJ2-1)
CASSLAGGTNEQFF

SEQ ID NO: 643941 - protein, 14 aa, Homo sapiens
  CDR3 for alpha chain variable domain of TCR clone 321971 (TRAV34, TRAJ22)
CGADTSGSARQLTF

SEQ ID NO: 643942 - protein, 15 aa, Homo sapiens
  CDR3 for beta chain variable domain of TCR clone 321971 (TRBV20-1, TRBJ2-3)
CSAEPLAGHGDTQYF

SEQ ID NO: 643943 - protein, 14 aa, Homo sapiens
  CDR3 for alpha chain variable domain of TCR clone 321972 (TRAV8-6, TRAJ57)
CAVRLEGGSEKLVF

SEQ ID NO: 643944 - protein, 14 aa, Homo sapiens
  CDR3 for beta chain variable domain of TCR clone 321972 (TRBV5-1, TRBJ2-2)
CASSLGGGSGELFF

SEQ ID NO: 643945 - protein, 11 aa, Homo sapiens
  CDR3 for alpha chain variable domain of TCR clone 321973 (TRAV21, TRAJ34)
CAPLDTDKLIF

SEQ ID NO: 643946 - protein, 16 aa, Homo sapiens
  CDR3 for beta chain variable domain of TCR clone 321973 (TRBV5-1, TRBJ2-3)
CASSLAGDRGRDTQYF

SEQ ID NO: 643947 - protein, 15 aa, Homo sapiens
  CDR3 for alpha chain variable domain of TCR clone 321974 (TRAV3, TRAJ5)
CAVRDRKTGRRALTF

SEQ ID NO: 643948 - protein, 14 aa, Homo sapiens
  CDR3 for beta chain variable domain of TCR clone 321974 (TRBV7-8, TRBJ2-3)
CASSLEAGTDTQYF

SEQ ID NO: 643949 - protein, 15 aa, Homo sapiens
  CDR3 for alpha chain variable domain of TCR clone 321975 (TRAV35, TRAJ23)
CSWPLGNNQGGKLIF

SEQ ID NO: 643950 - protein, 14 aa, Homo sapiens
  CDR3 for beta chain variable domain of TCR clone 321975 (TRBV7-9, TRBJ1-1)
CASTPLQSYTEAFF

SEQ ID NO: 643951 - protein, 18 aa, Homo sapiens
  CDR3 for alpha chain variable domain of TCR clone 321976 (TRAV14/DV4, TRAJ15)
CAMREFPPTGQAGTALIF

SEQ ID NO: 643952 - protein, 17 aa, Homo sapiens
  CDR3 for beta chain variable domain of TCR clone 321976 (TRBV13, TRBJ2-3)
CASSLSRVAGGRNTQYF

SEQ ID NO: 643953 - protein, 15 aa, Homo sapiens
  CDR3 for alpha chain variable domain of TCR clone 321977 (TRAV23/DV6, TRAJ44)
CAAMKPTGTASKLTF

SEQ ID NO: 643954 - protein, 16 aa, Homo sapiens
  CDR3 for beta chain variable domain of TCR clone 321977 (TRBV28, TRBJ2-5)
CATSGWPSRLKEAQYF

SEQ ID NO: 643955 - protein, 12 aa, Homo sapiens
  CDR3 for alpha chain variable domain of TCR clone 321978 (TRAV17, TRAJ57)
CSTDGGSEKLVF

SEQ ID NO: 643956 - protein, 12 aa, Homo sapiens
  CDR3 for beta chain variable domain of TCR clone 321978 (TRBV29-1, TRBJ2-2)
CSVDKYTGELFF

SEQ ID NO: 643957 - protein, 15 aa, Homo sapiens
  CDR3 for alpha chain variable domain of TCR clone 321979 (TRAV4, TRAJ10)
CLVGDGSGGGNKLTF

SEQ ID NO: 643958 - protein, 16 aa, Homo sapiens
  CDR3 for beta chain variable domain of TCR clone 321979 (TRBV5-1, TRBJ2-2)
CASSLWDTTNTGELFF

SEQ ID NO: 643959 - protein, 13 aa, Homo sapiens
  CDR3 for alpha chain variable domain of TCR clone 321980 (TRAV2, TRAJ15)
CAVEAQAGTALIF

SEQ ID NO: 643960 - protein, 14 aa, Homo sapiens
  CDR3 for beta chain variable domain of TCR clone 321980 (TRBV19, TRBJ2-1)
CASPTFVLSGEQFF

SEQ ID NO: 643961 - protein, 14 aa, Homo sapiens
  CDR3 for alpha chain variable domain of TCR clone 321981 (TRAV1-2, TRAJ16)
CAVNRFSDGQKLLF

SEQ ID NO: 643962 - protein, 16 aa, Homo sapiens
  CDR3 for beta chain variable domain of TCR clone 321981 (TRBV7-8, TRBJ2-3)
CASSTEGQRETDTQYF

SEQ ID NO: 643963 - protein, 15 aa, Homo sapiens
  CDR3 for alpha chain variable domain of TCR clone 321982 (TRAV17, TRAJ13)
CATVPNSGGYQKVTF

SEQ ID NO: 643964 - protein, 19 aa, Homo sapiens
  CDR3 for beta chain variable domain of TCR clone 321982 (TRBV28, TRBJ2-7)
CASSYSGTSRLGWVYEQYF

SEQ ID NO: 643965 - protein, 15 aa, Homo sapiens
  CDR3 for alpha chain variable domain of TCR clone 321983 (TRAV12-3, TRAJ6)
CAMSATTGGSYIPTF

SEQ ID NO: 643966 - protein, 15 aa, Homo sapiens
  CDR3 for beta chain variable domain of TCR clone 321983 (TRBV7-3, TRBJ2-1)
CASSPTGGGEVEQFF

SEQ ID NO: 643967 - protein, 11 aa, Homo sapiens
  CDR3 for alpha chain variable domain of TCR clone 321984 (TRAV3, TRAJ49)
CAPIPGNQFYF

SEQ ID NO: 643968 - protein, 16 aa, Homo sapiens
  CDR3 for beta chain variable domain of TCR clone 321984 (TRBV5-1, TRBJ2-3)
CASSVFPMSSTDTQYF

SEQ ID NO: 643969 - protein, 16 aa, Homo sapiens
  CDR3 for alpha chain variable domain of TCR clone 321985 (TRAV38-2/DV8, TRAJ45)
CAYTTTSGGGADGLTF

SEQ ID NO: 643970 - protein, 15 aa, Homo sapiens
  CDR3 for beta chain variable domain of TCR clone 321985 (TRBV9, TRBJ1-6)
CASSVAGTGDSPLHF

SEQ ID NO: 643971 - protein, 14 aa, Homo sapiens
  CDR3 for alpha chain variable domain of TCR clone 321986 (TRAV13-1, TRAJ15)
CAASTNQAVTALIF

SEQ ID NO: 643972 - protein, 11 aa, Homo sapiens
  CDR3 for beta chain variable domain of TCR clone 321986 (TRBV7-2, TRBJ2-1)
CASSLRDNEFF

SEQ ID NO: 643973 - protein, 17 aa, Homo sapiens
  CDR3 for alpha chain variable domain of TCR clone 321987 (TRAV23/DV6, TRAJ57)
CAASSTLSQGGPEKLVF

SEQ ID NO: 643974 - protein, 14 aa, Homo sapiens
  CDR3 for beta chain variable domain of TCR clone 321987 (TRBV19, TRBJ2-1)
CASSKDRGQDEQFF

SEQ ID NO: 643975 - protein, 17 aa, Homo sapiens
  CDR3 for alpha chain variable domain of TCR clone 321988 (TRAV36/DV7, TRAJ52)
CAVAQRAGGTSYGKLTF

SEQ ID NO: 643976 - protein, 14 aa, Homo sapiens
  CDR3 for beta chain variable domain of TCR clone 321988 (TRBV15, TRBJ2-3)
CATRSGTSTDTQYF

SEQ ID NO: 643977 - protein, 14 aa, Homo sapiens
  CDR3 for alpha chain variable domain of TCR clone 321989 (TRAV9-2, TRAJ39)
CALYIYNEGNMLTF

SEQ ID NO: 643978 - protein, 16 aa, Homo sapiens
  CDR3 for beta chain variable domain of TCR clone 321989 (TRBV25-1, TRBJ1-1)
CASSGDRDRGRIEAFF

SEQ ID NO: 643979 - protein, 12 aa, Homo sapiens
  CDR3 for alpha chain variable domain of TCR clone 321990 (TRAV12-1, TRAJ34)
CLVAGATDKLIF

SEQ ID NO: 643980 - protein, 16 aa, Homo sapiens
  CDR3 for beta chain variable domain of TCR clone 321990 (TRBV7-2, TRBJ1-2)
CASSSNQDRRGHGYTF

SEQ ID NO: 643981 - protein, 16 aa, Homo sapiens
  CDR3 for alpha chain variable domain of TCR clone 321991 (TRAV13-1, TRAJ18)
CAASRMRGSTLGRLYF

SEQ ID NO: 643982 - protein, 17 aa, Homo sapiens
  CDR3 for beta chain variable domain of TCR clone 321991 (TRBV4-1, TRBJ2-5)
CASSQGWLGKVQETQYF

SEQ ID NO: 643983 - protein, 12 aa, Homo sapiens
  CDR3 for alpha chain variable domain of TCR clone 321992 (TRAV12-3, TRAJ17)
CAMTLIGNKLTF

SEQ ID NO: 643984 - protein, 14 aa, Homo sapiens
  CDR3 for beta chain variable domain of TCR clone 321992 (TRBV6-3, TRBJ2-2)
CASTYTPDTGELFF

SEQ ID NO: 643985 - protein, 10 aa, Homo sapiens
  CDR3 for alpha chain variable domain of TCR clone 321993 (TRAV20, TRAJ49)
CAVQASPVLF

SEQ ID NO: 643986 - protein, 12 aa, Homo sapiens
  CDR3 for beta chain variable domain of TCR clone 321993 (TRBV7-3, TRBJ2-1)
CASSFINNEQFF

SEQ ID NO: 643987 - protein, 16 aa, Homo sapiens
  CDR3 for alpha chain variable domain of TCR clone 321994 (TRAV35, TRAJ28)
CAGQKYSGAGSYQLTF

SEQ ID NO: 643988 - protein, 13 aa, Homo sapiens
  CDR3 for beta chain variable domain of TCR clone 321994 (TRBV7-3, TRBJ1-1)
CASSQDWGAEAFF

SEQ ID NO: 643989 - protein, 15 aa, Homo sapiens
  CDR3 for alpha chain variable domain of TCR clone 321995 (TRAV21, TRAJ13)
CAVRPTSGGYQKGTF

SEQ ID NO: 643990 - protein, 18 aa, Homo sapiens
  CDR3 for beta chain variable domain of TCR clone 321995 (TRBV11-3, TRBJ2-1)
CASSSYPGGRDSYNERFF

SEQ ID NO: 643991 - protein, 14 aa, Homo sapiens
  CDR3 for alpha chain variable domain of TCR clone 321996 (TRAV1-2, TRAJ8)
CAVREDTGFQKLEF

SEQ ID NO: 643992 - protein, 14 aa, Homo sapiens
  CDR3 for beta chain variable domain of TCR clone 321996 (TRBV19, TRBJ2-1)
CASPNFVLSGEQFF

SEQ ID NO: 643993 - protein, 16 aa, Homo sapiens
  CDR3 for alpha chain variable domain of TCR clone 321997 (TRAV21, TRAJ37)
CAVRPRGSSNTGKLIF

SEQ ID NO: 643994 - protein, 13 aa, Homo sapiens
  CDR3 for beta chain variable domain of TCR clone 321997 (TRBV7-3, TRBJ1-1)
CASSQDWGAEAFF

SEQ ID NO: 643995 - protein, 10 aa, Homo sapiens
  CDR3 for alpha chain variable domain of TCR clone 321998 (TRAV36/DV7, TRAJ48)
CAVGNEKLTF

SEQ ID NO: 643996 - protein, 16 aa, Homo sapiens
  CDR3 for beta chain variable domain of TCR clone 321998 (TRBV15, TRBJ2-3)
CATRLSGGMSPETQYF

SEQ ID NO: 643997 - protein, 15 aa, Homo sapiens
  CDR3 for alpha chain variable domain of TCR clone 321999 (TRAV8-3, TRAJ11)
CSVVLLNSGYSTLTF

SEQ ID NO: 643998 - protein, 16 aa, Homo sapiens
  CDR3 for beta chain variable domain of TCR clone 321999 (TRBV7-9, TRBJ1-2)
CASSLGFSSGEDGYTF

SEQ ID NO: 643999 - protein, 15 aa, Homo sapiens
  CDR3 for alpha chain variable domain of TCR clone 322000 (TRAV35, TRAJ23)
CAGQRGYNQGGKLNF

SEQ ID NO: 644000 - protein, 16 aa, Homo sapiens
  CDR3 for beta chain variable domain of TCR clone 322000 (TRBV27, TRBJ2-1)
CASSSRLAGNYNEQFF

SEQ ID NO: 644001 - protein, 16 aa, Homo sapiens
  CDR3 for alpha chain variable domain of TCR clone 322001 (TRAV13-1, TRAJ37)
CAASSLGSSNTGKLIF

SEQ ID NO: 644002 - protein, 12 aa, Homo sapiens
  CDR3 for beta chain variable domain of TCR clone 322001 (TRBV6-1, TRBJ2-5)
CASRDGRETQYF

SEQ ID NO: 644003 - protein, 13 aa, Homo sapiens
  CDR3 for alpha chain variable domain of TCR clone 322002 (TRAV39, TRAJ48)
CAAVNFGNEKLTF

SEQ ID NO: 644004 - protein, 10 aa, Homo sapiens
  CDR3 for beta chain variable domain of TCR clone 322002 (TRBV15, TRBJ2-7)
AETGGYEQYF

SEQ ID NO: 644005 - protein, 15 aa, Homo sapiens
  CDR3 for alpha chain variable domain of TCR clone 322003 (TRAV3, TRAJ4)
CAVRDGTGGYNKLIF

SEQ ID NO: 644006 - protein, 14 aa, Homo sapiens
  CDR3 for beta chain variable domain of TCR clone 322003 (TRBV19, TRBJ2-1)
CASGKSTQYNEQFF

SEQ ID NO: 644007 - protein, 18 aa, Homo sapiens
  CDR3 for alpha chain variable domain of TCR clone 322004 (TRAV9-2, TRAJ52)
CALSRHNAGGTSYGKLTF

SEQ ID NO: 644008 - protein, 17 aa, Homo sapiens
  CDR3 for beta chain variable domain of TCR clone 322004 (TRBV7-8, TRBJ2-6)
CASSAGTGGAGANVLTF

SEQ ID NO: 644009 - protein, 11 aa, Homo sapiens
  CDR3 for alpha chain variable domain of TCR clone 322005 (TRAV25, TRAJ49)
CAGGTGNQCYF

SEQ ID NO: 644010 - protein, 12 aa, Homo sapiens
  CDR3 for beta chain variable domain of TCR clone 322005 (TRBV6-5, TRBJ2-1)
CASRNDRGQQFF

SEQ ID NO: 644011 - protein, 16 aa, Homo sapiens
  CDR3 for alpha chain variable domain of TCR clone 322006 (TRAV12-2, TRAJ32)
CAVILGQGGATNKLIF

SEQ ID NO: 644012 - protein, 15 aa, Homo sapiens
  CDR3 for beta chain variable domain of TCR clone 322006 (TRBV20-1, TRBJ2-7)
CSARGPLAGGREQYF

SEQ ID NO: 644013 - protein, 14 aa, Homo sapiens
  CDR3 for alpha chain variable domain of TCR clone 322007 (TRAV1-2, TRAJ8)
CAVREGTGFQKLVF

SEQ ID NO: 644014 - protein, 14 aa, Homo sapiens
  CDR3 for beta chain variable domain of TCR clone 322007 (TRBV11-2, TRBJ2-3)
CASSRLARTDTQYF

SEQ ID NO: 644015 - protein, 14 aa, Homo sapiens
  CDR3 for alpha chain variable domain of TCR clone 322008 (TRAV34, TRAJ22)
GGADTSGSARQLTF

SEQ ID NO: 644016 - protein, 15 aa, Homo sapiens
  CDR3 for beta chain variable domain of TCR clone 322008 (TRBV27, TRBJ2-1)
CASSNGGGSSNEQFF

SEQ ID NO: 644017 - protein, 12 aa, Homo sapiens
  CDR3 for alpha chain variable domain of TCR clone 322009 (TRAV8-3, TRAJ40)
SAVTSGTYKYIF

SEQ ID NO: 644018 - protein, 14 aa, Homo sapiens
  CDR3 for beta chain variable domain of TCR clone 322009 (TRBV12-4, TRBJ2-3)
CASSGQGSTDTQYF

SEQ ID NO: 644019 - protein, 18 aa, Homo sapiens
  CDR3 for alpha chain variable domain of TCR clone 322010 (TRAV26-1, TRAJ22)
CIVRVALISSGSASQLTF

SEQ ID NO: 644020 - protein, 13 aa, Homo sapiens
  CDR3 for beta chain variable domain of TCR clone 322010 (TRBV13, TRBJ2-5)
CASSPEVGETQYF

SEQ ID NO: 644021 - protein, 12 aa, Homo sapiens
  CDR3 for alpha chain variable domain of TCR clone 322011 (TRAV12-1, TRAJ31)
CVSWNNNARLTF

SEQ ID NO: 644022 - protein, 15 aa, Homo sapiens
  CDR3 for beta chain variable domain of TCR clone 322011 (TRBV7-2, TRBJ1-5)
CASSLDRGQDQPQHF

SEQ ID NO: 644023 - protein, 13 aa, Homo sapiens
  CDR3 for alpha chain variable domain of TCR clone 322012 (TRAV30, TRAJ24)
CGTVTDSWGKLQF

SEQ ID NO: 644024 - protein, 18 aa, Homo sapiens
  CDR3 for beta chain variable domain of TCR clone 322012 (TRBV12-4, TRBJ2-4)
CASSRTGAVDAAKNIQYF

SEQ ID NO: 644025 - protein, 14 aa, Homo sapiens
  CDR3 for alpha chain variable domain of TCR clone 322013 (TRAV20, TRAJ21)
CAAGGIYNFNKFYF

SEQ ID NO: 644026 - protein, 15 aa, Homo sapiens
  CDR3 for beta chain variable domain of TCR clone 322013 (TRBV12-4, TRBJ2-2)
CASSPQPGSTGELFF

SEQ ID NO: 644027 - protein, 12 aa, Homo sapiens
  CDR3 for alpha chain variable domain of TCR clone 322014 (TRAV12-2, TRAJ10)
WGVTGGGNKLTF

SEQ ID NO: 644028 - protein, 14 aa, Homo sapiens
  CDR3 for beta chain variable domain of TCR clone 322014 (TRBV27, TRBJ1-1)
CASSLLSGLSEAFF

SEQ ID NO: 644029 - protein, 13 aa, Homo sapiens
  CDR3 for alpha chain variable domain of TCR clone 322015 (TRAV12-1, TRAJ29)
CVVNGPGNTPLVF

SEQ ID NO: 644030 - protein, 13 aa, Homo sapiens
  CDR3 for beta chain variable domain of TCR clone 322015 (TRBV7-2, TRBJ2-5)
FASSSGGLETQYC

SEQ ID NO: 644031 - protein, 15 aa, Homo sapiens
  CDR3 for alpha chain variable domain of TCR clone 322016 (TRAV1-2, TRAJ28)
CAVHYSGAGSYQLTF

SEQ ID NO: 644032 - protein, 13 aa, Homo sapiens
  CDR3 for beta chain variable domain of TCR clone 322016 (TRBV20-1, TRBJ2-7)
CSATHTSGYEQYF

SEQ ID NO: 644033 - protein, 15 aa, Homo sapiens
  CDR3 for alpha chain variable domain of TCR clone 322017 (TRAV26-1, TRAJ40)
CIVRVTTSGTYKYIF

SEQ ID NO: 644034 - protein, 12 aa, Homo sapiens
  CDR3 for beta chain variable domain of TCR clone 322017 (TRBV5-7, TRBJ2-7)
CASSLGRYEQYF

SEQ ID NO: 644035 - protein, 10 aa, Homo sapiens
  CDR3 for alpha chain variable domain of TCR clone 322018 (TRAV16, TRAJ22)
SAMYLRQLTF

SEQ ID NO: 644036 - protein, 11 aa, Homo sapiens
  CDR3 for beta chain variable domain of TCR clone 322018 (TRBV29-1, TRBJ2-5)
CSEDRTGTQYF

SEQ ID NO: 644037 - protein, 13 aa, Homo sapiens
  CDR3 for alpha chain variable domain of TCR clone 322019 (TRAV12-2, TRAJ18)
CAVRGSTLGRLYF

SEQ ID NO: 644038 - protein, 15 aa, Homo sapiens
  CDR3 for beta chain variable domain of TCR clone 322019 (TRBV20-1, TRBJ2-7)
CSARDRVSGMDEQYF

SEQ ID NO: 644039 - protein, 13 aa, Homo sapiens
  CDR3 for alpha chain variable domain of TCR clone 322020 (TRAV12-3, TRAJ33)
CAMSVNSNYQLIW

SEQ ID NO: 644040 - protein, 15 aa, Homo sapiens
  CDR3 for beta chain variable domain of TCR clone 322020 (TRBV7-3, TRBJ2-1)
CASSPTGGGEVEQFF

SEQ ID NO: 644041 - protein, 16 aa, Homo sapiens
  CDR3 for alpha chain variable domain of TCR clone 322021 (TRAV30, TRAJ24)
CGTEIVDAESWGKFQF

SEQ ID NO: 644042 - protein, 14 aa, Homo sapiens
  CDR3 for beta chain variable domain of TCR clone 322021 (TRBV7-2, TRBJ2-7)
CASSPKTSFYEQYF

SEQ ID NO: 644043 - protein, 12 aa, Homo sapiens
  CDR3 for alpha chain variable domain of TCR clone 322022 (TRAV1-1, TRAJ39)
CAVPVVGNMLTF

SEQ ID NO: 644044 - protein, 12 aa, Homo sapiens
  CDR3 for beta chain variable domain of TCR clone 322022 (TRBV19, TRBJ2-3)
CATTSSTDTQYF

SEQ ID NO: 644045 - protein, 14 aa, Homo sapiens
  CDR3 for alpha chain variable domain of TCR clone 322023 (TRAV1-2, TRAJ8)
CAVREDIGFQKLVF

SEQ ID NO: 644046 - protein, 13 aa, Homo sapiens
  CDR3 for beta chain variable domain of TCR clone 322023 (TRBV12-5, TRBJ2-3)
CASGDRQSDTQYF

SEQ ID NO: 644047 - protein, 17 aa, Homo sapiens
  CDR3 for alpha chain variable domain of TCR clone 322024 (TRAV8-6, )
CTISRTLTLPCTSLETL

SEQ ID NO: 644048 - protein, 15 aa, Homo sapiens
  CDR3 for beta chain variable domain of TCR clone 322024 (TRBV6-4, TRBJ2-1)
CASSSGTSGYNEQFF

SEQ ID NO: 644049 - protein, 12 aa, Homo sapiens
  CDR3 for alpha chain variable domain of TCR clone 322025 (TRAV12-1, TRAJ40)
CVVNGETYKYIF

SEQ ID NO: 644050 - protein, 14 aa, Homo sapiens
  CDR3 for beta chain variable domain of TCR clone 322025 (TRBV7-9, TRBJ1-1)
CASSSTKGNTEALF

SEQ ID NO: 644051 - protein, 15 aa, Homo sapiens
  CDR3 for alpha chain variable domain of TCR clone 322026 (TRAV12-2, TRAJ53)
FAVNGGGGSNSKLTF

SEQ ID NO: 644052 - protein, 12 aa, Homo sapiens
  CDR3 for beta chain variable domain of TCR clone 322026 (TRBV5-1, TRBJ2-7)
CASSSTTYEQYF

SEQ ID NO: 644053 - protein, 14 aa, Homo sapiens
  CDR3 for alpha chain variable domain of TCR clone 322027 (TRAV26-1, TRAJ34)
CIVRVPYNTDKLIF

SEQ ID NO: 644054 - protein, 15 aa, Homo sapiens
  CDR3 for beta chain variable domain of TCR clone 322027 (TRBV20-1, TRBJ2-7)
CSARVPAAYFYEQYF

SEQ ID NO: 644055 - protein, 13 aa, Homo sapiens
  CDR3 for alpha chain variable domain of TCR clone 322028 (TRAV23/DV6, TRAJ3)
CAATYSSASKIIF

SEQ ID NO: 644056 - protein, 14 aa, Homo sapiens
  CDR3 for beta chain variable domain of TCR clone 322028 (TRBV7-2, TRBJ2-7)
CASSPKTSFYEQYF

SEQ ID NO: 644057 - protein, 12 aa, Homo sapiens
  CDR3 for alpha chain variable domain of TCR clone 322029 (TRAV17, TRAJ12)
CATLRRSYKLIF

SEQ ID NO: 644058 - protein, 16 aa, Homo sapiens
  CDR3 for beta chain variable domain of TCR clone 322029 (TRBV28, TRBJ2-7)
YASSLFCETGGPEQYF

SEQ ID NO: 644059 - protein, 13 aa, Homo sapiens
  CDR3 for alpha chain variable domain of TCR clone 322030 (TRAV20, TRAJ37)
CAGCSSNAGKLIF

SEQ ID NO: 644060 - protein, 11 aa, Homo sapiens
  CDR3 for beta chain variable domain of TCR clone 322030 (TRBV12-4, TRBJ2-3)
CASTATVTQYF

SEQ ID NO: 644061 - protein, 14 aa, Homo sapiens
  CDR3 for alpha chain variable domain of TCR clone 322031 (TRAV21, TRAJ38)
CAVMGAGNNRKLIW

SEQ ID NO: 644062 - protein, 13 aa, Homo sapiens
  CDR3 for beta chain variable domain of TCR clone 322031 (TRBV7-3, TRBJ2-5)
CASSIGFFETQYC

SEQ ID NO: 644063 - protein, 14 aa, Homo sapiens
  CDR3 for alpha chain variable domain of TCR clone 322032 (TRAV8-2, TRAJ4)
CVVSPSGGYNKLIF

SEQ ID NO: 644064 - protein, 14 aa, Homo sapiens
  CDR3 for beta chain variable domain of TCR clone 322032 (TRBV19, TRBJ2-5)
CASSSSGIQETQYF

SEQ ID NO: 644065 - protein, 14 aa, Homo sapiens
  CDR3 for alpha chain variable domain of TCR clone 322033 (TRAV12-2, TRAJ13)
CAVKKTGGYQKVTS

SEQ ID NO: 644066 - protein, 15 aa, Homo sapiens
  CDR3 for beta chain variable domain of TCR clone 322033 (TRBV27, TRBJ2-1)
CASSNGGGSSNEQFL

SEQ ID NO: 644067 - protein, 14 aa, Homo sapiens
  CDR3 for alpha chain variable domain of TCR clone 322034 (TRAV26-1, TRAJ38)
CIADNAGNNRKLIW

SEQ ID NO: 644068 - protein, 12 aa, Homo sapiens
  CDR3 for beta chain variable domain of TCR clone 322034 (TRBV12-4, TRBJ2-5)
CASSSAQETQYF

SEQ ID NO: 644069 - protein, 14 aa, Homo sapiens
  CDR3 for alpha chain variable domain of TCR clone 322035 (TRAV26-1, TRAJ33)
CIVRNMDSNYQLIW

SEQ ID NO: 644070 - protein, 18 aa, Homo sapiens
  CDR3 for beta chain variable domain of TCR clone 322035 (TRBV7-9, TRBJ2-7)
CASSLTTSGSRTWYEQYF

SEQ ID NO: 644071 - protein, 12 aa, Homo sapiens
  CDR3 for alpha chain variable domain of TCR clone 322036 (TRAV4, TRAJ21)
CLVGIQLQQILL

SEQ ID NO: 644072 - protein, 12 aa, Homo sapiens
  CDR3 for beta chain variable domain of TCR clone 322036 (TRBV20-1, TRBJ2-1)
CSAQYTYNEQFF

SEQ ID NO: 644073 - protein, 15 aa, Homo sapiens
  CDR3 for alpha chain variable domain of TCR clone 322037 (TRAV8-3, TRAJ6)
CAVGPLGEGRYIPTF

SEQ ID NO: 644074 - protein, 14 aa, Homo sapiens
  CDR3 for beta chain variable domain of TCR clone 322037 (TRBV19, TRBJ2-2)
CASSTGQGAGELFF

SEQ ID NO: 644075 - protein, 13 aa, Homo sapiens
  CDR3 for alpha chain variable domain of TCR clone 322038 (TRAV26-2, TRAJ57)
CILSRGGSEKLVF

SEQ ID NO: 644076 - protein, 16 aa, Homo sapiens
  CDR3 for beta chain variable domain of TCR clone 322038 (TRBV7-9, TRBJ2-1)
CASSDVAGGSYNEQFF

SEQ ID NO: 644077 - protein, 14 aa, Homo sapiens
  CDR3 for alpha chain variable domain of TCR clone 322039 (TRAV38-1, TRAJ40)
CALRPTSGTYKYVF

SEQ ID NO: 644078 - protein, 20 aa, Homo sapiens
  CDR3 for beta chain variable domain of TCR clone 322039 (TRBV11-2, TRBJ2-2)
LRTRPCISVPAALEAGSCFF

SEQ ID NO: 644079 - protein, 18 aa, Homo sapiens
  CDR3 for alpha chain variable domain of TCR clone 322040 (TRAV26-2, TRAJ45)
CILRVDKYSGGGADGLTF

SEQ ID NO: 644080 - protein, 13 aa, Homo sapiens
  CDR3 for beta chain variable domain of TCR clone 322040 (TRBV7-3, TRBJ1-1)
CASSQDWGAEAFF

SEQ ID NO: 644081 - protein, 14 aa, Homo sapiens
  CDR3 for alpha chain variable domain of TCR clone 322041 (TRAV12-2, TRAJ13)
CAVKKTEGYQKGTF

SEQ ID NO: 644082 - protein, 13 aa, Homo sapiens
  CDR3 for beta chain variable domain of TCR clone 322041 (TRBV10-3, TRBJ2-7)
CASKLAVNYEQYF

SEQ ID NO: 644083 - protein, 14 aa, Homo sapiens
  CDR3 for alpha chain variable domain of TCR clone 322042 (TRAV12-2, TRAJ41)
CVVNRANSGYALNF

SEQ ID NO: 644084 - protein, 13 aa, Homo sapiens
  CDR3 for beta chain variable domain of TCR clone 322042 (TRBV7-9, TRBJ1-2)
CASSLKQNYGYTF

SEQ ID NO: 644085 - protein, 19 aa, Homo sapiens
  CDR3 for alpha chain variable domain of TCR clone 322043 (TRAV13-1, TRAJ52)
CAASPYQNAGGTSYGQLTF

SEQ ID NO: 644086 - protein, 13 aa, Homo sapiens
  CDR3 for beta chain variable domain of TCR clone 322043 (TRBV15, TRBJ2-7)
CATSTTGHYEQYF

SEQ ID NO: 644087 - protein, 16 aa, Homo sapiens
  CDR3 for alpha chain variable domain of TCR clone 322044 (TRAV16, TRAJ52)
CALSAAGGTSYGKLTF

SEQ ID NO: 644088 - protein, 12 aa, Homo sapiens
  CDR3 for beta chain variable domain of TCR clone 322044 (TRBV6-3, TRBJ2-1)
CASSGSYNEQFF

SEQ ID NO: 644089 - protein, 16 aa, Homo sapiens
  CDR3 for alpha chain variable domain of TCR clone 322045 (TRAV35, TRAJ28)
CAGQKYSGAGSYQLTF

SEQ ID NO: 644090 - protein, 15 aa, Homo sapiens
  CDR3 for beta chain variable domain of TCR clone 322045 (TRBV7-9, TRBJ1-6)
CASSSPGRGNSPLHF

SEQ ID NO: 644091 - protein, 14 aa, Homo sapiens
  CDR3 for alpha chain variable domain of TCR clone 322046 (TRAV12-2, TRAJ5)
CAVNRSTGRRALTF

SEQ ID NO: 644092 - protein, 14 aa, Homo sapiens
  CDR3 for beta chain variable domain of TCR clone 322046 (TRBV11-2, TRBJ2-5)
CASSLGQIQETQYF

SEQ ID NO: 644093 - protein, 14 aa, Homo sapiens
  CDR3 for alpha chain variable domain of TCR clone 322047 (TRAV2, TRAJ9)
CAVEDRSGGFKTIL

SEQ ID NO: 644094 - protein, 13 aa, Homo sapiens
  CDR3 for beta chain variable domain of TCR clone 322047 (TRBV19, TRBJ1-2)
CASSQGQVYGYTF

SEQ ID NO: 644095 - protein, 17 aa, Homo sapiens
  CDR3 for alpha chain variable domain of TCR clone 322048 (TRAV13-1, TRAJ28)
CAASPPYSGAGSYQLTF

SEQ ID NO: 644096 - protein, 13 aa, Homo sapiens
  CDR3 for beta chain variable domain of TCR clone 322048 (TRBV3-1, TRBJ1-1)
CASSPGVITEAFF

SEQ ID NO: 644097 - protein, 14 aa, Homo sapiens
  CDR3 for alpha chain variable domain of TCR clone 322049 (TRAV12-2, TRAJ40)
CAVKIPSGTYKYIF

SEQ ID NO: 644098 - protein, 15 aa, Homo sapiens
  CDR3 for beta chain variable domain of TCR clone 322049 (TRBV7-8, TRBJ1-5)
CASSRGGGADQPQHF

SEQ ID NO: 644099 - protein, 16 aa, Homo sapiens
  CDR3 for alpha chain variable domain of TCR clone 322050 (TRAV17, TRAJ22)
CATGPISSGSARQLTF

SEQ ID NO: 644100 - protein, 15 aa, Homo sapiens
  CDR3 for beta chain variable domain of TCR clone 322050 (TRBV4-1, TRBJ1-4)
CASSDTGGTNEKLFF

SEQ ID NO: 644101 - protein, 16 aa, Homo sapiens
  CDR3 for alpha chain variable domain of TCR clone 322051 (TRAV30, TRAJ24)
CGTEIVDADSWGKFQL

SEQ ID NO: 644102 - protein, 16 aa, Homo sapiens
  CDR3 for beta chain variable domain of TCR clone 322051 (TRBV28, TRBJ2-7)
CASSLFFETGGPEQYF

SEQ ID NO: 644103 - protein, 12 aa, Homo sapiens
  CDR3 for alpha chain variable domain of TCR clone 322052 (TRAV23/DV6, TRAJ32)
CSMPGATNKLIF

SEQ ID NO: 644104 - protein, 17 aa, Homo sapiens
  CDR3 for beta chain variable domain of TCR clone 322052 (TRBV13, TRBJ2-3)
CASISLGTSGLTDTQYF

SEQ ID NO: 644105 - protein, 10 aa, Homo sapiens
  CDR3 for alpha chain variable domain of TCR clone 322053 (TRAV12-1, TRAJ37)
ARGNTGKLIF

SEQ ID NO: 644106 - protein, 16 aa, Homo sapiens
  CDR3 for beta chain variable domain of TCR clone 322053 (TRBV7-2, TRBJ2-2)
CASSLNRGTLSGELFF

SEQ ID NO: 644107 - protein, 15 aa, Homo sapiens
  CDR3 for alpha chain variable domain of TCR clone 322054 (TRAV13-1, TRAJ45)
CSASGSGGGADGLTF

SEQ ID NO: 644108 - protein, 14 aa, Homo sapiens
  CDR3 for beta chain variable domain of TCR clone 322054 (TRBV12-4, TRBJ1-2)
CASSFVGTAYGYTF

SEQ ID NO: 644109 - protein, 13 aa, Homo sapiens
  CDR3 for alpha chain variable domain of TCR clone 322055 (TRAV26-2, TRAJ57)
CILSRSGSEKLVF

SEQ ID NO: 644110 - protein, 16 aa, Homo sapiens
  CDR3 for beta chain variable domain of TCR clone 322055 (TRBV18, TRBJ1-5)
CASSPRTGGGNQPQHF

SEQ ID NO: 644111 - protein, 23 aa, Homo sapiens
  CDR3 for alpha chain variable domain of TCR clone 322056 (TRAV12-2, TRAJ36)
SLLIRDSQPSDSATLERANNLFF

SEQ ID NO: 644112 - protein, 15 aa, Homo sapiens
  CDR3 for beta chain variable domain of TCR clone 322056 (TRBV5-7, TRBJ2-7)
CASSLPGQVFYEQYF

SEQ ID NO: 644113 - protein, 12 aa, Homo sapiens
  CDR3 for alpha chain variable domain of TCR clone 322057 (TRAV13-1, TRAJ49)
CAASPMGNQFYF

SEQ ID NO: 644114 - protein, 16 aa, Homo sapiens
  CDR3 for beta chain variable domain of TCR clone 322057 (TRBV4-2, TRBJ2-3)
CASSQELAGDTDTQYF

SEQ ID NO: 644115 - protein, 12 aa, Homo sapiens
  CDR3 for alpha chain variable domain of TCR clone 322058 (TRAV17, TRAJ57)
CATDGGSEKLVF

SEQ ID NO: 644116 - protein, 14 aa, Homo sapiens
  CDR3 for beta chain variable domain of TCR clone 322058 (TRBV12-5, TRBJ2-5)
CASGSRTHQETQYF

SEQ ID NO: 644117 - protein, 10 aa, Homo sapiens
  CDR3 for alpha chain variable domain of TCR clone 322059 (TRAV8-1, TRAJ43)
CAVNVDDMRF

SEQ ID NO: 644118 - protein, 14 aa, Homo sapiens
  CDR3 for beta chain variable domain of TCR clone 322059 (TRBV11-2, TRBJ2-3)
CASSRLARTDTQYF

SEQ ID NO: 644119 - protein, 13 aa, Homo sapiens
  CDR3 for alpha chain variable domain of TCR clone 322060 (TRAV29/DV5, TRAJ44)
CAASTGTASKLTF

SEQ ID NO: 644120 - protein, 14 aa, Homo sapiens
  CDR3 for beta chain variable domain of TCR clone 322060 (TRBV18, TRBJ2-7)
CASSPRGGAYEQYF

SEQ ID NO: 644121 - protein, 13 aa, Homo sapiens
  CDR3 for alpha chain variable domain of TCR clone 322061 (TRAV21, TRAJ27)
CAARPGNAGKSTF

SEQ ID NO: 644122 - protein, 14 aa, Homo sapiens
  CDR3 for beta chain variable domain of TCR clone 322061 (TRBV7-3, TRBJ2-2)
CASSSGGYTGELFF

SEQ ID NO: 644123 - protein, 15 aa, Homo sapiens
  CDR3 for alpha chain variable domain of TCR clone 322062 (TRAV13-1, TRAJ10)
CAATIPTGGENKLTF

SEQ ID NO: 644124 - protein, 15 aa, Homo sapiens
  CDR3 for beta chain variable domain of TCR clone 322062 (TRBV2, TRBJ2-7)
CASTLLGSGATEQYF

SEQ ID NO: 644125 - protein, 14 aa, Homo sapiens
  CDR3 for alpha chain variable domain of TCR clone 322063 (TRAV1-2, TRAJ16)
CAVNRFSDCQKLLF

SEQ ID NO: 644126 - protein, 15 aa, Homo sapiens
  CDR3 for beta chain variable domain of TCR clone 322063 (TRBV9, TRBJ1-6)
CASSVAGTGDSPLLF

SEQ ID NO: 644127 - protein, 11 aa, Homo sapiens
  CDR3 for alpha chain variable domain of TCR clone 322064 (TRAV1-1, TRAJ23)
CAVRQGGKLVF

SEQ ID NO: 644128 - protein, 15 aa, Homo sapiens
  CDR3 for beta chain variable domain of TCR clone 322064 (TRBV27, TRBJ2-7)
CASSTAGTGSYEQYF

SEQ ID NO: 644129 - protein, 11 aa, Homo sapiens
  CDR3 for alpha chain variable domain of TCR clone 322065 (TRAV12-1, TRAJ21)
CVVNNFNKFYF

SEQ ID NO: 644130 - protein, 16 aa, Homo sapiens
  CDR3 for beta chain variable domain of TCR clone 322065 (TRBV19, TRBJ2-2)
CASRSPGTGATGEPFF

SEQ ID NO: 644131 - protein, 15 aa, Homo sapiens
  CDR3 for alpha chain variable domain of TCR clone 322066 (TRAV29/DV5, TRAJ20)
CAASAVRSNDYKHSF

SEQ ID NO: 644132 - protein, 15 aa, Homo sapiens
  CDR3 for beta chain variable domain of TCR clone 322066 (TRBV28, TRBJ2-7)
CASRPWDRFSYEQYF

SEQ ID NO: 644133 - protein, 13 aa, Homo sapiens
  CDR3 for alpha chain variable domain of TCR clone 322067 (TRAV12-1, TRAJ34)
CVVTGYNTDKLIF

SEQ ID NO: 644134 - protein, 13 aa, Homo sapiens
  CDR3 for beta chain variable domain of TCR clone 322067 (TRBV28, TRBJ2-7)
CASKAVGVYEQYF

SEQ ID NO: 644135 - protein, 14 aa, Homo sapiens
  CDR3 for alpha chain variable domain of TCR clone 322068 (TRAV13-1, TRAJ35)
CASSKGGFVNVLHC

SEQ ID NO: 644136 - protein, 13 aa, Homo sapiens
  CDR3 for beta chain variable domain of TCR clone 322068 (TRBV7-3, TRBJ1-1)
CASSQDWRAEAFF

SEQ ID NO: 644137 - protein, 17 aa, Homo sapiens
  CDR3 for alpha chain variable domain of TCR clone 322069 (TRAV4, TRAJ18)
CLVGERSVGLTLGRLYF

SEQ ID NO: 644138 - protein, 17 aa, Homo sapiens
  CDR3 for beta chain variable domain of TCR clone 322069 (TRBV4-1, TRBJ2-1)
CASSQGRGGGLYNEQFF

SEQ ID NO: 644139 - protein, 17 aa, Homo sapiens
  CDR3 for alpha chain variable domain of TCR clone 322070 (TRAV8-6, TRAJ58)
CAVSSWVGETSGSMLTF

SEQ ID NO: 644140 - protein, 17 aa, Homo sapiens
  CDR3 for beta chain variable domain of TCR clone 322070 (TRBV11-2, TRBJ2-1)
CASSLYPPGVEYNEQFF

SEQ ID NO: 644141 - protein, 10 aa, Homo sapiens
  CDR3 for alpha chain variable domain of TCR clone 322071 (TRAV1-2, TRAJ31)
CVSEDARLMF

SEQ ID NO: 644142 - protein, 15 aa, Homo sapiens
  CDR3 for beta chain variable domain of TCR clone 322071 (TRBV7-2, TRBJ2-1)
CASSSGLAGGNEQFF

SEQ ID NO: 644143 - protein, 15 aa, Homo sapiens
  CDR3 for alpha chain variable domain of TCR clone 322072 (TRAV3, TRAJ22)
CAVRDRGGSARELNF

SEQ ID NO: 644144 - protein, 12 aa, Homo sapiens
  CDR3 for beta chain variable domain of TCR clone 322072 (TRBV7-8, TRBJ2-1)
CASSLGHNEQFF

SEQ ID NO: 644145 - protein, 14 aa, Homo sapiens
  CDR3 for alpha chain variable domain of TCR clone 322073 (TRAV41, TRAJ57)
CAVRSSGGSEKLGF

SEQ ID NO: 644146 - protein, 13 aa, Homo sapiens
  CDR3 for beta chain variable domain of TCR clone 322073 (TRBV20-1, TRBJ1-1)
CSARGGGNTEAFF

SEQ ID NO: 644147 - protein, 12 aa, Homo sapiens
  CDR3 for alpha chain variable domain of TCR clone 322074 (TRAV17, TRAJ20)
CATDSNDYKLSF

SEQ ID NO: 644148 - protein, 13 aa, Homo sapiens
  CDR3 for beta chain variable domain of TCR clone 322074 (TRBV11-3, TRBJ1-1)
CATEEGLNTEAFF

SEQ ID NO: 644149 - protein, 14 aa, Homo sapiens
  CDR3 for alpha chain variable domain of TCR clone 322075 (TRAV2, TRAJ41)
CAVGTSNSGYALNF

SEQ ID NO: 644150 - protein, 13 aa, Homo sapiens
  CDR3 for beta chain variable domain of TCR clone 322075 (TRBV4-1, TRBJ2-1)
CASSQGVQYEQFF

SEQ ID NO: 644151 - protein, 13 aa, Homo sapiens
  CDR3 for alpha chain variable domain of TCR clone 322076 (TRAV12-2, TRAJ6)
CAVNVSRKLHTYI

SEQ ID NO: 644152 - protein, 13 aa, Homo sapiens
  CDR3 for beta chain variable domain of TCR clone 322076 (TRBV29-1, TRBJ2-1)
CSVEGGRVNEQFF

SEQ ID NO: 644153 - protein, 14 aa, Homo sapiens
  CDR3 for alpha chain variable domain of TCR clone 322077 (TRAV12-2, TRAJ40)
CAVKIPSGTYKYFF

SEQ ID NO: 644154 - protein, 20 aa, Homo sapiens
  CDR3 for beta chain variable domain of TCR clone 322077 (TRBV28, TRBJ2-1)
CASTPIGRSPGLAGGNEQFF

SEQ ID NO: 644155 - protein, 11 aa, Homo sapiens
  CDR3 for alpha chain variable domain of TCR clone 322078 (TRAV8-3, TRAJ49)
CAVNTVNQFYF

SEQ ID NO: 644156 - protein, 12 aa, Homo sapiens
  CDR3 for beta chain variable domain of TCR clone 322078 (TRBV11-2, TRBJ2-7)
CASSPPADEQYF

SEQ ID NO: 644157 - protein, 16 aa, Homo sapiens
  CDR3 for alpha chain variable domain of TCR clone 322079 (TRAV30, TRAJ24)
CVTEIVDADSWGKFQF

SEQ ID NO: 644158 - protein, 15 aa, Homo sapiens
  CDR3 for beta chain variable domain of TCR clone 322079 (TRBV9, TRBJ1-6)
CASSVAGTGDSPLHF

SEQ ID NO: 644159 - protein, 15 aa, Homo sapiens
  CDR3 for alpha chain variable domain of TCR clone 322080 (TRAV21, TRAJ37)
CAVRPTLSNTGKLIF

SEQ ID NO: 644160 - protein, 13 aa, Homo sapiens
  CDR3 for beta chain variable domain of TCR clone 322080 (TRBV23-1, TRBJ1-4)
CASRGKFNEKLFF

SEQ ID NO: 644161 - protein, 13 aa, Homo sapiens
  CDR3 for alpha chain variable domain of TCR clone 322081 (TRAV38-1, TRAJ42)
CSRWGGSQGNLIF

SEQ ID NO: 644162 - protein, 14 aa, Homo sapiens
  CDR3 for beta chain variable domain of TCR clone 322081 (TRBV12-4, TRBJ2-1)
CASSLGQGASEQFF

SEQ ID NO: 644163 - protein, 16 aa, Homo sapiens
  CDR3 for alpha chain variable domain of TCR clone 322082 (TRAV8-3, TRAJ44)
CAVGPLNTGTASKLTF

SEQ ID NO: 644164 - protein, 18 aa, Homo sapiens
  CDR3 for beta chain variable domain of TCR clone 322082 (TRBV3-1, TRBJ2-1)
CASSEDLPGRPLFDEQFF

SEQ ID NO: 644165 - protein, 14 aa, Homo sapiens
  CDR3 for alpha chain variable domain of TCR clone 322083 (TRAV1-2, TRAJ8)
CAVREDTGFQKLVF

SEQ ID NO: 644166 - protein, 13 aa, Homo sapiens
  CDR3 for beta chain variable domain of TCR clone 322083 (TRBV7-9, TRBJ1-2)
CASSPSNFWGYTF

SEQ ID NO: 644167 - protein, 16 aa, Homo sapiens
  CDR3 for alpha chain variable domain of TCR clone 322084 (TRAV3, TRAJ10)
CDVRDMRAGGGNKLTL

SEQ ID NO: 644168 - protein, 20 aa, Homo sapiens
  CDR3 for beta chain variable domain of TCR clone 322084 (TRBV11-3, TRBJ2-7)
CASSQRTSGSLRAVLRAGHQ

SEQ ID NO: 644169 - protein, 15 aa, Homo sapiens
  CDR3 for alpha chain variable domain of TCR clone 322085 (TRAV21, TRAJ45)
WAVSYSGGGADGRTF

SEQ ID NO: 644170 - protein, 12 aa, Homo sapiens
  CDR3 for beta chain variable domain of TCR clone 322085 (TRBV11-2, TRBJ2-2)
CASSLGGGELFF

SEQ ID NO: 644171 - protein, 13 aa, Homo sapiens
  CDR3 for alpha chain variable domain of TCR clone 322086 (TRAV27, TRAJ41)
CAGEGNSGYALNF

SEQ ID NO: 644172 - protein, 16 aa, Homo sapiens
  CDR3 for beta chain variable domain of TCR clone 322086 (TRBV7-3, TRBJ2-5)
CASSLRGGGGPETQYF

SEQ ID NO: 644173 - protein, 15 aa, Homo sapiens
  CDR3 for alpha chain variable domain of TCR clone 322087 (TRAV21, TRAJ24)
CAARSSTVSCGKLQF

SEQ ID NO: 644174 - protein, 13 aa, Homo sapiens
  CDR3 for beta chain variable domain of TCR clone 322087 (TRBV11-2, TRBJ2-5)
CASSSTGEETQYF

SEQ ID NO: 644175 - protein, 14 aa, Homo sapiens
  CDR3 for alpha chain variable domain of TCR clone 322088 (TRAV16, TRAJ33)
CALSAMDSNYQLIW

SEQ ID NO: 644176 - protein, 14 aa, Homo sapiens
  CDR3 for beta chain variable domain of TCR clone 322088 (TRBV19, TRBJ1-5)
CASSIGGGGQPQHF

SEQ ID NO: 644177 - protein, 14 aa, Homo sapiens
  CDR3 for alpha chain variable domain of TCR clone 322089 (TRAV23/DV6, TRAJ23)
CAAGPYNQGGKLIF

SEQ ID NO: 644178 - protein, 14 aa, Homo sapiens
  CDR3 for beta chain variable domain of TCR clone 322089 (TRBV12-5, TRBJ2-5)
CASGSRTHQETQYF

SEQ ID NO: 644179 - protein, 15 aa, Homo sapiens
  CDR3 for alpha chain variable domain of TCR clone 322090 (TRAV4, TRAJ39)
CLVGPNNNSGNMLTF

SEQ ID NO: 644180 - protein, 14 aa, Homo sapiens
  CDR3 for beta chain variable domain of TCR clone 322090 (TRBV19, TRBJ2-7)
CASNFRDTFTGMYF

SEQ ID NO: 644181 - protein, 14 aa, Homo sapiens
  CDR3 for alpha chain variable domain of TCR clone 322091 (TRAV12-2, TRAJ17)
CAVLFKAAGNKLTF

SEQ ID NO: 644182 - protein, 14 aa, Homo sapiens
  CDR3 for beta chain variable domain of TCR clone 322091 (TRBV2, TRBJ2-3)
CASTAQTSTDTQYF

SEQ ID NO: 644183 - protein, 11 aa, Homo sapiens
  CDR3 for alpha chain variable domain of TCR clone 322092 (TRAV27, TRAJ20)
CAGADDYKLSF

SEQ ID NO: 644184 - protein, 14 aa, Homo sapiens
  CDR3 for beta chain variable domain of TCR clone 322092 (TRBV12-5, TRBJ2-5)
CASGSRTHQETQYF

SEQ ID NO: 644185 - protein, 16 aa, Homo sapiens
  CDR3 for alpha chain variable domain of TCR clone 322093 (TRAV30, TRAJ24)
CGTEIVDADSWGNSSL

SEQ ID NO: 644186 - protein, 15 aa, Homo sapiens
  CDR3 for beta chain variable domain of TCR clone 322093 (TRBV19, TRBJ1-1)
CASTSGQIQNTEAFF

SEQ ID NO: 644187 - protein, 17 aa, Homo sapiens
  CDR3 for alpha chain variable domain of TCR clone 322094 (TRAV8-6, TRAJ58)
CAVSSWVGETSGSRLTF

SEQ ID NO: 644188 - protein, 13 aa, Homo sapiens
  CDR3 for beta chain variable domain of TCR clone 322094 (TRBV20-1, TRBJ1-1)
CSARVGGNTEAFF

SEQ ID NO: 644189 - protein, 16 aa, Homo sapiens
  CDR3 for alpha chain variable domain of TCR clone 322095 (TRAV30, TRAJ24)
CGTEIVDADSWGKFQF

SEQ ID NO: 644190 - protein, 13 aa, Homo sapiens
  CDR3 for beta chain variable domain of TCR clone 322095 (TRBV7-2, TRBJ1-6)
CASSLVGSSPLHF

SEQ ID NO: 644191 - protein, 13 aa, Homo sapiens
  CDR3 for alpha chain variable domain of TCR clone 322096 (TRAV17, TRAJ9)
CATDYTGGFKTIF

SEQ ID NO: 644192 - protein, 14 aa, Homo sapiens
  CDR3 for beta chain variable domain of TCR clone 322096 (TRBV13, TRBJ2-5)
CASSLERVGETQYF

SEQ ID NO: 644193 - protein, 18 aa, Homo sapiens
  CDR3 for alpha chain variable domain of TCR clone 322097 (TRAV13-1, TRAJ52)
CAASERSAGGTSYGKLTS

SEQ ID NO: 644194 - protein, 15 aa, Homo sapiens
  CDR3 for beta chain variable domain of TCR clone 322097 (TRBV7-2, TRBJ2-3)
CASSLVVRGPDTQYF

SEQ ID NO: 644195 - protein, 14 aa, Homo sapiens
  CDR3 for alpha chain variable domain of TCR clone 322098 (TRAV26-1, TRAJ16)
CIVRVPSAGQKLLF

SEQ ID NO: 644196 - protein, 17 aa, Homo sapiens
  CDR3 for beta chain variable domain of TCR clone 322098 (TRBV20-1, TRBJ2-1)
CSASSSGLAGSYNEQFF

SEQ ID NO: 644197 - protein, 14 aa, Homo sapiens
  CDR3 for alpha chain variable domain of TCR clone 322099 (TRAV26-1, TRAJ40)
CIVRLLSGTYKYIF

SEQ ID NO: 644198 - protein, 13 aa, Homo sapiens
  CDR3 for beta chain variable domain of TCR clone 322099 (TRBV15, TRBJ2-7)
CATSRDRGIRAFF

SEQ ID NO: 644199 - protein, 13 aa, Homo sapiens
  CDR3 for alpha chain variable domain of TCR clone 322100 (TRAV12-2, TRAJ53)
CAGVGGSNYKLTF

SEQ ID NO: 644200 - protein, 13 aa, Homo sapiens
  CDR3 for beta chain variable domain of TCR clone 322100 (TRBV28, TRBJ2-7)
CASRSSGVYEQYF

SEQ ID NO: 644201 - protein, 13 aa, Homo sapiens
  CDR3 for alpha chain variable domain of TCR clone 322101 (TRAV4, TRAJ15)
CLVGPEAGTALIF

SEQ ID NO: 644202 - protein, 15 aa, Homo sapiens
  CDR3 for beta chain variable domain of TCR clone 322101 (TRBV7-2, TRBJ2-1)
CASSFDPGRRKEQFF

SEQ ID NO: 644203 - protein, 15 aa, Homo sapiens
  CDR3 for alpha chain variable domain of TCR clone 322102 (TRAV17, TRAJ54)
CATTRSEQGAQTLVF

SEQ ID NO: 644204 - protein, 16 aa, Homo sapiens
  CDR3 for beta chain variable domain of TCR clone 322102 (TRBV12-4, TRBJ2-3)
CASSLRLAETTDTQYF

SEQ ID NO: 644205 - protein, 14 aa, Homo sapiens
  CDR3 for alpha chain variable domain of TCR clone 322103 (TRAV12-2, TRAJ44)
CAVNPAGPASKLTF

SEQ ID NO: 644206 - protein, 16 aa, Homo sapiens
  CDR3 for beta chain variable domain of TCR clone 322103 (TRBV2, TRBJ2-1)
CASSVGGSLSYNEQFF

SEQ ID NO: 644207 - protein, 15 aa, Homo sapiens
  CDR3 for alpha chain variable domain of TCR clone 322104 (TRAV27, TRAJ38)
CAGRFNAGNNRKLIW

SEQ ID NO: 644208 - protein, 16 aa, Homo sapiens
  CDR3 for beta chain variable domain of TCR clone 322104 (TRBV5-1, TRBJ2-5)
CASSLSLAGAQETQYF

SEQ ID NO: 644209 - protein, 12 aa, Homo sapiens
  CDR3 for alpha chain variable domain of TCR clone 322105 (TRAV13-1, TRAJ49)
CAASPMGNQFYF

SEQ ID NO: 644210 - protein, 13 aa, Homo sapiens
  CDR3 for beta chain variable domain of TCR clone 322105 (TRBV15, TRBJ2-7)
CATSRDRGIRAVL

SEQ ID NO: 644211 - protein, 13 aa, Homo sapiens
  CDR3 for alpha chain variable domain of TCR clone 322106 (TRAV13-2, TRAJ31)
CAENLEYQCQTHV

SEQ ID NO: 644212 - protein, 12 aa, Homo sapiens
  CDR3 for beta chain variable domain of TCR clone 322106 (TRBV20-1, TRBJ2-5)
CSAGGAGETQYF

SEQ ID NO: 644213 - protein, 12 aa, Homo sapiens
  CDR3 for alpha chain variable domain of TCR clone 322107 (TRAV13-1, TRAJ49)
CAASPMGNQFYF

SEQ ID NO: 644214 - protein, 13 aa, Homo sapiens
  CDR3 for beta chain variable domain of TCR clone 322107 (TRBV15, TRBJ2-2)
CATSRDRGIRAVL

SEQ ID NO: 644215 - protein, 13 aa, Homo sapiens
  CDR3 for alpha chain variable domain of TCR clone 322108 (TRAV1-2, TRAJ9)
CAALNTGGFKTIL

SEQ ID NO: 644216 - protein, 13 aa, Homo sapiens
  CDR3 for beta chain variable domain of TCR clone 322108 (TRBV11-2, TRBJ2-5)
CASSRGPSETQYF

SEQ ID NO: 644217 - protein, 17 aa, Homo sapiens
  CDR3 for alpha chain variable domain of TCR clone 322109 (TRAV3, TRAJ42)
CAVRDRDYGGSQRNLIF

SEQ ID NO: 644218 - protein, 14 aa, Homo sapiens
  CDR3 for beta chain variable domain of TCR clone 322109 (TRBV7-2, TRBJ2-5)
CASSPRGSSETQYF

SEQ ID NO: 644219 - protein, 16 aa, Homo sapiens
  CDR3 for alpha chain variable domain of TCR clone 322110 (TRAV30, TRAJ24)
CGTEIVDADSWGKFQF

SEQ ID NO: 644220 - protein, 12 aa, Homo sapiens
  CDR3 for beta chain variable domain of TCR clone 322110 (TRBV28, TRBJ2-6)
CAIQAGANVLTF

SEQ ID NO: 644221 - protein, 14 aa, Homo sapiens
  CDR3 for alpha chain variable domain of TCR clone 322111 (TRAV2, TRAJ9)
CAVEDRGGGFKTIF

SEQ ID NO: 644222 - protein, 13 aa, Homo sapiens
  CDR3 for beta chain variable domain of TCR clone 322111 (TRBV7-3, TRBJ2-5)
CASSVRGGETQYF

SEQ ID NO: 644223 - protein, 15 aa, Homo sapiens
  CDR3 for alpha chain variable domain of TCR clone 322112 (TRAV17, TRAJ16)
CATALRFSDGQKLLF

SEQ ID NO: 644224 - protein, 14 aa, Homo sapiens
  CDR3 for beta chain variable domain of TCR clone 322112 (TRBV4-2, TRBJ2-5)
CASSQERGPRTQYF

SEQ ID NO: 644225 - protein, 13 aa, Homo sapiens
  CDR3 for alpha chain variable domain of TCR clone 322113 (TRAV8-6, TRAJ49)
CAVITKTGNQFYF

SEQ ID NO: 644226 - protein, 17 aa, Homo sapiens
  CDR3 for beta chain variable domain of TCR clone 322113 (TRBV11-2, TRBJ2-1)
CASSLYPPGVEYNEQFF

SEQ ID NO: 644227 - protein, 15 aa, Homo sapiens
  CDR3 for alpha chain variable domain of TCR clone 322114 (TRAV3, TRAJ30)
CAVRDRVERGDKIIF

SEQ ID NO: 644228 - protein, 13 aa, Homo sapiens
  CDR3 for beta chain variable domain of TCR clone 322114 (TRBV29-1, TRBJ2-5)
CIACSSRRETQYF

SEQ ID NO: 644229 - protein, 14 aa, Homo sapiens
  CDR3 for alpha chain variable domain of TCR clone 322115 (TRAV16, TRAJ3)
CALSQYSSASKIIF

SEQ ID NO: 644230 - protein, 14 aa, Homo sapiens
  CDR3 for beta chain variable domain of TCR clone 322115 (TRBV6-3, TRBJ2-1)
CASLQSAYYNEQFF

SEQ ID NO: 644231 - protein, 12 aa, Homo sapiens
  CDR3 for alpha chain variable domain of TCR clone 322116 (TRAV3, TRAJ20)
CAVIDPDYKLSF

SEQ ID NO: 644232 - protein, 15 aa, Homo sapiens
  CDR3 for beta chain variable domain of TCR clone 322116 (TRBV2, TRBJ2-2)
CASSRETVGTGELFF

SEQ ID NO: 644233 - protein, 17 aa, Homo sapiens
  CDR3 for alpha chain variable domain of TCR clone 322117 (TRAV1-1, TRAJ32)
CAVRVDELWWCYKQAHL

SEQ ID NO: 644234 - protein, 13 aa, Homo sapiens
  CDR3 for beta chain variable domain of TCR clone 322117 (TRBV12-4, TRBJ2-7)
CASSFVRGYEQYF

SEQ ID NO: 644235 - protein, 14 aa, Homo sapiens
  CDR3 for alpha chain variable domain of TCR clone 322118 (TRAV12-2, TRAJ40)
CAVKIPSGTYKYIF

SEQ ID NO: 644236 - protein, 17 aa, Homo sapiens
  CDR3 for beta chain variable domain of TCR clone 322118 (TRBV13, TRBJ2-3)
CASSLSRVAGGMNTQYF

SEQ ID NO: 644237 - protein, 12 aa, Homo sapiens
  CDR3 for alpha chain variable domain of TCR clone 322119 (TRAV16, TRAJ10)
CSRTGGGNKLTF

SEQ ID NO: 644238 - protein, 15 aa, Homo sapiens
  CDR3 for beta chain variable domain of TCR clone 322119 (TRBV7-3, TRBJ2-2)
CQQHTSGRCAGELFF

SEQ ID NO: 644239 - protein, 13 aa, Homo sapiens
  CDR3 for alpha chain variable domain of TCR clone 322120 (TRAV17, TRAJ9)
CATFLTGGFKAIF

SEQ ID NO: 644240 - protein, 16 aa, Homo sapiens
  CDR3 for beta chain variable domain of TCR clone 322120 (TRBV5-7, TRBJ1-4)
CASSPSGGLKTEKLFF

SEQ ID NO: 644241 - protein, 16 aa, Homo sapiens
  CDR3 for alpha chain variable domain of TCR clone 322121 (TRAV17, TRAJ48)
TSVLRTRRFGNETLTF

SEQ ID NO: 644242 - protein, 17 aa, Homo sapiens
  CDR3 for beta chain variable domain of TCR clone 322121 (TRBV6-3, TRBJ2-2)
CASSYAGQGINTGELFF

SEQ ID NO: 644243 - protein, 15 aa, Homo sapiens
  CDR3 for alpha chain variable domain of TCR clone 322122 (TRAV4, TRAJ32)
CLVGEDGGATNKIIF

SEQ ID NO: 644244 - protein, 16 aa, Homo sapiens
  CDR3 for beta chain variable domain of TCR clone 322122 (TRBV13, TRBJ2-2)
CASSPRTGEHTGELFF

SEQ ID NO: 644245 - protein, 16 aa, Homo sapiens
  CDR3 for alpha chain variable domain of TCR clone 322123 (TRAV1-2, TRAJ10)
CAVRGVLTGGGNKLTF

SEQ ID NO: 644246 - protein, 16 aa, Homo sapiens
  CDR3 for beta chain variable domain of TCR clone 322123 (TRBV11-3, TRBJ2-5)
CASSSVVAGSTETQYF

SEQ ID NO: 644247 - protein, 14 aa, Homo sapiens
  CDR3 for alpha chain variable domain of TCR clone 322124 (TRAV1-2, TRAJ16)
CAVNRFSDGQKLLF

SEQ ID NO: 644248 - protein, 15 aa, Homo sapiens
  CDR3 for beta chain variable domain of TCR clone 322124 (TRBV2, TRBJ2-7)
CTSSELERGGVEQYF

SEQ ID NO: 644249 - protein, 12 aa, Homo sapiens
  CDR3 for alpha chain variable domain of TCR clone 322125 (TRAV8-2, TRAJ45)
CVQGGGAVGLTF

SEQ ID NO: 644250 - protein, 15 aa, Homo sapiens
  CDR3 for beta chain variable domain of TCR clone 322125 (TRBV19, TRBJ1-1)
CASSIRRQMNTEAFF

SEQ ID NO: 644251 - protein, 12 aa, Homo sapiens
  CDR3 for alpha chain variable domain of TCR clone 322126 (TRAV12-1, TRAJ40)
CVVCSGTYKYIF

SEQ ID NO: 644252 - protein, 15 aa, Homo sapiens
  CDR3 for beta chain variable domain of TCR clone 322126 (TRBV9, TRBJ1-6)
CASSVAGTGDSPLHF

SEQ ID NO: 644253 - protein, 14 aa, Homo sapiens
  CDR3 for alpha chain variable domain of TCR clone 322127 (TRAV12-2, TRAJ13)
CAVKKTGVYQKVTF

SEQ ID NO: 644254 - protein, 15 aa, Homo sapiens
  CDR3 for beta chain variable domain of TCR clone 322127 (TRBV7-3, TRBJ2-1)
CASSLDGNSYNEQFF

SEQ ID NO: 644255 - protein, 15 aa, Homo sapiens
  CDR3 for alpha chain variable domain of TCR clone 322128 (TRAV3, TRAJ24)
CAVRDKMKAGGNCSL

SEQ ID NO: 644256 - protein, 14 aa, Homo sapiens
  CDR3 for beta chain variable domain of TCR clone 322128 (TRBV7-2, TRBJ2-3)
CASSQTGSSYTQYF

SEQ ID NO: 644257 - protein, 14 aa, Homo sapiens
  CDR3 for alpha chain variable domain of TCR clone 322129 (TRAV23/DV6, TRAJ12)
CAASRMDSSYKLLF

SEQ ID NO: 644258 - protein, 14 aa, Homo sapiens
  CDR3 for beta chain variable domain of TCR clone 322129 (TRBV19, TRBJ2-7)
CASSMGQGASEQYF

SEQ ID NO: 644259 - protein, 11 aa, Homo sapiens
  CDR3 for alpha chain variable domain of TCR clone 322130 (TRAV3, TRAJ13)
CAVTSYQKVTF

SEQ ID NO: 644260 - protein, 12 aa, Homo sapiens
  CDR3 for beta chain variable domain of TCR clone 322130 (TRBV6-3, TRBJ2-7)
CASSLTPYEQYF

SEQ ID NO: 644261 - protein, 16 aa, Homo sapiens
  CDR3 for alpha chain variable domain of TCR clone 322131 (TRAV12-3, TRAJ53)
CAMSPGRGGSNYKLTF

SEQ ID NO: 644262 - protein, 11 aa, Homo sapiens
  CDR3 for beta chain variable domain of TCR clone 322131 (TRBV29-1, TRBJ2-5)
CSEDRTGTKYF

SEQ ID NO: 644263 - protein, 11 aa, Homo sapiens
  CDR3 for alpha chain variable domain of TCR clone 322132 (TRAV13-1, TRAJ39)
CASHAGNMLTF

SEQ ID NO: 644264 - protein, 12 aa, Homo sapiens
  CDR3 for beta chain variable domain of TCR clone 322132 (TRBV7-9, TRBJ1-1)
CASSLVRGEAFF

SEQ ID NO: 644265 - protein, 14 aa, Homo sapiens
  CDR3 for alpha chain variable domain of TCR clone 322133 (TRAV8-3, TRAJ39)
CAVGAWGAGNMLSF

SEQ ID NO: 644266 - protein, 16 aa, Homo sapiens
  CDR3 for beta chain variable domain of TCR clone 322133 (TRBV7-2, TRBJ1-3)
CASSSGRVLSGNTIYF

SEQ ID NO: 644267 - protein, 17 aa, Homo sapiens
  CDR3 for alpha chain variable domain of TCR clone 322134 (TRAV3, TRAJ6)
CAVRDCPRAGVSYIPTF

SEQ ID NO: 644268 - protein, 14 aa, Homo sapiens
  CDR3 for beta chain variable domain of TCR clone 322134 (TRBV7-2, TRBJ2-7)
CASSPKTSFYEQYF

SEQ ID NO: 644269 - protein, 18 aa, Homo sapiens
  CDR3 for alpha chain variable domain of TCR clone 322135 (TRAV20, TRAJ4)
CAVQPYYMFSGGYNKLIF

SEQ ID NO: 644270 - protein, 13 aa, Homo sapiens
  CDR3 for beta chain variable domain of TCR clone 322135 (TRBV19, TRBJ2-3)
CATWDKITETQYF

SEQ ID NO: 644271 - protein, 19 aa, Homo sapiens
  CDR3 for alpha chain variable domain of TCR clone 322136 (TRAV3, )
CAVRPTPDIQNPDPAVYQL

SEQ ID NO: 644272 - protein, 20 aa, Homo sapiens
  CDR3 for beta chain variable domain of TCR clone 322136 (TRBV11-3, TRBJ2-5)
CASSDTSGGSRPSTSGQARG

SEQ ID NO: 644273 - protein, 16 aa, Homo sapiens
  CDR3 for alpha chain variable domain of TCR clone 322137 (TRAV21, TRAJ37)
CAFRTAGSSNPGKLIF

SEQ ID NO: 644274 - protein, 13 aa, Homo sapiens
  CDR3 for beta chain variable domain of TCR clone 322137 (TRBV7-9, TRBJ2-5)
CASLPSGRETQYF

SEQ ID NO: 644275 - protein, 12 aa, Homo sapiens
  CDR3 for alpha chain variable domain of TCR clone 322138 (TRAV35, TRAJ31)
CAAASNNAILMF

SEQ ID NO: 644276 - protein, 14 aa, Homo sapiens
  CDR3 for beta chain variable domain of TCR clone 322138 (TRBV2, TRBJ2-2)
CASSLFGGNGELFF

SEQ ID NO: 644277 - protein, 14 aa, Homo sapiens
  CDR3 for alpha chain variable domain of TCR clone 322139 (TRAV38-1, TRAJ45)
CASHSGGGADVLTF

SEQ ID NO: 644278 - protein, 17 aa, Homo sapiens
  CDR3 for beta chain variable domain of TCR clone 322139 (TRBV11-2, TRBJ2-1)
CASSLYPPGVEYNEQFF

SEQ ID NO: 644279 - protein, 14 aa, Homo sapiens
  CDR3 for alpha chain variable domain of TCR clone 322140 (TRAV12-2, TRAJ41)
CAVNRANSGYALNF

SEQ ID NO: 644280 - protein, 18 aa, Homo sapiens
  CDR3 for beta chain variable domain of TCR clone 322140 (TRBV12-4, TRBJ2-2)
CASSLVAGTRGRTGELFF

SEQ ID NO: 644281 - protein, 13 aa, Homo sapiens
  CDR3 for alpha chain variable domain of TCR clone 322141 (TRAV27, TRAJ42)
CAGARGSQGNLIF

SEQ ID NO: 644282 - protein, 15 aa, Homo sapiens
  CDR3 for beta chain variable domain of TCR clone 322141 (TRBV10-3, TRBJ2-2)
CAIRTDREDKGELFF

SEQ ID NO: 644283 - protein, 12 aa, Homo sapiens
  CDR3 for alpha chain variable domain of TCR clone 322142 (TRAV12-3, TRAJ17)
CAMTLTGNKLTF

SEQ ID NO: 644284 - protein, 15 aa, Homo sapiens
  CDR3 for beta chain variable domain of TCR clone 322142 (TRBV5-7, TRBJ1-5)
CAGSYGKLWDQPQHF

SEQ ID NO: 644285 - protein, 16 aa, Homo sapiens
  CDR3 for alpha chain variable domain of TCR clone 322143 (TRAV17, TRAJ9)
CATGEWGGTGGFKTIF

SEQ ID NO: 644286 - protein, 13 aa, Homo sapiens
  CDR3 for beta chain variable domain of TCR clone 322143 (TRBV7-9, TRBJ1-2)
CASSLKQNYGYTF

SEQ ID NO: 644287 - protein, 15 aa, Homo sapiens
  CDR3 for alpha chain variable domain of TCR clone 322144 (TRAV27, TRAJ38)
CAARRNAGNNRKLIL

SEQ ID NO: 644288 - protein, 13 aa, Homo sapiens
  CDR3 for beta chain variable domain of TCR clone 322144 (TRBV12-5, TRBJ2-3)
CASGDRQSDTQCF

SEQ ID NO: 644289 - protein, 14 aa, Homo sapiens
  CDR3 for alpha chain variable domain of TCR clone 322145 (TRAV21, TRAJ58)
CAVRRGRSGSRLTF

SEQ ID NO: 644290 - protein, 17 aa, Homo sapiens
  CDR3 for beta chain variable domain of TCR clone 322145 (TRBV13, TRBJ2-3)
CASSLSRVAGGRNTQYF

SEQ ID NO: 644291 - protein, 13 aa, Homo sapiens
  CDR3 for alpha chain variable domain of TCR clone 322146 (TRAV2, TRAJ40)
CALVTSGTYKYIF

SEQ ID NO: 644292 - protein, 13 aa, Homo sapiens
  CDR3 for beta chain variable domain of TCR clone 322146 (TRBV25-1, TRBJ2-7)
CASSEDGDYEQYF

SEQ ID NO: 644293 - protein, 14 aa, Homo sapiens
  CDR3 for alpha chain variable domain of TCR clone 322147 (TRAV3, TRAJ9)
CAVRLNTGGFKTIF

SEQ ID NO: 644294 - protein, 15 aa, Homo sapiens
  CDR3 for beta chain variable domain of TCR clone 322147 (TRBV7-2, TRBJ2-1)
CASSLVAGGHNEQFF

SEQ ID NO: 644295 - protein, 16 aa, Homo sapiens
  CDR3 for alpha chain variable domain of TCR clone 322148 (TRAV30, TRAJ24)
CGTEIVDADSWGKFQC

SEQ ID NO: 644296 - protein, 14 aa, Homo sapiens
  CDR3 for beta chain variable domain of TCR clone 322148 (TRBV19, TRBJ2-1)
CASPTFVLSGEQFF

SEQ ID NO: 644297 - protein, 15 aa, Homo sapiens
  CDR3 for alpha chain variable domain of TCR clone 322149 (TRAV17, TRAJ29)
NSVLRTHSGNTPLVF

SEQ ID NO: 644298 - protein, 13 aa, Homo sapiens
  CDR3 for beta chain variable domain of TCR clone 322149 (TRBV5-7, TRBJ2-6)
CASTSSGANVLTF

SEQ ID NO: 644299 - protein, 12 aa, Homo sapiens
  CDR3 for alpha chain variable domain of TCR clone 322150 (TRAV12-3, TRAJ17)
CAMTLTDNKLTF

SEQ ID NO: 644300 - protein, 17 aa, Homo sapiens
  CDR3 for beta chain variable domain of TCR clone 322150 (TRBV7-3, TRBJ2-3)
CASSLMKRMRGADTQYF

SEQ ID NO: 644301 - protein, 15 aa, Homo sapiens
  CDR3 for alpha chain variable domain of TCR clone 322151 (TRAV2, TRAJ24)
CAVEVLTDSWGKFQF

SEQ ID NO: 644302 - protein, 16 aa, Homo sapiens
  CDR3 for beta chain variable domain of TCR clone 322151 (TRBV19, TRBJ2-1)
CASSKAGPSSYNEQFF

SEQ ID NO: 644303 - protein, 15 aa, Homo sapiens
  CDR3 for alpha chain variable domain of TCR clone 322152 (TRAV8-4, TRAJ47)
CAVSDPEEYGNKLVF

SEQ ID NO: 644304 - protein, 15 aa, Homo sapiens
  CDR3 for beta chain variable domain of TCR clone 322152 (TRBV11-2, TRBJ2-1)
CDSSLGPDSYNEQFF

SEQ ID NO: 644305 - protein, 14 aa, Homo sapiens
  CDR3 for alpha chain variable domain of TCR clone 322153 (TRAV8-2, TRAJ37)
CVVSLTGNTGKLIF

SEQ ID NO: 644306 - protein, 13 aa, Homo sapiens
  CDR3 for beta chain variable domain of TCR clone 322153 (TRBV9, TRBJ2-2)
CASSPRPAGELFF

SEQ ID NO: 644307 - protein, 14 aa, Homo sapiens
  CDR3 for alpha chain variable domain of TCR clone 322154 (TRAV12-2, TRAJ13)
CAVKKTGGYQKVTF

SEQ ID NO: 644308 - protein, 15 aa, Homo sapiens
  CDR3 for beta chain variable domain of TCR clone 322154 (TRBV20-1, TRBJ1-1)
CSASCDRFLNTEAFF

SEQ ID NO: 644309 - protein, 12 aa, Homo sapiens
  CDR3 for alpha chain variable domain of TCR clone 322155 (TRAV27, TRAJ35)
CAGADFGNVLHF

SEQ ID NO: 644310 - protein, 13 aa, Homo sapiens
  CDR3 for beta chain variable domain of TCR clone 322155 (TRBV19, TRBJ1-2)
CASSVPGRDGYTF

SEQ ID NO: 644311 - protein, 16 aa, Homo sapiens
  CDR3 for alpha chain variable domain of TCR clone 322156 (TRAV30, TRAJ24)
CGTEIVDADSWGKFQF

SEQ ID NO: 644312 - protein, 18 aa, Homo sapiens
  CDR3 for beta chain variable domain of TCR clone 322156 (TRBV4-3, TRBJ2-6)
CASSQDIQGGPGANVLTF

SEQ ID NO: 644313 - protein, 14 aa, Homo sapiens
  CDR3 for alpha chain variable domain of TCR clone 322157 (TRAV1-2, TRAJ16)
CVVNRFSDGQKLLF

SEQ ID NO: 644314 - protein, 13 aa, Homo sapiens
  CDR3 for beta chain variable domain of TCR clone 322157 (TRBV4-1, TRBJ2-1)
CASSQAGGDEQFF

SEQ ID NO: 644315 - protein, 17 aa, Homo sapiens
  CDR3 for alpha chain variable domain of TCR clone 322158 (TRAV22, TRAJ52)
CAVERRAGCTSYGKLTF

SEQ ID NO: 644316 - protein, 14 aa, Homo sapiens
  CDR3 for beta chain variable domain of TCR clone 322158 (TRBV27, TRBJ2-1)
CASSRRGAFNEQFF

SEQ ID NO: 644317 - protein, 15 aa, Homo sapiens
  CDR3 for alpha chain variable domain of TCR clone 322159 (TRAV12-1, TRAJ44)
CVVNINTGTASKLTF

SEQ ID NO: 644318 - protein, 16 aa, Homo sapiens
  CDR3 for beta chain variable domain of TCR clone 322159 (TRBV7-3, TRBJ2-2)
CASSLKRGTLSGELFF

SEQ ID NO: 644319 - protein, 15 aa, Homo sapiens
  CDR3 for alpha chain variable domain of TCR clone 322160 (TRAV17, TRAJ13)
CATDAGSGGYQKVTF

SEQ ID NO: 644320 - protein, 17 aa, Homo sapiens
  CDR3 for beta chain variable domain of TCR clone 322160 (TRBV11-2, TRBJ2-1)
CASSLYPQGVEYNEQFF

SEQ ID NO: 644321 - protein, 14 aa, Homo sapiens
  CDR3 for alpha chain variable domain of TCR clone 322161 (TRAV25, TRAJ22)
CAVRSSGSARQLTF

SEQ ID NO: 644322 - protein, 17 aa, Homo sapiens
  CDR3 for beta chain variable domain of TCR clone 322161 (TRBV5-1, TRBJ2-2)
CASSLAGLSGGTGELFF

SEQ ID NO: 644323 - protein, 17 aa, Homo sapiens
  CDR3 for alpha chain variable domain of TCR clone 322162 (TRAV3, TRAJ28)
CAVRPLYSGAGSYQLTF

SEQ ID NO: 644324 - protein, 16 aa, Homo sapiens
  CDR3 for beta chain variable domain of TCR clone 322162 (TRBV12-5, TRBJ2-5)
CASGPRTSGNQETQYF

SEQ ID NO: 644325 - protein, 15 aa, Homo sapiens
  CDR3 for alpha chain variable domain of TCR clone 322163 (TRAV4, TRAJ39)
CLVGPNNTAGNMLTF

SEQ ID NO: 644326 - protein, 14 aa, Homo sapiens
  CDR3 for beta chain variable domain of TCR clone 322163 (TRBV19, TRBJ2-1)
CASPTFVLSGEQFF

SEQ ID NO: 644327 - protein, 11 aa, Homo sapiens
  CDR3 for alpha chain variable domain of TCR clone 322164 (TRAV12-2, TRAJ31)
CAVTRWARLMF

SEQ ID NO: 644328 - protein, 15 aa, Homo sapiens
  CDR3 for beta chain variable domain of TCR clone 322164 (TRBV19, TRBJ2-7)
CASSIGGGLVNEQYC

SEQ ID NO: 644329 - protein, 15 aa, Homo sapiens
  CDR3 for alpha chain variable domain of TCR clone 322165 (TRAV16, TRAJ57)
CALSGGQGGSEKLVF

SEQ ID NO: 644330 - protein, 17 aa, Homo sapiens
  CDR3 for beta chain variable domain of TCR clone 322165 (TRBV7-3, TRBJ2-2)
CASSLSGTSGGTGELFF

SEQ ID NO: 644331 - protein, 15 aa, Homo sapiens
  CDR3 for alpha chain variable domain of TCR clone 322166 (TRAV12-3, TRAJ6)
CAMSPASGGSYIPTF

SEQ ID NO: 644332 - protein, 13 aa, Homo sapiens
  CDR3 for beta chain variable domain of TCR clone 322166 (TRBV20-1, TRBJ2-5)
CSARRGTGATQYF

SEQ ID NO: 644333 - protein, 12 aa, Homo sapiens
  CDR3 for alpha chain variable domain of TCR clone 322167 (TRAV27, TRAJ9)
RAGESGGFKTIF

SEQ ID NO: 644334 - protein, 18 aa, Homo sapiens
  CDR3 for beta chain variable domain of TCR clone 322167 (TRBV10-2, TRBJ2-2)
CISAPAVHRQADAGELFF

SEQ ID NO: 644335 - protein, 17 aa, Homo sapiens
  CDR3 for alpha chain variable domain of TCR clone 322168 (TRAV3, TRAJ42)
CAVRDRDYGGSQGNLIF

SEQ ID NO: 644336 - protein, 14 aa, Homo sapiens
  CDR3 for beta chain variable domain of TCR clone 322168 (TRBV25-1, TRBJ1-1)
CASTHLGGNTKAFF

SEQ ID NO: 644337 - protein, 14 aa, Homo sapiens
  CDR3 for alpha chain variable domain of TCR clone 322169 (TRAV1-2, TRAJ16)
CAANRFSDGQKLLF

SEQ ID NO: 644338 - protein, 13 aa, Homo sapiens
  CDR3 for beta chain variable domain of TCR clone 322169 (TRBV10-3, TRBJ2-7)
CASKLAVKYEQYF

SEQ ID NO: 644339 - protein, 15 aa, Homo sapiens
  CDR3 for alpha chain variable domain of TCR clone 322170 (TRAV13-1, TRAJ39)
CAASPLNNAGNMLTF

SEQ ID NO: 644340 - protein, 12 aa, Homo sapiens
  CDR3 for beta chain variable domain of TCR clone 322170 (TRBV16, TRBJ2-2)
CASSQSVGELFF

SEQ ID NO: 644341 - protein, 10 aa, Homo sapiens
  CDR3 for alpha chain variable domain of TCR clone 322171 (TRAV35, TRAJ30)
LPGGDDKIIF

SEQ ID NO: 644342 - protein, 14 aa, Homo sapiens
  CDR3 for beta chain variable domain of TCR clone 322171 (TRBV25-1, TRBJ1-1)
CASTRLGGNTEAFF

SEQ ID NO: 644343 - protein, 12 aa, Homo sapiens
  CDR3 for alpha chain variable domain of TCR clone 322172 (TRAV12-3, TRAJ17)
CPMTLTGNKLTF

SEQ ID NO: 644344 - protein, 15 aa, Homo sapiens
  CDR3 for beta chain variable domain of TCR clone 322172 (TRBV20-1, TRBJ2-7)
CSARDRVSGMEEQYF

SEQ ID NO: 644345 - protein, 16 aa, Homo sapiens
  CDR3 for alpha chain variable domain of TCR clone 322173 (TRAV30, TRAJ24)
CGTEIVDADSWWKCQF

SEQ ID NO: 644346 - protein, 14 aa, Homo sapiens
  CDR3 for beta chain variable domain of TCR clone 322173 (TRBV12-5, TRBJ2-5)
CASGSRTHQETQYF

SEQ ID NO: 644347 - protein, 15 aa, Homo sapiens
  CDR3 for alpha chain variable domain of TCR clone 322174 (TRAV8-3, TRAJ23)
CALGDRYNQGGKLIF

SEQ ID NO: 644348 - protein, 22 aa, Homo sapiens
  CDR3 for beta chain variable domain of TCR clone 322174 (TRBV29-1, TRBJ2-5)
TVSNMSPEDSSIYLCSAGIQYF

SEQ ID NO: 644349 - protein, 13 aa, Homo sapiens
  CDR3 for alpha chain variable domain of TCR clone 322175 (TRAV8-3, TRAJ28)
CAVGAVGSYQLTF

SEQ ID NO: 644350 - protein, 18 aa, Homo sapiens
  CDR3 for beta chain variable domain of TCR clone 322175 (TRBV7-3, TRBJ2-3)
CASSSTGTYPGSTDTQYF

SEQ ID NO: 644351 - protein, 13 aa, Homo sapiens
  CDR3 for alpha chain variable domain of TCR clone 322176 (TRAV26-1, TRAJ48)
CIVRVVRDEKLTF

SEQ ID NO: 644352 - protein, 19 aa, Homo sapiens
  CDR3 for beta chain variable domain of TCR clone 322176 (TRBV11-3, TRBJ2-2)
CASSTRPGAKTTNTGELFF

SEQ ID NO: 644353 - protein, 16 aa, Homo sapiens
  CDR3 for alpha chain variable domain of TCR clone 322177 (TRAV26-2, TRAJ45)
CTTASPIGGGADGLTF

SEQ ID NO: 644354 - protein, 12 aa, Homo sapiens
  CDR3 for beta chain variable domain of TCR clone 322177 (TRBV5-7, TRBJ1-2)
CASSLVQNGYTF

SEQ ID NO: 644355 - protein, 17 aa, Homo sapiens
  CDR3 for alpha chain variable domain of TCR clone 322178 (TRAV21, TRAJ52)
CCEAFPRGGTSYGKLTF

SEQ ID NO: 644356 - protein, 17 aa, Homo sapiens
  CDR3 for beta chain variable domain of TCR clone 322178 (TRBV13, TRBJ2-3)
CASSLSRVAGGRNTQYF

SEQ ID NO: 644357 - protein, 23 aa, Homo sapiens
  CDR3 for alpha chain variable domain of TCR clone 322179 (TRAV12-2, TRAJ22)
CAVSFRVHPGPPIVSVSARQLTF

SEQ ID NO: 644358 - protein, 13 aa, Homo sapiens
  CDR3 for beta chain variable domain of TCR clone 322179 (TRBV12-4, TRBJ1-2)
CASSLDSNDGYTF

SEQ ID NO: 644359 - protein, 14 aa, Homo sapiens
  CDR3 for alpha chain variable domain of TCR clone 322180 (TRAV1-2, TRAJ16)
CAVNRFSDGQKLLF

SEQ ID NO: 644360 - protein, 14 aa, Homo sapiens
  CDR3 for beta chain variable domain of TCR clone 322180 (TRBV12-4, TRBJ1-1)
CASSLWTGGTEAFF

SEQ ID NO: 644361 - protein, 13 aa, Homo sapiens
  CDR3 for alpha chain variable domain of TCR clone 322181 (TRAV13-1, TRAJ28)
CAANEARSYQLTF

SEQ ID NO: 644362 - protein, 15 aa, Homo sapiens
  CDR3 for beta chain variable domain of TCR clone 322181 (TRBV7-9, TRBJ1-6)
CASSSPGRGNSPLHF

SEQ ID NO: 644363 - protein, 16 aa, Homo sapiens
  CDR3 for alpha chain variable domain of TCR clone 322182 (TRAV27, TRAJ13)
CAGAKSDSGGYQEVTF

SEQ ID NO: 644364 - protein, 12 aa, Homo sapiens
  CDR3 for beta chain variable domain of TCR clone 322182 (TRBV29-1, TRBJ2-1)
RKTRLFYNEQFF

SEQ ID NO: 644365 - protein, 11 aa, Homo sapiens
  CDR3 for alpha chain variable domain of TCR clone 322183 (TRAV14/DV4, TRAJ31)
CAMRENARLTL

SEQ ID NO: 644366 - protein, 15 aa, Homo sapiens
  CDR3 for beta chain variable domain of TCR clone 322183 (TRBV19, TRBJ2-1)
CASSLETSGYNEQFF

SEQ ID NO: 644367 - protein, 16 aa, Homo sapiens
  CDR3 for alpha chain variable domain of TCR clone 322184 (TRAV13-1, TRAJ45)
CAARGSRKGGADGLTF

SEQ ID NO: 644368 - protein, 14 aa, Homo sapiens
  CDR3 for beta chain variable domain of TCR clone 322184 (TRBV6-3, TRBJ2-1)
CASSSLLAGGSQFF

SEQ ID NO: 644369 - protein, 13 aa, Homo sapiens
  CDR3 for alpha chain variable domain of TCR clone 322185 (TRAV13-2, TRAJ48)
CAEMYFGNEKLTF

SEQ ID NO: 644370 - protein, 12 aa, Homo sapiens
  CDR3 for beta chain variable domain of TCR clone 322185 (TRBV11-2, TRBJ2-2)
CASSLGGGELFF

SEQ ID NO: 644371 - protein, 14 aa, Homo sapiens
  CDR3 for alpha chain variable domain of TCR clone 322186 (TRAV16, TRAJ37)
CALDISGNTGKLIF

SEQ ID NO: 644372 - protein, 12 aa, Homo sapiens
  CDR3 for beta chain variable domain of TCR clone 322186 (TRBV5-4, TRBJ2-7)
CASSLEAYEQYF

SEQ ID NO: 644373 - protein, 14 aa, Homo sapiens
  CDR3 for alpha chain variable domain of TCR clone 322187 (TRAV14/DV4, TRAJ15)
CAMRRDQAGTALIF

SEQ ID NO: 644374 - protein, 19 aa, Homo sapiens
  CDR3 for beta chain variable domain of TCR clone 322187 (TRBV7-2, TRBJ2-3)
CASSPGLAGGGLTTDTQYF

SEQ ID NO: 644375 - protein, 16 aa, Homo sapiens
  CDR3 for alpha chain variable domain of TCR clone 322188 (TRAV3, TRAJ10)
CAVRDMRAGGGNKLTF

SEQ ID NO: 644376 - protein, 12 aa, Homo sapiens
  CDR3 for beta chain variable domain of TCR clone 322188 (TRBV7-9, TRBJ1-1)
CASSLVMGEAFF

SEQ ID NO: 644377 - protein, 14 aa, Homo sapiens
  CDR3 for alpha chain variable domain of TCR clone 322189 (TRAV17, TRAJ45)
CATDARGGADGLTF

SEQ ID NO: 644378 - protein, 11 aa, Homo sapiens
  CDR3 for beta chain variable domain of TCR clone 322189 (TRBV28, TRBJ2-5)
CATGSQETQYF

SEQ ID NO: 644379 - protein, 16 aa, Homo sapiens
  CDR3 for alpha chain variable domain of TCR clone 322190 (TRAV3, TRAJ10)
CAVRDMRAGGGNKLTL

SEQ ID NO: 644380 - protein, 16 aa, Homo sapiens
  CDR3 for beta chain variable domain of TCR clone 322190 (TRBV5-1, TRBJ2-1)
CASSPWTSGEYNEQFF

SEQ ID NO: 644381 - protein, 18 aa, Homo sapiens
  CDR3 for alpha chain variable domain of TCR clone 322191 (TRAV21, TRAJ52)
RAVRPSPAGGTSHGKLTF

SEQ ID NO: 644382 - protein, 15 aa, Homo sapiens
  CDR3 for beta chain variable domain of TCR clone 322191 (TRBV19, TRBJ1-1)
CASTSGQIQNTEAFF

SEQ ID NO: 644383 - protein, 13 aa, Homo sapiens
  CDR3 for alpha chain variable domain of TCR clone 322192 (TRAV12-3, TRAJ13)
CAMSSGGYQKVTY

SEQ ID NO: 644384 - protein, 13 aa, Homo sapiens
  CDR3 for beta chain variable domain of TCR clone 322192 (TRBV20-1, TRBJ1-1)
CSAPPGGHTEAFF

SEQ ID NO: 644385 - protein, 16 aa, Homo sapiens
  CDR3 for alpha chain variable domain of TCR clone 322193 (TRAV12-3, TRAJ53)
CAMSPGSGGSNYKLTF

SEQ ID NO: 644386 - protein, 15 aa, Homo sapiens
  CDR3 for beta chain variable domain of TCR clone 322193 (TRBV11-2, TRBJ2-1)
CASSKNRGLIYEQYF

SEQ ID NO: 644387 - protein, 15 aa, Homo sapiens
  CDR3 for alpha chain variable domain of TCR clone 322194 (TRAV8-6, TRAJ10)
CAVSDQAGGGNKLTF

SEQ ID NO: 644388 - protein, 16 aa, Homo sapiens
  CDR3 for beta chain variable domain of TCR clone 322194 (TRBV12-5, TRBJ2-5)
CASGPRTSGNQETQYF

SEQ ID NO: 644389 - protein, 12 aa, Homo sapiens
  CDR3 for alpha chain variable domain of TCR clone 322195 (TRAV12-1, TRAJ40)
CVVPSGTYKSIF

SEQ ID NO: 644390 - protein, 15 aa, Homo sapiens
  CDR3 for beta chain variable domain of TCR clone 322195 (TRBV12-4, TRBJ2-1)
CAGSPLSGRNSEQFF

SEQ ID NO: 644391 - protein, 12 aa, Homo sapiens
  CDR3 for alpha chain variable domain of TCR clone 322196 (TRAV21, TRAJ33)
CAKMDSNYQLIW

SEQ ID NO: 644392 - protein, 13 aa, Homo sapiens
  CDR3 for beta chain variable domain of TCR clone 322196 (TRBV7-2, TRBJ1-4)
CASSLAGLEKLFF

SEQ ID NO: 644393 - protein, 12 aa, Homo sapiens
  CDR3 for alpha chain variable domain of TCR clone 322197 (TRAV26-1, TRAJ17)
CIVRFAGNKLTF

SEQ ID NO: 644394 - protein, 15 aa, Homo sapiens
  CDR3 for beta chain variable domain of TCR clone 322197 (TRBV7-6, TRBJ1-2)
CASSSGGRGGYGYTF

SEQ ID NO: 644395 - protein, 16 aa, Homo sapiens
  CDR3 for alpha chain variable domain of TCR clone 322198 (TRAV27, TRAJ52)
CAGAGAGGNSYGKLTF

SEQ ID NO: 644396 - protein, 17 aa, Homo sapiens
  CDR3 for beta chain variable domain of TCR clone 322198 (TRBV24-1, TRBJ2-3)
CATSDLPSGEDTDTQYF

SEQ ID NO: 644397 - protein, 13 aa, Homo sapiens
  CDR3 for alpha chain variable domain of TCR clone 322199 (TRAV8-3, TRAJ48)
CAVVPFGNEKLTF

SEQ ID NO: 644398 - protein, 13 aa, Homo sapiens
  CDR3 for beta chain variable domain of TCR clone 322199 (TRBV12-4, TRBJ2-5)
CASSPGTEETQYF

SEQ ID NO: 644399 - protein, 13 aa, Homo sapiens
  CDR3 for alpha chain variable domain of TCR clone 322200 (TRAV23/DV6, TRAJ35)
CAAPIGFGNVLHC

SEQ ID NO: 644400 - protein, 13 aa, Homo sapiens
  CDR3 for beta chain variable domain of TCR clone 322200 (TRBV18, TRBJ1-1)
CASSGGRNTEAFF

SEQ ID NO: 644401 - protein, 16 aa, Homo sapiens
  CDR3 for alpha chain variable domain of TCR clone 322201 (TRAV8-3, TRAJ18)
CAVGARRGSTLGRLYF

SEQ ID NO: 644402 - protein, 15 aa, Homo sapiens
  CDR3 for beta chain variable domain of TCR clone 322201 (TRBV15, TRBJ2-3)
CATSRDPRGTDTQYF

SEQ ID NO: 644403 - protein, 11 aa, Homo sapiens
  CDR3 for alpha chain variable domain of TCR clone 322202 (TRAV12-1, TRAJ33)
CVVNSNYQLIW

SEQ ID NO: 644404 - protein, 18 aa, Homo sapiens
  CDR3 for beta chain variable domain of TCR clone 322202 (TRBV6-6, TRBJ1-3)
CASSYSKWDSISGNTIYF

SEQ ID NO: 644405 - protein, 14 aa, Homo sapiens
  CDR3 for alpha chain variable domain of TCR clone 322203 (TRAV1-2, TRAJ17)
GALRRGAAGNKLTF

SEQ ID NO: 644406 - protein, 12 aa, Homo sapiens
  CDR3 for beta chain variable domain of TCR clone 322203 (TRBV11-2, TRBJ2-2)
CASSLGGGELFF

SEQ ID NO: 644407 - protein, 11 aa, Homo sapiens
  CDR3 for alpha chain variable domain of TCR clone 322204 (TRAV1-2, TRAJ20)
CAVSNDYKLSF

SEQ ID NO: 644408 - protein, 16 aa, Homo sapiens
  CDR3 for beta chain variable domain of TCR clone 322204 (TRBV29-1, TRBJ2-6)
CRVEDITYSGANDLTF

SEQ ID NO: 644409 - protein, 14 aa, Homo sapiens
  CDR3 for alpha chain variable domain of TCR clone 322205 (TRAV12-3, TRAJ58)
CAMSTETSGSRMTF

SEQ ID NO: 644410 - protein, 11 aa, Homo sapiens
  CDR3 for beta chain variable domain of TCR clone 322205 (TRBV29-1, TRBJ2-5)
CSEDRTGTQYF

SEQ ID NO: 644411 - protein, 12 aa, Homo sapiens
  CDR3 for alpha chain variable domain of TCR clone 322206 (TRAV8-3, TRAJ20)
CAVGANDYKLSF

SEQ ID NO: 644412 - protein, 14 aa, Homo sapiens
  CDR3 for beta chain variable domain of TCR clone 322206 (TRBV19, TRBJ1-2)
CASSLQGQAYGYTF

SEQ ID NO: 644413 - protein, 14 aa, Homo sapiens
  CDR3 for alpha chain variable domain of TCR clone 322207 (TRAV12-2, TRAJ24)
CAVTPADSWGKLPF

SEQ ID NO: 644414 - protein, 12 aa, Homo sapiens
  CDR3 for beta chain variable domain of TCR clone 322207 (TRBV3-1, TRBJ2-1)
CDSSQGSSGQFF

SEQ ID NO: 644415 - protein, 13 aa, Homo sapiens
  CDR3 for alpha chain variable domain of TCR clone 322208 (TRAV2, TRAJ47)
CAVDREYGNKLVF

SEQ ID NO: 644416 - protein, 17 aa, Homo sapiens
  CDR3 for beta chain variable domain of TCR clone 322208 (TRBV15, TRBJ1-5)
CATSRVKGIYSNQPKHF

SEQ ID NO: 644417 - protein, 18 aa, Homo sapiens
  CDR3 for alpha chain variable domain of TCR clone 322209 (TRAV13-1, TRAJ52)
CAAKNPNAGGTSYGKLTF

SEQ ID NO: 644418 - protein, 17 aa, Homo sapiens
  CDR3 for beta chain variable domain of TCR clone 322209 (TRBV10-3, TRBJ2-4)
CTSVPSVNKGSKNIQYF

SEQ ID NO: 644419 - protein, 11 aa, Homo sapiens
  CDR3 for alpha chain variable domain of TCR clone 322210 (TRAV3, TRAJ13)
CAVTSYQKVTF

SEQ ID NO: 644420 - protein, 15 aa, Homo sapiens
  CDR3 for beta chain variable domain of TCR clone 322210 (TRBV7-9, TRBJ2-1)
CASSSSGLAVYEQFF

SEQ ID NO: 644421 - protein, 13 aa, Homo sapiens
  CDR3 for alpha chain variable domain of TCR clone 322211 (TRAV8-3, TRAJ48)
CAVVPFGNEKLTF

SEQ ID NO: 644422 - protein, 19 aa, Homo sapiens
  CDR3 for beta chain variable domain of TCR clone 322211 (TRBV25-1, TRBJ2-2)
CAILVYRVDRGRTTGELFF

SEQ ID NO: 644423 - protein, 15 aa, Homo sapiens
  CDR3 for alpha chain variable domain of TCR clone 322212 (TRAV12-3, TRAJ6)
CAMSAASGGSYIPTF

SEQ ID NO: 644424 - protein, 15 aa, Homo sapiens
  CDR3 for beta chain variable domain of TCR clone 322212 (TRBV19, TRBJ1-2)
CASSVGQVLNYGYTF

SEQ ID NO: 644425 - protein, 14 aa, Homo sapiens
  CDR3 for alpha chain variable domain of TCR clone 322213 (TRAV35, TRAJ33)
CAGSSQDSNYQLIW

SEQ ID NO: 644426 - protein, 13 aa, Homo sapiens
  CDR3 for beta chain variable domain of TCR clone 322213 (TRBV7-8, TRBJ2-7)
CASSLTGGREQYF

SEQ ID NO: 644427 - protein, 12 aa, Homo sapiens
  CDR3 for alpha chain variable domain of TCR clone 322214 (TRAV13-1, TRAJ48)
CAANFGNEKLTF

SEQ ID NO: 644428 - protein, 12 aa, Homo sapiens
  CDR3 for beta chain variable domain of TCR clone 322214 (TRBV6-3, TRBJ2-7)
CASSEPGFEQYF

SEQ ID NO: 644429 - protein, 17 aa, Homo sapiens
  CDR3 for alpha chain variable domain of TCR clone 322215 (TRAV3, TRAJ42)
CAVRDRDYGGSQGNPIF

SEQ ID NO: 644430 - protein, 15 aa, Homo sapiens
  CDR3 for beta chain variable domain of TCR clone 322215 (TRBV2, TRBJ2-1)
CASSEEREGDNEQFF

SEQ ID NO: 644431 - protein, 14 aa, Homo sapiens
  CDR3 for alpha chain variable domain of TCR clone 322216 (TRAV13-1, TRAJ24)
CAASRTDSWGKLQF

SEQ ID NO: 644432 - protein, 15 aa, Homo sapiens
  CDR3 for beta chain variable domain of TCR clone 322216 (TRBV7-9, TRBJ1-5)
CASSQCHQPNQPQHF

SEQ ID NO: 644433 - protein, 14 aa, Homo sapiens
  CDR3 for alpha chain variable domain of TCR clone 322217 (TRAV26-1, TRAJ31)
CIALPPNNNARLMF

SEQ ID NO: 644434 - protein, 12 aa, Homo sapiens
  CDR3 for beta chain variable domain of TCR clone 322217 (TRBV6-6, TRBJ2-5)
CASNRQSGTQYF

SEQ ID NO: 644435 - protein, 14 aa, Homo sapiens
  CDR3 for alpha chain variable domain of TCR clone 322218 (TRAV12-1, TRAJ8)
CVVNSNTGFPKLVF

SEQ ID NO: 644436 - protein, 17 aa, Homo sapiens
  CDR3 for beta chain variable domain of TCR clone 322218 (TRBV7-8, TRBJ2-6)
CASSAGTGGAGANVLTF

SEQ ID NO: 644437 - protein, 12 aa, Homo sapiens
  CDR3 for alpha chain variable domain of TCR clone 322219 (TRAV1-2, TRAJ39)
TSLLYAGNMLTF

SEQ ID NO: 644438 - protein, 16 aa, Homo sapiens
  CDR3 for beta chain variable domain of TCR clone 322219 (TRBV11-2, TRBJ2-1)
CASSLLLLSAYNEQFF

SEQ ID NO: 644439 - protein, 14 aa, Homo sapiens
  CDR3 for alpha chain variable domain of TCR clone 322220 (TRAV17, TRAJ57)
CATDPQGGSEKVVF

SEQ ID NO: 644440 - protein, 13 aa, Homo sapiens
  CDR3 for beta chain variable domain of TCR clone 322220 (TRBV19, TRBJ2-7)
CASSPRQSYEQYF

SEQ ID NO: 644441 - protein, 12 aa, Homo sapiens
  CDR3 for alpha chain variable domain of TCR clone 322221 (TRAV13-1, TRAJ49)
CAAMSTGNQFYF

SEQ ID NO: 644442 - protein, 14 aa, Homo sapiens
  CDR3 for beta chain variable domain of TCR clone 322221 (TRBV7-6, TRBJ2-3)
CASSVAGGTDTQYF

SEQ ID NO: 644443 - protein, 18 aa, Homo sapiens
  CDR3 for alpha chain variable domain of TCR clone 322222 (TRAV21, TRAJ52)
CAVRPSPAGGTSYGKLTF

SEQ ID NO: 644444 - protein, 17 aa, Homo sapiens
  CDR3 for beta chain variable domain of TCR clone 322222 (TRBV20-1, TRBJ2-2)
CSASGSVQGGLTGELFF

SEQ ID NO: 644445 - protein, 11 aa, Homo sapiens
  CDR3 for alpha chain variable domain of TCR clone 322223 (TRAV1-1, TRAJ23)
CAVRQGGKLIF

SEQ ID NO: 644446 - protein, 15 aa, Homo sapiens
  CDR3 for beta chain variable domain of TCR clone 322223 (TRBV7-2, TRBJ2-2)
CASRRPGQNTGELFF

SEQ ID NO: 644447 - protein, 12 aa, Homo sapiens
  CDR3 for alpha chain variable domain of TCR clone 322224 (TRAV13-2, TRAJ23)
CAERHRGGKLIF

SEQ ID NO: 644448 - protein, 14 aa, Homo sapiens
  CDR3 for beta chain variable domain of TCR clone 322224 (TRBV6-1, TRBJ1-3)
CASVQGGGGDTIYF

SEQ ID NO: 644449 - protein, 15 aa, Homo sapiens
  CDR3 for alpha chain variable domain of TCR clone 322225 (TRAV20, TRAJ43)
CAVQAGKSSNNDMRF

SEQ ID NO: 644450 - protein, 14 aa, Homo sapiens
  CDR3 for beta chain variable domain of TCR clone 322225 (TRBV19, TRBJ2-5)
CASSMTGQQETQYF

SEQ ID NO: 644451 - protein, 14 aa, Homo sapiens
  CDR3 for alpha chain variable domain of TCR clone 322226 (TRAV17, TRAJ39)
CATDPVRAGNMLTF

SEQ ID NO: 644452 - protein, 17 aa, Homo sapiens
  CDR3 for beta chain variable domain of TCR clone 322226 (TRBV28, TRBJ2-5)
CASSRQGGLAGAETQYF

SEQ ID NO: 644453 - protein, 12 aa, Homo sapiens
  CDR3 for alpha chain variable domain of TCR clone 322227 (TRAV17, TRAJ36)
CATLTGANNLFF

SEQ ID NO: 644454 - protein, 12 aa, Homo sapiens
  CDR3 for beta chain variable domain of TCR clone 322227 (TRBV19, TRBJ1-2)
CASSTRRILTMA

SEQ ID NO: 644455 - protein, 20 aa, Homo sapiens
  CDR3 for alpha chain variable domain of TCR clone 322228 (TRAV26-1, TRAJ38)
CLADNAGNNHIQNPDPAAYQ

SEQ ID NO: 644456 - protein, 13 aa, Homo sapiens
  CDR3 for beta chain variable domain of TCR clone 322228 (TRBV20-1, TRBJ1-1)
CSARGGGNTEAFF

SEQ ID NO: 644457 - protein, 13 aa, Homo sapiens
  CDR3 for alpha chain variable domain of TCR clone 322229 (TRAV30, TRAJ24)
CGTVTDSWGKLQF

SEQ ID NO: 644458 - protein, 15 aa, Homo sapiens
  CDR3 for beta chain variable domain of TCR clone 322229 (TRBV4-1, TRBJ2-1)
CASSQDPGSYNEQFF

SEQ ID NO: 644459 - protein, 13 aa, Homo sapiens
  CDR3 for alpha chain variable domain of TCR clone 322230 (TRAV36/DV7, TRAJ37)
CAVFSSNTGKLIF

SEQ ID NO: 644460 - protein, 15 aa, Homo sapiens
  CDR3 for beta chain variable domain of TCR clone 322230 (TRBV12-4, TRBJ2-5)
CRQFFVRGRRETQYF

SEQ ID NO: 644461 - protein, 15 aa, Homo sapiens
  CDR3 for alpha chain variable domain of TCR clone 322231 (TRAV26-1, TRAJ22)
CVVRVSFWFCKATDL

SEQ ID NO: 644462 - protein, 12 aa, Homo sapiens
  CDR3 for beta chain variable domain of TCR clone 322231 (TRBV11-2, TRBJ2-2)
CASSLGGGELFF

SEQ ID NO: 644463 - protein, 14 aa, Homo sapiens
  CDR3 for alpha chain variable domain of TCR clone 322232 (TRAV23/DV6, TRAJ8)
CAASKATGFKKLAF

SEQ ID NO: 644464 - protein, 15 aa, Homo sapiens
  CDR3 for beta chain variable domain of TCR clone 322232 (TRBV28, TRBJ2-3)
CASSPDRQGANTQYF

SEQ ID NO: 644465 - protein, 12 aa, Homo sapiens
  CDR3 for alpha chain variable domain of TCR clone 322233 (TRAV2, TRAJ36)
CAELTGANNLFF

SEQ ID NO: 644466 - protein, 18 aa, Homo sapiens
  CDR3 for beta chain variable domain of TCR clone 322233 (TRBV19, TRBJ1-1)
CASIIDGGDYTENTEAFF

SEQ ID NO: 644467 - protein, 19 aa, Homo sapiens
  CDR3 for alpha chain variable domain of TCR clone 322234 (TRAV2, TRAJ20)
IPQVREADAAVYRDCKLSL

SEQ ID NO: 644468 - protein, 12 aa, Homo sapiens
  CDR3 for beta chain variable domain of TCR clone 322234 (TRBV11-2, TRBJ2-2)
CASSLGGGELFF

SEQ ID NO: 644469 - protein, 14 aa, Homo sapiens
  CDR3 for alpha chain variable domain of TCR clone 322235 (TRAV12-2, TRAJ13)
CAVKKTGGYQKVTF

SEQ ID NO: 644470 - protein, 15 aa, Homo sapiens
  CDR3 for beta chain variable domain of TCR clone 322235 (TRBV7-9, TRBJ1-2)
CASSSFGDTNYGYTF

SEQ ID NO: 644471 - protein, 16 aa, Homo sapiens
  CDR3 for alpha chain variable domain of TCR clone 322236 (TRAV20, TRAJ38)
CAVQARNAGNNRKPIW

SEQ ID NO: 644472 - protein, 16 aa, Homo sapiens
  CDR3 for beta chain variable domain of TCR clone 322236 (TRBV7-8, TRBJ2-6)
CASRVGDSSGANVLTF

SEQ ID NO: 644473 - protein, 16 aa, Homo sapiens
  CDR3 for alpha chain variable domain of TCR clone 322237 (TRAV12-3, TRAJ53)
CAMSPGSGGSNYKLTF

SEQ ID NO: 644474 - protein, 15 aa, Homo sapiens
  CDR3 for beta chain variable domain of TCR clone 322237 (TRBV10-2, TRBJ2-6)
CASSEQGTGASVLTF

SEQ ID NO: 644475 - protein, 15 aa, Homo sapiens
  CDR3 for alpha chain variable domain of TCR clone 322238 (TRAV3, TRAJ13)
CAVRDIAVGYQKVTF

SEQ ID NO: 644476 - protein, 13 aa, Homo sapiens
  CDR3 for beta chain variable domain of TCR clone 322238 (TRBV2, TRBJ2-2)
CASSKKNTGELFF

SEQ ID NO: 644477 - protein, 18 aa, Homo sapiens
  CDR3 for alpha chain variable domain of TCR clone 322239 (TRAV17, TRAJ45)
CATSLDLYSGGGAVGLTF

SEQ ID NO: 644478 - protein, 13 aa, Homo sapiens
  CDR3 for beta chain variable domain of TCR clone 322239 (TRBV10-3, TRBJ2-7)
CASKLAVNYEQYF

SEQ ID NO: 644479 - protein, 12 aa, Homo sapiens
  CDR3 for alpha chain variable domain of TCR clone 322240 (TRAV12-3, TRAJ5)
CAMDTGRRALTF

SEQ ID NO: 644480 - protein, 13 aa, Homo sapiens
  CDR3 for beta chain variable domain of TCR clone 322240 (TRBV7-9, TRBJ2-3)
CASSPGSTDTQYF

SEQ ID NO: 644481 - protein, 13 aa, Homo sapiens
  CDR3 for alpha chain variable domain of TCR clone 322241 (TRAV21, TRAJ40)
CAVRPSRAYKYIF

SEQ ID NO: 644482 - protein, 15 aa, Homo sapiens
  CDR3 for beta chain variable domain of TCR clone 322241 (TRBV5-1, TRBJ2-7)
CASSLYPDRGYEQYF

SEQ ID NO: 644483 - protein, 15 aa, Homo sapiens
  CDR3 for alpha chain variable domain of TCR clone 322242 (TRAV36/DV7, TRAJ42)
CAVEGYGGSQGNLLF

SEQ ID NO: 644484 - protein, 14 aa, Homo sapiens
  CDR3 for beta chain variable domain of TCR clone 322242 (TRBV2, TRBJ1-6)
CASSEAYTYWALHF

SEQ ID NO: 644485 - protein, 14 aa, Homo sapiens
  CDR3 for alpha chain variable domain of TCR clone 322243 (TRAV1-2, TRAJ16)
CAVNRFSDGQKLLF

SEQ ID NO: 644486 - protein, 16 aa, Homo sapiens
  CDR3 for beta chain variable domain of TCR clone 322243 (TRBV18, TRBJ1-5)
CASSPRTGGGNQPQHF

SEQ ID NO: 644487 - protein, 13 aa, Homo sapiens
  CDR3 for alpha chain variable domain of TCR clone 322244 (TRAV3, TRAJ21)
CAVREPDFNKFYF

SEQ ID NO: 644488 - protein, 13 aa, Homo sapiens
  CDR3 for beta chain variable domain of TCR clone 322244 (TRBV12-4, TRBJ1-2)
CASSYRVNYGYTI

SEQ ID NO: 644489 - protein, 11 aa, Homo sapiens
  CDR3 for alpha chain variable domain of TCR clone 322245 (TRAV16, TRAJ31)
CALFNNARLMF

SEQ ID NO: 644490 - protein, 17 aa, Homo sapiens
  CDR3 for beta chain variable domain of TCR clone 322245 (TRBV18, TRBJ1-1)
CASSLGKERTLKLSFDK

SEQ ID NO: 644491 - protein, 16 aa, Homo sapiens
  CDR3 for alpha chain variable domain of TCR clone 322246 (TRAV1-2, TRAJ16)
CAVNRFSDARSCSLQG

SEQ ID NO: 644492 - protein, 16 aa, Homo sapiens
  CDR3 for beta chain variable domain of TCR clone 322246 (TRBV19, TRBJ2-1)
CASSEILAGDGNEQFF

SEQ ID NO: 644493 - protein, 16 aa, Homo sapiens
  CDR3 for alpha chain variable domain of TCR clone 322247 (TRAV30, TRAJ24)
CGTEMVDADSWGRFQF

SEQ ID NO: 644494 - protein, 14 aa, Homo sapiens
  CDR3 for beta chain variable domain of TCR clone 322247 (TRBV12-5, TRBJ2-5)
CASGSRTHQETQYF

SEQ ID NO: 644495 - protein, 15 aa, Homo sapiens
  CDR3 for alpha chain variable domain of TCR clone 322248 (TRAV4, TRAJ49)
FLVGDMESTGNQFYF

SEQ ID NO: 644496 - protein, 15 aa, Homo sapiens
  CDR3 for beta chain variable domain of TCR clone 322248 (TRBV25-1, TRBJ1-2)
CASSVGTGSYYGYTF

SEQ ID NO: 644497 - protein, 15 aa, Homo sapiens
  CDR3 for alpha chain variable domain of TCR clone 322249 (TRAV30, TRAJ13)
CGTQGVTGGYQKVTF

SEQ ID NO: 644498 - protein, 15 aa, Homo sapiens
  CDR3 for beta chain variable domain of TCR clone 322249 (TRBV20-1, TRBJ2-5)
CSAEGTGGLQETQYF

SEQ ID NO: 644499 - protein, 14 aa, Homo sapiens
  CDR3 for alpha chain variable domain of TCR clone 322250 (TRAV12-3, TRAJ10)
SHLPLTGGGNKLTF

SEQ ID NO: 644500 - protein, 14 aa, Homo sapiens
  CDR3 for beta chain variable domain of TCR clone 322250 (TRBV6-1, TRBJ1-3)
CASVQGGGENTIYF

SEQ ID NO: 644501 - protein, 12 aa, Homo sapiens
  CDR3 for alpha chain variable domain of TCR clone 322251 (TRAV26-1, TRAJ53)
CIEGGSNYKLTF

SEQ ID NO: 644502 - protein, 13 aa, Homo sapiens
  CDR3 for beta chain variable domain of TCR clone 322251 (TRBV4-2, TRBJ1-1)
CASSQAGNTEAFF

SEQ ID NO: 644503 - protein, 16 aa, Homo sapiens
  CDR3 for alpha chain variable domain of TCR clone 322252 (TRAV30, TRAJ24)
CGTEIVDANSWGKFQF

SEQ ID NO: 644504 - protein, 12 aa, Homo sapiens
  CDR3 for beta chain variable domain of TCR clone 322252 (TRBV11-2, TRBJ2-2)
CASSLPTGELFF

SEQ ID NO: 644505 - protein, 11 aa, Homo sapiens
  CDR3 for alpha chain variable domain of TCR clone 322253 (TRAV12-2, TRAJ29)
CAVTLRSPLVF

SEQ ID NO: 644506 - protein, 15 aa, Homo sapiens
  CDR3 for beta chain variable domain of TCR clone 322253 (TRBV4-1, TRBJ2-5)
CASGQWDLYQETQYF

SEQ ID NO: 644507 - protein, 13 aa, Homo sapiens
  CDR3 for alpha chain variable domain of TCR clone 322254 (TRAV2, TRAJ40)
CAVVTSGTYKYIF

SEQ ID NO: 644508 - protein, 15 aa, Homo sapiens
  CDR3 for beta chain variable domain of TCR clone 322254 (TRBV5-8, TRBJ1-1)
CASSFSGTSLKGAFF

SEQ ID NO: 644509 - protein, 15 aa, Homo sapiens
  CDR3 for alpha chain variable domain of TCR clone 322255 (TRAV21, TRAJ32)
CAVNSYGGATNNLIF

SEQ ID NO: 644510 - protein, 14 aa, Homo sapiens
  CDR3 for beta chain variable domain of TCR clone 322255 (TRBV7-2, TRBJ2-7)
CASSPKTSFYEQYF

SEQ ID NO: 644511 - protein, 14 aa, Homo sapiens
  CDR3 for alpha chain variable domain of TCR clone 322256 (TRAV12-3, TRAJ10)
SHLPLTGGGNKLTF

SEQ ID NO: 644512 - protein, 16 aa, Homo sapiens
  CDR3 for beta chain variable domain of TCR clone 322256 (TRBV19, TRBJ1-1)
CASRVDVTGAAWGAFF

SEQ ID NO: 644513 - protein, 18 aa, Homo sapiens
  CDR3 for alpha chain variable domain of TCR clone 322257 (TRAV9-2, TRAJ52)
CALSRHNAGGTSYGKLKF

SEQ ID NO: 644514 - protein, 15 aa, Homo sapiens
  CDR3 for beta chain variable domain of TCR clone 322257 (TRBV4-1, TRBJ1-4)
CASSDTGGTNEKLFF

SEQ ID NO: 644515 - protein, 13 aa, Homo sapiens
  CDR3 for alpha chain variable domain of TCR clone 322258 (TRAV13-1, TRAJ39)
CSKYSNAGNMLTF

SEQ ID NO: 644516 - protein, 17 aa, Homo sapiens
  CDR3 for beta chain variable domain of TCR clone 322258 (TRBV7-3, TRBJ2-2)
CASSLSGTSGGTGELFF

SEQ ID NO: 644517 - protein, 14 aa, Homo sapiens
  CDR3 for alpha chain variable domain of TCR clone 322259 (TRAV1-2, TRAJ16)
CAVNRFSDGQMLLF

SEQ ID NO: 644518 - protein, 15 aa, Homo sapiens
  CDR3 for beta chain variable domain of TCR clone 322259 (TRBV5-8, TRBJ1-1)
CASSFSGTSLKGAFF

SEQ ID NO: 644519 - protein, 14 aa, Homo sapiens
  CDR3 for alpha chain variable domain of TCR clone 322260 (TRAV1-2, TRAJ16)
CAFNRFSDGQKLLF

SEQ ID NO: 644520 - protein, 12 aa, Homo sapiens
  CDR3 for beta chain variable domain of TCR clone 322260 (TRBV7-6, TRBJ2-7)
CASSLADSEQYF

SEQ ID NO: 644521 - protein, 14 aa, Homo sapiens
  CDR3 for alpha chain variable domain of TCR clone 322261 (TRAV1-2, TRAJ6)
CAVSLSGGSSIPTF

SEQ ID NO: 644522 - protein, 15 aa, Homo sapiens
  CDR3 for beta chain variable domain of TCR clone 322261 (TRBV28, TRBJ2-7)
CASSPGGRGFYEQYF

SEQ ID NO: 644523 - protein, 17 aa, Homo sapiens
  CDR3 for alpha chain variable domain of TCR clone 322262 (TRAV38-2/DV8, TRAJ56)
CDYRSEVGTGANSKLTF

SEQ ID NO: 644524 - protein, 14 aa, Homo sapiens
  CDR3 for beta chain variable domain of TCR clone 322262 (TRBV11-1, TRBJ1-1)
CASSLEHPNTEAFF

SEQ ID NO: 644525 - protein, 14 aa, Homo sapiens
  CDR3 for alpha chain variable domain of TCR clone 322263 (TRAV17, TRAJ57)
CATDAKGGSEKLVF

SEQ ID NO: 644526 - protein, 13 aa, Homo sapiens
  CDR3 for beta chain variable domain of TCR clone 322263 (TRBV7-3, TRBJ2-5)
CASSSDREETQYF

SEQ ID NO: 644527 - protein, 12 aa, Homo sapiens
  CDR3 for alpha chain variable domain of TCR clone 322264 (TRAV8-3, TRAJ26)
CAGDNYGQNFVF

SEQ ID NO: 644528 - protein, 15 aa, Homo sapiens
  CDR3 for beta chain variable domain of TCR clone 322264 (TRBV5-1, TRBJ2-3)
CASSVTPGSTDTQYF

SEQ ID NO: 644529 - protein, 15 aa, Homo sapiens
  CDR3 for alpha chain variable domain of TCR clone 322265 (TRAV1-1, TRAJ20)
CAVRDNVANDYKLSF

SEQ ID NO: 644530 - protein, 16 aa, Homo sapiens
  CDR3 for beta chain variable domain of TCR clone 322265 (TRBV9, TRBJ2-2)
CASSAMGKGNTGELFF

SEQ ID NO: 644531 - protein, 14 aa, Homo sapiens
  CDR3 for alpha chain variable domain of TCR clone 322266 (TRAV2, TRAJ37)
CAVEGSSNTGKLIF

SEQ ID NO: 644532 - protein, 15 aa, Homo sapiens
  CDR3 for beta chain variable domain of TCR clone 322266 (TRBV27, TRBJ2-1)
CASSNGGGSSNEQLF

SEQ ID NO: 644533 - protein, 14 aa, Homo sapiens
  CDR3 for alpha chain variable domain of TCR clone 322267 (TRAV2, TRAJ37)
CAVDFTSNPGKLIF

SEQ ID NO: 644534 - protein, 15 aa, Homo sapiens
  CDR3 for beta chain variable domain of TCR clone 322267 (TRBV20-1, TRBJ1-1)
CSASRGVTGNTEAVF

SEQ ID NO: 644535 - protein, 13 aa, Homo sapiens
  CDR3 for alpha chain variable domain of TCR clone 322268 (TRAV8-3, TRAJ28)
CAVGAVGSCQLTF

SEQ ID NO: 644536 - protein, 17 aa, Homo sapiens
  CDR3 for beta chain variable domain of TCR clone 322268 (TRBV11-2, TRBJ2-1)
CASSLYPPGVEYNEQFF

SEQ ID NO: 644537 - protein, 13 aa, Homo sapiens
  CDR3 for alpha chain variable domain of TCR clone 322269 (TRAV3, TRAJ27)
CAVTNANAGKSTF

SEQ ID NO: 644538 - protein, 13 aa, Homo sapiens
  CDR3 for beta chain variable domain of TCR clone 322269 (TRBV19, TRBJ2-7)
CASQSYGAGEQYF

SEQ ID NO: 644539 - protein, 15 aa, Homo sapiens
  CDR3 for alpha chain variable domain of TCR clone 322270 (TRAV12-1, TRAJ44)
CVVFVNNGTASKLTF

SEQ ID NO: 644540 - protein, 17 aa, Homo sapiens
  CDR3 for beta chain variable domain of TCR clone 322270 (TRBV7-8, TRBJ2-6)
CASSAGTGGAGANVLTF

SEQ ID NO: 644541 - protein, 12 aa, Homo sapiens
  CDR3 for alpha chain variable domain of TCR clone 322271 (TRAV13-2, TRAJ23)
CAERHRGGKLIF

SEQ ID NO: 644542 - protein, 14 aa, Homo sapiens
  CDR3 for beta chain variable domain of TCR clone 322271 (TRBV7-2, TRBJ2-7)
CASSPKTSFYEQYV

SEQ ID NO: 644543 - protein, 14 aa, Homo sapiens
  CDR3 for alpha chain variable domain of TCR clone 322272 (TRAV12-2, TRAJ40)
CAVKIPSGTYKYIF

SEQ ID NO: 644544 - protein, 13 aa, Homo sapiens
  CDR3 for beta chain variable domain of TCR clone 322272 (TRBV18, TRBJ2-5)
VSSPLRVQETQYF

SEQ ID NO: 644545 - protein, 14 aa, Homo sapiens
  CDR3 for alpha chain variable domain of TCR clone 322273 (TRAV12-2, TRAJ13)
CAVKKTGGYQKATF

SEQ ID NO: 644546 - protein, 14 aa, Homo sapiens
  CDR3 for beta chain variable domain of TCR clone 322273 (TRBV5-1, TRBJ2-5)
CASSLAGKQETQYF

SEQ ID NO: 644547 - protein, 13 aa, Homo sapiens
  CDR3 for alpha chain variable domain of TCR clone 322274 (TRAV12-2, TRAJ15)
CAVFNQAGTALIF

SEQ ID NO: 644548 - protein, 23 aa, Homo sapiens
  CDR3 for beta chain variable domain of TCR clone 322274 (TRBV7-8, TRBJ1-5)
RRTPPCISVPAARGGGADQPQHF

SEQ ID NO: 644549 - protein, 14 aa, Homo sapiens
  CDR3 for alpha chain variable domain of TCR clone 322275 (TRAV5, TRAJ4)
CAASFSGGYNKLIF

SEQ ID NO: 644550 - protein, 19 aa, Homo sapiens
  CDR3 for beta chain variable domain of TCR clone 322275 (TRBV2, TRBJ2-7)
CASGDDETSGRANDYEQYF

SEQ ID NO: 644551 - protein, 10 aa, Homo sapiens
  CDR3 for alpha chain variable domain of TCR clone 322276 (TRAV23/DV6, TRAJ57)
CAASSTLSQG

SEQ ID NO: 644552 - protein, 10 aa, Homo sapiens
  CDR3 for beta chain variable domain of TCR clone 322276 (TRBV7-6, TRBJ2-1)
CQINYNEQFF

SEQ ID NO: 644553 - protein, 14 aa, Homo sapiens
  CDR3 for alpha chain variable domain of TCR clone 322277 (TRAV23/DV6, TRAJ8)
CAASKATGFQKLGF

SEQ ID NO: 644554 - protein, 15 aa, Homo sapiens
  CDR3 for beta chain variable domain of TCR clone 322277 (TRBV28, TRBJ2-3)
CASSPGRQGANTQYF

SEQ ID NO: 644555 - protein, 15 aa, Homo sapiens
  CDR3 for alpha chain variable domain of TCR clone 322278 (TRAV8-3, TRAJ45)
WASSYSGGGADGLTL

SEQ ID NO: 644556 - protein, 13 aa, Homo sapiens
  CDR3 for beta chain variable domain of TCR clone 322278 (TRBV10-3, TRBJ2-7)
CASKLAVNYEQYF

SEQ ID NO: 644557 - protein, 14 aa, Homo sapiens
  CDR3 for alpha chain variable domain of TCR clone 322279 (TRAV16, TRAJ29)
CALTRNSGNTPLFF

SEQ ID NO: 644558 - protein, 12 aa, Homo sapiens
  CDR3 for beta chain variable domain of TCR clone 322279 (TRBV2, TRBJ2-1)
CAKREGYNEQFF

SEQ ID NO: 644559 - protein, 12 aa, Homo sapiens
  CDR3 for alpha chain variable domain of TCR clone 322280 (TRAV12-1, TRAJ39)
CVVREAGNMLTF

SEQ ID NO: 644560 - protein, 13 aa, Homo sapiens
  CDR3 for beta chain variable domain of TCR clone 322280 (TRBV28, TRBJ2-1)
CASSPLPSSEQFF

SEQ ID NO: 644561 - protein, 14 aa, Homo sapiens
  CDR3 for alpha chain variable domain of TCR clone 322281 (TRAV12-2, TRAJ13)
CAVKKTGGYQKVTF

SEQ ID NO: 644562 - protein, 15 aa, Homo sapiens
  CDR3 for beta chain variable domain of TCR clone 322281 (TRBV27, TRBJ2-1)
CAGSNGGGPPMSSSS

SEQ ID NO: 644563 - protein, 15 aa, Homo sapiens
  CDR3 for alpha chain variable domain of TCR clone 322282 (TRAV3, TRAJ5)
CAVRDLDTGRRSLTF

SEQ ID NO: 644564 - protein, 14 aa, Homo sapiens
  CDR3 for beta chain variable domain of TCR clone 322282 (TRBV25-1, TRBJ1-4)
CASSGGGQPEKLFF

SEQ ID NO: 644565 - protein, 13 aa, Homo sapiens
  CDR3 for alpha chain variable domain of TCR clone 322283 (TRAV1-1, TRAJ31)
CASYLNNNTRLMF

SEQ ID NO: 644566 - protein, 14 aa, Homo sapiens
  CDR3 for beta chain variable domain of TCR clone 322283 (TRBV4-1, TRBJ2-5)
CASSRSGSGETQYF

SEQ ID NO: 644567 - protein, 14 aa, Homo sapiens
  CDR3 for alpha chain variable domain of TCR clone 322284 (TRAV17, TRAJ57)
CATDPQGGSEKLVF

SEQ ID NO: 644568 - protein, 15 aa, Homo sapiens
  CDR3 for beta chain variable domain of TCR clone 322284 (TRBV5-1, TRBJ2-7)
CASSLDLTGSYEQYF

SEQ ID NO: 644569 - protein, 15 aa, Homo sapiens
  CDR3 for alpha chain variable domain of TCR clone 322285 (TRAV2, TRAJ9)
CAVEDRGTGGFKTIF

SEQ ID NO: 644570 - protein, 16 aa, Homo sapiens
  CDR3 for beta chain variable domain of TCR clone 322285 (TRBV24-1, TRBJ2-3)
CGTSDPGTGATDTQYF

SEQ ID NO: 644571 - protein, 14 aa, Homo sapiens
  CDR3 for alpha chain variable domain of TCR clone 322286 (TRAV3, TRAJ36)
CAVRDGTGANNLFF

SEQ ID NO: 644572 - protein, 14 aa, Homo sapiens
  CDR3 for beta chain variable domain of TCR clone 322286 (TRBV7-2, TRBJ2-7)
CASRSQGAAYEQYF

SEQ ID NO: 644573 - protein, 12 aa, Homo sapiens
  CDR3 for alpha chain variable domain of TCR clone 322287 (TRAV3, TRAJ20)
CAVRDGDYKLSF

SEQ ID NO: 644574 - protein, 18 aa, Homo sapiens
  CDR3 for beta chain variable domain of TCR clone 322287 (TRBV4-1, TRBJ1-5)
CASSQDPRGQGLNQPQHF

SEQ ID NO: 644575 - protein, 12 aa, Homo sapiens
  CDR3 for alpha chain variable domain of TCR clone 322288 (TRAV1-1, TRAJ43)
CAPRVSSNDMRF

SEQ ID NO: 644576 - protein, 15 aa, Homo sapiens
  CDR3 for beta chain variable domain of TCR clone 322288 (TRBV5-1, TRBJ2-7)
RASSLGDFTTYEQYF

SEQ ID NO: 644577 - protein, 14 aa, Homo sapiens
  CDR3 for alpha chain variable domain of TCR clone 322289 (TRAV16, TRAJ33)
CALSAMDSNYQLIW

SEQ ID NO: 644578 - protein, 16 aa, Homo sapiens
  CDR3 for beta chain variable domain of TCR clone 322289 (TRBV12-4, TRBJ2-3)
CASSVPSNTNTDTQYF

SEQ ID NO: 644579 - protein, 16 aa, Homo sapiens
  CDR3 for alpha chain variable domain of TCR clone 322290 (TRAV12-3, TRAJ53)
CAMSPGSGGSNYKLTF

SEQ ID NO: 644580 - protein, 14 aa, Homo sapiens
  CDR3 for beta chain variable domain of TCR clone 322290 (TRBV4-2, TRBJ2-1)
CASGLDMAYNEQFF

SEQ ID NO: 644581 - protein, 14 aa, Homo sapiens
  CDR3 for alpha chain variable domain of TCR clone 322291 (TRAV3, TRAJ21)
CAVESQANFNKFYF

SEQ ID NO: 644582 - protein, 18 aa, Homo sapiens
  CDR3 for beta chain variable domain of TCR clone 322291 (TRBV7-9, TRBJ2-1)
CAISLAVSGTSGRNGQFF

SEQ ID NO: 644583 - protein, 12 aa, Homo sapiens
  CDR3 for alpha chain variable domain of TCR clone 322292 (TRAV8-3, TRAJ41)
CVVALSGYALNF

SEQ ID NO: 644584 - protein, 18 aa, Homo sapiens
  CDR3 for beta chain variable domain of TCR clone 322292 (TRBV20-1, TRBJ2-6)
CSAETTPTHGSGANVLTF

SEQ ID NO: 644585 - protein, 14 aa, Homo sapiens
  CDR3 for alpha chain variable domain of TCR clone 322293 (TRAV27, TRAJ44)
CAGARTGTASKLTF

SEQ ID NO: 644586 - protein, 13 aa, Homo sapiens
  CDR3 for beta chain variable domain of TCR clone 322293 (TRBV5-7, TRBJ2-6)
CASTSSGANVLTF

SEQ ID NO: 644587 - protein, 14 aa, Homo sapiens
  CDR3 for alpha chain variable domain of TCR clone 322294 (TRAV21, TRAJ45)
YAVSSGGGADGLTF

SEQ ID NO: 644588 - protein, 15 aa, Homo sapiens
  CDR3 for beta chain variable domain of TCR clone 322294 (TRBV6-1, TRBJ2-4)
CASSEAVWTINIQYF

SEQ ID NO: 644589 - protein, 13 aa, Homo sapiens
  CDR3 for alpha chain variable domain of TCR clone 322295 (TRAV12-1, TRAJ31)
CVVIPNNNARLMF

SEQ ID NO: 644590 - protein, 15 aa, Homo sapiens
  CDR3 for beta chain variable domain of TCR clone 322295 (TRBV19, TRBJ1-2)
CASNLGGETAYGYTF

SEQ ID NO: 644591 - protein, 15 aa, Homo sapiens
  CDR3 for alpha chain variable domain of TCR clone 322296 (TRAV17, TRAJ57)
CATGPSQGGSEKLVF

SEQ ID NO: 644592 - protein, 14 aa, Homo sapiens
  CDR3 for beta chain variable domain of TCR clone 322296 (TRBV12-5, TRBJ2-5)
CASGSRTPQETQYF

SEQ ID NO: 644593 - protein, 14 aa, Homo sapiens
  CDR3 for alpha chain variable domain of TCR clone 322297 (TRAV3, TRAJ33)
CAARDMGSNYQLIW

SEQ ID NO: 644594 - protein, 17 aa, Homo sapiens
  CDR3 for beta chain variable domain of TCR clone 322297 (TRBV19, TRBJ2-1)
CASSIWSAQPTHNEQFF

SEQ ID NO: 644595 - protein, 13 aa, Homo sapiens
  CDR3 for alpha chain variable domain of TCR clone 322298 (TRAV12-3, TRAJ13)
CAMSSGGYKKVTF

SEQ ID NO: 644596 - protein, 14 aa, Homo sapiens
  CDR3 for beta chain variable domain of TCR clone 322298 (TRBV2, TRBJ2-1)
CASRTGSSYNEQFF

SEQ ID NO: 644597 - protein, 13 aa, Homo sapiens
  CDR3 for alpha chain variable domain of TCR clone 322299 (TRAV27, TRAJ41)
CAGEGNSGYALNF

SEQ ID NO: 644598 - protein, 17 aa, Homo sapiens
  CDR3 for beta chain variable domain of TCR clone 322299 (TRBV28, TRBJ2-1)
CASSLSVAGGPVDEQFF

SEQ ID NO: 644599 - protein, 14 aa, Homo sapiens
  CDR3 for alpha chain variable domain of TCR clone 322300 (TRAV2, TRAJ9)
CTVDPHTGGFKTIF

SEQ ID NO: 644600 - protein, 13 aa, Homo sapiens
  CDR3 for beta chain variable domain of TCR clone 322300 (TRBV20-1, TRBJ2-1)
CSASTGTSNKQFF

SEQ ID NO: 644601 - protein, 14 aa, Homo sapiens
  CDR3 for alpha chain variable domain of TCR clone 322301 (TRAV14/DV4, TRAJ42)
CPRGSLRSQGNLIF

SEQ ID NO: 644602 - protein, 13 aa, Homo sapiens
  CDR3 for beta chain variable domain of TCR clone 322301 (TRBV5-1, TRBJ2-7)
CASSFEGSYEQYF

SEQ ID NO: 644603 - protein, 15 aa, Homo sapiens
  CDR3 for alpha chain variable domain of TCR clone 322302 (TRAV17, TRAJ23)
CATEAEDNQGGKLIF

SEQ ID NO: 644604 - protein, 12 aa, Homo sapiens
  CDR3 for beta chain variable domain of TCR clone 322302 (TRBV2, TRBJ2-1)
CAKREGYNEQFF

SEQ ID NO: 644605 - protein, 10 aa, Homo sapiens
  CDR3 for alpha chain variable domain of TCR clone 322303 (TRAV5, TRAJ34)
CEEDTDKLIF

SEQ ID NO: 644606 - protein, 12 aa, Homo sapiens
  CDR3 for beta chain variable domain of TCR clone 322303 (TRBV11-2, TRBJ2-2)
CASSLGGGELFF

SEQ ID NO: 644607 - protein, 11 aa, Homo sapiens
  CDR3 for alpha chain variable domain of TCR clone 322304 (TRAV4, TRAJ28)
CLVGDNRAETL

SEQ ID NO: 644608 - protein, 13 aa, Homo sapiens
  CDR3 for beta chain variable domain of TCR clone 322304 (TRBV20-1, TRBJ2-7)
CSATYTSGYEQYF

SEQ ID NO: 644609 - protein, 13 aa, Homo sapiens
  CDR3 for alpha chain variable domain of TCR clone 322305 (TRAV38-1, TRAJ42)
CARWGGSQGNLIF

SEQ ID NO: 644610 - protein, 15 aa, Homo sapiens
  CDR3 for beta chain variable domain of TCR clone 322305 (TRBV25-1, TRBJ1-4)
CASSPGDSTNEKLFF

SEQ ID NO: 644611 - protein, 12 aa, Homo sapiens
  CDR3 for alpha chain variable domain of TCR clone 322306 (TRAV13-2, TRAJ31)
CAESYNNARLMV

SEQ ID NO: 644612 - protein, 13 aa, Homo sapiens
  CDR3 for beta chain variable domain of TCR clone 322306 (TRBV24-1, TRBJ1-3)
CATMADSGNTIYF

SEQ ID NO: 644613 - protein, 17 aa, Homo sapiens
  CDR3 for alpha chain variable domain of TCR clone 322307 (TRAV3, TRAJ6)
CAVRDGPRAGGSYIPTF

SEQ ID NO: 644614 - protein, 15 aa, Homo sapiens
  CDR3 for beta chain variable domain of TCR clone 322307 (TRBV5-8, TRBJ2-2)
CASSLDRVATGELFF

SEQ ID NO: 644615 - protein, 16 aa, Homo sapiens
  CDR3 for alpha chain variable domain of TCR clone 322308 (TRAV3, TRAJ37)
YAVRGKGSGNKGKLIF

SEQ ID NO: 644616 - protein, 13 aa, Homo sapiens
  CDR3 for beta chain variable domain of TCR clone 322308 (TRBV14, TRBJ2-7)
CASSQDRRYEQYF

SEQ ID NO: 644617 - protein, 11 aa, Homo sapiens
  CDR3 for alpha chain variable domain of TCR clone 322309 (TRAV13-2, TRAJ45)
VTGGGADGLTF

SEQ ID NO: 644618 - protein, 17 aa, Homo sapiens
  CDR3 for beta chain variable domain of TCR clone 322309 (TRBV19, TRBJ1-1)
GASSIAGRGLMNTEAFF

SEQ ID NO: 644619 - protein, 12 aa, Homo sapiens
  CDR3 for alpha chain variable domain of TCR clone 322310 (TRAV2, TRAJ9)
CAVGAGGFKTIF

SEQ ID NO: 644620 - protein, 16 aa, Homo sapiens
  CDR3 for beta chain variable domain of TCR clone 322310 (TRBV4-1, TRBJ2-7)
CASSQEWTSGPLEQYF

SEQ ID NO: 644621 - protein, 14 aa, Homo sapiens
  CDR3 for alpha chain variable domain of TCR clone 322311 (TRAV1-2, TRAJ8)
CAVREDSGFQKLVF

SEQ ID NO: 644622 - protein, 14 aa, Homo sapiens
  CDR3 for beta chain variable domain of TCR clone 322311 (TRBV7-6, TRBJ2-3)
CASSLGTVTDTQYF

SEQ ID NO: 644623 - protein, 13 aa, Homo sapiens
  CDR3 for alpha chain variable domain of TCR clone 322312 (TRAV21, TRAJ49)
CAVRQSTGNQFYF

SEQ ID NO: 644624 - protein, 16 aa, Homo sapiens
  CDR3 for beta chain variable domain of TCR clone 322312 (TRBV12-5, TRBJ2-5)
CASGPRTSGNQETHYF

SEQ ID NO: 644625 - protein, 13 aa, Homo sapiens
  CDR3 for alpha chain variable domain of TCR clone 322313 (TRAV13-1, TRAJ21)
CAASIYNFNKFYF

SEQ ID NO: 644626 - protein, 15 aa, Homo sapiens
  CDR3 for beta chain variable domain of TCR clone 322313 (TRBV5-5, TRBJ1-5)
CARSLKGGGEQPQHF

SEQ ID NO: 644627 - protein, 14 aa, Homo sapiens
  CDR3 for alpha chain variable domain of TCR clone 322314 (TRAV16, TRAJ33)
CALSAMDSNYQLIW

SEQ ID NO: 644628 - protein, 14 aa, Homo sapiens
  CDR3 for beta chain variable domain of TCR clone 322314 (TRBV7-3, TRBJ1-1)
CASSLKGGNTEAFF

SEQ ID NO: 644629 - protein, 14 aa, Homo sapiens
  CDR3 for alpha chain variable domain of TCR clone 322315 (TRAV26-1, TRAJ38)
CIAANAGNNRKLIW

SEQ ID NO: 644630 - protein, 11 aa, Homo sapiens
  CDR3 for beta chain variable domain of TCR clone 322315 (TRBV29-1, TRBJ2-5)
CSEDRTGTQYF

SEQ ID NO: 644631 - protein, 12 aa, Homo sapiens
  CDR3 for alpha chain variable domain of TCR clone 322316 (TRAV12-2, TRAJ21)
CAVRYNFNKFYF

SEQ ID NO: 644632 - protein, 14 aa, Homo sapiens
  CDR3 for beta chain variable domain of TCR clone 322316 (TRBV28, TRBJ2-1)
CANSYYTAYNEQFF

SEQ ID NO: 644633 - protein, 12 aa, Homo sapiens
  CDR3 for alpha chain variable domain of TCR clone 322317 (TRAV3, TRAJ7)
CADLLWEQQTRF

SEQ ID NO: 644634 - protein, 15 aa, Homo sapiens
  CDR3 for beta chain variable domain of TCR clone 322317 (TRBV7-3, TRBJ2-1)
CASSPTGGGEVEQFF

SEQ ID NO: 644635 - protein, 15 aa, Homo sapiens
  CDR3 for alpha chain variable domain of TCR clone 322318 (TRAV26-1, TRAJ44)
CIVRIGTGTASKLTF

SEQ ID NO: 644636 - protein, 16 aa, Homo sapiens
  CDR3 for beta chain variable domain of TCR clone 322318 (TRBV5-1, TRBJ2-3)
CASSSSGGPSTDTQYF

SEQ ID NO: 644637 - protein, 14 aa, Homo sapiens
  CDR3 for alpha chain variable domain of TCR clone 322319 (TRAV8-3, TRAJ4)
CAVGAAGGYNKLIF

SEQ ID NO: 644638 - protein, 15 aa, Homo sapiens
  CDR3 for beta chain variable domain of TCR clone 322319 (TRBV19, TRBJ1-5)
CASSIVWADNQPQHF

SEQ ID NO: 644639 - protein, 18 aa, Homo sapiens
  CDR3 for alpha chain variable domain of TCR clone 322320 (TRAV21, TRAJ52)
CAVRPSPAGGTSYGKLTF

SEQ ID NO: 644640 - protein, 17 aa, Homo sapiens
  CDR3 for beta chain variable domain of TCR clone 322320 (TRBV13, TRBJ2-3)
RASSPSRGAGGRNTQYF

SEQ ID NO: 644641 - protein, 17 aa, Homo sapiens
  CDR3 for alpha chain variable domain of TCR clone 322321 (TRAV3, TRAJ6)
CAVRDGPRAGGSYLPTF

SEQ ID NO: 644642 - protein, 17 aa, Homo sapiens
  CDR3 for beta chain variable domain of TCR clone 322321 (TRBV7-8, TRBJ2-6)
CASSAGTGGAGANVLTF

SEQ ID NO: 644643 - protein, 14 aa, Homo sapiens
  CDR3 for alpha chain variable domain of TCR clone 322322 (TRAV12-3, TRAJ10)
SHQPLTGGGNKLTF

SEQ ID NO: 644644 - protein, 15 aa, Homo sapiens
  CDR3 for beta chain variable domain of TCR clone 322322 (TRBV29-1, TRBJ2-6)
CSVGDRGSGANVLTF

SEQ ID NO: 644645 - protein, 15 aa, Homo sapiens
  CDR3 for alpha chain variable domain of TCR clone 322323 (TRAV21, TRAJ38)
CAVRQDAGNNRKLIW

SEQ ID NO: 644646 - protein, 17 aa, Homo sapiens
  CDR3 for beta chain variable domain of TCR clone 322323 (TRBV4-3, TRBJ2-7)
CASSQDLIGQGAYEQYF

SEQ ID NO: 644647 - protein, 14 aa, Homo sapiens
  CDR3 for alpha chain variable domain of TCR clone 322324 (TRAV16, TRAJ37)
CALDISGNTGKLIF

SEQ ID NO: 644648 - protein, 15 aa, Homo sapiens
  CDR3 for beta chain variable domain of TCR clone 322324 (TRBV7-2, TRBJ2-1)
CASSSGLAGGNEQFF

SEQ ID NO: 644649 - protein, 13 aa, Homo sapiens
  CDR3 for alpha chain variable domain of TCR clone 322325 (TRAV12-1, TRAJ16)
CVVNGPDGQKLLF

SEQ ID NO: 644650 - protein, 13 aa, Homo sapiens
  CDR3 for beta chain variable domain of TCR clone 322325 (TRBV2, TRBJ1-1)
CARNRTGRYHAFF

SEQ ID NO: 644651 - protein, 10 aa, Homo sapiens
  CDR3 for alpha chain variable domain of TCR clone 322326 (TRAV23/DV6, TRAJ31)
CARGGARLML

SEQ ID NO: 644652 - protein, 17 aa, Homo sapiens
  CDR3 for beta chain variable domain of TCR clone 322326 (TRBV7-3, TRBJ2-3)
CASSLMKRMRGADTQYF

SEQ ID NO: 644653 - protein, 17 aa, Homo sapiens
  CDR3 for alpha chain variable domain of TCR clone 322327 (TRAV12-1, TRAJ52)
CVVTPNAGGTSYGKLTF

SEQ ID NO: 644654 - protein, 12 aa, Homo sapiens
  CDR3 for beta chain variable domain of TCR clone 322327 (TRBV5-1, TRBJ2-3)
CASSLAADTQYF

SEQ ID NO: 644655 - protein, 16 aa, Homo sapiens
  CDR3 for alpha chain variable domain of TCR clone 322328 (TRAV30, TRAJ24)
CGTEIVDADSWGKFKF

SEQ ID NO: 644656 - protein, 17 aa, Homo sapiens
  CDR3 for beta chain variable domain of TCR clone 322328 (TRBV20-1, TRBJ2-1)
CSASSSGLAGSYNEQFF

SEQ ID NO: 644657 - protein, 13 aa, Homo sapiens
  CDR3 for alpha chain variable domain of TCR clone 322329 (TRAV23/DV6, TRAJ58)
CAASEIGGSRLTI

SEQ ID NO: 644658 - protein, 14 aa, Homo sapiens
  CDR3 for beta chain variable domain of TCR clone 322329 (TRBV28, TRBJ2-5)
CASSRPAGGETQYF

SEQ ID NO: 644659 - protein, 16 aa, Homo sapiens
  CDR3 for alpha chain variable domain of TCR clone 322330 (TRAV20, TRAJ38)
CAVQASNAGNNRKPIW

SEQ ID NO: 644660 - protein, 16 aa, Homo sapiens
  CDR3 for beta chain variable domain of TCR clone 322330 (TRBV7-7, TRBJ2-1)
CASSLASGTSYNEQFF

SEQ ID NO: 644661 - protein, 14 aa, Homo sapiens
  CDR3 for alpha chain variable domain of TCR clone 322331 (TRAV9-2, TRAJ39)
CALYIYNSGNMLTF

SEQ ID NO: 644662 - protein, 14 aa, Homo sapiens
  CDR3 for beta chain variable domain of TCR clone 322331 (TRBV25-1, TRBJ1-1)
CASTHLGGNTEAFF

SEQ ID NO: 644663 - protein, 11 aa, Homo sapiens
  CDR3 for alpha chain variable domain of TCR clone 322332 (TRAV3, TRAJ13)
CAVTSYQTVTF

SEQ ID NO: 644664 - protein, 15 aa, Homo sapiens
  CDR3 for beta chain variable domain of TCR clone 322332 (TRBV7-9, TRBJ2-7)
CASSSSGLAVYEQYF

SEQ ID NO: 644665 - protein, 15 aa, Homo sapiens
  CDR3 for alpha chain variable domain of TCR clone 322333 (TRAV8-1, TRAJ6)
CAVNTSPGGSYIPTF

SEQ ID NO: 644666 - protein, 14 aa, Homo sapiens
  CDR3 for beta chain variable domain of TCR clone 322333 (TRBV12-4, TRBJ2-1)
CASSLGQGASEQFF

SEQ ID NO: 644667 - protein, 13 aa, Homo sapiens
  CDR3 for alpha chain variable domain of TCR clone 322334 (TRAV2, TRAJ40)
CALVTSGTYKYIF

SEQ ID NO: 644668 - protein, 16 aa, Homo sapiens
  CDR3 for beta chain variable domain of TCR clone 322334 (TRBV7-9, TRBJ1-3)
CASSLGAGSSGNTIYF

SEQ ID NO: 644669 - protein, 13 aa, Homo sapiens
  CDR3 for alpha chain variable domain of TCR clone 322335 (TRAV12-3, TRAJ6)
CANPSGGSYIPTF

SEQ ID NO: 644670 - protein, 16 aa, Homo sapiens
  CDR3 for beta chain variable domain of TCR clone 322335 (TRBV19, TRBJ2-2)
CASRSPGTGATGELFF

SEQ ID NO: 644671 - protein, 22 aa, Homo sapiens
  CDR3 for alpha chain variable domain of TCR clone 322336 (TRAV1-1, TRAJ35)
CAVRSIGFGNVLHCGSGPPVIV

SEQ ID NO: 644672 - protein, 14 aa, Homo sapiens
  CDR3 for beta chain variable domain of TCR clone 322336 (TRBV5-6, TRBJ2-7)
CASSGGLSSYEQYF

SEQ ID NO: 644673 - protein, 11 aa, Homo sapiens
  CDR3 for alpha chain variable domain of TCR clone 322337 (TRAV3, TRAJ17)
PRGAAGTKLTF

SEQ ID NO: 644674 - protein, 12 aa, Homo sapiens
  CDR3 for beta chain variable domain of TCR clone 322337 (TRBV11-2, TRBJ2-2)
CASSLGGGELFF

SEQ ID NO: 644675 - protein, 15 aa, Homo sapiens
  CDR3 for alpha chain variable domain of TCR clone 322338 (TRAV3, TRAJ20)
CAVRDIKLSDYKLSF

SEQ ID NO: 644676 - protein, 18 aa, Homo sapiens
  CDR3 for beta chain variable domain of TCR clone 322338 (TRBV20-1, TRBJ2-5)
RSQTGDSGRLGGKETQYF

SEQ ID NO: 644677 - protein, 13 aa, Homo sapiens
  CDR3 for alpha chain variable domain of TCR clone 322339 (TRAV2, TRAJ40)
CAVVTSGTYKYIF

SEQ ID NO: 644678 - protein, 15 aa, Homo sapiens
  CDR3 for beta chain variable domain of TCR clone 322339 (TRBV20-1, TRBJ2-5)
CSASPLAGGQETQYF

SEQ ID NO: 644679 - protein, 12 aa, Homo sapiens
  CDR3 for alpha chain variable domain of TCR clone 322340 (TRAV26-2, TRAJ21)
CILKGNFNKFYF

SEQ ID NO: 644680 - protein, 14 aa, Homo sapiens
  CDR3 for beta chain variable domain of TCR clone 322340 (TRBV12-4, TRBJ1-1)
CASRLGTGGTEAFF

SEQ ID NO: 644681 - protein, 14 aa, Homo sapiens
  CDR3 for alpha chain variable domain of TCR clone 322341 (TRAV21, TRAJ35)
CAVMPIGVGNVLHC

SEQ ID NO: 644682 - protein, 12 aa, Homo sapiens
  CDR3 for beta chain variable domain of TCR clone 322341 (TRBV7-9, TRBJ2-7)
CASSSKREEQYF

SEQ ID NO: 644683 - protein, 15 aa, Homo sapiens
  CDR3 for alpha chain variable domain of TCR clone 322342 (TRAV12-3, TRAJ6)
CAMSATTGGSYIPTF

SEQ ID NO: 644684 - protein, 16 aa, Homo sapiens
  CDR3 for beta chain variable domain of TCR clone 322342 (TRBV20-1, TRBJ1-2)
RSASMGQGVANYGDTF

SEQ ID NO: 644685 - protein, 17 aa, Homo sapiens
  CDR3 for alpha chain variable domain of TCR clone 322343 (TRAV3, TRAJ6)
CAVRDGPRAGGSYITTS

SEQ ID NO: 644686 - protein, 14 aa, Homo sapiens
  CDR3 for beta chain variable domain of TCR clone 322343 (TRBV7-2, TRBJ2-7)
CASSPKTSFYEQYF

SEQ ID NO: 644687 - protein, 15 aa, Homo sapiens
  CDR3 for alpha chain variable domain of TCR clone 322344 (TRAV12-3, TRAJ5)
CAISGLGTGRRALTF

SEQ ID NO: 644688 - protein, 16 aa, Homo sapiens
  CDR3 for beta chain variable domain of TCR clone 322344 (TRBV20-1, TRBJ2-3)
CSARLHSAGAIDTQYF

SEQ ID NO: 644689 - protein, 14 aa, Homo sapiens
  CDR3 for alpha chain variable domain of TCR clone 322345 (TRAV12-3, TRAJ10)
SHLPLPGGGNKLTF

SEQ ID NO: 644690 - protein, 15 aa, Homo sapiens
  CDR3 for beta chain variable domain of TCR clone 322345 (TRBV29-1, TRBJ2-6)
CSVGDRGSGANVLTF

SEQ ID NO: 644691 - protein, 14 aa, Homo sapiens
  CDR3 for alpha chain variable domain of TCR clone 322346 (TRAV1-2, TRAJ8)
CALREDTGFQKLVF

SEQ ID NO: 644692 - protein, 19 aa, Homo sapiens
  CDR3 for beta chain variable domain of TCR clone 322346 (TRBV28, TRBJ2-1)
CASSFSIRGSGRTRYEQFF

SEQ ID NO: 644693 - protein, 17 aa, Homo sapiens
  CDR3 for alpha chain variable domain of TCR clone 322347 (TRAV23/DV6, TRAJ57)
YAASSTLSQGGSEKMVF

SEQ ID NO: 644694 - protein, 14 aa, Homo sapiens
  CDR3 for beta chain variable domain of TCR clone 322347 (TRBV25-1, TRBJ1-1)
CASTHLGGNTEAFF

SEQ ID NO: 644695 - protein, 14 aa, Homo sapiens
  CDR3 for alpha chain variable domain of TCR clone 322348 (TRAV3, TRAJ40)
CAVRDRRGTYKYIF

SEQ ID NO: 644696 - protein, 17 aa, Homo sapiens
  CDR3 for beta chain variable domain of TCR clone 322348 (TRBV4-1, TRBJ2-7)
CASSQGRGLQTSYEQYF

SEQ ID NO: 644697 - protein, 14 aa, Homo sapiens
  CDR3 for alpha chain variable domain of TCR clone 322349 (TRAV23/DV6, TRAJ11)
CAASPASGYSTLTF

SEQ ID NO: 644698 - protein, 13 aa, Homo sapiens
  CDR3 for beta chain variable domain of TCR clone 322349 (TRBV4-1, TRBJ2-5)
CASSLTRGETQYF

SEQ ID NO: 644699 - protein, 11 aa, Homo sapiens
  CDR3 for alpha chain variable domain of TCR clone 322350 (TRAV2, TRAJ13)
CASGGYQKVNF

SEQ ID NO: 644700 - protein, 16 aa, Homo sapiens
  CDR3 for beta chain variable domain of TCR clone 322350 (TRBV6-1, TRBJ2-5)
CASSETLYRGAETQYF

SEQ ID NO: 644701 - protein, 12 aa, Homo sapiens
  CDR3 for alpha chain variable domain of TCR clone 322351 (TRAV1-2, TRAJ17)
CAVRAAGNKLTF

SEQ ID NO: 644702 - protein, 15 aa, Homo sapiens
  CDR3 for beta chain variable domain of TCR clone 322351 (TRBV20-1, TRBJ2-1)
QCSWLAGSYSDEQFF

SEQ ID NO: 644703 - protein, 11 aa, Homo sapiens
  CDR3 for alpha chain variable domain of TCR clone 322352 (TRAV2, TRAJ13)
CVSGGYQKVTF

SEQ ID NO: 644704 - protein, 14 aa, Homo sapiens
  CDR3 for beta chain variable domain of TCR clone 322352 (TRBV18, TRBJ1-2)
CASSPDRVVYGYTF

SEQ ID NO: 644705 - protein, 14 aa, Homo sapiens
  CDR3 for alpha chain variable domain of TCR clone 322353 (TRAV8-3, TRAJ44)
CAVGATGTASKLTF

SEQ ID NO: 644706 - protein, 15 aa, Homo sapiens
  CDR3 for beta chain variable domain of TCR clone 322353 (TRBV7-3, TRBJ2-1)
CASSLRTSSYNEQFF

SEQ ID NO: 644707 - protein, 16 aa, Homo sapiens
  CDR3 for alpha chain variable domain of TCR clone 322354 (TRAV12-2, TRAJ28)
CAVITDSGAGSYQLTS

SEQ ID NO: 644708 - protein, 12 aa, Homo sapiens
  CDR3 for beta chain variable domain of TCR clone 322354 (TRBV9, TRBJ2-2)
CASSLVTGELFF

SEQ ID NO: 644709 - protein, 12 aa, Homo sapiens
  CDR3 for alpha chain variable domain of TCR clone 322355 (TRAV13-1, TRAJ49)
CAAPNTGNQFYS

SEQ ID NO: 644710 - protein, 17 aa, Homo sapiens
  CDR3 for beta chain variable domain of TCR clone 322355 (TRBV25-1, TRBJ2-7)
CASSDARVVFSSYEQYC

SEQ ID NO: 644711 - protein, 12 aa, Homo sapiens
  CDR3 for alpha chain variable domain of TCR clone 322356 (TRAV12-1, TRAJ50)
CVGRTSYDKVIF

SEQ ID NO: 644712 - protein, 14 aa, Homo sapiens
  CDR3 for beta chain variable domain of TCR clone 322356 (TRBV5-6, TRBJ1-1)
CASSLVGTELSLDK

SEQ ID NO: 644713 - protein, 13 aa, Homo sapiens
  CDR3 for alpha chain variable domain of TCR clone 322357 (TRAV39, TRAJ58)
CAGEETSGSRLTF

SEQ ID NO: 644714 - protein, 15 aa, Homo sapiens
  CDR3 for beta chain variable domain of TCR clone 322357 (TRBV20-1, TRBJ2-7)
CSARDRVSGMDEQYV

SEQ ID NO: 644715 - protein, 12 aa, Homo sapiens
  CDR3 for alpha chain variable domain of TCR clone 322358 (TRAV12-3, TRAJ17)
CAMTLTGNKLTF

SEQ ID NO: 644716 - protein, 14 aa, Homo sapiens
  CDR3 for beta chain variable domain of TCR clone 322358 (TRBV2, TRBJ1-5)
CASSENRGGQTQHF

SEQ ID NO: 644717 - protein, 17 aa, Homo sapiens
  CDR3 for alpha chain variable domain of TCR clone 322359 (TRAV3, TRAJ42)
CAVRDRDYGGSQGNFIF

SEQ ID NO: 644718 - protein, 15 aa, Homo sapiens
  CDR3 for beta chain variable domain of TCR clone 322359 (TRBV6-3, TRBJ2-7)
CASSSPGTVFYEQYF

SEQ ID NO: 644719 - protein, 14 aa, Homo sapiens
  CDR3 for alpha chain variable domain of TCR clone 322360 (TRAV12-3, TRAJ10)
SHLPLTGGGNKLTF

SEQ ID NO: 644720 - protein, 13 aa, Homo sapiens
  CDR3 for beta chain variable domain of TCR clone 322360 (TRBV7-2, TRBJ2-2)
CQQRTGAAGELFF

SEQ ID NO: 644721 - protein, 14 aa, Homo sapiens
  CDR3 for alpha chain variable domain of TCR clone 322361 (TRAV12-2, TRAJ13)
CAVKKTGGYQKVTF

SEQ ID NO: 644722 - protein, 15 aa, Homo sapiens
  CDR3 for beta chain variable domain of TCR clone 322361 (TRBV5-7, TRBJ1-2)
CASSLGVAANYGYTF

SEQ ID NO: 644723 - protein, 14 aa, Homo sapiens
  CDR3 for alpha chain variable domain of TCR clone 322362 (TRAV20, TRAJ56)
CAVQFGGANSKLTF

SEQ ID NO: 644724 - protein, 16 aa, Homo sapiens
  CDR3 for beta chain variable domain of TCR clone 322362 (TRBV12-4, TRBJ2-7)
CASRSTGTGPSYEQYF

SEQ ID NO: 644725 - protein, 15 aa, Homo sapiens
  CDR3 for alpha chain variable domain of TCR clone 322363 (TRAV27, TRAJ38)
CAARRNAGNNRKLIW

SEQ ID NO: 644726 - protein, 13 aa, Homo sapiens
  CDR3 for beta chain variable domain of TCR clone 322363 (TRBV7-9, TRBJ2-3)
CASSDRQSDTQYF

SEQ ID NO: 644727 - protein, 14 aa, Homo sapiens
  CDR3 for alpha chain variable domain of TCR clone 322364 (TRAV8-2, TRAJ4)
CVVSPSGGYNKLIF

SEQ ID NO: 644728 - protein, 16 aa, Homo sapiens
  CDR3 for beta chain variable domain of TCR clone 322364 (TRBV20-1, TRBJ1-4)
CSARPYGGELNEKLFF

SEQ ID NO: 644729 - protein, 15 aa, Homo sapiens
  CDR3 for alpha chain variable domain of TCR clone 322365 (TRAV27, TRAJ38)
CAARRNAGNNRKLIW

SEQ ID NO: 644730 - protein, 13 aa, Homo sapiens
  CDR3 for beta chain variable domain of TCR clone 322365 (TRBV20-1, TRBJ1-1)
CSARAGGNTEAFF

SEQ ID NO: 644731 - protein, 13 aa, Homo sapiens
  CDR3 for alpha chain variable domain of TCR clone 322366 (TRAV1-1, TRAJ30)
CAVRSDRDDKIIF

SEQ ID NO: 644732 - protein, 12 aa, Homo sapiens
  CDR3 for beta chain variable domain of TCR clone 322366 (TRBV7-9, TRBJ2-7)
CASSFGSYEQYF

SEQ ID NO: 644733 - protein, 12 aa, Homo sapiens
  CDR3 for alpha chain variable domain of TCR clone 322367 (TRAV12-3, TRAJ17)
CALTLTGNKLTF

SEQ ID NO: 644734 - protein, 14 aa, Homo sapiens
  CDR3 for beta chain variable domain of TCR clone 322367 (TRBV12-4, TRBJ1-1)
CASSLGTGGTEAFF

SEQ ID NO: 644735 - protein, 13 aa, Homo sapiens
  CDR3 for alpha chain variable domain of TCR clone 322368 (TRAV3, TRAJ16)
CAVRDRNGQKLLL

SEQ ID NO: 644736 - protein, 15 aa, Homo sapiens
  CDR3 for beta chain variable domain of TCR clone 322368 (TRBV5-1, TRBJ2-1)
CASSPPRAPYNEQFF

SEQ ID NO: 644737 - protein, 11 aa, Homo sapiens
  CDR3 for alpha chain variable domain of TCR clone 322369 (TRAV23/DV6, TRAJ48)
CAPRWGEKLTF

SEQ ID NO: 644738 - protein, 14 aa, Homo sapiens
  CDR3 for beta chain variable domain of TCR clone 322369 (TRBV5-5, TRBJ1-5)
CASSGQGVDQPQHF

SEQ ID NO: 644739 - protein, 11 aa, Homo sapiens
  CDR3 for alpha chain variable domain of TCR clone 322370 (TRAV3, TRAJ21)
CAVGNFNKFYF

SEQ ID NO: 644740 - protein, 11 aa, Homo sapiens
  CDR3 for beta chain variable domain of TCR clone 322370 (TRBV29-1, TRBJ2-3)
QRTGGADTQYF

SEQ ID NO: 644741 - protein, 17 aa, Homo sapiens
  CDR3 for alpha chain variable domain of TCR clone 322371 (TRAV23/DV6, TRAJ57)
CAASSPLPQGGSEKLVF

SEQ ID NO: 644742 - protein, 14 aa, Homo sapiens
  CDR3 for beta chain variable domain of TCR clone 322371 (TRBV25-1, TRBJ1-1)
CASTHLGGNTEAFF

SEQ ID NO: 644743 - protein, 20 aa, Homo sapiens
  CDR3 for alpha chain variable domain of TCR clone 322372 (TRAV12-3, TRAJ41)
SLFIRDSQPSDSATPEALNF

SEQ ID NO: 644744 - protein, 15 aa, Homo sapiens
  CDR3 for beta chain variable domain of TCR clone 322372 (TRBV5-1, TRBJ2-3)
CASSSTSGSTDTQYF

SEQ ID NO: 644745 - protein, 12 aa, Homo sapiens
  CDR3 for alpha chain variable domain of TCR clone 322373 (TRAV12-2, TRAJ10)
WGVTGGGNKLTF

SEQ ID NO: 644746 - protein, 16 aa, Homo sapiens
  CDR3 for beta chain variable domain of TCR clone 322373 (TRBV6-4, TRBJ1-2)
CASSEAGGDPNYGYTF

SEQ ID NO: 644747 - protein, 12 aa, Homo sapiens
  CDR3 for alpha chain variable domain of TCR clone 322374 (TRAV3, TRAJ43)
CAVSDPNNDMRF

SEQ ID NO: 644748 - protein, 13 aa, Homo sapiens
  CDR3 for beta chain variable domain of TCR clone 322374 (TRBV19, TRBJ1-2)
CASSVPGQDGYTF

SEQ ID NO: 644749 - protein, 14 aa, Homo sapiens
  CDR3 for alpha chain variable domain of TCR clone 322375 (TRAV12-3, TRAJ10)
SHLPLTGGGDKLTF

SEQ ID NO: 644750 - protein, 13 aa, Homo sapiens
  CDR3 for beta chain variable domain of TCR clone 322375 (TRBV12-4, TRBJ2-3)
CASSSPLGGTQYF

SEQ ID NO: 644751 - protein, 13 aa, Homo sapiens
  CDR3 for alpha chain variable domain of TCR clone 322376 (TRAV12-1, TRAJ26)
CVVRRNYGQNFGF

SEQ ID NO: 644752 - protein, 14 aa, Homo sapiens
  CDR3 for beta chain variable domain of TCR clone 322376 (TRBV6-3, TRBJ1-1)
CASRYTGESTEAFF

SEQ ID NO: 644753 - protein, 16 aa, Homo sapiens
  CDR3 for alpha chain variable domain of TCR clone 322377 (TRAV39, TRAJ32)
CAVDMEYGGATNKLIF

SEQ ID NO: 644754 - protein, 12 aa, Homo sapiens
  CDR3 for beta chain variable domain of TCR clone 322377 (TRBV18, TRBJ1-4)
CASSPSREKLFF

SEQ ID NO: 644755 - protein, 15 aa, Homo sapiens
  CDR3 for alpha chain variable domain of TCR clone 322378 (TRAV3, TRAJ3)
CAVRDRDSSASKIIF

SEQ ID NO: 644756 - protein, 20 aa, Homo sapiens
  CDR3 for beta chain variable domain of TCR clone 322378 (TRBV7-8, TRBJ2-2)
CASSHLFPGPTIHITGELFF

SEQ ID NO: 644757 - protein, 18 aa, Homo sapiens
  CDR3 for alpha chain variable domain of TCR clone 322379 (TRAV21, TRAJ52)
CAVRPSPAGGPSYGKLTF

SEQ ID NO: 644758 - protein, 15 aa, Homo sapiens
  CDR3 for beta chain variable domain of TCR clone 322379 (TRBV20-1, TRBJ1-5)
CSAFKNGQRNQTQHF

SEQ ID NO: 644759 - protein, 14 aa, Homo sapiens
  CDR3 for alpha chain variable domain of TCR clone 322380 (TRAV21, TRAJ23)
CAIMIYNQGGKLIL

SEQ ID NO: 644760 - protein, 18 aa, Homo sapiens
  CDR3 for beta chain variable domain of TCR clone 322380 (TRBV20-1, TRBJ2-6)
CSAETTPTHGSGANDLTF

SEQ ID NO: 644761 - protein, 16 aa, Homo sapiens
  CDR3 for alpha chain variable domain of TCR clone 322381 (TRAV30, TRAJ26)
CGTESVGDNYGQNFVF

SEQ ID NO: 644762 - protein, 13 aa, Homo sapiens
  CDR3 for beta chain variable domain of TCR clone 322381 (TRBV19, TRBJ1-2)
CASSILEDYGYTF

SEQ ID NO: 644763 - protein, 16 aa, Homo sapiens
  CDR3 for alpha chain variable domain of TCR clone 322382 (TRAV30, TRAJ24)
CVTEIVDADSCGKFQF

SEQ ID NO: 644764 - protein, 14 aa, Homo sapiens
  CDR3 for beta chain variable domain of TCR clone 322382 (TRBV12-5, TRBJ2-5)
CASGSRTHQETQYF

SEQ ID NO: 644765 - protein, 12 aa, Homo sapiens
  CDR3 for alpha chain variable domain of TCR clone 322383 (TRAV2, TRAJ31)
CAVEYNNARLMF

SEQ ID NO: 644766 - protein, 16 aa, Homo sapiens
  CDR3 for beta chain variable domain of TCR clone 322383 (TRBV10-3, TRBJ2-1)
CAISGVGDGGGGKQFF

SEQ ID NO: 644767 - protein, 13 aa, Homo sapiens
  CDR3 for alpha chain variable domain of TCR clone 322384 (TRAV36/DV7, TRAJ49)
CAGDSNTGNQFYF

SEQ ID NO: 644768 - protein, 14 aa, Homo sapiens
  CDR3 for beta chain variable domain of TCR clone 322384 (TRBV7-2, TRBJ2-7)
CASSPKTSFYEQYF

SEQ ID NO: 644769 - protein, 17 aa, Homo sapiens
  CDR3 for alpha chain variable domain of TCR clone 322385 (TRAV3, TRAJ42)
CAVRDRDYGGSQGNLIF

SEQ ID NO: 644770 - protein, 14 aa, Homo sapiens
  CDR3 for beta chain variable domain of TCR clone 322385 (TRBV4-1, TRBJ2-2)
CASRQAVNTGELFF

SEQ ID NO: 644771 - protein, 13 aa, Homo sapiens
  CDR3 for alpha chain variable domain of TCR clone 322386 (TRAV35, TRAJ21)
CAGQLSNFNKFYF

SEQ ID NO: 644772 - protein, 15 aa, Homo sapiens
  CDR3 for beta chain variable domain of TCR clone 322386 (TRBV20-1, TRBJ2-1)
CSARGIGGTYNEQFF

SEQ ID NO: 644773 - protein, 17 aa, Homo sapiens
  CDR3 for alpha chain variable domain of TCR clone 322387 (TRAV3, TRAJ12)
CAVRDGGRMDSRYKLIF

SEQ ID NO: 644774 - protein, 12 aa, Homo sapiens
  CDR3 for beta chain variable domain of TCR clone 322387 (TRBV11-2, TRBJ2-2)
CASSLGGGELFF

SEQ ID NO: 644775 - protein, 16 aa, Homo sapiens
  CDR3 for alpha chain variable domain of TCR clone 322388 (TRAV14/DV4, TRAJ17)
CAMREAGRAAGNKLTF

SEQ ID NO: 644776 - protein, 15 aa, Homo sapiens
  CDR3 for beta chain variable domain of TCR clone 322388 (TRBV4-1, TRBJ2-7)
CASSQQGQGFDEQYF

SEQ ID NO: 644777 - protein, 14 aa, Homo sapiens
  CDR3 for alpha chain variable domain of TCR clone 322389 (TRAV4, TRAJ26)
CLVGPHNYGQNFVF

SEQ ID NO: 644778 - protein, 17 aa, Homo sapiens
  CDR3 for beta chain variable domain of TCR clone 322389 (TRBV24-1, TRBJ2-1)
CATSDVSTSGAYNEQLF

SEQ ID NO: 644779 - protein, 12 aa, Homo sapiens
  CDR3 for alpha chain variable domain of TCR clone 322390 (TRAV3, TRAJ26)
CAVRDYGQHFVF

SEQ ID NO: 644780 - protein, 16 aa, Homo sapiens
  CDR3 for beta chain variable domain of TCR clone 322390 (TRBV4-1, TRBJ1-2)
CASSQDAGQVLYGYTF

SEQ ID NO: 644781 - protein, 15 aa, Homo sapiens
  CDR3 for alpha chain variable domain of TCR clone 322391 (TRAV21, TRAJ53)
CATLNSGGSNYKLTY

SEQ ID NO: 644782 - protein, 14 aa, Homo sapiens
  CDR3 for beta chain variable domain of TCR clone 322391 (TRBV7-2, TRBJ2-7)
CASRSQGAAYEQYF

SEQ ID NO: 644783 - protein, 13 aa, Homo sapiens
  CDR3 for alpha chain variable domain of TCR clone 322392 (TRAV14/DV4, TRAJ26)
YAMREAYGQNFVF

SEQ ID NO: 644784 - protein, 19 aa, Homo sapiens
  CDR3 for beta chain variable domain of TCR clone 322392 (TRBV13, TRBJ2-6)
CASSLVHRDRGAGANVLTF

SEQ ID NO: 644785 - protein, 14 aa, Homo sapiens
  CDR3 for alpha chain variable domain of TCR clone 322393 (TRAV12-3, TRAJ58)
CAMSTETSGSRLTF

SEQ ID NO: 644786 - protein, 12 aa, Homo sapiens
  CDR3 for beta chain variable domain of TCR clone 322393 (TRBV7-8, TRBJ2-7)
CASSLGDREQYV

SEQ ID NO: 644787 - protein, 14 aa, Homo sapiens
  CDR3 for alpha chain variable domain of TCR clone 322394 (TRAV12-1, TRAJ4)
CGEQRYGGYNKLIF

SEQ ID NO: 644788 - protein, 16 aa, Homo sapiens
  CDR3 for beta chain variable domain of TCR clone 322394 (TRBV11-3, TRBJ2-5)
CASSSVVAGSAETQYF

SEQ ID NO: 644789 - protein, 14 aa, Homo sapiens
  CDR3 for alpha chain variable domain of TCR clone 322395 (TRAV23/DV6, TRAJ37)
CAAITSSNTGKLIF

SEQ ID NO: 644790 - protein, 13 aa, Homo sapiens
  CDR3 for beta chain variable domain of TCR clone 322395 (TRBV7-7, TRBJ1-1)
CASSLGANIEAFF

SEQ ID NO: 644791 - protein, 11 aa, Homo sapiens
  CDR3 for alpha chain variable domain of TCR clone 322396 (TRAV2, TRAJ13)
CASGGYQKVTF

SEQ ID NO: 644792 - protein, 15 aa, Homo sapiens
  CDR3 for beta chain variable domain of TCR clone 322396 (TRBV6-5, TRBJ1-4)
CASSSVGGAGEKLFF

SEQ ID NO: 644793 - protein, 13 aa, Homo sapiens
  CDR3 for alpha chain variable domain of TCR clone 322397 (TRAV27, TRAJ6)
CAGGTRGSYIPTF

SEQ ID NO: 644794 - protein, 13 aa, Homo sapiens
  CDR3 for beta chain variable domain of TCR clone 322397 (TRBV19, TRBJ2-1)
CASSMYRVNEQFF

SEQ ID NO: 644795 - protein, 10 aa, Homo sapiens
  CDR3 for alpha chain variable domain of TCR clone 322398 (TRAV12-2, TRAJ52)
CAANRWWYSL

SEQ ID NO: 644796 - protein, 13 aa, Homo sapiens
  CDR3 for beta chain variable domain of TCR clone 322398 (TRBV12-4, TRBJ1-1)
CASSPGTGFEAFF

SEQ ID NO: 644797 - protein, 12 aa, Homo sapiens
  CDR3 for alpha chain variable domain of TCR clone 322399 (TRAV8-3, TRAJ20)
CAVGANDYNLSF

SEQ ID NO: 644798 - protein, 16 aa, Homo sapiens
  CDR3 for beta chain variable domain of TCR clone 322399 (TRBV7-3, TRBJ2-2)
CASSLKRGTLSGELFF

SEQ ID NO: 644799 - protein, 16 aa, Homo sapiens
  CDR3 for alpha chain variable domain of TCR clone 322400 (TRAV12-3, TRAJ53)
CAMSPGSGGSNYKLTF

SEQ ID NO: 644800 - protein, 14 aa, Homo sapiens
  CDR3 for beta chain variable domain of TCR clone 322400 (TRBV5-1, TRBJ2-2)
CASSLIWIPGELFF

SEQ ID NO: 644801 - protein, 13 aa, Homo sapiens
  CDR3 for alpha chain variable domain of TCR clone 322401 (TRAV13-2, TRAJ48)
CAEMDFGNEKLTF

SEQ ID NO: 644802 - protein, 14 aa, Homo sapiens
  CDR3 for beta chain variable domain of TCR clone 322401 (TRBV7-2, TRBJ2-7)
CASSLYPGRYEQYV

SEQ ID NO: 644803 - protein, 12 aa, Homo sapiens
  CDR3 for alpha chain variable domain of TCR clone 322402 (TRAV3, TRAJ26)
CAVRDYGQNFVF

SEQ ID NO: 644804 - protein, 16 aa, Homo sapiens
  CDR3 for beta chain variable domain of TCR clone 322402 (TRBV11-2, TRBJ1-2)
CASSPSGREADYGYTF

SEQ ID NO: 644805 - protein, 15 aa, Homo sapiens
  CDR3 for alpha chain variable domain of TCR clone 322403 (TRAV25, TRAJ52)
CAGRPGGTSYGKLTF

SEQ ID NO: 644806 - protein, 15 aa, Homo sapiens
  CDR3 for beta chain variable domain of TCR clone 322403 (TRBV28, TRBJ2-5)
CASSSGRTIQETQYF

SEQ ID NO: 644807 - protein, 12 aa, Homo sapiens
  CDR3 for alpha chain variable domain of TCR clone 322404 (TRAV25, TRAJ11)
CAGYAGYSTLTF

SEQ ID NO: 644808 - protein, 13 aa, Homo sapiens
  CDR3 for beta chain variable domain of TCR clone 322404 (TRBV7-9, TRBJ1-2)
CASSLKQNYGYTF

SEQ ID NO: 644809 - protein, 13 aa, Homo sapiens
  CDR3 for alpha chain variable domain of TCR clone 322405 (TRAV13-1, TRAJ39)
CAASIWAGNMLTY

SEQ ID NO: 644810 - protein, 16 aa, Homo sapiens
  CDR3 for beta chain variable domain of TCR clone 322405 (TRBV24-1, TRBJ2-3)
CATSDPGTGATDTQYF

SEQ ID NO: 644811 - protein, 11 aa, Homo sapiens
  CDR3 for alpha chain variable domain of TCR clone 322406 (TRAV17, TRAJ43)
CATPRSNDMRF

SEQ ID NO: 644812 - protein, 20 aa, Homo sapiens
  CDR3 for beta chain variable domain of TCR clone 322406 (TRBV28, TRBJ2-1)
CASTPIGRSPGLAGGNEQFF

SEQ ID NO: 644813 - protein, 14 aa, Homo sapiens
  CDR3 for alpha chain variable domain of TCR clone 322407 (TRAV26-1, TRAJ31)
CIALPPNNNARLMF

SEQ ID NO: 644814 - protein, 14 aa, Homo sapiens
  CDR3 for beta chain variable domain of TCR clone 322407 (TRBV6-1, TRBJ1-3)
CASVQGGGGNTIYF

SEQ ID NO: 644815 - protein, 13 aa, Homo sapiens
  CDR3 for alpha chain variable domain of TCR clone 322408 (TRAV21, TRAJ20)
CAVGLRVDYKLSF

SEQ ID NO: 644816 - protein, 21 aa, Homo sapiens
  CDR3 for beta chain variable domain of TCR clone 322408 (TRBV15, TRBJ2-1)
DWGTQPCTCVPPAEVDTARFF

SEQ ID NO: 644817 - protein, 11 aa, Homo sapiens
  CDR3 for alpha chain variable domain of TCR clone 322409 (TRAV2, TRAJ23)
CAVETRGKLIF

SEQ ID NO: 644818 - protein, 17 aa, Homo sapiens
  CDR3 for beta chain variable domain of TCR clone 322409 (TRBV20-1, TRBJ2-1)
CSPSSSGLAGSYNEQFF

SEQ ID NO: 644819 - protein, 18 aa, Homo sapiens
  CDR3 for alpha chain variable domain of TCR clone 322410 (TRAV3, TRAJ17)
CAVRARRGGRSCRQHANY

SEQ ID NO: 644820 - protein, 14 aa, Homo sapiens
  CDR3 for beta chain variable domain of TCR clone 322410 (TRBV4-1, TRBJ2-2)
CASSQAVNTGELFF

SEQ ID NO: 644821 - protein, 13 aa, Homo sapiens
  CDR3 for alpha chain variable domain of TCR clone 322411 (TRAV2, TRAJ40)
CAVVTSGTYKYIF

SEQ ID NO: 644822 - protein, 15 aa, Homo sapiens
  CDR3 for beta chain variable domain of TCR clone 322411 (TRBV11-3, TRBJ2-3)
RASLKDGREGDTKYF

SEQ ID NO: 644823 - protein, 17 aa, Homo sapiens
  CDR3 for alpha chain variable domain of TCR clone 322412 (TRAV3, TRAJ6)
CAVRDGLRAGGSYIPTF

SEQ ID NO: 644824 - protein, 14 aa, Homo sapiens
  CDR3 for beta chain variable domain of TCR clone 322412 (TRBV7-2, TRBJ2-7)
CASSPKTSSYEQYF

SEQ ID NO: 644825 - protein, 13 aa, Homo sapiens
  CDR3 for alpha chain variable domain of TCR clone 322413 (TRAV6, TRAJ20)
CALAVSNDYNLSF

SEQ ID NO: 644826 - protein, 16 aa, Homo sapiens
  CDR3 for beta chain variable domain of TCR clone 322413 (TRBV7-9, TRBJ2-1)
WASSDVAGGSYNEQFF

SEQ ID NO: 644827 - protein, 16 aa, Homo sapiens
  CDR3 for alpha chain variable domain of TCR clone 322414 (TRAV2, TRAJ4)
CAVEDRFSGGYNKLIF

SEQ ID NO: 644828 - protein, 15 aa, Homo sapiens
  CDR3 for beta chain variable domain of TCR clone 322414 (TRBV20-1, TRBJ2-1)
CSARGIGGTYNEQFF

SEQ ID NO: 644829 - protein, 15 aa, Homo sapiens
  CDR3 for alpha chain variable domain of TCR clone 322415 (TRAV8-6, TRAJ6)
CAVSGESGGSYTPTF

SEQ ID NO: 644830 - protein, 14 aa, Homo sapiens
  CDR3 for beta chain variable domain of TCR clone 322415 (TRBV7-9, TRBJ2-1)
CASSSMVGFGEQFF

SEQ ID NO: 644831 - protein, 16 aa, Homo sapiens
  CDR3 for alpha chain variable domain of TCR clone 322416 (TRAV27, TRAJ13)
CAGAKSDSGGCQKVTF

SEQ ID NO: 644832 - protein, 14 aa, Homo sapiens
  CDR3 for beta chain variable domain of TCR clone 322416 (TRBV7-3, TRBJ2-1)
CASSLAGGTNEQFF

SEQ ID NO: 644833 - protein, 14 aa, Homo sapiens
  CDR3 for alpha chain variable domain of TCR clone 322417 (TRAV12-2, TRAJ13)
CAVKKTGGYQKDTF

SEQ ID NO: 644834 - protein, 13 aa, Homo sapiens
  CDR3 for beta chain variable domain of TCR clone 322417 (TRBV7-3, TRBJ1-1)
CASSQDWGAEAFF

SEQ ID NO: 644835 - protein, 12 aa, Homo sapiens
  CDR3 for alpha chain variable domain of TCR clone 322418 (TRAV8-3, TRAJ20)
CAVDFKDYKLSF

SEQ ID NO: 644836 - protein, 12 aa, Homo sapiens
  CDR3 for beta chain variable domain of TCR clone 322418 (TRBV12-4, TRBJ1-3)
CASSFSRNTIYF

SEQ ID NO: 644837 - protein, 13 aa, Homo sapiens
  CDR3 for alpha chain variable domain of TCR clone 322419 (TRAV20, TRAJ45)
CAVKKRRCRRTHR

SEQ ID NO: 644838 - protein, 14 aa, Homo sapiens
  CDR3 for beta chain variable domain of TCR clone 322419 (TRBV15, TRBJ2-5)
CATRIGGLGETQYF

SEQ ID NO: 644839 - protein, 11 aa, Homo sapiens
  CDR3 for alpha chain variable domain of TCR clone 322420 (TRAV39, TRAJ49)
CAVDISTQFYF

SEQ ID NO: 644840 - protein, 11 aa, Homo sapiens
  CDR3 for beta chain variable domain of TCR clone 322420 (TRBV7-8, TRBJ2-7)
CVSSLSREQYF

SEQ ID NO: 644841 - protein, 15 aa, Homo sapiens
  CDR3 for alpha chain variable domain of TCR clone 322421 (TRAV12-2, TRAJ53)
CAVNGGGGSNYKLTF

SEQ ID NO: 644842 - protein, 14 aa, Homo sapiens
  CDR3 for beta chain variable domain of TCR clone 322421 (TRBV11-2, TRBJ2-5)
CASSRIGGIETQYF

SEQ ID NO: 644843 - protein, 11 aa, Homo sapiens
  CDR3 for alpha chain variable domain of TCR clone 322422 (TRAV12-1, TRAJ34)
CVVNKGRELIF

SEQ ID NO: 644844 - protein, 15 aa, Homo sapiens
  CDR3 for beta chain variable domain of TCR clone 322422 (TRBV9, TRBJ1-6)
CASSVAGTGDSPLHF

SEQ ID NO: 644845 - protein, 13 aa, Homo sapiens
  CDR3 for alpha chain variable domain of TCR clone 322423 (TRAV2, TRAJ40)
CAVVTSGTYKYIF

SEQ ID NO: 644846 - protein, 14 aa, Homo sapiens
  CDR3 for beta chain variable domain of TCR clone 322423 (TRBV7-2, TRBJ2-5)
CASSIRLTQETQYF

SEQ ID NO: 644847 - protein, 14 aa, Homo sapiens
  CDR3 for alpha chain variable domain of TCR clone 322424 (TRAV1-2, TRAJ6)
CAVRSSGGSYIPTF

SEQ ID NO: 644848 - protein, 15 aa, Homo sapiens
  CDR3 for beta chain variable domain of TCR clone 322424 (TRBV9, TRBJ1-6)
CASSVAGTGDSPLHF

SEQ ID NO: 644849 - protein, 14 aa, Homo sapiens
  CDR3 for alpha chain variable domain of TCR clone 322425 (TRAV9-2, TRAJ39)
CALYIYNAGNMLTF

SEQ ID NO: 644850 - protein, 13 aa, Homo sapiens
  CDR3 for beta chain variable domain of TCR clone 322425 (TRBV7-9, TRBJ2-3)
CASSAAGSDTQYF

SEQ ID NO: 644851 - protein, 15 aa, Homo sapiens
  CDR3 for alpha chain variable domain of TCR clone 322426 (TRAV27, TRAJ38)
CAARRKAVNNRKLIW

SEQ ID NO: 644852 - protein, 13 aa, Homo sapiens
  CDR3 for beta chain variable domain of TCR clone 322426 (TRBV20-1, TRBJ1-1)
CSARAGGNTEAFF

SEQ ID NO: 644853 - protein, 14 aa, Homo sapiens
  CDR3 for alpha chain variable domain of TCR clone 322427 (TRAV8-6, TRAJ49)
CAVSVRYTGNQFYF

SEQ ID NO: 644854 - protein, 15 aa, Homo sapiens
  CDR3 for beta chain variable domain of TCR clone 322427 (TRBV2, TRBJ2-1)
CASSELAGGYNERFF

SEQ ID NO: 644855 - protein, 18 aa, Homo sapiens
  CDR3 for alpha chain variable domain of TCR clone 322428 (TRAV13-2, TRAJ10)
CAASLPPILTGGGNKLTF

SEQ ID NO: 644856 - protein, 16 aa, Homo sapiens
  CDR3 for beta chain variable domain of TCR clone 322428 (TRBV11-2, TRBJ2-7)
CASSPLAGGPRYEQYF

SEQ ID NO: 644857 - protein, 14 aa, Homo sapiens
  CDR3 for alpha chain variable domain of TCR clone 322429 (TRAV3, TRAJ6)
CAVRDSRRKLHTYI

SEQ ID NO: 644858 - protein, 15 aa, Homo sapiens
  CDR3 for beta chain variable domain of TCR clone 322429 (TRBV18, TRBJ2-7)
CASSPRQGRTYEQYF

SEQ ID NO: 644859 - protein, 13 aa, Homo sapiens
  CDR3 for alpha chain variable domain of TCR clone 322430 (TRAV23/DV6, TRAJ22)
CALSSGSARQLTF

SEQ ID NO: 644860 - protein, 15 aa, Homo sapiens
  CDR3 for beta chain variable domain of TCR clone 322430 (TRBV11-2, TRBJ1-6)
CASSLDPWAVSPLHF

SEQ ID NO: 644861 - protein, 14 aa, Homo sapiens
  CDR3 for alpha chain variable domain of TCR clone 322431 (TRAV38-2/DV8, TRAJ31)
CAYRSDNNNARLMF

SEQ ID NO: 644862 - protein, 17 aa, Homo sapiens
  CDR3 for beta chain variable domain of TCR clone 322431 (TRBV28, TRBJ2-3)
CASRNPSYGFSTDTQYF

SEQ ID NO: 644863 - protein, 17 aa, Homo sapiens
  CDR3 for alpha chain variable domain of TCR clone 322432 (TRAV3, TRAJ28)
CAVREAYSGAGSYQLTF

SEQ ID NO: 644864 - protein, 15 aa, Homo sapiens
  CDR3 for beta chain variable domain of TCR clone 322432 (TRBV7-9, TRBJ2-2)
CASGPLDTFPGELFF

SEQ ID NO: 644865 - protein, 12 aa, Homo sapiens
  CDR3 for alpha chain variable domain of TCR clone 322433 (TRAV12-3, TRAJ17)
CAMTLTGNKHTF

SEQ ID NO: 644866 - protein, 15 aa, Homo sapiens
  CDR3 for beta chain variable domain of TCR clone 322433 (TRBV20-1, TRBJ2-7)
CSARDRVSGMDEQYF

SEQ ID NO: 644867 - protein, 13 aa, Homo sapiens
  CDR3 for alpha chain variable domain of TCR clone 322434 (TRAV17, TRAJ9)
CATDYTGSFKTIF

SEQ ID NO: 644868 - protein, 14 aa, Homo sapiens
  CDR3 for beta chain variable domain of TCR clone 322434 (TRBV19, TRBJ2-5)
CASSMAGQQETQYF

SEQ ID NO: 644869 - protein, 12 aa, Homo sapiens
  CDR3 for alpha chain variable domain of TCR clone 322435 (TRAV13-1, TRAJ29)
CAARSRKHTACL

SEQ ID NO: 644870 - protein, 17 aa, Homo sapiens
  CDR3 for beta chain variable domain of TCR clone 322435 (TRBV4-1, TRBJ2-1)
CASSHRDSGSSYNEQFF

SEQ ID NO: 644871 - protein, 15 aa, Homo sapiens
  CDR3 for alpha chain variable domain of TCR clone 322436 (TRAV13-1, TRAJ5)
CAASKADTGRRALTF

SEQ ID NO: 644872 - protein, 15 aa, Homo sapiens
  CDR3 for beta chain variable domain of TCR clone 322436 (TRBV19, TRBJ2-1)
CASSMGWNRNDEQFF

SEQ ID NO: 644873 - protein, 15 aa, Homo sapiens
  CDR3 for alpha chain variable domain of TCR clone 322437 (TRAV21, TRAJ37)
CAVRPTLSNTGKLIF

SEQ ID NO: 644874 - protein, 15 aa, Homo sapiens
  CDR3 for beta chain variable domain of TCR clone 322437 (TRBV20-1, TRBJ2-7)
CSAESGTSGAYEQYF

SEQ ID NO: 644875 - protein, 16 aa, Homo sapiens
  CDR3 for alpha chain variable domain of TCR clone 322438 (TRAV30, TRAJ24)
CGTEIVDADSWGKFQF

SEQ ID NO: 644876 - protein, 15 aa, Homo sapiens
  CDR3 for beta chain variable domain of TCR clone 322438 (TRBV9, TRBJ1-6)
CASSVAGTGDSPLHS

SEQ ID NO: 644877 - protein, 19 aa, Homo sapiens
  CDR3 for alpha chain variable domain of TCR clone 322439 (TRAV26-1, TRAJ28)
CIVRVAHAYPGAGSYQLTF

SEQ ID NO: 644878 - protein, 12 aa, Homo sapiens
  CDR3 for beta chain variable domain of TCR clone 322439 (TRBV27, TRBJ2-2)
CASKLFTGELFF

SEQ ID NO: 644879 - protein, 14 aa, Homo sapiens
  CDR3 for alpha chain variable domain of TCR clone 322440 (TRAV13-1, TRAJ26)
CAAPKGPDGQNFVF

SEQ ID NO: 644880 - protein, 15 aa, Homo sapiens
  CDR3 for beta chain variable domain of TCR clone 322440 (TRBV28, TRBJ2-5)
CASSCRQGALETQYF

SEQ ID NO: 644881 - protein, 16 aa, Homo sapiens
  CDR3 for alpha chain variable domain of TCR clone 322441 (TRAV30, TRAJ24)
CGTEIVDADSWGKFQF

SEQ ID NO: 644882 - protein, 14 aa, Homo sapiens
  CDR3 for beta chain variable domain of TCR clone 322441 (TRBV20-1, TRBJ1-1)
CSVQTRIGGTEAFF

SEQ ID NO: 644883 - protein, 11 aa, Homo sapiens
  CDR3 for alpha chain variable domain of TCR clone 322442 (TRAV21, TRAJ34)
CAHYNTHKLIF

SEQ ID NO: 644884 - protein, 13 aa, Homo sapiens
  CDR3 for beta chain variable domain of TCR clone 322442 (TRBV7-6, TRBJ1-2)
CASSLVADYGYTF

SEQ ID NO: 644885 - protein, 12 aa, Homo sapiens
  CDR3 for alpha chain variable domain of TCR clone 322443 (TRAV12-3, TRAJ20)
CAMVRGDYKLSF

SEQ ID NO: 644886 - protein, 15 aa, Homo sapiens
  CDR3 for beta chain variable domain of TCR clone 322443 (TRBV11-2, TRBJ1-3)
CASSIWGSYGNTIYF

SEQ ID NO: 644887 - protein, 14 aa, Homo sapiens
  CDR3 for alpha chain variable domain of TCR clone 322444 (TRAV12-2, TRAJ17)
CAVLFKAAGNKLTF

SEQ ID NO: 644888 - protein, 15 aa, Homo sapiens
  CDR3 for beta chain variable domain of TCR clone 322444 (TRBV3-1, TRBJ2-7)
CASSQGVGVKVEQYF

SEQ ID NO: 644889 - protein, 14 aa, Homo sapiens
  CDR3 for alpha chain variable domain of TCR clone 322445 (TRAV35, TRAJ22)
CAGLRPGSARQLTF

SEQ ID NO: 644890 - protein, 14 aa, Homo sapiens
  CDR3 for beta chain variable domain of TCR clone 322445 (TRBV4-1, TRBJ2-7)
CASRPVAGGDEQYF

SEQ ID NO: 644891 - protein, 14 aa, Homo sapiens
  CDR3 for alpha chain variable domain of TCR clone 322446 (TRAV1-2, TRAJ16)
CAVNRFSDGQMLLF

SEQ ID NO: 644892 - protein, 13 aa, Homo sapiens
  CDR3 for beta chain variable domain of TCR clone 322446 (TRBV7-9, TRBJ1-2)
CASSLKQNYGYTF

SEQ ID NO: 644893 - protein, 15 aa, Homo sapiens
  CDR3 for alpha chain variable domain of TCR clone 322447 (TRAV12-1, TRAJ9)
CVVSFGDTGGFKTIF

SEQ ID NO: 644894 - protein, 13 aa, Homo sapiens
  CDR3 for beta chain variable domain of TCR clone 322447 (TRBV10-3, TRBJ2-7)
CASKLAVNYEQYF

SEQ ID NO: 644895 - protein, 14 aa, Homo sapiens
  CDR3 for alpha chain variable domain of TCR clone 322448 (TRAV12-3, TRAJ29)
CAMSPYSGNTPLVC

SEQ ID NO: 644896 - protein, 15 aa, Homo sapiens
  CDR3 for beta chain variable domain of TCR clone 322448 (TRBV27, TRBJ2-1)
CASSNGGGSSNEQFF

SEQ ID NO: 644897 - protein, 13 aa, Homo sapiens
  CDR3 for alpha chain variable domain of TCR clone 322449 (TRAV5, TRAJ30)
CAEIANRDDKIIF

SEQ ID NO: 644898 - protein, 14 aa, Homo sapiens
  CDR3 for beta chain variable domain of TCR clone 322449 (TRBV28, TRBJ2-3)
CASSWRGRADTQYF

SEQ ID NO: 644899 - protein, 13 aa, Homo sapiens
  CDR3 for alpha chain variable domain of TCR clone 322450 (TRAV8-2, TRAJ44)
CSRGAGTASKLTF

SEQ ID NO: 644900 - protein, 13 aa, Homo sapiens
  CDR3 for beta chain variable domain of TCR clone 322450 (TRBV12-4, TRBJ2-7)
CASSRHASYEQYF

SEQ ID NO: 644901 - protein, 13 aa, Homo sapiens
  CDR3 for alpha chain variable domain of TCR clone 322451 (TRAV13-1, TRAJ40)
CAAFSPGTYKYIF

SEQ ID NO: 644902 - protein, 13 aa, Homo sapiens
  CDR3 for beta chain variable domain of TCR clone 322451 (TRBV10-3, TRBJ2-7)
CAIRAGGPHEQYF

SEQ ID NO: 644903 - protein, 14 aa, Homo sapiens
  CDR3 for alpha chain variable domain of TCR clone 322452 (TRAV1-2, TRAJ8)
CAVREDTGFQKLVF

SEQ ID NO: 644904 - protein, 14 aa, Homo sapiens
  CDR3 for beta chain variable domain of TCR clone 322452 (TRBV19, TRBJ2-1)
CASGRAGPGNEQFF

SEQ ID NO: 644905 - protein, 12 aa, Homo sapiens
  CDR3 for alpha chain variable domain of TCR clone 322453 (TRAV30, TRAJ43)
CGTAERGNDMRF

SEQ ID NO: 644906 - protein, 13 aa, Homo sapiens
  CDR3 for beta chain variable domain of TCR clone 322453 (TRBV7-9, TRBJ2-3)
CASIPGSTDTQYF

SEQ ID NO: 644907 - protein, 13 aa, Homo sapiens
  CDR3 for alpha chain variable domain of TCR clone 322454 (TRAV1-1, TRAJ9)
CAAKNTGGFKTIF

SEQ ID NO: 644908 - protein, 14 aa, Homo sapiens
  CDR3 for beta chain variable domain of TCR clone 322454 (TRBV2, TRBJ2-5)
CASKRDGTTETQYF

SEQ ID NO: 644909 - protein, 15 aa, Homo sapiens
  CDR3 for alpha chain variable domain of TCR clone 322455 (TRAV13-2, TRAJ16)
CAEHDRFSDGQKLLF

SEQ ID NO: 644910 - protein, 18 aa, Homo sapiens
  CDR3 for beta chain variable domain of TCR clone 322455 (TRBV12-4, TRBJ2-2)
CAGSLVAGTRGRTGELFF

SEQ ID NO: 644911 - protein, 15 aa, Homo sapiens
  CDR3 for alpha chain variable domain of TCR clone 322456 (TRAV21, TRAJ40)
CAVRPQTSATYTYIF

SEQ ID NO: 644912 - protein, 13 aa, Homo sapiens
  CDR3 for beta chain variable domain of TCR clone 322456 (TRBV7-2, TRBJ2-2)
CASSSVRAGELFF

SEQ ID NO: 644913 - protein, 16 aa, Homo sapiens
  CDR3 for alpha chain variable domain of TCR clone 322457 (TRAV30, TRAJ24)
CGTEIVDADSWGKLQF

SEQ ID NO: 644914 - protein, 15 aa, Homo sapiens
  CDR3 for beta chain variable domain of TCR clone 322457 (TRBV20-1, TRBJ2-4)
CSARDLTGGPNIQYF

SEQ ID NO: 644915 - protein, 13 aa, Homo sapiens
  CDR3 for alpha chain variable domain of TCR clone 322458 (TRAV21, TRAJ27)
CAARPGNAGKSTL

SEQ ID NO: 644916 - protein, 14 aa, Homo sapiens
  CDR3 for beta chain variable domain of TCR clone 322458 (TRBV7-6, TRBJ2-3)
CASSLGTVTDTQYS

SEQ ID NO: 644917 - protein, 11 aa, Homo sapiens
  CDR3 for alpha chain variable domain of TCR clone 322459 (TRAV8-4, TRAJ20)
CAVTNVLTTTS

SEQ ID NO: 644918 - protein, 14 aa, Homo sapiens
  CDR3 for beta chain variable domain of TCR clone 322459 (TRBV5-4, TRBJ1-1)
CASSLDSRRDEAFF

SEQ ID NO: 644919 - protein, 16 aa, Homo sapiens
  CDR3 for alpha chain variable domain of TCR clone 322460 (TRAV4, TRAJ8)
CLVGDSGNTGFQKLVF

SEQ ID NO: 644920 - protein, 14 aa, Homo sapiens
  CDR3 for beta chain variable domain of TCR clone 322460 (TRBV15, TRBJ1-2)
CATSRVRASGSYTF

SEQ ID NO: 644921 - protein, 11 aa, Homo sapiens
  CDR3 for alpha chain variable domain of TCR clone 322461 (TRAV21, TRAJ34)
CAHYNTDKLIF

SEQ ID NO: 644922 - protein, 13 aa, Homo sapiens
  CDR3 for beta chain variable domain of TCR clone 322461 (TRBV7-6, TRBJ1-2)
CASSLVADYGYTY

SEQ ID NO: 644923 - protein, 15 aa, Homo sapiens
  CDR3 for alpha chain variable domain of TCR clone 322462 (TRAV4, TRAJ39)
CLVGPNNNAGNMLTF

SEQ ID NO: 644924 - protein, 17 aa, Homo sapiens
  CDR3 for beta chain variable domain of TCR clone 322462 (TRBV20-1, TRBJ1-5)
CSASLSPGQGGNQPQHF

SEQ ID NO: 644925 - protein, 13 aa, Homo sapiens
  CDR3 for alpha chain variable domain of TCR clone 322463 (TRAV24, TRAJ42)
CAFSTGSQGNLIF

SEQ ID NO: 644926 - protein, 16 aa, Homo sapiens
  CDR3 for beta chain variable domain of TCR clone 322463 (TRBV24-1, TRBJ2-3)
CATSDPGTGATDTQYF

SEQ ID NO: 644927 - protein, 15 aa, Homo sapiens
  CDR3 for alpha chain variable domain of TCR clone 322464 (TRAV23/DV6, TRAJ17)
CARGSCRQQANFWVR

SEQ ID NO: 644928 - protein, 14 aa, Homo sapiens
  CDR3 for beta chain variable domain of TCR clone 322464 (TRBV7-2, TRBJ1-2)
CASSQTGSTYGYTF

SEQ ID NO: 644929 - protein, 14 aa, Homo sapiens
  CDR3 for alpha chain variable domain of TCR clone 322465 (TRAV6, TRAJ40)
CALDATSGTYKYIF

SEQ ID NO: 644930 - protein, 16 aa, Homo sapiens
  CDR3 for beta chain variable domain of TCR clone 322465 (TRBV7-8, TRBJ2-5)
CASSPAGGRNQETQYV

SEQ ID NO: 644931 - protein, 12 aa, Homo sapiens
  CDR3 for alpha chain variable domain of TCR clone 322466 (TRAV12-2, TRAJ8)
CAVNTGFQTLVF

SEQ ID NO: 644932 - protein, 15 aa, Homo sapiens
  CDR3 for beta chain variable domain of TCR clone 322466 (TRBV7-8, TRBJ1-5)
CASSLERRGLEPQHF

SEQ ID NO: 644933 - protein, 14 aa, Homo sapiens
  CDR3 for alpha chain variable domain of TCR clone 322467 (TRAV29/DV5, TRAJ36)
CAARRKTGANNLFF

SEQ ID NO: 644934 - protein, 14 aa, Homo sapiens
  CDR3 for beta chain variable domain of TCR clone 322467 (TRBV12-5, TRBJ2-3)
CASEGIPSTDTQYF

SEQ ID NO: 644935 - protein, 13 aa, Homo sapiens
  CDR3 for alpha chain variable domain of TCR clone 322468 (TRAV4, TRAJ42)
CLVGGGSQGNLIF

SEQ ID NO: 644936 - protein, 16 aa, Homo sapiens
  CDR3 for beta chain variable domain of TCR clone 322468 (TRBV5-1, TRBJ2-3)
CTSSLQGRVGADTQYF

SEQ ID NO: 644937 - protein, 13 aa, Homo sapiens
  CDR3 for alpha chain variable domain of TCR clone 322469 (TRAV13-1, TRAJ11)
CAASISGYSTLTF

SEQ ID NO: 644938 - protein, 14 aa, Homo sapiens
  CDR3 for beta chain variable domain of TCR clone 322469 (TRBV4-3, TRBJ2-1)
YASGLDRAYNEQFF

SEQ ID NO: 644939 - protein, 11 aa, Homo sapiens
  CDR3 for alpha chain variable domain of TCR clone 322470 (TRAV12-1, TRAJ8)
CVVTGFQKLVF

SEQ ID NO: 644940 - protein, 17 aa, Homo sapiens
  CDR3 for beta chain variable domain of TCR clone 322470 (TRBV7-2, TRBJ1-3)
CASSLAPGRPAGNTIYF

SEQ ID NO: 644941 - protein, 14 aa, Homo sapiens
  CDR3 for alpha chain variable domain of TCR clone 322471 (TRAV12-2, TRAJ17)
CAVLFKASGNKLTF

SEQ ID NO: 644942 - protein, 14 aa, Homo sapiens
  CDR3 for beta chain variable domain of TCR clone 322471 (TRBV7-2, TRBJ2-7)
CASRSQGAAYEQYF

SEQ ID NO: 644943 - protein, 16 aa, Homo sapiens
  CDR3 for alpha chain variable domain of TCR clone 322472 (TRAV22, TRAJ45)
CAVESGKRGGADGLTF

SEQ ID NO: 644944 - protein, 13 aa, Homo sapiens
  CDR3 for beta chain variable domain of TCR clone 322472 (TRBV27, TRBJ1-1)
CASSLSIGAEAFF

SEQ ID NO: 644945 - protein, 14 aa, Homo sapiens
  CDR3 for alpha chain variable domain of TCR clone 322473 (TRAV26-1, TRAJ31)
CIALAPNNNARLMF

SEQ ID NO: 644946 - protein, 16 aa, Homo sapiens
  CDR3 for beta chain variable domain of TCR clone 322473 (TRBV10-2, TRBJ2-7)
CASSESPGSSGFEQYF

SEQ ID NO: 644947 - protein, 14 aa, Homo sapiens
  CDR3 for alpha chain variable domain of TCR clone 322474 (TRAV1-2, TRAJ8)
CAVRADTGFQKLVF

SEQ ID NO: 644948 - protein, 14 aa, Homo sapiens
  CDR3 for beta chain variable domain of TCR clone 322474 (TRBV7-9, TRBJ1-1)
CASSLGGANTEAFF

SEQ ID NO: 644949 - protein, 13 aa, Homo sapiens
  CDR3 for alpha chain variable domain of TCR clone 322475 (TRAV17, TRAJ21)
CATDWNNFNKFYF

SEQ ID NO: 644950 - protein, 12 aa, Homo sapiens
  CDR3 for beta chain variable domain of TCR clone 322475 (TRBV20-1, TRBJ1-1)
CSARGGNTEAFF

SEQ ID NO: 644951 - protein, 15 aa, Homo sapiens
  CDR3 for alpha chain variable domain of TCR clone 322476 (TRAV30, TRAJ32)
CGTEILGGATSKLIF

SEQ ID NO: 644952 - protein, 17 aa, Homo sapiens
  CDR3 for beta chain variable domain of TCR clone 322476 (TRBV5-4, TRBJ2-1)
CASSSAGGRGPYNEQFF

SEQ ID NO: 644953 - protein, 21 aa, Homo sapiens
  CDR3 for alpha chain variable domain of TCR clone 322477 (TRAV30, TRAJ43)
GLPAQLLRNLLPIIELNDMRF

SEQ ID NO: 644954 - protein, 14 aa, Homo sapiens
  CDR3 for beta chain variable domain of TCR clone 322477 (TRBV18, TRBJ2-7)
CASSPRGGAYEQYF

SEQ ID NO: 644955 - protein, 12 aa, Homo sapiens
  CDR3 for alpha chain variable domain of TCR clone 322478 (TRAV3, TRAJ43)
CAVRDPNNDMRF

SEQ ID NO: 644956 - protein, 15 aa, Homo sapiens
  CDR3 for beta chain variable domain of TCR clone 322478 (TRBV9, TRBJ2-1)
CASSLAGSSYNEQFF

SEQ ID NO: 644957 - protein, 14 aa, Homo sapiens
  CDR3 for alpha chain variable domain of TCR clone 322479 (TRAV9-2, TRAJ39)
GALYIYNAGNMLTF

SEQ ID NO: 644958 - protein, 14 aa, Homo sapiens
  CDR3 for beta chain variable domain of TCR clone 322479 (TRBV4-2, TRBJ2-1)
CASGLDRAYNEQFF

SEQ ID NO: 644959 - protein, 16 aa, Homo sapiens
  CDR3 for alpha chain variable domain of TCR clone 322480 (TRAV12-2, TRAJ10)
CAVNRVLTGGGIKLTF

SEQ ID NO: 644960 - protein, 14 aa, Homo sapiens
  CDR3 for beta chain variable domain of TCR clone 322480 (TRBV9, TRBJ2-1)
CASSVALAVNEQFF

SEQ ID NO: 644961 - protein, 16 aa, Homo sapiens
  CDR3 for alpha chain variable domain of TCR clone 322481 (TRAV21, TRAJ52)
CAVTNAGGTSYGKLTF

SEQ ID NO: 644962 - protein, 11 aa, Homo sapiens
  CDR3 for beta chain variable domain of TCR clone 322481 (TRBV13, TRBJ2-3)
CASGNADTQYF

SEQ ID NO: 644963 - protein, 16 aa, Homo sapiens
  CDR3 for alpha chain variable domain of TCR clone 322482 (TRAV23/DV6, TRAJ48)
CAASGVVNFGNEKLTF

SEQ ID NO: 644964 - protein, 12 aa, Homo sapiens
  CDR3 for beta chain variable domain of TCR clone 322482 (TRBV7-8, TRBJ2-7)
CASSLGDREQYF

SEQ ID NO: 644965 - protein, 14 aa, Homo sapiens
  CDR3 for alpha chain variable domain of TCR clone 322483 (TRAV13-1, TRAJ5)
CAAHPDTGRRALTF

SEQ ID NO: 644966 - protein, 16 aa, Homo sapiens
  CDR3 for beta chain variable domain of TCR clone 322483 (TRBV7-3, TRBJ2-3)
CASSLSGYRPEDTQYF

SEQ ID NO: 644967 - protein, 11 aa, Homo sapiens
  CDR3 for alpha chain variable domain of TCR clone 322484 (TRAV35, TRAJ30)
CAGLRDDKIIF

SEQ ID NO: 644968 - protein, 15 aa, Homo sapiens
  CDR3 for beta chain variable domain of TCR clone 322484 (TRBV2, TRBJ1-3)
CASSISPRSGNTMYF

SEQ ID NO: 644969 - protein, 14 aa, Homo sapiens
  CDR3 for alpha chain variable domain of TCR clone 322485 (TRAV13-1, TRAJ24)
CAASRTDSWGKLQF

SEQ ID NO: 644970 - protein, 15 aa, Homo sapiens
  CDR3 for beta chain variable domain of TCR clone 322485 (TRBV28, TRBJ2-7)
CASSLISGGSYEQYF

SEQ ID NO: 644971 - protein, 22 aa, Homo sapiens
  CDR3 for alpha chain variable domain of TCR clone 322486 (TRAV2, TRAJ38)
CAVEDFPNAGNNHIQNPDPAVY

SEQ ID NO: 644972 - protein, 12 aa, Homo sapiens
  CDR3 for beta chain variable domain of TCR clone 322486 (TRBV11-2, TRBJ2-2)
CASSLGGGELFF

SEQ ID NO: 644973 - protein, 13 aa, Homo sapiens
  CDR3 for alpha chain variable domain of TCR clone 322487 (TRAV21, TRAJ20)
CAVGLRVDYKLSF

SEQ ID NO: 644974 - protein, 15 aa, Homo sapiens
  CDR3 for beta chain variable domain of TCR clone 322487 (TRBV7-9, TRBJ2-2)
CASSPETGAGGELFF

SEQ ID NO: 644975 - protein, 15 aa, Homo sapiens
  CDR3 for alpha chain variable domain of TCR clone 322488 (TRAV23/DV6, TRAJ4)
CAASPLRGGYNKLIF

SEQ ID NO: 644976 - protein, 15 aa, Homo sapiens
  CDR3 for beta chain variable domain of TCR clone 322488 (TRBV7-9, TRBJ1-6)
CASSSPVRGNSPLHF

SEQ ID NO: 644977 - protein, 15 aa, Homo sapiens
  CDR3 for alpha chain variable domain of TCR clone 322489 (TRAV8-6, TRAJ6)
CAVSFTSGGSYIPKF

SEQ ID NO: 644978 - protein, 13 aa, Homo sapiens
  CDR3 for beta chain variable domain of TCR clone 322489 (TRBV12-4, TRBJ1-5)
CASSPDRAQPQHF

SEQ ID NO: 644979 - protein, 19 aa, Homo sapiens
  CDR3 for alpha chain variable domain of TCR clone 322490 (TRAV29/DV5, TRAJ49)
CSVLLCSKLTVDTGNQFSF

SEQ ID NO: 644980 - protein, 16 aa, Homo sapiens
  CDR3 for beta chain variable domain of TCR clone 322490 (TRBV13, TRBJ2-3)
CQQPLQGSGGRNTQYF

SEQ ID NO: 644981 - protein, 11 aa, Homo sapiens
  CDR3 for alpha chain variable domain of TCR clone 322491 (TRAV12-3, TRAJ43)
CAMSVSNDMRF

SEQ ID NO: 644982 - protein, 15 aa, Homo sapiens
  CDR3 for beta chain variable domain of TCR clone 322491 (TRBV5-1, TRBJ2-1)
CASSPPRAPYNEQFC

SEQ ID NO: 644983 - protein, 12 aa, Homo sapiens
  CDR3 for alpha chain variable domain of TCR clone 322492 (TRAV17, TRAJ4)
CATRGGYNKLIF

SEQ ID NO: 644984 - protein, 16 aa, Homo sapiens
  CDR3 for beta chain variable domain of TCR clone 322492 (TRBV4-3, TRBJ2-5)
CASSQDSIQLQETQYF

SEQ ID NO: 644985 - protein, 15 aa, Homo sapiens
  CDR3 for alpha chain variable domain of TCR clone 322493 (TRAV16, TRAJ17)
CALSGQEAAGNKLTF

SEQ ID NO: 644986 - protein, 15 aa, Homo sapiens
  CDR3 for beta chain variable domain of TCR clone 322493 (TRBV12-4, TRBJ1-5)
CAGTQGTGPLQPQHF

SEQ ID NO: 644987 - protein, 14 aa, Homo sapiens
  CDR3 for alpha chain variable domain of TCR clone 322494 (TRAV8-4, TRAJ9)
CAVRINTGGFKTIF

SEQ ID NO: 644988 - protein, 12 aa, Homo sapiens
  CDR3 for beta chain variable domain of TCR clone 322494 (TRBV14, TRBJ2-7)
CASSRLKGEQYF

SEQ ID NO: 644989 - protein, 13 aa, Homo sapiens
  CDR3 for alpha chain variable domain of TCR clone 322495 (TRAV12-1, TRAJ26)
CVVRRNYGQNFVF

SEQ ID NO: 644990 - protein, 17 aa, Homo sapiens
  CDR3 for beta chain variable domain of TCR clone 322495 (TRBV11-2, TRBJ2-1)
CASSLYPPGVEYNEQFF

SEQ ID NO: 644991 - protein, 11 aa, Homo sapiens
  CDR3 for alpha chain variable domain of TCR clone 322496 (TRAV21, TRAJ34)
CAHYNTDKLIF

SEQ ID NO: 644992 - protein, 11 aa, Homo sapiens
  CDR3 for beta chain variable domain of TCR clone 322496 (TRBV29-1, TRBJ2-5)
CSEDRTGTHYF

SEQ ID NO: 644993 - protein, 13 aa, Homo sapiens
  CDR3 for alpha chain variable domain of TCR clone 322497 (TRAV3, TRAJ21)
CAVATSTNFTLDL

SEQ ID NO: 644994 - protein, 16 aa, Homo sapiens
  CDR3 for beta chain variable domain of TCR clone 322497 (TRBV19, TRBJ2-1)
CASSKAGPSSYNGQFF

SEQ ID NO: 644995 - protein, 15 aa, Homo sapiens
  CDR3 for alpha chain variable domain of TCR clone 322498 (TRAV3, TRAJ5)
CAVRALDTGRSALTF

SEQ ID NO: 644996 - protein, 13 aa, Homo sapiens
  CDR3 for beta chain variable domain of TCR clone 322498 (TRBV12-4, TRBJ2-7)
CASSPTETYEQYF

SEQ ID NO: 644997 - protein, 13 aa, Homo sapiens
  CDR3 for alpha chain variable domain of TCR clone 322499 (TRAV13-2, TRAJ8)
CAFMNTGFQELVF

SEQ ID NO: 644998 - protein, 15 aa, Homo sapiens
  CDR3 for beta chain variable domain of TCR clone 322499 (TRBV19, TRBJ2-3)
CAAGDTNAPNDTQYF

SEQ ID NO: 644999 - protein, 17 aa, Homo sapiens
  CDR3 for alpha chain variable domain of TCR clone 322500 (TRAV26-1, TRAJ36)
CIVRPPGDQTGANNLFF

SEQ ID NO: 645000 - protein, 12 aa, Homo sapiens
  CDR3 for beta chain variable domain of TCR clone 322500 (TRBV12-4, TRBJ2-7)
CASSLGGYEQYL

SEQ ID NO: 645001 - protein, 14 aa, Homo sapiens
  CDR3 for alpha chain variable domain of TCR clone 322501 (TRAV20, TRAJ29)
SAVQAWVGNTPLVF

SEQ ID NO: 645002 - protein, 14 aa, Homo sapiens
  CDR3 for beta chain variable domain of TCR clone 322501 (TRBV11-2, TRBJ2-3)
CASSRLARTDTQYF

SEQ ID NO: 645003 - protein, 16 aa, Homo sapiens
  CDR3 for alpha chain variable domain of TCR clone 322502 (TRAV30, TRAJ24)
CGTEIVDADSWGKFQF

SEQ ID NO: 645004 - protein, 14 aa, Homo sapiens
  CDR3 for beta chain variable domain of TCR clone 322502 (TRBV7-9, TRBJ2-7)
CASSLGTDPNEQYF

SEQ ID NO: 645005 - protein, 15 aa, Homo sapiens
  CDR3 for alpha chain variable domain of TCR clone 322503 (TRAV21, TRAJ57)
CAVIITQGGSEKLVF

SEQ ID NO: 645006 - protein, 14 aa, Homo sapiens
  CDR3 for beta chain variable domain of TCR clone 322503 (TRBV5-1, TRBJ2-2)
CASSLIWIPEELFF

SEQ ID NO: 645007 - protein, 17 aa, Homo sapiens
  CDR3 for alpha chain variable domain of TCR clone 322504 (TRAV8-3, TRAJ34)
CAIPGKLIFGTGTRLQV

SEQ ID NO: 645008 - protein, 15 aa, Homo sapiens
  CDR3 for beta chain variable domain of TCR clone 322504 (TRBV5-7, TRBJ2-1)
CASSRLLAGDNEQFF

SEQ ID NO: 645009 - protein, 14 aa, Homo sapiens
  CDR3 for alpha chain variable domain of TCR clone 322505 (TRAV16, TRAJ44)
CALSTTGTASKLTF

SEQ ID NO: 645010 - protein, 14 aa, Homo sapiens
  CDR3 for beta chain variable domain of TCR clone 322505 (TRBV7-2, TRBJ2-7)
CASSPKTSFYEQYF

SEQ ID NO: 645011 - protein, 12 aa, Homo sapiens
  CDR3 for alpha chain variable domain of TCR clone 322506 (TRAV36/DV7, TRAJ54)
CAVVRGAQKLAF

SEQ ID NO: 645012 - protein, 18 aa, Homo sapiens
  CDR3 for beta chain variable domain of TCR clone 322506 (TRBV20-1, TRBJ2-3)
CSASGLAGGPGTTDTQYF

SEQ ID NO: 645013 - protein, 14 aa, Homo sapiens
  CDR3 for alpha chain variable domain of TCR clone 322507 (TRAV12-2, TRAJ44)
CAVNPAGTASKLTF

SEQ ID NO: 645014 - protein, 20 aa, Homo sapiens
  CDR3 for beta chain variable domain of TCR clone 322507 (TRBV7-8, TRBJ2-2)
CASSHLFPGPTIHITGELFF

SEQ ID NO: 645015 - protein, 13 aa, Homo sapiens
  CDR3 for alpha chain variable domain of TCR clone 322508 (TRAV25, TRAJ30)
CAGRVDRDDKIIF

SEQ ID NO: 645016 - protein, 20 aa, Homo sapiens
  CDR3 for beta chain variable domain of TCR clone 322508 (TRBV28, TRBJ2-1)
CASTPIGRSPGLAGGNEQFF

SEQ ID NO: 645017 - protein, 12 aa, Homo sapiens
  CDR3 for alpha chain variable domain of TCR clone 322509 (TRAV21, TRAJ30)
CAALNRDDKIIF

SEQ ID NO: 645018 - protein, 13 aa, Homo sapiens
  CDR3 for beta chain variable domain of TCR clone 322509 (TRBV7-9, TRBJ2-3)
CASSPGSTDTQYF

SEQ ID NO: 645019 - protein, 12 aa, Homo sapiens
  CDR3 for alpha chain variable domain of TCR clone 322510 (TRAV1-2, TRAJ26)
CAVRGYGQNFVF

SEQ ID NO: 645020 - protein, 16 aa, Homo sapiens
  CDR3 for beta chain variable domain of TCR clone 322510 (TRBV2, TRBJ2-7)
CASSEPWTGPSYEQYF

SEQ ID NO: 645021 - protein, 12 aa, Homo sapiens
  CDR3 for alpha chain variable domain of TCR clone 322511 (TRAV12-2, TRAJ10)
WGVTGGGNKLTF

SEQ ID NO: 645022 - protein, 15 aa, Homo sapiens
  CDR3 for beta chain variable domain of TCR clone 322511 (TRBV28, TRBJ2-1)
CASSIIAGGRSEQFF

SEQ ID NO: 645023 - protein, 15 aa, Homo sapiens
  CDR3 for alpha chain variable domain of TCR clone 322512 (TRAV17, TRAJ4)
CATGTWSGSYNKLIF

SEQ ID NO: 645024 - protein, 13 aa, Homo sapiens
  CDR3 for beta chain variable domain of TCR clone 322512 (TRBV6-6, TRBJ2-7)
CASSPKRLAEQYF

SEQ ID NO: 645025 - protein, 12 aa, Homo sapiens
  CDR3 for alpha chain variable domain of TCR clone 322513 (TRAV12-2, TRAJ42)
CAVGGSQGNLIF

SEQ ID NO: 645026 - protein, 14 aa, Homo sapiens
  CDR3 for beta chain variable domain of TCR clone 322513 (TRBV19, TRBJ2-1)
CASPTFVLSGEQFF

SEQ ID NO: 645027 - protein, 13 aa, Homo sapiens
  CDR3 for alpha chain variable domain of TCR clone 322514 (TRAV27, TRAJ6)
CAGGTRGSNIPTF

SEQ ID NO: 645028 - protein, 13 aa, Homo sapiens
  CDR3 for beta chain variable domain of TCR clone 322514 (TRBV4-1, TRBJ2-2)
CASSQENTGELFF

SEQ ID NO: 645029 - protein, 17 aa, Homo sapiens
  CDR3 for alpha chain variable domain of TCR clone 322515 (TRAV4, TRAJ42)
CLVGVLNYGGSQGNLIF

SEQ ID NO: 645030 - protein, 14 aa, Homo sapiens
  CDR3 for beta chain variable domain of TCR clone 322515 (TRBV7-2, TRBJ2-7)
CASSPKTSFYEQYF

SEQ ID NO: 645031 - protein, 14 aa, Homo sapiens
  CDR3 for alpha chain variable domain of TCR clone 322516 (TRAV1-2, TRAJ16)
CAVNRFSDGQKLLF

SEQ ID NO: 645032 - protein, 19 aa, Homo sapiens
  CDR3 for beta chain variable domain of TCR clone 322516 (TRBV6-1, TRBJ2-5)
CASSEVAMGVLAGVETQYF

SEQ ID NO: 645033 - protein, 15 aa, Homo sapiens
  CDR3 for alpha chain variable domain of TCR clone 322517 (TRAV3, TRAJ5)
CAVRDLDTGRRALTF

SEQ ID NO: 645034 - protein, 13 aa, Homo sapiens
  CDR3 for beta chain variable domain of TCR clone 322517 (TRBV28, TRBJ1-3)
CASSFLGSGTIYF

SEQ ID NO: 645035 - protein, 14 aa, Homo sapiens
  CDR3 for alpha chain variable domain of TCR clone 322518 (TRAV17, TRAJ29)
CATDSNSGNTPLVF

SEQ ID NO: 645036 - protein, 17 aa, Homo sapiens
  CDR3 for beta chain variable domain of TCR clone 322518 (TRBV7-3, TRBJ2-5)
CASSLGSGRSGSETQYF

SEQ ID NO: 645037 - protein, 14 aa, Homo sapiens
  CDR3 for alpha chain variable domain of TCR clone 322519 (TRAV21, TRAJ35)
CAVMPIGFGNVRRC

SEQ ID NO: 645038 - protein, 14 aa, Homo sapiens
  CDR3 for beta chain variable domain of TCR clone 322519 (TRBV20-1, TRBJ1-5)
CSARDDRGNQPQHF

SEQ ID NO: 645039 - protein, 14 aa, Homo sapiens
  CDR3 for alpha chain variable domain of TCR clone 322520 (TRAV12-2, TRAJ17)
CAVLFKAAGNKLTF

SEQ ID NO: 645040 - protein, 20 aa, Homo sapiens
  CDR3 for beta chain variable domain of TCR clone 322520 (TRBV19, TRBJ2-1)
CASRISRTVASTRLNNEQFF

SEQ ID NO: 645041 - protein, 15 aa, Homo sapiens
  CDR3 for alpha chain variable domain of TCR clone 322521 (TRAV8-2, TRAJ40)
CVVSDRGSGTYKYIF

SEQ ID NO: 645042 - protein, 18 aa, Homo sapiens
  CDR3 for beta chain variable domain of TCR clone 322521 (TRBV11-2, TRBJ2-3)
CASSLGGASRGAPNTQYF

SEQ ID NO: 645043 - protein, 14 aa, Homo sapiens
  CDR3 for alpha chain variable domain of TCR clone 322522 (TRAV20, TRAJ13)
CAVQVSGGYQKVTF

SEQ ID NO: 645044 - protein, 16 aa, Homo sapiens
  CDR3 for beta chain variable domain of TCR clone 322522 (TRBV28, TRBJ2-7)
CASSLFFETGGPEQYF

SEQ ID NO: 645045 - protein, 14 aa, Homo sapiens
  CDR3 for alpha chain variable domain of TCR clone 322523 (TRAV12-2, TRAJ13)
CAVKKTGGYQKVTF

SEQ ID NO: 645046 - protein, 12 aa, Homo sapiens
  CDR3 for beta chain variable domain of TCR clone 322523 (TRBV27, TRBJ2-2)
CASKLFTGELFF

SEQ ID NO: 645047 - protein, 19 aa, Homo sapiens
  CDR3 for alpha chain variable domain of TCR clone 322524 (TRAV1-2, TRAJ26)
CLLPLCCERPVNYGQNFVF

SEQ ID NO: 645048 - protein, 13 aa, Homo sapiens
  CDR3 for beta chain variable domain of TCR clone 322524 (TRBV19, TRBJ1-2)
CASSQGQVYGYTF

SEQ ID NO: 645049 - protein, 11 aa, Homo sapiens
  CDR3 for alpha chain variable domain of TCR clone 322525 (TRAV17, TRAJ9)
CGFTGGFKTIF

SEQ ID NO: 645050 - protein, 14 aa, Homo sapiens
  CDR3 for beta chain variable domain of TCR clone 322525 (TRBV11-2, TRBJ2-5)
CASRRTGGIETQYF

SEQ ID NO: 645051 - protein, 15 aa, Homo sapiens
  CDR3 for alpha chain variable domain of TCR clone 322526 (TRAV13-1, TRAJ44)
CAASRGGGTASKLTF

SEQ ID NO: 645052 - protein, 14 aa, Homo sapiens
  CDR3 for beta chain variable domain of TCR clone 322526 (TRBV7-2, TRBJ2-5)
CGSSPRGSSETQYF

SEQ ID NO: 645053 - protein, 14 aa, Homo sapiens
  CDR3 for alpha chain variable domain of TCR clone 322527 (TRAV12-2, TRAJ40)
CAVKIPSGTYKYNF

SEQ ID NO: 645054 - protein, 17 aa, Homo sapiens
  CDR3 for beta chain variable domain of TCR clone 322527 (TRBV28, TRBJ2-5)
CASSRQGGLAGAETQYF

SEQ ID NO: 645055 - protein, 12 aa, Homo sapiens
  CDR3 for alpha chain variable domain of TCR clone 322528 (TRAV3, TRAJ31)
CAVSDGNARLMF

SEQ ID NO: 645056 - protein, 18 aa, Homo sapiens
  CDR3 for beta chain variable domain of TCR clone 322528 (TRBV7-2, TRBJ2-3)
CASSLKREGSGITDTQHF

SEQ ID NO: 645057 - protein, 16 aa, Homo sapiens
  CDR3 for alpha chain variable domain of TCR clone 322529 (TRAV14/DV4, TRAJ53)
CAMREGGGGSNYKPTC

SEQ ID NO: 645058 - protein, 18 aa, Homo sapiens
  CDR3 for beta chain variable domain of TCR clone 322529 (TRBV18, TRBJ1-3)
CASSPRGGAGPSGNTIYF

SEQ ID NO: 645059 - protein, 13 aa, Homo sapiens
  CDR3 for alpha chain variable domain of TCR clone 322530 (TRAV35, TRAJ22)
CTGLSGSARQLTF

SEQ ID NO: 645060 - protein, 16 aa, Homo sapiens
  CDR3 for beta chain variable domain of TCR clone 322530 (TRBV7-9, TRBJ2-1)
CASSLVLTGQGNEQFF

SEQ ID NO: 645061 - protein, 15 aa, Homo sapiens
  CDR3 for alpha chain variable domain of TCR clone 322531 (TRAV38-1, TRAJ57)
CAFMDSQGGSEKLVF

SEQ ID NO: 645062 - protein, 16 aa, Homo sapiens
  CDR3 for beta chain variable domain of TCR clone 322531 (TRBV10-3, TRBJ2-1)
CAIRGGGRGDYNEQCV

SEQ ID NO: 645063 - protein, 13 aa, Homo sapiens
  CDR3 for alpha chain variable domain of TCR clone 322532 (TRAV12-3, TRAJ43)
CAMIRPNNNDMRF

SEQ ID NO: 645064 - protein, 15 aa, Homo sapiens
  CDR3 for beta chain variable domain of TCR clone 322532 (TRBV11-3, TRBJ2-5)
CASSDTSGGIETQYF

SEQ ID NO: 645065 - protein, 14 aa, Homo sapiens
  CDR3 for alpha chain variable domain of TCR clone 322533 (TRAV12-1, TRAJ22)
CVVTTSGSARQLTF

SEQ ID NO: 645066 - protein, 14 aa, Homo sapiens
  CDR3 for beta chain variable domain of TCR clone 322533 (TRBV7-2, TRBJ2-7)
CASRSQGAAYEQYF

SEQ ID NO: 645067 - protein, 12 aa, Homo sapiens
  CDR3 for alpha chain variable domain of TCR clone 322534 (TRAV12-3, TRAJ41)
CAMSYSGYALNF

SEQ ID NO: 645068 - protein, 13 aa, Homo sapiens
  CDR3 for beta chain variable domain of TCR clone 322534 (TRBV7-3, TRBJ2-1)
CASSLDSYNKQFF

SEQ ID NO: 645069 - protein, 13 aa, Homo sapiens
  CDR3 for alpha chain variable domain of TCR clone 322535 (TRAV26-2, TRAJ57)
CILSRGGSEKLVF

SEQ ID NO: 645070 - protein, 16 aa, Homo sapiens
  CDR3 for beta chain variable domain of TCR clone 322535 (TRBV18, TRBJ1-5)
CASSPRPGGGNQPQHF

SEQ ID NO: 645071 - protein, 18 aa, Homo sapiens
  CDR3 for alpha chain variable domain of TCR clone 322536 (TRAV12-3, TRAJ52)
CAMSRTNAGGTSYGKLTF

SEQ ID NO: 645072 - protein, 13 aa, Homo sapiens
  CDR3 for beta chain variable domain of TCR clone 322536 (TRBV12-5, TRBJ2-3)
CASGDRQSDTQYF

SEQ ID NO: 645073 - protein, 13 aa, Homo sapiens
  CDR3 for alpha chain variable domain of TCR clone 322537 (TRAV12-3, TRAJ43)
CAMIRPNNNDMRF

SEQ ID NO: 645074 - protein, 15 aa, Homo sapiens
  CDR3 for beta chain variable domain of TCR clone 322537 (TRBV13, TRBJ1-2)
CASSLGRQPGYGYTF

SEQ ID NO: 645075 - protein, 14 aa, Homo sapiens
  CDR3 for alpha chain variable domain of TCR clone 322538 (TRAV1-2, TRAJ16)
CAVNRFSDGQKLLF

SEQ ID NO: 645076 - protein, 15 aa, Homo sapiens
  CDR3 for beta chain variable domain of TCR clone 322538 (TRBV5-1, TRBJ2-3)
CASSVTSVSTDTQYF

SEQ ID NO: 645077 - protein, 15 aa, Homo sapiens
  CDR3 for alpha chain variable domain of TCR clone 322539 (TRAV13-2, TRAJ5)
CAENPHWTGRRALTF

SEQ ID NO: 645078 - protein, 16 aa, Homo sapiens
  CDR3 for beta chain variable domain of TCR clone 322539 (TRBV7-9, TRBJ1-3)
GASSQTSGPRMGTIYF

SEQ ID NO: 645079 - protein, 21 aa, Homo sapiens
  CDR3 for alpha chain variable domain of TCR clone 322540 (TRAV34, TRAJ44)
PAMQASTSVEQTTGTASKLTF

SEQ ID NO: 645080 - protein, 11 aa, Homo sapiens
  CDR3 for beta chain variable domain of TCR clone 322540 (TRBV12-4, TRBJ2-3)
WASTATDTQYF

SEQ ID NO: 645081 - protein, 21 aa, Homo sapiens
  CDR3 for alpha chain variable domain of TCR clone 322541 (TRAV8-3, TRAJ10)
CAVGHTHGRRKQTHLWDRHTA

SEQ ID NO: 645082 - protein, 10 aa, Homo sapiens
  CDR3 for beta chain variable domain of TCR clone 322541 (TRBV20-1, TRBJ2-5)
CRARFETQYF

SEQ ID NO: 645083 - protein, 15 aa, Homo sapiens
  CDR3 for alpha chain variable domain of TCR clone 322542 (TRAV13-1, TRAJ32)
CAASIYGGATNKLIF

SEQ ID NO: 645084 - protein, 17 aa, Homo sapiens
  CDR3 for beta chain variable domain of TCR clone 322542 (TRBV7-3, TRBJ2-5)
CASSLGSGRIGSETQYF

SEQ ID NO: 645085 - protein, 14 aa, Homo sapiens
  CDR3 for alpha chain variable domain of TCR clone 322543 (TRAV12-3, TRAJ15)
CAMIPPQAATALIF

SEQ ID NO: 645086 - protein, 14 aa, Homo sapiens
  CDR3 for beta chain variable domain of TCR clone 322543 (TRBV20-1, TRBJ2-2)
CSARRRLATGELFF

SEQ ID NO: 645087 - protein, 14 aa, Homo sapiens
  CDR3 for alpha chain variable domain of TCR clone 322544 (TRAV1-2, TRAJ16)
CAVNRFSDGKKLLF

SEQ ID NO: 645088 - protein, 14 aa, Homo sapiens
  CDR3 for beta chain variable domain of TCR clone 322544 (TRBV4-1, TRBJ2-2)
CASSQAVNTGELFF

SEQ ID NO: 645089 - protein, 14 aa, Homo sapiens
  CDR3 for alpha chain variable domain of TCR clone 322545 (TRAV35, TRAJ38)
CAGSNAGNNRKLIW

SEQ ID NO: 645090 - protein, 14 aa, Homo sapiens
  CDR3 for beta chain variable domain of TCR clone 322545 (TRBV19, TRBJ1-5)
YASSLSGGSQPQHF

SEQ ID NO: 645091 - protein, 13 aa, Homo sapiens
  CDR3 for alpha chain variable domain of TCR clone 322546 (TRAV23/DV6, TRAJ34)
CAAIENNTDKLIF

SEQ ID NO: 645092 - protein, 14 aa, Homo sapiens
  CDR3 for beta chain variable domain of TCR clone 322546 (TRBV4-1, TRBJ2-2)
CASSQAVNTGELFF

SEQ ID NO: 645093 - protein, 13 aa, Homo sapiens
  CDR3 for alpha chain variable domain of TCR clone 322547 (TRAV23/DV6, TRAJ34)
CAAIENNTDKLIF

SEQ ID NO: 645094 - protein, 18 aa, Homo sapiens
  CDR3 for beta chain variable domain of TCR clone 322547 (TRBV20-1, TRBJ2-6)
CSAETTTTHGSGANVLTF

SEQ ID NO: 645095 - protein, 15 aa, Homo sapiens
  CDR3 for alpha chain variable domain of TCR clone 322548 (TRAV17, TRAJ57)
CAKGPSQGGSEKLVF

SEQ ID NO: 645096 - protein, 14 aa, Homo sapiens
  CDR3 for beta chain variable domain of TCR clone 322548 (TRBV12-5, TRBJ2-5)
CASGSRTHQETQYF

SEQ ID NO: 645097 - protein, 10 aa, Homo sapiens
  CDR3 for alpha chain variable domain of TCR clone 322549 (TRAV21, TRAJ31)
CAVDNARLMF

SEQ ID NO: 645098 - protein, 16 aa, Homo sapiens
  CDR3 for beta chain variable domain of TCR clone 322549 (TRBV13, TRBJ2-2)
CASSEVFGANTGELFF

SEQ ID NO: 645099 - protein, 15 aa, Homo sapiens
  CDR3 for alpha chain variable domain of TCR clone 322550 (TRAV35, TRAJ23)
CAGQRGYNQGGKLIF

SEQ ID NO: 645100 - protein, 16 aa, Homo sapiens
  CDR3 for beta chain variable domain of TCR clone 322550 (TRBV27, TRBJ2-1)
CASSSRLAGNYKEQFF

SEQ ID NO: 645101 - protein, 13 aa, Homo sapiens
  CDR3 for alpha chain variable domain of TCR clone 322551 (TRAV2, TRAJ15)
CAVASQAGTALIF

SEQ ID NO: 645102 - protein, 13 aa, Homo sapiens
  CDR3 for beta chain variable domain of TCR clone 322551 (TRBV7-6, TRBJ1-1)
CASSLAGYTEAFF

SEQ ID NO: 645103 - protein, 12 aa, Homo sapiens
  CDR3 for alpha chain variable domain of TCR clone 322552 (TRAV12-3, TRAJ17)
CAMTLTGNKLTF

SEQ ID NO: 645104 - protein, 15 aa, Homo sapiens
  CDR3 for beta chain variable domain of TCR clone 322552 (TRBV20-1, TRBJ2-7)
GSARERGSGMDEQYF

SEQ ID NO: 645105 - protein, 16 aa, Homo sapiens
  CDR3 for alpha chain variable domain of TCR clone 322553 (TRAV26-1, TRAJ40)
CIVRGSPTSGTYKYIF

SEQ ID NO: 645106 - protein, 14 aa, Homo sapiens
  CDR3 for beta chain variable domain of TCR clone 322553 (TRBV5-1, TRBJ1-4)
CASSSGQGGEKLFF

SEQ ID NO: 645107 - protein, 15 aa, Homo sapiens
  CDR3 for alpha chain variable domain of TCR clone 322554 (TRAV26-1, TRAJ23)
CIVRVAVYQGGKLIF

SEQ ID NO: 645108 - protein, 18 aa, Homo sapiens
  CDR3 for beta chain variable domain of TCR clone 322554 (TRBV28, TRBJ2-1)
CASSSTSGRANSYNEQFF

SEQ ID NO: 645109 - protein, 14 aa, Homo sapiens
  CDR3 for alpha chain variable domain of TCR clone 322555 (TRAV17, TRAJ57)
CATDPQGGSEKLVL

SEQ ID NO: 645110 - protein, 18 aa, Homo sapiens
  CDR3 for beta chain variable domain of TCR clone 322555 (TRBV6-6, TRBJ1-3)
CASSYSKWDSISGNTIYF

SEQ ID NO: 645111 - protein, 12 aa, Homo sapiens
  CDR3 for alpha chain variable domain of TCR clone 322556 (TRAV8-3, TRAJ26)
CAVGAGGQSFVF

SEQ ID NO: 645112 - protein, 13 aa, Homo sapiens
  CDR3 for beta chain variable domain of TCR clone 322556 (TRBV12-4, TRBJ1-2)
CASSLRQGKGYTF

SEQ ID NO: 645113 - protein, 12 aa, Homo sapiens
  CDR3 for alpha chain variable domain of TCR clone 322557 (TRAV13-1, TRAJ49)
CAASPMGNQFYF

SEQ ID NO: 645114 - protein, 15 aa, Homo sapiens
  CDR3 for beta chain variable domain of TCR clone 322557 (TRBV19, TRBJ1-2)
CASSVGQVLNYGYTF

SEQ ID NO: 645115 - protein, 15 aa, Homo sapiens
  CDR3 for alpha chain variable domain of TCR clone 322558 (TRAV12-2, TRAJ53)
CAVNGGGGSNYKLTF

SEQ ID NO: 645116 - protein, 17 aa, Homo sapiens
  CDR3 for beta chain variable domain of TCR clone 322558 (TRBV7-3, TRBJ2-3)
CASSLMKRMRRADTQYF

SEQ ID NO: 645117 - protein, 15 aa, Homo sapiens
  CDR3 for alpha chain variable domain of TCR clone 322559 (TRAV17, TRAJ56)
CATDANTGANSKLTF

SEQ ID NO: 645118 - protein, 14 aa, Homo sapiens
  CDR3 for beta chain variable domain of TCR clone 322559 (TRBV12-5, TRBJ2-5)
CASGSRTHQETQYF

SEQ ID NO: 645119 - protein, 12 aa, Homo sapiens
  CDR3 for alpha chain variable domain of TCR clone 322560 (TRAV12-3, TRAJ43)
CAISSNNNDMRS

SEQ ID NO: 645120 - protein, 15 aa, Homo sapiens
  CDR3 for beta chain variable domain of TCR clone 322560 (TRBV27, TRBJ1-4)
CASSPRHATNEKLFF

SEQ ID NO: 645121 - protein, 15 aa, Homo sapiens
  CDR3 for alpha chain variable domain of TCR clone 322561 (TRAV26-1, TRAJ48)
CIARWSWFGNEKLTF

SEQ ID NO: 645122 - protein, 15 aa, Homo sapiens
  CDR3 for beta chain variable domain of TCR clone 322561 (TRBV20-1, TRBJ2-7)
CSAESGTSGAYEQYF

SEQ ID NO: 645123 - protein, 13 aa, Homo sapiens
  CDR3 for alpha chain variable domain of TCR clone 322562 (TRAV9-2, TRAJ53)
CALRGGSNYKLTF

SEQ ID NO: 645124 - protein, 15 aa, Homo sapiens
  CDR3 for beta chain variable domain of TCR clone 322562 (TRBV7-2, TRBJ2-1)
CASSSGLAGGNEQFF

SEQ ID NO: 645125 - protein, 15 aa, Homo sapiens
  CDR3 for alpha chain variable domain of TCR clone 322563 (TRAV3, TRAJ5)
CAVRDLDTGRRALTF

SEQ ID NO: 645126 - protein, 13 aa, Homo sapiens
  CDR3 for beta chain variable domain of TCR clone 322563 (TRBV12-4, TRBJ2-7)
CASSPTETSAQYF

SEQ ID NO: 645127 - protein, 13 aa, Homo sapiens
  CDR3 for alpha chain variable domain of TCR clone 322564 (TRAV17, TRAJ5)
CAPMDTGRRVLTF

SEQ ID NO: 645128 - protein, 13 aa, Homo sapiens
  CDR3 for beta chain variable domain of TCR clone 322564 (TRBV7-9, TRBJ1-2)
CASSLKQNYGYTF

SEQ ID NO: 645129 - protein, 16 aa, Homo sapiens
  CDR3 for alpha chain variable domain of TCR clone 322565 (TRAV8-3, TRAJ13)
CAVGAYPSGGYQKVTF

SEQ ID NO: 645130 - protein, 14 aa, Homo sapiens
  CDR3 for beta chain variable domain of TCR clone 322565 (TRBV7-9, TRBJ1-1)
CASSAQTMNTEAFF

SEQ ID NO: 645131 - protein, 15 aa, Homo sapiens
  CDR3 for alpha chain variable domain of TCR clone 322566 (TRAV23/DV6, TRAJ44)
CAARLLTGTASKLTS

SEQ ID NO: 645132 - protein, 15 aa, Homo sapiens
  CDR3 for beta chain variable domain of TCR clone 322566 (TRBV12-4, TRBJ1-5)
CASTLNRVSNQPQHF

SEQ ID NO: 645133 - protein, 15 aa, Homo sapiens
  CDR3 for alpha chain variable domain of TCR clone 322567 (TRAV17, TRAJ57)
CATGPSQGGSEKLVF

SEQ ID NO: 645134 - protein, 16 aa, Homo sapiens
  CDR3 for beta chain variable domain of TCR clone 322567 (TRBV20-1, TRBJ2-1)
CSARDLKQGMNNEQFF

SEQ ID NO: 645135 - protein, 12 aa, Homo sapiens
  CDR3 for alpha chain variable domain of TCR clone 322568 (TRAV13-2, TRAJ23)
CAERHRGGKLIF

SEQ ID NO: 645136 - protein, 14 aa, Homo sapiens
  CDR3 for beta chain variable domain of TCR clone 322568 (TRBV7-9, TRBJ2-5)
CASSLVENRETQYF

SEQ ID NO: 645137 - protein, 14 aa, Homo sapiens
  CDR3 for alpha chain variable domain of TCR clone 322569 (TRAV12-3, TRAJ58)
CAMSTETSGSRLTS

SEQ ID NO: 645138 - protein, 17 aa, Homo sapiens
  CDR3 for beta chain variable domain of TCR clone 322569 (TRBV13, TRBJ2-3)
CASSLSRVAGGRNTQYF

SEQ ID NO: 645139 - protein, 14 aa, Homo sapiens
  CDR3 for alpha chain variable domain of TCR clone 322570 (TRAV12-2, TRAJ40)
CAVKIPSGTYKYNF

SEQ ID NO: 645140 - protein, 12 aa, Homo sapiens
  CDR3 for beta chain variable domain of TCR clone 322570 (TRBV11-2, TRBJ2-2)
CASSLGGGELFF

SEQ ID NO: 645141 - protein, 13 aa, Homo sapiens
  CDR3 for alpha chain variable domain of TCR clone 322571 (TRAV3, TRAJ21)
FALREPDFNKFYF

SEQ ID NO: 645142 - protein, 15 aa, Homo sapiens
  CDR3 for beta chain variable domain of TCR clone 322571 (TRBV3-1, TRBJ2-7)
CASSQAPSGSYEQYF

SEQ ID NO: 645143 - protein, 11 aa, Homo sapiens
  CDR3 for alpha chain variable domain of TCR clone 322572 (TRAV1-2, TRAJ31)
CAVNNNARLMF

SEQ ID NO: 645144 - protein, 15 aa, Homo sapiens
  CDR3 for beta chain variable domain of TCR clone 322572 (TRBV20-1, TRBJ1-1)
CSASRGVTGNTEAVF

SEQ ID NO: 645145 - protein, 14 aa, Homo sapiens
  CDR3 for alpha chain variable domain of TCR clone 322573 (TRAV27, TRAJ22)
CAGVVPGSARQLTF

SEQ ID NO: 645146 - protein, 15 aa, Homo sapiens
  CDR3 for beta chain variable domain of TCR clone 322573 (TRBV13, TRBJ1-5)
CASSFGQGGVQPQHF

SEQ ID NO: 645147 - protein, 14 aa, Homo sapiens
  CDR3 for alpha chain variable domain of TCR clone 322574 (TRAV26-1, TRAJ40)
CIVRLLSGTYKYIF

SEQ ID NO: 645148 - protein, 14 aa, Homo sapiens
  CDR3 for beta chain variable domain of TCR clone 322574 (TRBV25-1, TRBJ1-1)
CASTHLGGNTEAFF

SEQ ID NO: 645149 - protein, 13 aa, Homo sapiens
  CDR3 for alpha chain variable domain of TCR clone 322575 (TRAV1-2, TRAJ9)
CAALNTGGFKTIF

SEQ ID NO: 645150 - protein, 14 aa, Homo sapiens
  CDR3 for beta chain variable domain of TCR clone 322575 (TRBV13, TRBJ2-3)
CASSSGAPTDTQYF

SEQ ID NO: 645151 - protein, 11 aa, Homo sapiens
  CDR3 for alpha chain variable domain of TCR clone 322576 (TRAV17, TRAJ31)
CATSNNARLMF

SEQ ID NO: 645152 - protein, 14 aa, Homo sapiens
  CDR3 for beta chain variable domain of TCR clone 322576 (TRBV18, TRBJ2-7)
CASSPRGGAYERYF

SEQ ID NO: 645153 - protein, 13 aa, Homo sapiens
  CDR3 for alpha chain variable domain of TCR clone 322577 (TRAV2, TRAJ21)
CAVEDLNFNKFYF

SEQ ID NO: 645154 - protein, 14 aa, Homo sapiens
  CDR3 for beta chain variable domain of TCR clone 322577 (TRBV7-9, TRBJ1-2)
CASSLVQINYGYTF

SEQ ID NO: 645155 - protein, 15 aa, Homo sapiens
  CDR3 for alpha chain variable domain of TCR clone 322578 (TRAV12-1, TRAJ41)
CVVNGDSNSGYALNF

SEQ ID NO: 645156 - protein, 15 aa, Homo sapiens
  CDR3 for beta chain variable domain of TCR clone 322578 (TRBV7-2, TRBJ1-5)
CASSSTGVDNQPQHF

SEQ ID NO: 645157 - protein, 14 aa, Homo sapiens
  CDR3 for alpha chain variable domain of TCR clone 322579 (TRAV3, TRAJ9)
CAVRLNTGGLKTIF

SEQ ID NO: 645158 - protein, 14 aa, Homo sapiens
  CDR3 for beta chain variable domain of TCR clone 322579 (TRBV20-1, TRBJ1-1)
CSAQTRIGGTEAFF

SEQ ID NO: 645159 - protein, 17 aa, Homo sapiens
  CDR3 for alpha chain variable domain of TCR clone 322580 (TRAV26-1, TRAJ58)
CIVRVGAEETSGSRLTF

SEQ ID NO: 645160 - protein, 17 aa, Homo sapiens
  CDR3 for beta chain variable domain of TCR clone 322580 (TRBV9, TRBJ2-2)
CASSVGGQGTDTGELFF

SEQ ID NO: 645161 - protein, 13 aa, Homo sapiens
  CDR3 for alpha chain variable domain of TCR clone 322581 (TRAV2, TRAJ40)
CAVVTSGTYKYIF

SEQ ID NO: 645162 - protein, 15 aa, Homo sapiens
  CDR3 for beta chain variable domain of TCR clone 322581 (TRBV19, TRBJ1-5)
CAGSIVWADNQPQHF

SEQ ID NO: 645163 - protein, 17 aa, Homo sapiens
  CDR3 for alpha chain variable domain of TCR clone 322582 (TRAV3, TRAJ6)
CAVRDGPRAGGSYIPTF

SEQ ID NO: 645164 - protein, 14 aa, Homo sapiens
  CDR3 for beta chain variable domain of TCR clone 322582 (TRBV7-2, TRBJ2-7)
CASSPKTSVYKQYF

SEQ ID NO: 645165 - protein, 10 aa, Homo sapiens
  CDR3 for alpha chain variable domain of TCR clone 322583 (TRAV1-2, TRAJ31)
CAFFDARLMF

SEQ ID NO: 645166 - protein, 13 aa, Homo sapiens
  CDR3 for beta chain variable domain of TCR clone 322583 (TRBV7-9, TRBJ1-2)
CASSLKQNYGYSF

SEQ ID NO: 645167 - protein, 13 aa, Homo sapiens
  CDR3 for alpha chain variable domain of TCR clone 322584 (TRAV8-3, TRAJ43)
CAVGSDNNNDMRF

SEQ ID NO: 645168 - protein, 12 aa, Homo sapiens
  CDR3 for beta chain variable domain of TCR clone 322584 (TRBV7-2, TRBJ1-6)
CASSLSSSPLHF

SEQ ID NO: 645169 - protein, 12 aa, Homo sapiens
  CDR3 for alpha chain variable domain of TCR clone 322585 (TRAV17, TRAJ47)
CTPTVRGNKLVF

SEQ ID NO: 645170 - protein, 13 aa, Homo sapiens
  CDR3 for beta chain variable domain of TCR clone 322585 (TRBV7-2, TRBJ2-4)
CASSLAEGGIQYF

SEQ ID NO: 645171 - protein, 13 aa, Homo sapiens
  CDR3 for alpha chain variable domain of TCR clone 322586 (TRAV21, TRAJ10)
CAVPTGGGNKLTL

SEQ ID NO: 645172 - protein, 22 aa, Homo sapiens
  CDR3 for beta chain variable domain of TCR clone 322586 (TRBV19, TRBJ2-1)
CASSVRDRVTGTSGRIYNEQFF

SEQ ID NO: 645173 - protein, 18 aa, Homo sapiens
  CDR3 for alpha chain variable domain of TCR clone 322587 (TRAV21, TRAJ52)
CAVRPSPAGGISYGKLTC

SEQ ID NO: 645174 - protein, 14 aa, Homo sapiens
  CDR3 for beta chain variable domain of TCR clone 322587 (TRBV4-1, TRBJ2-2)
CASSQAVNTGELFF

SEQ ID NO: 645175 - protein, 14 aa, Homo sapiens
  CDR3 for alpha chain variable domain of TCR clone 322588 (TRAV12-1, TRAJ17)
CLVNPKAAGNKLTF

SEQ ID NO: 645176 - protein, 16 aa, Homo sapiens
  CDR3 for beta chain variable domain of TCR clone 322588 (TRBV20-1, TRBJ2-1)
CSAGASGYSSYNEQFF

SEQ ID NO: 645177 - protein, 13 aa, Homo sapiens
  CDR3 for alpha chain variable domain of TCR clone 322589 (TRAV12-2, TRAJ37)
CAVSSGNTGKLIF

SEQ ID NO: 645178 - protein, 17 aa, Homo sapiens
  CDR3 for beta chain variable domain of TCR clone 322589 (TRBV11-2, TRBJ2-1)
CASSLYPPGVEYNEQFF

SEQ ID NO: 645179 - protein, 14 aa, Homo sapiens
  CDR3 for alpha chain variable domain of TCR clone 322590 (TRAV26-1, TRAJ38)
CIADNAGHNRKLNW

SEQ ID NO: 645180 - protein, 13 aa, Homo sapiens
  CDR3 for beta chain variable domain of TCR clone 322590 (TRBV20-1, TRBJ1-1)
CSARGGGNTEAFF

SEQ ID NO: 645181 - protein, 17 aa, Homo sapiens
  CDR3 for alpha chain variable domain of TCR clone 322591 (TRAV8-4, TRAJ11)
CAVSDRGENSGYSTLTF

SEQ ID NO: 645182 - protein, 13 aa, Homo sapiens
  CDR3 for beta chain variable domain of TCR clone 322591 (TRBV20-1, TRBJ2-1)
QSKRRGLLNEQFF

SEQ ID NO: 645183 - protein, 14 aa, Homo sapiens
  CDR3 for alpha chain variable domain of TCR clone 322592 (TRAV1-1, TRAJ30)
CAVRSFNRDDKIIF

SEQ ID NO: 645184 - protein, 14 aa, Homo sapiens
  CDR3 for beta chain variable domain of TCR clone 322592 (TRBV7-8, TRBJ2-3)
CASSLEAGTDTQYF

SEQ ID NO: 645185 - protein, 16 aa, Homo sapiens
  CDR3 for alpha chain variable domain of TCR clone 322593 (TRAV21, TRAJ52)
CAVTNAGGTSYGKLTF

SEQ ID NO: 645186 - protein, 12 aa, Homo sapiens
  CDR3 for beta chain variable domain of TCR clone 322593 (TRBV11-2, TRBJ2-2)
CASSLPTGELFF

SEQ ID NO: 645187 - protein, 14 aa, Homo sapiens
  CDR3 for alpha chain variable domain of TCR clone 322594 (TRAV12-1, TRAJ17)
CVVNYKAAGNKLTF

SEQ ID NO: 645188 - protein, 15 aa, Homo sapiens
  CDR3 for beta chain variable domain of TCR clone 322594 (TRBV10-3, TRBJ2-3)
CAISLTSGGTDTQYF

SEQ ID NO: 645189 - protein, 14 aa, Homo sapiens
  CDR3 for alpha chain variable domain of TCR clone 322595 (TRAV4, TRAJ9)
CLVGSGTGGFKTIF

SEQ ID NO: 645190 - protein, 12 aa, Homo sapiens
  CDR3 for beta chain variable domain of TCR clone 322595 (TRBV11-2, TRBJ2-1)
CASSPGDNEQFF

SEQ ID NO: 645191 - protein, 19 aa, Homo sapiens
  CDR3 for alpha chain variable domain of TCR clone 322596 (TRAV29/DV5, TRAJ49)
CSVLLCSKLTVDTGNQFYF

SEQ ID NO: 645192 - protein, 15 aa, Homo sapiens
  CDR3 for beta chain variable domain of TCR clone 322596 (TRBV7-3, TRBJ2-2)
CASSETGQGTGELLF

SEQ ID NO: 645193 - protein, 15 aa, Homo sapiens
  CDR3 for alpha chain variable domain of TCR clone 322597 (TRAV26-1, TRAJ3)
CIVRSGYGSASKIIF

SEQ ID NO: 645194 - protein, 14 aa, Homo sapiens
  CDR3 for beta chain variable domain of TCR clone 322597 (TRBV13, TRBJ2-5)
CASYRRLAEETQSF

SEQ ID NO: 645195 - protein, 15 aa, Homo sapiens
  CDR3 for alpha chain variable domain of TCR clone 322598 (TRAV1-2, TRAJ28)
CAVQDSGAGSYQLTF

SEQ ID NO: 645196 - protein, 15 aa, Homo sapiens
  CDR3 for beta chain variable domain of TCR clone 322598 (TRBV28, TRBJ2-5)
CASSSGRTIQETQYF

SEQ ID NO: 645197 - protein, 15 aa, Homo sapiens
  CDR3 for alpha chain variable domain of TCR clone 322599 (TRAV23/DV6, TRAJ42)
CAARAYGGSQGNLIF

SEQ ID NO: 645198 - protein, 13 aa, Homo sapiens
  CDR3 for beta chain variable domain of TCR clone 322599 (TRBV7-2, TRBJ1-5)
CASSTQGSQPQHF

SEQ ID NO: 645199 - protein, 18 aa, Homo sapiens
  CDR3 for alpha chain variable domain of TCR clone 322600 (TRAV21, TRAJ52)
CAVRPSPAGGTSYGKPTF

SEQ ID NO: 645200 - protein, 15 aa, Homo sapiens
  CDR3 for beta chain variable domain of TCR clone 322600 (TRBV7-9, TRBJ2-7)
CASSSSGLAVYEQYF

SEQ ID NO: 645201 - protein, 16 aa, Homo sapiens
  CDR3 for alpha chain variable domain of TCR clone 322601 (TRAV3, TRAJ37)
CAVTPHGSGNTGKLIF

SEQ ID NO: 645202 - protein, 16 aa, Homo sapiens
  CDR3 for beta chain variable domain of TCR clone 322601 (TRBV9, TRBJ1-2)
CASSVEEKVSPYGYTF

SEQ ID NO: 645203 - protein, 12 aa, Homo sapiens
  CDR3 for alpha chain variable domain of TCR clone 322602 (TRAV1-2, TRAJ29)
CAVPSGNTPLFF

SEQ ID NO: 645204 - protein, 13 aa, Homo sapiens
  CDR3 for beta chain variable domain of TCR clone 322602 (TRBV5-4, TRBJ1-1)
CASSVDLGTEAFF

SEQ ID NO: 645205 - protein, 14 aa, Homo sapiens
  CDR3 for alpha chain variable domain of TCR clone 322603 (TRAV17, TRAJ45)
CATASGGGADGLTF

SEQ ID NO: 645206 - protein, 15 aa, Homo sapiens
  CDR3 for beta chain variable domain of TCR clone 322603 (TRBV11-2, TRBJ2-1)
CASSSNRGLMYEQFF

SEQ ID NO: 645207 - protein, 13 aa, Homo sapiens
  CDR3 for alpha chain variable domain of TCR clone 322604 (TRAV35, TRAJ36)
CAGPRIGANNLFF

SEQ ID NO: 645208 - protein, 15 aa, Homo sapiens
  CDR3 for beta chain variable domain of TCR clone 322604 (TRBV28, TRBJ2-5)
CASSPTWSYQETQYF

SEQ ID NO: 645209 - protein, 12 aa, Homo sapiens
  CDR3 for alpha chain variable domain of TCR clone 322605 (TRAV1-2, TRAJ33)
CAGLDSNYQLIW

SEQ ID NO: 645210 - protein, 14 aa, Homo sapiens
  CDR3 for beta chain variable domain of TCR clone 322605 (TRBV28, TRBJ2-5)
CASSLYRGTETQYF

SEQ ID NO: 645211 - protein, 15 aa, Homo sapiens
  CDR3 for alpha chain variable domain of TCR clone 322606 (TRAV12-1, TRAJ44)
CVVDEYTGTASKLTF

SEQ ID NO: 645212 - protein, 13 aa, Homo sapiens
  CDR3 for beta chain variable domain of TCR clone 322606 (TRBV10-3, TRBJ2-7)
CASKLAVNYEQYF

SEQ ID NO: 645213 - protein, 13 aa, Homo sapiens
  CDR3 for alpha chain variable domain of TCR clone 322607 (TRAV8-3, TRAJ5)
CAVGPRGRRALTF

SEQ ID NO: 645214 - protein, 14 aa, Homo sapiens
  CDR3 for beta chain variable domain of TCR clone 322607 (TRBV11-2, TRBJ2-3)
CASSRLARTDTQYF

SEQ ID NO: 645215 - protein, 15 aa, Homo sapiens
  CDR3 for alpha chain variable domain of TCR clone 322608 (TRAV23/DV6, TRAJ37)
CAAGEGSSNTGKLII

SEQ ID NO: 645216 - protein, 17 aa, Homo sapiens
  CDR3 for beta chain variable domain of TCR clone 322608 (TRBV20-1, TRBJ2-7)
CSATRAGGVAGVEEQYF

SEQ ID NO: 645217 - protein, 15 aa, Homo sapiens
  CDR3 for alpha chain variable domain of TCR clone 322609 (TRAV8-3, TRAJ32)
CAVGPYGGATNKLIF

SEQ ID NO: 645218 - protein, 14 aa, Homo sapiens
  CDR3 for beta chain variable domain of TCR clone 322609 (TRBV29-1, TRBJ2-2)
CSVLAETNTGEQFF

SEQ ID NO: 645219 - protein, 14 aa, Homo sapiens
  CDR3 for alpha chain variable domain of TCR clone 322610 (TRAV23/DV6, TRAJ11)
CAASLETGYSTLTF

SEQ ID NO: 645220 - protein, 13 aa, Homo sapiens
  CDR3 for beta chain variable domain of TCR clone 322610 (TRBV4-1, TRBJ2-5)
CASSLTRGETQYF

SEQ ID NO: 645221 - protein, 13 aa, Homo sapiens
  CDR3 for alpha chain variable domain of TCR clone 322611 (TRAV8-3, TRAJ30)
CAVGGWRDDKIIF

SEQ ID NO: 645222 - protein, 13 aa, Homo sapiens
  CDR3 for beta chain variable domain of TCR clone 322611 (TRBV20-1, TRBJ1-1)
QSPPADMNTEAFF

SEQ ID NO: 645223 - protein, 13 aa, Homo sapiens
  CDR3 for alpha chain variable domain of TCR clone 322612 (TRAV2, TRAJ21)
CAVEDLNFNKFYF

SEQ ID NO: 645224 - protein, 15 aa, Homo sapiens
  CDR3 for beta chain variable domain of TCR clone 322612 (TRBV28, TRBJ2-5)
CSSSPVQGSIETQYF

SEQ ID NO: 645225 - protein, 14 aa, Homo sapiens
  CDR3 for alpha chain variable domain of TCR clone 322613 (TRAV8-3, TRAJ4)
CAVGAAGGYNKLIF

SEQ ID NO: 645226 - protein, 15 aa, Homo sapiens
  CDR3 for beta chain variable domain of TCR clone 322613 (TRBV6-5, TRBJ2-1)
CASSYDAGAGNEQYF

SEQ ID NO: 645227 - protein, 16 aa, Homo sapiens
  CDR3 for alpha chain variable domain of TCR clone 322614 (TRAV27, TRAJ13)
CAGAKSDSGGYQKVTF

SEQ ID NO: 645228 - protein, 15 aa, Homo sapiens
  CDR3 for beta chain variable domain of TCR clone 322614 (TRBV6-5, TRBJ2-7)
CASSRTSGFSYEQYF

SEQ ID NO: 645229 - protein, 10 aa, Homo sapiens
  CDR3 for alpha chain variable domain of TCR clone 322615 (TRAV12-3, TRAJ49)
CAMNDDQFYF

SEQ ID NO: 645230 - protein, 12 aa, Homo sapiens
  CDR3 for beta chain variable domain of TCR clone 322615 (TRBV28, TRBJ2-7)
CASTGNHYEQYF

SEQ ID NO: 645231 - protein, 14 aa, Homo sapiens
  CDR3 for alpha chain variable domain of TCR clone 322616 (TRAV20, TRAJ42)
CAVQAGGSQGNLIF

SEQ ID NO: 645232 - protein, 13 aa, Homo sapiens
  CDR3 for beta chain variable domain of TCR clone 322616 (TRBV12-4, TRBJ1-2)
CASSLRQGKGYTF

SEQ ID NO: 645233 - protein, 12 aa, Homo sapiens
  CDR3 for alpha chain variable domain of TCR clone 322617 (TRAV13-1, TRAJ21)
CAAKEGFNKFYF

SEQ ID NO: 645234 - protein, 14 aa, Homo sapiens
  CDR3 for beta chain variable domain of TCR clone 322617 (TRBV5-8, TRBJ1-1)
CASSLDSRRDEAFF

SEQ ID NO: 645235 - protein, 15 aa, Homo sapiens
  CDR3 for alpha chain variable domain of TCR clone 322618 (TRAV21, TRAJ53)
CATLNSGGSNYKLTF

SEQ ID NO: 645236 - protein, 17 aa, Homo sapiens
  CDR3 for beta chain variable domain of TCR clone 322618 (TRBV5-1, TRBJ2-2)
CASSEKPNFANTGELFF

SEQ ID NO: 645237 - protein, 14 aa, Homo sapiens
  CDR3 for alpha chain variable domain of TCR clone 322619 (TRAV10, TRAJ48)
CVGGFHFGNEKLTF

SEQ ID NO: 645238 - protein, 13 aa, Homo sapiens
  CDR3 for beta chain variable domain of TCR clone 322619 (TRBV25-1, TRBJ2-5)
CASSESGRETQYF

SEQ ID NO: 645239 - protein, 15 aa, Homo sapiens
  CDR3 for alpha chain variable domain of TCR clone 322620 (TRAV26-2, TRAJ50)
CILRDEETSYDKVIF

SEQ ID NO: 645240 - protein, 16 aa, Homo sapiens
  CDR3 for beta chain variable domain of TCR clone 322620 (TRBV4-2, TRBJ1-1)
CASSQAGFGMNTEAFF

SEQ ID NO: 645241 - protein, 11 aa, Homo sapiens
  CDR3 for alpha chain variable domain of TCR clone 322621 (TRAV12-1, TRAJ33)
CVVNMNYQLIW

SEQ ID NO: 645242 - protein, 13 aa, Homo sapiens
  CDR3 for beta chain variable domain of TCR clone 322621 (TRBV4-2, TRBJ1-1)
CASSQAGNTEAFF

SEQ ID NO: 645243 - protein, 14 aa, Homo sapiens
  CDR3 for alpha chain variable domain of TCR clone 322622 (TRAV1-2, TRAJ16)
CAVNRFSDGQKLLF

SEQ ID NO: 645244 - protein, 15 aa, Homo sapiens
  CDR3 for beta chain variable domain of TCR clone 322622 (TRBV19, TRBJ2-7)
CASSIASGGFYEQYF

SEQ ID NO: 645245 - protein, 16 aa, Homo sapiens
  CDR3 for alpha chain variable domain of TCR clone 322623 (TRAV3, TRAJ37)
CAVRGKGSGNTGKLIF

SEQ ID NO: 645246 - protein, 12 aa, Homo sapiens
  CDR3 for beta chain variable domain of TCR clone 322623 (TRBV11-2, TRBJ2-2)
CASSLGVGELFF

SEQ ID NO: 645247 - protein, 12 aa, Homo sapiens
  CDR3 for alpha chain variable domain of TCR clone 322624 (TRAV8-3, TRAJ26)
CAGDNYGQNFFF

SEQ ID NO: 645248 - protein, 15 aa, Homo sapiens
  CDR3 for beta chain variable domain of TCR clone 322624 (TRBV6-5, TRBJ2-1)
CASSYDAGAGNEQFF

SEQ ID NO: 645249 - protein, 18 aa, Homo sapiens
  CDR3 for alpha chain variable domain of TCR clone 322625 (TRAV21, TRAJ52)
CAVRPSPAGGTSYGKLTF

SEQ ID NO: 645250 - protein, 14 aa, Homo sapiens
  CDR3 for beta chain variable domain of TCR clone 322625 (TRBV7-8, TRBJ2-7)
CASSLEAGLGEQYF

SEQ ID NO: 645251 - protein, 11 aa, Homo sapiens
  CDR3 for alpha chain variable domain of TCR clone 322626 (TRAV21, TRAJ48)
CAVDGNEKLNF

SEQ ID NO: 645252 - protein, 15 aa, Homo sapiens
  CDR3 for beta chain variable domain of TCR clone 322626 (TRBV2, TRBJ2-1)
CASSELAGSYNEQFF

SEQ ID NO: 645253 - protein, 13 aa, Homo sapiens
  CDR3 for alpha chain variable domain of TCR clone 322627 (TRAV13-1, TRAJ23)
CAASGRGGGKLIF

SEQ ID NO: 645254 - protein, 13 aa, Homo sapiens
  CDR3 for beta chain variable domain of TCR clone 322627 (TRBV7-9, TRBJ1-2)
CASSLKQNYGYTF

SEQ ID NO: 645255 - protein, 11 aa, Homo sapiens
  CDR3 for alpha chain variable domain of TCR clone 322628 (TRAV25, TRAJ26)
CAGLYGQNFVF

SEQ ID NO: 645256 - protein, 13 aa, Homo sapiens
  CDR3 for beta chain variable domain of TCR clone 322628 (TRBV10-3, TRBJ2-7)
CASKLAVNYEQYF

SEQ ID NO: 645257 - protein, 12 aa, Homo sapiens
  CDR3 for alpha chain variable domain of TCR clone 322629 (TRAV21, TRAJ42)
CAVGGSQGNLIF

SEQ ID NO: 645258 - protein, 15 aa, Homo sapiens
  CDR3 for beta chain variable domain of TCR clone 322629 (TRBV11-2, TRBJ2-1)
CASSLGTSGLNEQFF

SEQ ID NO: 645259 - protein, 13 aa, Homo sapiens
  CDR3 for alpha chain variable domain of TCR clone 322630 (TRAV35, TRAJ40)
CWHPISGTYKYIF

SEQ ID NO: 645260 - protein, 15 aa, Homo sapiens
  CDR3 for beta chain variable domain of TCR clone 322630 (TRBV25-1, TRBJ1-4)
CTSSPGDSTNEKLFF

SEQ ID NO: 645261 - protein, 12 aa, Homo sapiens
  CDR3 for alpha chain variable domain of TCR clone 322631 (TRAV17, TRAJ20)
CATDSNDYKLSF

SEQ ID NO: 645262 - protein, 12 aa, Homo sapiens
  CDR3 for beta chain variable domain of TCR clone 322631 (TRBV28, TRBJ2-7)
CASSGRPYEQYF

SEQ ID NO: 645263 - protein, 12 aa, Homo sapiens
  CDR3 for alpha chain variable domain of TCR clone 322632 (TRAV12-3, TRAJ17)
CAMTLTGSKLTF

SEQ ID NO: 645264 - protein, 15 aa, Homo sapiens
  CDR3 for beta chain variable domain of TCR clone 322632 (TRBV20-1, TRBJ2-7)
CSAGDRVSGMDEQYF

SEQ ID NO: 645265 - protein, 14 aa, Homo sapiens
  CDR3 for alpha chain variable domain of TCR clone 322633 (TRAV12-2, TRAJ53)
CHERGGGSNYKLTF

SEQ ID NO: 645266 - protein, 14 aa, Homo sapiens
  CDR3 for beta chain variable domain of TCR clone 322633 (TRBV19, TRBJ2-2)
CASSTLHRSGELFF

SEQ ID NO: 645267 - protein, 17 aa, Homo sapiens
  CDR3 for alpha chain variable domain of TCR clone 322634 (TRAV2, TRAJ22)
ILQEREADAAEQRQLTF

SEQ ID NO: 645268 - protein, 16 aa, Homo sapiens
  CDR3 for beta chain variable domain of TCR clone 322634 (TRBV2, TRBJ2-5)
CASSETQGVGEETQYF

SEQ ID NO: 645269 - protein, 12 aa, Homo sapiens
  CDR3 for alpha chain variable domain of TCR clone 322635 (TRAV23/DV6, TRAJ43)
SPLLLCSRRCSF

SEQ ID NO: 645270 - protein, 16 aa, Homo sapiens
  CDR3 for beta chain variable domain of TCR clone 322635 (TRBV18, TRBJ1-2)
CASSPPERVTIYGYTF

SEQ ID NO: 645271 - protein, 14 aa, Homo sapiens
  CDR3 for alpha chain variable domain of TCR clone 322636 (TRAV12-2, TRAJ9)
CAVNALEGGFKTIF

SEQ ID NO: 645272 - protein, 16 aa, Homo sapiens
  CDR3 for beta chain variable domain of TCR clone 322636 (TRBV19, TRBJ1-6)
CASSVAQVAGNSPLHF

SEQ ID NO: 645273 - protein, 14 aa, Homo sapiens
  CDR3 for alpha chain variable domain of TCR clone 322637 (TRAV27, TRAJ44)
CAASFTGTASKLTF

SEQ ID NO: 645274 - protein, 13 aa, Homo sapiens
  CDR3 for beta chain variable domain of TCR clone 322637 (TRBV27, TRBJ2-3)
CATSRGGLYTQYL

SEQ ID NO: 645275 - protein, 14 aa, Homo sapiens
  CDR3 for alpha chain variable domain of TCR clone 322638 (TRAV26-1, TRAJ38)
CIADNAGNNRKLIW

SEQ ID NO: 645276 - protein, 13 aa, Homo sapiens
  CDR3 for beta chain variable domain of TCR clone 322638 (TRBV7-9, TRBJ1-2)
CASILKQNYGYAF

SEQ ID NO: 645277 - protein, 15 aa, Homo sapiens
  CDR3 for alpha chain variable domain of TCR clone 322639 (TRAV1-2, TRAJ16)
VLDGLEEKDGQKLLF

SEQ ID NO: 645278 - protein, 16 aa, Homo sapiens
  CDR3 for beta chain variable domain of TCR clone 322639 (TRBV2, TRBJ2-1)
CASRSPAGGKYNEQFF

SEQ ID NO: 645279 - protein, 14 aa, Homo sapiens
  CDR3 for alpha chain variable domain of TCR clone 322640 (TRAV1-2, TRAJ16)
CAVNRFSDGQKLLF

SEQ ID NO: 645280 - protein, 17 aa, Homo sapiens
  CDR3 for beta chain variable domain of TCR clone 322640 (TRBV13, TRBJ2-3)
WASSLSRVAGGRNTQYF

SEQ ID NO: 645281 - protein, 16 aa, Homo sapiens
  CDR3 for alpha chain variable domain of TCR clone 322641 (TRAV3, TRAJ42)
CAVRDIEVGSQGNLIF

SEQ ID NO: 645282 - protein, 15 aa, Homo sapiens
  CDR3 for beta chain variable domain of TCR clone 322641 (TRBV9, TRBJ2-2)
CASRDFAGASGELFF

SEQ ID NO: 645283 - protein, 14 aa, Homo sapiens
  CDR3 for alpha chain variable domain of TCR clone 322642 (TRAV13-1, TRAJ40)
CAASMTSGTYKYIF

SEQ ID NO: 645284 - protein, 13 aa, Homo sapiens
  CDR3 for beta chain variable domain of TCR clone 322642 (TRBV4-1, TRBJ2-5)
CASSQEGQETQYF

SEQ ID NO: 645285 - protein, 14 aa, Homo sapiens
  CDR3 for alpha chain variable domain of TCR clone 322643 (TRAV13-1, TRAJ35)
CAASKGGMGMCCIA

SEQ ID NO: 645286 - protein, 13 aa, Homo sapiens
  CDR3 for beta chain variable domain of TCR clone 322643 (TRBV7-3, TRBJ1-1)
CASSQDWGAEAFF

SEQ ID NO: 645287 - protein, 12 aa, Homo sapiens
  CDR3 for alpha chain variable domain of TCR clone 322644 (TRAV12-3, TRAJ17)
CAMTLTGNKLTF

SEQ ID NO: 645288 - protein, 15 aa, Homo sapiens
  CDR3 for beta chain variable domain of TCR clone 322644 (TRBV20-1, TRBJ1-5)
CSAFKNGQRNQPQHF

SEQ ID NO: 645289 - protein, 17 aa, Homo sapiens
  CDR3 for alpha chain variable domain of TCR clone 322645 (TRAV13-1, TRAJ52)
CSKNPNAGGTIYGKLTF

SEQ ID NO: 645290 - protein, 14 aa, Homo sapiens
  CDR3 for beta chain variable domain of TCR clone 322645 (TRBV6-5, TRBJ1-1)
CASSFGQGLTEAFF

SEQ ID NO: 645291 - protein, 13 aa, Homo sapiens
  CDR3 for alpha chain variable domain of TCR clone 322646 (TRAV2, TRAJ40)
CAVVTSGTYKYIF

SEQ ID NO: 645292 - protein, 16 aa, Homo sapiens
  CDR3 for beta chain variable domain of TCR clone 322646 (TRBV19, TRBJ2-2)
CASRSPGTGATGELSF

SEQ ID NO: 645293 - protein, 16 aa, Homo sapiens
  CDR3 for alpha chain variable domain of TCR clone 322647 (TRAV14/DV4, TRAJ54)
CAMREGRIQGAQKLVF

SEQ ID NO: 645294 - protein, 17 aa, Homo sapiens
  CDR3 for beta chain variable domain of TCR clone 322647 (TRBV15, TRBJ1-4)
CATSRYGTGDPNEKLFF

SEQ ID NO: 645295 - protein, 14 aa, Homo sapiens
  CDR3 for alpha chain variable domain of TCR clone 322648 (TRAV12-3, TRAJ10)
SHLPPTGGGNKLTF

SEQ ID NO: 645296 - protein, 17 aa, Homo sapiens
  CDR3 for beta chain variable domain of TCR clone 322648 (TRBV28, TRBJ2-5)
CASSTAEGDALQETQYF

SEQ ID NO: 645297 - protein, 14 aa, Homo sapiens
  CDR3 for alpha chain variable domain of TCR clone 322649 (TRAV8-1, TRAJ49)
CASSIANTGKQFYF

SEQ ID NO: 645298 - protein, 13 aa, Homo sapiens
  CDR3 for beta chain variable domain of TCR clone 322649 (TRBV11-2, TRBJ2-5)
CASSFSSQETQYF

SEQ ID NO: 645299 - protein, 13 aa, Homo sapiens
  CDR3 for alpha chain variable domain of TCR clone 322650 (TRAV27, TRAJ57)
CRSAQGGSEKLVF

SEQ ID NO: 645300 - protein, 15 aa, Homo sapiens
  CDR3 for beta chain variable domain of TCR clone 322650 (TRBV11-2, TRBJ2-2)
CASKANGANTGELFF

SEQ ID NO: 645301 - protein, 16 aa, Homo sapiens
  CDR3 for alpha chain variable domain of TCR clone 322651 (TRAV30, TRAJ24)
CGTEIVDADSWGKFQL

SEQ ID NO: 645302 - protein, 14 aa, Homo sapiens
  CDR3 for beta chain variable domain of TCR clone 322651 (TRBV7-9, TRBJ2-4)
CASSLAMGGNTQYF

SEQ ID NO: 645303 - protein, 12 aa, Homo sapiens
  CDR3 for alpha chain variable domain of TCR clone 322652 (TRAV1-1, TRAJ8)
RAGGTGFQNLVF

SEQ ID NO: 645304 - protein, 13 aa, Homo sapiens
  CDR3 for beta chain variable domain of TCR clone 322652 (TRBV7-9, TRBJ1-2)
CASSLKQNYGYTF

SEQ ID NO: 645305 - protein, 13 aa, Homo sapiens
  CDR3 for alpha chain variable domain of TCR clone 322653 (TRAV30, TRAJ16)
CGTFGGDGQKLLF

SEQ ID NO: 645306 - protein, 13 aa, Homo sapiens
  CDR3 for beta chain variable domain of TCR clone 322653 (TRBV7-3, TRBJ2-1)
CASSLDSYHEQFF

SEQ ID NO: 645307 - protein, 12 aa, Homo sapiens
  CDR3 for alpha chain variable domain of TCR clone 322654 (TRAV25, TRAJ20)
CAGRSNDYQLSF

SEQ ID NO: 645308 - protein, 15 aa, Homo sapiens
  CDR3 for beta chain variable domain of TCR clone 322654 (TRBV7-6, TRBJ2-7)
CASSGRRDTFGEQYF

SEQ ID NO: 645309 - protein, 16 aa, Homo sapiens
  CDR3 for alpha chain variable domain of TCR clone 322655 (TRAV1-2, TRAJ26)
CAVRDLITMVRILFLF

SEQ ID NO: 645310 - protein, 15 aa, Homo sapiens
  CDR3 for beta chain variable domain of TCR clone 322655 (TRBV9, TRBJ1-6)
CASSVAGTGDSPLHF

SEQ ID NO: 645311 - protein, 14 aa, Homo sapiens
  CDR3 for alpha chain variable domain of TCR clone 322656 (TRAV2, TRAJ9)
CAVEDRSGGFKTIF

SEQ ID NO: 645312 - protein, 20 aa, Homo sapiens
  CDR3 for beta chain variable domain of TCR clone 322656 (TRBV19, TRBJ2-1)
CASSISRTVTSTRLNNEQFF

SEQ ID NO: 645313 - protein, 14 aa, Homo sapiens
  CDR3 for alpha chain variable domain of TCR clone 322657 (TRAV2, TRAJ37)
CAVDFTSNTGKLIF

SEQ ID NO: 645314 - protein, 13 aa, Homo sapiens
  CDR3 for beta chain variable domain of TCR clone 322657 (TRBV20-1, TRBJ2-3)
CSARLAGTDTQYF

SEQ ID NO: 645315 - protein, 14 aa, Homo sapiens
  CDR3 for alpha chain variable domain of TCR clone 322658 (TRAV26-1, TRAJ38)
CIADNAGNNRKLIW

SEQ ID NO: 645316 - protein, 15 aa, Homo sapiens
  CDR3 for beta chain variable domain of TCR clone 322658 (TRBV7-9, TRBJ2-5)
CASSNRDYLQETQYF

SEQ ID NO: 645317 - protein, 14 aa, Homo sapiens
  CDR3 for alpha chain variable domain of TCR clone 322659 (TRAV13-1, TRAJ35)
CAASKGGSGNVLHC

SEQ ID NO: 645318 - protein, 13 aa, Homo sapiens
  CDR3 for beta chain variable domain of TCR clone 322659 (TRBV7-3, TRBJ1-1)
CASSQYWGAEAFF

SEQ ID NO: 645319 - protein, 12 aa, Homo sapiens
  CDR3 for alpha chain variable domain of TCR clone 322660 (TRAV2, TRAJ32)
FAVGGATNKLIF

SEQ ID NO: 645320 - protein, 15 aa, Homo sapiens
  CDR3 for beta chain variable domain of TCR clone 322660 (TRBV7-2, TRBJ2-1)
CASSSRTSREDEQFF

SEQ ID NO: 645321 - protein, 11 aa, Homo sapiens
  CDR3 for alpha chain variable domain of TCR clone 322661 (TRAV2, TRAJ33)
CAVESNYQLIW

SEQ ID NO: 645322 - protein, 14 aa, Homo sapiens
  CDR3 for beta chain variable domain of TCR clone 322661 (TRBV20-1, TRBJ2-7)
YSAKRGRSSYEQYF

SEQ ID NO: 645323 - protein, 12 aa, Homo sapiens
  CDR3 for alpha chain variable domain of TCR clone 322662 (TRAV21, TRAJ11)
CAATSGYSTLTF

SEQ ID NO: 645324 - protein, 14 aa, Homo sapiens
  CDR3 for beta chain variable domain of TCR clone 322662 (TRBV20-1, TRBJ2-7)
CGAPELAGVGEHYF

SEQ ID NO: 645325 - protein, 17 aa, Homo sapiens
  CDR3 for alpha chain variable domain of TCR clone 322663 (TRAV3, TRAJ38)
CAVRHCPNAGNNRKLIW

SEQ ID NO: 645326 - protein, 14 aa, Homo sapiens
  CDR3 for beta chain variable domain of TCR clone 322663 (TRBV5-5, TRBJ1-5)
CASSEQGVDQPQHF

SEQ ID NO: 645327 - protein, 10 aa, Homo sapiens
  CDR3 for alpha chain variable domain of TCR clone 322664 (TRAV30, TRAJ16)
CGTGGQKLLF

SEQ ID NO: 645328 - protein, 14 aa, Homo sapiens
  CDR3 for beta chain variable domain of TCR clone 322664 (TRBV27, TRBJ2-2)
CASSLGAATGELFF

SEQ ID NO: 645329 - protein, 15 aa, Homo sapiens
  CDR3 for alpha chain variable domain of TCR clone 322665 (TRAV1-1, TRAJ23)
CAVREGDNQGGKLIF

SEQ ID NO: 645330 - protein, 14 aa, Homo sapiens
  CDR3 for beta chain variable domain of TCR clone 322665 (TRBV20-1, TRBJ2-7)
CSAKTGTGGYEQYF

SEQ ID NO: 645331 - protein, 12 aa, Homo sapiens
  CDR3 for alpha chain variable domain of TCR clone 322666 (TRAV25, TRAJ11)
CAGASGYSTLTF

SEQ ID NO: 645332 - protein, 13 aa, Homo sapiens
  CDR3 for beta chain variable domain of TCR clone 322666 (TRBV20-1, TRBJ1-1)
CSARGGGNTEAFF

SEQ ID NO: 645333 - protein, 11 aa, Homo sapiens
  CDR3 for alpha chain variable domain of TCR clone 322667 (TRAV1-1, TRAJ37)
CAVSPQGKLIF

SEQ ID NO: 645334 - protein, 13 aa, Homo sapiens
  CDR3 for beta chain variable domain of TCR clone 322667 (TRBV7-2, TRBJ2-2)
CASSLAVTGELFF

SEQ ID NO: 645335 - protein, 14 aa, Homo sapiens
  CDR3 for alpha chain variable domain of TCR clone 322668 (TRAV17, TRAJ16)
CATADFSDGQKLLF

SEQ ID NO: 645336 - protein, 15 aa, Homo sapiens
  CDR3 for beta chain variable domain of TCR clone 322668 (TRBV18, TRBJ2-1)
CASSTPSAAYNEQFF

SEQ ID NO: 645337 - protein, 15 aa, Homo sapiens
  CDR3 for alpha chain variable domain of TCR clone 322669 (TRAV12-2, TRAJ53)
CAVNGGGGSNSKLTF

SEQ ID NO: 645338 - protein, 15 aa, Homo sapiens
  CDR3 for beta chain variable domain of TCR clone 322669 (TRBV7-2, TRBJ2-3)
CASTPTSGETDTQYF

SEQ ID NO: 645339 - protein, 10 aa, Homo sapiens
  CDR3 for alpha chain variable domain of TCR clone 322670 (TRAV12-2, TRAJ52)
RSTSYGKLTF

SEQ ID NO: 645340 - protein, 15 aa, Homo sapiens
  CDR3 for beta chain variable domain of TCR clone 322670 (TRBV7-9, TRBJ1-6)
CASSSPGRGNSPLHF

SEQ ID NO: 645341 - protein, 13 aa, Homo sapiens
  CDR3 for alpha chain variable domain of TCR clone 322671 (TRAV8-3, TRAJ44)
CAVVPGTASKLTF

SEQ ID NO: 645342 - protein, 14 aa, Homo sapiens
  CDR3 for beta chain variable domain of TCR clone 322671 (TRBV11-2, TRBJ2-3)
CATRRLARTDTQYF

SEQ ID NO: 645343 - protein, 13 aa, Homo sapiens
  CDR3 for alpha chain variable domain of TCR clone 322672 (TRAV24, TRAJ42)
CAFSTGSQGNLIF

SEQ ID NO: 645344 - protein, 15 aa, Homo sapiens
  CDR3 for beta chain variable domain of TCR clone 322672 (TRBV6-6, TRBJ2-5)
CASSPGGGLEETQYF

SEQ ID NO: 645345 - protein, 14 aa, Homo sapiens
  CDR3 for alpha chain variable domain of TCR clone 322673 (TRAV1-2, TRAJ16)
CAVNRFSDGQKLLF

SEQ ID NO: 645346 - protein, 15 aa, Homo sapiens
  CDR3 for beta chain variable domain of TCR clone 322673 (TRBV12-4, TRBJ2-5)
CASTLNSGRGETQYF

SEQ ID NO: 645347 - protein, 17 aa, Homo sapiens
  CDR3 for alpha chain variable domain of TCR clone 322674 (TRAV20, TRAJ42)
CAVQAWGYGGSQGNLIF

SEQ ID NO: 645348 - protein, 13 aa, Homo sapiens
  CDR3 for beta chain variable domain of TCR clone 322674 (TRBV23-1, TRBJ1-4)
CASRGKFNDKLFF

SEQ ID NO: 645349 - protein, 13 aa, Homo sapiens
  CDR3 for alpha chain variable domain of TCR clone 322675 (TRAV26-2, TRAJ43)
CILRAVNNNDMRF

SEQ ID NO: 645350 - protein, 15 aa, Homo sapiens
  CDR3 for beta chain variable domain of TCR clone 322675 (TRBV7-2, TRBJ2-1)
CASTHATGIYNEQFF

SEQ ID NO: 645351 - protein, 16 aa, Homo sapiens
  CDR3 for alpha chain variable domain of TCR clone 322676 (TRAV27, TRAJ13)
CAGAKSDSGGYQKVTF

SEQ ID NO: 645352 - protein, 13 aa, Homo sapiens
  CDR3 for beta chain variable domain of TCR clone 322676 (TRBV20-1, TRBJ1-1)
CSARVGGNTEAFF

SEQ ID NO: 645353 - protein, 15 aa, Homo sapiens
  CDR3 for alpha chain variable domain of TCR clone 322677 (TRAV21, TRAJ32)
CAVNSYGGATNKLIF

SEQ ID NO: 645354 - protein, 18 aa, Homo sapiens
  CDR3 for beta chain variable domain of TCR clone 322677 (TRBV7-9, TRBJ2-1)
CASSTGLAEGSSYNEQFF

SEQ ID NO: 645355 - protein, 12 aa, Homo sapiens
  CDR3 for alpha chain variable domain of TCR clone 322678 (TRAV38-2/DV8, TRAJ47)
CVLMEYGNKLVF

SEQ ID NO: 645356 - protein, 14 aa, Homo sapiens
  CDR3 for beta chain variable domain of TCR clone 322678 (TRBV20-1, TRBJ1-5)
CSATDRGSNQAQHF

SEQ ID NO: 645357 - protein, 15 aa, Homo sapiens
  CDR3 for alpha chain variable domain of TCR clone 322679 (TRAV35, TRAJ58)
CAGRRQETSGSRLTF

SEQ ID NO: 645358 - protein, 14 aa, Homo sapiens
  CDR3 for beta chain variable domain of TCR clone 322679 (TRBV25-1, TRBJ1-1)
CASTHLGGNTEAFF

SEQ ID NO: 645359 - protein, 15 aa, Homo sapiens
  CDR3 for alpha chain variable domain of TCR clone 322680 (TRAV8-4, TRAJ6)
CAVSAPSGGSYIPTF

SEQ ID NO: 645360 - protein, 15 aa, Homo sapiens
  CDR3 for beta chain variable domain of TCR clone 322680 (TRBV7-3, TRBJ2-2)
CASKANGASTGELFF

SEQ ID NO: 645361 - protein, 12 aa, Homo sapiens
  CDR3 for alpha chain variable domain of TCR clone 322681 (TRAV13-1, TRAJ21)
CAAKEGFNKFYF

SEQ ID NO: 645362 - protein, 15 aa, Homo sapiens
  CDR3 for beta chain variable domain of TCR clone 322681 (TRBV25-1, TRBJ1-4)
CASSPGDSTNENLFF

SEQ ID NO: 645363 - protein, 14 aa, Homo sapiens
  CDR3 for alpha chain variable domain of TCR clone 322682 (TRAV8-4, TRAJ54)
CAVSEVLGAEKLVF

SEQ ID NO: 645364 - protein, 13 aa, Homo sapiens
  CDR3 for beta chain variable domain of TCR clone 322682 (TRBV27, TRBJ2-7)
CASSFVSSYEQYF

SEQ ID NO: 645365 - protein, 10 aa, Homo sapiens
  CDR3 for alpha chain variable domain of TCR clone 322683 (TRAV16, TRAJ26)
CALSGSEFSL

SEQ ID NO: 645366 - protein, 12 aa, Homo sapiens
  CDR3 for beta chain variable domain of TCR clone 322683 (TRBV11-2, TRBJ2-1)
CASSPGNNEQFF

SEQ ID NO: 645367 - protein, 16 aa, Homo sapiens
  CDR3 for alpha chain variable domain of TCR clone 322684 (TRAV27, TRAJ53)
CAAPEGSGGSNYHLTF

SEQ ID NO: 645368 - protein, 14 aa, Homo sapiens
  CDR3 for beta chain variable domain of TCR clone 322684 (TRBV4-3, TRBJ1-5)
CASSQGGQGWPQHF

SEQ ID NO: 645369 - protein, 14 aa, Homo sapiens
  CDR3 for alpha chain variable domain of TCR clone 322685 (TRAV8-3, TRAJ47)
CAVAYMEYGNKLVF

SEQ ID NO: 645370 - protein, 14 aa, Homo sapiens
  CDR3 for beta chain variable domain of TCR clone 322685 (TRBV2, TRBJ2-7)
CASSLTSGGYEQYF

SEQ ID NO: 645371 - protein, 11 aa, Homo sapiens
  CDR3 for alpha chain variable domain of TCR clone 322686 (TRAV23/DV6, TRAJ58)
CAARFLRGETS

SEQ ID NO: 645372 - protein, 14 aa, Homo sapiens
  CDR3 for beta chain variable domain of TCR clone 322686 (TRBV7-3, TRBJ2-1)
CASSLAGGTNEQFF

SEQ ID NO: 645373 - protein, 12 aa, Homo sapiens
  CDR3 for alpha chain variable domain of TCR clone 322687 (TRAV13-1, TRAJ21)
CAAKEGFNKFYF

SEQ ID NO: 645374 - protein, 20 aa, Homo sapiens
  CDR3 for beta chain variable domain of TCR clone 322687 (TRBV6-6, TRBJ2-5)
CASSPGGGLRGDPVLRARHA

SEQ ID NO: 645375 - protein, 12 aa, Homo sapiens
  CDR3 for alpha chain variable domain of TCR clone 322688 (TRAV12-3, TRAJ17)
CAMTLTGNKLTF

SEQ ID NO: 645376 - protein, 15 aa, Homo sapiens
  CDR3 for beta chain variable domain of TCR clone 322688 (TRBV6-1, TRBJ2-5)
CASSEGWGTQETQYF

SEQ ID NO: 645377 - protein, 14 aa, Homo sapiens
  CDR3 for alpha chain variable domain of TCR clone 322689 (TRAV1-2, TRAJ16)
CAVNRFSDGRKLLF

SEQ ID NO: 645378 - protein, 14 aa, Homo sapiens
  CDR3 for beta chain variable domain of TCR clone 322689 (TRBV19, TRBJ2-1)
CASPTFVLSGEQFF

SEQ ID NO: 645379 - protein, 14 aa, Homo sapiens
  CDR3 for alpha chain variable domain of TCR clone 322690 (TRAV1-2, TRAJ16)
CAVNRLSDGQQLLF

SEQ ID NO: 645380 - protein, 14 aa, Homo sapiens
  CDR3 for beta chain variable domain of TCR clone 322690 (TRBV7-9, TRBJ2-3)
CASSLEDGTDTQYF

SEQ ID NO: 645381 - protein, 15 aa, Homo sapiens
  CDR3 for alpha chain variable domain of TCR clone 322691 (TRAV13-1, TRAJ3)
CAATKLASSASKIIF

SEQ ID NO: 645382 - protein, 16 aa, Homo sapiens
  CDR3 for beta chain variable domain of TCR clone 322691 (TRBV25-1, TRBJ1-5)
CASGAPTVNSNQPQHF

SEQ ID NO: 645383 - protein, 13 aa, Homo sapiens
  CDR3 for alpha chain variable domain of TCR clone 322692 (TRAV20, TRAJ20)
CAVQAGSGYKLSF

SEQ ID NO: 645384 - protein, 15 aa, Homo sapiens
  CDR3 for beta chain variable domain of TCR clone 322692 (TRBV7-9, TRBJ1-4)
CASSARTGGNEKLFF

SEQ ID NO: 645385 - protein, 10 aa, Homo sapiens
  CDR3 for alpha chain variable domain of TCR clone 322693 (TRAV5, TRAJ34)
CAEDTDKLIF

SEQ ID NO: 645386 - protein, 12 aa, Homo sapiens
  CDR3 for beta chain variable domain of TCR clone 322693 (TRBV11-2, TRBJ2-2)
CARSLGGGELFF

SEQ ID NO: 645387 - protein, 15 aa, Homo sapiens
  CDR3 for alpha chain variable domain of TCR clone 322694 (TRAV20, TRAJ53)
CAVQASGGSNYKLTF

SEQ ID NO: 645388 - protein, 13 aa, Homo sapiens
  CDR3 for beta chain variable domain of TCR clone 322694 (TRBV7-2, TRBJ1-5)
CASSTQGSQPQHF

SEQ ID NO: 645389 - protein, 11 aa, Homo sapiens
  CDR3 for alpha chain variable domain of TCR clone 322695 (TRAV35, TRAJ30)
CAGPGDAKIIF

SEQ ID NO: 645390 - protein, 14 aa, Homo sapiens
  CDR3 for beta chain variable domain of TCR clone 322695 (TRBV7-6, TRBJ1-6)
CASSQAGGGSPLHF

SEQ ID NO: 645391 - protein, 14 aa, Homo sapiens
  CDR3 for alpha chain variable domain of TCR clone 322696 (TRAV13-1, TRAJ44)
CAAKATGTASKLTF

SEQ ID NO: 645392 - protein, 17 aa, Homo sapiens
  CDR3 for beta chain variable domain of TCR clone 322696 (TRBV7-3, TRBJ2-3)
RASSLTKRMRGADTQYF

SEQ ID NO: 645393 - protein, 15 aa, Homo sapiens
  CDR3 for alpha chain variable domain of TCR clone 322697 (TRAV12-3, TRAJ6)
CAMSATSGGSYILTF

SEQ ID NO: 645394 - protein, 13 aa, Homo sapiens
  CDR3 for beta chain variable domain of TCR clone 322697 (TRBV7-9, TRBJ1-2)
CASSLKQNYGYTF

SEQ ID NO: 645395 - protein, 14 aa, Homo sapiens
  CDR3 for alpha chain variable domain of TCR clone 322698 (TRAV17, TRAJ8)
CATDLNTGFHKLVF

SEQ ID NO: 645396 - protein, 15 aa, Homo sapiens
  CDR3 for beta chain variable domain of TCR clone 322698 (TRBV6-3, TRBJ2-7)
CASSSPGTVFYEQYF

SEQ ID NO: 645397 - protein, 15 aa, Homo sapiens
  CDR3 for alpha chain variable domain of TCR clone 322699 (TRAV23/DV6, TRAJ18)
CAARYRGSTLGRLYF

SEQ ID NO: 645398 - protein, 15 aa, Homo sapiens
  CDR3 for beta chain variable domain of TCR clone 322699 (TRBV2, TRBJ2-4)
CASSGTNLAKNIQYF

SEQ ID NO: 645399 - protein, 12 aa, Homo sapiens
  CDR3 for alpha chain variable domain of TCR clone 322700 (TRAV16, TRAJ10)
CSRTGGGNKLTF

SEQ ID NO: 645400 - protein, 15 aa, Homo sapiens
  CDR3 for beta chain variable domain of TCR clone 322700 (TRBV28, TRBJ2-1)
CASSPPGLADHEQFF

SEQ ID NO: 645401 - protein, 16 aa, Homo sapiens
  CDR3 for alpha chain variable domain of TCR clone 322701 (TRAV38-1, TRAJ32)
CAFMKGGGGATNKLIF

SEQ ID NO: 645402 - protein, 18 aa, Homo sapiens
  CDR3 for beta chain variable domain of TCR clone 322701 (TRBV11-2, TRBJ2-3)
CASSLGGASRGAPNTQYF

SEQ ID NO: 645403 - protein, 11 aa, Homo sapiens
  CDR3 for alpha chain variable domain of TCR clone 322702 (TRAV12-2, TRAJ21)
CAVEGFNKFYF

SEQ ID NO: 645404 - protein, 15 aa, Homo sapiens
  CDR3 for beta chain variable domain of TCR clone 322702 (TRBV20-1, TRBJ1-5)
YSASRRGDLGQPQHF

SEQ ID NO: 645405 - protein, 12 aa, Homo sapiens
  CDR3 for alpha chain variable domain of TCR clone 322703 (TRAV26-1, TRAJ26)
CIVFIYGQNFVF

SEQ ID NO: 645406 - protein, 13 aa, Homo sapiens
  CDR3 for beta chain variable domain of TCR clone 322703 (TRBV27, TRBJ1-1)
CASSLSIGAEAFY

SEQ ID NO: 645407 - protein, 15 aa, Homo sapiens
  CDR3 for alpha chain variable domain of TCR clone 322704 (TRAV13-1, TRAJ17)
CAASIHGGCRQQANF

SEQ ID NO: 645408 - protein, 14 aa, Homo sapiens
  CDR3 for beta chain variable domain of TCR clone 322704 (TRBV20-1, TRBJ2-4)
CSARDRGKGGIQYF

SEQ ID NO: 645409 - protein, 23 aa, Homo sapiens
  CDR3 for alpha chain variable domain of TCR clone 322705 (TRAV13-1, )
CAASTRRAQIPDIQNPDPAVYQL

SEQ ID NO: 645410 - protein, 14 aa, Homo sapiens
  CDR3 for beta chain variable domain of TCR clone 322705 (TRBV18, TRBJ2-5)
CASSPGVSQETQYF

SEQ ID NO: 645411 - protein, 13 aa, Homo sapiens
  CDR3 for alpha chain variable domain of TCR clone 322706 (TRAV3, TRAJ20)
CAVRDTVDYKLSF

SEQ ID NO: 645412 - protein, 12 aa, Homo sapiens
  CDR3 for beta chain variable domain of TCR clone 322706 (TRBV29-1, TRBJ2-3)
CSVTGGADTQYF

SEQ ID NO: 645413 - protein, 16 aa, Homo sapiens
  CDR3 for alpha chain variable domain of TCR clone 322707 (TRAV2, TRAJ23)
CVGVKLIFGQGTELSV

SEQ ID NO: 645414 - protein, 20 aa, Homo sapiens
  CDR3 for beta chain variable domain of TCR clone 322707 (TRBV20-1, TRBJ2-5)
CSARAGLAGRLAGHLETQYF

SEQ ID NO: 645415 - protein, 15 aa, Homo sapiens
  CDR3 for alpha chain variable domain of TCR clone 322708 (TRAV17, TRAJ52)
CATEDGGTSYGKLTF

SEQ ID NO: 645416 - protein, 14 aa, Homo sapiens
  CDR3 for beta chain variable domain of TCR clone 322708 (TRBV28, TRBJ1-5)
CASSLGVLVKPQHF

SEQ ID NO: 645417 - protein, 14 aa, Homo sapiens
  CDR3 for alpha chain variable domain of TCR clone 322709 (TRAV12-2, TRAJ17)
CAVLFKAAGNKLTF

SEQ ID NO: 645418 - protein, 13 aa, Homo sapiens
  CDR3 for beta chain variable domain of TCR clone 322709 (TRBV3-1, TRBJ1-1)
CASSQLQGAEAFF

SEQ ID NO: 645419 - protein, 13 aa, Homo sapiens
  CDR3 for alpha chain variable domain of TCR clone 322710 (TRAV3, TRAJ41)
CAVRSNSGYALNF

SEQ ID NO: 645420 - protein, 12 aa, Homo sapiens
  CDR3 for beta chain variable domain of TCR clone 322710 (TRBV2, TRBJ2-1)
CASRPGPREQFF

SEQ ID NO: 645421 - protein, 10 aa, Homo sapiens
  CDR3 for alpha chain variable domain of TCR clone 322711 (TRAV8-3, TRAJ43)
SAVALANMRF

SEQ ID NO: 645422 - protein, 14 aa, Homo sapiens
  CDR3 for beta chain variable domain of TCR clone 322711 (TRBV4-2, TRBJ2-1)
CASGLDRAYNEQFF

SEQ ID NO: 645423 - protein, 17 aa, Homo sapiens
  CDR3 for alpha chain variable domain of TCR clone 322712 (TRAV3, TRAJ6)
CAVRDGPRAGGSYITTF

SEQ ID NO: 645424 - protein, 15 aa, Homo sapiens
  CDR3 for beta chain variable domain of TCR clone 322712 (TRBV29-1, TRBJ2-5)
CSVGGLAVNQETQYF

SEQ ID NO: 645425 - protein, 12 aa, Homo sapiens
  CDR3 for alpha chain variable domain of TCR clone 322713 (TRAV13-1, TRAJ49)
CAASIRSNQFYF

SEQ ID NO: 645426 - protein, 14 aa, Homo sapiens
  CDR3 for beta chain variable domain of TCR clone 322713 (TRBV7-2, TRBJ2-1)
CASSPGLAGDEQFF

SEQ ID NO: 645427 - protein, 16 aa, Homo sapiens
  CDR3 for alpha chain variable domain of TCR clone 322714 (TRAV3, TRAJ10)
CAVRDMRAGGGNKLTF

SEQ ID NO: 645428 - protein, 19 aa, Homo sapiens
  CDR3 for beta chain variable domain of TCR clone 322714 (TRBV6-3, TRBJ1-2)
CASSYSKGWTGPPNYGYTF

SEQ ID NO: 645429 - protein, 14 aa, Homo sapiens
  CDR3 for alpha chain variable domain of TCR clone 322715 (TRAV12-3, TRAJ10)
SHLPLTGGGNKLTF

SEQ ID NO: 645430 - protein, 13 aa, Homo sapiens
  CDR3 for beta chain variable domain of TCR clone 322715 (TRBV7-6, TRBJ2-3)
CASGLAVGDTQYF

SEQ ID NO: 645431 - protein, 13 aa, Homo sapiens
  CDR3 for alpha chain variable domain of TCR clone 322716 (TRAV8-3, TRAJ36)
CAVGATGANNLFF

SEQ ID NO: 645432 - protein, 15 aa, Homo sapiens
  CDR3 for beta chain variable domain of TCR clone 322716 (TRBV7-2, TRBJ1-2)
CASSPMAGWNYGYTF

SEQ ID NO: 645433 - protein, 14 aa, Homo sapiens
  CDR3 for alpha chain variable domain of TCR clone 322717 (TRAV12-3, TRAJ9)
CAMSPNTGGFKTIF

SEQ ID NO: 645434 - protein, 19 aa, Homo sapiens
  CDR3 for beta chain variable domain of TCR clone 322717 (TRBV7-3, TRBJ2-7)
CASSLTGVAGGWPSYEQYF

SEQ ID NO: 645435 - protein, 13 aa, Homo sapiens
  CDR3 for alpha chain variable domain of TCR clone 322718 (TRAV8-3, TRAJ48)
CAVVPFGNEKLTF

SEQ ID NO: 645436 - protein, 11 aa, Homo sapiens
  CDR3 for beta chain variable domain of TCR clone 322718 (TRBV7-2, TRBJ2-7)
CASSSGLWQYF

SEQ ID NO: 645437 - protein, 13 aa, Homo sapiens
  CDR3 for alpha chain variable domain of TCR clone 322719 (TRAV12-3, TRAJ9)
CAMRNTGGFKTIF

SEQ ID NO: 645438 - protein, 14 aa, Homo sapiens
  CDR3 for beta chain variable domain of TCR clone 322719 (TRBV19, TRBJ1-5)
CASSLGPGGEPQHF

SEQ ID NO: 645439 - protein, 12 aa, Homo sapiens
  CDR3 for alpha chain variable domain of TCR clone 322720 (TRAV12-3, TRAJ17)
CAMTLTGNKLTF

SEQ ID NO: 645440 - protein, 18 aa, Homo sapiens
  CDR3 for beta chain variable domain of TCR clone 322720 (TRBV28, TRBJ1-2)
CASRQQQGKRGSNYGYTF

SEQ ID NO: 645441 - protein, 14 aa, Homo sapiens
  CDR3 for alpha chain variable domain of TCR clone 322721 (TRAV1-2, TRAJ16)
CSVNRFSDGQKLLF

SEQ ID NO: 645442 - protein, 15 aa, Homo sapiens
  CDR3 for beta chain variable domain of TCR clone 322721 (TRBV3-1, TRBJ2-5)
CASSANLGGPETQYF

SEQ ID NO: 645443 - protein, 14 aa, Homo sapiens
  CDR3 for alpha chain variable domain of TCR clone 322722 (TRAV1-2, TRAJ8)
CAVREDTGFQQLVF

SEQ ID NO: 645444 - protein, 17 aa, Homo sapiens
  CDR3 for beta chain variable domain of TCR clone 322722 (TRBV20-1, TRBJ2-7)
CSARDRVSGWTSSTSGR

SEQ ID NO: 645445 - protein, 12 aa, Homo sapiens
  CDR3 for alpha chain variable domain of TCR clone 322723 (TRAV12-3, TRAJ40)
CAMSSGTYKYIF

SEQ ID NO: 645446 - protein, 16 aa, Homo sapiens
  CDR3 for beta chain variable domain of TCR clone 322723 (TRBV7-3, TRBJ2-7)
CASSPTTGGVSYEQYF

SEQ ID NO: 645447 - protein, 14 aa, Homo sapiens
  CDR3 for alpha chain variable domain of TCR clone 322724 (TRAV1-2, TRAJ16)
CAVNRFSDGQKLPF

SEQ ID NO: 645448 - protein, 14 aa, Homo sapiens
  CDR3 for beta chain variable domain of TCR clone 322724 (TRBV7-8, TRBJ2-7)
CASSQTQGADEQYF

SEQ ID NO: 645449 - protein, 19 aa, Homo sapiens
  CDR3 for alpha chain variable domain of TCR clone 322725 (TRAV29/DV5, TRAJ49)
CSVLLCSKLTVDTGNQFYF

SEQ ID NO: 645450 - protein, 13 aa, Homo sapiens
  CDR3 for beta chain variable domain of TCR clone 322725 (TRBV7-2, TRBJ2-1)
CASSLGVYNEQFF

SEQ ID NO: 645451 - protein, 23 aa, Homo sapiens
  CDR3 for alpha chain variable domain of TCR clone 322726 (TRAV30, TRAJ24)
SYPGTYCSGTEIVDADSWGKFQF

SEQ ID NO: 645452 - protein, 14 aa, Homo sapiens
  CDR3 for beta chain variable domain of TCR clone 322726 (TRBV12-5, TRBJ2-5)
CASGSRTHQETQYF

SEQ ID NO: 645453 - protein, 13 aa, Homo sapiens
  CDR3 for alpha chain variable domain of TCR clone 322727 (TRAV2, TRAJ40)
CAVVTSGTYKYIF

SEQ ID NO: 645454 - protein, 14 aa, Homo sapiens
  CDR3 for beta chain variable domain of TCR clone 322727 (TRBV19, TRBJ2-1)
CASPTFVLGGEQCF

SEQ ID NO: 645455 - protein, 10 aa, Homo sapiens
  CDR3 for alpha chain variable domain of TCR clone 322728 (TRAV1-2, TRAJ31)
CAFFDSRLMF

SEQ ID NO: 645456 - protein, 13 aa, Homo sapiens
  CDR3 for beta chain variable domain of TCR clone 322728 (TRBV7-9, TRBJ1-2)
CASSLKQNYGYTF

SEQ ID NO: 645457 - protein, 14 aa, Homo sapiens
  CDR3 for alpha chain variable domain of TCR clone 322729 (TRAV8-3, TRAJ47)
CAVGAQGYGNKLVF

SEQ ID NO: 645458 - protein, 15 aa, Homo sapiens
  CDR3 for beta chain variable domain of TCR clone 322729 (TRBV19, TRBJ1-1)
CASTSGQIQNTEAFF

SEQ ID NO: 645459 - protein, 15 aa, Homo sapiens
  CDR3 for alpha chain variable domain of TCR clone 322730 (TRAV13-1, TRAJ37)
CAASRTLATQENQSL

SEQ ID NO: 645460 - protein, 15 aa, Homo sapiens
  CDR3 for beta chain variable domain of TCR clone 322730 (TRBV2, TRBJ2-1)
CASSEEREGNNEQFF

SEQ ID NO: 645461 - protein, 17 aa, Homo sapiens
  CDR3 for alpha chain variable domain of TCR clone 322731 (TRAV3, TRAJ6)
CAVRDGPRAGGSYIPTF

SEQ ID NO: 645462 - protein, 17 aa, Homo sapiens
  CDR3 for beta chain variable domain of TCR clone 322731 (TRBV7-3, TRBJ2-2)
CASSLSGNSGGTGELFF

SEQ ID NO: 645463 - protein, 14 aa, Homo sapiens
  CDR3 for alpha chain variable domain of TCR clone 322732 (TRAV17, TRAJ57)
CATDPQGGSEKLVF

SEQ ID NO: 645464 - protein, 14 aa, Homo sapiens
  CDR3 for beta chain variable domain of TCR clone 322732 (TRBV7-2, TRBJ2-5)
CASSFIQGQETQYF

SEQ ID NO: 645465 - protein, 17 aa, Homo sapiens
  CDR3 for alpha chain variable domain of TCR clone 322733 (TRAV13-1, TRAJ3)
CAASKAGRGSSASKISF

SEQ ID NO: 645466 - protein, 15 aa, Homo sapiens
  CDR3 for beta chain variable domain of TCR clone 322733 (TRBV20-1, TRBJ1-5)
CSAREGGHSNQPQHF

SEQ ID NO: 645467 - protein, 13 aa, Homo sapiens
  CDR3 for alpha chain variable domain of TCR clone 322734 (TRAV12-2, TRAJ4)
CAVRSGGYNKLIF

SEQ ID NO: 645468 - protein, 15 aa, Homo sapiens
  CDR3 for beta chain variable domain of TCR clone 322734 (TRBV9, TRBJ1-6)
CANSVAGTGDSPLHF

SEQ ID NO: 645469 - protein, 16 aa, Homo sapiens
  CDR3 for alpha chain variable domain of TCR clone 322735 (TRAV13-2, TRAJ32)
CAENMNYGGATNSLIF

SEQ ID NO: 645470 - protein, 14 aa, Homo sapiens
  CDR3 for beta chain variable domain of TCR clone 322735 (TRBV15, TRBJ2-5)
CATSSTGYQETQYF

SEQ ID NO: 645471 - protein, 13 aa, Homo sapiens
  CDR3 for alpha chain variable domain of TCR clone 322736 (TRAV3, TRAJ27)
CAVRLLVAGKSTF

SEQ ID NO: 645472 - protein, 13 aa, Homo sapiens
  CDR3 for beta chain variable domain of TCR clone 322736 (TRBV7-9, TRBJ2-3)
CASSPGSTDTQYF

SEQ ID NO: 645473 - protein, 15 aa, Homo sapiens
  CDR3 for alpha chain variable domain of TCR clone 322737 (TRAV25, TRAJ52)
CAGTLGGTSYGKLIF

SEQ ID NO: 645474 - protein, 16 aa, Homo sapiens
  CDR3 for beta chain variable domain of TCR clone 322737 (TRBV15, TRBJ1-2)
CATSRGPRTGGGGYTF

SEQ ID NO: 645475 - protein, 15 aa, Homo sapiens
  CDR3 for alpha chain variable domain of TCR clone 322738 (TRAV8-3, TRAJ4)
CAVGVLFWWLQLADF

SEQ ID NO: 645476 - protein, 14 aa, Homo sapiens
  CDR3 for beta chain variable domain of TCR clone 322738 (TRBV7-9, TRBJ2-3)
CASSLEDGTDTQYF

SEQ ID NO: 645477 - protein, 15 aa, Homo sapiens
  CDR3 for alpha chain variable domain of TCR clone 322739 (TRAV12-1, TRAJ45)
CVVLSGGGGADGLTF

SEQ ID NO: 645478 - protein, 14 aa, Homo sapiens
  CDR3 for beta chain variable domain of TCR clone 322739 (TRBV11-2, TRBJ2-5)
CASSRKGGIETQYF

SEQ ID NO: 645479 - protein, 12 aa, Homo sapiens
  CDR3 for alpha chain variable domain of TCR clone 322740 (TRAV13-1, TRAJ21)
CAAKEGFNKFSF

SEQ ID NO: 645480 - protein, 18 aa, Homo sapiens
  CDR3 for beta chain variable domain of TCR clone 322740 (TRBV20-1, TRBJ2-6)
CSAETTPTHGSGANVLTF

SEQ ID NO: 645481 - protein, 12 aa, Homo sapiens
  CDR3 for alpha chain variable domain of TCR clone 322741 (TRAV14/DV4, TRAJ9)
CAMNPGGFKTIF

SEQ ID NO: 645482 - protein, 14 aa, Homo sapiens
  CDR3 for beta chain variable domain of TCR clone 322741 (TRBV4-1, TRBJ2-2)
CASSQAVNTGELFF

SEQ ID NO: 645483 - protein, 18 aa, Homo sapiens
  CDR3 for alpha chain variable domain of TCR clone 322742 (TRAV13-1, TRAJ52)
CAASKRSAGGTSYGKLTF

SEQ ID NO: 645484 - protein, 13 aa, Homo sapiens
  CDR3 for beta chain variable domain of TCR clone 322742 (TRBV12-4, TRBJ1-2)
CASSVRQGEGYTF

SEQ ID NO: 645485 - protein, 11 aa, Homo sapiens
  CDR3 for alpha chain variable domain of TCR clone 322743 (TRAV12-2, TRAJ43)
CAAYNNKDMRF

SEQ ID NO: 645486 - protein, 14 aa, Homo sapiens
  CDR3 for beta chain variable domain of TCR clone 322743 (TRBV7-8, TRBJ1-2)
CASSAGTAIYGYTF

SEQ ID NO: 645487 - protein, 13 aa, Homo sapiens
  CDR3 for alpha chain variable domain of TCR clone 322744 (TRAV21, TRAJ57)
CAVIEGGSVKLVF

SEQ ID NO: 645488 - protein, 15 aa, Homo sapiens
  CDR3 for beta chain variable domain of TCR clone 322744 (TRBV10-3, TRBJ2-5)
CAISEFGRGQETQYF

SEQ ID NO: 645489 - protein, 14 aa, Homo sapiens
  CDR3 for alpha chain variable domain of TCR clone 322745 (TRAV12-2, TRAJ13)
CAVKKTGGYQKVTF

SEQ ID NO: 645490 - protein, 16 aa, Homo sapiens
  CDR3 for beta chain variable domain of TCR clone 322745 (TRBV20-1, TRBJ1-4)
CSAPGQGLLTNAKLFF

SEQ ID NO: 645491 - protein, 14 aa, Homo sapiens
  CDR3 for alpha chain variable domain of TCR clone 322746 (TRAV3, TRAJ37)
CAVKESGNTGKLIF

SEQ ID NO: 645492 - protein, 15 aa, Homo sapiens
  CDR3 for beta chain variable domain of TCR clone 322746 (TRBV7-9, TRBJ1-4)
CASSRTGGFNEKLFF

SEQ ID NO: 645493 - protein, 13 aa, Homo sapiens
  CDR3 for alpha chain variable domain of TCR clone 322747 (TRAV1-1, TRAJ9)
CAAKNTGGFKTIF

SEQ ID NO: 645494 - protein, 14 aa, Homo sapiens
  CDR3 for beta chain variable domain of TCR clone 322747 (TRBV7-6, TRBJ2-3)
CASSVAGGTDTQYF

SEQ ID NO: 645495 - protein, 15 aa, Homo sapiens
  CDR3 for alpha chain variable domain of TCR clone 322748 (TRAV13-1, TRAJ57)
CAASNTQGGSEKLVF

SEQ ID NO: 645496 - protein, 14 aa, Homo sapiens
  CDR3 for beta chain variable domain of TCR clone 322748 (TRBV6-5, TRBJ1-2)
CASSYTRDRGSHTF

SEQ ID NO: 645497 - protein, 14 aa, Homo sapiens
  CDR3 for alpha chain variable domain of TCR clone 322749 (TRAV1-2, TRAJ16)
CAVNRFSDGQKLLF

SEQ ID NO: 645498 - protein, 13 aa, Homo sapiens
  CDR3 for beta chain variable domain of TCR clone 322749 (TRBV19, TRBJ1-1)
CASIGTQSTEAFF

SEQ ID NO: 645499 - protein, 15 aa, Homo sapiens
  CDR3 for alpha chain variable domain of TCR clone 322750 (TRAV2, TRAJ9)
CAVEDRGTAGFKTIF

SEQ ID NO: 645500 - protein, 19 aa, Homo sapiens
  CDR3 for beta chain variable domain of TCR clone 322750 (TRBV28, TRBJ2-7)
CASSYSGTSRLGWVYEQYF

SEQ ID NO: 645501 - protein, 22 aa, Homo sapiens
  CDR3 for alpha chain variable domain of TCR clone 322751 (TRAV27, TRAJ41)
CAVRTQIPDIQNPDPAVYQLID

SEQ ID NO: 645502 - protein, 13 aa, Homo sapiens
  CDR3 for beta chain variable domain of TCR clone 322751 (TRBV20-1, TRBJ1-1)
CSARGGGNTEAFF

SEQ ID NO: 645503 - protein, 11 aa, Homo sapiens
  CDR3 for alpha chain variable domain of TCR clone 322752 (TRAV13-1, TRAJ52)
PGGTSYGKLTF

SEQ ID NO: 645504 - protein, 15 aa, Homo sapiens
  CDR3 for beta chain variable domain of TCR clone 322752 (TRBV28, TRBJ2-7)
CASSPGGRGFYEQYF

SEQ ID NO: 645505 - protein, 15 aa, Homo sapiens
  CDR3 for alpha chain variable domain of TCR clone 322753 (TRAV3, TRAJ36)
CAVRDLDTGRRARTF

SEQ ID NO: 645506 - protein, 13 aa, Homo sapiens
  CDR3 for beta chain variable domain of TCR clone 322753 (TRBV12-4, TRBJ2-7)
CASSPTETYEQYF

SEQ ID NO: 645507 - protein, 15 aa, Homo sapiens
  CDR3 for alpha chain variable domain of TCR clone 322754 (TRAV3, TRAJ22)
CAVRDRGGSARQLTF

SEQ ID NO: 645508 - protein, 16 aa, Homo sapiens
  CDR3 for beta chain variable domain of TCR clone 322754 (TRBV5-1, TRBJ2-5)
CASSPSSGARTETQYF

SEQ ID NO: 645509 - protein, 13 aa, Homo sapiens
  CDR3 for alpha chain variable domain of TCR clone 322755 (TRAV1-2, TRAJ9)
CAVLNTGGFKTIF

SEQ ID NO: 645510 - protein, 17 aa, Homo sapiens
  CDR3 for beta chain variable domain of TCR clone 322755 (TRBV13, TRBJ2-3)
CASSLSRVAGGGNTQYF

SEQ ID NO: 645511 - protein, 15 aa, Homo sapiens
  CDR3 for alpha chain variable domain of TCR clone 322756 (TRAV10, TRAJ39)
CVVSASGNAGNMLTF

SEQ ID NO: 645512 - protein, 13 aa, Homo sapiens
  CDR3 for beta chain variable domain of TCR clone 322756 (TRBV18, TRBJ2-7)
CASQSGGGYEQYV

SEQ ID NO: 645513 - protein, 14 aa, Homo sapiens
  CDR3 for alpha chain variable domain of TCR clone 322757 (TRAV35, TRAJ33)
CAGSSQDSNYQSIW

SEQ ID NO: 645514 - protein, 12 aa, Homo sapiens
  CDR3 for beta chain variable domain of TCR clone 322757 (TRBV7-9, TRBJ2-7)
CATRTDAYEQYF

SEQ ID NO: 645515 - protein, 13 aa, Homo sapiens
  CDR3 for alpha chain variable domain of TCR clone 322758 (TRAV13-1, TRAJ39)
CAASICPVNMLTF

SEQ ID NO: 645516 - protein, 15 aa, Homo sapiens
  CDR3 for beta chain variable domain of TCR clone 322758 (TRBV7-9, TRBJ1-1)
CASSLLEQGGTEAFF

SEQ ID NO: 645517 - protein, 21 aa, Homo sapiens
  CDR3 for alpha chain variable domain of TCR clone 322759 (TRAV26-1, TRAJ17)
CCVLLHRQSSGSKATGNKLTF

SEQ ID NO: 645518 - protein, 14 aa, Homo sapiens
  CDR3 for beta chain variable domain of TCR clone 322759 (TRBV28, TRBJ1-2)
CASRIQGANYGYTF

SEQ ID NO: 645519 - protein, 15 aa, Homo sapiens
  CDR3 for alpha chain variable domain of TCR clone 322760 (TRAV1-1, TRAJ20)
CAVRYNVANDYKLSF

SEQ ID NO: 645520 - protein, 13 aa, Homo sapiens
  CDR3 for beta chain variable domain of TCR clone 322760 (TRBV7-2, TRBJ2-1)
CASSRQGYNEQFF

SEQ ID NO: 645521 - protein, 17 aa, Homo sapiens
  CDR3 for alpha chain variable domain of TCR clone 322761 (TRAV26-2, TRAJ42)
CILRDVGCGGSQGNPIF

SEQ ID NO: 645522 - protein, 16 aa, Homo sapiens
  CDR3 for beta chain variable domain of TCR clone 322761 (TRBV12-4, TRBJ2-7)
CASSLIGGTGTYEQYF

SEQ ID NO: 645523 - protein, 17 aa, Homo sapiens
  CDR3 for alpha chain variable domain of TCR clone 322762 (TRAV17, TRAJ28)
CATDPRRGGAGSYQLTF

SEQ ID NO: 645524 - protein, 16 aa, Homo sapiens
  CDR3 for beta chain variable domain of TCR clone 322762 (TRBV25-1, TRBJ1-1)
CASSGDRVRGRIEAFF

SEQ ID NO: 645525 - protein, 15 aa, Homo sapiens
  CDR3 for alpha chain variable domain of TCR clone 322763 (TRAV34, TRAJ38)
CGADYTPGNNRKLIW

SEQ ID NO: 645526 - protein, 16 aa, Homo sapiens
  CDR3 for beta chain variable domain of TCR clone 322763 (TRBV6-1, TRBJ2-3)
CASSEVIGQGTDTQYF

SEQ ID NO: 645527 - protein, 13 aa, Homo sapiens
  CDR3 for alpha chain variable domain of TCR clone 322764 (TRAV12-1, TRAJ33)
CGDAPYSNYQLIW

SEQ ID NO: 645528 - protein, 15 aa, Homo sapiens
  CDR3 for beta chain variable domain of TCR clone 322764 (TRBV7-2, TRBJ2-2)
CASRRPGQNTGELFF

SEQ ID NO: 645529 - protein, 17 aa, Homo sapiens
  CDR3 for alpha chain variable domain of TCR clone 322765 (TRAV17, TRAJ52)
CATDRPSGGTSYGKLTF

SEQ ID NO: 645530 - protein, 15 aa, Homo sapiens
  CDR3 for beta chain variable domain of TCR clone 322765 (TRBV5-1, TRBJ2-1)
CASSLVANSYNEQFF

SEQ ID NO: 645531 - protein, 17 aa, Homo sapiens
  CDR3 for alpha chain variable domain of TCR clone 322766 (TRAV12-2, TRAJ4)
CAVNVRPVSGGYNKLIF

SEQ ID NO: 645532 - protein, 17 aa, Homo sapiens
  CDR3 for beta chain variable domain of TCR clone 322766 (TRBV6-3, TRBJ2-1)
CASSYSSGTRGLDEQLF

SEQ ID NO: 645533 - protein, 15 aa, Homo sapiens
  CDR3 for alpha chain variable domain of TCR clone 322767 (TRAV4, TRAJ39)
CLVGPNNNAGNMLTF

SEQ ID NO: 645534 - protein, 12 aa, Homo sapiens
  CDR3 for beta chain variable domain of TCR clone 322767 (TRBV12-4, TRBJ2-7)
CASNPGGGERYF

SEQ ID NO: 645535 - protein, 17 aa, Homo sapiens
  CDR3 for alpha chain variable domain of TCR clone 322768 (TRAV16, TRAJ58)
CITVLSNGETSGSRLTF

SEQ ID NO: 645536 - protein, 17 aa, Homo sapiens
  CDR3 for beta chain variable domain of TCR clone 322768 (TRBV18, TRBJ2-1)
CASSKVLSGGADNEQFF

SEQ ID NO: 645537 - protein, 14 aa, Homo sapiens
  CDR3 for alpha chain variable domain of TCR clone 322769 (TRAV1-2, TRAJ6)
CAVSLSGGSYIPTF

SEQ ID NO: 645538 - protein, 13 aa, Homo sapiens
  CDR3 for beta chain variable domain of TCR clone 322769 (TRBV12-4, TRBJ1-2)
CASSSGPNYGYTF

SEQ ID NO: 645539 - protein, 11 aa, Homo sapiens
  CDR3 for alpha chain variable domain of TCR clone 322770 (TRAV2, TRAJ13)
CASGGYQKVTF

SEQ ID NO: 645540 - protein, 18 aa, Homo sapiens
  CDR3 for beta chain variable domain of TCR clone 322770 (TRBV19, TRBJ2-6)
CASVGPTSGGSGANVLTF

SEQ ID NO: 645541 - protein, 14 aa, Homo sapiens
  CDR3 for alpha chain variable domain of TCR clone 322771 (TRAV17, TRAJ57)
CATDPQGGPEKLVF

SEQ ID NO: 645542 - protein, 14 aa, Homo sapiens
  CDR3 for beta chain variable domain of TCR clone 322771 (TRBV11-2, TRBJ2-3)
CASSLGGGANTQYF

SEQ ID NO: 645543 - protein, 15 aa, Homo sapiens
  CDR3 for alpha chain variable domain of TCR clone 322772 (TRAV3, TRAJ3)
CCERQGEKQCFKIIF

SEQ ID NO: 645544 - protein, 13 aa, Homo sapiens
  CDR3 for beta chain variable domain of TCR clone 322772 (TRBV10-3, TRBJ2-7)
CASKLAVNYEQYF

SEQ ID NO: 645545 - protein, 13 aa, Homo sapiens
  CDR3 for alpha chain variable domain of TCR clone 322773 (TRAV3, TRAJ8)
CAVRFTGFQKLVF

SEQ ID NO: 645546 - protein, 15 aa, Homo sapiens
  CDR3 for beta chain variable domain of TCR clone 322773 (TRBV5-1, TRBJ2-1)
CASSPPRAPYNEQFF

SEQ ID NO: 645547 - protein, 15 aa, Homo sapiens
  CDR3 for alpha chain variable domain of TCR clone 322774 (TRAV3, TRAJ22)
CAVRDRGGFARQLTF

SEQ ID NO: 645548 - protein, 20 aa, Homo sapiens
  CDR3 for beta chain variable domain of TCR clone 322774 (TRBV11-2, TRBJ1-6)
CASSLVFATGGSVHPSTLGT

SEQ ID NO: 645549 - protein, 14 aa, Homo sapiens
  CDR3 for alpha chain variable domain of TCR clone 322775 (TRAV12-2, TRAJ13)
CPVKKTGGYRKVTF

SEQ ID NO: 645550 - protein, 15 aa, Homo sapiens
  CDR3 for beta chain variable domain of TCR clone 322775 (TRBV27, TRBJ2-1)
CASSNGGGSSNEQFF

SEQ ID NO: 645551 - protein, 14 aa, Homo sapiens
  CDR3 for alpha chain variable domain of TCR clone 322776 (TRAV23/DV6, TRAJ11)
CAASLESGYSTLTS

SEQ ID NO: 645552 - protein, 15 aa, Homo sapiens
  CDR3 for beta chain variable domain of TCR clone 322776 (TRBV28, TRBJ2-7)
CASSSPGTEPFEQYF

SEQ ID NO: 645553 - protein, 16 aa, Homo sapiens
  CDR3 for alpha chain variable domain of TCR clone 322777 (TRAV3, TRAJ37)
CAVRDSGSGNTGKLIF

SEQ ID NO: 645554 - protein, 12 aa, Homo sapiens
  CDR3 for beta chain variable domain of TCR clone 322777 (TRBV7-2, TRBJ2-5)
CASSLDRETQYF

SEQ ID NO: 645555 - protein, 15 aa, Homo sapiens
  CDR3 for alpha chain variable domain of TCR clone 322778 (TRAV4, TRAJ8)
CLVGEQHTGFQKLVF

SEQ ID NO: 645556 - protein, 14 aa, Homo sapiens
  CDR3 for beta chain variable domain of TCR clone 322778 (TRBV7-6, TRBJ2-3)
CASSVAGGTDTQYF

SEQ ID NO: 645557 - protein, 13 aa, Homo sapiens
  CDR3 for alpha chain variable domain of TCR clone 322779 (TRAV35, TRAJ21)
CAGQLSNFNKFYF

SEQ ID NO: 645558 - protein, 11 aa, Homo sapiens
  CDR3 for beta chain variable domain of TCR clone 322779 (TRBV7-6, TRBJ2-5)
FASSSQETQYF

SEQ ID NO: 645559 - protein, 16 aa, Homo sapiens
  CDR3 for alpha chain variable domain of TCR clone 322780 (TRAV20, TRAJ53)
CAVRRGSGGSNYKLTF

SEQ ID NO: 645560 - protein, 12 aa, Homo sapiens
  CDR3 for beta chain variable domain of TCR clone 322780 (TRBV29-1, TRBJ2-3)
CSVVLGADMQYS

SEQ ID NO: 645561 - protein, 11 aa, Homo sapiens
  CDR3 for alpha chain variable domain of TCR clone 322781 (TRAV1-2, TRAJ20)
RAVANDYKLSF

SEQ ID NO: 645562 - protein, 18 aa, Homo sapiens
  CDR3 for beta chain variable domain of TCR clone 322781 (TRBV20-1, TRBJ2-6)
CSAETTPTHGSGANDLTF

SEQ ID NO: 645563 - protein, 14 aa, Homo sapiens
  CDR3 for alpha chain variable domain of TCR clone 322782 (TRAV12-2, TRAJ40)
CAVKIPAGTYKYIF

SEQ ID NO: 645564 - protein, 17 aa, Homo sapiens
  CDR3 for beta chain variable domain of TCR clone 322782 (TRBV13, TRBJ2-3)
CASSLSRVAGGRNTQYF

SEQ ID NO: 645565 - protein, 12 aa, Homo sapiens
  CDR3 for alpha chain variable domain of TCR clone 322783 (TRAV27, TRAJ33)
CAGDGSNYQLIW

SEQ ID NO: 645566 - protein, 16 aa, Homo sapiens
  CDR3 for beta chain variable domain of TCR clone 322783 (TRBV12-5, TRBJ2-5)
CASGPRTSGNQETQYF

SEQ ID NO: 645567 - protein, 14 aa, Homo sapiens
  CDR3 for alpha chain variable domain of TCR clone 322784 (TRAV17, TRAJ9)
CATVTLGGGFKTIF

SEQ ID NO: 645568 - protein, 13 aa, Homo sapiens
  CDR3 for beta chain variable domain of TCR clone 322784 (TRBV12-4, TRBJ1-2)
CASSYRVNYGYTF

SEQ ID NO: 645569 - protein, 11 aa, Homo sapiens
  CDR3 for alpha chain variable domain of TCR clone 322785 (TRAV17, TRAJ43)
CATPRSNDMRF

SEQ ID NO: 645570 - protein, 16 aa, Homo sapiens
  CDR3 for beta chain variable domain of TCR clone 322785 (TRBV3-1, TRBJ2-5)
CASSPGQFNGFGTQYF

SEQ ID NO: 645571 - protein, 13 aa, Homo sapiens
  CDR3 for alpha chain variable domain of TCR clone 322786 (TRAV22, TRAJ48)
CAVERFGNEQLTF

SEQ ID NO: 645572 - protein, 13 aa, Homo sapiens
  CDR3 for beta chain variable domain of TCR clone 322786 (TRBV20-1, TRBJ2-5)
CSARGDYQETQYF

SEQ ID NO: 645573 - protein, 14 aa, Homo sapiens
  CDR3 for alpha chain variable domain of TCR clone 322787 (TRAV38-1, TRAJ45)
CASHSGGGADGLNF

SEQ ID NO: 645574 - protein, 13 aa, Homo sapiens
  CDR3 for beta chain variable domain of TCR clone 322787 (TRBV10-3, TRBJ1-2)
CAISERGSYGYTF

SEQ ID NO: 645575 - protein, 13 aa, Homo sapiens
  CDR3 for alpha chain variable domain of TCR clone 322788 (TRAV1-1, TRAJ31)
CASYLSKNARLMF

SEQ ID NO: 645576 - protein, 13 aa, Homo sapiens
  CDR3 for beta chain variable domain of TCR clone 322788 (TRBV15, TRBJ1-6)
CATSGGLNSPLHF

SEQ ID NO: 645577 - protein, 15 aa, Homo sapiens
  CDR3 for alpha chain variable domain of TCR clone 322789 (TRAV12-2, TRAJ57)
CAVSRGQGGSEELVF

SEQ ID NO: 645578 - protein, 14 aa, Homo sapiens
  CDR3 for beta chain variable domain of TCR clone 322789 (TRBV20-1, TRBJ2-1)
CSAHPGLPYNEQFF

SEQ ID NO: 645579 - protein, 12 aa, Homo sapiens
  CDR3 for alpha chain variable domain of TCR clone 322790 (TRAV25, TRAJ48)
CAGDFGNEKLTF

SEQ ID NO: 645580 - protein, 11 aa, Homo sapiens
  CDR3 for beta chain variable domain of TCR clone 322790 (TRBV2, TRBJ2-5)
CQQRNGETQYF

SEQ ID NO: 645581 - protein, 14 aa, Homo sapiens
  CDR3 for alpha chain variable domain of TCR clone 322791 (TRAV2, TRAJ9)
CAVEDRSGGLKTIF

SEQ ID NO: 645582 - protein, 16 aa, Homo sapiens
  CDR3 for beta chain variable domain of TCR clone 322791 (TRBV7-3, TRBJ2-1)
CASSLEGYRSYNEQFF

SEQ ID NO: 645583 - protein, 17 aa, Homo sapiens
  CDR3 for alpha chain variable domain of TCR clone 322792 (TRAV3, TRAJ42)
CAVRDRDYGGSQGNLIF

SEQ ID NO: 645584 - protein, 18 aa, Homo sapiens
  CDR3 for beta chain variable domain of TCR clone 322792 (TRBV20-1, TRBJ2-3)
CSDSGLAGGPGTTDTQYF

SEQ ID NO: 645585 - protein, 16 aa, Homo sapiens
  CDR3 for alpha chain variable domain of TCR clone 322793 (TRAV3, TRAJ10)
CAVRDMRAGGGNKLTF

SEQ ID NO: 645586 - protein, 17 aa, Homo sapiens
  CDR3 for beta chain variable domain of TCR clone 322793 (TRBV14, TRBJ2-5)
CASSQASGRPSTSGQAR

SEQ ID NO: 645587 - protein, 13 aa, Homo sapiens
  CDR3 for alpha chain variable domain of TCR clone 322794 (TRAV16, TRAJ34)
CALSPYNTDKLIF

SEQ ID NO: 645588 - protein, 15 aa, Homo sapiens
  CDR3 for beta chain variable domain of TCR clone 322794 (TRBV12-3, TRBJ2-5)
CASSPPTGLQETQYF

SEQ ID NO: 645589 - protein, 13 aa, Homo sapiens
  CDR3 for alpha chain variable domain of TCR clone 322795 (TRAV17, TRAJ40)
CAGALGGTYKYIF

SEQ ID NO: 645590 - protein, 13 aa, Homo sapiens
  CDR3 for beta chain variable domain of TCR clone 322795 (TRBV7-9, TRBJ1-2)
CASSLKQNYGYTF

SEQ ID NO: 645591 - protein, 15 aa, Homo sapiens
  CDR3 for alpha chain variable domain of TCR clone 322796 (TRAV12-1, TRAJ44)
CVVDTPQGTASKLTF

SEQ ID NO: 645592 - protein, 14 aa, Homo sapiens
  CDR3 for beta chain variable domain of TCR clone 322796 (TRBV7-9, TRBJ2-1)
CASSPRDSLYEQVF

SEQ ID NO: 645593 - protein, 13 aa, Homo sapiens
  CDR3 for alpha chain variable domain of TCR clone 322797 (TRAV12-2, TRAJ52)
CAVGGTSYGKLTF

SEQ ID NO: 645594 - protein, 15 aa, Homo sapiens
  CDR3 for beta chain variable domain of TCR clone 322797 (TRBV4-3, TRBJ2-1)
CASSQGLAGSNEQFF

SEQ ID NO: 645595 - protein, 14 aa, Homo sapiens
  CDR3 for alpha chain variable domain of TCR clone 322798 (TRAV1-2, TRAJ8)
CAVREDTGFQKLVF

SEQ ID NO: 645596 - protein, 14 aa, Homo sapiens
  CDR3 for beta chain variable domain of TCR clone 322798 (TRBV19, TRBJ2-2)
CASSIAGAFGELFF

SEQ ID NO: 645597 - protein, 11 aa, Homo sapiens
  CDR3 for alpha chain variable domain of TCR clone 322799 (TRAV23/DV6, TRAJ58)
CAARLLRGETS

SEQ ID NO: 645598 - protein, 15 aa, Homo sapiens
  CDR3 for beta chain variable domain of TCR clone 322799 (TRBV19, TRBJ1-6)
CASSTQGAVGSPLHF

SEQ ID NO: 645599 - protein, 13 aa, Homo sapiens
  CDR3 for alpha chain variable domain of TCR clone 322800 (TRAV8-3, TRAJ28)
CAVGAVGSYQLTF

SEQ ID NO: 645600 - protein, 14 aa, Homo sapiens
  CDR3 for beta chain variable domain of TCR clone 322800 (TRBV7-9, TRBJ2-7)
CASSPKTSFYEQYF

SEQ ID NO: 645601 - protein, 15 aa, Homo sapiens
  CDR3 for alpha chain variable domain of TCR clone 322801 (TRAV23/DV6, TRAJ45)
CAAGRAGGGADGLTF

SEQ ID NO: 645602 - protein, 13 aa, Homo sapiens
  CDR3 for beta chain variable domain of TCR clone 322801 (TRBV3-1, TRBJ2-2)
CASRQTNTGELFF

SEQ ID NO: 645603 - protein, 15 aa, Homo sapiens
  CDR3 for alpha chain variable domain of TCR clone 322802 (TRAV12-1, TRAJ44)
CVADLPTGTASKLTF

SEQ ID NO: 645604 - protein, 13 aa, Homo sapiens
  CDR3 for beta chain variable domain of TCR clone 322802 (TRBV19, TRBJ2-5)
CASRDSRRETQYF

SEQ ID NO: 645605 - protein, 16 aa, Homo sapiens
  CDR3 for alpha chain variable domain of TCR clone 322803 (TRAV27, TRAJ41)
ASTSVQERNSGYALNF

SEQ ID NO: 645606 - protein, 14 aa, Homo sapiens
  CDR3 for beta chain variable domain of TCR clone 322803 (TRBV25-1, TRBJ1-1)
CASSHLGGNTEAFF

SEQ ID NO: 645607 - protein, 14 aa, Homo sapiens
  CDR3 for alpha chain variable domain of TCR clone 322804 (TRAV8-1, TRAJ5)
CAVRTGTGRRALTF

SEQ ID NO: 645608 - protein, 14 aa, Homo sapiens
  CDR3 for beta chain variable domain of TCR clone 322804 (TRBV5-5, TRBJ1-2)
CASSLDPYNYGYTF

SEQ ID NO: 645609 - protein, 14 aa, Homo sapiens
  CDR3 for alpha chain variable domain of TCR clone 322805 (TRAV1-2, TRAJ16)
CAVNRFSAGQKLLF

SEQ ID NO: 645610 - protein, 13 aa, Homo sapiens
  CDR3 for beta chain variable domain of TCR clone 322805 (TRBV20-1, TRBJ1-1)
CSARLGQGTEAFF

SEQ ID NO: 645611 - protein, 13 aa, Homo sapiens
  CDR3 for alpha chain variable domain of TCR clone 322806 (TRAV3, TRAJ27)
CSVTNTNAGKSTF

SEQ ID NO: 645612 - protein, 13 aa, Homo sapiens
  CDR3 for beta chain variable domain of TCR clone 322806 (TRBV19, TRBJ2-7)
CASQSYGAGEQYF

SEQ ID NO: 645613 - protein, 16 aa, Homo sapiens
  CDR3 for alpha chain variable domain of TCR clone 322807 (TRAV17, TRAJ22)
CATGPISSGSARQLTF

SEQ ID NO: 645614 - protein, 14 aa, Homo sapiens
  CDR3 for beta chain variable domain of TCR clone 322807 (TRBV27, TRBJ2-5)
CASSRTFLVDTQYF

SEQ ID NO: 645615 - protein, 11 aa, Homo sapiens
  CDR3 for alpha chain variable domain of TCR clone 322808 (TRAV17, TRAJ31)
CATSNNARLMF

SEQ ID NO: 645616 - protein, 14 aa, Homo sapiens
  CDR3 for beta chain variable domain of TCR clone 322808 (TRBV7-2, TRBJ2-7)
CASSLDPGGGEQYF

SEQ ID NO: 645617 - protein, 15 aa, Homo sapiens
  CDR3 for alpha chain variable domain of TCR clone 322809 (TRAV21, TRAJ53)
FATLNSGGSNYKLTF

SEQ ID NO: 645618 - protein, 12 aa, Homo sapiens
  CDR3 for beta chain variable domain of TCR clone 322809 (TRBV11-2, TRBJ2-2)
CASSLPTGELFF

SEQ ID NO: 645619 - protein, 16 aa, Homo sapiens
  CDR3 for alpha chain variable domain of TCR clone 322810 (TRAV30, TRAJ24)
CVTEIVDADSWGKFQF

SEQ ID NO: 645620 - protein, 15 aa, Homo sapiens
  CDR3 for beta chain variable domain of TCR clone 322810 (TRBV18, TRBJ2-1)
CASLPDRGRDNEQFF

SEQ ID NO: 645621 - protein, 12 aa, Homo sapiens
  CDR3 for alpha chain variable domain of TCR clone 322811 (TRAV20, TRAJ33)
CAVRGSDYQLIW

SEQ ID NO: 645622 - protein, 13 aa, Homo sapiens
  CDR3 for beta chain variable domain of TCR clone 322811 (TRBV4-3, TRBJ1-1)
CASSPTGNTEAFF

SEQ ID NO: 645623 - protein, 16 aa, Homo sapiens
  CDR3 for alpha chain variable domain of TCR clone 322812 (TRAV10, TRAJ13)
CVVSVRNSGGYQKVTF

SEQ ID NO: 645624 - protein, 19 aa, Homo sapiens
  CDR3 for beta chain variable domain of TCR clone 322812 (TRBV12-4, TRBJ2-1)
CASTLAFDPRDKEANEQFF

SEQ ID NO: 645625 - protein, 14 aa, Homo sapiens
  CDR3 for alpha chain variable domain of TCR clone 322813 (TRAV12-2, TRAJ3)
CAVRLYSSASKIIF

SEQ ID NO: 645626 - protein, 15 aa, Homo sapiens
  CDR3 for beta chain variable domain of TCR clone 322813 (TRBV9, TRBJ1-6)
CASSVAGTGDSPLHF

SEQ ID NO: 645627 - protein, 14 aa, Homo sapiens
  CDR3 for alpha chain variable domain of TCR clone 322814 (TRAV12-2, TRAJ40)
CAVKIPSGTYKYIF

SEQ ID NO: 645628 - protein, 14 aa, Homo sapiens
  CDR3 for beta chain variable domain of TCR clone 322814 (TRBV20-1, TRBJ1-1)
CRAQTRIGGTDAFF

SEQ ID NO: 645629 - protein, 14 aa, Homo sapiens
  CDR3 for alpha chain variable domain of TCR clone 322815 (TRAV17, TRAJ15)
CATTTNQAGTALIF

SEQ ID NO: 645630 - protein, 16 aa, Homo sapiens
  CDR3 for beta chain variable domain of TCR clone 322815 (TRBV4-1, TRBJ2-7)
CASSRGDMLNSYEQYF

SEQ ID NO: 645631 - protein, 14 aa, Homo sapiens
  CDR3 for alpha chain variable domain of TCR clone 322816 (TRAV1-2, TRAJ8)
CAVREDTGFQKLEF

SEQ ID NO: 645632 - protein, 15 aa, Homo sapiens
  CDR3 for beta chain variable domain of TCR clone 322816 (TRBV28, TRBJ2-1)
CASSIIAGGRSEQFF

SEQ ID NO: 645633 - protein, 11 aa, Homo sapiens
  CDR3 for alpha chain variable domain of TCR clone 322817 (TRAV8-6, TRAJ42)
GGGGSQGNLIF

SEQ ID NO: 645634 - protein, 12 aa, Homo sapiens
  CDR3 for beta chain variable domain of TCR clone 322817 (TRBV7-3, TRBJ1-1)
CQQPGLGAEAFF

SEQ ID NO: 645635 - protein, 11 aa, Homo sapiens
  CDR3 for alpha chain variable domain of TCR clone 322818 (TRAV2, TRAJ13)
CASGGYQKVTF

SEQ ID NO: 645636 - protein, 13 aa, Homo sapiens
  CDR3 for beta chain variable domain of TCR clone 322818 (TRBV12-4, TRBJ2-7)
CDSSPTETYEQYF

SEQ ID NO: 645637 - protein, 15 aa, Homo sapiens
  CDR3 for alpha chain variable domain of TCR clone 322819 (TRAV2, TRAJ9)
CAVEDRGTGGFKTIF

SEQ ID NO: 645638 - protein, 16 aa, Homo sapiens
  CDR3 for beta chain variable domain of TCR clone 322819 (TRBV4-3, TRBJ2-1)
CASSTALDRGVNEQFF

SEQ ID NO: 645639 - protein, 16 aa, Homo sapiens
  CDR3 for alpha chain variable domain of TCR clone 322820 (TRAV30, TRAJ24)
CGTEIVDADSWGKFQF

SEQ ID NO: 645640 - protein, 14 aa, Homo sapiens
  CDR3 for beta chain variable domain of TCR clone 322820 (TRBV5-1, TRBJ2-2)
CASSLGGGSGELFF

SEQ ID NO: 645641 - protein, 14 aa, Homo sapiens
  CDR3 for alpha chain variable domain of TCR clone 322821 (TRAV16, TRAJ37)
FALDISGNTGKLIF

SEQ ID NO: 645642 - protein, 15 aa, Homo sapiens
  CDR3 for beta chain variable domain of TCR clone 322821 (TRBV2, TRBJ2-1)
CASSELAGGHNEQFF

SEQ ID NO: 645643 - protein, 12 aa, Homo sapiens
  CDR3 for alpha chain variable domain of TCR clone 322822 (TRAV1-2, TRAJ29)
CAVPSGNTPLFF

SEQ ID NO: 645644 - protein, 14 aa, Homo sapiens
  CDR3 for beta chain variable domain of TCR clone 322822 (TRBV18, TRBJ2-5)
CASSPGVSQETQYF

SEQ ID NO: 645645 - protein, 14 aa, Homo sapiens
  CDR3 for alpha chain variable domain of TCR clone 322823 (TRAV13-1, TRAJ9)
CAASALTGGFKTIL

SEQ ID NO: 645646 - protein, 13 aa, Homo sapiens
  CDR3 for beta chain variable domain of TCR clone 322823 (TRBV20-1, TRBJ1-1)
CSAGTVGNTEDFF

SEQ ID NO: 645647 - protein, 12 aa, Homo sapiens
  CDR3 for alpha chain variable domain of TCR clone 322824 (TRAV29/DV5, TRAJ34)
CAARHNTDKLIF

SEQ ID NO: 645648 - protein, 15 aa, Homo sapiens
  CDR3 for beta chain variable domain of TCR clone 322824 (TRBV7-9, TRBJ1-6)
CASSSPGRGNSPLHF

SEQ ID NO: 645649 - protein, 13 aa, Homo sapiens
  CDR3 for alpha chain variable domain of TCR clone 322825 (TRAV12-1, TRAJ37)
CVVNAGNTGKLIF

SEQ ID NO: 645650 - protein, 14 aa, Homo sapiens
  CDR3 for beta chain variable domain of TCR clone 322825 (TRBV7-2, TRBJ2-7)
CASRSQGAAYEQYF

SEQ ID NO: 645651 - protein, 15 aa, Homo sapiens
  CDR3 for alpha chain variable domain of TCR clone 322826 (TRAV3, TRAJ20)
CAVRDIKLSDYKRSF

SEQ ID NO: 645652 - protein, 16 aa, Homo sapiens
  CDR3 for beta chain variable domain of TCR clone 322826 (TRBV7-9, TRBJ1-2)
CASSLGFSSGEDGYTF

SEQ ID NO: 645653 - protein, 17 aa, Homo sapiens
  CDR3 for alpha chain variable domain of TCR clone 322827 (TRAV23/DV6, TRAJ57)
CAASPTLSQGGSEKLVF

SEQ ID NO: 645654 - protein, 14 aa, Homo sapiens
  CDR3 for beta chain variable domain of TCR clone 322827 (TRBV7-8, TRBJ2-1)
CASSSQGTYNEQFF

SEQ ID NO: 645655 - protein, 13 aa, Homo sapiens
  CDR3 for alpha chain variable domain of TCR clone 322828 (TRAV17, TRAJ5)
CAPMDTGRKALTF

SEQ ID NO: 645656 - protein, 15 aa, Homo sapiens
  CDR3 for beta chain variable domain of TCR clone 322828 (TRBV6-6, TRBJ2-5)
CASSPGGGLEETQYF

SEQ ID NO: 645657 - protein, 16 aa, Homo sapiens
  CDR3 for alpha chain variable domain of TCR clone 322829 (TRAV4, TRAJ22)
CLVGDLYSSSARQLTY

SEQ ID NO: 645658 - protein, 16 aa, Homo sapiens
  CDR3 for beta chain variable domain of TCR clone 322829 (TRBV7-9, TRBJ2-1)
CASSDVAGGSYNEQFF

SEQ ID NO: 645659 - protein, 15 aa, Homo sapiens
  CDR3 for alpha chain variable domain of TCR clone 322830 (TRAV20, TRAJ23)
CAVQAVRNQGGKLIF

SEQ ID NO: 645660 - protein, 16 aa, Homo sapiens
  CDR3 for beta chain variable domain of TCR clone 322830 (TRBV27, TRBJ2-7)
CASSKQGRGWAYEHYF

SEQ ID NO: 645661 - protein, 14 aa, Homo sapiens
  CDR3 for alpha chain variable domain of TCR clone 322831 (TRAV12-2, TRAJ45)
CALPERGGADGLTF

SEQ ID NO: 645662 - protein, 14 aa, Homo sapiens
  CDR3 for beta chain variable domain of TCR clone 322831 (TRBV18, TRBJ1-5)
CARSPGNSNQPQHF

SEQ ID NO: 645663 - protein, 12 aa, Homo sapiens
  CDR3 for alpha chain variable domain of TCR clone 322832 (TRAV25, TRAJ11)
CAAASGYSTLTF

SEQ ID NO: 645664 - protein, 14 aa, Homo sapiens
  CDR3 for beta chain variable domain of TCR clone 322832 (TRBV5-8, TRBJ2-3)
CASSLGQGTDTQYF

SEQ ID NO: 645665 - protein, 14 aa, Homo sapiens
  CDR3 for alpha chain variable domain of TCR clone 322833 (TRAV1-2, TRAJ33)
CAVRAPDSNYQLSW

SEQ ID NO: 645666 - protein, 14 aa, Homo sapiens
  CDR3 for beta chain variable domain of TCR clone 322833 (TRBV11-3, TRBJ1-6)
CASSFSGGDSPLHF

SEQ ID NO: 645667 - protein, 15 aa, Homo sapiens
  CDR3 for alpha chain variable domain of TCR clone 322834 (TRAV12-2, TRAJ53)
CAVNGGGGSNYKLTV

SEQ ID NO: 645668 - protein, 17 aa, Homo sapiens
  CDR3 for beta chain variable domain of TCR clone 322834 (TRBV7-3, TRBJ2-3)
RASSLMKRMRGADTQYF

SEQ ID NO: 645669 - protein, 15 aa, Homo sapiens
  CDR3 for alpha chain variable domain of TCR clone 322835 (TRAV1-2, TRAJ15)
CAVDVMGSAGTALIF

SEQ ID NO: 645670 - protein, 13 aa, Homo sapiens
  CDR3 for beta chain variable domain of TCR clone 322835 (TRBV20-1, TRBJ1-1)
CSAFDRENTEAFL

SEQ ID NO: 645671 - protein, 14 aa, Homo sapiens
  CDR3 for alpha chain variable domain of TCR clone 322836 (TRAV12-1, TRAJ9)
CGEFRGYWRLKTIF

SEQ ID NO: 645672 - protein, 19 aa, Homo sapiens
  CDR3 for beta chain variable domain of TCR clone 322836 (TRBV25-1, TRBJ2-2)
CAILVYRVDRGRKTGELFF

SEQ ID NO: 645673 - protein, 13 aa, Homo sapiens
  CDR3 for alpha chain variable domain of TCR clone 322837 (TRAV23/DV6, TRAJ9)
CTASTTGGFKTIF

SEQ ID NO: 645674 - protein, 15 aa, Homo sapiens
  CDR3 for beta chain variable domain of TCR clone 322837 (TRBV7-2, TRBJ2-1)
CASRKTGSSYNEQFF

SEQ ID NO: 645675 - protein, 15 aa, Homo sapiens
  CDR3 for alpha chain variable domain of TCR clone 322838 (TRAV12-1, TRAJ6)
CVVNSPSGGSYIHTF

SEQ ID NO: 645676 - protein, 15 aa, Homo sapiens
  CDR3 for beta chain variable domain of TCR clone 322838 (TRBV18, TRBJ1-1)
CASSGRTGEVTEAFF

SEQ ID NO: 645677 - protein, 12 aa, Homo sapiens
  CDR3 for alpha chain variable domain of TCR clone 322839 (TRAV13-1, TRAJ11)
CAGPSGYSTLTF

SEQ ID NO: 645678 - protein, 14 aa, Homo sapiens
  CDR3 for beta chain variable domain of TCR clone 322839 (TRBV12-5, TRBJ2-5)
CASGSRTHQETQYF

SEQ ID NO: 645679 - protein, 13 aa, Homo sapiens
  CDR3 for alpha chain variable domain of TCR clone 322840 (TRAV13-2, TRAJ54)
FAENYQGAQKLVF

SEQ ID NO: 645680 - protein, 15 aa, Homo sapiens
  CDR3 for beta chain variable domain of TCR clone 322840 (TRBV3-1, TRBJ2-5)
CASSRGLALRETQYF

SEQ ID NO: 645681 - protein, 14 aa, Homo sapiens
  CDR3 for alpha chain variable domain of TCR clone 322841 (TRAV12-1, TRAJ23)
CVVNMHNQGGKLIF

SEQ ID NO: 645682 - protein, 14 aa, Homo sapiens
  CDR3 for beta chain variable domain of TCR clone 322841 (TRBV20-1, TRBJ2-3)
CSARDLALTDTQYF

SEQ ID NO: 645683 - protein, 16 aa, Homo sapiens
  CDR3 for alpha chain variable domain of TCR clone 322842 (TRAV12-3, TRAJ53)
CAMRPGSGGSNYKLKF

SEQ ID NO: 645684 - protein, 11 aa, Homo sapiens
  CDR3 for beta chain variable domain of TCR clone 322842 (TRBV29-1, TRBJ2-5)
CSEDRTGTQYF

SEQ ID NO: 645685 - protein, 11 aa, Homo sapiens
  CDR3 for alpha chain variable domain of TCR clone 322843 (TRAV1-2, TRAJ20)
CAVANNYKLSF

SEQ ID NO: 645686 - protein, 13 aa, Homo sapiens
  CDR3 for beta chain variable domain of TCR clone 322843 (TRBV7-9, TRBJ2-3)
CASSPGSTDTQYF

SEQ ID NO: 645687 - protein, 13 aa, Homo sapiens
  CDR3 for alpha chain variable domain of TCR clone 322844 (TRAV3, TRAJ21)
CAVREPDFNKFYF

SEQ ID NO: 645688 - protein, 16 aa, Homo sapiens
  CDR3 for beta chain variable domain of TCR clone 322844 (TRBV7-2, TRBJ2-6)
CASSLAGRSGANVLTF

SEQ ID NO: 645689 - protein, 14 aa, Homo sapiens
  CDR3 for alpha chain variable domain of TCR clone 322845 (TRAV23/DV6, TRAJ22)
CAADPSGSARQLTF

SEQ ID NO: 645690 - protein, 14 aa, Homo sapiens
  CDR3 for beta chain variable domain of TCR clone 322845 (TRBV5-1, TRBJ2-7)
CATSLWGAQDEQYF

SEQ ID NO: 645691 - protein, 12 aa, Homo sapiens
  CDR3 for alpha chain variable domain of TCR clone 322846 (TRAV12-3, TRAJ17)
CAMTLTGNKLTF

SEQ ID NO: 645692 - protein, 12 aa, Homo sapiens
  CDR3 for beta chain variable domain of TCR clone 322846 (TRBV11-2, TRBJ2-7)
CASSLPTYEQYF

SEQ ID NO: 645693 - protein, 12 aa, Homo sapiens
  CDR3 for alpha chain variable domain of TCR clone 322847 (TRAV25, TRAJ45)
DYSGGGADGLTF

SEQ ID NO: 645694 - protein, 19 aa, Homo sapiens
  CDR3 for beta chain variable domain of TCR clone 322847 (TRBV28, TRBJ2-7)
GASSYSGTSRLGWVYEQYF

SEQ ID NO: 645695 - protein, 17 aa, Homo sapiens
  CDR3 for alpha chain variable domain of TCR clone 322848 (TRAV3, TRAJ6)
CAVRAGPRAGGSYIPTF

SEQ ID NO: 645696 - protein, 15 aa, Homo sapiens
  CDR3 for beta chain variable domain of TCR clone 322848 (TRBV7-8, TRBJ1-5)
CASSLERRGLEPQHF

SEQ ID NO: 645697 - protein, 11 aa, Homo sapiens
  CDR3 for alpha chain variable domain of TCR clone 322849 (TRAV3, TRAJ21)
CAVGNFNKFYF

SEQ ID NO: 645698 - protein, 15 aa, Homo sapiens
  CDR3 for beta chain variable domain of TCR clone 322849 (TRBV5-1, TRBJ2-1)
CASSLVANSYNQQFF

SEQ ID NO: 645699 - protein, 12 aa, Homo sapiens
  CDR3 for alpha chain variable domain of TCR clone 322850 (TRAV21, TRAJ31)
CVLAGNNARLMF

SEQ ID NO: 645700 - protein, 12 aa, Homo sapiens
  CDR3 for beta chain variable domain of TCR clone 322850 (TRBV4-1, TRBJ2-3)
CASSQGTDTQYF

SEQ ID NO: 645701 - protein, 16 aa, Homo sapiens
  CDR3 for alpha chain variable domain of TCR clone 322851 (TRAV12-2, TRAJ32)
CAVNLGQGGATNKLIF

SEQ ID NO: 645702 - protein, 17 aa, Homo sapiens
  CDR3 for beta chain variable domain of TCR clone 322851 (TRBV4-1, TRBJ2-5)
CASSQDLTGGPIETQYF

SEQ ID NO: 645703 - protein, 16 aa, Homo sapiens
  CDR3 for alpha chain variable domain of TCR clone 322852 (TRAV14/DV4, TRAJ48)
CAMREGGNFGNGKLTF

SEQ ID NO: 645704 - protein, 15 aa, Homo sapiens
  CDR3 for beta chain variable domain of TCR clone 322852 (TRBV19, TRBJ2-1)
CASSSPGVPLDEQFF

SEQ ID NO: 645705 - protein, 14 aa, Homo sapiens
  CDR3 for alpha chain variable domain of TCR clone 322853 (TRAV8-2, TRAJ4)
CVVSPSGGYNKLIF

SEQ ID NO: 645706 - protein, 15 aa, Homo sapiens
  CDR3 for beta chain variable domain of TCR clone 322853 (TRBV7-9, TRBJ1-4)
CASSARTGGNEKLFF

SEQ ID NO: 645707 - protein, 15 aa, Homo sapiens
  CDR3 for alpha chain variable domain of TCR clone 322854 (TRAV8-1, TRAJ6)
CAVNANPGGSYIPTF

SEQ ID NO: 645708 - protein, 12 aa, Homo sapiens
  CDR3 for beta chain variable domain of TCR clone 322854 (TRBV7-9, TRBJ1-1)
CASSLSGGVAFF

SEQ ID NO: 645709 - protein, 12 aa, Homo sapiens
  CDR3 for alpha chain variable domain of TCR clone 322855 (TRAV12-3, TRAJ17)
CAMTLTGNKLTF

SEQ ID NO: 645710 - protein, 12 aa, Homo sapiens
  CDR3 for beta chain variable domain of TCR clone 322855 (TRBV7-2, TRBJ2-1)
CASSPQDIEQFF

SEQ ID NO: 645711 - protein, 14 aa, Homo sapiens
  CDR3 for alpha chain variable domain of TCR clone 322856 (TRAV8-4, TRAJ27)
CAVSKGTNAGKSTF

SEQ ID NO: 645712 - protein, 16 aa, Homo sapiens
  CDR3 for beta chain variable domain of TCR clone 322856 (TRBV2, TRBJ2-7)
CASSLTRRGSSYEQYF

SEQ ID NO: 645713 - protein, 13 aa, Homo sapiens
  CDR3 for alpha chain variable domain of TCR clone 322857 (TRAV12-3, TRAJ9)
CAMRNTGGFKTIF

SEQ ID NO: 645714 - protein, 14 aa, Homo sapiens
  CDR3 for beta chain variable domain of TCR clone 322857 (TRBV11-2, TRBJ2-7)
CASSSPGEGYEQYF

SEQ ID NO: 645715 - protein, 18 aa, Homo sapiens
  CDR3 for alpha chain variable domain of TCR clone 322858 (TRAV26-2, TRAJ45)
CILRVDKYSGGGADGLTF

SEQ ID NO: 645716 - protein, 14 aa, Homo sapiens
  CDR3 for beta chain variable domain of TCR clone 322858 (TRBV4-2, TRBJ2-1)
CASGLDRAYNEQFF

SEQ ID NO: 645717 - protein, 13 aa, Homo sapiens
  CDR3 for alpha chain variable domain of TCR clone 322859 (TRAV16, TRAJ21)
CACGWAKLQQILL

SEQ ID NO: 645718 - protein, 14 aa, Homo sapiens
  CDR3 for beta chain variable domain of TCR clone 322859 (TRBV19, TRBJ2-1)
CASPTFVLSGEQFF

SEQ ID NO: 645719 - protein, 14 aa, Homo sapiens
  CDR3 for alpha chain variable domain of TCR clone 322860 (TRAV26-1, TRAJ34)
CIVRVAYNTAKLIF

SEQ ID NO: 645720 - protein, 15 aa, Homo sapiens
  CDR3 for beta chain variable domain of TCR clone 322860 (TRBV20-1, TRBJ1-1)
CSASRGVTGNTEAFF

SEQ ID NO: 645721 - protein, 13 aa, Homo sapiens
  CDR3 for alpha chain variable domain of TCR clone 322861 (TRAV21, TRAJ27)
CAARPGNAGKSTL

SEQ ID NO: 645722 - protein, 14 aa, Homo sapiens
  CDR3 for beta chain variable domain of TCR clone 322861 (TRBV7-6, TRBJ2-3)
CASSLGTVTDTQDF

SEQ ID NO: 645723 - protein, 15 aa, Homo sapiens
  CDR3 for alpha chain variable domain of TCR clone 322862 (TRAV26-1, TRAJ39)
CIVRPGNNAGNMLTF

SEQ ID NO: 645724 - protein, 15 aa, Homo sapiens
  CDR3 for beta chain variable domain of TCR clone 322862 (TRBV6-3, TRBJ2-7)
CASSSPGTVFYEQYF

SEQ ID NO: 645725 - protein, 13 aa, Homo sapiens
  CDR3 for alpha chain variable domain of TCR clone 322863 (TRAV1-1, TRAJ9)
CATKNTGGFKAIF

SEQ ID NO: 645726 - protein, 14 aa, Homo sapiens
  CDR3 for beta chain variable domain of TCR clone 322863 (TRBV20-1, TRBJ2-1)
CSAQIGGSANEQFF

SEQ ID NO: 645727 - protein, 11 aa, Homo sapiens
  CDR3 for alpha chain variable domain of TCR clone 322864 (TRAV3, TRAJ21)
CAVGNFNKFYF

SEQ ID NO: 645728 - protein, 11 aa, Homo sapiens
  CDR3 for beta chain variable domain of TCR clone 322864 (TRBV19, TRBJ1-1)
CASSIGNEAFF

SEQ ID NO: 645729 - protein, 14 aa, Homo sapiens
  CDR3 for alpha chain variable domain of TCR clone 322865 (TRAV13-1, TRAJ40)
CAASMTSGTYKYIF

SEQ ID NO: 645730 - protein, 17 aa, Homo sapiens
  CDR3 for beta chain variable domain of TCR clone 322865 (TRBV7-6, TRBJ2-5)
CASSPGLADPWGETQYF

SEQ ID NO: 645731 - protein, 15 aa, Homo sapiens
  CDR3 for alpha chain variable domain of TCR clone 322866 (TRAV3, TRAJ5)
CAVRDRKTGRRGLTF

SEQ ID NO: 645732 - protein, 15 aa, Homo sapiens
  CDR3 for beta chain variable domain of TCR clone 322866 (TRBV7-8, TRBJ2-1)
CASSLADGLYNEQFF

SEQ ID NO: 645733 - protein, 20 aa, Homo sapiens
  CDR3 for alpha chain variable domain of TCR clone 322867 (TRAV1-1, TRAJ4)
CPLLLRCEGFLSGGYNKLIF

SEQ ID NO: 645734 - protein, 16 aa, Homo sapiens
  CDR3 for beta chain variable domain of TCR clone 322867 (TRBV28, TRBJ1-4)
CASSPPYRGRSEKLFF

SEQ ID NO: 645735 - protein, 12 aa, Homo sapiens
  CDR3 for alpha chain variable domain of TCR clone 322868 (TRAV21, TRAJ31)
CAVWGNNARLMF

SEQ ID NO: 645736 - protein, 16 aa, Homo sapiens
  CDR3 for beta chain variable domain of TCR clone 322868 (TRBV27, TRBJ2-5)
CGSSYGPGGQKETQYF

SEQ ID NO: 645737 - protein, 12 aa, Homo sapiens
  CDR3 for alpha chain variable domain of TCR clone 322869 (TRAV27, TRAJ35)
CAGADFGNVLHC

SEQ ID NO: 645738 - protein, 16 aa, Homo sapiens
  CDR3 for beta chain variable domain of TCR clone 322869 (TRBV5-1, TRBJ2-2)
CASSLWDTTNTGELFF

SEQ ID NO: 645739 - protein, 11 aa, Homo sapiens
  CDR3 for alpha chain variable domain of TCR clone 322870 (TRAV17, TRAJ9)
CATTGGLNTIF

SEQ ID NO: 645740 - protein, 14 aa, Homo sapiens
  CDR3 for beta chain variable domain of TCR clone 322870 (TRBV7-9, TRBJ2-2)
CASSGLADTGELFF

SEQ ID NO: 645741 - protein, 13 aa, Homo sapiens
  CDR3 for alpha chain variable domain of TCR clone 322871 (TRAV13-2, TRAJ13)
CAERPGGYQKVTF

SEQ ID NO: 645742 - protein, 15 aa, Homo sapiens
  CDR3 for beta chain variable domain of TCR clone 322871 (TRBV28, TRBJ2-1)
CASRKRGALRNEQFF

SEQ ID NO: 645743 - protein, 15 aa, Homo sapiens
  CDR3 for alpha chain variable domain of TCR clone 322872 (TRAV3, TRAJ47)
CAVRDIGENGNKLVF

SEQ ID NO: 645744 - protein, 14 aa, Homo sapiens
  CDR3 for beta chain variable domain of TCR clone 322872 (TRBV13, TRBJ2-5)
CASSLERVGETQYF

SEQ ID NO: 645745 - protein, 12 aa, Homo sapiens
  CDR3 for alpha chain variable domain of TCR clone 322873 (TRAV13-1, TRAJ21)
YAAKEGFNKFYF

SEQ ID NO: 645746 - protein, 14 aa, Homo sapiens
  CDR3 for beta chain variable domain of TCR clone 322873 (TRBV5-4, TRBJ1-1)
CASGLDSRRDEAFF

SEQ ID NO: 645747 - protein, 13 aa, Homo sapiens
  CDR3 for alpha chain variable domain of TCR clone 322874 (TRAV21, TRAJ27)
CAARPGNAGKSTF

SEQ ID NO: 645748 - protein, 18 aa, Homo sapiens
  CDR3 for beta chain variable domain of TCR clone 322874 (TRBV7-6, TRBJ2-1)
GHVSLFQQLGGGADEQFF

SEQ ID NO: 645749 - protein, 12 aa, Homo sapiens
  CDR3 for alpha chain variable domain of TCR clone 322875 (TRAV25, TRAJ17)
CAGEAAGNKLTF

SEQ ID NO: 645750 - protein, 14 aa, Homo sapiens
  CDR3 for beta chain variable domain of TCR clone 322875 (TRBV20-1, TRBJ2-7)
CSARVRDSPYEQYF

SEQ ID NO: 645751 - protein, 22 aa, Homo sapiens
  CDR3 for alpha chain variable domain of TCR clone 322876 (TRAV3, )
CAVRDHTGNNHTQNPDPAVYQL

SEQ ID NO: 645752 - protein, 14 aa, Homo sapiens
  CDR3 for beta chain variable domain of TCR clone 322876 (TRBV7-2, TRBJ2-7)
CASSSTVGGYEQYF

SEQ ID NO: 645753 - protein, 14 aa, Homo sapiens
  CDR3 for alpha chain variable domain of TCR clone 322877 (TRAV23/DV6, TRAJ40)
CAASLTSGTYKYIF

SEQ ID NO: 645754 - protein, 14 aa, Homo sapiens
  CDR3 for beta chain variable domain of TCR clone 322877 (TRBV5-1, TRBJ2-3)
GASSRGQGGGTQYF

SEQ ID NO: 645755 - protein, 14 aa, Homo sapiens
  CDR3 for alpha chain variable domain of TCR clone 322878 (TRAV2, TRAJ9)
CAVEDRSGCFKTIF

SEQ ID NO: 645756 - protein, 19 aa, Homo sapiens
  CDR3 for beta chain variable domain of TCR clone 322878 (TRBV25-1, TRBJ2-2)
CAILVYRVDRGRKTGELFF

SEQ ID NO: 645757 - protein, 15 aa, Homo sapiens
  CDR3 for alpha chain variable domain of TCR clone 322879 (TRAV4, TRAJ4)
CLVGPLSGGYNKLIF

SEQ ID NO: 645758 - protein, 16 aa, Homo sapiens
  CDR3 for beta chain variable domain of TCR clone 322879 (TRBV7-8, TRBJ1-4)
CASSLGVGTTNEKLFF

SEQ ID NO: 645759 - protein, 14 aa, Homo sapiens
  CDR3 for alpha chain variable domain of TCR clone 322880 (TRAV12-3, TRAJ10)
SHLPLTGGGNKLTF

SEQ ID NO: 645760 - protein, 17 aa, Homo sapiens
  CDR3 for beta chain variable domain of TCR clone 322880 (TRBV14, TRBJ2-1)
CASSQDRRDSIYNEQFF

SEQ ID NO: 645761 - protein, 13 aa, Homo sapiens
  CDR3 for alpha chain variable domain of TCR clone 322881 (TRAV27, TRAJ41)
CAGEGNSGYALNF

SEQ ID NO: 645762 - protein, 14 aa, Homo sapiens
  CDR3 for beta chain variable domain of TCR clone 322881 (TRBV7-9, TRBJ2-7)
CASSLVSGTEYYYF

SEQ ID NO: 645763 - protein, 15 aa, Homo sapiens
  CDR3 for alpha chain variable domain of TCR clone 322882 (TRAV26-2, TRAJ13)
CILRDLSGGYQKVTF

SEQ ID NO: 645764 - protein, 15 aa, Homo sapiens
  CDR3 for beta chain variable domain of TCR clone 322882 (TRBV9, TRBJ1-6)
CASSVAGTGDSPLHF

SEQ ID NO: 645765 - protein, 13 aa, Homo sapiens
  CDR3 for alpha chain variable domain of TCR clone 322883 (TRAV21, TRAJ27)
CAARPGNAGKSTF

SEQ ID NO: 645766 - protein, 13 aa, Homo sapiens
  CDR3 for beta chain variable domain of TCR clone 322883 (TRBV12-4, TRBJ2-7)
CASSLSGVYEQYF

SEQ ID NO: 645767 - protein, 13 aa, Homo sapiens
  CDR3 for alpha chain variable domain of TCR clone 322884 (TRAV12-1, TRAJ31)
CVVNMNNNARLMF

SEQ ID NO: 645768 - protein, 15 aa, Homo sapiens
  CDR3 for beta chain variable domain of TCR clone 322884 (TRBV28, TRBJ2-7)
CASSPGGRGFYEQYF

SEQ ID NO: 645769 - protein, 13 aa, Homo sapiens
  CDR3 for alpha chain variable domain of TCR clone 322885 (TRAV8-3, TRAJ44)
CAVVPSTASKLTF

SEQ ID NO: 645770 - protein, 14 aa, Homo sapiens
  CDR3 for beta chain variable domain of TCR clone 322885 (TRBV11-2, TRBJ2-3)
CASRRLARTDTQYF

SEQ ID NO: 645771 - protein, 13 aa, Homo sapiens
  CDR3 for alpha chain variable domain of TCR clone 322886 (TRAV21, TRAJ57)
CAVTQGGSEKLVF

SEQ ID NO: 645772 - protein, 13 aa, Homo sapiens
  CDR3 for beta chain variable domain of TCR clone 322886 (TRBV14, TRBJ1-1)
CASSQEAGTEAFF

SEQ ID NO: 645773 - protein, 13 aa, Homo sapiens
  CDR3 for alpha chain variable domain of TCR clone 322887 (TRAV13-1, TRAJ13)
CAASKGGYQKVTF

SEQ ID NO: 645774 - protein, 16 aa, Homo sapiens
  CDR3 for beta chain variable domain of TCR clone 322887 (TRBV18, TRBJ1-2)
CASSPPEWVTIYGYTF

SEQ ID NO: 645775 - protein, 13 aa, Homo sapiens
  CDR3 for alpha chain variable domain of TCR clone 322888 (TRAV26-1, TRAJ34)
CIVRGHNTDKLIF

SEQ ID NO: 645776 - protein, 15 aa, Homo sapiens
  CDR3 for beta chain variable domain of TCR clone 322888 (TRBV5-1, TRBJ2-1)
CASSPPRAPYNEQFF

SEQ ID NO: 645777 - protein, 16 aa, Homo sapiens
  CDR3 for alpha chain variable domain of TCR clone 322889 (TRAV3, TRAJ10)
CAVRDMRAGGGDKLTF

SEQ ID NO: 645778 - protein, 17 aa, Homo sapiens
  CDR3 for beta chain variable domain of TCR clone 322889 (TRBV28, TRBJ2-5)
CASSTPEGDALQETQYF

SEQ ID NO: 645779 - protein, 12 aa, Homo sapiens
  CDR3 for alpha chain variable domain of TCR clone 322890 (TRAV12-3, TRAJ17)
CAMTLTVNKLTF

SEQ ID NO: 645780 - protein, 16 aa, Homo sapiens
  CDR3 for beta chain variable domain of TCR clone 322890 (TRBV19, TRBJ2-2)
CASRSPGTGATGELFF

SEQ ID NO: 645781 - protein, 13 aa, Homo sapiens
  CDR3 for alpha chain variable domain of TCR clone 322891 (TRAV2, TRAJ40)
CAVVTYGTYKYIF

SEQ ID NO: 645782 - protein, 14 aa, Homo sapiens
  CDR3 for beta chain variable domain of TCR clone 322891 (TRBV19, TRBJ2-1)
CASPTFVLSGEQFF

SEQ ID NO: 645783 - protein, 13 aa, Homo sapiens
  CDR3 for alpha chain variable domain of TCR clone 322892 (TRAV5, TRAJ30)
WAEIANRDDKIIF

SEQ ID NO: 645784 - protein, 14 aa, Homo sapiens
  CDR3 for beta chain variable domain of TCR clone 322892 (TRBV4-1, TRBJ2-2)
CASSQAVNTGELFF

SEQ ID NO: 645785 - protein, 19 aa, Homo sapiens
  CDR3 for alpha chain variable domain of TCR clone 322893 (TRAV3, TRAJ6)
CAVRDRNPGRAGGSYIPTF

SEQ ID NO: 645786 - protein, 15 aa, Homo sapiens
  CDR3 for beta chain variable domain of TCR clone 322893 (TRBV18, TRBJ2-7)
CASSPTFMDSYEQYF

SEQ ID NO: 645787 - protein, 13 aa, Homo sapiens
  CDR3 for alpha chain variable domain of TCR clone 322894 (TRAV2, TRAJ29)
CAAQNSGNTPLVF

SEQ ID NO: 645788 - protein, 13 aa, Homo sapiens
  CDR3 for beta chain variable domain of TCR clone 322894 (TRBV5-1, TRBJ2-4)
CASRGTGQNIQYF

SEQ ID NO: 645789 - protein, 14 aa, Homo sapiens
  CDR3 for alpha chain variable domain of TCR clone 322895 (TRAV12-2, TRAJ17)
CAVNIKAAGNKLTF

SEQ ID NO: 645790 - protein, 18 aa, Homo sapiens
  CDR3 for beta chain variable domain of TCR clone 322895 (TRBV11-2, TRBJ2-5)
CASSLVGAGGSYQETQYF

SEQ ID NO: 645791 - protein, 12 aa, Homo sapiens
  CDR3 for alpha chain variable domain of TCR clone 322896 (TRAV13-2, TRAJ23)
FAERHRGGKLIF

SEQ ID NO: 645792 - protein, 14 aa, Homo sapiens
  CDR3 for beta chain variable domain of TCR clone 322896 (TRBV7-2, TRBJ2-3)
CASIRGGVQDTQYF

SEQ ID NO: 645793 - protein, 13 aa, Homo sapiens
  CDR3 for alpha chain variable domain of TCR clone 322897 (TRAV27, TRAJ54)
CAGAGQGAEKLVF

SEQ ID NO: 645794 - protein, 15 aa, Homo sapiens
  CDR3 for beta chain variable domain of TCR clone 322897 (TRBV18, TRBJ2-6)
CASSPSYAGANVLTF

SEQ ID NO: 645795 - protein, 14 aa, Homo sapiens
  CDR3 for alpha chain variable domain of TCR clone 322898 (TRAV1-2, TRAJ8)
CAVREDTGFQNLVF

SEQ ID NO: 645796 - protein, 16 aa, Homo sapiens
  CDR3 for beta chain variable domain of TCR clone 322898 (TRBV29-1, TRBJ2-6)
CSVEDITYSGANVLTF

SEQ ID NO: 645797 - protein, 15 aa, Homo sapiens
  CDR3 for alpha chain variable domain of TCR clone 322899 (TRAV8-3, TRAJ45)
CASSYSGGGADGLTF

SEQ ID NO: 645798 - protein, 12 aa, Homo sapiens
  CDR3 for beta chain variable domain of TCR clone 322899 (TRBV5-5, TRBJ2-5)
CASSYFGETQYF

SEQ ID NO: 645799 - protein, 16 aa, Homo sapiens
  CDR3 for alpha chain variable domain of TCR clone 322900 (TRAV20, TRAJ52)
CAVLPDGGTSYGKLTF

SEQ ID NO: 645800 - protein, 13 aa, Homo sapiens
  CDR3 for beta chain variable domain of TCR clone 322900 (TRBV19, TRBJ1-2)
CASSVPGQDGYTF

SEQ ID NO: 645801 - protein, 14 aa, Homo sapiens
  CDR3 for alpha chain variable domain of TCR clone 322901 (TRAV23/DV6, TRAJ37)
CAASTSSNTGKLIF

SEQ ID NO: 645802 - protein, 14 aa, Homo sapiens
  CDR3 for beta chain variable domain of TCR clone 322901 (TRBV24-1, TRBJ1-1)
CATSIPRGDTEAFF

SEQ ID NO: 645803 - protein, 14 aa, Homo sapiens
  CDR3 for alpha chain variable domain of TCR clone 322902 (TRAV1-2, TRAJ16)
CAVNRFSDGQTLLF

SEQ ID NO: 645804 - protein, 14 aa, Homo sapiens
  CDR3 for beta chain variable domain of TCR clone 322902 (TRBV18, TRBJ2-7)
CASSPRGGAYEQYF

SEQ ID NO: 645805 - protein, 12 aa, Homo sapiens
  CDR3 for alpha chain variable domain of TCR clone 322903 (TRAV26-2, TRAJ21)
CILKGNFNKFYF

SEQ ID NO: 645806 - protein, 15 aa, Homo sapiens
  CDR3 for beta chain variable domain of TCR clone 322903 (TRBV7-2, TRBJ2-2)
CASRRPGQNTGELFF

SEQ ID NO: 645807 - protein, 18 aa, Homo sapiens
  CDR3 for alpha chain variable domain of TCR clone 322904 (TRAV13-1, TRAJ45)
CAASIGVDSGGGADGLTF

SEQ ID NO: 645808 - protein, 13 aa, Homo sapiens
  CDR3 for beta chain variable domain of TCR clone 322904 (TRBV27, TRBJ1-1)
CASSYATNTEAFF

SEQ ID NO: 645809 - protein, 13 aa, Homo sapiens
  CDR3 for alpha chain variable domain of TCR clone 322905 (TRAV2, TRAJ40)
CAVVTSGTYQYIF

SEQ ID NO: 645810 - protein, 12 aa, Homo sapiens
  CDR3 for beta chain variable domain of TCR clone 322905 (TRBV11-2, TRBJ2-1)
CASSPGNNEQFF

SEQ ID NO: 645811 - protein, 15 aa, Homo sapiens
  CDR3 for alpha chain variable domain of TCR clone 322906 (TRAV34, TRAJ38)
CGADFTPGNNRKLIW

SEQ ID NO: 645812 - protein, 16 aa, Homo sapiens
  CDR3 for beta chain variable domain of TCR clone 322906 (TRBV12-5, TRBJ2-5)
SASGPRTSGNQETQYF

SEQ ID NO: 645813 - protein, 14 aa, Homo sapiens
  CDR3 for alpha chain variable domain of TCR clone 322907 (TRAV12-2, TRAJ13)
RAAKKTGGYQKVTF

SEQ ID NO: 645814 - protein, 15 aa, Homo sapiens
  CDR3 for beta chain variable domain of TCR clone 322907 (TRBV27, TRBJ2-1)
CASSNGGGSSNEQFF

SEQ ID NO: 645815 - protein, 12 aa, Homo sapiens
  CDR3 for alpha chain variable domain of TCR clone 322908 (TRAV12-3, TRAJ17)
CAMTLTGNELTF

SEQ ID NO: 645816 - protein, 13 aa, Homo sapiens
  CDR3 for beta chain variable domain of TCR clone 322908 (TRBV7-3, TRBJ1-1)
CASSQDWGAEAFF

SEQ ID NO: 645817 - protein, 14 aa, Homo sapiens
  CDR3 for alpha chain variable domain of TCR clone 322909 (TRAV38-1, TRAJ11)
CAFMKHEGYSTLTF

SEQ ID NO: 645818 - protein, 13 aa, Homo sapiens
  CDR3 for beta chain variable domain of TCR clone 322909 (TRBV7-3, TRBJ1-1)
CASSQDWGAEAFF

SEQ ID NO: 645819 - protein, 16 aa, Homo sapiens
  CDR3 for alpha chain variable domain of TCR clone 322910 (TRAV23/DV6, TRAJ48)
CAASGVVNFGIEKLTF

SEQ ID NO: 645820 - protein, 15 aa, Homo sapiens
  CDR3 for beta chain variable domain of TCR clone 322910 (TRBV20-1, TRBJ2-5)
CSAGLAGVSQEIQYF

SEQ ID NO: 645821 - protein, 11 aa, Homo sapiens
  CDR3 for alpha chain variable domain of TCR clone 322911 (TRAV23/DV6, TRAJ49)
CAARAGNQFYF

SEQ ID NO: 645822 - protein, 13 aa, Homo sapiens
  CDR3 for beta chain variable domain of TCR clone 322911 (TRBV2, TRBJ2-2)
CASRAWRTGELFF

SEQ ID NO: 645823 - protein, 11 aa, Homo sapiens
  CDR3 for alpha chain variable domain of TCR clone 322912 (TRAV21, TRAJ48)
CAVDGNEKLTF

SEQ ID NO: 645824 - protein, 16 aa, Homo sapiens
  CDR3 for beta chain variable domain of TCR clone 322912 (TRBV12-4, TRBJ1-5)
CASSSGPRSSNQPQHF

SEQ ID NO: 645825 - protein, 16 aa, Homo sapiens
  CDR3 for alpha chain variable domain of TCR clone 322913 (TRAV13-1, TRAJ48)
CTASIFGNFGNEKLTF

SEQ ID NO: 645826 - protein, 14 aa, Homo sapiens
  CDR3 for beta chain variable domain of TCR clone 322913 (TRBV24-1, TRBJ1-1)
CATSIPRGDTEAFF

SEQ ID NO: 645827 - protein, 12 aa, Homo sapiens
  CDR3 for alpha chain variable domain of TCR clone 322914 (TRAV13-1, TRAJ17)
CAARTAGNKLTF

SEQ ID NO: 645828 - protein, 15 aa, Homo sapiens
  CDR3 for beta chain variable domain of TCR clone 322914 (TRBV7-6, TRBJ1-1)
CAISPQGGANTEAFF

SEQ ID NO: 645829 - protein, 17 aa, Homo sapiens
  CDR3 for alpha chain variable domain of TCR clone 322915 (TRAV3, TRAJ42)
CAVRERDYGGSQGNLIF

SEQ ID NO: 645830 - protein, 16 aa, Homo sapiens
  CDR3 for beta chain variable domain of TCR clone 322915 (TRBV9, TRBJ2-1)
CASSVGGGGNYNEQFF

SEQ ID NO: 645831 - protein, 15 aa, Homo sapiens
  CDR3 for alpha chain variable domain of TCR clone 322916 (TRAV26-1, TRAJ29)
CIVRVEGSGNTPVVF

SEQ ID NO: 645832 - protein, 15 aa, Homo sapiens
  CDR3 for beta chain variable domain of TCR clone 322916 (TRBV28, TRBJ2-5)
CASSPGQGSIETQYF

SEQ ID NO: 645833 - protein, 18 aa, Homo sapiens
  CDR3 for alpha chain variable domain of TCR clone 322917 (TRAV21, TRAJ4)
CAVPRFWWLQYADFWSRG

SEQ ID NO: 645834 - protein, 13 aa, Homo sapiens
  CDR3 for beta chain variable domain of TCR clone 322917 (TRBV7-3, TRBJ2-5)
CASSLTAGETQYF

SEQ ID NO: 645835 - protein, 14 aa, Homo sapiens
  CDR3 for alpha chain variable domain of TCR clone 322918 (TRAV12-3, TRAJ20)
CAMSARRGDYKLSF

SEQ ID NO: 645836 - protein, 14 aa, Homo sapiens
  CDR3 for beta chain variable domain of TCR clone 322918 (TRBV7-3, TRBJ2-3)
CTSSPSARTDTQYF

SEQ ID NO: 645837 - protein, 22 aa, Homo sapiens
  CDR3 for alpha chain variable domain of TCR clone 322919 (TRAV1-2, TRAJ26)
CAVRDLITMVRILSLVPEPLSV

SEQ ID NO: 645838 - protein, 12 aa, Homo sapiens
  CDR3 for beta chain variable domain of TCR clone 322919 (TRBV7-9, TRBJ2-7)
CATRTDAYEQYF

SEQ ID NO: 645839 - protein, 15 aa, Homo sapiens
  CDR3 for alpha chain variable domain of TCR clone 322920 (TRAV20, TRAJ4)
CAVEGSSGGYNKLIF

SEQ ID NO: 645840 - protein, 14 aa, Homo sapiens
  CDR3 for beta chain variable domain of TCR clone 322920 (TRBV7-8, TRBJ2-7)
CASTLGGALDEQYF

SEQ ID NO: 645841 - protein, 14 aa, Homo sapiens
  CDR3 for alpha chain variable domain of TCR clone 322921 (TRAV12-3, TRAJ10)
SHLPLTGGGHKLTF

SEQ ID NO: 645842 - protein, 16 aa, Homo sapiens
  CDR3 for beta chain variable domain of TCR clone 322921 (TRBV4-1, TRBJ1-4)
CASSQDLRRGGEKLFF

SEQ ID NO: 645843 - protein, 13 aa, Homo sapiens
  CDR3 for alpha chain variable domain of TCR clone 322922 (TRAV12-1, TRAJ22)
CVVYSGSARQLTF

SEQ ID NO: 645844 - protein, 10 aa, Homo sapiens
  CDR3 for beta chain variable domain of TCR clone 322922 (TRBV6-3, TRBJ2-2)
CASRDGELFL

SEQ ID NO: 645845 - protein, 15 aa, Homo sapiens
  CDR3 for alpha chain variable domain of TCR clone 322923 (TRAV8-2, TRAJ36)
CVVSENWGKQPLHLD

SEQ ID NO: 645846 - protein, 15 aa, Homo sapiens
  CDR3 for beta chain variable domain of TCR clone 322923 (TRBV20-1, TRBJ2-5)
CSAEGTGGLQETQYF

SEQ ID NO: 645847 - protein, 12 aa, Homo sapiens
  CDR3 for alpha chain variable domain of TCR clone 322924 (TRAV13-1, TRAJ21)
CAAKEGFNKFYF

SEQ ID NO: 645848 - protein, 15 aa, Homo sapiens
  CDR3 for beta chain variable domain of TCR clone 322924 (TRBV2, TRBJ2-1)
CANSELAGSYNEQFF

SEQ ID NO: 645849 - protein, 14 aa, Homo sapiens
  CDR3 for alpha chain variable domain of TCR clone 322925 (TRAV20, TRAJ37)
CAVQEASNSGKLIF

SEQ ID NO: 645850 - protein, 15 aa, Homo sapiens
  CDR3 for beta chain variable domain of TCR clone 322925 (TRBV10-3, TRBJ2-5)
CAISESRDRGETQYF

SEQ ID NO: 645851 - protein, 15 aa, Homo sapiens
  CDR3 for alpha chain variable domain of TCR clone 322926 (TRAV34, TRAJ38)
CGADFTPGNNRKLIW

SEQ ID NO: 645852 - protein, 16 aa, Homo sapiens
  CDR3 for beta chain variable domain of TCR clone 322926 (TRBV12-5, TRBJ2-7)
CASGPRTSGNQETQYF

SEQ ID NO: 645853 - protein, 15 aa, Homo sapiens
  CDR3 for alpha chain variable domain of TCR clone 322927 (TRAV17, TRAJ56)
CATDANTGANSKLTF

SEQ ID NO: 645854 - protein, 15 aa, Homo sapiens
  CDR3 for beta chain variable domain of TCR clone 322927 (TRBV7-2, TRBJ2-1)
CASSLVAGRYNEQFF

SEQ ID NO: 645855 - protein, 16 aa, Homo sapiens
  CDR3 for alpha chain variable domain of TCR clone 322928 (TRAV3, TRAJ10)
CAVRDMRAGGGNKLHF

SEQ ID NO: 645856 - protein, 13 aa, Homo sapiens
  CDR3 for beta chain variable domain of TCR clone 322928 (TRBV4-2, TRBJ1-1)
CASSQAGNTEAFF

SEQ ID NO: 645857 - protein, 15 aa, Homo sapiens
  CDR3 for alpha chain variable domain of TCR clone 322929 (TRAV17, TRAJ57)
CATGPSQGGSEKLVF

SEQ ID NO: 645858 - protein, 16 aa, Homo sapiens
  CDR3 for beta chain variable domain of TCR clone 322929 (TRBV24-1, TRBJ2-3)
CATSDRRQDLTDTQYF

SEQ ID NO: 645859 - protein, 11 aa, Homo sapiens
  CDR3 for alpha chain variable domain of TCR clone 322930 (TRAV21, TRAJ20)
CAVDGDYKLSF

SEQ ID NO: 645860 - protein, 14 aa, Homo sapiens
  CDR3 for beta chain variable domain of TCR clone 322930 (TRBV7-8, TRBJ2-3)
CASSLEAGTDTQYF

SEQ ID NO: 645861 - protein, 17 aa, Homo sapiens
  CDR3 for alpha chain variable domain of TCR clone 322931 (TRAV23/DV6, TRAJ57)
CAASSTLSQGGSEKLVF

SEQ ID NO: 645862 - protein, 14 aa, Homo sapiens
  CDR3 for beta chain variable domain of TCR clone 322931 (TRBV7-2, TRBJ1-1)
CASSFLTGTTEAFF

SEQ ID NO: 645863 - protein, 15 aa, Homo sapiens
  CDR3 for alpha chain variable domain of TCR clone 322932 (TRAV1-2, TRAJ35)
CAVRDPGGFGNVLHC

SEQ ID NO: 645864 - protein, 14 aa, Homo sapiens
  CDR3 for beta chain variable domain of TCR clone 322932 (TRBV5-1, TRBJ2-1)
CASSLDDRFDEEFF

SEQ ID NO: 645865 - protein, 15 aa, Homo sapiens
  CDR3 for alpha chain variable domain of TCR clone 322933 (TRAV3, TRAJ5)
CAVRDLDTGRRALTF

SEQ ID NO: 645866 - protein, 15 aa, Homo sapiens
  CDR3 for beta chain variable domain of TCR clone 322933 (TRBV2, TRBJ2-7)
CASSEGLARSYEQYF

SEQ ID NO: 645867 - protein, 14 aa, Homo sapiens
  CDR3 for alpha chain variable domain of TCR clone 322934 (TRAV2, TRAJ37)
CAVDFTSNTGKLIF

SEQ ID NO: 645868 - protein, 13 aa, Homo sapiens
  CDR3 for beta chain variable domain of TCR clone 322934 (TRBV28, TRBJ2-7)
CASTPGLAGEQYF

SEQ ID NO: 645869 - protein, 13 aa, Homo sapiens
  CDR3 for alpha chain variable domain of TCR clone 322935 (TRAV26-2, TRAJ43)
CILRAVTNNDMRF

SEQ ID NO: 645870 - protein, 15 aa, Homo sapiens
  CDR3 for beta chain variable domain of TCR clone 322935 (TRBV7-2, TRBJ2-1)
CASTHGTVIYNEQFF

SEQ ID NO: 645871 - protein, 12 aa, Homo sapiens
  CDR3 for alpha chain variable domain of TCR clone 322936 (TRAV21, TRAJ13)
PGPSGGYQKVTF

SEQ ID NO: 645872 - protein, 14 aa, Homo sapiens
  CDR3 for beta chain variable domain of TCR clone 322936 (TRBV27, TRBJ2-5)
CASSSLKGWENQYF

SEQ ID NO: 645873 - protein, 15 aa, Homo sapiens
  CDR3 for alpha chain variable domain of TCR clone 322937 (TRAV13-1, TRAJ16)
CAARYQMARSCALQG

SEQ ID NO: 645874 - protein, 13 aa, Homo sapiens
  CDR3 for beta chain variable domain of TCR clone 322937 (TRBV4-1, TRBJ2-1)
CASSQAGGDEQFF

SEQ ID NO: 645875 - protein, 13 aa, Homo sapiens
  CDR3 for alpha chain variable domain of TCR clone 322938 (TRAV2, TRAJ15)
CAVAFQAGTALIF

SEQ ID NO: 645876 - protein, 16 aa, Homo sapiens
  CDR3 for beta chain variable domain of TCR clone 322938 (TRBV18, TRBJ1-5)
CASSPYRVEGNQPQHF

SEQ ID NO: 645877 - protein, 11 aa, Homo sapiens
  CDR3 for alpha chain variable domain of TCR clone 322939 (TRAV21, TRAJ34)
CAVTNTDNLIF

SEQ ID NO: 645878 - protein, 17 aa, Homo sapiens
  CDR3 for beta chain variable domain of TCR clone 322939 (TRBV20-1, TRBJ2-1)
CSARSSRGGPPTMSSSS

SEQ ID NO: 645879 - protein, 15 aa, Homo sapiens
  CDR3 for alpha chain variable domain of TCR clone 322940 (TRAV17, TRAJ57)
CATGPSQGGSETLVF

SEQ ID NO: 645880 - protein, 17 aa, Homo sapiens
  CDR3 for beta chain variable domain of TCR clone 322940 (TRBV20-1, TRBJ2-1)
CSASSSGLAGSYNEQFF

SEQ ID NO: 645881 - protein, 11 aa, Homo sapiens
  CDR3 for alpha chain variable domain of TCR clone 322941 (TRAV8-3, TRAJ15)
CAVGPGTALIF

SEQ ID NO: 645882 - protein, 18 aa, Homo sapiens
  CDR3 for beta chain variable domain of TCR clone 322941 (TRBV18, TRBJ2-3)
CASSYTSGAAGGTDTQYS

SEQ ID NO: 645883 - protein, 12 aa, Homo sapiens
  CDR3 for alpha chain variable domain of TCR clone 322942 (TRAV3, TRAJ27)
CAVRDKAGKSTF

SEQ ID NO: 645884 - protein, 14 aa, Homo sapiens
  CDR3 for beta chain variable domain of TCR clone 322942 (TRBV7-9, TRBJ2-7)
CASSIGQGAGEQYF

SEQ ID NO: 645885 - protein, 14 aa, Homo sapiens
  CDR3 for alpha chain variable domain of TCR clone 322943 (TRAV1-2, TRAJ8)
CAVREDTGFQKLVF

SEQ ID NO: 645886 - protein, 15 aa, Homo sapiens
  CDR3 for beta chain variable domain of TCR clone 322943 (TRBV12-4, TRBJ1-5)
CQQPTGRGVQSAQHF

SEQ ID NO: 645887 - protein, 16 aa, Homo sapiens
  CDR3 for alpha chain variable domain of TCR clone 322944 (TRAV22, TRAJ45)
CAVERGKRGGADGLTF

SEQ ID NO: 645888 - protein, 15 aa, Homo sapiens
  CDR3 for beta chain variable domain of TCR clone 322944 (TRBV12-4, TRBJ2-5)
CASSPPTGLQETQYF

SEQ ID NO: 645889 - protein, 17 aa, Homo sapiens
  CDR3 for alpha chain variable domain of TCR clone 322945 (TRAV12-1, TRAJ42)
CVVMRMNYGGSQGNLIF

SEQ ID NO: 645890 - protein, 11 aa, Homo sapiens
  CDR3 for beta chain variable domain of TCR clone 322945 (TRBV29-1, TRBJ2-5)
CSEDRTGTQYF

SEQ ID NO: 645891 - protein, 12 aa, Homo sapiens
  CDR3 for alpha chain variable domain of TCR clone 322946 (TRAV12-2, TRAJ31)
CAVNTPDARLMF

SEQ ID NO: 645892 - protein, 17 aa, Homo sapiens
  CDR3 for beta chain variable domain of TCR clone 322946 (TRBV20-1, TRBJ1-6)
CSARGGYTFSYNSPLHF

SEQ ID NO: 645893 - protein, 11 aa, Homo sapiens
  CDR3 for alpha chain variable domain of TCR clone 322947 (TRAV12-1, TRAJ43)
CVEYDNNDMRF

SEQ ID NO: 645894 - protein, 13 aa, Homo sapiens
  CDR3 for beta chain variable domain of TCR clone 322947 (TRBV7-7, TRBJ2-3)
CASSLSRADTQYF

SEQ ID NO: 645895 - protein, 13 aa, Homo sapiens
  CDR3 for alpha chain variable domain of TCR clone 322948 (TRAV36/DV7, TRAJ37)
CAVFSSNTGKLIF

SEQ ID NO: 645896 - protein, 15 aa, Homo sapiens
  CDR3 for beta chain variable domain of TCR clone 322948 (TRBV12-4, TRBJ2-5)
CQQFFVSGRQETQYF

SEQ ID NO: 645897 - protein, 13 aa, Homo sapiens
  CDR3 for alpha chain variable domain of TCR clone 322949 (TRAV3, TRAJ20)
CCEAFCNDYKLSF

SEQ ID NO: 645898 - protein, 15 aa, Homo sapiens
  CDR3 for beta chain variable domain of TCR clone 322949 (TRBV6-5, TRBJ2-1)
CASSYDAGAGNDQFF

SEQ ID NO: 645899 - protein, 12 aa, Homo sapiens
  CDR3 for alpha chain variable domain of TCR clone 322950 (TRAV12-3, TRAJ17)
CAMTLTGNKLNF

SEQ ID NO: 645900 - protein, 15 aa, Homo sapiens
  CDR3 for beta chain variable domain of TCR clone 322950 (TRBV6-3, TRBJ2-2)
CASSFLATLTGELFF

SEQ ID NO: 645901 - protein, 16 aa, Homo sapiens
  CDR3 for alpha chain variable domain of TCR clone 322951 (TRAV12-1, TRAJ8)
CVVNGRGNTGFQKLVF

SEQ ID NO: 645902 - protein, 12 aa, Homo sapiens
  CDR3 for beta chain variable domain of TCR clone 322951 (TRBV19, TRBJ1-5)
CASSIAQQPQHF

SEQ ID NO: 645903 - protein, 15 aa, Homo sapiens
  CDR3 for alpha chain variable domain of TCR clone 322952 (TRAV14/DV4, TRAJ12)
CAMREQRDSSYKLIF

SEQ ID NO: 645904 - protein, 16 aa, Homo sapiens
  CDR3 for beta chain variable domain of TCR clone 322952 (TRBV11-2, TRBJ1-2)
CASSLDRGGNNYGYTF

SEQ ID NO: 645905 - protein, 17 aa, Homo sapiens
  CDR3 for alpha chain variable domain of TCR clone 322953 (TRAV26-1, TRAJ37)
CIVRVITVSSNTGKLIF

SEQ ID NO: 645906 - protein, 14 aa, Homo sapiens
  CDR3 for beta chain variable domain of TCR clone 322953 (TRBV19, TRBJ2-1)
CDSPTFVLSGEQFF

SEQ ID NO: 645907 - protein, 15 aa, Homo sapiens
  CDR3 for alpha chain variable domain of TCR clone 322954 (TRAV8-3, TRAJ11)
CAVGLLNSGYSTLTF

SEQ ID NO: 645908 - protein, 13 aa, Homo sapiens
  CDR3 for beta chain variable domain of TCR clone 322954 (TRBV7-7, TRBJ1-1)
CASSLGAITEAFF

SEQ ID NO: 645909 - protein, 15 aa, Homo sapiens
  CDR3 for alpha chain variable domain of TCR clone 322955 (TRAV3, TRAJ4)
CAQNMFSGGYNKLIF

SEQ ID NO: 645910 - protein, 15 aa, Homo sapiens
  CDR3 for beta chain variable domain of TCR clone 322955 (TRBV7-9, TRBJ1-5)
CASSFGTGNNQPQHF

SEQ ID NO: 645911 - protein, 11 aa, Homo sapiens
  CDR3 for alpha chain variable domain of TCR clone 322956 (TRAV3, TRAJ17)
PRGAAGNKLTF

SEQ ID NO: 645912 - protein, 15 aa, Homo sapiens
  CDR3 for beta chain variable domain of TCR clone 322956 (TRBV6-1, TRBJ2-3)
CASSERGGITDTQYF

SEQ ID NO: 645913 - protein, 14 aa, Homo sapiens
  CDR3 for alpha chain variable domain of TCR clone 322957 (TRAV17, TRAJ54)
CAMDANLGAQKLVF

SEQ ID NO: 645914 - protein, 12 aa, Homo sapiens
  CDR3 for beta chain variable domain of TCR clone 322957 (TRBV7-9, TRBJ2-7)
CASSIKREEQYF

SEQ ID NO: 645915 - protein, 14 aa, Homo sapiens
  CDR3 for alpha chain variable domain of TCR clone 322958 (TRAV12-2, TRAJ17)
CAVNIKAAGNKLTF

SEQ ID NO: 645916 - protein, 11 aa, Homo sapiens
  CDR3 for beta chain variable domain of TCR clone 322958 (TRBV29-1, TRBJ2-5)
CSEDRTGTQYF

SEQ ID NO: 645917 - protein, 12 aa, Homo sapiens
  CDR3 for alpha chain variable domain of TCR clone 322959 (TRAV27, TRAJ9)
CAGESGGFKTIF

SEQ ID NO: 645918 - protein, 18 aa, Homo sapiens
  CDR3 for beta chain variable domain of TCR clone 322959 (TRBV10-2, TRBJ2-2)
CISAPAVHRQADAEELFF

SEQ ID NO: 645919 - protein, 15 aa, Homo sapiens
  CDR3 for alpha chain variable domain of TCR clone 322960 (TRAV12-3, TRAJ53)
CNERPIEGSNYKLTF

SEQ ID NO: 645920 - protein, 13 aa, Homo sapiens
  CDR3 for beta chain variable domain of TCR clone 322960 (TRBV4-1, TRBJ1-1)
CASSQLGTGEAFF

SEQ ID NO: 645921 - protein, 14 aa, Homo sapiens
  CDR3 for alpha chain variable domain of TCR clone 322961 (TRAV26-1, TRAJ39)
CIVFTNNAGNMLTF

SEQ ID NO: 645922 - protein, 15 aa, Homo sapiens
  CDR3 for beta chain variable domain of TCR clone 322961 (TRBV19, TRBJ2-4)
CASSLTGLTKNIQYC

SEQ ID NO: 645923 - protein, 12 aa, Homo sapiens
  CDR3 for alpha chain variable domain of TCR clone 322962 (TRAV3, TRAJ43)
CAVRDPNNDMRF

SEQ ID NO: 645924 - protein, 17 aa, Homo sapiens
  CDR3 for beta chain variable domain of TCR clone 322962 (TRBV19, TRBJ2-3)
CASSIDPAGGGTDTQYF

SEQ ID NO: 645925 - protein, 21 aa, Homo sapiens
  CDR3 for alpha chain variable domain of TCR clone 322963 (TRAV27, TRAJ38)
CAARRNAGNNHIQNPDPAVYQ

SEQ ID NO: 645926 - protein, 13 aa, Homo sapiens
  CDR3 for beta chain variable domain of TCR clone 322963 (TRBV12-4, TRBJ2-3)
CASRLGLGDTQYF

SEQ ID NO: 645927 - protein, 15 aa, Homo sapiens
  CDR3 for alpha chain variable domain of TCR clone 322964 (TRAV3, TRAJ45)
CAVRTPWGGADGLTF

SEQ ID NO: 645928 - protein, 16 aa, Homo sapiens
  CDR3 for beta chain variable domain of TCR clone 322964 (TRBV6-1, TRBJ2-2)
CASSFGQGANTGELFF

SEQ ID NO: 645929 - protein, 17 aa, Homo sapiens
  CDR3 for alpha chain variable domain of TCR clone 322965 (TRAV35, TRAJ52)
CAGQLAAGGTSYGKLTF

SEQ ID NO: 645930 - protein, 12 aa, Homo sapiens
  CDR3 for beta chain variable domain of TCR clone 322965 (TRBV20-1, TRBJ2-7)
YSAGRRQSEQYF

SEQ ID NO: 645931 - protein, 15 aa, Homo sapiens
  CDR3 for alpha chain variable domain of TCR clone 322966 (TRAV3, TRAJ20)
CSVRDIKLSDYKLSF

SEQ ID NO: 645932 - protein, 18 aa, Homo sapiens
  CDR3 for beta chain variable domain of TCR clone 322966 (TRBV20-1, TRBJ2-5)
CSQTGDSGRLGGKETQYF

SEQ ID NO: 645933 - protein, 14 aa, Homo sapiens
  CDR3 for alpha chain variable domain of TCR clone 322967 (TRAV8-6, TRAJ29)
CAVSRASGNTPLVF

SEQ ID NO: 645934 - protein, 16 aa, Homo sapiens
  CDR3 for beta chain variable domain of TCR clone 322967 (TRBV20-1, TRBJ1-4)
CSAPGQGLLTNEKLFF

SEQ ID NO: 645935 - protein, 11 aa, Homo sapiens
  CDR3 for alpha chain variable domain of TCR clone 322968 (TRAV12-2, TRAJ34)
CAHYNTDKLIF

SEQ ID NO: 645936 - protein, 12 aa, Homo sapiens
  CDR3 for beta chain variable domain of TCR clone 322968 (TRBV2, TRBJ2-1)
GRGLPSYNEQFF

SEQ ID NO: 645937 - protein, 14 aa, Homo sapiens
  CDR3 for alpha chain variable domain of TCR clone 322969 (TRAV13-1, TRAJ26)
CAAPKGPDGQNFVF

SEQ ID NO: 645938 - protein, 15 aa, Homo sapiens
  CDR3 for beta chain variable domain of TCR clone 322969 (TRBV28, TRBJ2-5)
CASSFRQGALEIQYF

SEQ ID NO: 645939 - protein, 14 aa, Homo sapiens
  CDR3 for alpha chain variable domain of TCR clone 322970 (TRAV8-2, TRAJ6)
CVVISAGGRYIPTF

SEQ ID NO: 645940 - protein, 16 aa, Homo sapiens
  CDR3 for beta chain variable domain of TCR clone 322970 (TRBV7-6, TRBJ2-6)
CSSSLPGLSGANVLTF

SEQ ID NO: 645941 - protein, 14 aa, Homo sapiens
  CDR3 for alpha chain variable domain of TCR clone 322971 (TRAV12-3, TRAJ22)
CARSLFGSARQLTF

SEQ ID NO: 645942 - protein, 11 aa, Homo sapiens
  CDR3 for beta chain variable domain of TCR clone 322971 (TRBV12-4, TRBJ2-2)
CASSSAGELFF

SEQ ID NO: 645943 - protein, 16 aa, Homo sapiens
  CDR3 for alpha chain variable domain of TCR clone 322972 (TRAV12-2, TRAJ32)
CAVNLGQGGATNKLIF

SEQ ID NO: 645944 - protein, 15 aa, Homo sapiens
  CDR3 for beta chain variable domain of TCR clone 322972 (TRBV20-1, TRBJ2-7)
CSARGPLAGGTEQYF

SEQ ID NO: 645945 - protein, 12 aa, Homo sapiens
  CDR3 for alpha chain variable domain of TCR clone 322973 (TRAV16, TRAJ10)
CSRTGGGNTLTF

SEQ ID NO: 645946 - protein, 12 aa, Homo sapiens
  CDR3 for beta chain variable domain of TCR clone 322973 (TRBV11-3, TRBJ1-1)
CASSHRQGEAFF

SEQ ID NO: 645947 - protein, 15 aa, Homo sapiens
  CDR3 for alpha chain variable domain of TCR clone 322974 (TRAV3, TRAJ5)
CAVRDLDTGRRALTF

SEQ ID NO: 645948 - protein, 14 aa, Homo sapiens
  CDR3 for beta chain variable domain of TCR clone 322974 (TRBV7-9, TRBJ2-7)
CASSSRLVLHEQYF

SEQ ID NO: 645949 - protein, 13 aa, Homo sapiens
  CDR3 for alpha chain variable domain of TCR clone 322975 (TRAV30, TRAJ24)
CGTVTYSWGKLQF

SEQ ID NO: 645950 - protein, 14 aa, Homo sapiens
  CDR3 for beta chain variable domain of TCR clone 322975 (TRBV6-3, TRBJ2-2)
CASTYTPDTGELFF

SEQ ID NO: 645951 - protein, 18 aa, Homo sapiens
  CDR3 for alpha chain variable domain of TCR clone 322976 (TRAV13-1, TRAJ52)
WAAKNPNAVGTSYGKLTF

SEQ ID NO: 645952 - protein, 14 aa, Homo sapiens
  CDR3 for beta chain variable domain of TCR clone 322976 (TRBV6-5, TRBJ1-1)
CASSFGQGLTEAFF

SEQ ID NO: 645953 - protein, 15 aa, Homo sapiens
  CDR3 for alpha chain variable domain of TCR clone 322977 (TRAV8-4, TRAJ10)
CAVSDQMGGGNKLTF

SEQ ID NO: 645954 - protein, 16 aa, Homo sapiens
  CDR3 for beta chain variable domain of TCR clone 322977 (TRBV20-1, TRBJ2-1)
CSARDVTPPPYNEQLF

SEQ ID NO: 645955 - protein, 11 aa, Homo sapiens
  CDR3 for alpha chain variable domain of TCR clone 322978 (TRAV27, TRAJ47)
SIVEYGNKQVF

SEQ ID NO: 645956 - protein, 15 aa, Homo sapiens
  CDR3 for beta chain variable domain of TCR clone 322978 (TRBV7-3, TRBJ2-1)
CASSLDGNSYNEQFF

SEQ ID NO: 645957 - protein, 13 aa, Homo sapiens
  CDR3 for alpha chain variable domain of TCR clone 322979 (TRAV12-3, TRAJ7)
CAMTPYGNNRLAF

SEQ ID NO: 645958 - protein, 16 aa, Homo sapiens
  CDR3 for beta chain variable domain of TCR clone 322979 (TRBV20-1, TRBJ1-4)
CSARPYGWELNEKLFF

SEQ ID NO: 645959 - protein, 13 aa, Homo sapiens
  CDR3 for alpha chain variable domain of TCR clone 322980 (TRAV23/DV6, TRAJ16)
CAASISDGQKLPV

SEQ ID NO: 645960 - protein, 15 aa, Homo sapiens
  CDR3 for beta chain variable domain of TCR clone 322980 (TRBV2, TRBJ2-2)
CASSRETVGTGELFF

SEQ ID NO: 645961 - protein, 10 aa, Homo sapiens
  CDR3 for alpha chain variable domain of TCR clone 322981 (TRAV16, TRAJ22)
SAMYLRQLTF

SEQ ID NO: 645962 - protein, 15 aa, Homo sapiens
  CDR3 for beta chain variable domain of TCR clone 322981 (TRBV7-9, TRBJ1-6)
CASSSPGRGNSPLHF

SEQ ID NO: 645963 - protein, 16 aa, Homo sapiens
  CDR3 for alpha chain variable domain of TCR clone 322982 (TRAV16, TRAJ57)
CAPYLITQGGSEKLVF

SEQ ID NO: 645964 - protein, 15 aa, Homo sapiens
  CDR3 for beta chain variable domain of TCR clone 322982 (TRBV7-2, TRBJ2-7)
CASSLVSSGSYEQYF

SEQ ID NO: 645965 - protein, 13 aa, Homo sapiens
  CDR3 for alpha chain variable domain of TCR clone 322983 (TRAV1-2, TRAJ31)
CAVRGYNNARLMF

SEQ ID NO: 645966 - protein, 14 aa, Homo sapiens
  CDR3 for beta chain variable domain of TCR clone 322983 (TRBV12-5, TRBJ2-5)
CASGSRTHQETQYF

SEQ ID NO: 645967 - protein, 15 aa, Homo sapiens
  CDR3 for alpha chain variable domain of TCR clone 322984 (TRAV21, TRAJ53)
CATLNSGGSNYKLTF

SEQ ID NO: 645968 - protein, 15 aa, Homo sapiens
  CDR3 for beta chain variable domain of TCR clone 322984 (TRBV27, TRBJ2-1)
CASSNGGGSSDEQFF

SEQ ID NO: 645969 - protein, 14 aa, Homo sapiens
  CDR3 for alpha chain variable domain of TCR clone 322985 (TRAV2, TRAJ9)
CAVEDRSGGFKTIF

SEQ ID NO: 645970 - protein, 14 aa, Homo sapiens
  CDR3 for beta chain variable domain of TCR clone 322985 (TRBV3-1, TRBJ2-5)
CTSSQGPDQETQYF

SEQ ID NO: 645971 - protein, 12 aa, Homo sapiens
  CDR3 for alpha chain variable domain of TCR clone 322986 (TRAV2, TRAJ13)
TTVLPGYQKVTF

SEQ ID NO: 645972 - protein, 16 aa, Homo sapiens
  CDR3 for beta chain variable domain of TCR clone 322986 (TRBV6-1, TRBJ2-5)
CASSETLDRGAETQYF

SEQ ID NO: 645973 - protein, 11 aa, Homo sapiens
  CDR3 for alpha chain variable domain of TCR clone 322987 (TRAV12-2, TRAJ49)
CAVWAGNQFYF

SEQ ID NO: 645974 - protein, 13 aa, Homo sapiens
  CDR3 for beta chain variable domain of TCR clone 322987 (TRBV10-3, TRBJ2-7)
CASELAVNYEQYF

SEQ ID NO: 645975 - protein, 12 aa, Homo sapiens
  CDR3 for alpha chain variable domain of TCR clone 322988 (TRAV13-1, TRAJ43)
CAAGRFTNDMRF

SEQ ID NO: 645976 - protein, 14 aa, Homo sapiens
  CDR3 for beta chain variable domain of TCR clone 322988 (TRBV6-3, TRBJ2-5)
CASRRDGGEETQYF

SEQ ID NO: 645977 - protein, 18 aa, Homo sapiens
  CDR3 for alpha chain variable domain of TCR clone 322989 (TRAV13-1, TRAJ52)
CAAKNPNSGGTSYGKLTF

SEQ ID NO: 645978 - protein, 14 aa, Homo sapiens
  CDR3 for beta chain variable domain of TCR clone 322989 (TRBV4-1, TRBJ2-2)
CASSQAVNTGELFF

SEQ ID NO: 645979 - protein, 15 aa, Homo sapiens
  CDR3 for alpha chain variable domain of TCR clone 322990 (TRAV26-1, TRAJ29)
CIVRVEGAGNTPLVL

SEQ ID NO: 645980 - protein, 15 aa, Homo sapiens
  CDR3 for beta chain variable domain of TCR clone 322990 (TRBV7-9, TRBJ1-5)
CASSQGHQPNQPQHF

SEQ ID NO: 645981 - protein, 17 aa, Homo sapiens
  CDR3 for alpha chain variable domain of TCR clone 322991 (TRAV3, TRAJ38)
CAVRDCLNAGNNRKMIW

SEQ ID NO: 645982 - protein, 14 aa, Homo sapiens
  CDR3 for beta chain variable domain of TCR clone 322991 (TRBV5-5, TRBJ1-5)
CASSGQGVDQPQHF

SEQ ID NO: 645983 - protein, 15 aa, Homo sapiens
  CDR3 for alpha chain variable domain of TCR clone 322992 (TRAV35, TRAJ30)
CAGQPEMNRDDKIIF

SEQ ID NO: 645984 - protein, 13 aa, Homo sapiens
  CDR3 for beta chain variable domain of TCR clone 322992 (TRBV24-1, TRBJ2-2)
CATSDWSTGELFF

SEQ ID NO: 645985 - protein, 11 aa, Homo sapiens
  CDR3 for alpha chain variable domain of TCR clone 322993 (TRAV17, TRAJ36)
CAPTGANNLFF

SEQ ID NO: 645986 - protein, 12 aa, Homo sapiens
  CDR3 for beta chain variable domain of TCR clone 322993 (TRBV29-1, TRBJ2-3)
CSVVVGADTQYF

SEQ ID NO: 645987 - protein, 14 aa, Homo sapiens
  CDR3 for alpha chain variable domain of TCR clone 322994 (TRAV35, TRAJ22)
CAGLRPGSARQLTF

SEQ ID NO: 645988 - protein, 15 aa, Homo sapiens
  CDR3 for beta chain variable domain of TCR clone 322994 (TRBV12-4, TRBJ2-5)
CASSPPAGLQETQHF

SEQ ID NO: 645989 - protein, 14 aa, Homo sapiens
  CDR3 for alpha chain variable domain of TCR clone 322995 (TRAV12-2, TRAJ53)
CAVKGGGSNYKLTF

SEQ ID NO: 645990 - protein, 14 aa, Homo sapiens
  CDR3 for beta chain variable domain of TCR clone 322995 (TRBV7-2, TRBJ2-7)
CASSPKTSFYEQYF

SEQ ID NO: 645991 - protein, 15 aa, Homo sapiens
  CDR3 for alpha chain variable domain of TCR clone 322996 (TRAV12-1, TRAJ9)
CVVSFGDTGGFKTIF

SEQ ID NO: 645992 - protein, 14 aa, Homo sapiens
  CDR3 for beta chain variable domain of TCR clone 322996 (TRBV5-1, TRBJ2-7)
CASSRGESLYEQYF

SEQ ID NO: 645993 - protein, 13 aa, Homo sapiens
  CDR3 for alpha chain variable domain of TCR clone 322997 (TRAV12-2, TRAJ30)
RAVNLNRDDKIIF

SEQ ID NO: 645994 - protein, 12 aa, Homo sapiens
  CDR3 for beta chain variable domain of TCR clone 322997 (TRBV11-2, TRBJ2-2)
CAGSLGCGELFF

SEQ ID NO: 645995 - protein, 14 aa, Homo sapiens
  CDR3 for alpha chain variable domain of TCR clone 322998 (TRAV35, TRAJ38)
CAGSNAGNNRKLIW

SEQ ID NO: 645996 - protein, 13 aa, Homo sapiens
  CDR3 for beta chain variable domain of TCR clone 322998 (TRBV19, TRBJ1-2)
CASSVPGQDGYTF

SEQ ID NO: 645997 - protein, 14 aa, Homo sapiens
  CDR3 for alpha chain variable domain of TCR clone 322999 (TRAV26-1, TRAJ38)
CIADNAGNNRKLFW

SEQ ID NO: 645998 - protein, 20 aa, Homo sapiens
  CDR3 for beta chain variable domain of TCR clone 322999 (TRBV7-8, TRBJ2-2)
CASSHLFPGPTIQITGELFF

SEQ ID NO: 645999 - protein, 15 aa, Homo sapiens
  CDR3 for alpha chain variable domain of TCR clone 323000 (TRAV3, TRAJ22)
CAVRDRGGSARQLTF

SEQ ID NO: 646000 - protein, 16 aa, Homo sapiens
  CDR3 for beta chain variable domain of TCR clone 323000 (TRBV5-4, TRBJ2-3)
CASQTPGAGGADTQYF

SEQ ID NO: 646001 - protein, 18 aa, Homo sapiens
  CDR3 for alpha chain variable domain of TCR clone 323001 (TRAV21, TRAJ52)
CAVRPSPAGGTSYGKLTF

SEQ ID NO: 646002 - protein, 15 aa, Homo sapiens
  CDR3 for beta chain variable domain of TCR clone 323001 (TRBV10-3, TRBJ2-2)
CAISVATSNTGELFF

SEQ ID NO: 646003 - protein, 15 aa, Homo sapiens
  CDR3 for alpha chain variable domain of TCR clone 323002 (TRAV17, TRAJ57)
CATGPSQGGSEKLVF

SEQ ID NO: 646004 - protein, 15 aa, Homo sapiens
  CDR3 for beta chain variable domain of TCR clone 323002 (TRBV9, TRBJ1-6)
CASSVAGTGDSALHF

SEQ ID NO: 646005 - protein, 16 aa, Homo sapiens
  CDR3 for alpha chain variable domain of TCR clone 323003 (TRAV30, TRAJ24)
CGTEIVDADSWGKFQC

SEQ ID NO: 646006 - protein, 15 aa, Homo sapiens
  CDR3 for beta chain variable domain of TCR clone 323003 (TRBV9, TRBJ1-6)
CASSVAGTGDSPLHF

SEQ ID NO: 646007 - protein, 14 aa, Homo sapiens
  CDR3 for alpha chain variable domain of TCR clone 323004 (TRAV12-2, TRAJ24)
CAVTPADSWGKLQF

SEQ ID NO: 646008 - protein, 16 aa, Homo sapiens
  CDR3 for beta chain variable domain of TCR clone 323004 (TRBV4-1, TRBJ2-3)
CASSQSTSGAEDTQYF

SEQ ID NO: 646009 - protein, 12 aa, Homo sapiens
  CDR3 for alpha chain variable domain of TCR clone 323005 (TRAV27, TRAJ35)
CTGADFGNVLHC

SEQ ID NO: 646010 - protein, 16 aa, Homo sapiens
  CDR3 for beta chain variable domain of TCR clone 323005 (TRBV6-1, TRBJ2-1)
CASILRQGSSYNEQFF

SEQ ID NO: 646011 - protein, 14 aa, Homo sapiens
  CDR3 for alpha chain variable domain of TCR clone 323006 (TRAV1-2, TRAJ8)
CAVRGDTGFQKLVF

SEQ ID NO: 646012 - protein, 12 aa, Homo sapiens
  CDR3 for beta chain variable domain of TCR clone 323006 (TRBV11-2, TRBJ2-2)
CASSLPTGELFF

SEQ ID NO: 646013 - protein, 15 aa, Homo sapiens
  CDR3 for alpha chain variable domain of TCR clone 323007 (TRAV3, TRAJ32)
CAVSSDGVATNKLIF

SEQ ID NO: 646014 - protein, 13 aa, Homo sapiens
  CDR3 for beta chain variable domain of TCR clone 323007 (TRBV20-1, TRBJ2-7)
CSARPSTNYEQYF

SEQ ID NO: 646015 - protein, 16 aa, Homo sapiens
  CDR3 for alpha chain variable domain of TCR clone 323008 (TRAV26-1, TRAJ53)
CIVRVARGGSNYKLTF

SEQ ID NO: 646016 - protein, 12 aa, Homo sapiens
  CDR3 for beta chain variable domain of TCR clone 323008 (TRBV7-9, TRBJ1-5)
CASSPQGQLQHF

SEQ ID NO: 646017 - protein, 15 aa, Homo sapiens
  CDR3 for alpha chain variable domain of TCR clone 323009 (TRAV12-1, TRAJ42)
CVVKTGGGSQGNLIF

SEQ ID NO: 646018 - protein, 15 aa, Homo sapiens
  CDR3 for beta chain variable domain of TCR clone 323009 (TRBV6-1, TRBJ2-3)
CASSERGGITDTQYF

SEQ ID NO: 646019 - protein, 14 aa, Homo sapiens
  CDR3 for alpha chain variable domain of TCR clone 323010 (TRAV13-1, TRAJ35)
CAASKGGFGNVLHC

SEQ ID NO: 646020 - protein, 21 aa, Homo sapiens
  CDR3 for beta chain variable domain of TCR clone 323010 (TRBV7-3, TRBJ1-1)
GGTQQCISVPAARIGGAEAFF

SEQ ID NO: 646021 - protein, 14 aa, Homo sapiens
  CDR3 for alpha chain variable domain of TCR clone 323011 (TRAV1-2, TRAJ8)
FAVREDTGFQKLVF

SEQ ID NO: 646022 - protein, 14 aa, Homo sapiens
  CDR3 for beta chain variable domain of TCR clone 323011 (TRBV18, TRBJ2-7)
CASSPRGGSYEQYF

SEQ ID NO: 646023 - protein, 13 aa, Homo sapiens
  CDR3 for alpha chain variable domain of TCR clone 323012 (TRAV3, TRAJ36)
CAVKRTGANNLFF

SEQ ID NO: 646024 - protein, 14 aa, Homo sapiens
  CDR3 for beta chain variable domain of TCR clone 323012 (TRBV19, TRBJ2-1)
CASSMGSGATEQFF

SEQ ID NO: 646025 - protein, 13 aa, Homo sapiens
  CDR3 for alpha chain variable domain of TCR clone 323013 (TRAV13-2, TRAJ5)
CAVMDAGRRALTF

SEQ ID NO: 646026 - protein, 12 aa, Homo sapiens
  CDR3 for beta chain variable domain of TCR clone 323013 (TRBV28, TRBJ2-7)
CASSFSSYEQYF

SEQ ID NO: 646027 - protein, 15 aa, Homo sapiens
  CDR3 for alpha chain variable domain of TCR clone 323014 (TRAV23/DV6, TRAJ18)
CAARYRGSTLGRLYF

SEQ ID NO: 646028 - protein, 15 aa, Homo sapiens
  CDR3 for beta chain variable domain of TCR clone 323014 (TRBV7-8, TRBJ2-1)
CASSLARGLYNEQFF

SEQ ID NO: 646029 - protein, 12 aa, Homo sapiens
  CDR3 for alpha chain variable domain of TCR clone 323015 (TRAV12-3, TRAJ41)
CAMSYSGYALNF

SEQ ID NO: 646030 - protein, 13 aa, Homo sapiens
  CDR3 for beta chain variable domain of TCR clone 323015 (TRBV7-3, TRBJ2-1)
CASSSDSYNEQFF

SEQ ID NO: 646031 - protein, 14 aa, Homo sapiens
  CDR3 for alpha chain variable domain of TCR clone 323016 (TRAV34, TRAJ44)
CGADGTGTASKLTF

SEQ ID NO: 646032 - protein, 11 aa, Homo sapiens
  CDR3 for beta chain variable domain of TCR clone 323016 (TRBV6-3, TRBJ2-7)
CQSRQGYEQYF

SEQ ID NO: 646033 - protein, 15 aa, Homo sapiens
  CDR3 for alpha chain variable domain of TCR clone 323017 (TRAV3, TRAJ47)
CAVRDIGEYGKKLVF

SEQ ID NO: 646034 - protein, 14 aa, Homo sapiens
  CDR3 for beta chain variable domain of TCR clone 323017 (TRBV13, TRBJ2-5)
CASSLDRVGETQYF

SEQ ID NO: 646035 - protein, 13 aa, Homo sapiens
  CDR3 for alpha chain variable domain of TCR clone 323018 (TRAV8-6, TRAJ50)
CAVIKTSYDKVIF

SEQ ID NO: 646036 - protein, 15 aa, Homo sapiens
  CDR3 for beta chain variable domain of TCR clone 323018 (TRBV7-8, TRBJ2-2)
CASRRPGQNTGELFF

SEQ ID NO: 646037 - protein, 13 aa, Homo sapiens
  CDR3 for alpha chain variable domain of TCR clone 323019 (TRAV2, TRAJ29)
CAVEPTGNTPLVF

SEQ ID NO: 646038 - protein, 16 aa, Homo sapiens
  CDR3 for beta chain variable domain of TCR clone 323019 (TRBV18, TRBJ1-6)
CASSQTEISYDSPLHS

SEQ ID NO: 646039 - protein, 15 aa, Homo sapiens
  CDR3 for alpha chain variable domain of TCR clone 323020 (TRAV16, TRAJ39)
CALSSSNNAGNMLTF

SEQ ID NO: 646040 - protein, 14 aa, Homo sapiens
  CDR3 for beta chain variable domain of TCR clone 323020 (TRBV7-7, TRBJ2-7)
CASSPGGPTYEQYF

SEQ ID NO: 646041 - protein, 12 aa, Homo sapiens
  CDR3 for alpha chain variable domain of TCR clone 323021 (TRAV4, TRAJ6)
CLAPGGSYILTF

SEQ ID NO: 646042 - protein, 18 aa, Homo sapiens
  CDR3 for beta chain variable domain of TCR clone 323021 (TRBV20-1, TRBJ2-3)
CSASGLAGGPGTTDTQYF

SEQ ID NO: 646043 - protein, 13 aa, Homo sapiens
  CDR3 for alpha chain variable domain of TCR clone 323022 (TRAV1-1, TRAJ13)
CAAYSGGYQKVTF

SEQ ID NO: 646044 - protein, 14 aa, Homo sapiens
  CDR3 for beta chain variable domain of TCR clone 323022 (TRBV12-5, TRBJ2-5)
CASGSRTHQETQYF

SEQ ID NO: 646045 - protein, 15 aa, Homo sapiens
  CDR3 for alpha chain variable domain of TCR clone 323023 (TRAV3, TRAJ5)
CAARDLDTGRRALTF

SEQ ID NO: 646046 - protein, 14 aa, Homo sapiens
  CDR3 for beta chain variable domain of TCR clone 323023 (TRBV25-1, TRBJ1-1)
CASTHLGGNTEAFF

SEQ ID NO: 646047 - protein, 13 aa, Homo sapiens
  CDR3 for alpha chain variable domain of TCR clone 323024 (TRAV25, TRAJ30)
CAGRVDSDDKIIF

SEQ ID NO: 646048 - protein, 17 aa, Homo sapiens
  CDR3 for beta chain variable domain of TCR clone 323024 (TRBV7-9, TRBJ2-6)
CASSFGAGYSGASVLTF

SEQ ID NO: 646049 - protein, 15 aa, Homo sapiens
  CDR3 for alpha chain variable domain of TCR clone 323025 (TRAV19, TRAJ9)
CALSLPDTGGLKTIF

SEQ ID NO: 646050 - protein, 15 aa, Homo sapiens
  CDR3 for beta chain variable domain of TCR clone 323025 (TRBV7-9, TRBJ1-6)
CASSSPGRGNSPLHF

SEQ ID NO: 646051 - protein, 15 aa, Homo sapiens
  CDR3 for alpha chain variable domain of TCR clone 323026 (TRAV2, TRAJ24)
CAVVRLKYSWGKLQF

SEQ ID NO: 646052 - protein, 16 aa, Homo sapiens
  CDR3 for beta chain variable domain of TCR clone 323026 (TRBV7-7, TRBJ2-3)
CASSPGTSGSTDTQYF

SEQ ID NO: 646053 - protein, 13 aa, Homo sapiens
  CDR3 for alpha chain variable domain of TCR clone 323027 (TRAV21, TRAJ57)
CAVTQGGSEKLVF

SEQ ID NO: 646054 - protein, 13 aa, Homo sapiens
  CDR3 for beta chain variable domain of TCR clone 323027 (TRBV28, TRBJ2-7)
CASSPTLKREQYF

SEQ ID NO: 646055 - protein, 13 aa, Homo sapiens
  CDR3 for alpha chain variable domain of TCR clone 323028 (TRAV2, TRAJ40)
CAVVTLATYKYIF

SEQ ID NO: 646056 - protein, 14 aa, Homo sapiens
  CDR3 for beta chain variable domain of TCR clone 323028 (TRBV7-9, TRBJ2-1)
CASSSMVGFGEQFF

SEQ ID NO: 646057 - protein, 11 aa, Homo sapiens
  CDR3 for alpha chain variable domain of TCR clone 323029 (TRAV12-2, TRAJ33)
CAVDSNYPLIW

SEQ ID NO: 646058 - protein, 15 aa, Homo sapiens
  CDR3 for beta chain variable domain of TCR clone 323029 (TRBV19, TRBJ1-2)
CASSVGQVLNYGYTF

SEQ ID NO: 646059 - protein, 15 aa, Homo sapiens
  CDR3 for alpha chain variable domain of TCR clone 323030 (TRAV12-3, TRAJ27)
CAMRAYNTNAGKSTF

SEQ ID NO: 646060 - protein, 13 aa, Homo sapiens
  CDR3 for beta chain variable domain of TCR clone 323030 (TRBV11-2, TRBJ2-5)
CDSSRGPPETQYF

SEQ ID NO: 646061 - protein, 15 aa, Homo sapiens
  CDR3 for alpha chain variable domain of TCR clone 323031 (TRAV17, TRAJ23)
CATDAEDNQGGKLIF

SEQ ID NO: 646062 - protein, 15 aa, Homo sapiens
  CDR3 for beta chain variable domain of TCR clone 323031 (TRBV13, TRBJ1-3)
CASSSQGTSGNTIYF

SEQ ID NO: 646063 - protein, 13 aa, Homo sapiens
  CDR3 for alpha chain variable domain of TCR clone 323032 (TRAV35, TRAJ44)
CAGLSGTASKLTF

SEQ ID NO: 646064 - protein, 16 aa, Homo sapiens
  CDR3 for beta chain variable domain of TCR clone 323032 (TRBV11-2, TRBJ2-1)
CASARGSYSHHNEQFF

SEQ ID NO: 646065 - protein, 15 aa, Homo sapiens
  CDR3 for alpha chain variable domain of TCR clone 323033 (TRAV8-1, TRAJ23)
CAVNSHYNQGGKLIF

SEQ ID NO: 646066 - protein, 15 aa, Homo sapiens
  CDR3 for beta chain variable domain of TCR clone 323033 (TRBV28, TRBJ1-3)
CASSMGWVSGNTIYF

SEQ ID NO: 646067 - protein, 13 aa, Homo sapiens
  CDR3 for alpha chain variable domain of TCR clone 323034 (TRAV8-3, TRAJ44)
GAVVPGTASKLTF

SEQ ID NO: 646068 - protein, 14 aa, Homo sapiens
  CDR3 for beta chain variable domain of TCR clone 323034 (TRBV11-2, TRBJ2-3)
CASSRLARTDTQYF

SEQ ID NO: 646069 - protein, 16 aa, Homo sapiens
  CDR3 for alpha chain variable domain of TCR clone 323035 (TRAV30, TRAJ24)
CGTEIVDADCWGKFQF

SEQ ID NO: 646070 - protein, 13 aa, Homo sapiens
  CDR3 for beta chain variable domain of TCR clone 323035 (TRBV11-2, TRBJ2-5)
CASSSTGEETQYF

SEQ ID NO: 646071 - protein, 14 aa, Homo sapiens
  CDR3 for alpha chain variable domain of TCR clone 323036 (TRAV12-3, TRAJ10)
SHLPLTGGGNNLTF

SEQ ID NO: 646072 - protein, 15 aa, Homo sapiens
  CDR3 for beta chain variable domain of TCR clone 323036 (TRBV15, TRBJ1-1)
CATSLQGGRNTEAFF

SEQ ID NO: 646073 - protein, 14 aa, Homo sapiens
  CDR3 for alpha chain variable domain of TCR clone 323037 (TRAV2, TRAJ12)
CAVDAMDSSYKLIF

SEQ ID NO: 646074 - protein, 12 aa, Homo sapiens
  CDR3 for beta chain variable domain of TCR clone 323037 (TRBV11-2, TRBJ2-1)
CASSPGNNEQFF

SEQ ID NO: 646075 - protein, 16 aa, Homo sapiens
  CDR3 for alpha chain variable domain of TCR clone 323038 (TRAV3, TRAJ10)
CAVRDMRAGGGNKLNF

SEQ ID NO: 646076 - protein, 15 aa, Homo sapiens
  CDR3 for beta chain variable domain of TCR clone 323038 (TRBV20-1, TRBJ2-7)
CSARDRVSGMDEQYF

SEQ ID NO: 646077 - protein, 16 aa, Homo sapiens
  CDR3 for alpha chain variable domain of TCR clone 323039 (TRAV2, TRAJ10)
CCGGSTVTGGGNKLTF

SEQ ID NO: 646078 - protein, 16 aa, Homo sapiens
  CDR3 for beta chain variable domain of TCR clone 323039 (TRBV20-1, TRBJ2-1)
CSARDARTRGPNEQFF

SEQ ID NO: 646079 - protein, 15 aa, Homo sapiens
  CDR3 for alpha chain variable domain of TCR clone 323040 (TRAV12-1, TRAJ36)
CVVNEHQTGANNLFF

SEQ ID NO: 646080 - protein, 12 aa, Homo sapiens
  CDR3 for beta chain variable domain of TCR clone 323040 (TRBV29-1, TRBJ2-3)
CSVTGGADTKYF

SEQ ID NO: 646081 - protein, 12 aa, Homo sapiens
  CDR3 for alpha chain variable domain of TCR clone 323041 (TRAV21, TRAJ35)
CAVVGFGNVLHC

SEQ ID NO: 646082 - protein, 16 aa, Homo sapiens
  CDR3 for beta chain variable domain of TCR clone 323041 (TRBV6-1, TRBJ2-5)
CASSEALDRGAETQYF

SEQ ID NO: 646083 - protein, 16 aa, Homo sapiens
  CDR3 for alpha chain variable domain of TCR clone 323042 (TRAV8-6, TRAJ13)
CAVSDKGIWGLPESYL

SEQ ID NO: 646084 - protein, 14 aa, Homo sapiens
  CDR3 for beta chain variable domain of TCR clone 323042 (TRBV7-9, TRBJ2-7)
CASSPRTGTYEQYF

SEQ ID NO: 646085 - protein, 15 aa, Homo sapiens
  CDR3 for alpha chain variable domain of TCR clone 323043 (TRAV17, TRAJ28)
CATVYSGAGSYQLTF

SEQ ID NO: 646086 - protein, 14 aa, Homo sapiens
  CDR3 for beta chain variable domain of TCR clone 323043 (TRBV20-1, TRBJ1-1)
CSAQTRIGGTEAFF

SEQ ID NO: 646087 - protein, 16 aa, Homo sapiens
  CDR3 for alpha chain variable domain of TCR clone 323044 (TRAV4, TRAJ22)
CLVGDLYSGSARQLTF

SEQ ID NO: 646088 - protein, 16 aa, Homo sapiens
  CDR3 for beta chain variable domain of TCR clone 323044 (TRBV7-9, TRBJ2-3)
CASSPWREVGTDTQYY

SEQ ID NO: 646089 - protein, 17 aa, Homo sapiens
  CDR3 for alpha chain variable domain of TCR clone 323045 (TRAV12-2, TRAJ4)
CAVNVRPVFGGYNKLIF

SEQ ID NO: 646090 - protein, 17 aa, Homo sapiens
  CDR3 for beta chain variable domain of TCR clone 323045 (TRBV6-3, TRBJ2-1)
CASSYSSGTRGLDEQFF

SEQ ID NO: 646091 - protein, 14 aa, Homo sapiens
  CDR3 for alpha chain variable domain of TCR clone 323046 (TRAV23/DV6, TRAJ37)
CAASTSSTTGKLIF

SEQ ID NO: 646092 - protein, 14 aa, Homo sapiens
  CDR3 for beta chain variable domain of TCR clone 323046 (TRBV15, TRBJ2-3)
CATRSGTSTDTQYF

SEQ ID NO: 646093 - protein, 15 aa, Homo sapiens
  CDR3 for alpha chain variable domain of TCR clone 323047 (TRAV26-1, TRAJ44)
CIVRANTGTASKLTF

SEQ ID NO: 646094 - protein, 15 aa, Homo sapiens
  CDR3 for beta chain variable domain of TCR clone 323047 (TRBV15, TRBJ1-5)
CATSREQEGNQPQHF

SEQ ID NO: 646095 - protein, 10 aa, Homo sapiens
  CDR3 for alpha chain variable domain of TCR clone 323048 (TRAV21, TRAJ35)
CAVFGNVLHC

SEQ ID NO: 646096 - protein, 13 aa, Homo sapiens
  CDR3 for beta chain variable domain of TCR clone 323048 (TRBV4-1, TRBJ1-1)
CASSRKMNTEAFF

SEQ ID NO: 646097 - protein, 15 aa, Homo sapiens
  CDR3 for alpha chain variable domain of TCR clone 323049 (TRAV14/DV4, TRAJ12)
CAIREERDSSYKLIF

SEQ ID NO: 646098 - protein, 16 aa, Homo sapiens
  CDR3 for beta chain variable domain of TCR clone 323049 (TRBV11-2, TRBJ1-2)
CASSLDRGGNNYGYTF

SEQ ID NO: 646099 - protein, 13 aa, Homo sapiens
  CDR3 for alpha chain variable domain of TCR clone 323050 (TRAV8-3, TRAJ4)
WVFYSGGYNKLIF

SEQ ID NO: 646100 - protein, 14 aa, Homo sapiens
  CDR3 for beta chain variable domain of TCR clone 323050 (TRBV7-9, TRBJ2-3)
CASSLEEGTDTQYI

SEQ ID NO: 646101 - protein, 14 aa, Homo sapiens
  CDR3 for alpha chain variable domain of TCR clone 323051 (TRAV13-1, TRAJ6)
CAASNGGGSYIPTF

SEQ ID NO: 646102 - protein, 15 aa, Homo sapiens
  CDR3 for beta chain variable domain of TCR clone 323051 (TRBV10-3, TRBJ2-5)
CAIRPWDVDLGTQYF

SEQ ID NO: 646103 - protein, 14 aa, Homo sapiens
  CDR3 for alpha chain variable domain of TCR clone 323052 (TRAV35, TRAJ42)
CAGRYGGSQGTLIF

SEQ ID NO: 646104 - protein, 15 aa, Homo sapiens
  CDR3 for beta chain variable domain of TCR clone 323052 (TRBV7-9, TRBJ2-1)
CASSLGWGRANEQFF

SEQ ID NO: 646105 - protein, 12 aa, Homo sapiens
  CDR3 for alpha chain variable domain of TCR clone 323053 (TRAV22, TRAJ22)
CAPGGSARQLTF

SEQ ID NO: 646106 - protein, 15 aa, Homo sapiens
  CDR3 for beta chain variable domain of TCR clone 323053 (TRBV11-1, TRBJ2-7)
CASSLNYGASYEQYF

SEQ ID NO: 646107 - protein, 12 aa, Homo sapiens
  CDR3 for alpha chain variable domain of TCR clone 323054 (TRAV12-3, TRAJ40)
CEMGSGTYKYIF

SEQ ID NO: 646108 - protein, 15 aa, Homo sapiens
  CDR3 for beta chain variable domain of TCR clone 323054 (TRBV7-3, TRBJ2-2)
CASSETGQGTGELFF

SEQ ID NO: 646109 - protein, 14 aa, Homo sapiens
  CDR3 for alpha chain variable domain of TCR clone 323055 (TRAV12-3, TRAJ57)
RAMSAWGGSEKLVF

SEQ ID NO: 646110 - protein, 14 aa, Homo sapiens
  CDR3 for beta chain variable domain of TCR clone 323055 (TRBV18, TRBJ2-5)
CASSPGVSQETQYF

SEQ ID NO: 646111 - protein, 15 aa, Homo sapiens
  CDR3 for alpha chain variable domain of TCR clone 323056 (TRAV8-2, TRAJ15)
CVVTMGNQAGTALIF

SEQ ID NO: 646112 - protein, 16 aa, Homo sapiens
  CDR3 for beta chain variable domain of TCR clone 323056 (TRBV7-3, TRBJ2-1)
CASSKPLAGGYNEQFF

SEQ ID NO: 646113 - protein, 15 aa, Homo sapiens
  CDR3 for alpha chain variable domain of TCR clone 323057 (TRAV4, TRAJ39)
CLVGPNNNAGNMLTF

SEQ ID NO: 646114 - protein, 17 aa, Homo sapiens
  CDR3 for beta chain variable domain of TCR clone 323057 (TRBV10-3, TRBJ1-2)
CAISETRDRGLEYGYTF

SEQ ID NO: 646115 - protein, 15 aa, Homo sapiens
  CDR3 for alpha chain variable domain of TCR clone 323058 (TRAV17, TRAJ23)
CATDAEDNQGGKLIV

SEQ ID NO: 646116 - protein, 12 aa, Homo sapiens
  CDR3 for beta chain variable domain of TCR clone 323058 (TRBV2, TRBJ2-1)
CARREGYNEQFF

SEQ ID NO: 646117 - protein, 13 aa, Homo sapiens
  CDR3 for alpha chain variable domain of TCR clone 323059 (TRAV1-1, TRAJ9)
CAAKNTGGFKTIF

SEQ ID NO: 646118 - protein, 13 aa, Homo sapiens
  CDR3 for beta chain variable domain of TCR clone 323059 (TRBV7-2, TRBJ2-7)
CASSSPSGSEQYF

SEQ ID NO: 646119 - protein, 14 aa, Homo sapiens
  CDR3 for alpha chain variable domain of TCR clone 323060 (TRAV13-2, TRAJ43)
CAEIPTYNNNDMRF

SEQ ID NO: 646120 - protein, 14 aa, Homo sapiens
  CDR3 for beta chain variable domain of TCR clone 323060 (TRBV7-2, TRBJ1-2)
CASSQTGSTYGYTF

SEQ ID NO: 646121 - protein, 13 aa, Homo sapiens
  CDR3 for alpha chain variable domain of TCR clone 323061 (TRAV3, TRAJ21)
CAVREPDFNKFYF

SEQ ID NO: 646122 - protein, 15 aa, Homo sapiens
  CDR3 for beta chain variable domain of TCR clone 323061 (TRBV25-1, TRBJ1-4)
CASSPGDSTNEKLFF

SEQ ID NO: 646123 - protein, 15 aa, Homo sapiens
  CDR3 for alpha chain variable domain of TCR clone 323062 (TRAV4, TRAJ39)
CLVGPNNNAGNMLTF

SEQ ID NO: 646124 - protein, 15 aa, Homo sapiens
  CDR3 for beta chain variable domain of TCR clone 323062 (TRBV5-1, TRBJ2-1)
RASSPPRAPYNEQFF

SEQ ID NO: 646125 - protein, 14 aa, Homo sapiens
  CDR3 for alpha chain variable domain of TCR clone 323063 (TRAV27, TRAJ22)
SAGVSALGKKQLTF

SEQ ID NO: 646126 - protein, 17 aa, Homo sapiens
  CDR3 for beta chain variable domain of TCR clone 323063 (TRBV14, TRBJ2-1)
CASSQDRRVTSYNEQFF

SEQ ID NO: 646127 - protein, 11 aa, Homo sapiens
  CDR3 for alpha chain variable domain of TCR clone 323064 (TRAV2, TRAJ33)
CAVESNYQLIW

SEQ ID NO: 646128 - protein, 14 aa, Homo sapiens
  CDR3 for beta chain variable domain of TCR clone 323064 (TRBV19, TRBJ1-1)
CQYRGQIQNTEAFF

SEQ ID NO: 646129 - protein, 11 aa, Homo sapiens
  CDR3 for alpha chain variable domain of TCR clone 323065 (TRAV35, TRAJ34)
CWARHNDKLIF

SEQ ID NO: 646130 - protein, 14 aa, Homo sapiens
  CDR3 for beta chain variable domain of TCR clone 323065 (TRBV5-1, TRBJ2-7)
CASSRGESLYEQYF

SEQ ID NO: 646131 - protein, 15 aa, Homo sapiens
  CDR3 for alpha chain variable domain of TCR clone 323066 (TRAV34, TRAJ38)
CGADFTPGNNRKLIW

SEQ ID NO: 646132 - protein, 14 aa, Homo sapiens
  CDR3 for beta chain variable domain of TCR clone 323066 (TRBV7-9, TRBJ2-2)
CASSFDRGTGELFF

SEQ ID NO: 646133 - protein, 11 aa, Homo sapiens
  CDR3 for alpha chain variable domain of TCR clone 323067 (TRAV21, TRAJ34)
CAVTNTDKLIF

SEQ ID NO: 646134 - protein, 12 aa, Homo sapiens
  CDR3 for beta chain variable domain of TCR clone 323067 (TRBV11-2, TRBJ2-2)
CASSLGGGELVF

SEQ ID NO: 646135 - protein, 16 aa, Homo sapiens
  CDR3 for alpha chain variable domain of TCR clone 323068 (TRAV30, TRAJ24)
CGTEIVDADSWGKFQF

SEQ ID NO: 646136 - protein, 18 aa, Homo sapiens
  CDR3 for beta chain variable domain of TCR clone 323068 (TRBV11-2, TRBJ2-6)
CASSLNAFLGTGANVLTF

SEQ ID NO: 646137 - protein, 12 aa, Homo sapiens
  CDR3 for alpha chain variable domain of TCR clone 323069 (TRAV3, TRAJ20)
CAVRDPDYKLSF

SEQ ID NO: 646138 - protein, 15 aa, Homo sapiens
  CDR3 for beta chain variable domain of TCR clone 323069 (TRBV20-1, TRBJ2-7)
CSARGPLAGGREQYF

SEQ ID NO: 646139 - protein, 13 aa, Homo sapiens
  CDR3 for alpha chain variable domain of TCR clone 323070 (TRAV12-3, TRAJ7)
CAMSASGNNRLAF

SEQ ID NO: 646140 - protein, 14 aa, Homo sapiens
  CDR3 for beta chain variable domain of TCR clone 323070 (TRBV13, TRBJ2-5)
CASTLGPRGETQYF

SEQ ID NO: 646141 - protein, 16 aa, Homo sapiens
  CDR3 for alpha chain variable domain of TCR clone 323071 (TRAV3, TRAJ10)
CAVSDMRAGGGNKLTF

SEQ ID NO: 646142 - protein, 16 aa, Homo sapiens
  CDR3 for beta chain variable domain of TCR clone 323071 (TRBV19, TRBJ2-2)
CASSFPGQGLAGQLFF

SEQ ID NO: 646143 - protein, 11 aa, Homo sapiens
  CDR3 for alpha chain variable domain of TCR clone 323072 (TRAV17, TRAJ31)
CATDRTARVMF

SEQ ID NO: 646144 - protein, 14 aa, Homo sapiens
  CDR3 for beta chain variable domain of TCR clone 323072 (TRBV4-2, TRBJ2-3)
CASSQERGTDTQYF

SEQ ID NO: 646145 - protein, 14 aa, Homo sapiens
  CDR3 for alpha chain variable domain of TCR clone 323073 (TRAV12-2, TRAJ5)
CAVKGDTGRRALTF

SEQ ID NO: 646146 - protein, 13 aa, Homo sapiens
  CDR3 for beta chain variable domain of TCR clone 323073 (TRBV7-9, TRBJ2-5)
CASLPSGRETQYF

SEQ ID NO: 646147 - protein, 14 aa, Homo sapiens
  CDR3 for alpha chain variable domain of TCR clone 323074 (TRAV1-1, TRAJ23)
CAVSIYNQGGKLIF

SEQ ID NO: 646148 - protein, 14 aa, Homo sapiens
  CDR3 for beta chain variable domain of TCR clone 323074 (TRBV7-2, TRBJ2-5)
CASSLSGGGETQYF

SEQ ID NO: 646149 - protein, 12 aa, Homo sapiens
  CDR3 for alpha chain variable domain of TCR clone 323075 (TRAV26-1, TRAJ43)
CIVRVYNNDIRF

SEQ ID NO: 646150 - protein, 14 aa, Homo sapiens
  CDR3 for beta chain variable domain of TCR clone 323075 (TRBV25-1, TRBJ1-4)
CASSYSGGQEKLFF

SEQ ID NO: 646151 - protein, 13 aa, Homo sapiens
  CDR3 for alpha chain variable domain of TCR clone 323076 (TRAV29/DV5, TRAJ29)
CAASAAGNTPLVF

SEQ ID NO: 646152 - protein, 14 aa, Homo sapiens
  CDR3 for beta chain variable domain of TCR clone 323076 (TRBV6-1, TRBJ1-3)
CASVQGGGGNTIYF

SEQ ID NO: 646153 - protein, 12 aa, Homo sapiens
  CDR3 for alpha chain variable domain of TCR clone 323077 (TRAV1-1, TRAJ39)
CAVPVVGNMLTF

SEQ ID NO: 646154 - protein, 12 aa, Homo sapiens
  CDR3 for beta chain variable domain of TCR clone 323077 (TRBV11-3, TRBJ1-1)
CASSHRQGEAFF

SEQ ID NO: 646155 - protein, 17 aa, Homo sapiens
  CDR3 for alpha chain variable domain of TCR clone 323078 (TRAV12-1, TRAJ42)
LVVMRMNYGGSQGNLIF

SEQ ID NO: 646156 - protein, 13 aa, Homo sapiens
  CDR3 for beta chain variable domain of TCR clone 323078 (TRBV7-2, TRBJ1-1)
CASSLARPAEAFF

SEQ ID NO: 646157 - protein, 16 aa, Homo sapiens
  CDR3 for alpha chain variable domain of TCR clone 323079 (TRAV3, TRAJ21)
CAVRDIEIGNFNKFYF

SEQ ID NO: 646158 - protein, 20 aa, Homo sapiens
  CDR3 for beta chain variable domain of TCR clone 323079 (TRBV4-1, TRBJ2-2)
CASSQASPPGLASNTGELFF

SEQ ID NO: 646159 - protein, 15 aa, Homo sapiens
  CDR3 for alpha chain variable domain of TCR clone 323080 (TRAV23/DV6, TRAJ44)
CSASGGTGTASKLTF

SEQ ID NO: 646160 - protein, 16 aa, Homo sapiens
  CDR3 for beta chain variable domain of TCR clone 323080 (TRBV20-1, TRBJ2-3)
CSALAFDTGDPDTQYF

SEQ ID NO: 646161 - protein, 17 aa, Homo sapiens
  CDR3 for alpha chain variable domain of TCR clone 323081 (TRAV13-1, TRAJ28)
CAASPPYSGAGSYQLTF

SEQ ID NO: 646162 - protein, 15 aa, Homo sapiens
  CDR3 for beta chain variable domain of TCR clone 323081 (TRBV12-4, TRBJ2-5)
CASSPPTGLQETQYF

SEQ ID NO: 646163 - protein, 14 aa, Homo sapiens
  CDR3 for alpha chain variable domain of TCR clone 323082 (TRAV23/DV6, TRAJ23)
CAAGPYNQGGKRIV

SEQ ID NO: 646164 - protein, 17 aa, Homo sapiens
  CDR3 for beta chain variable domain of TCR clone 323082 (TRBV4-2, TRBJ1-1)
CASSQVETGGMNTEAFF

SEQ ID NO: 646165 - protein, 17 aa, Homo sapiens
  CDR3 for alpha chain variable domain of TCR clone 323083 (TRAV8-6, TRAJ58)
CAVSSWVGETSGSRLTF

SEQ ID NO: 646166 - protein, 14 aa, Homo sapiens
  CDR3 for beta chain variable domain of TCR clone 323083 (TRBV4-2, TRBJ2-1)
CASGLDRAYNEQIF

SEQ ID NO: 646167 - protein, 15 aa, Homo sapiens
  CDR3 for alpha chain variable domain of TCR clone 323084 (TRAV13-1, TRAJ11)
CAASNRNSGYSTLTF

SEQ ID NO: 646168 - protein, 11 aa, Homo sapiens
  CDR3 for beta chain variable domain of TCR clone 323084 (TRBV20-1, TRBJ2-7)
CSARRSYEQYF

SEQ ID NO: 646169 - protein, 14 aa, Homo sapiens
  CDR3 for alpha chain variable domain of TCR clone 323085 (TRAV26-1, TRAJ45)
CIGVTGGGADGLTF

SEQ ID NO: 646170 - protein, 12 aa, Homo sapiens
  CDR3 for beta chain variable domain of TCR clone 323085 (TRBV12-5, TRBJ2-5)
CASGQGVETQYF

SEQ ID NO: 646171 - protein, 16 aa, Homo sapiens
  CDR3 for alpha chain variable domain of TCR clone 323086 (TRAV26-1, TRAJ32)
CIVRTNYGGATNKLNF

SEQ ID NO: 646172 - protein, 14 aa, Homo sapiens
  CDR3 for beta chain variable domain of TCR clone 323086 (TRBV6-1, TRBJ1-3)
CASVQGGGGNTIYF

SEQ ID NO: 646173 - protein, 13 aa, Homo sapiens
  CDR3 for alpha chain variable domain of TCR clone 323087 (TRAV27, TRAJ6)
CAGGTRGSYIPTF

SEQ ID NO: 646174 - protein, 15 aa, Homo sapiens
  CDR3 for beta chain variable domain of TCR clone 323087 (TRBV5-5, TRBJ2-7)
CASSLAEPLSYEQYF

SEQ ID NO: 646175 - protein, 14 aa, Homo sapiens
  CDR3 for alpha chain variable domain of TCR clone 323088 (TRAV12-2, TRAJ13)
CAVKKTGGYQKVTF

SEQ ID NO: 646176 - protein, 16 aa, Homo sapiens
  CDR3 for beta chain variable domain of TCR clone 323088 (TRBV5-1, TRBJ2-1)
CASSPWTSGEYNEQFF

SEQ ID NO: 646177 - protein, 15 aa, Homo sapiens
  CDR3 for alpha chain variable domain of TCR clone 323089 (TRAV35, TRAJ50)
CAGQLRKASYDKVIF

SEQ ID NO: 646178 - protein, 12 aa, Homo sapiens
  CDR3 for beta chain variable domain of TCR clone 323089 (TRBV5-1, TRBJ2-5)
CASRLGLETQYF

SEQ ID NO: 646179 - protein, 13 aa, Homo sapiens
  CDR3 for alpha chain variable domain of TCR clone 323090 (TRAV36/DV7, TRAJ54)
CAVAIQGAQKLVF

SEQ ID NO: 646180 - protein, 14 aa, Homo sapiens
  CDR3 for beta chain variable domain of TCR clone 323090 (TRBV19, TRBJ2-7)
CSSNFRDTFTGMYF

SEQ ID NO: 646181 - protein, 23 aa, Homo sapiens
  CDR3 for alpha chain variable domain of TCR clone 323091 (TRAV26-1, TRAJ38)
CIADNAGNNHIQNPDPAVYHLRD

SEQ ID NO: 646182 - protein, 13 aa, Homo sapiens
  CDR3 for beta chain variable domain of TCR clone 323091 (TRBV20-1, TRBJ1-1)
CSARGGGNTEAVF

SEQ ID NO: 646183 - protein, 13 aa, Homo sapiens
  CDR3 for alpha chain variable domain of TCR clone 323092 (TRAV13-1, TRAJ52)
CASLGASYGKLTF

SEQ ID NO: 646184 - protein, 15 aa, Homo sapiens
  CDR3 for beta chain variable domain of TCR clone 323092 (TRBV20-1, TRBJ2-1)
CSARSPGGPGNEQFF

SEQ ID NO: 646185 - protein, 18 aa, Homo sapiens
  CDR3 for alpha chain variable domain of TCR clone 323093 (TRAV13-1, TRAJ52)
CAASKRSAGGTSYGKLTF

SEQ ID NO: 646186 - protein, 14 aa, Homo sapiens
  CDR3 for beta chain variable domain of TCR clone 323093 (TRBV13, TRBJ2-7)
CASSLKGASYEHYF

SEQ ID NO: 646187 - protein, 16 aa, Homo sapiens
  CDR3 for alpha chain variable domain of TCR clone 323094 (TRAV26-1, TRAJ53)
CIVRVAMGGSNYKLTF

SEQ ID NO: 646188 - protein, 13 aa, Homo sapiens
  CDR3 for beta chain variable domain of TCR clone 323094 (TRBV11-2, TRBJ2-5)
CASSSTGEETQYF

SEQ ID NO: 646189 - protein, 15 aa, Homo sapiens
  CDR3 for alpha chain variable domain of TCR clone 323095 (TRAV3, TRAJ5)
CAVRDLDTGRRALTF

SEQ ID NO: 646190 - protein, 17 aa, Homo sapiens
  CDR3 for beta chain variable domain of TCR clone 323095 (TRBV11-2, TRBJ2-6)
CASSQRDIFSGANVLTF

SEQ ID NO: 646191 - protein, 14 aa, Homo sapiens
  CDR3 for alpha chain variable domain of TCR clone 323096 (TRAV26-1, TRAJ21)
CIVRPPYNFNKFYF

SEQ ID NO: 646192 - protein, 14 aa, Homo sapiens
  CDR3 for beta chain variable domain of TCR clone 323096 (TRBV3-1, TRBJ2-5)
CASSQGPDQETQYF

SEQ ID NO: 646193 - protein, 13 aa, Homo sapiens
  CDR3 for alpha chain variable domain of TCR clone 323097 (TRAV12-1, TRAJ29)
CVVDTSGNTPLVF

SEQ ID NO: 646194 - protein, 13 aa, Homo sapiens
  CDR3 for beta chain variable domain of TCR clone 323097 (TRBV19, TRBJ1-2)
CASSVPGQDGYTF

SEQ ID NO: 646195 - protein, 12 aa, Homo sapiens
  CDR3 for alpha chain variable domain of TCR clone 323098 (TRAV1-1, TRAJ23)
CAVTNQGGKLIF

SEQ ID NO: 646196 - protein, 14 aa, Homo sapiens
  CDR3 for beta chain variable domain of TCR clone 323098 (TRBV25-1, TRBJ1-1)
CASTHLGGNTEAFF

SEQ ID NO: 646197 - protein, 14 aa, Homo sapiens
  CDR3 for alpha chain variable domain of TCR clone 323099 (TRAV17, TRAJ35)
CATDRPGFGNVLHC

SEQ ID NO: 646198 - protein, 13 aa, Homo sapiens
  CDR3 for beta chain variable domain of TCR clone 323099 (TRBV12-4, TRBJ1-1)
CASSPGTGFEAFF

SEQ ID NO: 646199 - protein, 14 aa, Homo sapiens
  CDR3 for alpha chain variable domain of TCR clone 323100 (TRAV26-1, TRAJ39)
CIVRGSRAGNMLTF

SEQ ID NO: 646200 - protein, 14 aa, Homo sapiens
  CDR3 for beta chain variable domain of TCR clone 323100 (TRBV7-9, TRBJ1-5)
CQQPGHQPNQPQHF

SEQ ID NO: 646201 - protein, 15 aa, Homo sapiens
  CDR3 for alpha chain variable domain of TCR clone 323101 (TRAV10, TRAJ42)
SLLHLWGGSQGNLIF

SEQ ID NO: 646202 - protein, 16 aa, Homo sapiens
  CDR3 for beta chain variable domain of TCR clone 323101 (TRBV7-3, TRBJ2-2)
CASSLKRGTLSGELFF

SEQ ID NO: 646203 - protein, 13 aa, Homo sapiens
  CDR3 for alpha chain variable domain of TCR clone 323102 (TRAV1-2, TRAJ9)
CAVLNTGGFKTIF

SEQ ID NO: 646204 - protein, 14 aa, Homo sapiens
  CDR3 for beta chain variable domain of TCR clone 323102 (TRBV19, TRBJ2-1)
CASPTFVLSGQQFF

SEQ ID NO: 646205 - protein, 11 aa, Homo sapiens
  CDR3 for alpha chain variable domain of TCR clone 323103 (TRAV12-1, TRAJ30)
CVVNGQDKIIF

SEQ ID NO: 646206 - protein, 16 aa, Homo sapiens
  CDR3 for beta chain variable domain of TCR clone 323103 (TRBV24-1, TRBJ2-3)
CATSDAISGMTDTQYF

SEQ ID NO: 646207 - protein, 15 aa, Homo sapiens
  CDR3 for alpha chain variable domain of TCR clone 323104 (TRAV3, TRAJ45)
CAVWTPWGGADGLTF

SEQ ID NO: 646208 - protein, 16 aa, Homo sapiens
  CDR3 for beta chain variable domain of TCR clone 323104 (TRBV6-1, TRBJ2-2)
CASSFGQGANTGELFF

SEQ ID NO: 646209 - protein, 11 aa, Homo sapiens
  CDR3 for alpha chain variable domain of TCR clone 323105 (TRAV1-2, TRAJ8)
CAVSSFQKLVF

SEQ ID NO: 646210 - protein, 16 aa, Homo sapiens
  CDR3 for beta chain variable domain of TCR clone 323105 (TRBV7-3, TRBJ2-2)
CASSLKRGALSGELFF

SEQ ID NO: 646211 - protein, 13 aa, Homo sapiens
  CDR3 for alpha chain variable domain of TCR clone 323106 (TRAV20, TRAJ3)
CASRYSSASKITF

SEQ ID NO: 646212 - protein, 16 aa, Homo sapiens
  CDR3 for beta chain variable domain of TCR clone 323106 (TRBV6-1, TRBJ1-6)
CASSSDGSPRNSPLHF

SEQ ID NO: 646213 - protein, 18 aa, Homo sapiens
  CDR3 for alpha chain variable domain of TCR clone 323107 (TRAV3, TRAJ32)
CAVRHIRGHGGATNKLIF

SEQ ID NO: 646214 - protein, 15 aa, Homo sapiens
  CDR3 for beta chain variable domain of TCR clone 323107 (TRBV12-4, TRBJ2-2)
CASSLGVRHTGELFF

SEQ ID NO: 646215 - protein, 14 aa, Homo sapiens
  CDR3 for alpha chain variable domain of TCR clone 323108 (TRAV12-2, TRAJ13)
CAVKKTGGCQKVTF

SEQ ID NO: 646216 - protein, 15 aa, Homo sapiens
  CDR3 for beta chain variable domain of TCR clone 323108 (TRBV11-2, TRBJ1-3)
CTSSLDGTVGNTIYF

SEQ ID NO: 646217 - protein, 14 aa, Homo sapiens
  CDR3 for alpha chain variable domain of TCR clone 323109 (TRAV16, TRAJ17)
CALSGRAAGNKLTF

SEQ ID NO: 646218 - protein, 14 aa, Homo sapiens
  CDR3 for beta chain variable domain of TCR clone 323109 (TRBV5-1, TRBJ2-5)
CASSLAGKQETQYF

SEQ ID NO: 646219 - protein, 16 aa, Homo sapiens
  CDR3 for alpha chain variable domain of TCR clone 323110 (TRAV4, TRAJ5)
CLVGPDHGHGQESTYF

SEQ ID NO: 646220 - protein, 17 aa, Homo sapiens
  CDR3 for beta chain variable domain of TCR clone 323110 (TRBV11-2, TRBJ2-1)
CASSLYPPGVEYNEQVF

SEQ ID NO: 646221 - protein, 15 aa, Homo sapiens
  CDR3 for alpha chain variable domain of TCR clone 323111 (TRAV26-1, TRAJ29)
CIVRVEGSGNTPLVF

SEQ ID NO: 646222 - protein, 11 aa, Homo sapiens
  CDR3 for beta chain variable domain of TCR clone 323111 (TRBV29-1, TRBJ2-5)
CSVASGETQYF

SEQ ID NO: 646223 - protein, 14 aa, Homo sapiens
  CDR3 for alpha chain variable domain of TCR clone 323112 (TRAV12-2, TRAJ17)
CAVLFKAAGNKLTF

SEQ ID NO: 646224 - protein, 17 aa, Homo sapiens
  CDR3 for beta chain variable domain of TCR clone 323112 (TRBV20-1, TRBJ2-2)
RSASGSGQGGLTGELFF

SEQ ID NO: 646225 - protein, 14 aa, Homo sapiens
  CDR3 for alpha chain variable domain of TCR clone 323113 (TRAV12-1, TRAJ17)
RVVNYKAAGNKLAF

SEQ ID NO: 646226 - protein, 17 aa, Homo sapiens
  CDR3 for beta chain variable domain of TCR clone 323113 (TRBV20-1, TRBJ2-1)
CSASSSGLAGSYNEQFF

SEQ ID NO: 646227 - protein, 17 aa, Homo sapiens
  CDR3 for alpha chain variable domain of TCR clone 323114 (TRAV26-1, TRAJ22)
RIVRVPSHSGSARQLTF

SEQ ID NO: 646228 - protein, 16 aa, Homo sapiens
  CDR3 for beta chain variable domain of TCR clone 323114 (TRBV28, TRBJ2-1)
CASRRSGRVVGNEQFF

SEQ ID NO: 646229 - protein, 14 aa, Homo sapiens
  CDR3 for alpha chain variable domain of TCR clone 323115 (TRAV12-2, TRAJ17)
CAVLFKAAGNKRTF

SEQ ID NO: 646230 - protein, 14 aa, Homo sapiens
  CDR3 for beta chain variable domain of TCR clone 323115 (TRBV12-5, TRBJ2-5)
CASGSRTHQETQYF

SEQ ID NO: 646231 - protein, 16 aa, Homo sapiens
  CDR3 for alpha chain variable domain of TCR clone 323116 (TRAV8-3, TRAJ13)
CAVGSYPSGGYQKVTF

SEQ ID NO: 646232 - protein, 13 aa, Homo sapiens
  CDR3 for beta chain variable domain of TCR clone 323116 (TRBV7-9, TRBJ1-2)
CASSLKQNYGYTF

SEQ ID NO: 646233 - protein, 14 aa, Homo sapiens
  CDR3 for alpha chain variable domain of TCR clone 323117 (TRAV12-2, TRAJ40)
CAVKIPSGTYKSIF

SEQ ID NO: 646234 - protein, 15 aa, Homo sapiens
  CDR3 for beta chain variable domain of TCR clone 323117 (TRBV28, TRBJ2-3)
CASSPDRQGANTQYF

SEQ ID NO: 646235 - protein, 14 aa, Homo sapiens
  CDR3 for alpha chain variable domain of TCR clone 323118 (TRAV12-2, TRAJ13)
CAVKKTGGNQEVTF

SEQ ID NO: 646236 - protein, 15 aa, Homo sapiens
  CDR3 for beta chain variable domain of TCR clone 323118 (TRBV27, TRBJ2-1)
CASSNGGGSSNEQFF

SEQ ID NO: 646237 - protein, 15 aa, Homo sapiens
  CDR3 for alpha chain variable domain of TCR clone 323119 (TRAV35, TRAJ52)
CAGPRGGTSYGQLTF

SEQ ID NO: 646238 - protein, 14 aa, Homo sapiens
  CDR3 for beta chain variable domain of TCR clone 323119 (TRBV20-1, TRBJ2-7)
CSAWTALSSYEQYL

SEQ ID NO: 646239 - protein, 19 aa, Homo sapiens
  CDR3 for alpha chain variable domain of TCR clone 323120 (TRAV40, )
CLPIPDIQNPDPAVYQLRD

SEQ ID NO: 646240 - protein, 15 aa, Homo sapiens
  CDR3 for beta chain variable domain of TCR clone 323120 (TRBV2, TRBJ1-2)
RASSEIGGANYGYTF

SEQ ID NO: 646241 - protein, 18 aa, Homo sapiens
  CDR3 for alpha chain variable domain of TCR clone 323121 (TRAV26-1, TRAJ23)
CIVRVGLEVWNQGGKLIF

SEQ ID NO: 646242 - protein, 15 aa, Homo sapiens
  CDR3 for beta chain variable domain of TCR clone 323121 (TRBV4-3, TRBJ2-7)
CASSQGGRGIYEQYF

SEQ ID NO: 646243 - protein, 11 aa, Homo sapiens
  CDR3 for alpha chain variable domain of TCR clone 323122 (TRAV21, TRAJ34)
CAVTNTDKLIF

SEQ ID NO: 646244 - protein, 17 aa, Homo sapiens
  CDR3 for beta chain variable domain of TCR clone 323122 (TRBV28, TRBJ2-5)
CASSTPEGDALQETQYF

SEQ ID NO: 646245 - protein, 14 aa, Homo sapiens
  CDR3 for alpha chain variable domain of TCR clone 323123 (TRAV20, TRAJ42)
CAVQAGGSQGNLIF

SEQ ID NO: 646246 - protein, 14 aa, Homo sapiens
  CDR3 for beta chain variable domain of TCR clone 323123 (TRBV28, TRBJ1-2)
CASRIQGGNYGYTF

SEQ ID NO: 646247 - protein, 16 aa, Homo sapiens
  CDR3 for alpha chain variable domain of TCR clone 323124 (TRAV12-3, TRAJ53)
RAMSPGSGGSNYRLTL

SEQ ID NO: 646248 - protein, 14 aa, Homo sapiens
  CDR3 for beta chain variable domain of TCR clone 323124 (TRBV2, TRBJ2-7)
CASSLTSGGYEQYF

SEQ ID NO: 646249 - protein, 16 aa, Homo sapiens
  CDR3 for alpha chain variable domain of TCR clone 323125 (TRAV26-1, TRAJ53)
SIVRVAMGGSNYKLTF

SEQ ID NO: 646250 - protein, 12 aa, Homo sapiens
  CDR3 for beta chain variable domain of TCR clone 323125 (TRBV7-9, TRBJ1-5)
CASSPQGQPQHF

SEQ ID NO: 646251 - protein, 16 aa, Homo sapiens
  CDR3 for alpha chain variable domain of TCR clone 323126 (TRAV30, TRAJ24)
CGTEIVDADSWGKFQF

SEQ ID NO: 646252 - protein, 12 aa, Homo sapiens
  CDR3 for beta chain variable domain of TCR clone 323126 (TRBV11-2, TRBJ2-2)
CASSLGGGELFF

SEQ ID NO: 646253 - protein, 15 aa, Homo sapiens
  CDR3 for alpha chain variable domain of TCR clone 323127 (TRAV4, TRAJ8)
CRVGEQHTGFQKLVF

SEQ ID NO: 646254 - protein, 15 aa, Homo sapiens
  CDR3 for beta chain variable domain of TCR clone 323127 (TRBV7-9, TRBJ2-5)
CASSNRDYLQETQYF

SEQ ID NO: 646255 - protein, 14 aa, Homo sapiens
  CDR3 for alpha chain variable domain of TCR clone 323128 (TRAV17, TRAJ54)
CATDANQGAQKLVF

SEQ ID NO: 646256 - protein, 12 aa, Homo sapiens
  CDR3 for beta chain variable domain of TCR clone 323128 (TRBV7-9, TRBJ2-7)
CDSSIKREEPYF

SEQ ID NO: 646257 - protein, 13 aa, Homo sapiens
  CDR3 for alpha chain variable domain of TCR clone 323129 (TRAV39, TRAJ48)
CAAVNLGNEKLIF

SEQ ID NO: 646258 - protein, 12 aa, Homo sapiens
  CDR3 for beta chain variable domain of TCR clone 323129 (TRBV5-5, TRBJ2-5)
CASSYFGETQYF

SEQ ID NO: 646259 - protein, 14 aa, Homo sapiens
  CDR3 for alpha chain variable domain of TCR clone 323130 (TRAV1-2, TRAJ16)
CAVNRVSDGQKLLF

SEQ ID NO: 646260 - protein, 15 aa, Homo sapiens
  CDR3 for beta chain variable domain of TCR clone 323130 (TRBV5-5, TRBJ1-5)
CASSSTPGSNQPQHF

SEQ ID NO: 646261 - protein, 13 aa, Homo sapiens
  CDR3 for alpha chain variable domain of TCR clone 323131 (TRAV2, TRAJ40)
CAVVTSGTSKYIF

SEQ ID NO: 646262 - protein, 14 aa, Homo sapiens
  CDR3 for beta chain variable domain of TCR clone 323131 (TRBV19, TRBJ2-1)
CASPTFVVSGEQFF

SEQ ID NO: 646263 - protein, 13 aa, Homo sapiens
  CDR3 for alpha chain variable domain of TCR clone 323132 (TRAV39, TRAJ49)
CAVDRNTGNQFYF

SEQ ID NO: 646264 - protein, 14 aa, Homo sapiens
  CDR3 for beta chain variable domain of TCR clone 323132 (TRBV4-1, TRBJ1-1)
CASSRSGQSFDAFF

SEQ ID NO: 646265 - protein, 12 aa, Homo sapiens
  CDR3 for alpha chain variable domain of TCR clone 323133 (TRAV8-3, TRAJ40)
CAVTSGTYKYIF

SEQ ID NO: 646266 - protein, 14 aa, Homo sapiens
  CDR3 for beta chain variable domain of TCR clone 323133 (TRBV12-4, TRBJ2-3)
CASSGQGSTHTQYF

SEQ ID NO: 646267 - protein, 14 aa, Homo sapiens
  CDR3 for alpha chain variable domain of TCR clone 323134 (TRAV38-1, TRAJ43)
CAFMKHNNNNDMRF

SEQ ID NO: 646268 - protein, 13 aa, Homo sapiens
  CDR3 for beta chain variable domain of TCR clone 323134 (TRBV7-9, TRBJ1-2)
CASSLKQNYGYTF

SEQ ID NO: 646269 - protein, 13 aa, Homo sapiens
  CDR3 for alpha chain variable domain of TCR clone 323135 (TRAV17, TRAJ11)
CATRNSGYSTLTF

SEQ ID NO: 646270 - protein, 14 aa, Homo sapiens
  CDR3 for beta chain variable domain of TCR clone 323135 (TRBV25-1, TRBJ1-1)
CASTHLGGNTEAFF

SEQ ID NO: 646271 - protein, 13 aa, Homo sapiens
  CDR3 for alpha chain variable domain of TCR clone 323136 (TRAV13-2, TRAJ48)
CAEMDFGDEKLTF

SEQ ID NO: 646272 - protein, 13 aa, Homo sapiens
  CDR3 for beta chain variable domain of TCR clone 323136 (TRBV7-9, TRBJ1-2)
CASSLKQNYGYTF

SEQ ID NO: 646273 - protein, 14 aa, Homo sapiens
  CDR3 for alpha chain variable domain of TCR clone 323137 (TRAV1-1, TRAJ23)
CVVSIYNQGGKLIF

SEQ ID NO: 646274 - protein, 15 aa, Homo sapiens
  CDR3 for beta chain variable domain of TCR clone 323137 (TRBV5-8, TRBJ2-2)
CASSLDRGATGELFF

SEQ ID NO: 646275 - protein, 11 aa, Homo sapiens
  CDR3 for alpha chain variable domain of TCR clone 323138 (TRAV2, TRAJ13)
CASGGYQKVTF

SEQ ID NO: 646276 - protein, 16 aa, Homo sapiens
  CDR3 for beta chain variable domain of TCR clone 323138 (TRBV7-6, TRBJ2-2)
CASSPGLADYTGELFF

SEQ ID NO: 646277 - protein, 13 aa, Homo sapiens
  CDR3 for alpha chain variable domain of TCR clone 323139 (TRAV27, TRAJ8)
CAGGPTGFQKLVF

SEQ ID NO: 646278 - protein, 15 aa, Homo sapiens
  CDR3 for beta chain variable domain of TCR clone 323139 (TRBV6-1, TRBJ2-7)
CSSSESMGDFYEQYF

SEQ ID NO: 646279 - protein, 13 aa, Homo sapiens
  CDR3 for alpha chain variable domain of TCR clone 323140 (TRAV13-2, TRAJ48)
CAEMDFGNEKLTF

SEQ ID NO: 646280 - protein, 15 aa, Homo sapiens
  CDR3 for beta chain variable domain of TCR clone 323140 (TRBV7-9, TRBJ1-1)
CASSLLEQGGTEAFF

SEQ ID NO: 646281 - protein, 13 aa, Homo sapiens
  CDR3 for alpha chain variable domain of TCR clone 323141 (TRAV1-1, TRAJ9)
CAAKNTGGFKTIF

SEQ ID NO: 646282 - protein, 13 aa, Homo sapiens
  CDR3 for beta chain variable domain of TCR clone 323141 (TRBV27, TRBJ1-6)
CASSLVLVSPLHF

SEQ ID NO: 646283 - protein, 14 aa, Homo sapiens
  CDR3 for alpha chain variable domain of TCR clone 323142 (TRAV12-1, TRAJ3)
CVVNPGSGASKIIF

SEQ ID NO: 646284 - protein, 14 aa, Homo sapiens
  CDR3 for beta chain variable domain of TCR clone 323142 (TRBV20-1, TRBJ2-3)
CSARGGTSTDTQYF

SEQ ID NO: 646285 - protein, 14 aa, Homo sapiens
  CDR3 for alpha chain variable domain of TCR clone 323143 (TRAV38-1, TRAJ45)
CAYYSGGGADGLTF

SEQ ID NO: 646286 - protein, 17 aa, Homo sapiens
  CDR3 for beta chain variable domain of TCR clone 323143 (TRBV4-1, TRBJ2-3)
GASSQGYGSGGTDTQYF

SEQ ID NO: 646287 - protein, 13 aa, Homo sapiens
  CDR3 for alpha chain variable domain of TCR clone 323144 (TRAV21, TRAJ20)
CAVGLRVGYKLSF

SEQ ID NO: 646288 - protein, 15 aa, Homo sapiens
  CDR3 for beta chain variable domain of TCR clone 323144 (TRBV28, TRBJ1-3)
CASSLAGSSGNTIYF

SEQ ID NO: 646289 - protein, 14 aa, Homo sapiens
  CDR3 for alpha chain variable domain of TCR clone 323145 (TRAV17, TRAJ57)
CATDPQGGSEKLVV

SEQ ID NO: 646290 - protein, 18 aa, Homo sapiens
  CDR3 for beta chain variable domain of TCR clone 323145 (TRBV6-5, TRBJ2-6)
CASSYSGNMESGANVLTF

SEQ ID NO: 646291 - protein, 12 aa, Homo sapiens
  CDR3 for alpha chain variable domain of TCR clone 323146 (TRAV23/DV6, TRAJ16)
CAATVTGQKLLF

SEQ ID NO: 646292 - protein, 20 aa, Homo sapiens
  CDR3 for beta chain variable domain of TCR clone 323146 (TRBV6-7, TRBJ1-2)
CASSYSAGQGNPLRVYGYTF

SEQ ID NO: 646293 - protein, 12 aa, Homo sapiens
  CDR3 for alpha chain variable domain of TCR clone 323147 (TRAV8-3, TRAJ20)
CAVGANDYKLST

SEQ ID NO: 646294 - protein, 16 aa, Homo sapiens
  CDR3 for beta chain variable domain of TCR clone 323147 (TRBV19, TRBJ2-2)
CASRSPGTGATGELFF

SEQ ID NO: 646295 - protein, 11 aa, Homo sapiens
  CDR3 for alpha chain variable domain of TCR clone 323148 (TRAV2, TRAJ33)
CAVESNYQLIW

SEQ ID NO: 646296 - protein, 14 aa, Homo sapiens
  CDR3 for beta chain variable domain of TCR clone 323148 (TRBV5-1, TRBJ2-7)
CASSRGESLYEQYF

SEQ ID NO: 646297 - protein, 15 aa, Homo sapiens
  CDR3 for alpha chain variable domain of TCR clone 323149 (TRAV21, TRAJ53)
CATLNSGGSNYKLTF

SEQ ID NO: 646298 - protein, 17 aa, Homo sapiens
  CDR3 for beta chain variable domain of TCR clone 323149 (TRBV7-9, TRBJ2-1)
CASSLTPGHHPNNEQFF

SEQ ID NO: 646299 - protein, 16 aa, Homo sapiens
  CDR3 for alpha chain variable domain of TCR clone 323150 (TRAV38-1, TRAJ37)
CAFKGDGSSNTGKLIF

SEQ ID NO: 646300 - protein, 14 aa, Homo sapiens
  CDR3 for beta chain variable domain of TCR clone 323150 (TRBV12-4, TRBJ2-7)
CASSPAGLKYEQYF

SEQ ID NO: 646301 - protein, 17 aa, Homo sapiens
  CDR3 for alpha chain variable domain of TCR clone 323151 (TRAV12-2, TRAJ6)
CAPQGPPRAGGSYIPTF

SEQ ID NO: 646302 - protein, 16 aa, Homo sapiens
  CDR3 for beta chain variable domain of TCR clone 323151 (TRBV19, TRBJ2-2)
CESSTARASNTGELFF

SEQ ID NO: 646303 - protein, 12 aa, Homo sapiens
  CDR3 for alpha chain variable domain of TCR clone 323152 (TRAV2, TRAJ9)
CAVGAGGFKTIF

SEQ ID NO: 646304 - protein, 17 aa, Homo sapiens
  CDR3 for beta chain variable domain of TCR clone 323152 (TRBV4-1, TRBJ1-4)
CASSQEGPRGVEEKLFF

SEQ ID NO: 646305 - protein, 12 aa, Homo sapiens
  CDR3 for alpha chain variable domain of TCR clone 323153 (TRAV13-1, TRAJ48)
CAANFGTEKLTF

SEQ ID NO: 646306 - protein, 11 aa, Homo sapiens
  CDR3 for beta chain variable domain of TCR clone 323153 (TRBV20-1, TRBJ1-5)
CSAQGDQPQHF

SEQ ID NO: 646307 - protein, 14 aa, Homo sapiens
  CDR3 for alpha chain variable domain of TCR clone 323154 (TRAV9-2, TRAJ39)
CALYIYNAGNMLTF

SEQ ID NO: 646308 - protein, 12 aa, Homo sapiens
  CDR3 for beta chain variable domain of TCR clone 323154 (TRBV20-1, TRBJ2-3)
CSARVGTDTQYF

SEQ ID NO: 646309 - protein, 12 aa, Homo sapiens
  CDR3 for alpha chain variable domain of TCR clone 323155 (TRAV13-2, TRAJ23)
CAERHRGGKLIF

SEQ ID NO: 646310 - protein, 19 aa, Homo sapiens
  CDR3 for beta chain variable domain of TCR clone 323155 (TRBV19, TRBJ2-5)
CASSIGQVTDFFLGETPYF

SEQ ID NO: 646311 - protein, 15 aa, Homo sapiens
  CDR3 for alpha chain variable domain of TCR clone 323156 (TRAV3, TRAJ15)
CAVRPANLAGTALIF

SEQ ID NO: 646312 - protein, 14 aa, Homo sapiens
  CDR3 for beta chain variable domain of TCR clone 323156 (TRBV4-1, TRBJ2-2)
CASSQAVNTGELFF

SEQ ID NO: 646313 - protein, 15 aa, Homo sapiens
  CDR3 for alpha chain variable domain of TCR clone 323157 (TRAV14/DV4, TRAJ22)
CAMREGWTTARQLTF

SEQ ID NO: 646314 - protein, 13 aa, Homo sapiens
  CDR3 for beta chain variable domain of TCR clone 323157 (TRBV20-1, TRBJ2-5)
CSAREGGTETQYF

SEQ ID NO: 646315 - protein, 13 aa, Homo sapiens
  CDR3 for alpha chain variable domain of TCR clone 323158 (TRAV2, TRAJ40)
CAVVTSGTYKYIF

SEQ ID NO: 646316 - protein, 19 aa, Homo sapiens
  CDR3 for beta chain variable domain of TCR clone 323158 (TRBV4-1, TRBJ2-1)
CASSQGPLPGLGSRNEQFF

SEQ ID NO: 646317 - protein, 14 aa, Homo sapiens
  CDR3 for alpha chain variable domain of TCR clone 323159 (TRAV1-2, TRAJ16)
CAVNRFSDGQKLLF

SEQ ID NO: 646318 - protein, 15 aa, Homo sapiens
  CDR3 for beta chain variable domain of TCR clone 323159 (TRBV20-1, TRBJ2-5)
CSARDRVSGMDEQYF

SEQ ID NO: 646319 - protein, 18 aa, Homo sapiens
  CDR3 for alpha chain variable domain of TCR clone 323160 (TRAV8-3, TRAJ4)
WVRDPTSNDPGGYNKLIF

SEQ ID NO: 646320 - protein, 13 aa, Homo sapiens
  CDR3 for beta chain variable domain of TCR clone 323160 (TRBV20-1, TRBJ1-2)
CSATGIQGSGHTF

SEQ ID NO: 646321 - protein, 14 aa, Homo sapiens
  CDR3 for alpha chain variable domain of TCR clone 323161 (TRAV17, TRAJ31)
CATVPLSGNARLMF

SEQ ID NO: 646322 - protein, 15 aa, Homo sapiens
  CDR3 for beta chain variable domain of TCR clone 323161 (TRBV15, TRBJ2-2)
CPTSGTGGRVGELFF

SEQ ID NO: 646323 - protein, 14 aa, Homo sapiens
  CDR3 for alpha chain variable domain of TCR clone 323162 (TRAV17, TRAJ57)
CAMDPQGGSEKLVF

SEQ ID NO: 646324 - protein, 18 aa, Homo sapiens
  CDR3 for beta chain variable domain of TCR clone 323162 (TRBV6-6, TRBJ1-3)
CASSYSKWDSISGNTIYF

SEQ ID NO: 646325 - protein, 14 aa, Homo sapiens
  CDR3 for alpha chain variable domain of TCR clone 323163 (TRAV29/DV5, TRAJ4)
CAATVLGGYNKLSF

SEQ ID NO: 646326 - protein, 17 aa, Homo sapiens
  CDR3 for beta chain variable domain of TCR clone 323163 (TRBV11-2, TRBJ2-1)
CASSLYPPGVEYNEQFF

SEQ ID NO: 646327 - protein, 13 aa, Homo sapiens
  CDR3 for alpha chain variable domain of TCR clone 323164 (TRAV26-2, TRAJ57)
CILSRGGSEKLVF

SEQ ID NO: 646328 - protein, 16 aa, Homo sapiens
  CDR3 for beta chain variable domain of TCR clone 323164 (TRBV18, TRBJ1-5)
CASSPRTGGGNQHQHF

SEQ ID NO: 646329 - protein, 16 aa, Homo sapiens
  CDR3 for alpha chain variable domain of TCR clone 323165 (TRAV38-2/DV8, TRAJ47)
CADRSAIMEYGNKLVF

SEQ ID NO: 646330 - protein, 14 aa, Homo sapiens
  CDR3 for beta chain variable domain of TCR clone 323165 (TRBV19, TRBJ2-7)
CASSIFAGTYEQYF

SEQ ID NO: 646331 - protein, 14 aa, Homo sapiens
  CDR3 for alpha chain variable domain of TCR clone 323166 (TRAV3, TRAJ36)
CAVRDGTGANNLFF

SEQ ID NO: 646332 - protein, 15 aa, Homo sapiens
  CDR3 for beta chain variable domain of TCR clone 323166 (TRBV5-1, TRBJ2-5)
CASSFKGGDQETQYF

SEQ ID NO: 646333 - protein, 12 aa, Homo sapiens
  CDR3 for alpha chain variable domain of TCR clone 323167 (TRAV12-1, TRAJ40)
CVFYSGTYKYIF

SEQ ID NO: 646334 - protein, 14 aa, Homo sapiens
  CDR3 for beta chain variable domain of TCR clone 323167 (TRBV7-6, TRBJ2-3)
CASSLGTVTDTQYF

SEQ ID NO: 646335 - protein, 13 aa, Homo sapiens
  CDR3 for alpha chain variable domain of TCR clone 323168 (TRAV27, TRAJ39)
CAGDTPAGNMLTF

SEQ ID NO: 646336 - protein, 16 aa, Homo sapiens
  CDR3 for beta chain variable domain of TCR clone 323168 (TRBV10-3, TRBJ2-1)
CAISGVGDGGGGEQFL

SEQ ID NO: 646337 - protein, 11 aa, Homo sapiens
  CDR3 for alpha chain variable domain of TCR clone 323169 (TRAV1-2, TRAJ40)
CAVPGTYKYIF

SEQ ID NO: 646338 - protein, 16 aa, Homo sapiens
  CDR3 for beta chain variable domain of TCR clone 323169 (TRBV29-1, TRBJ2-7)
CSVEVVGTSGSYEQDF

SEQ ID NO: 646339 - protein, 14 aa, Homo sapiens
  CDR3 for alpha chain variable domain of TCR clone 323170 (TRAV12-3, TRAJ10)
SHLPLTGGGNKLTF

SEQ ID NO: 646340 - protein, 16 aa, Homo sapiens
  CDR3 for beta chain variable domain of TCR clone 323170 (TRBV14, TRBJ2-2)
CDSSRSLGDDTGELFF

SEQ ID NO: 646341 - protein, 17 aa, Homo sapiens
  CDR3 for alpha chain variable domain of TCR clone 323171 (TRAV1-1, TRAJ9)
CLLLLRCQNTGGFKTIF

SEQ ID NO: 646342 - protein, 14 aa, Homo sapiens
  CDR3 for beta chain variable domain of TCR clone 323171 (TRBV20-1, TRBJ2-1)
CSAQICGSANEQFF

SEQ ID NO: 646343 - protein, 12 aa, Homo sapiens
  CDR3 for alpha chain variable domain of TCR clone 323172 (TRAV12-1, TRAJ40)
CVVYSGTYKYIF

SEQ ID NO: 646344 - protein, 13 aa, Homo sapiens
  CDR3 for beta chain variable domain of TCR clone 323172 (TRBV7-3, TRBJ2-3)
CASSSWSTDTQYF

SEQ ID NO: 646345 - protein, 17 aa, Homo sapiens
  CDR3 for alpha chain variable domain of TCR clone 323173 (TRAV12-1, TRAJ13)
CVVNKRGEFWGLPESYL

SEQ ID NO: 646346 - protein, 13 aa, Homo sapiens
  CDR3 for beta chain variable domain of TCR clone 323173 (TRBV7-9, TRBJ2-5)
CASLPSGRETQYF

SEQ ID NO: 646347 - protein, 17 aa, Homo sapiens
  CDR3 for alpha chain variable domain of TCR clone 323174 (TRAV17, TRAJ52)
CATERPSGGTSYGKLTF

SEQ ID NO: 646348 - protein, 13 aa, Homo sapiens
  CDR3 for beta chain variable domain of TCR clone 323174 (TRBV5-1, TRBJ2-2)
CASIVARTGELFF

SEQ ID NO: 646349 - protein, 15 aa, Homo sapiens
  CDR3 for alpha chain variable domain of TCR clone 323175 (TRAV13-1, TRAJ45)
CAASGSGRGADGLTF

SEQ ID NO: 646350 - protein, 12 aa, Homo sapiens
  CDR3 for beta chain variable domain of TCR clone 323175 (TRBV11-2, TRBJ2-2)
CASSLGGGGLFF

SEQ ID NO: 646351 - protein, 14 aa, Homo sapiens
  CDR3 for alpha chain variable domain of TCR clone 323176 (TRAV13-2, TRAJ22)
CADGTLGSARQLTF

SEQ ID NO: 646352 - protein, 16 aa, Homo sapiens
  CDR3 for beta chain variable domain of TCR clone 323176 (TRBV19, TRBJ2-1)
CASSSRGTRAYNEQFF

SEQ ID NO: 646353 - protein, 15 aa, Homo sapiens
  CDR3 for alpha chain variable domain of TCR clone 323177 (TRAV12-3, TRAJ47)
CAMSALVEYGNKLVF

SEQ ID NO: 646354 - protein, 14 aa, Homo sapiens
  CDR3 for beta chain variable domain of TCR clone 323177 (TRBV20-1, TRBJ1-1)
CSAQTRMGGTEAFF

SEQ ID NO: 646355 - protein, 16 aa, Homo sapiens
  CDR3 for alpha chain variable domain of TCR clone 323178 (TRAV25, TRAJ53)
CAGPKGSGGSNYKLTF

SEQ ID NO: 646356 - protein, 17 aa, Homo sapiens
  CDR3 for beta chain variable domain of TCR clone 323178 (TRBV11-3, TRBJ2-6)
CASKWGQGLSGANALTF

SEQ ID NO: 646357 - protein, 11 aa, Homo sapiens
  CDR3 for alpha chain variable domain of TCR clone 323179 (TRAV1-1, TRAJ23)
CAVRQGGKLIF

SEQ ID NO: 646358 - protein, 16 aa, Homo sapiens
  CDR3 for beta chain variable domain of TCR clone 323179 (TRBV7-2, TRBJ1-2)
CASSSNQDRRGHGYTF

SEQ ID NO: 646359 - protein, 17 aa, Homo sapiens
  CDR3 for alpha chain variable domain of TCR clone 323180 (TRAV4, TRAJ13)
CLVGVQGSSGGYQKVTF

SEQ ID NO: 646360 - protein, 16 aa, Homo sapiens
  CDR3 for beta chain variable domain of TCR clone 323180 (TRBV28, TRBJ2-7)
CASSVFSETGGPEQYF

SEQ ID NO: 646361 - protein, 15 aa, Homo sapiens
  CDR3 for alpha chain variable domain of TCR clone 323181 (TRAV8-6, TRAJ6)
CAVSFTSGGSYIPTF

SEQ ID NO: 646362 - protein, 14 aa, Homo sapiens
  CDR3 for beta chain variable domain of TCR clone 323181 (TRBV6-1, TRBJ1-3)
CASSEDRGIDTMYF

SEQ ID NO: 646363 - protein, 12 aa, Homo sapiens
  CDR3 for alpha chain variable domain of TCR clone 323182 (TRAV12-3, TRAJ17)
CAMTLTGNKLTF

SEQ ID NO: 646364 - protein, 14 aa, Homo sapiens
  CDR3 for beta chain variable domain of TCR clone 323182 (TRBV20-1, TRBJ2-7)
EDSSLGAGAYEQYF

SEQ ID NO: 646365 - protein, 16 aa, Homo sapiens
  CDR3 for alpha chain variable domain of TCR clone 323183 (TRAV30, TRAJ24)
CGTEIVDADSWGKFQF

SEQ ID NO: 646366 - protein, 17 aa, Homo sapiens
  CDR3 for beta chain variable domain of TCR clone 323183 (TRBV20-1, TRBJ2-2)
CSASGSGQGGLIGELFF

SEQ ID NO: 646367 - protein, 14 aa, Homo sapiens
  CDR3 for alpha chain variable domain of TCR clone 323184 (TRAV2, TRAJ37)
CAVAFTSNTGKLIF

SEQ ID NO: 646368 - protein, 15 aa, Homo sapiens
  CDR3 for beta chain variable domain of TCR clone 323184 (TRBV20-1, TRBJ1-1)
CSASRGVTGNTGAFF

SEQ ID NO: 646369 - protein, 15 aa, Homo sapiens
  CDR3 for alpha chain variable domain of TCR clone 323185 (TRAV12-1, TRAJ4)
CVVNGFSGGYNKLIF

SEQ ID NO: 646370 - protein, 14 aa, Homo sapiens
  CDR3 for beta chain variable domain of TCR clone 323185 (TRBV19, TRBJ2-1)
CASPTFVLSGEQFF

SEQ ID NO: 646371 - protein, 15 aa, Homo sapiens
  CDR3 for alpha chain variable domain of TCR clone 323186 (TRAV12-1, TRAJ15)
CVVTRANQAGTALIF

SEQ ID NO: 646372 - protein, 13 aa, Homo sapiens
  CDR3 for beta chain variable domain of TCR clone 323186 (TRBV4-1, TRBJ2-1)
CASSQAGGDEQFF

SEQ ID NO: 646373 - protein, 13 aa, Homo sapiens
  CDR3 for alpha chain variable domain of TCR clone 323187 (TRAV13-2, TRAJ13)
CAESTGGYQKVTF

SEQ ID NO: 646374 - protein, 15 aa, Homo sapiens
  CDR3 for beta chain variable domain of TCR clone 323187 (TRBV11-3, TRBJ2-7)
CASSPGPASSYEQYF

SEQ ID NO: 646375 - protein, 16 aa, Homo sapiens
  CDR3 for alpha chain variable domain of TCR clone 323188 (TRAV21, TRAJ37)
CAVRTAGSSNTGKLIF

SEQ ID NO: 646376 - protein, 13 aa, Homo sapiens
  CDR3 for beta chain variable domain of TCR clone 323188 (TRBV7-9, TRBJ2-5)
CASSQTSVETQYF

SEQ ID NO: 646377 - protein, 17 aa, Homo sapiens
  CDR3 for alpha chain variable domain of TCR clone 323189 (TRAV12-2, TRAJ48)
CAVNEGGSNFGNEKLTF

SEQ ID NO: 646378 - protein, 14 aa, Homo sapiens
  CDR3 for beta chain variable domain of TCR clone 323189 (TRBV13, TRBJ2-7)
CASSLKGASYEQYF

SEQ ID NO: 646379 - protein, 14 aa, Homo sapiens
  CDR3 for alpha chain variable domain of TCR clone 323190 (TRAV17, TRAJ26)
CATDDHNYGQNFVF

SEQ ID NO: 646380 - protein, 14 aa, Homo sapiens
  CDR3 for beta chain variable domain of TCR clone 323190 (TRBV19, TRBJ2-1)
CASPTFVLSGEQFF

SEQ ID NO: 646381 - protein, 17 aa, Homo sapiens
  CDR3 for alpha chain variable domain of TCR clone 323191 (TRAV13-1, TRAJ28)
CAASPPYSGAGSYQLTF

SEQ ID NO: 646382 - protein, 13 aa, Homo sapiens
  CDR3 for beta chain variable domain of TCR clone 323191 (TRBV6-4, TRBJ1-5)
CASSADLNQPQHF

SEQ ID NO: 646383 - protein, 14 aa, Homo sapiens
  CDR3 for alpha chain variable domain of TCR clone 323192 (TRAV1-2, TRAJ8)
CAVREDTGFQKLVF

SEQ ID NO: 646384 - protein, 10 aa, Homo sapiens
  CDR3 for beta chain variable domain of TCR clone 323192 (TRBV10-3, TRBJ2-7)
CAAASNEQYF

SEQ ID NO: 646385 - protein, 14 aa, Homo sapiens
  CDR3 for alpha chain variable domain of TCR clone 323193 (TRAV29/DV5, TRAJ36)
CAARRKTGANNLFF

SEQ ID NO: 646386 - protein, 13 aa, Homo sapiens
  CDR3 for beta chain variable domain of TCR clone 323193 (TRBV7-3, TRBJ1-1)
CASSQDWVAEAFF

SEQ ID NO: 646387 - protein, 17 aa, Homo sapiens
  CDR3 for alpha chain variable domain of TCR clone 323194 (TRAV3, TRAJ6)
CAVSRRTYTGGSYIPTF

SEQ ID NO: 646388 - protein, 18 aa, Homo sapiens
  CDR3 for beta chain variable domain of TCR clone 323194 (TRBV7-2, TRBJ2-3)
CASSLETSRGRKADTQYF

SEQ ID NO: 646389 - protein, 13 aa, Homo sapiens
  CDR3 for alpha chain variable domain of TCR clone 323195 (TRAV21, TRAJ20)
CAVGLRVDDKLSF

SEQ ID NO: 646390 - protein, 11 aa, Homo sapiens
  CDR3 for beta chain variable domain of TCR clone 323195 (TRBV25-1, TRBJ2-1)
CATTRISEQFF

SEQ ID NO: 646391 - protein, 23 aa, Homo sapiens
  CDR3 for alpha chain variable domain of TCR clone 323196 (TRAV26-1, TRAJ38)
CIADNAGNNHIQNPNPAVYQLLD

SEQ ID NO: 646392 - protein, 15 aa, Homo sapiens
  CDR3 for beta chain variable domain of TCR clone 323196 (TRBV27, TRBJ2-1)
CASSNGGGSSNEQFF

SEQ ID NO: 646393 - protein, 14 aa, Homo sapiens
  CDR3 for alpha chain variable domain of TCR clone 323197 (TRAV17, TRAJ53)
CATDAGGSNYKLTF

SEQ ID NO: 646394 - protein, 13 aa, Homo sapiens
  CDR3 for beta chain variable domain of TCR clone 323197 (TRBV20-1, TRBJ1-1)
CSARGGGNTEAFF

SEQ ID NO: 646395 - protein, 16 aa, Homo sapiens
  CDR3 for alpha chain variable domain of TCR clone 323198 (TRAV14/DV4, TRAJ21)
CAMREGPENNFNKFYF

SEQ ID NO: 646396 - protein, 12 aa, Homo sapiens
  CDR3 for beta chain variable domain of TCR clone 323198 (TRBV29-1, TRBJ2-2)
CSVDKYTGELFS

SEQ ID NO: 646397 - protein, 14 aa, Homo sapiens
  CDR3 for alpha chain variable domain of TCR clone 323199 (TRAV9-2, TRAJ6)
CALSDPGGSYIPTF

SEQ ID NO: 646398 - protein, 16 aa, Homo sapiens
  CDR3 for beta chain variable domain of TCR clone 323199 (TRBV19, TRBJ2-2)
CASRSPGTGATGALFF

SEQ ID NO: 646399 - protein, 13 aa, Homo sapiens
  CDR3 for alpha chain variable domain of TCR clone 323200 (TRAV12-1, TRAJ11)
CVLNRAGYSTLTF

SEQ ID NO: 646400 - protein, 15 aa, Homo sapiens
  CDR3 for beta chain variable domain of TCR clone 323200 (TRBV7-3, TRBJ2-2)
CASSETGQGTGELFF

SEQ ID NO: 646401 - protein, 15 aa, Homo sapiens
  CDR3 for alpha chain variable domain of TCR clone 323201 (TRAV27, TRAJ38)
CAGRFNAGDNRKLIW

SEQ ID NO: 646402 - protein, 13 aa, Homo sapiens
  CDR3 for beta chain variable domain of TCR clone 323201 (TRBV20-1, TRBJ2-1)
TSGALPPGNEQFF

SEQ ID NO: 646403 - protein, 14 aa, Homo sapiens
  CDR3 for alpha chain variable domain of TCR clone 323202 (TRAV1-2, TRAJ8)
CAVREDTGFQKLVF

SEQ ID NO: 646404 - protein, 14 aa, Homo sapiens
  CDR3 for beta chain variable domain of TCR clone 323202 (TRBV18, TRBJ2-2)
CASSARTNTGELFF

SEQ ID NO: 646405 - protein, 14 aa, Homo sapiens
  CDR3 for alpha chain variable domain of TCR clone 323203 (TRAV35, TRAJ22)
CAGLRPGSASQQTF

SEQ ID NO: 646406 - protein, 15 aa, Homo sapiens
  CDR3 for beta chain variable domain of TCR clone 323203 (TRBV12-4, TRBJ2-5)
CASSPPTGLQETQYF

SEQ ID NO: 646407 - protein, 20 aa, Homo sapiens
  CDR3 for alpha chain variable domain of TCR clone 323204 (TRAV27, TRAJ38)
CAARRNAGNNHIQNPDPTVY

SEQ ID NO: 646408 - protein, 13 aa, Homo sapiens
  CDR3 for beta chain variable domain of TCR clone 323204 (TRBV12-5, TRBJ2-3)
CASGDRQSDTQYF

SEQ ID NO: 646409 - protein, 13 aa, Homo sapiens
  CDR3 for alpha chain variable domain of TCR clone 323205 (TRAV22, TRAJ20)
CAVRFSNDYKLSF

SEQ ID NO: 646410 - protein, 17 aa, Homo sapiens
  CDR3 for beta chain variable domain of TCR clone 323205 (TRBV7-8, TRBJ2-6)
CASSAGTGGAGANVLTF

SEQ ID NO: 646411 - protein, 13 aa, Homo sapiens
  CDR3 for alpha chain variable domain of TCR clone 323206 (TRAV12-2, TRAJ50)
CAVIVTSYDKVIF

SEQ ID NO: 646412 - protein, 14 aa, Homo sapiens
  CDR3 for beta chain variable domain of TCR clone 323206 (TRBV9, TRBJ2-1)
CASSVDPWGKEQFF

SEQ ID NO: 646413 - protein, 12 aa, Homo sapiens
  CDR3 for alpha chain variable domain of TCR clone 323207 (TRAV8-3, TRAJ43)
CAVGRTANDMRF

SEQ ID NO: 646414 - protein, 15 aa, Homo sapiens
  CDR3 for beta chain variable domain of TCR clone 323207 (TRBV27, TRBJ2-7)
CASSTAGTGSYEQYF

SEQ ID NO: 646415 - protein, 19 aa, Homo sapiens
  CDR3 for alpha chain variable domain of TCR clone 323208 (TRAV13-1, TRAJ52)
CAASPYQHAGGTRYGKLTF

SEQ ID NO: 646416 - protein, 14 aa, Homo sapiens
  CDR3 for beta chain variable domain of TCR clone 323208 (TRBV19, TRBJ2-7)
CASTVQGRPYEQYF

SEQ ID NO: 646417 - protein, 15 aa, Homo sapiens
  CDR3 for alpha chain variable domain of TCR clone 323209 (TRAV13-1, TRAJ27)
CAASGGNTNAGKSTF

SEQ ID NO: 646418 - protein, 15 aa, Homo sapiens
  CDR3 for beta chain variable domain of TCR clone 323209 (TRBV12-4, TRBJ1-5)
CASTRQGSGNQPQNF

SEQ ID NO: 646419 - protein, 15 aa, Homo sapiens
  CDR3 for alpha chain variable domain of TCR clone 323210 (TRAV23/DV6, TRAJ27)
CAASKPMQTNQPLRM

SEQ ID NO: 646420 - protein, 14 aa, Homo sapiens
  CDR3 for beta chain variable domain of TCR clone 323210 (TRBV5-4, TRBJ1-1)
CASSLDSRRDEAFF

SEQ ID NO: 646421 - protein, 14 aa, Homo sapiens
  CDR3 for alpha chain variable domain of TCR clone 323211 (TRAV14/DV4, TRAJ15)
CAMRRDQAGTALIF

SEQ ID NO: 646422 - protein, 13 aa, Homo sapiens
  CDR3 for beta chain variable domain of TCR clone 323211 (TRBV12-4, TRBJ2-7)
CASSPTETYEQYF

SEQ ID NO: 646423 - protein, 13 aa, Homo sapiens
  CDR3 for alpha chain variable domain of TCR clone 323212 (TRAV8-1, TRAJ28)
CAVSGGGSYQLTF

SEQ ID NO: 646424 - protein, 14 aa, Homo sapiens
  CDR3 for beta chain variable domain of TCR clone 323212 (TRBV7-2, TRBJ2-2)
CASRGQGAAGELFF

SEQ ID NO: 646425 - protein, 14 aa, Homo sapiens
  CDR3 for alpha chain variable domain of TCR clone 323213 (TRAV8-6, TRAJ8)
CAVNENTGFQKLVF

SEQ ID NO: 646426 - protein, 12 aa, Homo sapiens
  CDR3 for beta chain variable domain of TCR clone 323213 (TRBV7-9, TRBJ1-5)
CASSPQGQTQHF

SEQ ID NO: 646427 - protein, 13 aa, Homo sapiens
  CDR3 for alpha chain variable domain of TCR clone 323214 (TRAV3, TRAJ43)
CAVKARNTMTCAL

SEQ ID NO: 646428 - protein, 16 aa, Homo sapiens
  CDR3 for beta chain variable domain of TCR clone 323214 (TRBV7-9, TRBJ2-3)
CASSFSVAGGTDTQYF

SEQ ID NO: 646429 - protein, 10 aa, Homo sapiens
  CDR3 for alpha chain variable domain of TCR clone 323215 (TRAV8-4, TRAJ43)
CAVSADDMRF

SEQ ID NO: 646430 - protein, 15 aa, Homo sapiens
  CDR3 for beta chain variable domain of TCR clone 323215 (TRBV7-2, TRBJ2-1)
CASSSGLAGGNEQFF

SEQ ID NO: 646431 - protein, 14 aa, Homo sapiens
  CDR3 for alpha chain variable domain of TCR clone 323216 (TRAV13-1, TRAJ44)
CAAKATGTASKLTF

SEQ ID NO: 646432 - protein, 15 aa, Homo sapiens
  CDR3 for beta chain variable domain of TCR clone 323216 (TRBV6-6, TRBJ2-7)
CASSYSYGGSYEQYF

SEQ ID NO: 646433 - protein, 14 aa, Homo sapiens
  CDR3 for alpha chain variable domain of TCR clone 323217 (TRAV20, TRAJ42)
CCAADGGSQGNLIF

SEQ ID NO: 646434 - protein, 16 aa, Homo sapiens
  CDR3 for beta chain variable domain of TCR clone 323217 (TRBV5-1, TRBJ2-1)
CASSLTLAGGRNEQFF

SEQ ID NO: 646435 - protein, 14 aa, Homo sapiens
  CDR3 for alpha chain variable domain of TCR clone 323218 (TRAV8-3, TRAJ36)
CAAVGNNGANNLFF

SEQ ID NO: 646436 - protein, 15 aa, Homo sapiens
  CDR3 for beta chain variable domain of TCR clone 323218 (TRBV7-9, TRBJ1-6)
CASSSPGRGNSPLHF

SEQ ID NO: 646437 - protein, 23 aa, Homo sapiens
  CDR3 for alpha chain variable domain of TCR clone 323219 (TRAV26-1, TRAJ38)
CIADNAGNNHIQNPDPAVYQLRD

SEQ ID NO: 646438 - protein, 14 aa, Homo sapiens
  CDR3 for beta chain variable domain of TCR clone 323219 (TRBV19, TRBJ2-7)
CASSMGQGAIEQYF

SEQ ID NO: 646439 - protein, 12 aa, Homo sapiens
  CDR3 for alpha chain variable domain of TCR clone 323220 (TRAV21, TRAJ31)
CAVSPARGRLMF

SEQ ID NO: 646440 - protein, 14 aa, Homo sapiens
  CDR3 for beta chain variable domain of TCR clone 323220 (TRBV28, TRBJ2-7)
CASSLIRISYEQYF

SEQ ID NO: 646441 - protein, 12 aa, Homo sapiens
  CDR3 for alpha chain variable domain of TCR clone 323221 (TRAV13-1, TRAJ9)
CASHTEASKLSL

SEQ ID NO: 646442 - protein, 13 aa, Homo sapiens
  CDR3 for beta chain variable domain of TCR clone 323221 (TRBV12-4, TRBJ1-2)
CASSSGSKDGYTF

SEQ ID NO: 646443 - protein, 12 aa, Homo sapiens
  CDR3 for alpha chain variable domain of TCR clone 323222 (TRAV13-2, TRAJ42)
CAEGGSQGNLIF

SEQ ID NO: 646444 - protein, 16 aa, Homo sapiens
  CDR3 for beta chain variable domain of TCR clone 323222 (TRBV2, TRBJ1-4)
CASNLLQGATNEKLFF

SEQ ID NO: 646445 - protein, 14 aa, Homo sapiens
  CDR3 for alpha chain variable domain of TCR clone 323223 (TRAV1-2, TRAJ8)
CAVREDTGFQKLVF

SEQ ID NO: 646446 - protein, 15 aa, Homo sapiens
  CDR3 for beta chain variable domain of TCR clone 323223 (TRBV20-1, TRBJ2-7)
CSARDRVSGMDEEYF

SEQ ID NO: 646447 - protein, 13 aa, Homo sapiens
  CDR3 for alpha chain variable domain of TCR clone 323224 (TRAV30, TRAJ39)
CGTEKNAGNMLTF

SEQ ID NO: 646448 - protein, 12 aa, Homo sapiens
  CDR3 for beta chain variable domain of TCR clone 323224 (TRBV12-4, TRBJ2-5)
CASSSAQETQDF

SEQ ID NO: 646449 - protein, 15 aa, Homo sapiens
  CDR3 for alpha chain variable domain of TCR clone 323225 (TRAV3, TRAJ20)
CAVRDIKLSDYKLSF

SEQ ID NO: 646450 - protein, 14 aa, Homo sapiens
  CDR3 for beta chain variable domain of TCR clone 323225 (TRBV7-9, TRBJ2-5)
CASSLAFGQETQYF

SEQ ID NO: 646451 - protein, 15 aa, Homo sapiens
  CDR3 for alpha chain variable domain of TCR clone 323226 (TRAV20, TRAJ43)
CAVQAGKSSNNDMRF

SEQ ID NO: 646452 - protein, 13 aa, Homo sapiens
  CDR3 for beta chain variable domain of TCR clone 323226 (TRBV27, TRBJ2-1)
CQQTPGRGKEQFF

SEQ ID NO: 646453 - protein, 16 aa, Homo sapiens
  CDR3 for alpha chain variable domain of TCR clone 323227 (TRAV3, TRAJ10)
CAVRDMRAGGGNKLTF

SEQ ID NO: 646454 - protein, 15 aa, Homo sapiens
  CDR3 for beta chain variable domain of TCR clone 323227 (TRBV9, TRBJ1-6)
CASSVAGTGDSPLLF

SEQ ID NO: 646455 - protein, 14 aa, Homo sapiens
  CDR3 for alpha chain variable domain of TCR clone 323228 (TRAV12-1, TRAJ46)
CVVTAKSSGYKLTF

SEQ ID NO: 646456 - protein, 17 aa, Homo sapiens
  CDR3 for beta chain variable domain of TCR clone 323228 (TRBV4-1, TRBJ2-3)
CASSQDPAGGPLDTQYF

SEQ ID NO: 646457 - protein, 12 aa, Homo sapiens
  CDR3 for alpha chain variable domain of TCR clone 323229 (TRAV12-3, TRAJ17)
RAMTLTGNKLPF

SEQ ID NO: 646458 - protein, 15 aa, Homo sapiens
  CDR3 for beta chain variable domain of TCR clone 323229 (TRBV20-1, TRBJ2-7)
CSARDRVSGMDEQYF

SEQ ID NO: 646459 - protein, 13 aa, Homo sapiens
  CDR3 for alpha chain variable domain of TCR clone 323230 (TRAV12-3, TRAJ7)
CAMSASGNNRLAF

SEQ ID NO: 646460 - protein, 14 aa, Homo sapiens
  CDR3 for beta chain variable domain of TCR clone 323230 (TRBV13, TRBJ2-5)
CASSLGPRGETLYF

SEQ ID NO: 646461 - protein, 15 aa, Homo sapiens
  CDR3 for alpha chain variable domain of TCR clone 323231 (TRAV3, TRAJ8)
CAVRDNETGFQKLVF

SEQ ID NO: 646462 - protein, 13 aa, Homo sapiens
  CDR3 for beta chain variable domain of TCR clone 323231 (TRBV10-3, TRBJ2-7)
CASKLAVNYEQYF

SEQ ID NO: 646463 - protein, 16 aa, Homo sapiens
  CDR3 for alpha chain variable domain of TCR clone 323232 (TRAV20, TRAJ53)
CAVRRGSGGSNYKLTF

SEQ ID NO: 646464 - protein, 12 aa, Homo sapiens
  CDR3 for beta chain variable domain of TCR clone 323232 (TRBV29-1, TRBJ2-3)
CSVVLRADTQYF

SEQ ID NO: 646465 - protein, 13 aa, Homo sapiens
  CDR3 for alpha chain variable domain of TCR clone 323233 (TRAV12-1, TRAJ40)
CVVNSSGTYKYIF

SEQ ID NO: 646466 - protein, 14 aa, Homo sapiens
  CDR3 for beta chain variable domain of TCR clone 323233 (TRBV2, TRBJ1-6)
CASEVSSYNSPFHF

SEQ ID NO: 646467 - protein, 14 aa, Homo sapiens
  CDR3 for alpha chain variable domain of TCR clone 323234 (TRAV2, )
CAVGTSNSGYPTLT

SEQ ID NO: 646468 - protein, 13 aa, Homo sapiens
  CDR3 for beta chain variable domain of TCR clone 323234 (TRBV4-1, TRBJ2-1)
CASSQEVQYEQFF

SEQ ID NO: 646469 - protein, 12 aa, Homo sapiens
  CDR3 for alpha chain variable domain of TCR clone 323235 (TRAV13-1, TRAJ21)
CAAKEGFNKFYF

SEQ ID NO: 646470 - protein, 15 aa, Homo sapiens
  CDR3 for beta chain variable domain of TCR clone 323235 (TRBV2, TRBJ2-1)
CASSELAGSYNEQFS

SEQ ID NO: 646471 - protein, 10 aa, Homo sapiens
  CDR3 for alpha chain variable domain of TCR clone 323236 (TRAV1-2, TRAJ31)
CAFFDARLMF

SEQ ID NO: 646472 - protein, 15 aa, Homo sapiens
  CDR3 for beta chain variable domain of TCR clone 323236 (TRBV5-1, TRBJ2-7)
CASSLNGGPAREQYF

SEQ ID NO: 646473 - protein, 14 aa, Homo sapiens
  CDR3 for alpha chain variable domain of TCR clone 323237 (TRAV12-2, TRAJ17)
CAVLFKAAGNKLTF

SEQ ID NO: 646474 - protein, 12 aa, Homo sapiens
  CDR3 for beta chain variable domain of TCR clone 323237 (TRBV5-7, TRBJ1-1)
CASSLGRGKAFF

SEQ ID NO: 646475 - protein, 12 aa, Homo sapiens
  CDR3 for alpha chain variable domain of TCR clone 323238 (TRAV8-3, TRAJ20)
CAVGANDYKLSF

SEQ ID NO: 646476 - protein, 15 aa, Homo sapiens
  CDR3 for beta chain variable domain of TCR clone 323238 (TRBV7-2, TRBJ2-3)
CASSSTGLETDTQYV

SEQ ID NO: 646477 - protein, 15 aa, Homo sapiens
  CDR3 for alpha chain variable domain of TCR clone 323239 (TRAV21, TRAJ53)
CATLNSGCSNYKLTF

SEQ ID NO: 646478 - protein, 15 aa, Homo sapiens
  CDR3 for beta chain variable domain of TCR clone 323239 (TRBV11-2, TRBJ2-2)
CASSSDRVNAGELFC

SEQ ID NO: 646479 - protein, 13 aa, Homo sapiens
  CDR3 for alpha chain variable domain of TCR clone 323240 (TRAV12-3, TRAJ53)
CAMRGGSNYKLTF

SEQ ID NO: 646480 - protein, 13 aa, Homo sapiens
  CDR3 for beta chain variable domain of TCR clone 323240 (TRBV20-1, TRBJ1-1)
CSAPLGGGTEAFF

SEQ ID NO: 646481 - protein, 11 aa, Homo sapiens
  CDR3 for alpha chain variable domain of TCR clone 323241 (TRAV2, TRAJ13)
CASGSYQKVTF

SEQ ID NO: 646482 - protein, 16 aa, Homo sapiens
  CDR3 for beta chain variable domain of TCR clone 323241 (TRBV12-4, TRBJ2-5)
CASSFFVRGRQETQYF

SEQ ID NO: 646483 - protein, 13 aa, Homo sapiens
  CDR3 for alpha chain variable domain of TCR clone 323242 (TRAV35, TRAJ44)
CAGLSGTASKLTF

SEQ ID NO: 646484 - protein, 16 aa, Homo sapiens
  CDR3 for beta chain variable domain of TCR clone 323242 (TRBV4-1, TRBJ2-3)
CASSQSTSGAEDTQYF

SEQ ID NO: 646485 - protein, 16 aa, Homo sapiens
  CDR3 for alpha chain variable domain of TCR clone 323243 (TRAV25, TRAJ53)
CAGPKGSGGRNYKLTF

SEQ ID NO: 646486 - protein, 17 aa, Homo sapiens
  CDR3 for beta chain variable domain of TCR clone 323243 (TRBV11-3, TRBJ2-6)
CASKWGQGLSGANVLTF

SEQ ID NO: 646487 - protein, 15 aa, Homo sapiens
  CDR3 for alpha chain variable domain of TCR clone 323244 (TRAV1-2, TRAJ28)
CAVQYSGAGSYPLTF

SEQ ID NO: 646488 - protein, 13 aa, Homo sapiens
  CDR3 for beta chain variable domain of TCR clone 323244 (TRBV4-2, TRBJ1-1)
CASSQAGNTEAFF

SEQ ID NO: 646489 - protein, 17 aa, Homo sapiens
  CDR3 for alpha chain variable domain of TCR clone 323245 (TRAV8-4, TRAJ53)
CAGSGPRSEGSNYKLTF

SEQ ID NO: 646490 - protein, 14 aa, Homo sapiens
  CDR3 for beta chain variable domain of TCR clone 323245 (TRBV7-3, TRBJ2-1)
CASSALAGGPEQFF

SEQ ID NO: 646491 - protein, 12 aa, Homo sapiens
  CDR3 for alpha chain variable domain of TCR clone 323246 (TRAV12-1, TRAJ40)
CVVYSGTYKYIF

SEQ ID NO: 646492 - protein, 18 aa, Homo sapiens
  CDR3 for beta chain variable domain of TCR clone 323246 (TRBV11-2, TRBJ2-3)
CASSLGGASRGAPNTQFF

SEQ ID NO: 646493 - protein, 18 aa, Homo sapiens
  CDR3 for alpha chain variable domain of TCR clone 323247 (TRAV26-1, TRAJ23)
CIARVGLEVGNQGGKLIF

SEQ ID NO: 646494 - protein, 14 aa, Homo sapiens
  CDR3 for beta chain variable domain of TCR clone 323247 (TRBV7-6, TRBJ2-3)
CASSLGTVTDTQYF

SEQ ID NO: 646495 - protein, 19 aa, Homo sapiens
  CDR3 for alpha chain variable domain of TCR clone 323248 (TRAV25, TRAJ20)
TATQTTDVGILPHDYKLSF

SEQ ID NO: 646496 - protein, 14 aa, Homo sapiens
  CDR3 for beta chain variable domain of TCR clone 323248 (TRBV12-4, TRBJ1-1)
CASSLGTGGTEAFF

SEQ ID NO: 646497 - protein, 14 aa, Homo sapiens
  CDR3 for alpha chain variable domain of TCR clone 323249 (TRAV1-2, TRAJ16)
CAVNRFSDGQKLLF

SEQ ID NO: 646498 - protein, 13 aa, Homo sapiens
  CDR3 for beta chain variable domain of TCR clone 323249 (TRBV7-9, TRBJ2-5)
CASGKVGIETQYF

SEQ ID NO: 646499 - protein, 12 aa, Homo sapiens
  CDR3 for alpha chain variable domain of TCR clone 323250 (TRAV24, TRAJ11)
CAVPSGYSTLTF

SEQ ID NO: 646500 - protein, 19 aa, Homo sapiens
  CDR3 for beta chain variable domain of TCR clone 323250 (TRBV28, TRBJ2-7)
CASSYSGTSRLGWVYEQYF

SEQ ID NO: 646501 - protein, 14 aa, Homo sapiens
  CDR3 for alpha chain variable domain of TCR clone 323251 (TRAV12-3, TRAJ54)
CAIRGIQGAQKLVF

SEQ ID NO: 646502 - protein, 13 aa, Homo sapiens
  CDR3 for beta chain variable domain of TCR clone 323251 (TRBV19, TRBJ1-1)
CASSPSNGGEAFF

SEQ ID NO: 646503 - protein, 14 aa, Homo sapiens
  CDR3 for alpha chain variable domain of TCR clone 323252 (TRAV12-1, TRAJ41)
WVVLNSNSGYALNF

SEQ ID NO: 646504 - protein, 14 aa, Homo sapiens
  CDR3 for beta chain variable domain of TCR clone 323252 (TRBV5-1, TRBJ2-7)
CASSRGESLYEQYF

SEQ ID NO: 646505 - protein, 14 aa, Homo sapiens
  CDR3 for alpha chain variable domain of TCR clone 323253 (TRAV12-1, TRAJ9)
CVVTGDTGGFKTIF

SEQ ID NO: 646506 - protein, 16 aa, Homo sapiens
  CDR3 for beta chain variable domain of TCR clone 323253 (TRBV29-1, TRBJ1-2)
CSVEANRDVANYGYTF

SEQ ID NO: 646507 - protein, 14 aa, Homo sapiens
  CDR3 for alpha chain variable domain of TCR clone 323254 (TRAV23/DV6, TRAJ22)
CAASVSGSARQLTF

SEQ ID NO: 646508 - protein, 16 aa, Homo sapiens
  CDR3 for beta chain variable domain of TCR clone 323254 (TRBV19, TRBJ2-2)
CASSFPGRGLAGELFF

SEQ ID NO: 646509 - protein, 14 aa, Homo sapiens
  CDR3 for alpha chain variable domain of TCR clone 323255 (TRAV1-2, TRAJ16)
RAVNRFSDGQKLLF

SEQ ID NO: 646510 - protein, 17 aa, Homo sapiens
  CDR3 for beta chain variable domain of TCR clone 323255 (TRBV13, TRBJ2-3)
CASSLSRVAGGRNTQYF

SEQ ID NO: 646511 - protein, 14 aa, Homo sapiens
  CDR3 for alpha chain variable domain of TCR clone 323256 (TRAV12-1, TRAJ46)
CVVTAKSSRDKLTF

SEQ ID NO: 646512 - protein, 17 aa, Homo sapiens
  CDR3 for beta chain variable domain of TCR clone 323256 (TRBV4-1, TRBJ2-3)
CASSQDPAGGPLDTQYF

SEQ ID NO: 646513 - protein, 13 aa, Homo sapiens
  CDR3 for alpha chain variable domain of TCR clone 323257 (TRAV1-1, TRAJ9)
CAAKNTGGFKTIF

SEQ ID NO: 646514 - protein, 16 aa, Homo sapiens
  CDR3 for beta chain variable domain of TCR clone 323257 (TRBV4-3, TRBJ2-1)
CASSPALDRGVNEQFF

SEQ ID NO: 646515 - protein, 13 aa, Homo sapiens
  CDR3 for alpha chain variable domain of TCR clone 323258 (TRAV36/DV7, TRAJ38)
CVANAGNKRKLIW

SEQ ID NO: 646516 - protein, 14 aa, Homo sapiens
  CDR3 for beta chain variable domain of TCR clone 323258 (TRBV7-2, TRBJ2-7)
CASSLRWEVNEQYF

SEQ ID NO: 646517 - protein, 13 aa, Homo sapiens
  CDR3 for alpha chain variable domain of TCR clone 323259 (TRAV13-1, TRAJ20)
CAARVSNDYKLSF

SEQ ID NO: 646518 - protein, 13 aa, Homo sapiens
  CDR3 for beta chain variable domain of TCR clone 323259 (TRBV10-3, TRBJ2-7)
CASKLAVNYEQYF

SEQ ID NO: 646519 - protein, 14 aa, Homo sapiens
  CDR3 for alpha chain variable domain of TCR clone 323260 (TRAV12-2, TRAJ45)
CAVNIGGGSDGLTF

SEQ ID NO: 646520 - protein, 13 aa, Homo sapiens
  CDR3 for beta chain variable domain of TCR clone 323260 (TRBV19, TRBJ1-5)
CASKVGPWEPQHF

SEQ ID NO: 646521 - protein, 15 aa, Homo sapiens
  CDR3 for alpha chain variable domain of TCR clone 323261 (TRAV21, TRAJ52)
CAVRGGGTSYGKLTF

SEQ ID NO: 646522 - protein, 14 aa, Homo sapiens
  CDR3 for beta chain variable domain of TCR clone 323261 (TRBV11-2, TRBJ2-5)
CASSRTGGIETQYF

SEQ ID NO: 646523 - protein, 13 aa, Homo sapiens
  CDR3 for alpha chain variable domain of TCR clone 323262 (TRAV23/DV6, TRAJ24)
CSGSACSWGKLQF

SEQ ID NO: 646524 - protein, 13 aa, Homo sapiens
  CDR3 for beta chain variable domain of TCR clone 323262 (TRBV20-1, TRBJ1-1)
CSAGTVGNTEAFF

SEQ ID NO: 646525 - protein, 18 aa, Homo sapiens
  CDR3 for alpha chain variable domain of TCR clone 323263 (TRAV12-1, TRAJ15)
CVVSPAGQPGRNCSDLLA

SEQ ID NO: 646526 - protein, 13 aa, Homo sapiens
  CDR3 for beta chain variable domain of TCR clone 323263 (TRBV7-2, TRBJ2-4)
CASSREHANIQYF

SEQ ID NO: 646527 - protein, 12 aa, Homo sapiens
  CDR3 for alpha chain variable domain of TCR clone 323264 (TRAV25, TRAJ31)
CAGHLNNARLMF

SEQ ID NO: 646528 - protein, 16 aa, Homo sapiens
  CDR3 for beta chain variable domain of TCR clone 323264 (TRBV10-3, TRBJ2-1)
CAIRGRGRGDYNEQFF

SEQ ID NO: 646529 - protein, 12 aa, Homo sapiens
  CDR3 for alpha chain variable domain of TCR clone 323265 (TRAV16, TRAJ27)
CALNHQCRQINL

SEQ ID NO: 646530 - protein, 13 aa, Homo sapiens
  CDR3 for beta chain variable domain of TCR clone 323265 (TRBV11-2, TRBJ1-5)
CQQLRQGRQPQHF

SEQ ID NO: 646531 - protein, 13 aa, Homo sapiens
  CDR3 for alpha chain variable domain of TCR clone 323266 (TRAV30, TRAJ49)
CGTEPNTGNKFYF

SEQ ID NO: 646532 - protein, 14 aa, Homo sapiens
  CDR3 for beta chain variable domain of TCR clone 323266 (TRBV29-1, TRBJ2-1)
CSVEFRGIPFEQFF

SEQ ID NO: 646533 - protein, 15 aa, Homo sapiens
  CDR3 for alpha chain variable domain of TCR clone 323267 (TRAV27, TRAJ38)
CAARRNSGNNRKLNW

SEQ ID NO: 646534 - protein, 13 aa, Homo sapiens
  CDR3 for beta chain variable domain of TCR clone 323267 (TRBV12-5, TRBJ2-3)
CASGDRQSDTQYF

SEQ ID NO: 646535 - protein, 12 aa, Homo sapiens
  CDR3 for alpha chain variable domain of TCR clone 323268 (TRAV1-1, TRAJ8)
CAGGTGFQKLVF

SEQ ID NO: 646536 - protein, 16 aa, Homo sapiens
  CDR3 for beta chain variable domain of TCR clone 323268 (TRBV4-3, TRBJ2-3)
CASSLGLAGEGDTQYF

SEQ ID NO: 646537 - protein, 11 aa, Homo sapiens
  CDR3 for alpha chain variable domain of TCR clone 323269 (TRAV3, TRAJ17)
PRGAAGNKLTF

SEQ ID NO: 646538 - protein, 16 aa, Homo sapiens
  CDR3 for beta chain variable domain of TCR clone 323269 (TRBV9, TRBJ2-1)
CASSVGGGGNYNEQFF

SEQ ID NO: 646539 - protein, 14 aa, Homo sapiens
  CDR3 for alpha chain variable domain of TCR clone 323270 (TRAV1-2, TRAJ8)
CAVREDTGFQKLVF

SEQ ID NO: 646540 - protein, 15 aa, Homo sapiens
  CDR3 for beta chain variable domain of TCR clone 323270 (TRBV7-9, TRBJ2-2)
CARGPLDTFPGELFF

SEQ ID NO: 646541 - protein, 14 aa, Homo sapiens
  CDR3 for alpha chain variable domain of TCR clone 323271 (TRAV17, TRAJ12)
CATDREDSSYKLIF

SEQ ID NO: 646542 - protein, 14 aa, Homo sapiens
  CDR3 for beta chain variable domain of TCR clone 323271 (TRBV14, TRBJ2-3)
CASSQRLSTDTQYF

SEQ ID NO: 646543 - protein, 15 aa, Homo sapiens
  CDR3 for alpha chain variable domain of TCR clone 323272 (TRAV3, TRAJ20)
CAVRDIKLGDYKLSF

SEQ ID NO: 646544 - protein, 15 aa, Homo sapiens
  CDR3 for beta chain variable domain of TCR clone 323272 (TRBV7-9, TRBJ1-6)
CASSSPGRGDSPLHF

SEQ ID NO: 646545 - protein, 13 aa, Homo sapiens
  CDR3 for alpha chain variable domain of TCR clone 323273 (TRAV21, TRAJ27)
CAARPGNAGKSTF

SEQ ID NO: 646546 - protein, 16 aa, Homo sapiens
  CDR3 for beta chain variable domain of TCR clone 323273 (TRBV3-1, TRBJ1-6)
CASSQEFQGSYSPLHF

SEQ ID NO: 646547 - protein, 14 aa, Homo sapiens
  CDR3 for alpha chain variable domain of TCR clone 323274 (TRAV12-2, TRAJ40)
CAVQIPSGTYKYIF

SEQ ID NO: 646548 - protein, 14 aa, Homo sapiens
  CDR3 for beta chain variable domain of TCR clone 323274 (TRBV20-1, TRBJ1-1)
CSAQTRIGGTKAFF

SEQ ID NO: 646549 - protein, 15 aa, Homo sapiens
  CDR3 for alpha chain variable domain of TCR clone 323275 (TRAV36/DV7, TRAJ54)
CAVEKPVQGAQKLVF

SEQ ID NO: 646550 - protein, 14 aa, Homo sapiens
  CDR3 for beta chain variable domain of TCR clone 323275 (TRBV7-3, TRBJ2-2)
CASSSGGYTGELFF

SEQ ID NO: 646551 - protein, 10 aa, Homo sapiens
  CDR3 for alpha chain variable domain of TCR clone 323276 (TRAV12-3, TRAJ49)
CAMKDDQFYF

SEQ ID NO: 646552 - protein, 13 aa, Homo sapiens
  CDR3 for beta chain variable domain of TCR clone 323276 (TRBV12-4, TRBJ1-1)
CASSPGTGCEAFF

SEQ ID NO: 646553 - protein, 13 aa, Homo sapiens
  CDR3 for alpha chain variable domain of TCR clone 323277 (TRAV3, TRAJ20)
CAVRDTPRYKLSF

SEQ ID NO: 646554 - protein, 15 aa, Homo sapiens
  CDR3 for beta chain variable domain of TCR clone 323277 (TRBV4-1, TRBJ2-7)
CASSQNTGRLYEQYF

SEQ ID NO: 646555 - protein, 19 aa, Homo sapiens
  CDR3 for alpha chain variable domain of TCR clone 323278 (TRAV26-2, TRAJ52)
CILRTGFNAGGTSYGKLTF

SEQ ID NO: 646556 - protein, 16 aa, Homo sapiens
  CDR3 for beta chain variable domain of TCR clone 323278 (TRBV7-8, TRBJ2-4)
CASSAERTLAKNIQYF

SEQ ID NO: 646557 - protein, 14 aa, Homo sapiens
  CDR3 for alpha chain variable domain of TCR clone 323279 (TRAV3, TRAJ9)
CAVRLNTGGFKTIF

SEQ ID NO: 646558 - protein, 17 aa, Homo sapiens
  CDR3 for beta chain variable domain of TCR clone 323279 (TRBV7-2, TRBJ1-4)
CASSFKAGPTTNEKLFF

SEQ ID NO: 646559 - protein, 13 aa, Homo sapiens
  CDR3 for alpha chain variable domain of TCR clone 323280 (TRAV21, TRAJ37)
CAVSSGNTGQLIF

SEQ ID NO: 646560 - protein, 15 aa, Homo sapiens
  CDR3 for beta chain variable domain of TCR clone 323280 (TRBV12-4, TRBJ1-2)
CASSFVDRGNYGYTF

SEQ ID NO: 646561 - protein, 11 aa, Homo sapiens
  CDR3 for alpha chain variable domain of TCR clone 323281 (TRAV12-1, TRAJ30)
WVVNGQDKIIF

SEQ ID NO: 646562 - protein, 12 aa, Homo sapiens
  CDR3 for beta chain variable domain of TCR clone 323281 (TRBV27, TRBJ2-2)
CARKLFTGELFF

SEQ ID NO: 646563 - protein, 14 aa, Homo sapiens
  CDR3 for alpha chain variable domain of TCR clone 323282 (TRAV27, TRAJ23)
CAGLSYNQGGKLIF

SEQ ID NO: 646564 - protein, 15 aa, Homo sapiens
  CDR3 for beta chain variable domain of TCR clone 323282 (TRBV6-1, TRBJ2-3)
CASSERGGITDTQYF

SEQ ID NO: 646565 - protein, 13 aa, Homo sapiens
  CDR3 for alpha chain variable domain of TCR clone 323283 (TRAV8-6, TRAJ49)
CAVITNTGNQFYF

SEQ ID NO: 646566 - protein, 14 aa, Homo sapiens
  CDR3 for beta chain variable domain of TCR clone 323283 (TRBV11-2, TRBJ2-5)
CASSGHSLQETQYF

SEQ ID NO: 646567 - protein, 15 aa, Homo sapiens
  CDR3 for alpha chain variable domain of TCR clone 323284 (TRAV29/DV5, TRAJ24)
YAASGATDSWGKFQF

SEQ ID NO: 646568 - protein, 15 aa, Homo sapiens
  CDR3 for beta chain variable domain of TCR clone 323284 (TRBV29-1, TRBJ2-7)
CSVEFFDRGSYEQYF

SEQ ID NO: 646569 - protein, 12 aa, Homo sapiens
  CDR3 for alpha chain variable domain of TCR clone 323285 (TRAV12-2, TRAJ47)
CAVAEYGNKLVF

SEQ ID NO: 646570 - protein, 13 aa, Homo sapiens
  CDR3 for beta chain variable domain of TCR clone 323285 (TRBV7-9, TRBJ1-2)
CASSLKQNYGYTF

SEQ ID NO: 646571 - protein, 13 aa, Homo sapiens
  CDR3 for alpha chain variable domain of TCR clone 323286 (TRAV21, TRAJ15)
CCEPQQAGTALIF

SEQ ID NO: 646572 - protein, 11 aa, Homo sapiens
  CDR3 for beta chain variable domain of TCR clone 323286 (TRBV20-1, TRBJ2-7)
CSARTSYEQYF

SEQ ID NO: 646573 - protein, 14 aa, Homo sapiens
  CDR3 for alpha chain variable domain of TCR clone 323287 (TRAV12-1, TRAJ37)
CVVGGVENTGKLIF

SEQ ID NO: 646574 - protein, 12 aa, Homo sapiens
  CDR3 for beta chain variable domain of TCR clone 323287 (TRBV11-2, TRBJ2-2)
CASSLPTGELFF

SEQ ID NO: 646575 - protein, 13 aa, Homo sapiens
  CDR3 for alpha chain variable domain of TCR clone 323288 (TRAV38-2/DV8, TRAJ53)
CASGGGSNYRLTF

SEQ ID NO: 646576 - protein, 16 aa, Homo sapiens
  CDR3 for beta chain variable domain of TCR clone 323288 (TRBV28, TRBJ1-5)
CASRFRGAVQNQPQHF

SEQ ID NO: 646577 - protein, 15 aa, Homo sapiens
  CDR3 for alpha chain variable domain of TCR clone 323289 (TRAV8-3, TRAJ11)
CAVGLLNSGYSTLTF

SEQ ID NO: 646578 - protein, 17 aa, Homo sapiens
  CDR3 for beta chain variable domain of TCR clone 323289 (TRBV4-1, TRBJ2-7)
CASSRDPLGVRGGEQYF

SEQ ID NO: 646579 - protein, 17 aa, Homo sapiens
  CDR3 for alpha chain variable domain of TCR clone 323290 (TRAV3, TRAJ6)
CAVRDGPRAGGIYIPTF

SEQ ID NO: 646580 - protein, 17 aa, Homo sapiens
  CDR3 for beta chain variable domain of TCR clone 323290 (TRBV20-1, TRBJ1-5)
CSASLSPGQGGNQPQHF

SEQ ID NO: 646581 - protein, 11 aa, Homo sapiens
  CDR3 for alpha chain variable domain of TCR clone 323291 (TRAV2, TRAJ33)
CAVESNYQLIW

SEQ ID NO: 646582 - protein, 15 aa, Homo sapiens
  CDR3 for beta chain variable domain of TCR clone 323291 (TRBV19, TRBJ1-1)
CACTSGQIQNTEAFF

SEQ ID NO: 646583 - protein, 12 aa, Homo sapiens
  CDR3 for alpha chain variable domain of TCR clone 323292 (TRAV13-2, TRAJ42)
CAEGGSQGNLIF

SEQ ID NO: 646584 - protein, 15 aa, Homo sapiens
  CDR3 for beta chain variable domain of TCR clone 323292 (TRBV28, TRBJ2-1)
CASSLGTRLYNEQFF

SEQ ID NO: 646585 - protein, 12 aa, Homo sapiens
  CDR3 for alpha chain variable domain of TCR clone 323293 (TRAV8-3, TRAJ20)
CAVDFNDYKLSF

SEQ ID NO: 646586 - protein, 12 aa, Homo sapiens
  CDR3 for beta chain variable domain of TCR clone 323293 (TRBV19, TRBJ2-7)
CASTSVGSEQYF

SEQ ID NO: 646587 - protein, 13 aa, Homo sapiens
  CDR3 for alpha chain variable domain of TCR clone 323294 (TRAV1-2, TRAJ9)
CAVLTTGGFKTIF

SEQ ID NO: 646588 - protein, 17 aa, Homo sapiens
  CDR3 for beta chain variable domain of TCR clone 323294 (TRBV13, TRBJ2-3)
CASSLSRVAGGRNTQYF

SEQ ID NO: 646589 - protein, 13 aa, Homo sapiens
  CDR3 for alpha chain variable domain of TCR clone 323295 (TRAV35, TRAJ33)
LAPGRDSNYQLIW

SEQ ID NO: 646590 - protein, 11 aa, Homo sapiens
  CDR3 for beta chain variable domain of TCR clone 323295 (TRBV10-3, TRBJ2-7)
CAISEGLEQYF

SEQ ID NO: 646591 - protein, 16 aa, Homo sapiens
  CDR3 for alpha chain variable domain of TCR clone 323296 (TRAV8-2, TRAJ45)
CVVSEGTGGGADGLTF

SEQ ID NO: 646592 - protein, 14 aa, Homo sapiens
  CDR3 for beta chain variable domain of TCR clone 323296 (TRBV20-1, TRBJ2-7)
CSAKRGRSSYEQYF

SEQ ID NO: 646593 - protein, 19 aa, Homo sapiens
  CDR3 for alpha chain variable domain of TCR clone 323297 (TRAV26-1, TRAJ22)
CCVLSHRWVFSGSARPLTF

SEQ ID NO: 646594 - protein, 19 aa, Homo sapiens
  CDR3 for beta chain variable domain of TCR clone 323297 (TRBV19, TRBJ2-5)
CASSIGQVTDFFLGETQYF

SEQ ID NO: 646595 - protein, 14 aa, Homo sapiens
  CDR3 for alpha chain variable domain of TCR clone 323298 (TRAV12-3, TRAJ10)
SHLPLTGGGNKLTF

SEQ ID NO: 646596 - protein, 14 aa, Homo sapiens
  CDR3 for beta chain variable domain of TCR clone 323298 (TRBV7-9, TRBJ2-2)
CASSFDRGTGELFF

SEQ ID NO: 646597 - protein, 15 aa, Homo sapiens
  CDR3 for alpha chain variable domain of TCR clone 323299 (TRAV13-1, TRAJ17)
CAASIDRAAGNKLTF

SEQ ID NO: 646598 - protein, 13 aa, Homo sapiens
  CDR3 for beta chain variable domain of TCR clone 323299 (TRBV27, TRBJ2-1)
CASRTLGVGEQFF

SEQ ID NO: 646599 - protein, 16 aa, Homo sapiens
  CDR3 for alpha chain variable domain of TCR clone 323300 (TRAV12-3, TRAJ53)
CAMSPGRGGRHYKLTF

SEQ ID NO: 646600 - protein, 11 aa, Homo sapiens
  CDR3 for beta chain variable domain of TCR clone 323300 (TRBV29-1, TRBJ2-5)
CSEDRTGTQYF

SEQ ID NO: 646601 - protein, 14 aa, Homo sapiens
  CDR3 for alpha chain variable domain of TCR clone 323301 (TRAV12-3, TRAJ10)
SHLPLTGGGNKLTF

SEQ ID NO: 646602 - protein, 16 aa, Homo sapiens
  CDR3 for beta chain variable domain of TCR clone 323301 (TRBV19, TRBJ1-1)
CASGFGGPVTGTEAFF

SEQ ID NO: 646603 - protein, 15 aa, Homo sapiens
  CDR3 for alpha chain variable domain of TCR clone 323302 (TRAV3, TRAJ20)
CAVRDIKLSDYKLSF

SEQ ID NO: 646604 - protein, 15 aa, Homo sapiens
  CDR3 for beta chain variable domain of TCR clone 323302 (TRBV7-9, TRBJ1-6)
CASSSPGRGNSPLPF

SEQ ID NO: 646605 - protein, 16 aa, Homo sapiens
  CDR3 for alpha chain variable domain of TCR clone 323303 (TRAV27, TRAJ52)
CAGAGAVGTSYGKLTF

SEQ ID NO: 646606 - protein, 17 aa, Homo sapiens
  CDR3 for beta chain variable domain of TCR clone 323303 (TRBV24-1, TRBJ2-3)
CATSDLPSGEDTDTQYF

SEQ ID NO: 646607 - protein, 14 aa, Homo sapiens
  CDR3 for alpha chain variable domain of TCR clone 323304 (TRAV23/DV6, TRAJ28)
CAASSGAGSYQLTF

SEQ ID NO: 646608 - protein, 14 aa, Homo sapiens
  CDR3 for beta chain variable domain of TCR clone 323304 (TRBV12-5, TRBJ2-5)
CASGSRTHQETQYF

SEQ ID NO: 646609 - protein, 13 aa, Homo sapiens
  CDR3 for alpha chain variable domain of TCR clone 323305 (TRAV14/DV4, TRAJ49)
CAMVENTGNQFYF

SEQ ID NO: 646610 - protein, 17 aa, Homo sapiens
  CDR3 for beta chain variable domain of TCR clone 323305 (TRBV11-2, TRBJ2-1)
CASSLYPPGVEYNEQFF

SEQ ID NO: 646611 - protein, 12 aa, Homo sapiens
  CDR3 for alpha chain variable domain of TCR clone 323306 (TRAV3, TRAJ20)
CAVRDGDYKLSF

SEQ ID NO: 646612 - protein, 13 aa, Homo sapiens
  CDR3 for beta chain variable domain of TCR clone 323306 (TRBV9, TRBJ2-7)
CASSVGQGGEQYF

SEQ ID NO: 646613 - protein, 14 aa, Homo sapiens
  CDR3 for alpha chain variable domain of TCR clone 323307 (TRAV12-2, TRAJ17)
CAALFKAAGNKLTL

SEQ ID NO: 646614 - protein, 15 aa, Homo sapiens
  CDR3 for beta chain variable domain of TCR clone 323307 (TRBV20-1, TRBJ2-7)
CSARDRVSGMDEQYF

SEQ ID NO: 646615 - protein, 15 aa, Homo sapiens
  CDR3 for alpha chain variable domain of TCR clone 323308 (TRAV36/DV7, TRAJ53)
CAVEGSGGSYYKLTF

SEQ ID NO: 646616 - protein, 16 aa, Homo sapiens
  CDR3 for beta chain variable domain of TCR clone 323308 (TRBV27, TRBJ2-2)
CASSLSGFWVTGELFF

SEQ ID NO: 646617 - protein, 12 aa, Homo sapiens
  CDR3 for alpha chain variable domain of TCR clone 323309 (TRAV25, TRAJ38)
CAGTGNNRKLIW

SEQ ID NO: 646618 - protein, 17 aa, Homo sapiens
  CDR3 for beta chain variable domain of TCR clone 323309 (TRBV11-2, TRBJ2-1)
CASSLYPPGVEYNEQFF

SEQ ID NO: 646619 - protein, 12 aa, Homo sapiens
  CDR3 for alpha chain variable domain of TCR clone 323310 (TRAV3, TRAJ31)
CAVRDGNARLMF

SEQ ID NO: 646620 - protein, 13 aa, Homo sapiens
  CDR3 for beta chain variable domain of TCR clone 323310 (TRBV7-9, TRBJ1-2)
CASSLKQNYGYTF

SEQ ID NO: 646621 - protein, 13 aa, Homo sapiens
  CDR3 for alpha chain variable domain of TCR clone 323311 (TRAV30, TRAJ24)
CGTEGNGWGKFQF

SEQ ID NO: 646622 - protein, 11 aa, Homo sapiens
  CDR3 for beta chain variable domain of TCR clone 323311 (TRBV7-2, TRBJ2-2)
CASSARDREGR

SEQ ID NO: 646623 - protein, 11 aa, Homo sapiens
  CDR3 for alpha chain variable domain of TCR clone 323312 (TRAV12-2, TRAJ36)
CAVKDNLFFVT

SEQ ID NO: 646624 - protein, 15 aa, Homo sapiens
  CDR3 for beta chain variable domain of TCR clone 323312 (TRBV28, TRBJ2-2)
CASTVAGANTGELFF

SEQ ID NO: 646625 - protein, 13 aa, Homo sapiens
  CDR3 for alpha chain variable domain of TCR clone 323313 (TRAV26-1, )
CIVSHRVEGFWNQ

SEQ ID NO: 646626 - protein, 14 aa, Homo sapiens
  CDR3 for beta chain variable domain of TCR clone 323313 (TRBV20-1, TRBJ2-7)
CSAWTALSAYEQYF

SEQ ID NO: 646627 - protein, 14 aa, Homo sapiens
  CDR3 for alpha chain variable domain of TCR clone 323314 (TRAV1-2, TRAJ8)
CAVREDTGLQKLVF

SEQ ID NO: 646628 - protein, 11 aa, Homo sapiens
  CDR3 for beta chain variable domain of TCR clone 323314 (TRBV11-2, TRBJ2-2)
CASSLPGELFF

SEQ ID NO: 646629 - protein, 12 aa, Homo sapiens
  CDR3 for alpha chain variable domain of TCR clone 323315 (TRAV12-3, TRAJ20)
CAMVRGDYKLSF

SEQ ID NO: 646630 - protein, 17 aa, Homo sapiens
  CDR3 for beta chain variable domain of TCR clone 323315 (TRBV7-3, TRBJ2-3)
CASSLMKRMRGADTQYF

SEQ ID NO: 646631 - protein, 17 aa, Homo sapiens
  CDR3 for alpha chain variable domain of TCR clone 323316 (TRAV12-2, TRAJ52)
CAVNPYAGGTSYGKLTF

SEQ ID NO: 646632 - protein, 12 aa, Homo sapiens
  CDR3 for beta chain variable domain of TCR clone 323316 (TRBV5-5, TRBJ2-2)
AAREGATGELFF

SEQ ID NO: 646633 - protein, 14 aa, Homo sapiens
  CDR3 for alpha chain variable domain of TCR clone 323317 (TRAV12-3, TRAJ58)
CAMSTETIGSRLTF

SEQ ID NO: 646634 - protein, 13 aa, Homo sapiens
  CDR3 for beta chain variable domain of TCR clone 323317 (TRBV27, TRBJ2-3)
CASSWGRTDTQYF

SEQ ID NO: 646635 - protein, 12 aa, Homo sapiens
  CDR3 for alpha chain variable domain of TCR clone 323318 (TRAV13-1, TRAJ21)
CAVKEGFNKFYF

SEQ ID NO: 646636 - protein, 17 aa, Homo sapiens
  CDR3 for beta chain variable domain of TCR clone 323318 (TRBV20-1, TRBJ2-1)
CSASSSGLAGSYNEQFF

SEQ ID NO: 646637 - protein, 13 aa, Homo sapiens
  CDR3 for alpha chain variable domain of TCR clone 323319 (TRAV2, TRAJ21)
CAVEDNNFNKFYF

SEQ ID NO: 646638 - protein, 14 aa, Homo sapiens
  CDR3 for beta chain variable domain of TCR clone 323319 (TRBV6-1, TRBJ2-7)
CASSERVNPYEHYF

SEQ ID NO: 646639 - protein, 16 aa, Homo sapiens
  CDR3 for alpha chain variable domain of TCR clone 323320 (TRAV3, TRAJ3)
CAVRDPGTAVLPRYSL

SEQ ID NO: 646640 - protein, 16 aa, Homo sapiens
  CDR3 for beta chain variable domain of TCR clone 323320 (TRBV19, TRBJ1-5)
CASSIDRGGPRQPQHF

SEQ ID NO: 646641 - protein, 11 aa, Homo sapiens
  CDR3 for alpha chain variable domain of TCR clone 323321 (TRAV21, TRAJ11)
CAVNGYSTLTF

SEQ ID NO: 646642 - protein, 14 aa, Homo sapiens
  CDR3 for beta chain variable domain of TCR clone 323321 (TRBV2, TRBJ1-5)
CASSGTGFNQPQHF

SEQ ID NO: 646643 - protein, 16 aa, Homo sapiens
  CDR3 for alpha chain variable domain of TCR clone 323322 (TRAV16, TRAJ52)
CALSGVGGTSFGKLTF

SEQ ID NO: 646644 - protein, 14 aa, Homo sapiens
  CDR3 for beta chain variable domain of TCR clone 323322 (TRBV19, TRBJ1-2)
CASSLQGQAYGYTF

SEQ ID NO: 646645 - protein, 15 aa, Homo sapiens
  CDR3 for alpha chain variable domain of TCR clone 323323 (TRAV12-1, TRAJ9)
CVVSFGDTVGFKTIF

SEQ ID NO: 646646 - protein, 15 aa, Homo sapiens
  CDR3 for beta chain variable domain of TCR clone 323323 (TRBV28, TRBJ2-5)
CASSPGQGSIETQYF

SEQ ID NO: 646647 - protein, 14 aa, Homo sapiens
  CDR3 for alpha chain variable domain of TCR clone 323324 (TRAV35, TRAJ22)
CAGLRPGSARQLTF

SEQ ID NO: 646648 - protein, 13 aa, Homo sapiens
  CDR3 for beta chain variable domain of TCR clone 323324 (TRBV20-1, TRBJ1-1)
YSGRGGGNTEAFF

SEQ ID NO: 646649 - protein, 15 aa, Homo sapiens
  CDR3 for alpha chain variable domain of TCR clone 323325 (TRAV25, TRAJ52)
CVGTSGGTSYGKLTF

SEQ ID NO: 646650 - protein, 13 aa, Homo sapiens
  CDR3 for beta chain variable domain of TCR clone 323325 (TRBV27, TRBJ1-1)
CASSLSIGAEAFF

SEQ ID NO: 646651 - protein, 15 aa, Homo sapiens
  CDR3 for alpha chain variable domain of TCR clone 323326 (TRAV20, TRAJ28)
CAVQGTGAGRYQLTF

SEQ ID NO: 646652 - protein, 12 aa, Homo sapiens
  CDR3 for beta chain variable domain of TCR clone 323326 (TRBV5-1, TRBJ1-2)
CASSLDGKGYTF

SEQ ID NO: 646653 - protein, 15 aa, Homo sapiens
  CDR3 for alpha chain variable domain of TCR clone 323327 (TRAV36/DV7, TRAJ21)
CALKFYFGSGTKLNV

SEQ ID NO: 646654 - protein, 13 aa, Homo sapiens
  CDR3 for beta chain variable domain of TCR clone 323327 (TRBV11-3, TRBJ2-5)
CASSSGLQDTQYF

SEQ ID NO: 646655 - protein, 14 aa, Homo sapiens
  CDR3 for alpha chain variable domain of TCR clone 323328 (TRAV12-2, TRAJ45)
CAVNIGGGADGLTF

SEQ ID NO: 646656 - protein, 12 aa, Homo sapiens
  CDR3 for beta chain variable domain of TCR clone 323328 (TRBV19, TRBJ1-5)
CASSIAQQPQHF

SEQ ID NO: 646657 - protein, 12 aa, Homo sapiens
  CDR3 for alpha chain variable domain of TCR clone 323329 (TRAV21, TRAJ11)
CAATSGYSTLTF

SEQ ID NO: 646658 - protein, 14 aa, Homo sapiens
  CDR3 for beta chain variable domain of TCR clone 323329 (TRBV20-1, TRBJ2-7)
CTAPELAGVGEQYF

SEQ ID NO: 646659 - protein, 14 aa, Homo sapiens
  CDR3 for alpha chain variable domain of TCR clone 323330 (TRAV1-2, TRAJ16)
CAVNRFSDGPKLLF

SEQ ID NO: 646660 - protein, 12 aa, Homo sapiens
  CDR3 for beta chain variable domain of TCR clone 323330 (TRBV7-8, TRBJ2-7)
CASSLGDREQYF

SEQ ID NO: 646661 - protein, 15 aa, Homo sapiens
  CDR3 for alpha chain variable domain of TCR clone 323331 (TRAV38-1, TRAJ57)
CAFMGSQGGSEKLVF

SEQ ID NO: 646662 - protein, 16 aa, Homo sapiens
  CDR3 for beta chain variable domain of TCR clone 323331 (TRBV10-3, TRBJ2-1)
CAIRGGGRGEYNEQFF

SEQ ID NO: 646663 - protein, 14 aa, Homo sapiens
  CDR3 for alpha chain variable domain of TCR clone 323332 (TRAV8-3, TRAJ36)
CAVGPITGANNLFF

SEQ ID NO: 646664 - protein, 15 aa, Homo sapiens
  CDR3 for beta chain variable domain of TCR clone 323332 (TRBV4-1, TRBJ2-1)
CASSQDPGNYNEEFF

SEQ ID NO: 646665 - protein, 13 aa, Homo sapiens
  CDR3 for alpha chain variable domain of TCR clone 323333 (TRAV13-1, TRAJ10)
CEALEGGGNKLTF

SEQ ID NO: 646666 - protein, 13 aa, Homo sapiens
  CDR3 for beta chain variable domain of TCR clone 323333 (TRBV7-9, TRBJ1-2)
CASSLKQNYGYTF

SEQ ID NO: 646667 - protein, 13 aa, Homo sapiens
  CDR3 for alpha chain variable domain of TCR clone 323334 (TRAV20, TRAJ37)
CAGCSSNTGKLIF

SEQ ID NO: 646668 - protein, 11 aa, Homo sapiens
  CDR3 for beta chain variable domain of TCR clone 323334 (TRBV12-4, TRBJ2-3)
CASTGTDTQYF

SEQ ID NO: 646669 - protein, 14 aa, Homo sapiens
  CDR3 for alpha chain variable domain of TCR clone 323335 (TRAV4, TRAJ26)
CLVGPHNYGQNFVF

SEQ ID NO: 646670 - protein, 15 aa, Homo sapiens
  CDR3 for beta chain variable domain of TCR clone 323335 (TRBV18, TRBJ2-1)
CASSPPSASYNEQFF

SEQ ID NO: 646671 - protein, 15 aa, Homo sapiens
  CDR3 for alpha chain variable domain of TCR clone 323336 (TRAV12-1, TRAJ48)
CVVNKVNFRNEKLTF

SEQ ID NO: 646672 - protein, 15 aa, Homo sapiens
  CDR3 for beta chain variable domain of TCR clone 323336 (TRBV20-1, TRBJ2-7)
CSARDRVSGMDEQYF

SEQ ID NO: 646673 - protein, 14 aa, Homo sapiens
  CDR3 for alpha chain variable domain of TCR clone 323337 (TRAV26-1, TRAJ49)
CIVRLTNTGDQFYF

SEQ ID NO: 646674 - protein, 13 aa, Homo sapiens
  CDR3 for beta chain variable domain of TCR clone 323337 (TRBV7-9, TRBJ1-2)
CASSLKQNYGYTF

SEQ ID NO: 646675 - protein, 18 aa, Homo sapiens
  CDR3 for alpha chain variable domain of TCR clone 323338 (TRAV21, TRAJ52)
CAVRPSPAGGTSYGKLTF

SEQ ID NO: 646676 - protein, 15 aa, Homo sapiens
  CDR3 for beta chain variable domain of TCR clone 323338 (TRBV2, TRBJ2-1)
CASSVTSEGTDEQFF

SEQ ID NO: 646677 - protein, 14 aa, Homo sapiens
  CDR3 for alpha chain variable domain of TCR clone 323339 (TRAV12-2, TRAJ13)
CAVKKTGGYKKVTF

SEQ ID NO: 646678 - protein, 16 aa, Homo sapiens
  CDR3 for beta chain variable domain of TCR clone 323339 (TRBV9, TRBJ2-3)
CASSGTSGKDTDTQYF

SEQ ID NO: 646679 - protein, 13 aa, Homo sapiens
  CDR3 for alpha chain variable domain of TCR clone 323340 (TRAV12-2, TRAJ3)
CAFQYSSASKIIF

SEQ ID NO: 646680 - protein, 11 aa, Homo sapiens
  CDR3 for beta chain variable domain of TCR clone 323340 (TRBV20-1, TRBJ2-3)
CSGNSSTTQYF

SEQ ID NO: 646681 - protein, 14 aa, Homo sapiens
  CDR3 for alpha chain variable domain of TCR clone 323341 (TRAV4, TRAJ10)
CLVGDTGGGNKLTF

SEQ ID NO: 646682 - protein, 16 aa, Homo sapiens
  CDR3 for beta chain variable domain of TCR clone 323341 (TRBV12-5, TRBJ2-5)
CASGPRTSGNQETQYF

SEQ ID NO: 646683 - protein, 16 aa, Homo sapiens
  CDR3 for alpha chain variable domain of TCR clone 323342 (TRAV12-3, TRAJ53)
CALSPGSGGSNYKLTF

SEQ ID NO: 646684 - protein, 11 aa, Homo sapiens
  CDR3 for beta chain variable domain of TCR clone 323342 (TRBV29-1, TRBJ2-5)
RSEDRTGTQYF

SEQ ID NO: 646685 - protein, 12 aa, Homo sapiens
  CDR3 for alpha chain variable domain of TCR clone 323343 (TRAV21, TRAJ31)
CVVWGHNARLMF

SEQ ID NO: 646686 - protein, 14 aa, Homo sapiens
  CDR3 for beta chain variable domain of TCR clone 323343 (TRBV6-1, TRBJ1-3)
CASVQGGGGNTIYF

SEQ ID NO: 646687 - protein, 14 aa, Homo sapiens
  CDR3 for alpha chain variable domain of TCR clone 323344 (TRAV14/DV4, TRAJ42)
CPRGSLRSQGNLIF

SEQ ID NO: 646688 - protein, 18 aa, Homo sapiens
  CDR3 for beta chain variable domain of TCR clone 323344 (TRBV20-1, TRBJ2-3)
CSASGLAGGPGTTDTQYV

SEQ ID NO: 646689 - protein, 14 aa, Homo sapiens
  CDR3 for alpha chain variable domain of TCR clone 323345 (TRAV2, TRAJ37)
CAVDFTSNTGKLIF

SEQ ID NO: 646690 - protein, 13 aa, Homo sapiens
  CDR3 for beta chain variable domain of TCR clone 323345 (TRBV7-9, TRBJ2-1)
CASRPNLSDEQFF

SEQ ID NO: 646691 - protein, 15 aa, Homo sapiens
  CDR3 for alpha chain variable domain of TCR clone 323346 (TRAV17, TRAJ16)
CATALRFSDGQKLLF

SEQ ID NO: 646692 - protein, 13 aa, Homo sapiens
  CDR3 for beta chain variable domain of TCR clone 323346 (TRBV13, TRBJ2-1)
CASTPGSYNEQFF

SEQ ID NO: 646693 - protein, 13 aa, Homo sapiens
  CDR3 for alpha chain variable domain of TCR clone 323347 (TRAV38-2/DV8, TRAJ35)
CAQRRGFGNVLHC

SEQ ID NO: 646694 - protein, 15 aa, Homo sapiens
  CDR3 for beta chain variable domain of TCR clone 323347 (TRBV19, TRBJ1-6)
CASSTQGAVGSPLHF

SEQ ID NO: 646695 - protein, 11 aa, Homo sapiens
  CDR3 for alpha chain variable domain of TCR clone 323348 (TRAV2, TRAJ24)
TTVPSWGKLQF

SEQ ID NO: 646696 - protein, 12 aa, Homo sapiens
  CDR3 for beta chain variable domain of TCR clone 323348 (TRBV11-2, TRBJ2-2)
CASSLGGGELFF

SEQ ID NO: 646697 - protein, 21 aa, Homo sapiens
  CDR3 for alpha chain variable domain of TCR clone 323349 (TRAV4, TRAJ3)
CCVLLPRGCPPGYSSASKIIF

SEQ ID NO: 646698 - protein, 12 aa, Homo sapiens
  CDR3 for beta chain variable domain of TCR clone 323349 (TRBV11-2, TRBJ2-2)
CASSLGGGELFF

SEQ ID NO: 646699 - protein, 15 aa, Homo sapiens
  CDR3 for alpha chain variable domain of TCR clone 323350 (TRAV3, TRAJ5)
CSVRDLDAGRRALTF

SEQ ID NO: 646700 - protein, 13 aa, Homo sapiens
  CDR3 for beta chain variable domain of TCR clone 323350 (TRBV12-4, TRBJ2-7)
CASSPTETYEQYF

SEQ ID NO: 646701 - protein, 14 aa, Homo sapiens
  CDR3 for alpha chain variable domain of TCR clone 323351 (TRAV12-1, TRAJ24)
CVVRSTDSWGKFQF

SEQ ID NO: 646702 - protein, 13 aa, Homo sapiens
  CDR3 for beta chain variable domain of TCR clone 323351 (TRBV2, TRBJ2-3)
CASILAGGQGEYF

SEQ ID NO: 646703 - protein, 13 aa, Homo sapiens
  CDR3 for alpha chain variable domain of TCR clone 323352 (TRAV1-2, TRAJ12)
CAVSMDSSYKLIF

SEQ ID NO: 646704 - protein, 12 aa, Homo sapiens
  CDR3 for beta chain variable domain of TCR clone 323352 (TRBV7-8, TRBJ2-7)
CASSLGDREQYF

SEQ ID NO: 646705 - protein, 13 aa, Homo sapiens
  CDR3 for alpha chain variable domain of TCR clone 323353 (TRAV21, TRAJ20)
CAVGLRVAYKLSF

SEQ ID NO: 646706 - protein, 14 aa, Homo sapiens
  CDR3 for beta chain variable domain of TCR clone 323353 (TRBV4-2, TRBJ2-1)
CASGLDRAYNEQFF

SEQ ID NO: 646707 - protein, 12 aa, Homo sapiens
  CDR3 for alpha chain variable domain of TCR clone 323354 (TRAV21, TRAJ33)
CAKMDSNYQLIW

SEQ ID NO: 646708 - protein, 13 aa, Homo sapiens
  CDR3 for beta chain variable domain of TCR clone 323354 (TRBV13, TRBJ2-7)
CASSQGVSYEQYF

SEQ ID NO: 646709 - protein, 14 aa, Homo sapiens
  CDR3 for alpha chain variable domain of TCR clone 323355 (TRAV12-2, TRAJ40)
CAVKIPSGTYNYIF

SEQ ID NO: 646710 - protein, 14 aa, Homo sapiens
  CDR3 for beta chain variable domain of TCR clone 323355 (TRBV7-8, TRBJ2-7)
CASSPRDRVYEQYF

SEQ ID NO: 646711 - protein, 11 aa, Homo sapiens
  CDR3 for alpha chain variable domain of TCR clone 323356 (TRAV1-1, TRAJ23)
CAVRQGGKLIF

SEQ ID NO: 646712 - protein, 15 aa, Homo sapiens
  CDR3 for beta chain variable domain of TCR clone 323356 (TRBV6-1, TRBJ2-1)
CASSELRGQYNEQFF

SEQ ID NO: 646713 - protein, 18 aa, Homo sapiens
  CDR3 for alpha chain variable domain of TCR clone 323357 (TRAV1-2, TRAJ10)
CAVRALTPVTGGGTKLTF

SEQ ID NO: 646714 - protein, 14 aa, Homo sapiens
  CDR3 for beta chain variable domain of TCR clone 323357 (TRBV4-1, TRBJ1-1)
CASSQQGNGNEAFF

SEQ ID NO: 646715 - protein, 14 aa, Homo sapiens
  CDR3 for alpha chain variable domain of TCR clone 323358 (TRAV13-2, TRAJ29)
CAEGTFETNTPLVF

SEQ ID NO: 646716 - protein, 13 aa, Homo sapiens
  CDR3 for beta chain variable domain of TCR clone 323358 (TRBV2, TRBJ1-1)
SASNLLRNTEAFF

SEQ ID NO: 646717 - protein, 14 aa, Homo sapiens
  CDR3 for alpha chain variable domain of TCR clone 323359 (TRAV29/DV5, TRAJ36)
CAACRKTGANNLFF

SEQ ID NO: 646718 - protein, 16 aa, Homo sapiens
  CDR3 for beta chain variable domain of TCR clone 323359 (TRBV11-2, TRBJ2-2)
CASSLRTGNLIGELFF

SEQ ID NO: 646719 - protein, 15 aa, Homo sapiens
  CDR3 for alpha chain variable domain of TCR clone 323360 (TRAV23/DV6, TRAJ30)
CAASSQESRDDKIIF

SEQ ID NO: 646720 - protein, 16 aa, Homo sapiens
  CDR3 for beta chain variable domain of TCR clone 323360 (TRBV19, TRBJ2-2)
CASRSPGTGATGELFF

SEQ ID NO: 646721 - protein, 11 aa, Homo sapiens
  CDR3 for alpha chain variable domain of TCR clone 323361 (TRAV27, TRAJ20)
CAGLSDYKLSF

SEQ ID NO: 646722 - protein, 14 aa, Homo sapiens
  CDR3 for beta chain variable domain of TCR clone 323361 (TRBV6-1, TRBJ1-1)
CASTPLQMNTEAFF

SEQ ID NO: 646723 - protein, 17 aa, Homo sapiens
  CDR3 for alpha chain variable domain of TCR clone 323362 (TRAV4, TRAJ13)
CLVGVQGSSGGYQKVTF

SEQ ID NO: 646724 - protein, 13 aa, Homo sapiens
  CDR3 for beta chain variable domain of TCR clone 323362 (TRBV7-3, TRBJ1-1)
CASSQDWGAEAFF

SEQ ID NO: 646725 - protein, 12 aa, Homo sapiens
  CDR3 for alpha chain variable domain of TCR clone 323363 (TRAV27, TRAJ13)
CAGAGGYQKVTF

SEQ ID NO: 646726 - protein, 15 aa, Homo sapiens
  CDR3 for beta chain variable domain of TCR clone 323363 (TRBV20-1, TRBJ2-6)
CGARDRGPGANVLTF

SEQ ID NO: 646727 - protein, 14 aa, Homo sapiens
  CDR3 for alpha chain variable domain of TCR clone 323364 (TRAV2, TRAJ9)
CAVEDRSGGVKTIF

SEQ ID NO: 646728 - protein, 13 aa, Homo sapiens
  CDR3 for beta chain variable domain of TCR clone 323364 (TRBV27, TRBJ1-1)
CASSLSIGAEAFF

SEQ ID NO: 646729 - protein, 14 aa, Homo sapiens
  CDR3 for alpha chain variable domain of TCR clone 323365 (TRAV3, TRAJ17)
CAVRERSCRQQANF

SEQ ID NO: 646730 - protein, 17 aa, Homo sapiens
  CDR3 for beta chain variable domain of TCR clone 323365 (TRBV13, TRBJ2-3)
CGSSLSRVAGGRNTQYF

SEQ ID NO: 646731 - protein, 15 aa, Homo sapiens
  CDR3 for alpha chain variable domain of TCR clone 323366 (TRAV38-1, TRAJ37)
CAFIHGSGNNGKLIF

SEQ ID NO: 646732 - protein, 14 aa, Homo sapiens
  CDR3 for beta chain variable domain of TCR clone 323366 (TRBV29-1, TRBJ2-5)
CSVETSGSGETQYF

SEQ ID NO: 646733 - protein, 17 aa, Homo sapiens
  CDR3 for alpha chain variable domain of TCR clone 323367 (TRAV13-1, TRAJ28)
CAASPPYSGAASYQLTF

SEQ ID NO: 646734 - protein, 15 aa, Homo sapiens
  CDR3 for beta chain variable domain of TCR clone 323367 (TRBV6-3, TRBJ2-2)
CASSFLATLTGELFF

SEQ ID NO: 646735 - protein, 11 aa, Homo sapiens
  CDR3 for alpha chain variable domain of TCR clone 323368 (TRAV12-3, TRAJ43)
CAMSASNDMRF

SEQ ID NO: 646736 - protein, 15 aa, Homo sapiens
  CDR3 for beta chain variable domain of TCR clone 323368 (TRBV5-1, TRBJ2-7)
CASSLNGGPAREQYF

SEQ ID NO: 646737 - protein, 14 aa, Homo sapiens
  CDR3 for alpha chain variable domain of TCR clone 323369 (TRAV12-1, TRAJ8)
CVVNSNTVFQKLVF

SEQ ID NO: 646738 - protein, 17 aa, Homo sapiens
  CDR3 for beta chain variable domain of TCR clone 323369 (TRBV7-8, TRBJ2-6)
CASSAGTGGAGANVLTF

SEQ ID NO: 646739 - protein, 12 aa, Homo sapiens
  CDR3 for alpha chain variable domain of TCR clone 323370 (TRAV17, TRAJ20)
CAALSNDYKLSF

SEQ ID NO: 646740 - protein, 16 aa, Homo sapiens
  CDR3 for beta chain variable domain of TCR clone 323370 (TRBV24-1, TRBJ2-3)
CATSDPGTGATDTQYF

SEQ ID NO: 646741 - protein, 14 aa, Homo sapiens
  CDR3 for alpha chain variable domain of TCR clone 323371 (TRAV8-4, TRAJ13)
CAVTLSGGYQKVTF

SEQ ID NO: 646742 - protein, 14 aa, Homo sapiens
  CDR3 for beta chain variable domain of TCR clone 323371 (TRBV7-2, TRBJ1-2)
CASSQTGSTYGYTI

SEQ ID NO: 646743 - protein, 14 aa, Homo sapiens
  CDR3 for alpha chain variable domain of TCR clone 323372 (TRAV23/DV6, TRAJ17)
CAARCRAAGNKLTF

SEQ ID NO: 646744 - protein, 13 aa, Homo sapiens
  CDR3 for beta chain variable domain of TCR clone 323372 (TRBV7-6, TRBJ1-2)
CASSLVADYGYTF

SEQ ID NO: 646745 - protein, 21 aa, Homo sapiens
  CDR3 for alpha chain variable domain of TCR clone 323373 (TRAV1-1, TRAJ6)
CLLLLRCERLERTGGSYIPTF

SEQ ID NO: 646746 - protein, 13 aa, Homo sapiens
  CDR3 for beta chain variable domain of TCR clone 323373 (TRBV10-2, TRBJ2-7)
CASGASGGDEQYF

SEQ ID NO: 646747 - protein, 16 aa, Homo sapiens
  CDR3 for alpha chain variable domain of TCR clone 323374 (TRAV16, TRAJ4)
CALSRMFSVGYNKLIF

SEQ ID NO: 646748 - protein, 16 aa, Homo sapiens
  CDR3 for beta chain variable domain of TCR clone 323374 (TRBV24-1, TRBJ2-3)
CATSDPWTGATDTQYF

SEQ ID NO: 646749 - protein, 14 aa, Homo sapiens
  CDR3 for alpha chain variable domain of TCR clone 323375 (TRAV3, TRAJ27)
CAVRDDTNAGKLTF

SEQ ID NO: 646750 - protein, 15 aa, Homo sapiens
  CDR3 for beta chain variable domain of TCR clone 323375 (TRBV7-7, TRBJ2-2)
CATSKLAKNTGELFF

SEQ ID NO: 646751 - protein, 11 aa, Homo sapiens
  CDR3 for alpha chain variable domain of TCR clone 323376 (TRAV12-3, TRAJ43)
CAMSVSNDMRY

SEQ ID NO: 646752 - protein, 20 aa, Homo sapiens
  CDR3 for beta chain variable domain of TCR clone 323376 (TRBV28, TRBJ2-1)
CASTPIGRSPGLAGGNEQFF

SEQ ID NO: 646753 - protein, 17 aa, Homo sapiens
  CDR3 for alpha chain variable domain of TCR clone 323377 (TRAV26-1, TRAJ22)
CIVRVPSHSGSARQLTF

SEQ ID NO: 646754 - protein, 16 aa, Homo sapiens
  CDR3 for beta chain variable domain of TCR clone 323377 (TRBV28, TRBJ2-1)
CASRRSERVVGNEQFF

SEQ ID NO: 646755 - protein, 16 aa, Homo sapiens
  CDR3 for alpha chain variable domain of TCR clone 323378 (TRAV30, TRAJ24)
CGTEIVDADSWGKFQF

SEQ ID NO: 646756 - protein, 16 aa, Homo sapiens
  CDR3 for beta chain variable domain of TCR clone 323378 (TRBV4-1, TRBJ1-1)
CASSQDAGMGNTEVFF

SEQ ID NO: 646757 - protein, 17 aa, Homo sapiens
  CDR3 for alpha chain variable domain of TCR clone 323379 (TRAV26-1, TRAJ53)
CIVIVDDSGGSNYKMTF

SEQ ID NO: 646758 - protein, 15 aa, Homo sapiens
  CDR3 for beta chain variable domain of TCR clone 323379 (TRBV20-1, TRBJ2-7)
CSARVPAAYFYEQYF

SEQ ID NO: 646759 - protein, 12 aa, Homo sapiens
  CDR3 for alpha chain variable domain of TCR clone 323380 (TRAV12-1, TRAJ20)
CVVNPDDDKLSF

SEQ ID NO: 646760 - protein, 12 aa, Homo sapiens
  CDR3 for beta chain variable domain of TCR clone 323380 (TRBV11-2, TRBJ2-2)
RASSLGGGELFF

SEQ ID NO: 646761 - protein, 10 aa, Homo sapiens
  CDR3 for alpha chain variable domain of TCR clone 323381 (TRAV1-2, TRAJ20)
CALNDYKLSF

SEQ ID NO: 646762 - protein, 16 aa, Homo sapiens
  CDR3 for beta chain variable domain of TCR clone 323381 (TRBV7-9, TRBJ2-1)
CASSLDPGLAIDEQFF

SEQ ID NO: 646763 - protein, 14 aa, Homo sapiens
  CDR3 for alpha chain variable domain of TCR clone 323382 (TRAV17, TRAJ37)
CATDGSSNTGKLIF

SEQ ID NO: 646764 - protein, 15 aa, Homo sapiens
  CDR3 for beta chain variable domain of TCR clone 323382 (TRBV5-1, TRBJ2-7)
CASSLNGGPAREQYF

SEQ ID NO: 646765 - protein, 14 aa, Homo sapiens
  CDR3 for alpha chain variable domain of TCR clone 323383 (TRAV12-1, TRAJ12)
CVVTRMDSSYKLIF

SEQ ID NO: 646766 - protein, 14 aa, Homo sapiens
  CDR3 for beta chain variable domain of TCR clone 323383 (TRBV19, TRBJ1-1)
CASSKVTGVTEAFF

SEQ ID NO: 646767 - protein, 16 aa, Homo sapiens
  CDR3 for alpha chain variable domain of TCR clone 323384 (TRAV30, TRAJ24)
CGTEIVYADSWGKFQF

SEQ ID NO: 646768 - protein, 17 aa, Homo sapiens
  CDR3 for beta chain variable domain of TCR clone 323384 (TRBV20-1, TRBJ2-1)
CSARDPLAGVWDNEQFF

SEQ ID NO: 646769 - protein, 14 aa, Homo sapiens
  CDR3 for alpha chain variable domain of TCR clone 323385 (TRAV35, TRAJ24)
CAGPRRDSWGKLQF

SEQ ID NO: 646770 - protein, 12 aa, Homo sapiens
  CDR3 for beta chain variable domain of TCR clone 323385 (TRBV12-4, TRBJ2-3)
CASSSGQDTQYF

SEQ ID NO: 646771 - protein, 12 aa, Homo sapiens
  CDR3 for alpha chain variable domain of TCR clone 323386 (TRAV36/DV7, TRAJ37)
CACYGNTGKLIF

SEQ ID NO: 646772 - protein, 18 aa, Homo sapiens
  CDR3 for beta chain variable domain of TCR clone 323386 (TRBV11-2, TRBJ2-3)
CASSLGGASRGAPNTQYF

SEQ ID NO: 646773 - protein, 12 aa, Homo sapiens
  CDR3 for alpha chain variable domain of TCR clone 323387 (TRAV2, TRAJ31)
CAVEDNNARIMF

SEQ ID NO: 646774 - protein, 14 aa, Homo sapiens
  CDR3 for beta chain variable domain of TCR clone 323387 (TRBV19, TRBJ2-5)
CASSMTGQQEAQFF

SEQ ID NO: 646775 - protein, 14 aa, Homo sapiens
  CDR3 for alpha chain variable domain of TCR clone 323388 (TRAV3, TRAJ22)
CAVRDYGSARQLTF

SEQ ID NO: 646776 - protein, 22 aa, Homo sapiens
  CDR3 for beta chain variable domain of TCR clone 323388 (TRBV11-2, TRBJ1-4)
CASSLDITRRGIPRKDNEKLFF

SEQ ID NO: 646777 - protein, 15 aa, Homo sapiens
  CDR3 for alpha chain variable domain of TCR clone 323389 (TRAV12-2, TRAJ53)
FAVNGGGGSNYKLTF

SEQ ID NO: 646778 - protein, 17 aa, Homo sapiens
  CDR3 for beta chain variable domain of TCR clone 323389 (TRBV7-3, TRBJ2-3)
CASSLMKRMRGADTQYF

SEQ ID NO: 646779 - protein, 13 aa, Homo sapiens
  CDR3 for alpha chain variable domain of TCR clone 323390 (TRAV8-6, TRAJ49)
CAVITNTGNLFYF

SEQ ID NO: 646780 - protein, 14 aa, Homo sapiens
  CDR3 for beta chain variable domain of TCR clone 323390 (TRBV28, TRBJ2-7)
CAIVGQGNLYEQYF

SEQ ID NO: 646781 - protein, 16 aa, Homo sapiens
  CDR3 for alpha chain variable domain of TCR clone 323391 (TRAV30, TRAJ24)
CGTEIVDDDSWGKFQF

SEQ ID NO: 646782 - protein, 17 aa, Homo sapiens
  CDR3 for beta chain variable domain of TCR clone 323391 (TRBV20-1, TRBJ2-2)
CSASGSGQGGLTGELFF

SEQ ID NO: 646783 - protein, 13 aa, Homo sapiens
  CDR3 for alpha chain variable domain of TCR clone 323392 (TRAV20, TRAJ34)
CAVSSYNTDKLIF

SEQ ID NO: 646784 - protein, 13 aa, Homo sapiens
  CDR3 for beta chain variable domain of TCR clone 323392 (TRBV7-9, TRBJ1-2)
CAISLKQNYGYTF

SEQ ID NO: 646785 - protein, 14 aa, Homo sapiens
  CDR3 for alpha chain variable domain of TCR clone 323393 (TRAV3, TRAJ8)
CAVSLNTGFQKLVF

SEQ ID NO: 646786 - protein, 14 aa, Homo sapiens
  CDR3 for beta chain variable domain of TCR clone 323393 (TRBV7-2, TRBJ2-7)
CASSLPPGQGPQYF

SEQ ID NO: 646787 - protein, 18 aa, Homo sapiens
  CDR3 for alpha chain variable domain of TCR clone 323394 (TRAV12-3, TRAJ52)
CAMSVGGAGGTSYGKLTF

SEQ ID NO: 646788 - protein, 15 aa, Homo sapiens
  CDR3 for beta chain variable domain of TCR clone 323394 (TRBV6-6, TRBJ2-7)
CASSYSYGGSYEQYF

SEQ ID NO: 646789 - protein, 13 aa, Homo sapiens
  CDR3 for alpha chain variable domain of TCR clone 323395 (TRAV38-1, TRAJ52)
CAFRGTSYGKLTF

SEQ ID NO: 646790 - protein, 15 aa, Homo sapiens
  CDR3 for beta chain variable domain of TCR clone 323395 (TRBV7-8, TRBJ2-5)
CASSDSAGSQETQYF

SEQ ID NO: 646791 - protein, 13 aa, Homo sapiens
  CDR3 for alpha chain variable domain of TCR clone 323396 (TRAV27, TRAJ42)
CAGARGSQGNSIF

SEQ ID NO: 646792 - protein, 15 aa, Homo sapiens
  CDR3 for beta chain variable domain of TCR clone 323396 (TRBV10-3, TRBJ2-2)
CAIRTDREDTGELFF

SEQ ID NO: 646793 - protein, 13 aa, Homo sapiens
  CDR3 for alpha chain variable domain of TCR clone 323397 (TRAV12-2, TRAJ20)
CAVNRFDDYKLSF

SEQ ID NO: 646794 - protein, 16 aa, Homo sapiens
  CDR3 for beta chain variable domain of TCR clone 323397 (TRBV29-1, TRBJ2-7)
CSVEDAEDGTAYEQYF

SEQ ID NO: 646795 - protein, 11 aa, Homo sapiens
  CDR3 for alpha chain variable domain of TCR clone 323398 (TRAV27, TRAJ47)
SIVDYGNKLVF

SEQ ID NO: 646796 - protein, 18 aa, Homo sapiens
  CDR3 for beta chain variable domain of TCR clone 323398 (TRBV2, TRBJ2-1)
CASRGLAGGPRTYNEQSF

SEQ ID NO: 646797 - protein, 11 aa, Homo sapiens
  CDR3 for alpha chain variable domain of TCR clone 323399 (TRAV20, TRAJ40)
CAVGGTYKYIF

SEQ ID NO: 646798 - protein, 15 aa, Homo sapiens
  CDR3 for beta chain variable domain of TCR clone 323399 (TRBV6-3, TRBJ2-2)
CASSFLATLTGELFS

SEQ ID NO: 646799 - protein, 11 aa, Homo sapiens
  CDR3 for alpha chain variable domain of TCR clone 323400 (TRAV2, TRAJ13)
CASGGYQKVTF

SEQ ID NO: 646800 - protein, 15 aa, Homo sapiens
  CDR3 for beta chain variable domain of TCR clone 323400 (TRBV6-3, TRBJ2-3)
RLIHYSVGQADTQYL

SEQ ID NO: 646801 - protein, 13 aa, Homo sapiens
  CDR3 for alpha chain variable domain of TCR clone 323401 (TRAV2, TRAJ15)
CAVASQAGTALIF

SEQ ID NO: 646802 - protein, 15 aa, Homo sapiens
  CDR3 for beta chain variable domain of TCR clone 323401 (TRBV6-6, TRBJ2-5)
CASSPGGGLEETQYF

SEQ ID NO: 646803 - protein, 13 aa, Homo sapiens
  CDR3 for alpha chain variable domain of TCR clone 323402 (TRAV8-6, TRAJ54)
CAVSDQGARKLVF

SEQ ID NO: 646804 - protein, 17 aa, Homo sapiens
  CDR3 for beta chain variable domain of TCR clone 323402 (TRBV19, TRBJ1-1)
CASSIAGRGLMNTEAFF

SEQ ID NO: 646805 - protein, 14 aa, Homo sapiens
  CDR3 for alpha chain variable domain of TCR clone 323403 (TRAV26-1, TRAJ11)
CIVPLYSGYSTLTF

SEQ ID NO: 646806 - protein, 14 aa, Homo sapiens
  CDR3 for beta chain variable domain of TCR clone 323403 (TRBV7-3, TRBJ2-1)
CASSLAGGTNEQFF

SEQ ID NO: 646807 - protein, 11 aa, Homo sapiens
  CDR3 for alpha chain variable domain of TCR clone 323404 (TRAV12-3, TRAJ27)
CAMANAGKSTF

SEQ ID NO: 646808 - protein, 15 aa, Homo sapiens
  CDR3 for beta chain variable domain of TCR clone 323404 (TRBV19, TRBJ2-1)
CASNAQGLAGREQFF

SEQ ID NO: 646809 - protein, 13 aa, Homo sapiens
  CDR3 for alpha chain variable domain of TCR clone 323405 (TRAV26-1, TRAJ34)
CIVRPWITDNLIF

SEQ ID NO: 646810 - protein, 13 aa, Homo sapiens
  CDR3 for beta chain variable domain of TCR clone 323405 (TRBV5-1, TRBJ2-1)
CASSLGSYNEQFF

SEQ ID NO: 646811 - protein, 11 aa, Homo sapiens
  CDR3 for alpha chain variable domain of TCR clone 323406 (TRAV2, TRAJ13)
CAYGGYQKVTF

SEQ ID NO: 646812 - protein, 16 aa, Homo sapiens
  CDR3 for beta chain variable domain of TCR clone 323406 (TRBV19, TRBJ2-1)
CASSKAGPSSYNEQFF

SEQ ID NO: 646813 - protein, 14 aa, Homo sapiens
  CDR3 for alpha chain variable domain of TCR clone 323407 (TRAV1-2, TRAJ8)
GAVREDTGFQKLVF

SEQ ID NO: 646814 - protein, 22 aa, Homo sapiens
  CDR3 for beta chain variable domain of TCR clone 323407 (TRBV7-3, TRBJ2-2)
GGTQPCISVPAAQEDTPGSCFF

SEQ ID NO: 646815 - protein, 13 aa, Homo sapiens
  CDR3 for alpha chain variable domain of TCR clone 323408 (TRAV29/DV5, TRAJ31)
CAASRNNNPRLMF

SEQ ID NO: 646816 - protein, 13 aa, Homo sapiens
  CDR3 for beta chain variable domain of TCR clone 323408 (TRBV7-2, TRBJ2-4)
CASSREHANIQYF

SEQ ID NO: 646817 - protein, 15 aa, Homo sapiens
  CDR3 for alpha chain variable domain of TCR clone 323409 (TRAV23/DV6, )
CAADIQNPDPAVYQL

SEQ ID NO: 646818 - protein, 14 aa, Homo sapiens
  CDR3 for beta chain variable domain of TCR clone 323409 (TRBV5-7, TRBJ1-6)
CASSFAGHNSPLHI

SEQ ID NO: 646819 - protein, 13 aa, Homo sapiens
  CDR3 for alpha chain variable domain of TCR clone 323410 (TRAV2, TRAJ16)
CAVKRSDGQKLLF

SEQ ID NO: 646820 - protein, 15 aa, Homo sapiens
  CDR3 for beta chain variable domain of TCR clone 323410 (TRBV20-1, TRBJ2-5)
CSAIKGQGSQETQYF

SEQ ID NO: 646821 - protein, 14 aa, Homo sapiens
  CDR3 for alpha chain variable domain of TCR clone 323411 (TRAV17, TRAJ56)
CATVPAGANSKLTF

SEQ ID NO: 646822 - protein, 13 aa, Homo sapiens
  CDR3 for beta chain variable domain of TCR clone 323411 (TRBV12-5, TRBJ2-3)
CASGDRQSDTQYF

SEQ ID NO: 646823 - protein, 14 aa, Homo sapiens
  CDR3 for alpha chain variable domain of TCR clone 323412 (TRAV29/DV5, TRAJ36)
CAARRKTGANNLFF

SEQ ID NO: 646824 - protein, 14 aa, Homo sapiens
  CDR3 for beta chain variable domain of TCR clone 323412 (TRBV12-5, TRBJ2-5)
CASGSRTHQETQDF

SEQ ID NO: 646825 - protein, 14 aa, Homo sapiens
  CDR3 for alpha chain variable domain of TCR clone 323413 (TRAV35, TRAJ13)
CAGSPAGGYQKVTF

SEQ ID NO: 646826 - protein, 13 aa, Homo sapiens
  CDR3 for beta chain variable domain of TCR clone 323413 (TRBV29-1, TRBJ1-1)
CSVGDSRNTEAFF

SEQ ID NO: 646827 - protein, 14 aa, Homo sapiens
  CDR3 for alpha chain variable domain of TCR clone 323414 (TRAV29/DV5, TRAJ45)
CATSFRGGADGLTF

SEQ ID NO: 646828 - protein, 13 aa, Homo sapiens
  CDR3 for beta chain variable domain of TCR clone 323414 (TRBV7-9, TRBJ1-2)
CASSLKQNYGYTF

SEQ ID NO: 646829 - protein, 12 aa, Homo sapiens
  CDR3 for alpha chain variable domain of TCR clone 323415 (TRAV17, TRAJ57)
CATDGGSEKLVF

SEQ ID NO: 646830 - protein, 12 aa, Homo sapiens
  CDR3 for beta chain variable domain of TCR clone 323415 (TRBV12-4, TRBJ1-2)
CASSFIWLHLWF

SEQ ID NO: 646831 - protein, 14 aa, Homo sapiens
  CDR3 for alpha chain variable domain of TCR clone 323416 (TRAV20, TRAJ42)
CAVQAGGSQGNLIF

SEQ ID NO: 646832 - protein, 15 aa, Homo sapiens
  CDR3 for beta chain variable domain of TCR clone 323416 (TRBV7-3, TRBJ2-1)
CASSPTGGGEVEQFF

SEQ ID NO: 646833 - protein, 15 aa, Homo sapiens
  CDR3 for alpha chain variable domain of TCR clone 323417 (TRAV12-1, TRAJ44)
CVVDLPTGTASKLTF

SEQ ID NO: 646834 - protein, 13 aa, Homo sapiens
  CDR3 for beta chain variable domain of TCR clone 323417 (TRBV6-5, TRBJ2-5)
CASSPQGGETQYF

SEQ ID NO: 646835 - protein, 14 aa, Homo sapiens
  CDR3 for alpha chain variable domain of TCR clone 323418 (TRAV8-3, TRAJ4)
CAVGAAGGDNKLIF

SEQ ID NO: 646836 - protein, 14 aa, Homo sapiens
  CDR3 for beta chain variable domain of TCR clone 323418 (TRBV11-2, TRBJ2-3)
CASSRLARTDTQYF

SEQ ID NO: 646837 - protein, 10 aa, Homo sapiens
  CDR3 for alpha chain variable domain of TCR clone 323419 (TRAV26-1, TRAJ22)
CIGGSFLVLQ

SEQ ID NO: 646838 - protein, 11 aa, Homo sapiens
  CDR3 for beta chain variable domain of TCR clone 323419 (TRBV19, TRBJ2-5)
CASSIGQVTDF

SEQ ID NO: 646839 - protein, 13 aa, Homo sapiens
  CDR3 for alpha chain variable domain of TCR clone 323420 (TRAV2, TRAJ21)
CAVEDLNFNKFYF

SEQ ID NO: 646840 - protein, 16 aa, Homo sapiens
  CDR3 for beta chain variable domain of TCR clone 323420 (TRBV7-3, TRBJ2-2)
CASSLKRGTLSGELFF

SEQ ID NO: 646841 - protein, 10 aa, Homo sapiens
  CDR3 for alpha chain variable domain of TCR clone 323421 (TRAV2, TRAJ34)
CAVVSDKLIF

SEQ ID NO: 646842 - protein, 20 aa, Homo sapiens
  CDR3 for beta chain variable domain of TCR clone 323421 (TRBV19, TRBJ2-1)
CASSISRTVTSTRLNNEQFF

SEQ ID NO: 646843 - protein, 18 aa, Homo sapiens
  CDR3 for alpha chain variable domain of TCR clone 323422 (TRAV12-3, TRAJ52)
CAMSVGGAGGTSYGKLTF

SEQ ID NO: 646844 - protein, 11 aa, Homo sapiens
  CDR3 for beta chain variable domain of TCR clone 323422 (TRBV11-2, TRBJ2-2)
CASSLPGELLF

SEQ ID NO: 646845 - protein, 13 aa, Homo sapiens
  CDR3 for alpha chain variable domain of TCR clone 323423 (TRAV36/DV7, TRAJ37)
CAVFSSNTGKLIF

SEQ ID NO: 646846 - protein, 16 aa, Homo sapiens
  CDR3 for beta chain variable domain of TCR clone 323423 (TRBV3-1, TRBJ2-5)
CASSPVQFNGFGTQYF

SEQ ID NO: 646847 - protein, 12 aa, Homo sapiens
  CDR3 for alpha chain variable domain of TCR clone 323424 (TRAV13-1, TRAJ34)
CAASKGTDKLIF

SEQ ID NO: 646848 - protein, 18 aa, Homo sapiens
  CDR3 for beta chain variable domain of TCR clone 323424 (TRBV7-9, TRBJ2-7)
CASSLTTSGRRTWYEQYF

SEQ ID NO: 646849 - protein, 12 aa, Homo sapiens
  CDR3 for alpha chain variable domain of TCR clone 323425 (TRAV12-3, TRAJ17)
CAMTLTGNNLPF

SEQ ID NO: 646850 - protein, 15 aa, Homo sapiens
  CDR3 for beta chain variable domain of TCR clone 323425 (TRBV20-1, TRBJ2-7)
CSARYRVSGMDEQYF

SEQ ID NO: 646851 - protein, 14 aa, Homo sapiens
  CDR3 for alpha chain variable domain of TCR clone 323426 (TRAV13-1, TRAJ35)
CAASKGGFGNVLHC

SEQ ID NO: 646852 - protein, 17 aa, Homo sapiens
  CDR3 for beta chain variable domain of TCR clone 323426 (TRBV4-1, TRBJ2-7)
CASSQPTSGSRGYEQYF

SEQ ID NO: 646853 - protein, 16 aa, Homo sapiens
  CDR3 for alpha chain variable domain of TCR clone 323427 (TRAV8-3, TRAJ18)
CAVGARRGSTLGGLYF

SEQ ID NO: 646854 - protein, 14 aa, Homo sapiens
  CDR3 for beta chain variable domain of TCR clone 323427 (TRBV5-4, TRBJ1-3)
CASSSQSAGNTIYF

SEQ ID NO: 646855 - protein, 14 aa, Homo sapiens
  CDR3 for alpha chain variable domain of TCR clone 323428 (TRAV21, TRAJ15)
CAVSLNQAGTALIF

SEQ ID NO: 646856 - protein, 19 aa, Homo sapiens
  CDR3 for beta chain variable domain of TCR clone 323428 (TRBV7-9, TRBJ2-1)
CASSHNRGALLRSYNEQFF

SEQ ID NO: 646857 - protein, 14 aa, Homo sapiens
  CDR3 for alpha chain variable domain of TCR clone 323429 (TRAV1-2, TRAJ16)
CAVNRFSDGLKLLF

SEQ ID NO: 646858 - protein, 13 aa, Homo sapiens
  CDR3 for beta chain variable domain of TCR clone 323429 (TRBV4-1, TRBJ2-1)
CASSQAGGDEQFF

SEQ ID NO: 646859 - protein, 18 aa, Homo sapiens
  CDR3 for alpha chain variable domain of TCR clone 323430 (TRAV21, TRAJ52)
CAVRPSPAGGTSYGKLTF

SEQ ID NO: 646860 - protein, 16 aa, Homo sapiens
  CDR3 for beta chain variable domain of TCR clone 323430 (TRBV19, TRBJ2-1)
CASSKAGQSSYNEQFF

SEQ ID NO: 646861 - protein, 16 aa, Homo sapiens
  CDR3 for alpha chain variable domain of TCR clone 323431 (TRAV17, TRAJ52)
CATSNAGGTSYGKLTF

SEQ ID NO: 646862 - protein, 13 aa, Homo sapiens
  CDR3 for beta chain variable domain of TCR clone 323431 (TRBV27, TRBJ1-6)
CAGSLALVSPLHF

SEQ ID NO: 646863 - protein, 12 aa, Homo sapiens
  CDR3 for alpha chain variable domain of TCR clone 323432 (TRAV26-1, TRAJ13)
CIVSRGYQKVTF

SEQ ID NO: 646864 - protein, 16 aa, Homo sapiens
  CDR3 for beta chain variable domain of TCR clone 323432 (TRBV6-1, TRBJ2-5)
CASSETLDRGAETQYF

SEQ ID NO: 646865 - protein, 11 aa, Homo sapiens
  CDR3 for alpha chain variable domain of TCR clone 323433 (TRAV17, TRAJ43)
CATPRSNDMRF

SEQ ID NO: 646866 - protein, 15 aa, Homo sapiens
  CDR3 for beta chain variable domain of TCR clone 323433 (TRBV6-1, TRBJ2-3)
CASSERGGITDTQYF

SEQ ID NO: 646867 - protein, 14 aa, Homo sapiens
  CDR3 for alpha chain variable domain of TCR clone 323434 (TRAV1-2, TRAJ16)
CAVNRFSDGQRLLF

SEQ ID NO: 646868 - protein, 15 aa, Homo sapiens
  CDR3 for beta chain variable domain of TCR clone 323434 (TRBV6-3, TRBJ2-7)
CASSSPGTVFYEQYF

SEQ ID NO: 646869 - protein, 11 aa, Homo sapiens
  CDR3 for alpha chain variable domain of TCR clone 323435 (TRAV12-3, TRAJ17)
CAMTLTGKLTF

SEQ ID NO: 646870 - protein, 15 aa, Homo sapiens
  CDR3 for beta chain variable domain of TCR clone 323435 (TRBV20-1, TRBJ2-7)
CSARDRISGMDEQYF

SEQ ID NO: 646871 - protein, 15 aa, Homo sapiens
  CDR3 for alpha chain variable domain of TCR clone 323436 (TRAV3, TRAJ9)
CAVRDSDTGGFKTIF

SEQ ID NO: 646872 - protein, 16 aa, Homo sapiens
  CDR3 for beta chain variable domain of TCR clone 323436 (TRBV15, TRBJ2-5)
CATSPTTGQGMETQYF

SEQ ID NO: 646873 - protein, 17 aa, Homo sapiens
  CDR3 for alpha chain variable domain of TCR clone 323437 (TRAV13-1, TRAJ52)
CAAGRNAGGTSYGKLTF

SEQ ID NO: 646874 - protein, 15 aa, Homo sapiens
  CDR3 for beta chain variable domain of TCR clone 323437 (TRBV7-2, TRBJ1-1)
CASSFAGDRDTEAFF

SEQ ID NO: 646875 - protein, 12 aa, Homo sapiens
  CDR3 for alpha chain variable domain of TCR clone 323438 (TRAV12-2, TRAJ10)
WGVTGGGNKLTF

SEQ ID NO: 646876 - protein, 16 aa, Homo sapiens
  CDR3 for beta chain variable domain of TCR clone 323438 (TRBV24-1, TRBJ2-3)
CATSDRRQDLTDTEYF

SEQ ID NO: 646877 - protein, 18 aa, Homo sapiens
  CDR3 for alpha chain variable domain of TCR clone 323439 (TRAV13-1, TRAJ52)
CAADFPNAGCTSYGKLTF

SEQ ID NO: 646878 - protein, 14 aa, Homo sapiens
  CDR3 for beta chain variable domain of TCR clone 323439 (TRBV11-2, TRBJ2-3)
CASSLYAGRDTQYF

SEQ ID NO: 646879 - protein, 15 aa, Homo sapiens
  CDR3 for alpha chain variable domain of TCR clone 323440 (TRAV12-1, TRAJ4)
CVVTPWMGGYNKLIF

SEQ ID NO: 646880 - protein, 12 aa, Homo sapiens
  CDR3 for beta chain variable domain of TCR clone 323440 (TRBV7-3, TRBJ2-1)
CASSLGFNEQFF

SEQ ID NO: 646881 - protein, 14 aa, Homo sapiens
  CDR3 for alpha chain variable domain of TCR clone 323441 (TRAV29/DV5, TRAJ20)
CTASAPIEDYKLSF

SEQ ID NO: 646882 - protein, 15 aa, Homo sapiens
  CDR3 for beta chain variable domain of TCR clone 323441 (TRBV6-1, TRBJ2-1)
CASSEAAYSYNEQFF

SEQ ID NO: 646883 - protein, 13 aa, Homo sapiens
  CDR3 for alpha chain variable domain of TCR clone 323442 (TRAV21, TRAJ20)
CAVGLRVDYKLSF

SEQ ID NO: 646884 - protein, 15 aa, Homo sapiens
  CDR3 for beta chain variable domain of TCR clone 323442 (TRBV11-1, TRBJ2-7)
CASSRGRFKTYEQYF

SEQ ID NO: 646885 - protein, 12 aa, Homo sapiens
  CDR3 for alpha chain variable domain of TCR clone 323443 (TRAV10, TRAJ43)
CVVLRVGNDMRF

SEQ ID NO: 646886 - protein, 15 aa, Homo sapiens
  CDR3 for beta chain variable domain of TCR clone 323443 (TRBV2, TRBJ2-7)
CASSEGLARSYEQYF

SEQ ID NO: 646887 - protein, 14 aa, Homo sapiens
  CDR3 for alpha chain variable domain of TCR clone 323444 (TRAV12-3, TRAJ33)
CAMSVPGSNYQLIW

SEQ ID NO: 646888 - protein, 16 aa, Homo sapiens
  CDR3 for beta chain variable domain of TCR clone 323444 (TRBV4-2, TRBJ1-1)
CASSQAGFGMNTEAFF

SEQ ID NO: 646889 - protein, 14 aa, Homo sapiens
  CDR3 for alpha chain variable domain of TCR clone 323445 (TRAV1-2, TRAJ16)
CAVNRFSDGQKLLF

SEQ ID NO: 646890 - protein, 14 aa, Homo sapiens
  CDR3 for beta chain variable domain of TCR clone 323445 (TRBV5-5, TRBJ1-2)
CASSLDPYSYGYTF

SEQ ID NO: 646891 - protein, 16 aa, Homo sapiens
  CDR3 for alpha chain variable domain of TCR clone 323446 (TRAV16, TRAJ52)
CALSAAGGTSYGKLTF

SEQ ID NO: 646892 - protein, 12 aa, Homo sapiens
  CDR3 for beta chain variable domain of TCR clone 323446 (TRBV12-4, TRBJ1-3)
CVSSFSGNTIYF

SEQ ID NO: 646893 - protein, 15 aa, Homo sapiens
  CDR3 for alpha chain variable domain of TCR clone 323447 (TRAV3, TRAJ32)
CAVSSYGVATTKLIF

SEQ ID NO: 646894 - protein, 16 aa, Homo sapiens
  CDR3 for beta chain variable domain of TCR clone 323447 (TRBV5-1, TRBJ2-5)
CASSLSLAGAQETQYF

SEQ ID NO: 646895 - protein, 11 aa, Homo sapiens
  CDR3 for alpha chain variable domain of TCR clone 323448 (TRAV17, TRAJ9)
CATTGGFKTIF

SEQ ID NO: 646896 - protein, 14 aa, Homo sapiens
  CDR3 for beta chain variable domain of TCR clone 323448 (TRBV7-9, TRBJ2-2)
CASSGLGDTGELFF

SEQ ID NO: 646897 - protein, 14 aa, Homo sapiens
  CDR3 for alpha chain variable domain of TCR clone 323449 (TRAV3, TRAJ9)
CAVRLNTGGFKTIF

SEQ ID NO: 646898 - protein, 17 aa, Homo sapiens
  CDR3 for beta chain variable domain of TCR clone 323449 (TRBV28, TRBJ2-5)
CASSTPEGDALQETQYF

SEQ ID NO: 646899 - protein, 14 aa, Homo sapiens
  CDR3 for alpha chain variable domain of TCR clone 323450 (TRAV38-1, TRAJ40)
CALRPTSGTYKYIF

SEQ ID NO: 646900 - protein, 16 aa, Homo sapiens
  CDR3 for beta chain variable domain of TCR clone 323450 (TRBV29-1, TRBJ2-2)
CSVEKTSEGNTGELFF

SEQ ID NO: 646901 - protein, 15 aa, Homo sapiens
  CDR3 for alpha chain variable domain of TCR clone 323451 (TRAV12-1, TRAJ42)
CVVTRDGGSQGNLIF

SEQ ID NO: 646902 - protein, 14 aa, Homo sapiens
  CDR3 for beta chain variable domain of TCR clone 323451 (TRBV11-2, TRBJ2-3)
FASSLGGGANTQYF

SEQ ID NO: 646903 - protein, 10 aa, Homo sapiens
  CDR3 for alpha chain variable domain of TCR clone 323452 (TRAV23/DV6, TRAJ57)
CAAASTLSQG

SEQ ID NO: 646904 - protein, 14 aa, Homo sapiens
  CDR3 for beta chain variable domain of TCR clone 323452 (TRBV25-1, TRBJ1-1)
CASTHLGGNTEAFF

SEQ ID NO: 646905 - protein, 11 aa, Homo sapiens
  CDR3 for alpha chain variable domain of TCR clone 323453 (TRAV3, TRAJ13)
CAVTSYQKVTF

SEQ ID NO: 646906 - protein, 15 aa, Homo sapiens
  CDR3 for beta chain variable domain of TCR clone 323453 (TRBV7-9, TRBJ2-7)
CASSSSGLAVYEQCF

SEQ ID NO: 646907 - protein, 15 aa, Homo sapiens
  CDR3 for alpha chain variable domain of TCR clone 323454 (TRAV26-1, TRAJ44)
CIARVPFGTASKLTF

SEQ ID NO: 646908 - protein, 15 aa, Homo sapiens
  CDR3 for beta chain variable domain of TCR clone 323454 (TRBV7-9, TRBJ2-7)
CASSLALAEAYEQYF

SEQ ID NO: 646909 - protein, 14 aa, Homo sapiens
  CDR3 for alpha chain variable domain of TCR clone 323455 (TRAV13-2, TRAJ17)
CAENSKAAGNKLTF

SEQ ID NO: 646910 - protein, 15 aa, Homo sapiens
  CDR3 for beta chain variable domain of TCR clone 323455 (TRBV27, TRBJ2-1)
CTSSNGGGSSNEQFF

SEQ ID NO: 646911 - protein, 14 aa, Homo sapiens
  CDR3 for alpha chain variable domain of TCR clone 323456 (TRAV8-2, TRAJ44)
CVVSLTGTASKLTF

SEQ ID NO: 646912 - protein, 15 aa, Homo sapiens
  CDR3 for beta chain variable domain of TCR clone 323456 (TRBV7-2, TRBJ2-1)
CASSFSGGIYNEQVF

SEQ ID NO: 646913 - protein, 14 aa, Homo sapiens
  CDR3 for alpha chain variable domain of TCR clone 323457 (TRAV4, TRAJ17)
CLVGDPLVGNKLTF

SEQ ID NO: 646914 - protein, 20 aa, Homo sapiens
  CDR3 for beta chain variable domain of TCR clone 323457 (TRBV20-1, TRBJ2-1)
CSARPYSVAGGPSYYNEQFL

SEQ ID NO: 646915 - protein, 11 aa, Homo sapiens
  CDR3 for alpha chain variable domain of TCR clone 323458 (TRAV13-1, TRAJ39)
CASHAGNMLTF

SEQ ID NO: 646916 - protein, 15 aa, Homo sapiens
  CDR3 for beta chain variable domain of TCR clone 323458 (TRBV6-3, TRBJ2-7)
CASSSPGTVFYEQDF

SEQ ID NO: 646917 - protein, 14 aa, Homo sapiens
  CDR3 for alpha chain variable domain of TCR clone 323459 (TRAV12-3, TRAJ57)
CAMSAWGGSQKLVF

SEQ ID NO: 646918 - protein, 14 aa, Homo sapiens
  CDR3 for beta chain variable domain of TCR clone 323459 (TRBV18, TRBJ2-5)
CASSPGVSQETQYF

SEQ ID NO: 646919 - protein, 11 aa, Homo sapiens
  CDR3 for alpha chain variable domain of TCR clone 323460 (TRAV2, TRAJ13)
CASGGYQKVTF

SEQ ID NO: 646920 - protein, 15 aa, Homo sapiens
  CDR3 for beta chain variable domain of TCR clone 323460 (TRBV9, TRBJ1-6)
CASSVAGTGDSPLDF

SEQ ID NO: 646921 - protein, 13 aa, Homo sapiens
  CDR3 for alpha chain variable domain of TCR clone 323461 (TRAV27, TRAJ37)
CAGGPSNTGKLIF

SEQ ID NO: 646922 - protein, 14 aa, Homo sapiens
  CDR3 for beta chain variable domain of TCR clone 323461 (TRBV7-8, TRBJ1-5)
CASSLGAFNQTQHF

SEQ ID NO: 646923 - protein, 13 aa, Homo sapiens
  CDR3 for alpha chain variable domain of TCR clone 323462 (TRAV17, TRAJ7)
CATGNYGNNRLAF

SEQ ID NO: 646924 - protein, 16 aa, Homo sapiens
  CDR3 for beta chain variable domain of TCR clone 323462 (TRBV4-1, TRBJ2-5)
CASSQAISASSATQYF

SEQ ID NO: 646925 - protein, 15 aa, Homo sapiens
  CDR3 for alpha chain variable domain of TCR clone 323463 (TRAV2, TRAJ44)
CAVEAYTGTASKLTF

SEQ ID NO: 646926 - protein, 17 aa, Homo sapiens
  CDR3 for beta chain variable domain of TCR clone 323463 (TRBV12-4, TRBJ2-1)
CAISPGLAGGRINEQFF

SEQ ID NO: 646927 - protein, 13 aa, Homo sapiens
  CDR3 for alpha chain variable domain of TCR clone 323464 (TRAV21, TRAJ57)
CAVIQGGAEKLVF

SEQ ID NO: 646928 - protein, 16 aa, Homo sapiens
  CDR3 for beta chain variable domain of TCR clone 323464 (TRBV29-1, TRBJ2-7)
CSVEDAEDGTAYEQYF

SEQ ID NO: 646929 - protein, 20 aa, Homo sapiens
  CDR3 for alpha chain variable domain of TCR clone 323465 (TRAV30, TRAJ32)
RNLLLRHREGYGGATNKLSF

SEQ ID NO: 646930 - protein, 13 aa, Homo sapiens
  CDR3 for beta chain variable domain of TCR clone 323465 (TRBV10-3, TRBJ2-7)
CASKLAVNYEQYF

SEQ ID NO: 646931 - protein, 13 aa, Homo sapiens
  CDR3 for alpha chain variable domain of TCR clone 323466 (TRAV2, TRAJ15)
CAVASQAGTALIF

SEQ ID NO: 646932 - protein, 12 aa, Homo sapiens
  CDR3 for beta chain variable domain of TCR clone 323466 (TRBV7-8, TRBJ2-7)
CASEGGPHGQYF

SEQ ID NO: 646933 - protein, 14 aa, Homo sapiens
  CDR3 for alpha chain variable domain of TCR clone 323467 (TRAV36/DV7, TRAJ45)
CPLYSGGGADGLTF

SEQ ID NO: 646934 - protein, 13 aa, Homo sapiens
  CDR3 for beta chain variable domain of TCR clone 323467 (TRBV7-9, TRBJ1-2)
CASSLKQNYGYTF

SEQ ID NO: 646935 - protein, 14 aa, Homo sapiens
  CDR3 for alpha chain variable domain of TCR clone 323468 (TRAV8-3, TRAJ13)
CAVGAQEGYQKVTF

SEQ ID NO: 646936 - protein, 13 aa, Homo sapiens
  CDR3 for beta chain variable domain of TCR clone 323468 (TRBV7-3, TRBJ2-1)
CASSLDSYNEQFF

SEQ ID NO: 646937 - protein, 13 aa, Homo sapiens
  CDR3 for alpha chain variable domain of TCR clone 323469 (TRAV8-3, TRAJ44)
CAVVPGTASKLTF

SEQ ID NO: 646938 - protein, 14 aa, Homo sapiens
  CDR3 for beta chain variable domain of TCR clone 323469 (TRBV5-1, TRBJ2-7)
CASSRGESLYEQYF

SEQ ID NO: 646939 - protein, 14 aa, Homo sapiens
  CDR3 for alpha chain variable domain of TCR clone 323470 (TRAV1-1, TRAJ27)
CAVIYNTNAAKSTF

SEQ ID NO: 646940 - protein, 15 aa, Homo sapiens
  CDR3 for beta chain variable domain of TCR clone 323470 (TRBV7-2, TRBJ2-1)
CASSSGLAGGNEQFF

SEQ ID NO: 646941 - protein, 13 aa, Homo sapiens
  CDR3 for alpha chain variable domain of TCR clone 323471 (TRAV21, TRAJ27)
CAARPGNAGKSTF

SEQ ID NO: 646942 - protein, 15 aa, Homo sapiens
  CDR3 for beta chain variable domain of TCR clone 323471 (TRBV7-8, TRBJ2-7)
CASSLGTGNPYEQYF

SEQ ID NO: 646943 - protein, 14 aa, Homo sapiens
  CDR3 for alpha chain variable domain of TCR clone 323472 (TRAV13-2, TRAJ32)
CAENYGGATNKLIF

SEQ ID NO: 646944 - protein, 15 aa, Homo sapiens
  CDR3 for beta chain variable domain of TCR clone 323472 (TRBV12-4, TRBJ2-5)
CASALNSGRGETQYF

SEQ ID NO: 646945 - protein, 11 aa, Homo sapiens
  CDR3 for alpha chain variable domain of TCR clone 323473 (TRAV2, TRAJ37)
CAVDTTGKLIF

SEQ ID NO: 646946 - protein, 14 aa, Homo sapiens
  CDR3 for beta chain variable domain of TCR clone 323473 (TRBV20-1, TRBJ2-1)
CSATLAGGLGEQFF

SEQ ID NO: 646947 - protein, 18 aa, Homo sapiens
  CDR3 for alpha chain variable domain of TCR clone 323474 (TRAV13-1, TRAJ52)
CAAKNPNAGGTSYGKLTF

SEQ ID NO: 646948 - protein, 12 aa, Homo sapiens
  CDR3 for beta chain variable domain of TCR clone 323474 (TRBV11-2, TRBJ2-2)
CASSLPTGELFL

SEQ ID NO: 646949 - protein, 13 aa, Homo sapiens
  CDR3 for alpha chain variable domain of TCR clone 323475 (TRAV8-4, TRAJ8)
CAVSYTGFQKLVF

SEQ ID NO: 646950 - protein, 13 aa, Homo sapiens
  CDR3 for beta chain variable domain of TCR clone 323475 (TRBV7-2, TRBJ2-5)
CASSQTSVETQYF

SEQ ID NO: 646951 - protein, 15 aa, Homo sapiens
  CDR3 for alpha chain variable domain of TCR clone 323476 (TRAV2, TRAJ9)
CAVEDRGTGGFKTIF

SEQ ID NO: 646952 - protein, 19 aa, Homo sapiens
  CDR3 for beta chain variable domain of TCR clone 323476 (TRBV12-4, TRBJ2-1)
CASTLAFDPRDKEANEQFF

SEQ ID NO: 646953 - protein, 16 aa, Homo sapiens
  CDR3 for alpha chain variable domain of TCR clone 323477 (TRAV13-1, TRAJ48)
CAASIFGTFGNEKLTF

SEQ ID NO: 646954 - protein, 14 aa, Homo sapiens
  CDR3 for beta chain variable domain of TCR clone 323477 (TRBV24-1, TRBJ1-1)
CATSIPRGDTEAFF

SEQ ID NO: 646955 - protein, 14 aa, Homo sapiens
  CDR3 for alpha chain variable domain of TCR clone 323478 (TRAV8-3, TRAJ39)
CAVGANNAGNMLTF

SEQ ID NO: 646956 - protein, 15 aa, Homo sapiens
  CDR3 for beta chain variable domain of TCR clone 323478 (TRBV9, TRBJ2-3)
CASSVVSGSTDTQYF

SEQ ID NO: 646957 - protein, 23 aa, Homo sapiens
  CDR3 for alpha chain variable domain of TCR clone 323479 (TRAV13-1, TRAJ32)
CAASNGWWCYKQAHLWNWHSACF

SEQ ID NO: 646958 - protein, 17 aa, Homo sapiens
  CDR3 for beta chain variable domain of TCR clone 323479 (TRBV15, TRBJ1-2)
CATSGREIDVVNYGYTF

SEQ ID NO: 646959 - protein, 14 aa, Homo sapiens
  CDR3 for alpha chain variable domain of TCR clone 323480 (TRAV4, TRAJ22)
CLARLSGSARQLTF

SEQ ID NO: 646960 - protein, 15 aa, Homo sapiens
  CDR3 for beta chain variable domain of TCR clone 323480 (TRBV28, TRBJ1-3)
CASSMGWASGNTIYF

SEQ ID NO: 646961 - protein, 13 aa, Homo sapiens
  CDR3 for alpha chain variable domain of TCR clone 323481 (TRAV12-3, TRAJ13)
CAMRSGGYQKVTF

SEQ ID NO: 646962 - protein, 13 aa, Homo sapiens
  CDR3 for beta chain variable domain of TCR clone 323481 (TRBV7-3, TRBJ2-5)
CASSFRGGETQYF

SEQ ID NO: 646963 - protein, 12 aa, Homo sapiens
  CDR3 for alpha chain variable domain of TCR clone 323482 (TRAV12-3, TRAJ17)
RAMTLTGNKLTF

SEQ ID NO: 646964 - protein, 15 aa, Homo sapiens
  CDR3 for beta chain variable domain of TCR clone 323482 (TRBV20-1, TRBJ2-7)
CSARDRASGMDEQYF

SEQ ID NO: 646965 - protein, 15 aa, Homo sapiens
  CDR3 for alpha chain variable domain of TCR clone 323483 (TRAV27, TRAJ45)
CAPVDSGGGSDGLTF

SEQ ID NO: 646966 - protein, 15 aa, Homo sapiens
  CDR3 for beta chain variable domain of TCR clone 323483 (TRBV2, TRBJ2-1)
CASSELAGSYNEQFF

SEQ ID NO: 646967 - protein, 12 aa, Homo sapiens
  CDR3 for alpha chain variable domain of TCR clone 323484 (TRAV13-1, TRAJ21)
CAAKEGFNKFYF

SEQ ID NO: 646968 - protein, 14 aa, Homo sapiens
  CDR3 for beta chain variable domain of TCR clone 323484 (TRBV7-2, TRBJ2-7)
CASSPKTSFYEQCF

SEQ ID NO: 646969 - protein, 15 aa, Homo sapiens
  CDR3 for alpha chain variable domain of TCR clone 323485 (TRAV12-3, TRAJ6)
CAMSATTGGSYIPTF

SEQ ID NO: 646970 - protein, 14 aa, Homo sapiens
  CDR3 for beta chain variable domain of TCR clone 323485 (TRBV13, TRBJ2-5)
CASSLGPRGETQYF

SEQ ID NO: 646971 - protein, 13 aa, Homo sapiens
  CDR3 for alpha chain variable domain of TCR clone 323486 (TRAV35, TRAJ57)
CAGSQGGSEKLVF

SEQ ID NO: 646972 - protein, 17 aa, Homo sapiens
  CDR3 for beta chain variable domain of TCR clone 323486 (TRBV7-3, TRBJ2-3)
CASSRGLAGEVPDTQYF

SEQ ID NO: 646973 - protein, 17 aa, Homo sapiens
  CDR3 for alpha chain variable domain of TCR clone 323487 (TRAV3, TRAJ6)
CAVRDGPRAGGSYIPTF

SEQ ID NO: 646974 - protein, 19 aa, Homo sapiens
  CDR3 for beta chain variable domain of TCR clone 323487 (TRBV7-9, TRBJ2-6)
CASSLESATVLPGANVLTF

SEQ ID NO: 646975 - protein, 13 aa, Homo sapiens
  CDR3 for alpha chain variable domain of TCR clone 323488 (TRAV21, TRAJ20)
CAVGLSVDYKLSF

SEQ ID NO: 646976 - protein, 13 aa, Homo sapiens
  CDR3 for beta chain variable domain of TCR clone 323488 (TRBV15, TRBJ2-1)
CVPPAEVDTARFF

SEQ ID NO: 646977 - protein, 14 aa, Homo sapiens
  CDR3 for alpha chain variable domain of TCR clone 323489 (TRAV26-1, TRAJ38)
CIADNAGNNRKRIW

SEQ ID NO: 646978 - protein, 13 aa, Homo sapiens
  CDR3 for beta chain variable domain of TCR clone 323489 (TRBV20-1, TRBJ1-1)
CSARGGGNTEAFF

SEQ ID NO: 646979 - protein, 14 aa, Homo sapiens
  CDR3 for alpha chain variable domain of TCR clone 323490 (TRAV30, TRAJ33)
CGTVAPRSNYQLIW

SEQ ID NO: 646980 - protein, 14 aa, Homo sapiens
  CDR3 for beta chain variable domain of TCR clone 323490 (TRBV19, TRBJ2-1)
CASPTFVVSGEQFF

SEQ ID NO: 646981 - protein, 15 aa, Homo sapiens
  CDR3 for alpha chain variable domain of TCR clone 323491 (TRAV8-3, TRAJ37)
CAVGGLSSNTGKLIF

SEQ ID NO: 646982 - protein, 15 aa, Homo sapiens
  CDR3 for beta chain variable domain of TCR clone 323491 (TRBV10-3, TRBJ2-7)
CATREQGIRSYEQYF

SEQ ID NO: 646983 - protein, 10 aa, Homo sapiens
  CDR3 for alpha chain variable domain of TCR clone 323492 (TRAV13-1, TRAJ7)
LIGGNNRLAF

SEQ ID NO: 646984 - protein, 14 aa, Homo sapiens
  CDR3 for beta chain variable domain of TCR clone 323492 (TRBV25-1, TRBJ1-1)
CASTHLGGNTEAFF

SEQ ID NO: 646985 - protein, 14 aa, Homo sapiens
  CDR3 for alpha chain variable domain of TCR clone 323493 (TRAV12-2, TRAJ17)
CAVLFKAAGNKLTF

SEQ ID NO: 646986 - protein, 11 aa, Homo sapiens
  CDR3 for beta chain variable domain of TCR clone 323493 (TRBV7-8, TRBJ2-7)
CASSLSLEQYF

SEQ ID NO: 646987 - protein, 16 aa, Homo sapiens
  CDR3 for alpha chain variable domain of TCR clone 323494 (TRAV16, TRAJ4)
CALSRMFSGGYNKLIF

SEQ ID NO: 646988 - protein, 13 aa, Homo sapiens
  CDR3 for beta chain variable domain of TCR clone 323494 (TRBV14, TRBJ2-7)
CASSQDRRYEQYF

SEQ ID NO: 646989 - protein, 11 aa, Homo sapiens
  CDR3 for alpha chain variable domain of TCR clone 323495 (TRAV3, TRAJ21)
FAVGNFNKFYF

SEQ ID NO: 646990 - protein, 16 aa, Homo sapiens
  CDR3 for beta chain variable domain of TCR clone 323495 (TRBV19, TRBJ2-1)
CVSSKAGPSSYNEQFF

SEQ ID NO: 646991 - protein, 13 aa, Homo sapiens
  CDR3 for alpha chain variable domain of TCR clone 323496 (TRAV20, TRAJ37)
CAGCSSNTGKLIF

SEQ ID NO: 646992 - protein, 15 aa, Homo sapiens
  CDR3 for beta chain variable domain of TCR clone 323496 (TRBV7-2, TRBJ2-1)
CASRFQADEYNEQFF

SEQ ID NO: 646993 - protein, 12 aa, Homo sapiens
  CDR3 for alpha chain variable domain of TCR clone 323497 (TRAV2, TRAJ33)
CAVPDSNYQLIW

SEQ ID NO: 646994 - protein, 20 aa, Homo sapiens
  CDR3 for beta chain variable domain of TCR clone 323497 (TRBV19, TRBJ2-1)
CASSISRTVTSTRLNNEQFV

SEQ ID NO: 646995 - protein, 14 aa, Homo sapiens
  CDR3 for alpha chain variable domain of TCR clone 323498 (TRAV12-2, TRAJ3)
CAVSLYSSASKVIF

SEQ ID NO: 646996 - protein, 14 aa, Homo sapiens
  CDR3 for beta chain variable domain of TCR clone 323498 (TRBV27, TRBJ2-1)
CAGSIAETYNEQFF

SEQ ID NO: 646997 - protein, 15 aa, Homo sapiens
  CDR3 for alpha chain variable domain of TCR clone 323499 (TRAV36/DV7, TRAJ50)
CAVEPENLLRQGVIW

SEQ ID NO: 646998 - protein, 13 aa, Homo sapiens
  CDR3 for beta chain variable domain of TCR clone 323499 (TRBV7-2, TRBJ2-7)
CASSSPSGSEQYF

SEQ ID NO: 646999 - protein, 13 aa, Homo sapiens
  CDR3 for alpha chain variable domain of TCR clone 323500 (TRAV3, TRAJ21)
CAVREPDFNKFYF

SEQ ID NO: 647000 - protein, 12 aa, Homo sapiens
  CDR3 for beta chain variable domain of TCR clone 323500 (TRBV28, TRBJ2-1)
CASSVQINEQFF

SEQ ID NO: 647001 - protein, 18 aa, Homo sapiens
  CDR3 for alpha chain variable domain of TCR clone 323501 (TRAV3, TRAJ17)
CAVRARRGGRSCRPQANF

SEQ ID NO: 647002 - protein, 14 aa, Homo sapiens
  CDR3 for beta chain variable domain of TCR clone 323501 (TRBV4-1, TRBJ2-2)
CASSQAVNTVELFF

SEQ ID NO: 647003 - protein, 13 aa, Homo sapiens
  CDR3 for alpha chain variable domain of TCR clone 323502 (TRAV1-2, TRAJ9)
CAALNTGGFNTIF

SEQ ID NO: 647004 - protein, 16 aa, Homo sapiens
  CDR3 for beta chain variable domain of TCR clone 323502 (TRBV12-4, TRBJ2-5)
CASSFFVRGRQETQYF

SEQ ID NO: 647005 - protein, 16 aa, Homo sapiens
  CDR3 for alpha chain variable domain of TCR clone 323503 (TRAV3, TRAJ37)
CAVRPNGSGNTGQLIF

SEQ ID NO: 647006 - protein, 15 aa, Homo sapiens
  CDR3 for beta chain variable domain of TCR clone 323503 (TRBV5-5, TRBJ2-7)
CASSLAAPLSYEQYF

SEQ ID NO: 647007 - protein, 15 aa, Homo sapiens
  CDR3 for alpha chain variable domain of TCR clone 323504 (TRAV17, TRAJ22)
CATGGTSGSARQLTF

SEQ ID NO: 647008 - protein, 15 aa, Homo sapiens
  CDR3 for beta chain variable domain of TCR clone 323504 (TRBV7-6, TRBJ2-5)
CASSKPTGPQETQYF

SEQ ID NO: 647009 - protein, 14 aa, Homo sapiens
  CDR3 for alpha chain variable domain of TCR clone 323505 (TRAV17, TRAJ32)
CATDPGGATNKLIF

SEQ ID NO: 647010 - protein, 13 aa, Homo sapiens
  CDR3 for beta chain variable domain of TCR clone 323505 (TRBV19, TRBJ1-2)
CASSQGQVYGYTF

SEQ ID NO: 647011 - protein, 12 aa, Homo sapiens
  CDR3 for alpha chain variable domain of TCR clone 323506 (TRAV8-3, TRAJ26)
GAGDNYGQNFVF

SEQ ID NO: 647012 - protein, 12 aa, Homo sapiens
  CDR3 for beta chain variable domain of TCR clone 323506 (TRBV11-2, TRBJ2-1)
CASSPGNNEQFF

SEQ ID NO: 647013 - protein, 13 aa, Homo sapiens
  CDR3 for alpha chain variable domain of TCR clone 323507 (TRAV13-1, TRAJ33)
CAAWTDSNYQLIW

SEQ ID NO: 647014 - protein, 16 aa, Homo sapiens
  CDR3 for beta chain variable domain of TCR clone 323507 (TRBV19, TRBJ2-1)
CASSKAGPSSYNEQFF

SEQ ID NO: 647015 - protein, 19 aa, Homo sapiens
  CDR3 for alpha chain variable domain of TCR clone 323508 (TRAV1-2, TRAJ26)
CLLPLCCERPDNYGQNFVF

SEQ ID NO: 647016 - protein, 12 aa, Homo sapiens
  CDR3 for beta chain variable domain of TCR clone 323508 (TRBV7-9, TRBJ1-4)
CASSSDREKLFF

SEQ ID NO: 647017 - protein, 19 aa, Homo sapiens
  CDR3 for alpha chain variable domain of TCR clone 323509 (TRAV26-1, TRAJ52)
CIVRAHRNAGGTSYGKLTF

SEQ ID NO: 647018 - protein, 12 aa, Homo sapiens
  CDR3 for beta chain variable domain of TCR clone 323509 (TRBV11-2, TRBJ2-2)
CASSLPTGELFF

SEQ ID NO: 647019 - protein, 14 aa, Homo sapiens
  CDR3 for alpha chain variable domain of TCR clone 323510 (TRAV12-2, TRAJ13)
CAVKKTGGYKKVTF

SEQ ID NO: 647020 - protein, 18 aa, Homo sapiens
  CDR3 for beta chain variable domain of TCR clone 323510 (TRBV24-1, TRBJ2-2)
CATSDSGQGTANTGELFF

SEQ ID NO: 647021 - protein, 16 aa, Homo sapiens
  CDR3 for alpha chain variable domain of TCR clone 323511 (TRAV12-3, TRAJ53)
CAMSPGSGGSKYKLTF

SEQ ID NO: 647022 - protein, 17 aa, Homo sapiens
  CDR3 for beta chain variable domain of TCR clone 323511 (TRBV28, TRBJ2-5)
CASSTTEGDALQETQYF

SEQ ID NO: 647023 - protein, 21 aa, Homo sapiens
  CDR3 for alpha chain variable domain of TCR clone 323512 (TRAV12-2, TRAJ20)
SPVIQPPTSAVYPSNDYKLSF

SEQ ID NO: 647024 - protein, 15 aa, Homo sapiens
  CDR3 for beta chain variable domain of TCR clone 323512 (TRBV27, TRBJ2-5)
CASSLYPRGGETQYF

SEQ ID NO: 647025 - protein, 12 aa, Homo sapiens
  CDR3 for alpha chain variable domain of TCR clone 323513 (TRAV13-1, TRAJ49)
CAASPMGNQFYF

SEQ ID NO: 647026 - protein, 13 aa, Homo sapiens
  CDR3 for beta chain variable domain of TCR clone 323513 (TRBV24-1, TRBJ2-2)
CAASDWSTGELFF

SEQ ID NO: 647027 - protein, 13 aa, Homo sapiens
  CDR3 for alpha chain variable domain of TCR clone 323514 (TRAV16, TRAJ28)
CALTGAGSYQLTF

SEQ ID NO: 647028 - protein, 16 aa, Homo sapiens
  CDR3 for beta chain variable domain of TCR clone 323514 (TRBV28, TRBJ1-5)
CACSLTGQGWNQPQNF

SEQ ID NO: 647029 - protein, 15 aa, Homo sapiens
  CDR3 for alpha chain variable domain of TCR clone 323515 (TRAV13-1, TRAJ37)
CAASRTLATQANKSL

SEQ ID NO: 647030 - protein, 15 aa, Homo sapiens
  CDR3 for beta chain variable domain of TCR clone 323515 (TRBV2, TRBJ2-1)
CASSEEREGDNEQFF

SEQ ID NO: 647031 - protein, 14 aa, Homo sapiens
  CDR3 for alpha chain variable domain of TCR clone 323516 (TRAV17, TRAJ23)
CATAFGGQGGKLIF

SEQ ID NO: 647032 - protein, 13 aa, Homo sapiens
  CDR3 for beta chain variable domain of TCR clone 323516 (TRBV3-1, TRBJ2-5)
CASSPPAAETQYF

SEQ ID NO: 647033 - protein, 13 aa, Homo sapiens
  CDR3 for alpha chain variable domain of TCR clone 323517 (TRAV8-4, TRAJ30)
SAYVFYRDDKIIF

SEQ ID NO: 647034 - protein, 16 aa, Homo sapiens
  CDR3 for beta chain variable domain of TCR clone 323517 (TRBV20-1, TRBJ1-5)
CSAELPGQQTNQPQHF

SEQ ID NO: 647035 - protein, 16 aa, Homo sapiens
  CDR3 for alpha chain variable domain of TCR clone 323518 (TRAV2, TRAJ13)
CAARILGVTRKLPLEL

SEQ ID NO: 647036 - protein, 14 aa, Homo sapiens
  CDR3 for beta chain variable domain of TCR clone 323518 (TRBV7-3, TRBJ2-1)
CASSLAGGTNEQFF

SEQ ID NO: 647037 - protein, 14 aa, Homo sapiens
  CDR3 for alpha chain variable domain of TCR clone 323519 (TRAV9-2, TRAJ53)
CALNPGGSNYKLTF

SEQ ID NO: 647038 - protein, 15 aa, Homo sapiens
  CDR3 for beta chain variable domain of TCR clone 323519 (TRBV2, TRBJ2-1)
CASSELAGSYNEQFF

SEQ ID NO: 647039 - protein, 16 aa, Homo sapiens
  CDR3 for alpha chain variable domain of TCR clone 323520 (TRAV1-2, TRAJ10)
CAVRGVLTGGGNKLTF

SEQ ID NO: 647040 - protein, 16 aa, Homo sapiens
  CDR3 for beta chain variable domain of TCR clone 323520 (TRBV20-1, TRBJ2-3)
CSAVRDRGPIADTQYF

SEQ ID NO: 647041 - protein, 15 aa, Homo sapiens
  CDR3 for alpha chain variable domain of TCR clone 323521 (TRAV1-2, TRAJ30)
CAVRPHGNRDDKIIF

SEQ ID NO: 647042 - protein, 14 aa, Homo sapiens
  CDR3 for beta chain variable domain of TCR clone 323521 (TRBV7-2, TRBJ2-7)
CASRSQGAAFEQYF

SEQ ID NO: 647043 - protein, 13 aa, Homo sapiens
  CDR3 for alpha chain variable domain of TCR clone 323522 (TRAV13-1, TRAJ5)
CAARVTGRRSLTF

SEQ ID NO: 647044 - protein, 15 aa, Homo sapiens
  CDR3 for beta chain variable domain of TCR clone 323522 (TRBV7-9, TRBJ2-7)
CASSPGGGLTYEQYF

SEQ ID NO: 647045 - protein, 14 aa, Homo sapiens
  CDR3 for alpha chain variable domain of TCR clone 323523 (TRAV36/DV7, TRAJ32)
CAVGHVGATNKLIF

SEQ ID NO: 647046 - protein, 12 aa, Homo sapiens
  CDR3 for beta chain variable domain of TCR clone 323523 (TRBV11-2, TRBJ2-1)
CASSPGNNEQFF

SEQ ID NO: 647047 - protein, 23 aa, Homo sapiens
  CDR3 for alpha chain variable domain of TCR clone 323524 (TRAV26-1, )
CIVRPLNAANNHIQNPDPAVYQL

SEQ ID NO: 647048 - protein, 13 aa, Homo sapiens
  CDR3 for beta chain variable domain of TCR clone 323524 (TRBV18, TRBJ1-1)
CASSPNGDTEAFF

SEQ ID NO: 647049 - protein, 16 aa, Homo sapiens
  CDR3 for alpha chain variable domain of TCR clone 323525 (TRAV16, TRAJ42)
CALSGLLGGSQGNLIF

SEQ ID NO: 647050 - protein, 15 aa, Homo sapiens
  CDR3 for beta chain variable domain of TCR clone 323525 (TRBV7-3, TRBJ2-3)
CASSLTAGQTDTQYF

SEQ ID NO: 647051 - protein, 12 aa, Homo sapiens
  CDR3 for alpha chain variable domain of TCR clone 323526 (TRAV13-2, TRAJ23)
CAERHRGGKLIF

SEQ ID NO: 647052 - protein, 14 aa, Homo sapiens
  CDR3 for beta chain variable domain of TCR clone 323526 (TRBV5-4, TRBJ1-1)
CGSSLDSRRDEAFF

SEQ ID NO: 647053 - protein, 11 aa, Homo sapiens
  CDR3 for alpha chain variable domain of TCR clone 323527 (TRAV1-2, TRAJ20)
CAVSNDYKLSF

SEQ ID NO: 647054 - protein, 13 aa, Homo sapiens
  CDR3 for beta chain variable domain of TCR clone 323527 (TRBV25-1, TRBJ1-1)
CASSDRGRAEAFF

SEQ ID NO: 647055 - protein, 14 aa, Homo sapiens
  CDR3 for alpha chain variable domain of TCR clone 323528 (TRAV12-3, TRAJ42)
CAMNYGGSQGNLIF

SEQ ID NO: 647056 - protein, 15 aa, Homo sapiens
  CDR3 for beta chain variable domain of TCR clone 323528 (TRBV5-6, TRBJ1-5)
CASSYGKVWDQPQHF

SEQ ID NO: 647057 - protein, 14 aa, Homo sapiens
  CDR3 for alpha chain variable domain of TCR clone 323529 (TRAV1-2, TRAJ33)
CAVRAPDSNYQLTW

SEQ ID NO: 647058 - protein, 14 aa, Homo sapiens
  CDR3 for beta chain variable domain of TCR clone 323529 (TRBV11-3, TRBJ1-6)
CASSFSGGDSPLHF

SEQ ID NO: 647059 - protein, 14 aa, Homo sapiens
  CDR3 for alpha chain variable domain of TCR clone 323530 (TRAV8-3, TRAJ9)
CAVVYNTGGSKTIF

SEQ ID NO: 647060 - protein, 14 aa, Homo sapiens
  CDR3 for beta chain variable domain of TCR clone 323530 (TRBV7-3, TRBJ2-2)
CASSSGVYTGELFF

SEQ ID NO: 647061 - protein, 15 aa, Homo sapiens
  CDR3 for alpha chain variable domain of TCR clone 323531 (TRAV14/DV4, TRAJ46)
CAMREKKSSGDKLTF

SEQ ID NO: 647062 - protein, 13 aa, Homo sapiens
  CDR3 for beta chain variable domain of TCR clone 323531 (TRBV20-1, TRBJ2-5)
CSAREAFQETHYF

SEQ ID NO: 647063 - protein, 15 aa, Homo sapiens
  CDR3 for alpha chain variable domain of TCR clone 323532 (TRAV27, TRAJ38)
CTAHRNAGNNRKLIW

SEQ ID NO: 647064 - protein, 13 aa, Homo sapiens
  CDR3 for beta chain variable domain of TCR clone 323532 (TRBV12-5, TRBJ2-3)
CASGDRQSDTQYF

SEQ ID NO: 647065 - protein, 13 aa, Homo sapiens
  CDR3 for alpha chain variable domain of TCR clone 323533 (TRAV30, TRAJ24)
CGTVTDSWGKLQF

SEQ ID NO: 647066 - protein, 17 aa, Homo sapiens
  CDR3 for beta chain variable domain of TCR clone 323533 (TRBV20-1, TRBJ2-1)
CSARDPLAGVWDNEQFF

SEQ ID NO: 647067 - protein, 14 aa, Homo sapiens
  CDR3 for alpha chain variable domain of TCR clone 323534 (TRAV12-2, TRAJ36)
CAVKISTGANNLFF

SEQ ID NO: 647068 - protein, 14 aa, Homo sapiens
  CDR3 for beta chain variable domain of TCR clone 323534 (TRBV6-6, TRBJ1-5)
CASTDGQFNQPQHF

SEQ ID NO: 647069 - protein, 16 aa, Homo sapiens
  CDR3 for alpha chain variable domain of TCR clone 323535 (TRAV13-1, TRAJ18)
CAASRMRGSTLGRLDF

SEQ ID NO: 647070 - protein, 16 aa, Homo sapiens
  CDR3 for beta chain variable domain of TCR clone 323535 (TRBV27, TRBJ1-1)
CASSSRGRTGYTEAFF

SEQ ID NO: 647071 - protein, 17 aa, Homo sapiens
  CDR3 for alpha chain variable domain of TCR clone 323536 (TRAV3, TRAJ6)
CAVSDGPRAGGSYIPTF

SEQ ID NO: 647072 - protein, 18 aa, Homo sapiens
  CDR3 for beta chain variable domain of TCR clone 323536 (TRBV25-1, TRBJ1-2)
CASSGLQNGQGLIFGYTF

SEQ ID NO: 647073 - protein, 14 aa, Homo sapiens
  CDR3 for alpha chain variable domain of TCR clone 323537 (TRAV17, TRAJ22)
CATSPSGSARQLTF

SEQ ID NO: 647074 - protein, 14 aa, Homo sapiens
  CDR3 for beta chain variable domain of TCR clone 323537 (TRBV7-8, TRBJ2-3)
CASSLEAGTDTQYF

SEQ ID NO: 647075 - protein, 14 aa, Homo sapiens
  CDR3 for alpha chain variable domain of TCR clone 323538 (TRAV12-1, TRAJ17)
CVVNYKAAGNKLTF

SEQ ID NO: 647076 - protein, 17 aa, Homo sapiens
  CDR3 for beta chain variable domain of TCR clone 323538 (TRBV20-1, TRBJ2-1)
CSASSSGLAGSYNGQSF

SEQ ID NO: 647077 - protein, 11 aa, Homo sapiens
  CDR3 for alpha chain variable domain of TCR clone 323539 (TRAV21, TRAJ11)
CAVNGYSTLTF

SEQ ID NO: 647078 - protein, 11 aa, Homo sapiens
  CDR3 for beta chain variable domain of TCR clone 323539 (TRBV11-2, TRBJ2-7)
CASSLDYEQYF

SEQ ID NO: 647079 - protein, 23 aa, Homo sapiens
  CDR3 for alpha chain variable domain of TCR clone 323540 (TRAV12-2, TRAJ43)
SLLIRDSQPNDSATYPCAFDMRF

SEQ ID NO: 647080 - protein, 18 aa, Homo sapiens
  CDR3 for beta chain variable domain of TCR clone 323540 (TRBV20-1, TRBJ2-3)
CSASGLAGGPGTTDTQYF

SEQ ID NO: 647081 - protein, 15 aa, Homo sapiens
  CDR3 for alpha chain variable domain of TCR clone 323541 (TRAV27, TRAJ38)
CAARRNAGNDRKLIW

SEQ ID NO: 647082 - protein, 13 aa, Homo sapiens
  CDR3 for beta chain variable domain of TCR clone 323541 (TRBV12-5, TRBJ2-3)
CASGDRQSDTQCF

SEQ ID NO: 647083 - protein, 12 aa, Homo sapiens
  CDR3 for alpha chain variable domain of TCR clone 323542 (TRAV3, TRAJ7)
CADLLWEQQTRF

SEQ ID NO: 647084 - protein, 16 aa, Homo sapiens
  CDR3 for beta chain variable domain of TCR clone 323542 (TRBV12-4, TRBJ1-5)
CASSRPVGGSNQPQHF

SEQ ID NO: 647085 - protein, 14 aa, Homo sapiens
  CDR3 for alpha chain variable domain of TCR clone 323543 (TRAV1-2, TRAJ16)
CDVNRFSDGQKLLF

SEQ ID NO: 647086 - protein, 15 aa, Homo sapiens
  CDR3 for beta chain variable domain of TCR clone 323543 (TRBV9, TRBJ1-6)
CASSVAGTGDSPLLF

SEQ ID NO: 647087 - protein, 14 aa, Homo sapiens
  CDR3 for alpha chain variable domain of TCR clone 323544 (TRAV12-3, TRAJ18)
CNERRGSTLVRLYF

SEQ ID NO: 647088 - protein, 13 aa, Homo sapiens
  CDR3 for beta chain variable domain of TCR clone 323544 (TRBV15, TRBJ1-6)
CATSGGLNSPLHF

SEQ ID NO: 647089 - protein, 15 aa, Homo sapiens
  CDR3 for alpha chain variable domain of TCR clone 323545 (TRAV26-2, TRAJ39)
CSLRGNNNAGNMFTF

SEQ ID NO: 647090 - protein, 15 aa, Homo sapiens
  CDR3 for beta chain variable domain of TCR clone 323545 (TRBV5-4, TRBJ1-1)
CASSSLGWANTEAFF

SEQ ID NO: 647091 - protein, 12 aa, Homo sapiens
  CDR3 for alpha chain variable domain of TCR clone 323546 (TRAV26-1, TRAJ52)
NAGGTSYGKLTF

SEQ ID NO: 647092 - protein, 16 aa, Homo sapiens
  CDR3 for beta chain variable domain of TCR clone 323546 (TRBV12-5, TRBJ2-5)
CASGPRTSGNQETQYF

SEQ ID NO: 647093 - protein, 11 aa, Homo sapiens
  CDR3 for alpha chain variable domain of TCR clone 323547 (TRAV12-1, TRAJ43)
CVVIRNTDMRF

SEQ ID NO: 647094 - protein, 16 aa, Homo sapiens
  CDR3 for beta chain variable domain of TCR clone 323547 (TRBV14, TRBJ2-1)
CASSPRLAGEGNEQFF

SEQ ID NO: 647095 - protein, 12 aa, Homo sapiens
  CDR3 for alpha chain variable domain of TCR clone 323548 (TRAV16, TRAJ49)
CALNVGGNQFYF

SEQ ID NO: 647096 - protein, 14 aa, Homo sapiens
  CDR3 for beta chain variable domain of TCR clone 323548 (TRBV7-9, TRBJ2-1)
CASRPTGLRNEQFF

SEQ ID NO: 647097 - protein, 16 aa, Homo sapiens
  CDR3 for alpha chain variable domain of TCR clone 323549 (TRAV30, TRAJ24)
CGTEIVDADSWGKFQF

SEQ ID NO: 647098 - protein, 13 aa, Homo sapiens
  CDR3 for beta chain variable domain of TCR clone 323549 (TRBV27, TRBJ2-7)
CASSLTTGYEQYF

SEQ ID NO: 647099 - protein, 11 aa, Homo sapiens
  CDR3 for alpha chain variable domain of TCR clone 323550 (TRAV12-1, TRAJ21)
CVVYNFNKFYF

SEQ ID NO: 647100 - protein, 14 aa, Homo sapiens
  CDR3 for beta chain variable domain of TCR clone 323550 (TRBV12-5, TRBJ2-5)
CASGSRTHQETQYF

SEQ ID NO: 647101 - protein, 13 aa, Homo sapiens
  CDR3 for alpha chain variable domain of TCR clone 323551 (TRAV12-3, TRAJ33)
CAMSVNSNYQLIW

SEQ ID NO: 647102 - protein, 13 aa, Homo sapiens
  CDR3 for beta chain variable domain of TCR clone 323551 (TRBV4-2, TRBJ1-1)
CASSQAGNTEAVF

SEQ ID NO: 647103 - protein, 14 aa, Homo sapiens
  CDR3 for alpha chain variable domain of TCR clone 323552 (TRAV21, TRAJ32)
CAVWDGGATNKLIF

SEQ ID NO: 647104 - protein, 13 aa, Homo sapiens
  CDR3 for beta chain variable domain of TCR clone 323552 (TRBV7-9, TRBJ1-2)
CASSLKQNYGYTF

SEQ ID NO: 647105 - protein, 11 aa, Homo sapiens
  CDR3 for alpha chain variable domain of TCR clone 323553 (TRAV12-2, TRAJ33)
CAVTSNYQLIW

SEQ ID NO: 647106 - protein, 15 aa, Homo sapiens
  CDR3 for beta chain variable domain of TCR clone 323553 (TRBV10-3, TRBJ2-3)
CAISLTSGGTDTQYF

SEQ ID NO: 647107 - protein, 18 aa, Homo sapiens
  CDR3 for alpha chain variable domain of TCR clone 323554 (TRAV21, TRAJ52)
CAVRPSPAGGTSYGKFIF

SEQ ID NO: 647108 - protein, 17 aa, Homo sapiens
  CDR3 for beta chain variable domain of TCR clone 323554 (TRBV13, TRBJ2-3)
CASSLSRVAGGRNTQYF

SEQ ID NO: 647109 - protein, 15 aa, Homo sapiens
  CDR3 for alpha chain variable domain of TCR clone 323555 (TRAV3, TRAJ3)
CAVRDRDSSASKIIF

SEQ ID NO: 647110 - protein, 17 aa, Homo sapiens
  CDR3 for beta chain variable domain of TCR clone 323555 (TRBV24-1, TRBJ2-1)
CATSDVSTSGTYNEQFF

SEQ ID NO: 647111 - protein, 14 aa, Homo sapiens
  CDR3 for alpha chain variable domain of TCR clone 323556 (TRAV1-2, TRAJ16)
CAVNRFSDGQKLLF

SEQ ID NO: 647112 - protein, 12 aa, Homo sapiens
  CDR3 for beta chain variable domain of TCR clone 323556 (TRBV28, TRBJ2-3)
CASSLYRDTQYL

SEQ ID NO: 647113 - protein, 12 aa, Homo sapiens
  CDR3 for alpha chain variable domain of TCR clone 323557 (TRAV8-3, TRAJ26)
CAGDNFGQNFVF

SEQ ID NO: 647114 - protein, 12 aa, Homo sapiens
  CDR3 for beta chain variable domain of TCR clone 323557 (TRBV11-2, TRBJ2-2)
CASSLGGGELFF

SEQ ID NO: 647115 - protein, 16 aa, Homo sapiens
  CDR3 for alpha chain variable domain of TCR clone 323558 (TRAV4, TRAJ5)
YLVGPDHGHGQESTYF

SEQ ID NO: 647116 - protein, 17 aa, Homo sapiens
  CDR3 for beta chain variable domain of TCR clone 323558 (TRBV11-2, TRBJ2-1)
CASSLYPPGVEYNEQFF

SEQ ID NO: 647117 - protein, 18 aa, Homo sapiens
  CDR3 for alpha chain variable domain of TCR clone 323559 (TRAV26-2, TRAJ45)
CILRLWGYSGGGADGLTS

SEQ ID NO: 647118 - protein, 17 aa, Homo sapiens
  CDR3 for beta chain variable domain of TCR clone 323559 (TRBV28, TRBJ2-3)
CASSPTPAGGRVDTQYF

SEQ ID NO: 647119 - protein, 13 aa, Homo sapiens
  CDR3 for alpha chain variable domain of TCR clone 323560 (TRAV8-3, TRAJ48)
CCGCNFGNEKLTF

SEQ ID NO: 647120 - protein, 12 aa, Homo sapiens
  CDR3 for beta chain variable domain of TCR clone 323560 (TRBV7-2, TRBJ2-5)
CASSQYQETQDF

SEQ ID NO: 647121 - protein, 14 aa, Homo sapiens
  CDR3 for alpha chain variable domain of TCR clone 323561 (TRAV1-2, TRAJ15)
CAVRDREAGTALIF

SEQ ID NO: 647122 - protein, 15 aa, Homo sapiens
  CDR3 for beta chain variable domain of TCR clone 323561 (TRBV7-2, TRBJ2-1)
CASSSGLAGGNEQFF

SEQ ID NO: 647123 - protein, 12 aa, Homo sapiens
  CDR3 for alpha chain variable domain of TCR clone 323562 (TRAV21, TRAJ8)
CAVNTGFQKLVF

SEQ ID NO: 647124 - protein, 17 aa, Homo sapiens
  CDR3 for beta chain variable domain of TCR clone 323562 (TRBV24-1, TRBJ2-1)
CATSDVSTSGTYNEQFF

SEQ ID NO: 647125 - protein, 14 aa, Homo sapiens
  CDR3 for alpha chain variable domain of TCR clone 323563 (TRAV10, TRAJ36)
CVVKYEGGANKLFF

SEQ ID NO: 647126 - protein, 16 aa, Homo sapiens
  CDR3 for beta chain variable domain of TCR clone 323563 (TRBV7-3, TRBJ2-2)
CASSLKRGTLSGELFF

SEQ ID NO: 647127 - protein, 14 aa, Homo sapiens
  CDR3 for alpha chain variable domain of TCR clone 323564 (TRAV1-2, TRAJ8)
CSVREDTGFQKLVF

SEQ ID NO: 647128 - protein, 15 aa, Homo sapiens
  CDR3 for beta chain variable domain of TCR clone 323564 (TRBV7-9, TRBJ1-4)
CASSARTGGNEKLFF

SEQ ID NO: 647129 - protein, 12 aa, Homo sapiens
  CDR3 for alpha chain variable domain of TCR clone 323565 (TRAV38-2/DV8, TRAJ47)
CVLLEYGNKLVF

SEQ ID NO: 647130 - protein, 14 aa, Homo sapiens
  CDR3 for beta chain variable domain of TCR clone 323565 (TRBV20-1, TRBJ1-5)
CSATDRGSNQPQHF

SEQ ID NO: 647131 - protein, 14 aa, Homo sapiens
  CDR3 for alpha chain variable domain of TCR clone 323566 (TRAV8-1, TRAJ4)
CAVPFSGGYHKLIF

SEQ ID NO: 647132 - protein, 16 aa, Homo sapiens
  CDR3 for beta chain variable domain of TCR clone 323566 (TRBV6-1, TRBJ1-2)
CASSGAWQGRSHGYTF

SEQ ID NO: 647133 - protein, 14 aa, Homo sapiens
  CDR3 for alpha chain variable domain of TCR clone 323567 (TRAV12-2, TRAJ44)
CAVNPAGTASKPTF

SEQ ID NO: 647134 - protein, 12 aa, Homo sapiens
  CDR3 for beta chain variable domain of TCR clone 323567 (TRBV27, TRBJ2-5)
CASSPTGETQYF

SEQ ID NO: 647135 - protein, 15 aa, Homo sapiens
  CDR3 for alpha chain variable domain of TCR clone 323568 (TRAV20, TRAJ53)
CAVQASGGSNYKLTF

SEQ ID NO: 647136 - protein, 14 aa, Homo sapiens
  CDR3 for beta chain variable domain of TCR clone 323568 (TRBV7-8, TRBJ2-3)
CASSLEAGTDTQYF

SEQ ID NO: 647137 - protein, 19 aa, Homo sapiens
  CDR3 for alpha chain variable domain of TCR clone 323569 (TRAV26-1, TRAJ22)
CCVLLHRWVFSGSARQLTF

SEQ ID NO: 647138 - protein, 19 aa, Homo sapiens
  CDR3 for beta chain variable domain of TCR clone 323569 (TRBV19, TRBJ2-5)
CASSIGQVTDFFLGETQFF

SEQ ID NO: 647139 - protein, 12 aa, Homo sapiens
  CDR3 for alpha chain variable domain of TCR clone 323570 (TRAV26-1, TRAJ36)
CIVRVRADNLFF

SEQ ID NO: 647140 - protein, 15 aa, Homo sapiens
  CDR3 for beta chain variable domain of TCR clone 323570 (TRBV6-3, TRBJ2-7)
CASSPPGTVFYEQYF

SEQ ID NO: 647141 - protein, 12 aa, Homo sapiens
  CDR3 for alpha chain variable domain of TCR clone 323571 (TRAV29/DV5, TRAJ15)
CASNQAGTALIF

SEQ ID NO: 647142 - protein, 15 aa, Homo sapiens
  CDR3 for beta chain variable domain of TCR clone 323571 (TRBV11-2, TRBJ2-2)
CASSSDRVNAGDLFF

SEQ ID NO: 647143 - protein, 10 aa, Homo sapiens
  CDR3 for alpha chain variable domain of TCR clone 323572 (TRAV17, TRAJ36)
CATVAGNYFF

SEQ ID NO: 647144 - protein, 12 aa, Homo sapiens
  CDR3 for beta chain variable domain of TCR clone 323572 (TRBV11-2, TRBJ2-4)
CASSSASGSEYF

SEQ ID NO: 647145 - protein, 13 aa, Homo sapiens
  CDR3 for alpha chain variable domain of TCR clone 323573 (TRAV8-2, TRAJ26)
CVVSLGSGQNFVF

SEQ ID NO: 647146 - protein, 13 aa, Homo sapiens
  CDR3 for beta chain variable domain of TCR clone 323573 (TRBV19, TRBJ2-1)
CASSMYRVNEQFF

SEQ ID NO: 647147 - protein, 16 aa, Homo sapiens
  CDR3 for alpha chain variable domain of TCR clone 323574 (TRAV27, TRAJ48)
TAAQPGDTGLYLPLTF

SEQ ID NO: 647148 - protein, 16 aa, Homo sapiens
  CDR3 for beta chain variable domain of TCR clone 323574 (TRBV12-5, TRBJ2-5)
CASGPRTSGNQETQYF

SEQ ID NO: 647149 - protein, 15 aa, Homo sapiens
  CDR3 for alpha chain variable domain of TCR clone 323575 (TRAV17, TRAJ56)
CATEPFTGANSKLTF

SEQ ID NO: 647150 - protein, 15 aa, Homo sapiens
  CDR3 for beta chain variable domain of TCR clone 323575 (TRBV24-1, TRBJ2-7)
CATSDPGQGTYEQYF

SEQ ID NO: 647151 - protein, 21 aa, Homo sapiens
  CDR3 for alpha chain variable domain of TCR clone 323576 (TRAV26-1, TRAJ56)
CCVLLHRQSRAYTGANSKLTF

SEQ ID NO: 647152 - protein, 12 aa, Homo sapiens
  CDR3 for beta chain variable domain of TCR clone 323576 (TRBV6-5, TRBJ2-5)
CASSEGSETQYC

SEQ ID NO: 647153 - protein, 13 aa, Homo sapiens
  CDR3 for alpha chain variable domain of TCR clone 323577 (TRAV27, TRAJ6)
CAGGTRGSYIPTF

SEQ ID NO: 647154 - protein, 15 aa, Homo sapiens
  CDR3 for beta chain variable domain of TCR clone 323577 (TRBV10-2, TRBJ2-6)
CASSEQGTGANVLTF

SEQ ID NO: 647155 - protein, 14 aa, Homo sapiens
  CDR3 for alpha chain variable domain of TCR clone 323578 (TRAV9-2, TRAJ39)
CALYIYNAGNMLTF

SEQ ID NO: 647156 - protein, 13 aa, Homo sapiens
  CDR3 for beta chain variable domain of TCR clone 323578 (TRBV4-1, TRBJ1-5)
CASSQEVRRPQHF

SEQ ID NO: 647157 - protein, 12 aa, Homo sapiens
  CDR3 for alpha chain variable domain of TCR clone 323579 (TRAV36/DV7, TRAJ40)
CAVGTGTYKYIF

SEQ ID NO: 647158 - protein, 19 aa, Homo sapiens
  CDR3 for beta chain variable domain of TCR clone 323579 (TRBV25-1, TRBJ2-2)
CAILVYRVDRGRKTGELFF

SEQ ID NO: 647159 - protein, 14 aa, Homo sapiens
  CDR3 for alpha chain variable domain of TCR clone 323580 (TRAV12-3, TRAJ10)
SHLPLTGGGNKLTF

SEQ ID NO: 647160 - protein, 15 aa, Homo sapiens
  CDR3 for beta chain variable domain of TCR clone 323580 (TRBV7-9, TRBJ2-2)
CASRRTGGRTGELFF

SEQ ID NO: 647161 - protein, 15 aa, Homo sapiens
  CDR3 for alpha chain variable domain of TCR clone 323581 (TRAV8-3, TRAJ45)
CASSYSGGGADGLTF

SEQ ID NO: 647162 - protein, 14 aa, Homo sapiens
  CDR3 for beta chain variable domain of TCR clone 323581 (TRBV19, TRBJ1-5)
CASSKMTGPQPQHF

SEQ ID NO: 647163 - protein, 14 aa, Homo sapiens
  CDR3 for alpha chain variable domain of TCR clone 323582 (TRAV16, TRAJ33)
CALSAMDSNYQLIW

SEQ ID NO: 647164 - protein, 16 aa, Homo sapiens
  CDR3 for beta chain variable domain of TCR clone 323582 (TRBV15, TRBJ1-2)
CATSRGPRTGGGGYTF

SEQ ID NO: 647165 - protein, 11 aa, Homo sapiens
  CDR3 for alpha chain variable domain of TCR clone 323583 (TRAV23/DV6, TRAJ48)
CAPRWGAQLTF

SEQ ID NO: 647166 - protein, 13 aa, Homo sapiens
  CDR3 for beta chain variable domain of TCR clone 323583 (TRBV12-4, TRBJ2-5)
CASSPGTEETQYF

SEQ ID NO: 647167 - protein, 16 aa, Homo sapiens
  CDR3 for alpha chain variable domain of TCR clone 323584 (TRAV30, TRAJ24)
CGTEIVDADSWGKFRF

SEQ ID NO: 647168 - protein, 18 aa, Homo sapiens
  CDR3 for beta chain variable domain of TCR clone 323584 (TRBV7-9, TRBJ2-7)
CASSLTTSGSRTWYEQYF

SEQ ID NO: 647169 - protein, 14 aa, Homo sapiens
  CDR3 for alpha chain variable domain of TCR clone 323585 (TRAV26-1, TRAJ45)
CIVREGGGAEGLTF

SEQ ID NO: 647170 - protein, 14 aa, Homo sapiens
  CDR3 for beta chain variable domain of TCR clone 323585 (TRBV2, TRBJ1-2)
CASNEGTGPYGYTF

SEQ ID NO: 647171 - protein, 11 aa, Homo sapiens
  CDR3 for alpha chain variable domain of TCR clone 323586 (TRAV2, TRAJ33)
CAVESNYQLIW

SEQ ID NO: 647172 - protein, 15 aa, Homo sapiens
  CDR3 for beta chain variable domain of TCR clone 323586 (TRBV6-6, TRBJ2-7)
CASSYSYGGSYEQYF

SEQ ID NO: 647173 - protein, 15 aa, Homo sapiens
  CDR3 for alpha chain variable domain of TCR clone 323587 (TRAV20, TRAJ52)
CAVQAGGTSYGKLTF

SEQ ID NO: 647174 - protein, 15 aa, Homo sapiens
  CDR3 for beta chain variable domain of TCR clone 323587 (TRBV7-9, TRBJ2-7)
CASSLALAEAYEQYF

SEQ ID NO: 647175 - protein, 14 aa, Homo sapiens
  CDR3 for alpha chain variable domain of TCR clone 323588 (TRAV23/DV6, TRAJ37)
CAASTSSNTGKLIF

SEQ ID NO: 647176 - protein, 15 aa, Homo sapiens
  CDR3 for beta chain variable domain of TCR clone 323588 (TRBV7-2, TRBJ2-1)
CASSSGLAGGNEQFF

SEQ ID NO: 647177 - protein, 14 aa, Homo sapiens
  CDR3 for alpha chain variable domain of TCR clone 323589 (TRAV26-1, TRAJ29)
CIVSRGIRKHTSCL

SEQ ID NO: 647178 - protein, 14 aa, Homo sapiens
  CDR3 for beta chain variable domain of TCR clone 323589 (TRBV18, TRBJ2-5)
CASSPGVSQETQYF

SEQ ID NO: 647179 - protein, 16 aa, Homo sapiens
  CDR3 for alpha chain variable domain of TCR clone 323590 (TRAV3, TRAJ10)
CAVRDIRAGGGNKLTF

SEQ ID NO: 647180 - protein, 13 aa, Homo sapiens
  CDR3 for beta chain variable domain of TCR clone 323590 (TRBV12-4, TRBJ2-7)
CASSPTETYEQYF

SEQ ID NO: 647181 - protein, 13 aa, Homo sapiens
  CDR3 for alpha chain variable domain of TCR clone 323591 (TRAV8-3, TRAJ40)
CAVGAQYLRNLQI

SEQ ID NO: 647182 - protein, 13 aa, Homo sapiens
  CDR3 for beta chain variable domain of TCR clone 323591 (TRBV10-3, TRBJ2-7)
CASKLAVNYEQYF

SEQ ID NO: 647183 - protein, 15 aa, Homo sapiens
  CDR3 for alpha chain variable domain of TCR clone 323592 (TRAV8-3, TRAJ45)
CASSYSGGGADGLTF

SEQ ID NO: 647184 - protein, 15 aa, Homo sapiens
  CDR3 for beta chain variable domain of TCR clone 323592 (TRBV5-1, TRBJ2-3)
CASSVTSGSTDTQYF

SEQ ID NO: 647185 - protein, 11 aa, Homo sapiens
  CDR3 for alpha chain variable domain of TCR clone 323593 (TRAV17, TRAJ31)
CATSNNARLMF

SEQ ID NO: 647186 - protein, 16 aa, Homo sapiens
  CDR3 for beta chain variable domain of TCR clone 323593 (TRBV4-2, TRBJ2-3)
FASSQELAGDTDTQYF

SEQ ID NO: 647187 - protein, 15 aa, Homo sapiens
  CDR3 for alpha chain variable domain of TCR clone 323594 (TRAV13-2, TRAJ23)
CAERGFYNQGGKLIF

SEQ ID NO: 647188 - protein, 14 aa, Homo sapiens
  CDR3 for beta chain variable domain of TCR clone 323594 (TRBV4-1, TRBJ2-3)
CASSQDCSTDTQYF

SEQ ID NO: 647189 - protein, 13 aa, Homo sapiens
  CDR3 for alpha chain variable domain of TCR clone 323595 (TRAV17, TRAJ5)
CALMDTGRRALTF

SEQ ID NO: 647190 - protein, 14 aa, Homo sapiens
  CDR3 for beta chain variable domain of TCR clone 323595 (TRBV29-1, TRBJ2-7)
CSVDQRQASYEQYF

SEQ ID NO: 647191 - protein, 15 aa, Homo sapiens
  CDR3 for alpha chain variable domain of TCR clone 323596 (TRAV26-1, TRAJ29)
CIVRVEGSGNTPLVF

SEQ ID NO: 647192 - protein, 13 aa, Homo sapiens
  CDR3 for beta chain variable domain of TCR clone 323596 (TRBV19, TRBJ2-2)
CASSIWSTGELFF

SEQ ID NO: 647193 - protein, 14 aa, Homo sapiens
  CDR3 for alpha chain variable domain of TCR clone 323597 (TRAV4, TRAJ43)
CLGGPRYNNNDMRF

SEQ ID NO: 647194 - protein, 21 aa, Homo sapiens
  CDR3 for beta chain variable domain of TCR clone 323597 (TRBV11-1, TRBJ2-1)
CASSARERLRPEGPSYNEQFF

SEQ ID NO: 647195 - protein, 16 aa, Homo sapiens
  CDR3 for alpha chain variable domain of TCR clone 323598 (TRAV4, TRAJ22)
CLVGDLYSGSARQLTF

SEQ ID NO: 647196 - protein, 15 aa, Homo sapiens
  CDR3 for beta chain variable domain of TCR clone 323598 (TRBV6-3, TRBJ2-2)
CASSFLATLTGELFF

SEQ ID NO: 647197 - protein, 11 aa, Homo sapiens
  CDR3 for alpha chain variable domain of TCR clone 323599 (TRAV12-1, TRAJ37)
CVVNTPGKLIF

SEQ ID NO: 647198 - protein, 13 aa, Homo sapiens
  CDR3 for beta chain variable domain of TCR clone 323599 (TRBV12-4, TRBJ1-5)
CACSPDRAQPQHF

SEQ ID NO: 647199 - protein, 14 aa, Homo sapiens
  CDR3 for alpha chain variable domain of TCR clone 323600 (TRAV14/DV4, TRAJ13)
CAMIHSGGYQKVTF

SEQ ID NO: 647200 - protein, 16 aa, Homo sapiens
  CDR3 for beta chain variable domain of TCR clone 323600 (TRBV28, TRBJ2-7)
CASSLFFETGGPEQYF

SEQ ID NO: 647201 - protein, 18 aa, Homo sapiens
  CDR3 for alpha chain variable domain of TCR clone 323601 (TRAV26-1, TRAJ22)
CIVRVALISSGYARQLTF

SEQ ID NO: 647202 - protein, 13 aa, Homo sapiens
  CDR3 for beta chain variable domain of TCR clone 323601 (TRBV13, TRBJ2-5)
CASSPEVGETQYF

SEQ ID NO: 647203 - protein, 14 aa, Homo sapiens
  CDR3 for alpha chain variable domain of TCR clone 323602 (TRAV1-2, TRAJ8)
CAVREDTGFQKLVF

SEQ ID NO: 647204 - protein, 15 aa, Homo sapiens
  CDR3 for beta chain variable domain of TCR clone 323602 (TRBV20-1, TRBJ1-1)
CSASWDRFLNTEAFF

SEQ ID NO: 647205 - protein, 13 aa, Homo sapiens
  CDR3 for alpha chain variable domain of TCR clone 323603 (TRAV17, TRAJ5)
CAPMDTGRRALTF

SEQ ID NO: 647206 - protein, 15 aa, Homo sapiens
  CDR3 for beta chain variable domain of TCR clone 323603 (TRBV6-6, TRBJ2-5)
CASSPGGGLEETQYF

SEQ ID NO: 647207 - protein, 14 aa, Homo sapiens
  CDR3 for alpha chain variable domain of TCR clone 323604 (TRAV21, TRAJ37)
CAVQGSSNTGKLIF

SEQ ID NO: 647208 - protein, 14 aa, Homo sapiens
  CDR3 for beta chain variable domain of TCR clone 323604 (TRBV7-2, TRBJ2-1)
CACSRGGARNEQFF

SEQ ID NO: 647209 - protein, 17 aa, Homo sapiens
  CDR3 for alpha chain variable domain of TCR clone 323605 (TRAV26-1, TRAJ53)
CIVRVDDSGGSNYKLTF

SEQ ID NO: 647210 - protein, 16 aa, Homo sapiens
  CDR3 for beta chain variable domain of TCR clone 323605 (TRBV20-1, TRBJ1-2)
CSASMGQGVANYGYTF

SEQ ID NO: 647211 - protein, 12 aa, Homo sapiens
  CDR3 for alpha chain variable domain of TCR clone 323606 (TRAV36/DV7, TRAJ54)
CAVVRGAQKLVF

SEQ ID NO: 647212 - protein, 16 aa, Homo sapiens
  CDR3 for beta chain variable domain of TCR clone 323606 (TRBV11-3, TRBJ2-3)
CASSSGSGGGTDTQYF

SEQ ID NO: 647213 - protein, 15 aa, Homo sapiens
  CDR3 for alpha chain variable domain of TCR clone 323607 (TRAV26-1, TRAJ15)
CTVRAANQAGTALIF

SEQ ID NO: 647214 - protein, 15 aa, Homo sapiens
  CDR3 for beta chain variable domain of TCR clone 323607 (TRBV20-1, TRBJ1-1)
CSARSAATSNTEAFF

SEQ ID NO: 647215 - protein, 14 aa, Homo sapiens
  CDR3 for alpha chain variable domain of TCR clone 323608 (TRAV16, TRAJ26)
CALSSANYGQNFVF

SEQ ID NO: 647216 - protein, 12 aa, Homo sapiens
  CDR3 for beta chain variable domain of TCR clone 323608 (TRBV6-5, TRBJ2-2)
CASRTGTGQLFF

SEQ ID NO: 647217 - protein, 14 aa, Homo sapiens
  CDR3 for alpha chain variable domain of TCR clone 323609 (TRAV12-3, TRAJ22)
CAMSLFGSARQLTF

SEQ ID NO: 647218 - protein, 14 aa, Homo sapiens
  CDR3 for beta chain variable domain of TCR clone 323609 (TRBV7-2, TRBJ2-7)
CASSPKTSFYEQYV

SEQ ID NO: 647219 - protein, 12 aa, Homo sapiens
  CDR3 for alpha chain variable domain of TCR clone 323610 (TRAV17, TRAJ49)
CATVTTGNQFYF

SEQ ID NO: 647220 - protein, 15 aa, Homo sapiens
  CDR3 for beta chain variable domain of TCR clone 323610 (TRBV7-2, TRBJ2-1)
CASSSGLAGGNEQFF

SEQ ID NO: 647221 - protein, 13 aa, Homo sapiens
  CDR3 for alpha chain variable domain of TCR clone 323611 (TRAV21, TRAJ20)
CAVGLRVDYKLSF

SEQ ID NO: 647222 - protein, 14 aa, Homo sapiens
  CDR3 for beta chain variable domain of TCR clone 323611 (TRBV20-1, TRBJ2-5)
CSARDGRAGETQYF

SEQ ID NO: 647223 - protein, 14 aa, Homo sapiens
  CDR3 for alpha chain variable domain of TCR clone 323612 (TRAV35, TRAJ13)
CAGSPSGGYQKVTF

SEQ ID NO: 647224 - protein, 14 aa, Homo sapiens
  CDR3 for beta chain variable domain of TCR clone 323612 (TRBV12-5, TRBJ2-5)
CASGSRTHQETQCF

SEQ ID NO: 647225 - protein, 14 aa, Homo sapiens
  CDR3 for alpha chain variable domain of TCR clone 323613 (TRAV23/DV6, TRAJ3)
CAASMASSASKIVF

SEQ ID NO: 647226 - protein, 13 aa, Homo sapiens
  CDR3 for beta chain variable domain of TCR clone 323613 (TRBV27, TRBJ2-5)
CASFSRGLETQYF

SEQ ID NO: 647227 - protein, 16 aa, Homo sapiens
  CDR3 for alpha chain variable domain of TCR clone 323614 (TRAV1-1, TRAJ29)
CAVRSTRNTGNTPLVF

SEQ ID NO: 647228 - protein, 16 aa, Homo sapiens
  CDR3 for beta chain variable domain of TCR clone 323614 (TRBV27, TRBJ1-1)
CASSSRGRTGYTEAFF

SEQ ID NO: 647229 - protein, 14 aa, Homo sapiens
  CDR3 for alpha chain variable domain of TCR clone 323615 (TRAV8-2, TRAJ4)
CVVSPSGGYNKLIF

SEQ ID NO: 647230 - protein, 12 aa, Homo sapiens
  CDR3 for beta chain variable domain of TCR clone 323615 (TRBV19, TRBJ2-7)
CASTDRGYEQYF

SEQ ID NO: 647231 - protein, 17 aa, Homo sapiens
  CDR3 for alpha chain variable domain of TCR clone 323616 (TRAV13-1, TRAJ5)
CSNPSLSRDTGRRALTF

SEQ ID NO: 647232 - protein, 15 aa, Homo sapiens
  CDR3 for beta chain variable domain of TCR clone 323616 (TRBV10-2, TRBJ2-6)
CASSEQGTGANVLTF

SEQ ID NO: 647233 - protein, 14 aa, Homo sapiens
  CDR3 for alpha chain variable domain of TCR clone 323617 (TRAV12-1, TRAJ3)
CVVNPGSSASKIIF

SEQ ID NO: 647234 - protein, 14 aa, Homo sapiens
  CDR3 for beta chain variable domain of TCR clone 323617 (TRBV20-1, TRBJ2-3)
CSARGGTSTDTQDF

SEQ ID NO: 647235 - protein, 14 aa, Homo sapiens
  CDR3 for alpha chain variable domain of TCR clone 323618 (TRAV38-2/DV8, TRAJ31)
CAYRSDNNNARLMF

SEQ ID NO: 647236 - protein, 13 aa, Homo sapiens
  CDR3 for beta chain variable domain of TCR clone 323618 (TRBV28, TRBJ1-1)
CASSKQGWTDAFF

SEQ ID NO: 647237 - protein, 14 aa, Homo sapiens
  CDR3 for alpha chain variable domain of TCR clone 323619 (TRAV8-2, TRAJ4)
CVVSPSGGDNKLIF

SEQ ID NO: 647238 - protein, 15 aa, Homo sapiens
  CDR3 for beta chain variable domain of TCR clone 323619 (TRBV4-1, TRBJ1-4)
CASSDTGGTDEKLFF

SEQ ID NO: 647239 - protein, 15 aa, Homo sapiens
  CDR3 for alpha chain variable domain of TCR clone 323620 (TRAV8-3, TRAJ27)
CAVVPSKTNAGKSTF

SEQ ID NO: 647240 - protein, 15 aa, Homo sapiens
  CDR3 for beta chain variable domain of TCR clone 323620 (TRBV9, TRBJ1-6)
CASSVAGTGDSPLRF

SEQ ID NO: 647241 - protein, 14 aa, Homo sapiens
  CDR3 for alpha chain variable domain of TCR clone 323621 (TRAV12-1, TRAJ38)
CSELKAGNNRKLIW

SEQ ID NO: 647242 - protein, 12 aa, Homo sapiens
  CDR3 for beta chain variable domain of TCR clone 323621 (TRBV24-1, TRBJ1-1)
CATLYPDTEAVF

SEQ ID NO: 647243 - protein, 13 aa, Homo sapiens
  CDR3 for alpha chain variable domain of TCR clone 323622 (TRAV8-4, TRAJ32)
CCLYGGATNKLIF

SEQ ID NO: 647244 - protein, 16 aa, Homo sapiens
  CDR3 for beta chain variable domain of TCR clone 323622 (TRBV27, TRBJ2-2)
CASSPLAAANTGELFF

SEQ ID NO: 647245 - protein, 17 aa, Homo sapiens
  CDR3 for alpha chain variable domain of TCR clone 323623 (TRAV3, TRAJ6)
CAVRDGPRAGGSYIPTF

SEQ ID NO: 647246 - protein, 20 aa, Homo sapiens
  CDR3 for beta chain variable domain of TCR clone 323623 (TRBV28, TRBJ2-1)
CASTPIGRSPGLAEGNEQFF

SEQ ID NO: 647247 - protein, 14 aa, Homo sapiens
  CDR3 for alpha chain variable domain of TCR clone 323624 (TRAV17, TRAJ12)
CAILPMDSSYKLIF

SEQ ID NO: 647248 - protein, 15 aa, Homo sapiens
  CDR3 for beta chain variable domain of TCR clone 323624 (TRBV28, TRBJ2-2)
CASSLPGAGVGELFF

SEQ ID NO: 647249 - protein, 14 aa, Homo sapiens
  CDR3 for alpha chain variable domain of TCR clone 323625 (TRAV26-1, TRAJ21)
CIVRPPYNFNKFYF

SEQ ID NO: 647250 - protein, 14 aa, Homo sapiens
  CDR3 for beta chain variable domain of TCR clone 323625 (TRBV4-1, TRBJ2-2)
CASSQAVDTGELFF

SEQ ID NO: 647251 - protein, 13 aa, Homo sapiens
  CDR3 for alpha chain variable domain of TCR clone 323626 (TRAV29/DV5, TRAJ31)
CAASRNNNARIMF

SEQ ID NO: 647252 - protein, 15 aa, Homo sapiens
  CDR3 for beta chain variable domain of TCR clone 323626 (TRBV9, TRBJ2-1)
CASSLAGSSYNEQFF

SEQ ID NO: 647253 - protein, 14 aa, Homo sapiens
  CDR3 for alpha chain variable domain of TCR clone 323627 (TRAV29/DV5, TRAJ36)
CAARRKTGANNLFF

SEQ ID NO: 647254 - protein, 13 aa, Homo sapiens
  CDR3 for beta chain variable domain of TCR clone 323627 (TRBV29-1, TRBJ2-2)
CSTTGVNTGELFF

SEQ ID NO: 647255 - protein, 14 aa, Homo sapiens
  CDR3 for alpha chain variable domain of TCR clone 323628 (TRAV12-2, TRAJ13)
CAVKKTGGYQKVTF

SEQ ID NO: 647256 - protein, 12 aa, Homo sapiens
  CDR3 for beta chain variable domain of TCR clone 323628 (TRBV12-4, TRBJ1-2)
CASSFIWLVLRF

SEQ ID NO: 647257 - protein, 16 aa, Homo sapiens
  CDR3 for alpha chain variable domain of TCR clone 323629 (TRAV3, TRAJ18)
CAVRDGRGSTLGRLYF

SEQ ID NO: 647258 - protein, 14 aa, Homo sapiens
  CDR3 for beta chain variable domain of TCR clone 323629 (TRBV4-1, TRBJ2-2)
CASSQAVNTGELFF

SEQ ID NO: 647259 - protein, 12 aa, Homo sapiens
  CDR3 for alpha chain variable domain of TCR clone 323630 (TRAV12-1, TRAJ20)
CVVNPDDYKLSF

SEQ ID NO: 647260 - protein, 12 aa, Homo sapiens
  CDR3 for beta chain variable domain of TCR clone 323630 (TRBV11-2, TRBJ2-7)
CASSPPADEQYF

SEQ ID NO: 647261 - protein, 14 aa, Homo sapiens
  CDR3 for alpha chain variable domain of TCR clone 323631 (TRAV12-2, TRAJ40)
RAVKIPSGTYKYIF

SEQ ID NO: 647262 - protein, 13 aa, Homo sapiens
  CDR3 for beta chain variable domain of TCR clone 323631 (TRBV7-9, TRBJ1-2)
CASSLKQNYGYTF

SEQ ID NO: 647263 - protein, 13 aa, Homo sapiens
  CDR3 for alpha chain variable domain of TCR clone 323632 (TRAV27, TRAJ9)
CAGAKTGGFKTIF

SEQ ID NO: 647264 - protein, 17 aa, Homo sapiens
  CDR3 for beta chain variable domain of TCR clone 323632 (TRBV11-2, TRBJ2-1)
CASSLYPPGVEYNEQFF

SEQ ID NO: 647265 - protein, 14 aa, Homo sapiens
  CDR3 for alpha chain variable domain of TCR clone 323633 (TRAV1-2, TRAJ8)
CAVRKDTGFQKLGF

SEQ ID NO: 647266 - protein, 15 aa, Homo sapiens
  CDR3 for beta chain variable domain of TCR clone 323633 (TRBV6-3, TRBJ2-7)
CASSSPGTVFYEQYF

SEQ ID NO: 647267 - protein, 14 aa, Homo sapiens
  CDR3 for alpha chain variable domain of TCR clone 323634 (TRAV23/DV6, TRAJ4)
CAANLSGGYNKLIF

SEQ ID NO: 647268 - protein, 15 aa, Homo sapiens
  CDR3 for beta chain variable domain of TCR clone 323634 (TRBV29-1, TRBJ2-1)
CSVGRHALFYNEQFF

SEQ ID NO: 647269 - protein, 14 aa, Homo sapiens
  CDR3 for alpha chain variable domain of TCR clone 323635 (TRAV23/DV6, TRAJ22)
CADISSGSARQLTF

SEQ ID NO: 647270 - protein, 14 aa, Homo sapiens
  CDR3 for beta chain variable domain of TCR clone 323635 (TRBV28, TRBJ2-7)
CASSLLRISYEQYF

SEQ ID NO: 647271 - protein, 15 aa, Homo sapiens
  CDR3 for alpha chain variable domain of TCR clone 323636 (TRAV26-1, TRAJ40)
CIVRVTTSGTYKYIF

SEQ ID NO: 647272 - protein, 13 aa, Homo sapiens
  CDR3 for beta chain variable domain of TCR clone 323636 (TRBV10-2, TRBJ2-7)
CASGASGGYEQYF

SEQ ID NO: 647273 - protein, 15 aa, Homo sapiens
  CDR3 for alpha chain variable domain of TCR clone 323637 (TRAV3, TRAJ4)
FAQNMFSGGYNKLIF

SEQ ID NO: 647274 - protein, 16 aa, Homo sapiens
  CDR3 for beta chain variable domain of TCR clone 323637 (TRBV3-1, TRBJ1-6)
CASSQEFQGSYSPLHF

SEQ ID NO: 647275 - protein, 16 aa, Homo sapiens
  CDR3 for alpha chain variable domain of TCR clone 323638 (TRAV3, TRAJ42)
CAGRDIEGGSQGNLIF

SEQ ID NO: 647276 - protein, 15 aa, Homo sapiens
  CDR3 for beta chain variable domain of TCR clone 323638 (TRBV9, TRBJ2-2)
CASSVVAGASGELFF

SEQ ID NO: 647277 - protein, 14 aa, Homo sapiens
  CDR3 for alpha chain variable domain of TCR clone 323639 (TRAV1-2, TRAJ33)
CAVRAPDSNYQLIW

SEQ ID NO: 647278 - protein, 15 aa, Homo sapiens
  CDR3 for beta chain variable domain of TCR clone 323639 (TRBV19, TRBJ2-1)
CASSITREPSHEQFF

SEQ ID NO: 647279 - protein, 15 aa, Homo sapiens
  CDR3 for alpha chain variable domain of TCR clone 323640 (TRAV17, TRAJ57)
CATSPSQGGSEKLVF

SEQ ID NO: 647280 - protein, 15 aa, Homo sapiens
  CDR3 for beta chain variable domain of TCR clone 323640 (TRBV25-1, TRBJ1-4)
CASSPGDSTNEKLFF

SEQ ID NO: 647281 - protein, 11 aa, Homo sapiens
  CDR3 for alpha chain variable domain of TCR clone 323641 (TRAV3, TRAJ21)
CAVGNLNNFYF

SEQ ID NO: 647282 - protein, 16 aa, Homo sapiens
  CDR3 for beta chain variable domain of TCR clone 323641 (TRBV19, TRBJ2-1)
CASSKAGPSSYNEQFF

SEQ ID NO: 647283 - protein, 14 aa, Homo sapiens
  CDR3 for alpha chain variable domain of TCR clone 323642 (TRAV1-2, TRAJ16)
CAVNRVSDGQKLLF

SEQ ID NO: 647284 - protein, 13 aa, Homo sapiens
  CDR3 for beta chain variable domain of TCR clone 323642 (TRBV10-3, TRBJ2-7)
CASKLAVNHEQYF

SEQ ID NO: 647285 - protein, 14 aa, Homo sapiens
  CDR3 for alpha chain variable domain of TCR clone 323643 (TRAV1-1, TRAJ27)
CAVIYNTTAGKSTL

SEQ ID NO: 647286 - protein, 15 aa, Homo sapiens
  CDR3 for beta chain variable domain of TCR clone 323643 (TRBV7-2, TRBJ2-1)
CASSSGLAGGNEQFF

SEQ ID NO: 647287 - protein, 16 aa, Homo sapiens
  CDR3 for alpha chain variable domain of TCR clone 323644 (TRAV26-2, TRAJ37)
CILRDFGSSNTGKLIF

SEQ ID NO: 647288 - protein, 15 aa, Homo sapiens
  CDR3 for beta chain variable domain of TCR clone 323644 (TRBV6-5, TRBJ2-7)
CASRSLAVCSYEQYF

SEQ ID NO: 647289 - protein, 16 aa, Homo sapiens
  CDR3 for alpha chain variable domain of TCR clone 323645 (TRAV30, TRAJ24)
CGTEIVDADSWGKSQF

SEQ ID NO: 647290 - protein, 14 aa, Homo sapiens
  CDR3 for beta chain variable domain of TCR clone 323645 (TRBV12-5, TRBJ2-5)
CASGSRTHQETQYF

SEQ ID NO: 647291 - protein, 10 aa, Homo sapiens
  CDR3 for alpha chain variable domain of TCR clone 323646 (TRAV1-2, TRAJ23)
CAGQGGKLIF

SEQ ID NO: 647292 - protein, 16 aa, Homo sapiens
  CDR3 for beta chain variable domain of TCR clone 323646 (TRBV11-2, TRBJ1-1)
CASSLRQGGEHSKAIF

SEQ ID NO: 647293 - protein, 15 aa, Homo sapiens
  CDR3 for alpha chain variable domain of TCR clone 323647 (TRAV12-1, TRAJ9)
CVVSFGDTGGFKTTF

SEQ ID NO: 647294 - protein, 13 aa, Homo sapiens
  CDR3 for beta chain variable domain of TCR clone 323647 (TRBV2, TRBJ1-4)
CASSERAGEKLFF

SEQ ID NO: 647295 - protein, 17 aa, Homo sapiens
  CDR3 for alpha chain variable domain of TCR clone 323648 (TRAV3, TRAJ6)
CAVRDGPRAGGSYIPTF

SEQ ID NO: 647296 - protein, 13 aa, Homo sapiens
  CDR3 for beta chain variable domain of TCR clone 323648 (TRBV10-2, TRBJ2-3)
CASSESGDHTQYF

SEQ ID NO: 647297 - protein, 14 aa, Homo sapiens
  CDR3 for alpha chain variable domain of TCR clone 323649 (TRAV8-3, TRAJ17)
CAVGAGAAGNKLTF

SEQ ID NO: 647298 - protein, 15 aa, Homo sapiens
  CDR3 for beta chain variable domain of TCR clone 323649 (TRBV20-1, TRBJ2-7)
CSARDRVSGMDEQYF

SEQ ID NO: 647299 - protein, 11 aa, Homo sapiens
  CDR3 for alpha chain variable domain of TCR clone 323650 (TRAV35, TRAJ30)
CAPGGNDKIIF

SEQ ID NO: 647300 - protein, 16 aa, Homo sapiens
  CDR3 for beta chain variable domain of TCR clone 323650 (TRBV7-6, TRBJ2-1)
CIAVPAAWGGADEQFF

SEQ ID NO: 647301 - protein, 12 aa, Homo sapiens
  CDR3 for alpha chain variable domain of TCR clone 323651 (TRAV13-1, TRAJ40)
CSSKGGTSKYIF

SEQ ID NO: 647302 - protein, 13 aa, Homo sapiens
  CDR3 for beta chain variable domain of TCR clone 323651 (TRBV7-6, TRBJ1-2)
CASSLVADYGYTF

SEQ ID NO: 647303 - protein, 10 aa, Homo sapiens
  CDR3 for alpha chain variable domain of TCR clone 323652 (TRAV21, TRAJ34)
CCDYTDKLIF

SEQ ID NO: 647304 - protein, 12 aa, Homo sapiens
  CDR3 for beta chain variable domain of TCR clone 323652 (TRBV7-9, TRBJ1-1)
CASSLVRGEAFF

SEQ ID NO: 647305 - protein, 17 aa, Homo sapiens
  CDR3 for alpha chain variable domain of TCR clone 323653 (TRAV23/DV6, TRAJ57)
CAASSTLSQGGPDKLVF

SEQ ID NO: 647306 - protein, 14 aa, Homo sapiens
  CDR3 for beta chain variable domain of TCR clone 323653 (TRBV25-1, TRBJ1-1)
CVSTHLGGNTEAFF

SEQ ID NO: 647307 - protein, 12 aa, Homo sapiens
  CDR3 for alpha chain variable domain of TCR clone 323654 (TRAV12-3, TRAJ20)
CAMVRGAYKLSF

SEQ ID NO: 647308 - protein, 12 aa, Homo sapiens
  CDR3 for beta chain variable domain of TCR clone 323654 (TRBV29-1, TRBJ1-1)
CSESDGNTEAFF

SEQ ID NO: 647309 - protein, 15 aa, Homo sapiens
  CDR3 for alpha chain variable domain of TCR clone 323655 (TRAV2, TRAJ15)
CAVEDRGQAGTALIF

SEQ ID NO: 647310 - protein, 14 aa, Homo sapiens
  CDR3 for beta chain variable domain of TCR clone 323655 (TRBV7-9, TRBJ2-2)
CASSLVQDTGELFF

SEQ ID NO: 647311 - protein, 16 aa, Homo sapiens
  CDR3 for alpha chain variable domain of TCR clone 323656 (TRAV17, TRAJ52)
CATSNAGGTSYGKLTF

SEQ ID NO: 647312 - protein, 18 aa, Homo sapiens
  CDR3 for beta chain variable domain of TCR clone 323656 (TRBV25-1, TRBJ1-2)
CASSGLQNGQGLIFGYTF

SEQ ID NO: 647313 - protein, 13 aa, Homo sapiens
  CDR3 for alpha chain variable domain of TCR clone 323657 (TRAV14/DV4, TRAJ16)
CAMRGTDGQKLLF

SEQ ID NO: 647314 - protein, 18 aa, Homo sapiens
  CDR3 for beta chain variable domain of TCR clone 323657 (TRBV4-1, TRBJ2-3)
RASSHQLAGGRSTDTQYF

SEQ ID NO: 647315 - protein, 10 aa, Homo sapiens
  CDR3 for alpha chain variable domain of TCR clone 323658 (TRAV12-3, TRAJ49)
CAMNDDQFYF

SEQ ID NO: 647316 - protein, 13 aa, Homo sapiens
  CDR3 for beta chain variable domain of TCR clone 323658 (TRBV12-4, TRBJ1-1)
YASSPGTGFEAFF

SEQ ID NO: 647317 - protein, 12 aa, Homo sapiens
  CDR3 for alpha chain variable domain of TCR clone 323659 (TRAV2, TRAJ9)
CAVGAGGFKTIF

SEQ ID NO: 647318 - protein, 16 aa, Homo sapiens
  CDR3 for beta chain variable domain of TCR clone 323659 (TRBV13, TRBJ2-2)
GASSPRTGEHTGELFF

SEQ ID NO: 647319 - protein, 14 aa, Homo sapiens
  CDR3 for alpha chain variable domain of TCR clone 323660 (TRAV26-1, TRAJ21)
CIVRPPYNFNKFYF

SEQ ID NO: 647320 - protein, 14 aa, Homo sapiens
  CDR3 for beta chain variable domain of TCR clone 323660 (TRBV11-3, TRBJ2-1)
CASSAKTSGSSQFF

SEQ ID NO: 647321 - protein, 13 aa, Homo sapiens
  CDR3 for alpha chain variable domain of TCR clone 323661 (TRAV12-1, TRAJ37)
CVVNAGNTGKLIF

SEQ ID NO: 647322 - protein, 14 aa, Homo sapiens
  CDR3 for beta chain variable domain of TCR clone 323661 (TRBV7-2, TRBJ2-3)
CPSRRGLAADTQYF

SEQ ID NO: 647323 - protein, 11 aa, Homo sapiens
  CDR3 for alpha chain variable domain of TCR clone 323662 (TRAV16, TRAJ33)
CALHSNYQLIW

SEQ ID NO: 647324 - protein, 15 aa, Homo sapiens
  CDR3 for beta chain variable domain of TCR clone 323662 (TRBV4-1, TRBJ2-7)
CASIQQGQGFDEQYF

SEQ ID NO: 647325 - protein, 15 aa, Homo sapiens
  CDR3 for alpha chain variable domain of TCR clone 323663 (TRAV21, TRAJ32)
CAAAPYGGATNKLIF

SEQ ID NO: 647326 - protein, 13 aa, Homo sapiens
  CDR3 for beta chain variable domain of TCR clone 323663 (TRBV10-3, TRBJ1-2)
CAISERDSYGYTF

SEQ ID NO: 647327 - protein, 15 aa, Homo sapiens
  CDR3 for alpha chain variable domain of TCR clone 323664 (TRAV16, TRAJ17)
CAISGQEAAGNKLTF

SEQ ID NO: 647328 - protein, 15 aa, Homo sapiens
  CDR3 for beta chain variable domain of TCR clone 323664 (TRBV12-4, TRBJ1-5)
CASTQGTGPLQPQHF

SEQ ID NO: 647329 - protein, 13 aa, Homo sapiens
  CDR3 for alpha chain variable domain of TCR clone 323665 (TRAV8-3, TRAJ36)
CAVGATGANNLFF

SEQ ID NO: 647330 - protein, 14 aa, Homo sapiens
  CDR3 for beta chain variable domain of TCR clone 323665 (TRBV12-5, TRBJ2-5)
CASGSRTHQGTQYF

SEQ ID NO: 647331 - protein, 15 aa, Homo sapiens
  CDR3 for alpha chain variable domain of TCR clone 323666 (TRAV38-2/DV8, TRAJ45)
CAYWDSGGGADGLTF

SEQ ID NO: 647332 - protein, 16 aa, Homo sapiens
  CDR3 for beta chain variable domain of TCR clone 323666 (TRBV4-2, TRBJ2-1)
CASSQDGTGGYNEQFF

SEQ ID NO: 647333 - protein, 13 aa, Homo sapiens
  CDR3 for alpha chain variable domain of TCR clone 323667 (TRAV12-1, TRAJ7)
CVVNMRGNNRLAF

SEQ ID NO: 647334 - protein, 16 aa, Homo sapiens
  CDR3 for beta chain variable domain of TCR clone 323667 (TRBV20-1, TRBJ1-4)
CSSPGQGLLTNEKLFF

SEQ ID NO: 647335 - protein, 16 aa, Homo sapiens
  CDR3 for alpha chain variable domain of TCR clone 323668 (TRAV4, TRAJ8)
CLVGDSGNTGFQKLVF

SEQ ID NO: 647336 - protein, 14 aa, Homo sapiens
  CDR3 for beta chain variable domain of TCR clone 323668 (TRBV4-2, TRBJ2-1)
CASGLDRAYNEQFF

SEQ ID NO: 647337 - protein, 13 aa, Homo sapiens
  CDR3 for alpha chain variable domain of TCR clone 323669 (TRAV21, TRAJ57)
CAVTQGGSEKLVF

SEQ ID NO: 647338 - protein, 16 aa, Homo sapiens
  CDR3 for beta chain variable domain of TCR clone 323669 (TRBV29-1, TRBJ2-7)
WSVEDAEDGTAYEQYF

SEQ ID NO: 647339 - protein, 15 aa, Homo sapiens
  CDR3 for alpha chain variable domain of TCR clone 323670 (TRAV30, TRAJ32)
CGTEILGGATNKLIF

SEQ ID NO: 647340 - protein, 15 aa, Homo sapiens
  CDR3 for beta chain variable domain of TCR clone 323670 (TRBV6-3, TRBJ2-5)
CASSLYPRGGETQYF

SEQ ID NO: 647341 - protein, 14 aa, Homo sapiens
  CDR3 for alpha chain variable domain of TCR clone 323671 (TRAV14/DV4, TRAJ42)
CPRGSVRSQGNLIF

SEQ ID NO: 647342 - protein, 18 aa, Homo sapiens
  CDR3 for beta chain variable domain of TCR clone 323671 (TRBV20-1, TRBJ2-3)
CSASGLAGGPGTTDTQYF

SEQ ID NO: 647343 - protein, 12 aa, Homo sapiens
  CDR3 for alpha chain variable domain of TCR clone 323672 (TRAV8-3, TRAJ20)
WAVGANDYKLSS

SEQ ID NO: 647344 - protein, 16 aa, Homo sapiens
  CDR3 for beta chain variable domain of TCR clone 323672 (TRBV19, TRBJ2-2)
CASRSPGTGATGELFF

SEQ ID NO: 647345 - protein, 17 aa, Homo sapiens
  CDR3 for alpha chain variable domain of TCR clone 323673 (TRAV12-2, TRAJ53)
CAPLTDSQEGSNYKLTF

SEQ ID NO: 647346 - protein, 14 aa, Homo sapiens
  CDR3 for beta chain variable domain of TCR clone 323673 (TRBV7-2, TRBJ2-7)
CASSLDPGPYEQYL

SEQ ID NO: 647347 - protein, 16 aa, Homo sapiens
  CDR3 for alpha chain variable domain of TCR clone 323674 (TRAV12-3, TRAJ58)
CAMTDTEETSGSRLTL

SEQ ID NO: 647348 - protein, 15 aa, Homo sapiens
  CDR3 for beta chain variable domain of TCR clone 323674 (TRBV4-2, TRBJ1-6)
CASSYHRDSDSPLHF

SEQ ID NO: 647349 - protein, 18 aa, Homo sapiens
  CDR3 for alpha chain variable domain of TCR clone 323675 (TRAV21, TRAJ52)
CAVRPSPAGGTSYGKLTF

SEQ ID NO: 647350 - protein, 15 aa, Homo sapiens
  CDR3 for beta chain variable domain of TCR clone 323675 (TRBV7-9, TRBJ2-7)
CASSSSGLAVYEQYC

SEQ ID NO: 647351 - protein, 13 aa, Homo sapiens
  CDR3 for alpha chain variable domain of TCR clone 323676 (TRAV12-2, TRAJ11)
CAAPNSGYSTLTF

SEQ ID NO: 647352 - protein, 14 aa, Homo sapiens
  CDR3 for beta chain variable domain of TCR clone 323676 (TRBV4-1, TRBJ2-2)
CASSQAVNTGELFF

SEQ ID NO: 647353 - protein, 14 aa, Homo sapiens
  CDR3 for alpha chain variable domain of TCR clone 323677 (TRAV23/DV6, TRAJ11)
CAASLESGYSTLTF

SEQ ID NO: 647354 - protein, 15 aa, Homo sapiens
  CDR3 for beta chain variable domain of TCR clone 323677 (TRBV6-3, TRBJ2-7)
CASSSPGTVFYEQYF

SEQ ID NO: 647355 - protein, 11 aa, Homo sapiens
  CDR3 for alpha chain variable domain of TCR clone 323678 (TRAV1-1, TRAJ31)
CAAFPNARLMF

SEQ ID NO: 647356 - protein, 16 aa, Homo sapiens
  CDR3 for beta chain variable domain of TCR clone 323678 (TRBV4-3, TRBJ2-2)
CASSHLQGSGTGELFF

SEQ ID NO: 647357 - protein, 16 aa, Homo sapiens
  CDR3 for alpha chain variable domain of TCR clone 323679 (TRAV30, TRAJ24)
CGTKIVDADSWGKFQF

SEQ ID NO: 647358 - protein, 15 aa, Homo sapiens
  CDR3 for beta chain variable domain of TCR clone 323679 (TRBV9, TRBJ1-6)
CASSVAGTGDSTLHF

SEQ ID NO: 647359 - protein, 14 aa, Homo sapiens
  CDR3 for alpha chain variable domain of TCR clone 323680 (TRAV12-2, TRAJ40)
CAVKIPSGTSKYIF

SEQ ID NO: 647360 - protein, 17 aa, Homo sapiens
  CDR3 for beta chain variable domain of TCR clone 323680 (TRBV7-8, TRBJ2-6)
CASSAGTGGAGANVLTF

SEQ ID NO: 647361 - protein, 15 aa, Homo sapiens
  CDR3 for alpha chain variable domain of TCR clone 323681 (TRAV8-3, TRAJ11)
CAVGLLNSGYSTLTF

SEQ ID NO: 647362 - protein, 13 aa, Homo sapiens
  CDR3 for beta chain variable domain of TCR clone 323681 (TRBV9, TRBJ2-1)
CASSVGQGGEQFF

SEQ ID NO: 647363 - protein, 14 aa, Homo sapiens
  CDR3 for alpha chain variable domain of TCR clone 323682 (TRAV13-1, TRAJ44)
CAASSTGTASKLTF

SEQ ID NO: 647364 - protein, 14 aa, Homo sapiens
  CDR3 for beta chain variable domain of TCR clone 323682 (TRBV7-6, TRBJ1-1)
CASSFSEGGTEAFF

SEQ ID NO: 647365 - protein, 16 aa, Homo sapiens
  CDR3 for alpha chain variable domain of TCR clone 323683 (TRAV16, TRAJ52)
CALSAAGGTSYGKLTF

SEQ ID NO: 647366 - protein, 12 aa, Homo sapiens
  CDR3 for beta chain variable domain of TCR clone 323683 (TRBV24-1, TRBJ1-1)
CATSDPGLEAFF

SEQ ID NO: 647367 - protein, 10 aa, Homo sapiens
  CDR3 for alpha chain variable domain of TCR clone 323684 (TRAV2, TRAJ26)
CAVVGLWPEF

SEQ ID NO: 647368 - protein, 15 aa, Homo sapiens
  CDR3 for beta chain variable domain of TCR clone 323684 (TRBV11-2, TRBJ2-1)
CASSLGTSGLNEQFF

SEQ ID NO: 647369 - protein, 12 aa, Homo sapiens
  CDR3 for alpha chain variable domain of TCR clone 323685 (TRAV8-3, TRAJ6)
CAVAGGSYIPTF

SEQ ID NO: 647370 - protein, 14 aa, Homo sapiens
  CDR3 for beta chain variable domain of TCR clone 323685 (TRBV27, TRBJ2-7)
CASATGTERREQYC

SEQ ID NO: 647371 - protein, 11 aa, Homo sapiens
  CDR3 for alpha chain variable domain of TCR clone 323686 (TRAV23/DV6, TRAJ58)
CAARLLRGETS

SEQ ID NO: 647372 - protein, 15 aa, Homo sapiens
  CDR3 for beta chain variable domain of TCR clone 323686 (TRBV9, TRBJ1-6)
CDSSVAGTGDSPLHF

SEQ ID NO: 647373 - protein, 13 aa, Homo sapiens
  CDR3 for alpha chain variable domain of TCR clone 323687 (TRAV16, TRAJ58)
CALSIPSGSRLTF

SEQ ID NO: 647374 - protein, 13 aa, Homo sapiens
  CDR3 for beta chain variable domain of TCR clone 323687 (TRBV10-3, TRBJ1-2)
CAISERDSYGYTF

SEQ ID NO: 647375 - protein, 13 aa, Homo sapiens
  CDR3 for alpha chain variable domain of TCR clone 323688 (TRAV26-1, TRAJ36)
CIVRVVGDEKLTF

SEQ ID NO: 647376 - protein, 16 aa, Homo sapiens
  CDR3 for beta chain variable domain of TCR clone 323688 (TRBV4-2, TRBJ2-3)
CASSQELAGDTDTQYF

SEQ ID NO: 647377 - protein, 16 aa, Homo sapiens
  CDR3 for alpha chain variable domain of TCR clone 323689 (TRAV12-3, TRAJ53)
CAMSPGSGGSNYKLTV

SEQ ID NO: 647378 - protein, 12 aa, Homo sapiens
  CDR3 for beta chain variable domain of TCR clone 323689 (TRBV7-8, TRBJ2-7)
CASSLGDREQYF

SEQ ID NO: 647379 - protein, 19 aa, Homo sapiens
  CDR3 for alpha chain variable domain of TCR clone 323690 (TRAV13-1, TRAJ52)
CAASPYQNAGGTSYGKLTF

SEQ ID NO: 647380 - protein, 14 aa, Homo sapiens
  CDR3 for beta chain variable domain of TCR clone 323690 (TRBV7-6, TRBJ2-3)
CASSLGTVTDTQYF

SEQ ID NO: 647381 - protein, 14 aa, Homo sapiens
  CDR3 for alpha chain variable domain of TCR clone 323691 (TRAV8-1, TRAJ4)
CAVKFSGGYNKLIF

SEQ ID NO: 647382 - protein, 22 aa, Homo sapiens
  CDR3 for beta chain variable domain of TCR clone 323691 (TRBV7-3, TRBJ2-5)
CASARDRVILRSRDPVLRARHA

SEQ ID NO: 647383 - protein, 14 aa, Homo sapiens
  CDR3 for alpha chain variable domain of TCR clone 323692 (TRAV20, TRAJ32)
CCGRYDGATNKLIF

SEQ ID NO: 647384 - protein, 16 aa, Homo sapiens
  CDR3 for beta chain variable domain of TCR clone 323692 (TRBV19, TRBJ2-2)
CASRSPGTGATGELFF

SEQ ID NO: 647385 - protein, 11 aa, Homo sapiens
  CDR3 for alpha chain variable domain of TCR clone 323693 (TRAV13-1, TRAJ39)
CASHAGNMLTF

SEQ ID NO: 647386 - protein, 15 aa, Homo sapiens
  CDR3 for beta chain variable domain of TCR clone 323693 (TRBV27, TRBJ1-3)
CASSPQGATGNTIYF

SEQ ID NO: 647387 - protein, 14 aa, Homo sapiens
  CDR3 for alpha chain variable domain of TCR clone 323694 (TRAV14/DV4, TRAJ54)
CAMREAPGAQKLVF

SEQ ID NO: 647388 - protein, 13 aa, Homo sapiens
  CDR3 for beta chain variable domain of TCR clone 323694 (TRBV19, TRBJ2-1)
CQSDFRLSGEQFF

SEQ ID NO: 647389 - protein, 18 aa, Homo sapiens
  CDR3 for alpha chain variable domain of TCR clone 323695 (TRAV21, TRAJ52)
CAVRASPAGGTSYGKLTF

SEQ ID NO: 647390 - protein, 14 aa, Homo sapiens
  CDR3 for beta chain variable domain of TCR clone 323695 (TRBV2, TRBJ2-7)
CASSLTSGGYEQYF

SEQ ID NO: 647391 - protein, 14 aa, Homo sapiens
  CDR3 for alpha chain variable domain of TCR clone 323696 (TRAV12-2, TRAJ13)
CAVKKTGGHKKVTF

SEQ ID NO: 647392 - protein, 15 aa, Homo sapiens
  CDR3 for beta chain variable domain of TCR clone 323696 (TRBV27, TRBJ2-1)
CASSNGGGSSNEQFF

SEQ ID NO: 647393 - protein, 14 aa, Homo sapiens
  CDR3 for alpha chain variable domain of TCR clone 323697 (TRAV12-3, TRAJ10)
SHLPLTGGGNKLTF

SEQ ID NO: 647394 - protein, 15 aa, Homo sapiens
  CDR3 for beta chain variable domain of TCR clone 323697 (TRBV7-9, TRBJ1-4)
CASSRTGGFNEELFF

SEQ ID NO: 647395 - protein, 14 aa, Homo sapiens
  CDR3 for alpha chain variable domain of TCR clone 323698 (TRAV12-1, TRAJ17)
CVVNPKAAGNKLTF

SEQ ID NO: 647396 - protein, 17 aa, Homo sapiens
  CDR3 for beta chain variable domain of TCR clone 323698 (TRBV28, TRBJ2-5)
CASSRQGGLAGAETQYF

SEQ ID NO: 647397 - protein, 13 aa, Homo sapiens
  CDR3 for alpha chain variable domain of TCR clone 323699 (TRAV8-3, TRAJ48)
CAVVPFGNEKLTF

SEQ ID NO: 647398 - protein, 11 aa, Homo sapiens
  CDR3 for beta chain variable domain of TCR clone 323699 (TRBV19, TRBJ1-1)
CASSIGSEAFF

SEQ ID NO: 647399 - protein, 12 aa, Homo sapiens
  CDR3 for alpha chain variable domain of TCR clone 323700 (TRAV13-1, TRAJ21)
CAAKEGFNKFYF

SEQ ID NO: 647400 - protein, 20 aa, Homo sapiens
  CDR3 for beta chain variable domain of TCR clone 323700 (TRBV7-8, TRBJ2-2)
CASSHLFPEPTIHITGELFF

SEQ ID NO: 647401 - protein, 15 aa, Homo sapiens
  CDR3 for alpha chain variable domain of TCR clone 323701 (TRAV12-1, TRAJ41)
CVVNGASNSGYALNF

SEQ ID NO: 647402 - protein, 15 aa, Homo sapiens
  CDR3 for beta chain variable domain of TCR clone 323701 (TRBV7-2, TRBJ1-5)
CASSSTGVDNQHQHF

SEQ ID NO: 647403 - protein, 13 aa, Homo sapiens
  CDR3 for alpha chain variable domain of TCR clone 323702 (TRAV17, TRAJ5)
CALRGTGRRALTF

SEQ ID NO: 647404 - protein, 14 aa, Homo sapiens
  CDR3 for beta chain variable domain of TCR clone 323702 (TRBV7-3, TRBJ2-2)
CASSSGGYTGELFF

SEQ ID NO: 647405 - protein, 17 aa, Homo sapiens
  CDR3 for alpha chain variable domain of TCR clone 323703 (TRAV4, TRAJ22)
CCVLLPRGGGSARQLTF

SEQ ID NO: 647406 - protein, 12 aa, Homo sapiens
  CDR3 for beta chain variable domain of TCR clone 323703 (TRBV11-2, TRBJ2-2)
CASSLGGGELFF

SEQ ID NO: 647407 - protein, 14 aa, Homo sapiens
  CDR3 for alpha chain variable domain of TCR clone 323704 (TRAV20, TRAJ54)
CAVQAGRGAQKLVF

SEQ ID NO: 647408 - protein, 15 aa, Homo sapiens
  CDR3 for beta chain variable domain of TCR clone 323704 (TRBV28, TRBJ2-5)
CASSPPWSYQETQYF

SEQ ID NO: 647409 - protein, 13 aa, Homo sapiens
  CDR3 for alpha chain variable domain of TCR clone 323705 (TRAV13-1, TRAJ5)
CAARVTGRIALTF

SEQ ID NO: 647410 - protein, 15 aa, Homo sapiens
  CDR3 for beta chain variable domain of TCR clone 323705 (TRBV7-9, TRBJ2-7)
CASSPGGGLTYEQYF

SEQ ID NO: 647411 - protein, 15 aa, Homo sapiens
  CDR3 for alpha chain variable domain of TCR clone 323706 (TRAV26-1, TRAJ44)
CFVRVANGTASKLTF

SEQ ID NO: 647412 - protein, 18 aa, Homo sapiens
  CDR3 for beta chain variable domain of TCR clone 323706 (TRBV20-1, TRBJ2-3)
CSAKPLVRGARRTDTQYF

SEQ ID NO: 647413 - protein, 11 aa, Homo sapiens
  CDR3 for alpha chain variable domain of TCR clone 323707 (TRAV12-2, TRAJ33)
CAVTSSYQLIW

SEQ ID NO: 647414 - protein, 14 aa, Homo sapiens
  CDR3 for beta chain variable domain of TCR clone 323707 (TRBV28, TRBJ2-2)
CASRIRSGTGELFF

SEQ ID NO: 647415 - protein, 17 aa, Homo sapiens
  CDR3 for alpha chain variable domain of TCR clone 323708 (TRAV3, TRAJ6)
CAARDGARAGGSYIPTF

SEQ ID NO: 647416 - protein, 14 aa, Homo sapiens
  CDR3 for beta chain variable domain of TCR clone 323708 (TRBV7-2, TRBJ2-7)
CASSPKTSFYEQYF

SEQ ID NO: 647417 - protein, 19 aa, Homo sapiens
  CDR3 for alpha chain variable domain of TCR clone 323709 (TRAV30, TRAJ52)
CGTEANTNAGGTSYGKLTF

SEQ ID NO: 647418 - protein, 11 aa, Homo sapiens
  CDR3 for beta chain variable domain of TCR clone 323709 (TRBV29-1, TRBJ2-5)
CSEERTGTQYF

SEQ ID NO: 647419 - protein, 13 aa, Homo sapiens
  CDR3 for alpha chain variable domain of TCR clone 323710 (TRAV14/DV4, TRAJ22)
CAMRDFSARQLTF

SEQ ID NO: 647420 - protein, 18 aa, Homo sapiens
  CDR3 for beta chain variable domain of TCR clone 323710 (TRBV19, TRBJ1-5)
CASSKGQVSIHSNQPQHF

SEQ ID NO: 647421 - protein, 13 aa, Homo sapiens
  CDR3 for alpha chain variable domain of TCR clone 323711 (TRAV2, TRAJ24)
CDLQLTAGGNSSL

SEQ ID NO: 647422 - protein, 13 aa, Homo sapiens
  CDR3 for beta chain variable domain of TCR clone 323711 (TRBV7-9, TRBJ1-2)
CAGSLKQNYGDTF

SEQ ID NO: 647423 - protein, 14 aa, Homo sapiens
  CDR3 for alpha chain variable domain of TCR clone 323712 (TRAV12-1, TRAJ17)
CVVNYKAAGNKLTF

SEQ ID NO: 647424 - protein, 17 aa, Homo sapiens
  CDR3 for beta chain variable domain of TCR clone 323712 (TRBV7-9, TRBJ2-3)
CASSPTVAGDLTDTQYF

SEQ ID NO: 647425 - protein, 16 aa, Homo sapiens
  CDR3 for alpha chain variable domain of TCR clone 323713 (TRAV12-1, TRAJ52)
CVVPPAGGTSYGKLTF

SEQ ID NO: 647426 - protein, 14 aa, Homo sapiens
  CDR3 for beta chain variable domain of TCR clone 323713 (TRBV5-1, TRBJ1-1)
CASSLTRRSTEAFF

SEQ ID NO: 647427 - protein, 12 aa, Homo sapiens
  CDR3 for alpha chain variable domain of TCR clone 323714 (TRAV12-3, TRAJ17)
CAMTLTGNKLTF

SEQ ID NO: 647428 - protein, 16 aa, Homo sapiens
  CDR3 for beta chain variable domain of TCR clone 323714 (TRBV27, TRBJ2-1)
CASSLTTSGLFDEQFF

SEQ ID NO: 647429 - protein, 13 aa, Homo sapiens
  CDR3 for alpha chain variable domain of TCR clone 323715 (TRAV2, TRAJ40)
CAVVTSGTYKYIF

SEQ ID NO: 647430 - protein, 15 aa, Homo sapiens
  CDR3 for beta chain variable domain of TCR clone 323715 (TRBV20-1, TRBJ2-7)
CSAESGTSGAYEQYF

SEQ ID NO: 647431 - protein, 16 aa, Homo sapiens
  CDR3 for alpha chain variable domain of TCR clone 323716 (TRAV26-1, TRAJ47)
CIVRVVLSQYGNKLVF

SEQ ID NO: 647432 - protein, 16 aa, Homo sapiens
  CDR3 for beta chain variable domain of TCR clone 323716 (TRBV5-1, TRBJ2-1)
CASSFGVSGSYNEQFL

SEQ ID NO: 647433 - protein, 16 aa, Homo sapiens
  CDR3 for alpha chain variable domain of TCR clone 323717 (TRAV12-1, TRAJ48)
CVVNMVSNFGNEKLTF

SEQ ID NO: 647434 - protein, 18 aa, Homo sapiens
  CDR3 for beta chain variable domain of TCR clone 323717 (TRBV11-2, TRBJ2-6)
CASSLNPFQGTGANVLTF

SEQ ID NO: 647435 - protein, 15 aa, Homo sapiens
  CDR3 for alpha chain variable domain of TCR clone 323718 (TRAV12-2, TRAJ43)
CAFDMRFGAGTRLTV

SEQ ID NO: 647436 - protein, 20 aa, Homo sapiens
  CDR3 for beta chain variable domain of TCR clone 323718 (TRBV14, TRBJ2-3)
CASSQDRGVSQIRSIWPRHP

SEQ ID NO: 647437 - protein, 12 aa, Homo sapiens
  CDR3 for alpha chain variable domain of TCR clone 323719 (TRAV36/DV7, TRAJ54)
CAVVRGAQKLVF

SEQ ID NO: 647438 - protein, 15 aa, Homo sapiens
  CDR3 for beta chain variable domain of TCR clone 323719 (TRBV10-2, TRBJ2-6)
CASSEQGTGANVLTF

SEQ ID NO: 647439 - protein, 13 aa, Homo sapiens
  CDR3 for alpha chain variable domain of TCR clone 323720 (TRAV21, TRAJ15)
CAVRNQAGTALVF

SEQ ID NO: 647440 - protein, 16 aa, Homo sapiens
  CDR3 for beta chain variable domain of TCR clone 323720 (TRBV20-1, TRBJ2-5)
CSPGGTSGGYMETQYF

SEQ ID NO: 647441 - protein, 14 aa, Homo sapiens
  CDR3 for alpha chain variable domain of TCR clone 323721 (TRAV23/DV6, TRAJ17)
GAASVQAAGNKLTF

SEQ ID NO: 647442 - protein, 18 aa, Homo sapiens
  CDR3 for beta chain variable domain of TCR clone 323721 (TRBV20-1, TRBJ2-7)
CSAGLPPRSGGSPYEQYF

SEQ ID NO: 647443 - protein, 15 aa, Homo sapiens
  CDR3 for alpha chain variable domain of TCR clone 323722 (TRAV21, TRAJ37)
GAVRPTLSNTGKLIF

SEQ ID NO: 647444 - protein, 16 aa, Homo sapiens
  CDR3 for beta chain variable domain of TCR clone 323722 (TRBV24-1, TRBJ2-3)
CATSDRRQDLTDTQYF

SEQ ID NO: 647445 - protein, 14 aa, Homo sapiens
  CDR3 for alpha chain variable domain of TCR clone 323723 (TRAV10, TRAJ35)
CVVRSIGFGNVLHC

SEQ ID NO: 647446 - protein, 15 aa, Homo sapiens
  CDR3 for beta chain variable domain of TCR clone 323723 (TRBV20-1, TRBJ2-7)
CSARDRVSGMDEQYF

SEQ ID NO: 647447 - protein, 14 aa, Homo sapiens
  CDR3 for alpha chain variable domain of TCR clone 323724 (TRAV17, TRAJ16)
CATADFSDGQKLLF

SEQ ID NO: 647448 - protein, 13 aa, Homo sapiens
  CDR3 for beta chain variable domain of TCR clone 323724 (TRBV28, TRBJ2-7)
FASSPSGTYEQYF

SEQ ID NO: 647449 - protein, 13 aa, Homo sapiens
  CDR3 for alpha chain variable domain of TCR clone 323725 (TRAV13-1, TRAJ21)
CAASIYNFNKFYF

SEQ ID NO: 647450 - protein, 11 aa, Homo sapiens
  CDR3 for beta chain variable domain of TCR clone 323725 (TRBV6-3, TRBJ2-3)
CATGQADTQYF

SEQ ID NO: 647451 - protein, 11 aa, Homo sapiens
  CDR3 for alpha chain variable domain of TCR clone 323726 (TRAV17, TRAJ36)
CAPTGANTLFF

SEQ ID NO: 647452 - protein, 12 aa, Homo sapiens
  CDR3 for beta chain variable domain of TCR clone 323726 (TRBV29-1, TRBJ2-3)
CSVTGGADTQYF

SEQ ID NO: 647453 - protein, 14 aa, Homo sapiens
  CDR3 for alpha chain variable domain of TCR clone 323727 (TRAV27, TRAJ17)
CRSTIRAAGNKLTF

SEQ ID NO: 647454 - protein, 18 aa, Homo sapiens
  CDR3 for beta chain variable domain of TCR clone 323727 (TRBV7-6, TRBJ1-3)
CASSSPIGGDSSGNTIYF

SEQ ID NO: 647455 - protein, 13 aa, Homo sapiens
  CDR3 for alpha chain variable domain of TCR clone 323728 (TRAV12-1, TRAJ26)
CVVRRNYGQNFVF

SEQ ID NO: 647456 - protein, 14 aa, Homo sapiens
  CDR3 for beta chain variable domain of TCR clone 323728 (TRBV6-3, TRBJ1-1)
CGSRYTGESTEAFF

SEQ ID NO: 647457 - protein, 12 aa, Homo sapiens
  CDR3 for alpha chain variable domain of TCR clone 323729 (TRAV2, TRAJ31)
CAVEDNNARLMF

SEQ ID NO: 647458 - protein, 12 aa, Homo sapiens
  CDR3 for beta chain variable domain of TCR clone 323729 (TRBV28, TRBJ2-1)
CASSVQINEQFF

SEQ ID NO: 647459 - protein, 16 aa, Homo sapiens
  CDR3 for alpha chain variable domain of TCR clone 323730 (TRAV3, TRAJ18)
CAVRDGRGSTLGRLYF

SEQ ID NO: 647460 - protein, 13 aa, Homo sapiens
  CDR3 for beta chain variable domain of TCR clone 323730 (TRBV7-6, TRBJ1-2)
CASSLSDRYGYTF

SEQ ID NO: 647461 - protein, 17 aa, Homo sapiens
  CDR3 for alpha chain variable domain of TCR clone 323731 (TRAV13-2, TRAJ45)
STFVQRVTGGGADGLTF

SEQ ID NO: 647462 - protein, 17 aa, Homo sapiens
  CDR3 for beta chain variable domain of TCR clone 323731 (TRBV19, TRBJ1-1)
CASSIAGRGLMNTEAFF

SEQ ID NO: 647463 - protein, 13 aa, Homo sapiens
  CDR3 for alpha chain variable domain of TCR clone 323732 (TRAV12-3, TRAJ15)
CNDPPQAGTALIF

SEQ ID NO: 647464 - protein, 14 aa, Homo sapiens
  CDR3 for beta chain variable domain of TCR clone 323732 (TRBV20-1, TRBJ2-2)
CSARKRLATGELFF

SEQ ID NO: 647465 - protein, 13 aa, Homo sapiens
  CDR3 for alpha chain variable domain of TCR clone 323733 (TRAV27, TRAJ23)
CAGVLPKGGKLIF

SEQ ID NO: 647466 - protein, 15 aa, Homo sapiens
  CDR3 for beta chain variable domain of TCR clone 323733 (TRBV20-1, TRBJ2-7)
CSARDRVSGMDEQYF

SEQ ID NO: 647467 - protein, 14 aa, Homo sapiens
  CDR3 for alpha chain variable domain of TCR clone 323734 (TRAV38-1, TRAJ39)
CAFAYNNAGNMLTF

SEQ ID NO: 647468 - protein, 15 aa, Homo sapiens
  CDR3 for beta chain variable domain of TCR clone 323734 (TRBV19, TRBJ2-6)
CACSIGPSGANVLTF

SEQ ID NO: 647469 - protein, 14 aa, Homo sapiens
  CDR3 for alpha chain variable domain of TCR clone 323735 (TRAV3, TRAJ21)
CAVRDKYNFNKFYF

SEQ ID NO: 647470 - protein, 15 aa, Homo sapiens
  CDR3 for beta chain variable domain of TCR clone 323735 (TRBV7-2, TRBJ2-3)
CASSSTGLETDTQYF

SEQ ID NO: 647471 - protein, 16 aa, Homo sapiens
  CDR3 for alpha chain variable domain of TCR clone 323736 (TRAV3, TRAJ3)
CAVRDRAKSSASKIIF

SEQ ID NO: 647472 - protein, 15 aa, Homo sapiens
  CDR3 for beta chain variable domain of TCR clone 323736 (TRBV5-1, TRBJ2-5)
CASSLGLAEQETQYF

SEQ ID NO: 647473 - protein, 12 aa, Homo sapiens
  CDR3 for alpha chain variable domain of TCR clone 323737 (TRAV12-2, TRAJ20)
CAVRPSDYKLSF

SEQ ID NO: 647474 - protein, 14 aa, Homo sapiens
  CDR3 for beta chain variable domain of TCR clone 323737 (TRBV7-2, TRBJ2-7)
CASRSQGAAYEQYF

SEQ ID NO: 647475 - protein, 12 aa, Homo sapiens
  CDR3 for alpha chain variable domain of TCR clone 323738 (TRAV2, TRAJ24)
CAATDSWGKFQV

SEQ ID NO: 647476 - protein, 15 aa, Homo sapiens
  CDR3 for beta chain variable domain of TCR clone 323738 (TRBV10-3, TRBJ2-2)
CAIYTGGTGTGELFF

SEQ ID NO: 647477 - protein, 12 aa, Homo sapiens
  CDR3 for alpha chain variable domain of TCR clone 323739 (TRAV9-2, TRAJ3)
CALYSSASKIIF

SEQ ID NO: 647478 - protein, 16 aa, Homo sapiens
  CDR3 for beta chain variable domain of TCR clone 323739 (TRBV7-3, TRBJ2-2)
CASSLKRGTLSGELFF

SEQ ID NO: 647479 - protein, 17 aa, Homo sapiens
  CDR3 for alpha chain variable domain of TCR clone 323740 (TRAV26-1, TRAJ22)
CIVRVPSHSGSARQLTF

SEQ ID NO: 647480 - protein, 16 aa, Homo sapiens
  CDR3 for beta chain variable domain of TCR clone 323740 (TRBV28, TRBJ2-1)
CASRRSGRVEGNEQFF

SEQ ID NO: 647481 - protein, 16 aa, Homo sapiens
  CDR3 for alpha chain variable domain of TCR clone 323741 (TRAV12-3, TRAJ50)
CAMRDPMKTSYDKLIF

SEQ ID NO: 647482 - protein, 13 aa, Homo sapiens
  CDR3 for beta chain variable domain of TCR clone 323741 (TRBV4-1, TRBJ2-3)
CASSLDFTDTQYF

SEQ ID NO: 647483 - protein, 12 aa, Homo sapiens
  CDR3 for alpha chain variable domain of TCR clone 323742 (TRAV8-3, TRAJ26)
CAGDNYGQNFVF

SEQ ID NO: 647484 - protein, 11 aa, Homo sapiens
  CDR3 for beta chain variable domain of TCR clone 323742 (TRBV7-3, TRBJ2-5)
CASSLSETQYF

SEQ ID NO: 647485 - protein, 15 aa, Homo sapiens
  CDR3 for alpha chain variable domain of TCR clone 323743 (TRAV29/DV5, TRAJ29)
CAASKRSSGNTPLVF

SEQ ID NO: 647486 - protein, 17 aa, Homo sapiens
  CDR3 for beta chain variable domain of TCR clone 323743 (TRBV4-1, TRBJ1-4)
CASSQEGPRGVEEKLFF

SEQ ID NO: 647487 - protein, 11 aa, Homo sapiens
  CDR3 for alpha chain variable domain of TCR clone 323744 (TRAV13-1, TRAJ43)
CAAHNNNDMRF

SEQ ID NO: 647488 - protein, 13 aa, Homo sapiens
  CDR3 for beta chain variable domain of TCR clone 323744 (TRBV20-1, TRBJ1-1)
CSARLGQGTEAFF

SEQ ID NO: 647489 - protein, 18 aa, Homo sapiens
  CDR3 for alpha chain variable domain of TCR clone 323745 (TRAV13-1, TRAJ52)
CAAKNPNAGGTSYGKLTF

SEQ ID NO: 647490 - protein, 15 aa, Homo sapiens
  CDR3 for beta chain variable domain of TCR clone 323745 (TRBV2, TRBJ2-2)
CASSRETVGTGEMFF

SEQ ID NO: 647491 - protein, 13 aa, Homo sapiens
  CDR3 for alpha chain variable domain of TCR clone 323746 (TRAV27, TRAJ40)
CAGPPSGTYKYIF

SEQ ID NO: 647492 - protein, 15 aa, Homo sapiens
  CDR3 for beta chain variable domain of TCR clone 323746 (TRBV20-1, TRBJ2-7)
CSAESGTSGAYEQYF

SEQ ID NO: 647493 - protein, 12 aa, Homo sapiens
  CDR3 for alpha chain variable domain of TCR clone 323747 (TRAV1-2, TRAJ24)
CAVGGSWGKFQF

SEQ ID NO: 647494 - protein, 12 aa, Homo sapiens
  CDR3 for beta chain variable domain of TCR clone 323747 (TRBV5-1, TRBJ1-2)
CASSQDTYGYTF

SEQ ID NO: 647495 - protein, 14 aa, Homo sapiens
  CDR3 for alpha chain variable domain of TCR clone 323748 (TRAV12-3, TRAJ5)
CAMTWDTGRRALTF

SEQ ID NO: 647496 - protein, 13 aa, Homo sapiens
  CDR3 for beta chain variable domain of TCR clone 323748 (TRBV11-2, TRBJ1-5)
CASSSGGNQHQHF

SEQ ID NO: 647497 - protein, 12 aa, Homo sapiens
  CDR3 for alpha chain variable domain of TCR clone 323749 (TRAV17, TRAJ12)
CATLRSSYKLIF

SEQ ID NO: 647498 - protein, 16 aa, Homo sapiens
  CDR3 for beta chain variable domain of TCR clone 323749 (TRBV28, TRBJ2-7)
CGSSLFFETGGPEQYF

SEQ ID NO: 647499 - protein, 15 aa, Homo sapiens
  CDR3 for alpha chain variable domain of TCR clone 323750 (TRAV12-3, TRAJ10)
CASYILTGGVNKLTF

SEQ ID NO: 647500 - protein, 15 aa, Homo sapiens
  CDR3 for beta chain variable domain of TCR clone 323750 (TRBV7-2, TRBJ1-6)
CASSLGPDRGMPLHF

SEQ ID NO: 647501 - protein, 14 aa, Homo sapiens
  CDR3 for alpha chain variable domain of TCR clone 323751 (TRAV38-1, TRAJ45)
CAYYSGGGAAGLTF

SEQ ID NO: 647502 - protein, 15 aa, Homo sapiens
  CDR3 for beta chain variable domain of TCR clone 323751 (TRBV11-2, TRBJ2-1)
CASSKNRGLIYEQFF

SEQ ID NO: 647503 - protein, 13 aa, Homo sapiens
  CDR3 for alpha chain variable domain of TCR clone 323752 (TRAV27, TRAJ41)
CAGAGNSGDALNF

SEQ ID NO: 647504 - protein, 14 aa, Homo sapiens
  CDR3 for beta chain variable domain of TCR clone 323752 (TRBV7-2, TRBJ1-1)
CASRFLTGTTEAFF

SEQ ID NO: 647505 - protein, 16 aa, Homo sapiens
  CDR3 for alpha chain variable domain of TCR clone 323753 (TRAV12-1, TRAJ43)
CVVNPHRFEAGTRLTV

SEQ ID NO: 647506 - protein, 13 aa, Homo sapiens
  CDR3 for beta chain variable domain of TCR clone 323753 (TRBV20-1, TRBJ1-1)
CSARGGGNTEAFF

SEQ ID NO: 647507 - protein, 17 aa, Homo sapiens
  CDR3 for alpha chain variable domain of TCR clone 323754 (TRAV3, TRAJ42)
FAVRDRDYGGSQGNLIF

SEQ ID NO: 647508 - protein, 14 aa, Homo sapiens
  CDR3 for beta chain variable domain of TCR clone 323754 (TRBV12-5, TRBJ2-5)
CASGSRTHQETQYF

SEQ ID NO: 647509 - protein, 14 aa, Homo sapiens
  CDR3 for alpha chain variable domain of TCR clone 323755 (TRAV1-2, TRAJ16)
CAVNRFSDGQKLLF

SEQ ID NO: 647510 - protein, 14 aa, Homo sapiens
  CDR3 for beta chain variable domain of TCR clone 323755 (TRBV7-2, TRBJ1-1)
CASSFLTGATEAFF

SEQ ID NO: 647511 - protein, 14 aa, Homo sapiens
  CDR3 for alpha chain variable domain of TCR clone 323756 (TRAV17, TRAJ45)
CATDARGGADGLTF

SEQ ID NO: 647512 - protein, 11 aa, Homo sapiens
  CDR3 for beta chain variable domain of TCR clone 323756 (TRBV28, TRBJ2-5)
CATGNQETQDF

SEQ ID NO: 647513 - protein, 13 aa, Homo sapiens
  CDR3 for alpha chain variable domain of TCR clone 323757 (TRAV8-3, TRAJ36)
CAVGATGANNLCF

SEQ ID NO: 647514 - protein, 13 aa, Homo sapiens
  CDR3 for beta chain variable domain of TCR clone 323757 (TRBV6-1, TRBJ1-1)
CASSRQGNTEAFF

SEQ ID NO: 647515 - protein, 12 aa, Homo sapiens
  CDR3 for alpha chain variable domain of TCR clone 323758 (TRAV13-1, TRAJ22)
DLSSGSARQLTF

SEQ ID NO: 647516 - protein, 13 aa, Homo sapiens
  CDR3 for beta chain variable domain of TCR clone 323758 (TRBV7-7, TRBJ1-5)
CASSHGKNQPQHF

SEQ ID NO: 647517 - protein, 14 aa, Homo sapiens
  CDR3 for alpha chain variable domain of TCR clone 323759 (TRAV13-2, TRAJ39)
GASVRNNAGNMLTF

SEQ ID NO: 647518 - protein, 13 aa, Homo sapiens
  CDR3 for beta chain variable domain of TCR clone 323759 (TRBV20-1, TRBJ2-7)
CSAPGLADYEQYF

SEQ ID NO: 647519 - protein, 12 aa, Homo sapiens
  CDR3 for alpha chain variable domain of TCR clone 323760 (TRAV1-1, TRAJ9)
CAVDTGGFKTIF

SEQ ID NO: 647520 - protein, 14 aa, Homo sapiens
  CDR3 for beta chain variable domain of TCR clone 323760 (TRBV4-2, TRBJ2-1)
CASGLDRAYNEQFF

SEQ ID NO: 647521 - protein, 17 aa, Homo sapiens
  CDR3 for alpha chain variable domain of TCR clone 323761 (TRAV3, TRAJ6)
CAVRDGARAGGSYIPTF

SEQ ID NO: 647522 - protein, 14 aa, Homo sapiens
  CDR3 for beta chain variable domain of TCR clone 323761 (TRBV12-5, TRBJ2-5)
CASGSRTHQETQYF

SEQ ID NO: 647523 - protein, 13 aa, Homo sapiens
  CDR3 for alpha chain variable domain of TCR clone 323762 (TRAV2, TRAJ40)
CAVVTSGTYKYIF

SEQ ID NO: 647524 - protein, 13 aa, Homo sapiens
  CDR3 for beta chain variable domain of TCR clone 323762 (TRBV11-2, TRBJ2-5)
CASSSTGEETQYF

SEQ ID NO: 647525 - protein, 13 aa, Homo sapiens
  CDR3 for alpha chain variable domain of TCR clone 323763 (TRAV3, TRAJ20)
CAVRSLNDFKLSF

SEQ ID NO: 647526 - protein, 13 aa, Homo sapiens
  CDR3 for beta chain variable domain of TCR clone 323763 (TRBV7-3, TRBJ1-1)
CASSQDWGAEAFF

SEQ ID NO: 647527 - protein, 15 aa, Homo sapiens
  CDR3 for alpha chain variable domain of TCR clone 323764 (TRAV17, TRAJ16)
CATALRFSDVQKLLF

SEQ ID NO: 647528 - protein, 15 aa, Homo sapiens
  CDR3 for beta chain variable domain of TCR clone 323764 (TRBV6-5, TRBJ2-1)
CASSYDAGAGNEQFF

SEQ ID NO: 647529 - protein, 12 aa, Homo sapiens
  CDR3 for alpha chain variable domain of TCR clone 323765 (TRAV21, TRAJ27)
CAPPGNAGKSTF

SEQ ID NO: 647530 - protein, 13 aa, Homo sapiens
  CDR3 for beta chain variable domain of TCR clone 323765 (TRBV2, TRBJ1-1)
CARNPTGGFHTFF

SEQ ID NO: 647531 - protein, 16 aa, Homo sapiens
  CDR3 for alpha chain variable domain of TCR clone 323766 (TRAV3, TRAJ37)
CAVIPLGSGNTGKLIF

SEQ ID NO: 647532 - protein, 16 aa, Homo sapiens
  CDR3 for beta chain variable domain of TCR clone 323766 (TRBV9, TRBJ1-2)
CASSVEEKVSPYGYTF

SEQ ID NO: 647533 - protein, 13 aa, Homo sapiens
  CDR3 for alpha chain variable domain of TCR clone 323767 (TRAV27, TRAJ11)
CAGARSGYSTLTF

SEQ ID NO: 647534 - protein, 13 aa, Homo sapiens
  CDR3 for beta chain variable domain of TCR clone 323767 (TRBV5-4, TRBJ2-1)
CASSLQGPREQFF

SEQ ID NO: 647535 - protein, 16 aa, Homo sapiens
  CDR3 for alpha chain variable domain of TCR clone 323768 (TRAV30, TRAJ49)
SAAQRVGPNTGKQFYF

SEQ ID NO: 647536 - protein, 15 aa, Homo sapiens
  CDR3 for beta chain variable domain of TCR clone 323768 (TRBV2, TRBJ2-1)
CASSELAGSYNEQFF

SEQ ID NO: 647537 - protein, 14 aa, Homo sapiens
  CDR3 for alpha chain variable domain of TCR clone 323769 (TRAV35, TRAJ42)
CAGRYGGSQGNLIF

SEQ ID NO: 647538 - protein, 16 aa, Homo sapiens
  CDR3 for beta chain variable domain of TCR clone 323769 (TRBV28, TRBJ2-7)
CASSLFFETGGPEQYF

SEQ ID NO: 647539 - protein, 10 aa, Homo sapiens
  CDR3 for alpha chain variable domain of TCR clone 323770 (TRAV1-2, TRAJ23)
CAGQGGKLIF

SEQ ID NO: 647540 - protein, 12 aa, Homo sapiens
  CDR3 for beta chain variable domain of TCR clone 323770 (TRBV2, TRBJ2-1)
CAKREGYNEQFF

SEQ ID NO: 647541 - protein, 14 aa, Homo sapiens
  CDR3 for alpha chain variable domain of TCR clone 323771 (TRAV16, TRAJ57)
CALPTQGGSEKLAF

SEQ ID NO: 647542 - protein, 15 aa, Homo sapiens
  CDR3 for beta chain variable domain of TCR clone 323771 (TRBV28, TRBJ1-3)
CASWGGHLSGNTMYF

SEQ ID NO: 647543 - protein, 12 aa, Homo sapiens
  CDR3 for alpha chain variable domain of TCR clone 323772 (TRAV13-1, TRAJ15)
CAASQAGTALIF

SEQ ID NO: 647544 - protein, 13 aa, Homo sapiens
  CDR3 for beta chain variable domain of TCR clone 323772 (TRBV10-3, TRBJ1-2)
CAISERDSYGYSF

SEQ ID NO: 647545 - protein, 14 aa, Homo sapiens
  CDR3 for alpha chain variable domain of TCR clone 323773 (TRAV12-1, TRAJ9)
CVSFGDTGGFKTIF

SEQ ID NO: 647546 - protein, 13 aa, Homo sapiens
  CDR3 for beta chain variable domain of TCR clone 323773 (TRBV2, TRBJ1-4)
CASSERAGEKLFF

SEQ ID NO: 647547 - protein, 12 aa, Homo sapiens
  CDR3 for alpha chain variable domain of TCR clone 323774 (TRAV1-2, TRAJ42)
CVAGGSPGNLIF

SEQ ID NO: 647548 - protein, 14 aa, Homo sapiens
  CDR3 for beta chain variable domain of TCR clone 323774 (TRBV5-4, TRBJ2-5)
CASSLVRGQETQYF

SEQ ID NO: 647549 - protein, 16 aa, Homo sapiens
  CDR3 for alpha chain variable domain of TCR clone 323775 (TRAV3, TRAJ37)
CAVRGKGSGNTGKLIF

SEQ ID NO: 647550 - protein, 20 aa, Homo sapiens
  CDR3 for beta chain variable domain of TCR clone 323775 (TRBV7-8, TRBJ2-2)
CASSHLFPGPPIHITGELFF

SEQ ID NO: 647551 - protein, 11 aa, Homo sapiens
  CDR3 for alpha chain variable domain of TCR clone 323776 (TRAV17, TRAJ36)
CAPTGANNLFF

SEQ ID NO: 647552 - protein, 17 aa, Homo sapiens
  CDR3 for beta chain variable domain of TCR clone 323776 (TRBV11-2, TRBJ2-3)
CQQLRGASRGAPNTQYF

SEQ ID NO: 647553 - protein, 14 aa, Homo sapiens
  CDR3 for alpha chain variable domain of TCR clone 323777 (TRAV8-2, TRAJ11)
CVVSEKSGYSTLTF

SEQ ID NO: 647554 - protein, 16 aa, Homo sapiens
  CDR3 for beta chain variable domain of TCR clone 323777 (TRBV28, TRBJ2-1)
CASSSPEYPRDKEQFF

SEQ ID NO: 647555 - protein, 16 aa, Homo sapiens
  CDR3 for alpha chain variable domain of TCR clone 323778 (TRAV26-1, TRAJ53)
CIVRVAMGGSNYKLTF

SEQ ID NO: 647556 - protein, 14 aa, Homo sapiens
  CDR3 for beta chain variable domain of TCR clone 323778 (TRBV18, TRBJ2-7)
CAGSPRGGSYEQYF

SEQ ID NO: 647557 - protein, 14 aa, Homo sapiens
  CDR3 for alpha chain variable domain of TCR clone 323779 (TRAV4, TRAJ6)
CLVGEAGGSYIPTF

SEQ ID NO: 647558 - protein, 14 aa, Homo sapiens
  CDR3 for beta chain variable domain of TCR clone 323779 (TRBV6-1, TRBJ1-3)
CASVQGGGGNTIYF

SEQ ID NO: 647559 - protein, 14 aa, Homo sapiens
  CDR3 for alpha chain variable domain of TCR clone 323780 (TRAV8-4, TRAJ8)
CAVSEDTGFQKLVF

SEQ ID NO: 647560 - protein, 16 aa, Homo sapiens
  CDR3 for beta chain variable domain of TCR clone 323780 (TRBV7-3, TRBJ2-1)
CASSKPLAGGYNEEFF

SEQ ID NO: 647561 - protein, 13 aa, Homo sapiens
  CDR3 for alpha chain variable domain of TCR clone 323781 (TRAV12-1, TRAJ21)
CVVIGDNFNKFYF

SEQ ID NO: 647562 - protein, 15 aa, Homo sapiens
  CDR3 for beta chain variable domain of TCR clone 323781 (TRBV7-6, TRBJ2-1)
CASSSLAGEGNEQFF

SEQ ID NO: 647563 - protein, 23 aa, Homo sapiens
  CDR3 for alpha chain variable domain of TCR clone 323782 (TRAV26-1, TRAJ38)
CIADNAGNNHIQNPDPAVYQLRD

SEQ ID NO: 647564 - protein, 17 aa, Homo sapiens
  CDR3 for beta chain variable domain of TCR clone 323782 (TRBV7-8, TRBJ2-6)
CASSAGTGGAGANVLTF

SEQ ID NO: 647565 - protein, 17 aa, Homo sapiens
  CDR3 for alpha chain variable domain of TCR clone 323783 (TRAV3, TRAJ42)
SAVRDRDYGGSQGNLIF

SEQ ID NO: 647566 - protein, 12 aa, Homo sapiens
  CDR3 for beta chain variable domain of TCR clone 323783 (TRBV11-2, TRBJ2-1)
CASSPGNNEQFF

SEQ ID NO: 647567 - protein, 14 aa, Homo sapiens
  CDR3 for alpha chain variable domain of TCR clone 323784 (TRAV8-4, TRAJ9)
CAVILNTGGFKTIF

SEQ ID NO: 647568 - protein, 11 aa, Homo sapiens
  CDR3 for beta chain variable domain of TCR clone 323784 (TRBV7-9, TRBJ2-6)
CASPTANVLTF

SEQ ID NO: 647569 - protein, 18 aa, Homo sapiens
  CDR3 for alpha chain variable domain of TCR clone 323785 (TRAV21, TRAJ52)
CAVRPSPAGGTSYGKLTF

SEQ ID NO: 647570 - protein, 17 aa, Homo sapiens
  CDR3 for beta chain variable domain of TCR clone 323785 (TRBV20-1, TRBJ2-1)
CSARDPLAGAWDNEQFF

SEQ ID NO: 647571 - protein, 13 aa, Homo sapiens
  CDR3 for alpha chain variable domain of TCR clone 323786 (TRAV8-3, TRAJ28)
CAVGAVGSYQLTF

SEQ ID NO: 647572 - protein, 14 aa, Homo sapiens
  CDR3 for beta chain variable domain of TCR clone 323786 (TRBV7-2, TRBJ2-1)
CASRSQGAAYEQYF

SEQ ID NO: 647573 - protein, 17 aa, Homo sapiens
  CDR3 for alpha chain variable domain of TCR clone 323787 (TRAV3, TRAJ6)
CTVRDGPRAGGSYIPTF

SEQ ID NO: 647574 - protein, 13 aa, Homo sapiens
  CDR3 for beta chain variable domain of TCR clone 323787 (TRBV27, TRBJ2-1)
CASRTLGVGEQFF

SEQ ID NO: 647575 - protein, 17 aa, Homo sapiens
  CDR3 for alpha chain variable domain of TCR clone 323788 (TRAV38-1, TRAJ28)
CAFMKPTPGAGSYQLTF

SEQ ID NO: 647576 - protein, 15 aa, Homo sapiens
  CDR3 for beta chain variable domain of TCR clone 323788 (TRBV5-1, TRBJ2-4)
CASSLGGGGSYTQYF

SEQ ID NO: 647577 - protein, 13 aa, Homo sapiens
  CDR3 for alpha chain variable domain of TCR clone 323789 (TRAV14/DV4, TRAJ4)
CAMKAGGYNKLIF

SEQ ID NO: 647578 - protein, 14 aa, Homo sapiens
  CDR3 for beta chain variable domain of TCR clone 323789 (TRBV7-2, TRBJ2-7)
CASSPKTSFYEQYF

SEQ ID NO: 647579 - protein, 15 aa, Homo sapiens
  CDR3 for alpha chain variable domain of TCR clone 323790 (TRAV16, TRAJ12)
CSKWPLRDSSYKLIF

SEQ ID NO: 647580 - protein, 13 aa, Homo sapiens
  CDR3 for beta chain variable domain of TCR clone 323790 (TRBV4-2, TRBJ1-1)
YASSQAGNTEAFF

SEQ ID NO: 647581 - protein, 19 aa, Homo sapiens
  CDR3 for alpha chain variable domain of TCR clone 323791 (TRAV2, TRAJ20)
ILQVREADAAVYRDCKLSF

SEQ ID NO: 647582 - protein, 16 aa, Homo sapiens
  CDR3 for beta chain variable domain of TCR clone 323791 (TRBV9, TRBJ2-2)
CASSAMGKGNTGELLF

SEQ ID NO: 647583 - protein, 14 aa, Homo sapiens
  CDR3 for alpha chain variable domain of TCR clone 323792 (TRAV17, TRAJ40)
CATALTSETYKYIF

SEQ ID NO: 647584 - protein, 13 aa, Homo sapiens
  CDR3 for beta chain variable domain of TCR clone 323792 (TRBV27, TRBJ2-1)
CASSSGSYNEQFF

SEQ ID NO: 647585 - protein, 11 aa, Homo sapiens
  CDR3 for alpha chain variable domain of TCR clone 323793 (TRAV12-2, TRAJ43)
CAAYNNNEMRF

SEQ ID NO: 647586 - protein, 14 aa, Homo sapiens
  CDR3 for beta chain variable domain of TCR clone 323793 (TRBV7-8, TRBJ1-2)
CASSAGTAIYGYTF

SEQ ID NO: 647587 - protein, 17 aa, Homo sapiens
  CDR3 for alpha chain variable domain of TCR clone 323794 (TRAV3, TRAJ6)
CAVGDGPRAGGSYIPTF

SEQ ID NO: 647588 - protein, 13 aa, Homo sapiens
  CDR3 for beta chain variable domain of TCR clone 323794 (TRBV20-1, TRBJ1-6)
CSAPLGVGSPLHF

SEQ ID NO: 647589 - protein, 17 aa, Homo sapiens
  CDR3 for alpha chain variable domain of TCR clone 323795 (TRAV21, TRAJ10)
CAVRVYILTGGGNKLTF

SEQ ID NO: 647590 - protein, 14 aa, Homo sapiens
  CDR3 for beta chain variable domain of TCR clone 323795 (TRBV7-6, TRBJ2-7)
CASSFRQGADEQYF

SEQ ID NO: 647591 - protein, 15 aa, Homo sapiens
  CDR3 for alpha chain variable domain of TCR clone 323796 (TRAV17, TRAJ56)
CATEPFTGANSKLTF

SEQ ID NO: 647592 - protein, 15 aa, Homo sapiens
  CDR3 for beta chain variable domain of TCR clone 323796 (TRBV28, TRBJ1-5)
CASSRTVGYVQTQHF

SEQ ID NO: 647593 - protein, 13 aa, Homo sapiens
  CDR3 for alpha chain variable domain of TCR clone 323797 (TRAV1-2, TRAJ9)
CAALNTGGFKTIF

SEQ ID NO: 647594 - protein, 14 aa, Homo sapiens
  CDR3 for beta chain variable domain of TCR clone 323797 (TRBV19, TRBJ2-1)
CASGKSTQYNERFF

SEQ ID NO: 647595 - protein, 13 aa, Homo sapiens
  CDR3 for alpha chain variable domain of TCR clone 323798 (TRAV2, TRAJ40)
CVVVTSGTYKYIF

SEQ ID NO: 647596 - protein, 13 aa, Homo sapiens
  CDR3 for beta chain variable domain of TCR clone 323798 (TRBV12-5, TRBJ2-3)
CASGDRQSDTQYF

SEQ ID NO: 647597 - protein, 14 aa, Homo sapiens
  CDR3 for alpha chain variable domain of TCR clone 323799 (TRAV1-2, TRAJ16)
CAVNRFSVGQKLLF

SEQ ID NO: 647598 - protein, 16 aa, Homo sapiens
  CDR3 for beta chain variable domain of TCR clone 323799 (TRBV18, TRBJ1-4)
CASSLQTVATNEKLFF

SEQ ID NO: 647599 - protein, 15 aa, Homo sapiens
  CDR3 for alpha chain variable domain of TCR clone 323800 (TRAV21, TRAJ53)
CATLNSGGSNYKLTF

SEQ ID NO: 647600 - protein, 15 aa, Homo sapiens
  CDR3 for beta chain variable domain of TCR clone 323800 (TRBV20-1, TRBJ2-5)
CSAEGTGGLQETQYF

SEQ ID NO: 647601 - protein, 15 aa, Homo sapiens
  CDR3 for alpha chain variable domain of TCR clone 323801 (TRAV13-1, TRAJ3)
FAASKLASSASTIIF

SEQ ID NO: 647602 - protein, 16 aa, Homo sapiens
  CDR3 for beta chain variable domain of TCR clone 323801 (TRBV25-1, TRBJ1-5)
CASGAPTVNSNQPQHF

SEQ ID NO: 647603 - protein, 13 aa, Homo sapiens
  CDR3 for alpha chain variable domain of TCR clone 323802 (TRAV2, TRAJ40)
CAVVTSGTYKYTF

SEQ ID NO: 647604 - protein, 15 aa, Homo sapiens
  CDR3 for beta chain variable domain of TCR clone 323802 (TRBV9, TRBJ1-6)
CASSVAGTGDSPLHF

SEQ ID NO: 647605 - protein, 13 aa, Homo sapiens
  CDR3 for alpha chain variable domain of TCR clone 323803 (TRAV27, TRAJ6)
CAGGTRGSYIPTF

SEQ ID NO: 647606 - protein, 14 aa, Homo sapiens
  CDR3 for beta chain variable domain of TCR clone 323803 (TRBV20-1, TRBJ2-4)
CSASGRVGENIQYY

SEQ ID NO: 647607 - protein, 13 aa, Homo sapiens
  CDR3 for alpha chain variable domain of TCR clone 323804 (TRAV13-2, TRAJ15)
CADRPQAGTALIF

SEQ ID NO: 647608 - protein, 15 aa, Homo sapiens
  CDR3 for beta chain variable domain of TCR clone 323804 (TRBV11-2, TRBJ2-7)
CASRFPGTGGYELYF

SEQ ID NO: 647609 - protein, 12 aa, Homo sapiens
  CDR3 for alpha chain variable domain of TCR clone 323805 (TRAV12-2, TRAJ52)
IGGGTSYGKLTF

SEQ ID NO: 647610 - protein, 13 aa, Homo sapiens
  CDR3 for beta chain variable domain of TCR clone 323805 (TRBV15, TRBJ2-7)
CATSTTGNYEQYF

SEQ ID NO: 647611 - protein, 14 aa, Homo sapiens
  CDR3 for alpha chain variable domain of TCR clone 323806 (TRAV12-2, TRAJ13)
CAVQKTGGYQKVTF

SEQ ID NO: 647612 - protein, 15 aa, Homo sapiens
  CDR3 for beta chain variable domain of TCR clone 323806 (TRBV27, TRBJ2-1)
CASSNGGGSSNEHFF

SEQ ID NO: 647613 - protein, 14 aa, Homo sapiens
  CDR3 for alpha chain variable domain of TCR clone 323807 (TRAV6, TRAJ6)
CALPTSGGSYIPTF

SEQ ID NO: 647614 - protein, 17 aa, Homo sapiens
  CDR3 for beta chain variable domain of TCR clone 323807 (TRBV5-1, TRBJ2-5)
CASSPVALGQNQETQYS

SEQ ID NO: 647615 - protein, 11 aa, Homo sapiens
  CDR3 for alpha chain variable domain of TCR clone 323808 (TRAV17, TRAJ31)
CATDRTARLMF

SEQ ID NO: 647616 - protein, 13 aa, Homo sapiens
  CDR3 for beta chain variable domain of TCR clone 323808 (TRBV7-2, TRBJ2-2)
CASSLAVTGELFF

SEQ ID NO: 647617 - protein, 16 aa, Homo sapiens
  CDR3 for alpha chain variable domain of TCR clone 323809 (TRAV30, TRAJ24)
CGTEIVDADSWGKFRF

SEQ ID NO: 647618 - protein, 14 aa, Homo sapiens
  CDR3 for beta chain variable domain of TCR clone 323809 (TRBV12-5, TRBJ2-5)
CASGSRTHQETQCF

SEQ ID NO: 647619 - protein, 12 aa, Homo sapiens
  CDR3 for alpha chain variable domain of TCR clone 323810 (TRAV12-3, TRAJ13)
CNELWGYQKVTF

SEQ ID NO: 647620 - protein, 14 aa, Homo sapiens
  CDR3 for beta chain variable domain of TCR clone 323810 (TRBV2, TRBJ2-1)
CASRTGSSYNEQFF

SEQ ID NO: 647621 - protein, 16 aa, Homo sapiens
  CDR3 for alpha chain variable domain of TCR clone 323811 (TRAV12-3, TRAJ53)
CAMSPGSGGSNYKLTF

SEQ ID NO: 647622 - protein, 20 aa, Homo sapiens
  CDR3 for beta chain variable domain of TCR clone 323811 (TRBV7-8, TRBJ2-2)
CVSSHLFPGPTIHITGELFF

SEQ ID NO: 647623 - protein, 14 aa, Homo sapiens
  CDR3 for alpha chain variable domain of TCR clone 323812 (TRAV17, TRAJ32)
CATDPGGATNKLIF

SEQ ID NO: 647624 - protein, 12 aa, Homo sapiens
  CDR3 for beta chain variable domain of TCR clone 323812 (TRBV28, TRBJ2-3)
CASRLYRDTQYF

SEQ ID NO: 647625 - protein, 15 aa, Homo sapiens
  CDR3 for alpha chain variable domain of TCR clone 323813 (TRAV12-3, TRAJ11)
CAMSEENSGYSTLTF

SEQ ID NO: 647626 - protein, 16 aa, Homo sapiens
  CDR3 for beta chain variable domain of TCR clone 323813 (TRBV5-1, TRBJ2-7)
CASSLEGLPGLYEQYF

SEQ ID NO: 647627 - protein, 14 aa, Homo sapiens
  CDR3 for alpha chain variable domain of TCR clone 323814 (TRAV17, TRAJ22)
CATARSGSARQLTF

SEQ ID NO: 647628 - protein, 13 aa, Homo sapiens
  CDR3 for beta chain variable domain of TCR clone 323814 (TRBV6-4, TRBJ1-5)
CASSADLNQPQHF

SEQ ID NO: 647629 - protein, 14 aa, Homo sapiens
  CDR3 for alpha chain variable domain of TCR clone 323815 (TRAV1-2, TRAJ15)
CSVDVMGSAGTALI

SEQ ID NO: 647630 - protein, 13 aa, Homo sapiens
  CDR3 for beta chain variable domain of TCR clone 323815 (TRBV20-1, TRBJ1-1)
CSAFDRENTEAFF

SEQ ID NO: 647631 - protein, 14 aa, Homo sapiens
  CDR3 for alpha chain variable domain of TCR clone 323816 (TRAV12-2, TRAJ44)
CAVNPAGAASKLTF

SEQ ID NO: 647632 - protein, 15 aa, Homo sapiens
  CDR3 for beta chain variable domain of TCR clone 323816 (TRBV5-1, TRBJ2-1)
CASSPPRAPYNEQFF

SEQ ID NO: 647633 - protein, 11 aa, Homo sapiens
  CDR3 for alpha chain variable domain of TCR clone 323817 (TRAV13-1, TRAJ52)
PGCTSYGKLTF

SEQ ID NO: 647634 - protein, 16 aa, Homo sapiens
  CDR3 for beta chain variable domain of TCR clone 323817 (TRBV28, TRBJ2-7)
CASSPWVATGDLAQYF

SEQ ID NO: 647635 - protein, 13 aa, Homo sapiens
  CDR3 for alpha chain variable domain of TCR clone 323818 (TRAV17, TRAJ4)
CATKSGGYNKLIF

SEQ ID NO: 647636 - protein, 14 aa, Homo sapiens
  CDR3 for beta chain variable domain of TCR clone 323818 (TRBV6-1, TRBJ1-3)
CASVQGGGGNTIYF

SEQ ID NO: 647637 - protein, 14 aa, Homo sapiens
  CDR3 for alpha chain variable domain of TCR clone 323819 (TRAV12-3, TRAJ4)
CAMSATGGYNKLIF

SEQ ID NO: 647638 - protein, 16 aa, Homo sapiens
  CDR3 for beta chain variable domain of TCR clone 323819 (TRBV12-4, TRBJ2-7)
CASSLIGGTGTYEQYF

SEQ ID NO: 647639 - protein, 15 aa, Homo sapiens
  CDR3 for alpha chain variable domain of TCR clone 323820 (TRAV30, TRAJ32)
CGTEILGGATNKLIF

SEQ ID NO: 647640 - protein, 17 aa, Homo sapiens
  CDR3 for beta chain variable domain of TCR clone 323820 (TRBV5-4, TRBJ2-1)
CASGSAGGRGAYNEQFF

SEQ ID NO: 647641 - protein, 12 aa, Homo sapiens
  CDR3 for alpha chain variable domain of TCR clone 323821 (TRAV27, TRAJ58)
CAGARDTSMLTF

SEQ ID NO: 647642 - protein, 15 aa, Homo sapiens
  CDR3 for beta chain variable domain of TCR clone 323821 (TRBV3-1, TRBJ2-7)
CASSQVAGAQYEQYF

SEQ ID NO: 647643 - protein, 16 aa, Homo sapiens
  CDR3 for alpha chain variable domain of TCR clone 323822 (TRAV3, TRAJ37)
CAVRDRGSGNTGKLIF

SEQ ID NO: 647644 - protein, 13 aa, Homo sapiens
  CDR3 for beta chain variable domain of TCR clone 323822 (TRBV14, TRBJ2-1)
CASSQDRRNEQFF

SEQ ID NO: 647645 - protein, 15 aa, Homo sapiens
  CDR3 for alpha chain variable domain of TCR clone 323823 (TRAV8-2, TRAJ16)
CVGSDGVSDGQKLLF

SEQ ID NO: 647646 - protein, 14 aa, Homo sapiens
  CDR3 for beta chain variable domain of TCR clone 323823 (TRBV7-3, TRBJ1-1)
CASSLGTGYTEAFF

SEQ ID NO: 647647 - protein, 14 aa, Homo sapiens
  CDR3 for alpha chain variable domain of TCR clone 323824 (TRAV12-2, TRAJ13)
CAVEKTGGYQKVTF

SEQ ID NO: 647648 - protein, 15 aa, Homo sapiens
  CDR3 for beta chain variable domain of TCR clone 323824 (TRBV27, TRBJ2-1)
CASSNGGGYSNEQFF

SEQ ID NO: 647649 - protein, 15 aa, Homo sapiens
  CDR3 for alpha chain variable domain of TCR clone 323825 (TRAV26-1, TRAJ44)
CIVRANTGTASKLTF

SEQ ID NO: 647650 - protein, 15 aa, Homo sapiens
  CDR3 for beta chain variable domain of TCR clone 323825 (TRBV7-2, TRBJ1-2)
CASSPRAGWNYGYTF

SEQ ID NO: 647651 - protein, 13 aa, Homo sapiens
  CDR3 for alpha chain variable domain of TCR clone 323826 (TRAV26-1, TRAJ33)
FIVRVEGNYQLIW

SEQ ID NO: 647652 - protein, 16 aa, Homo sapiens
  CDR3 for beta chain variable domain of TCR clone 323826 (TRBV15, TRBJ2-7)
CATCRDRGRRRGEQYF

SEQ ID NO: 647653 - protein, 12 aa, Homo sapiens
  CDR3 for alpha chain variable domain of TCR clone 323827 (TRAV26-1, TRAJ17)
CIVRSAGNKLTF

SEQ ID NO: 647654 - protein, 14 aa, Homo sapiens
  CDR3 for beta chain variable domain of TCR clone 323827 (TRBV7-3, TRBJ2-1)
CASSLAGGTNEQFF

SEQ ID NO: 647655 - protein, 14 aa, Homo sapiens
  CDR3 for alpha chain variable domain of TCR clone 323828 (TRAV29/DV5, TRAJ20)
CAATIRSNDYKLSL

SEQ ID NO: 647656 - protein, 15 aa, Homo sapiens
  CDR3 for beta chain variable domain of TCR clone 323828 (TRBV20-1, TRBJ2-1)
CSASSAGSSYNEQFF

SEQ ID NO: 647657 - protein, 15 aa, Homo sapiens
  CDR3 for alpha chain variable domain of TCR clone 323829 (TRAV8-6, TRAJ6)
CAGSFTSGGSYIPTF

SEQ ID NO: 647658 - protein, 13 aa, Homo sapiens
  CDR3 for beta chain variable domain of TCR clone 323829 (TRBV29-1, TRBJ2-1)
CSVEGGRVNEQSF

SEQ ID NO: 647659 - protein, 14 aa, Homo sapiens
  CDR3 for alpha chain variable domain of TCR clone 323830 (TRAV1-2, TRAJ16)
CSVNRFSDGQKLLF

SEQ ID NO: 647660 - protein, 14 aa, Homo sapiens
  CDR3 for beta chain variable domain of TCR clone 323830 (TRBV7-9, TRBJ1-4)
CAITEGEANEKLFF

SEQ ID NO: 647661 - protein, 11 aa, Homo sapiens
  CDR3 for alpha chain variable domain of TCR clone 323831 (TRAV13-1, TRAJ30)
CAASRDDKIIC

SEQ ID NO: 647662 - protein, 15 aa, Homo sapiens
  CDR3 for beta chain variable domain of TCR clone 323831 (TRBV18, TRBJ1-1)
CASSPSSWVNTEAFF

SEQ ID NO: 647663 - protein, 11 aa, Homo sapiens
  CDR3 for alpha chain variable domain of TCR clone 323832 (TRAV4, TRAJ28)
CLVGDNRAETP

SEQ ID NO: 647664 - protein, 13 aa, Homo sapiens
  CDR3 for beta chain variable domain of TCR clone 323832 (TRBV20-1, TRBJ2-7)
CSATHTSGYEQYF

SEQ ID NO: 647665 - protein, 11 aa, Homo sapiens
  CDR3 for alpha chain variable domain of TCR clone 323833 (TRAV35, TRAJ30)
CAPGGDDKIIF

SEQ ID NO: 647666 - protein, 17 aa, Homo sapiens
  CDR3 for beta chain variable domain of TCR clone 323833 (TRBV7-6, TRBJ2-1)
CIVVPAAWGGGADEQFF

SEQ ID NO: 647667 - protein, 15 aa, Homo sapiens
  CDR3 for alpha chain variable domain of TCR clone 323834 (TRAV26-1, TRAJ29)
CIVRVEGSGNTPLVF

SEQ ID NO: 647668 - protein, 12 aa, Homo sapiens
  CDR3 for beta chain variable domain of TCR clone 323834 (TRBV24-1, TRBJ1-1)
CATLYPDTEAFF

SEQ ID NO: 647669 - protein, 18 aa, Homo sapiens
  CDR3 for alpha chain variable domain of TCR clone 323835 (TRAV12-3, TRAJ52)
CAMSVGGAGGTSYGKLTF

SEQ ID NO: 647670 - protein, 15 aa, Homo sapiens
  CDR3 for beta chain variable domain of TCR clone 323835 (TRBV7-8, TRBJ2-1)
CASSLAGGLYNEQFF

SEQ ID NO: 647671 - protein, 14 aa, Homo sapiens
  CDR3 for alpha chain variable domain of TCR clone 323836 (TRAV1-2, TRAJ8)
CAVREDTGFQKRVF

SEQ ID NO: 647672 - protein, 14 aa, Homo sapiens
  CDR3 for beta chain variable domain of TCR clone 323836 (TRBV5-4, TRBJ2-1)
CASSLDQGLNEQFF

SEQ ID NO: 647673 - protein, 12 aa, Homo sapiens
  CDR3 for alpha chain variable domain of TCR clone 323837 (TRAV9-2, TRAJ36)
CALEKGANNLFF

SEQ ID NO: 647674 - protein, 13 aa, Homo sapiens
  CDR3 for beta chain variable domain of TCR clone 323837 (TRBV27, TRBJ1-1)
CASSLSLGAEAFF

SEQ ID NO: 647675 - protein, 12 aa, Homo sapiens
  CDR3 for alpha chain variable domain of TCR clone 323838 (TRAV20, TRAJ39)
CAVGNAGNMLNF

SEQ ID NO: 647676 - protein, 16 aa, Homo sapiens
  CDR3 for beta chain variable domain of TCR clone 323838 (TRBV15, TRBJ1-2)
CATSRGPRTGGGGYTF

SEQ ID NO: 647677 - protein, 17 aa, Homo sapiens
  CDR3 for alpha chain variable domain of TCR clone 323839 (TRAV3, TRAJ6)
CAVRDGPRAVGSYIPTF

SEQ ID NO: 647678 - protein, 14 aa, Homo sapiens
  CDR3 for beta chain variable domain of TCR clone 323839 (TRBV7-2, TRBJ2-7)
CASSPKTSFYERYF

SEQ ID NO: 647679 - protein, 15 aa, Homo sapiens
  CDR3 for alpha chain variable domain of TCR clone 323840 (TRAV23/DV6, TRAJ37)
CAAGEGSSNTGKLII

SEQ ID NO: 647680 - protein, 17 aa, Homo sapiens
  CDR3 for beta chain variable domain of TCR clone 323840 (TRBV20-1, TRBJ2-7)
CRARRAGGVAGVEEQYF

SEQ ID NO: 647681 - protein, 15 aa, Homo sapiens
  CDR3 for alpha chain variable domain of TCR clone 323841 (TRAV3, TRAJ17)
CAVRDTGAAGNKLTF

SEQ ID NO: 647682 - protein, 14 aa, Homo sapiens
  CDR3 for beta chain variable domain of TCR clone 323841 (TRBV7-9, TRBJ2-1)
CASSPKGGADEQFF

SEQ ID NO: 647683 - protein, 14 aa, Homo sapiens
  CDR3 for alpha chain variable domain of TCR clone 323842 (TRAV1-2, TRAJ16)
CAVNRFSDCQKLLF

SEQ ID NO: 647684 - protein, 16 aa, Homo sapiens
  CDR3 for beta chain variable domain of TCR clone 323842 (TRBV9, TRBJ2-1)
CASSVGGGGNYNEQFF

SEQ ID NO: 647685 - protein, 15 aa, Homo sapiens
  CDR3 for alpha chain variable domain of TCR clone 323843 (TRAV8-3, TRAJ23)
CAVGAPYNQGGKLIF

SEQ ID NO: 647686 - protein, 15 aa, Homo sapiens
  CDR3 for beta chain variable domain of TCR clone 323843 (TRBV2, TRBJ2-3)
CASSDAGGPPDTQYF

SEQ ID NO: 647687 - protein, 10 aa, Homo sapiens
  CDR3 for alpha chain variable domain of TCR clone 323844 (TRAV26-1, TRAJ22)
RSGSARQLTF

SEQ ID NO: 647688 - protein, 14 aa, Homo sapiens
  CDR3 for beta chain variable domain of TCR clone 323844 (TRBV7-3, TRBJ2-7)
CASSYDQDYYEQYF

SEQ ID NO: 647689 - protein, 14 aa, Homo sapiens
  CDR3 for alpha chain variable domain of TCR clone 323845 (TRAV17, TRAJ39)
CATDPVRAGNMLTF

SEQ ID NO: 647690 - protein, 12 aa, Homo sapiens
  CDR3 for beta chain variable domain of TCR clone 323845 (TRBV2, TRBJ2-4)
CASQGDSGIQYY

SEQ ID NO: 647691 - protein, 13 aa, Homo sapiens
  CDR3 for alpha chain variable domain of TCR clone 323846 (TRAV22, TRAJ44)
CAGSTGTASKLTF

SEQ ID NO: 647692 - protein, 15 aa, Homo sapiens
  CDR3 for beta chain variable domain of TCR clone 323846 (TRBV20-1, TRBJ2-7)
CSARDRVSGMDEQYF

SEQ ID NO: 647693 - protein, 15 aa, Homo sapiens
  CDR3 for alpha chain variable domain of TCR clone 323847 (TRAV12-1, TRAJ26)
CVVNSWVTMVRILSL

SEQ ID NO: 647694 - protein, 15 aa, Homo sapiens
  CDR3 for beta chain variable domain of TCR clone 323847 (TRBV19, TRBJ1-2)
CASSVGQVLNYGYTF

SEQ ID NO: 647695 - protein, 13 aa, Homo sapiens
  CDR3 for alpha chain variable domain of TCR clone 323848 (TRAV12-2, TRAJ9)
CAVLETGGFKTIF

SEQ ID NO: 647696 - protein, 15 aa, Homo sapiens
  CDR3 for beta chain variable domain of TCR clone 323848 (TRBV6-1, TRBJ2-3)
CASSERGGITDTQYF

SEQ ID NO: 647697 - protein, 15 aa, Homo sapiens
  CDR3 for alpha chain variable domain of TCR clone 323849 (TRAV2, TRAJ15)
CAVEDRNQAGTALIF

SEQ ID NO: 647698 - protein, 14 aa, Homo sapiens
  CDR3 for beta chain variable domain of TCR clone 323849 (TRBV7-8, TRBJ2-3)
CASSLEAGTDTQYF

SEQ ID NO: 647699 - protein, 14 aa, Homo sapiens
  CDR3 for alpha chain variable domain of TCR clone 323850 (TRAV2, TRAJ37)
CAVDFTSNTGKLIF

SEQ ID NO: 647700 - protein, 15 aa, Homo sapiens
  CDR3 for beta chain variable domain of TCR clone 323850 (TRBV20-1, TRBJ1-1)
CSARGGGTLKLSLDK

SEQ ID NO: 647701 - protein, 15 aa, Homo sapiens
  CDR3 for alpha chain variable domain of TCR clone 323851 (TRAV27, TRAJ33)
CAGADIMDGNYQLIW

SEQ ID NO: 647702 - protein, 13 aa, Homo sapiens
  CDR3 for beta chain variable domain of TCR clone 323851 (TRBV28, TRBJ1-2)
CASSLQGRGGYTF

SEQ ID NO: 647703 - protein, 15 aa, Homo sapiens
  CDR3 for alpha chain variable domain of TCR clone 323852 (TRAV3, TRAJ3)
CAVRDRDSSASKLIF

SEQ ID NO: 647704 - protein, 16 aa, Homo sapiens
  CDR3 for beta chain variable domain of TCR clone 323852 (TRBV12-4, TRBJ1-5)
CASSRPVGGSNQPQHF

SEQ ID NO: 647705 - protein, 11 aa, Homo sapiens
  CDR3 for alpha chain variable domain of TCR clone 323853 (TRAV21, TRAJ34)
CAVTNTDKLIF

SEQ ID NO: 647706 - protein, 14 aa, Homo sapiens
  CDR3 for beta chain variable domain of TCR clone 323853 (TRBV4-2, TRBJ2-3)
CASRETRAPGMQYF

SEQ ID NO: 647707 - protein, 14 aa, Homo sapiens
  CDR3 for alpha chain variable domain of TCR clone 323854 (TRAV8-4, TRAJ16)
CAVSPVGRWPEAAL

SEQ ID NO: 647708 - protein, 15 aa, Homo sapiens
  CDR3 for beta chain variable domain of TCR clone 323854 (TRBV7-3, TRBJ1-6)
CARSLGRGAGSPLHF

SEQ ID NO: 647709 - protein, 14 aa, Homo sapiens
  CDR3 for alpha chain variable domain of TCR clone 323855 (TRAV16, TRAJ54)
CALSGVRGAQQLVF

SEQ ID NO: 647710 - protein, 15 aa, Homo sapiens
  CDR3 for beta chain variable domain of TCR clone 323855 (TRBV18, TRBJ2-2)
CASSTSGLHTGELFF

SEQ ID NO: 647711 - protein, 13 aa, Homo sapiens
  CDR3 for alpha chain variable domain of TCR clone 323856 (TRAV12-3, TRAJ9)
CAMRNTGGFKTNF

SEQ ID NO: 647712 - protein, 16 aa, Homo sapiens
  CDR3 for beta chain variable domain of TCR clone 323856 (TRBV19, TRBJ2-1)
CASSIDGSFAYNEQFF

SEQ ID NO: 647713 - protein, 16 aa, Homo sapiens
  CDR3 for alpha chain variable domain of TCR clone 323857 (TRAV30, TRAJ57)
CGTGWAPQGGSEKLVF

SEQ ID NO: 647714 - protein, 14 aa, Homo sapiens
  CDR3 for beta chain variable domain of TCR clone 323857 (TRBV18, TRBJ1-1)
CASSPRFQGVEAFF

SEQ ID NO: 647715 - protein, 13 aa, Homo sapiens
  CDR3 for alpha chain variable domain of TCR clone 323858 (TRAV38-1, TRAJ42)
CAFRSGSQGNLIF

SEQ ID NO: 647716 - protein, 18 aa, Homo sapiens
  CDR3 for beta chain variable domain of TCR clone 323858 (TRBV11-2, TRBJ2-3)
CASSLGGASRGAPNTQYF

SEQ ID NO: 647717 - protein, 14 aa, Homo sapiens
  CDR3 for alpha chain variable domain of TCR clone 323859 (TRAV1-2, TRAJ16)
CAVNRFSDGQKLPF

SEQ ID NO: 647718 - protein, 14 aa, Homo sapiens
  CDR3 for beta chain variable domain of TCR clone 323859 (TRBV11-2, TRBJ2-3)
CASSRLARTDTQYF

SEQ ID NO: 647719 - protein, 16 aa, Homo sapiens
  CDR3 for alpha chain variable domain of TCR clone 323860 (TRAV13-1, TRAJ13)
CAASRVGVIRKLPLEL

SEQ ID NO: 647720 - protein, 14 aa, Homo sapiens
  CDR3 for beta chain variable domain of TCR clone 323860 (TRBV5-1, TRBJ2-7)
CASSATGGYDEQYF

SEQ ID NO: 647721 - protein, 12 aa, Homo sapiens
  CDR3 for alpha chain variable domain of TCR clone 323861 (TRAV13-2, TRAJ23)
CAERHRGGKLIF

SEQ ID NO: 647722 - protein, 12 aa, Homo sapiens
  CDR3 for beta chain variable domain of TCR clone 323861 (TRBV19, TRBJ2-5)
CASSIGQVTDFF

SEQ ID NO: 647723 - protein, 13 aa, Homo sapiens
  CDR3 for alpha chain variable domain of TCR clone 323862 (TRAV36/DV7, TRAJ54)
CAVDIQGAQKLVF

SEQ ID NO: 647724 - protein, 14 aa, Homo sapiens
  CDR3 for beta chain variable domain of TCR clone 323862 (TRBV25-1, TRBJ1-1)
CASTHLGGNTEAFF

SEQ ID NO: 647725 - protein, 14 aa, Homo sapiens
  CDR3 for alpha chain variable domain of TCR clone 323863 (TRAV8-3, TRAJ6)
CAVGASGGSYIPTC

SEQ ID NO: 647726 - protein, 17 aa, Homo sapiens
  CDR3 for beta chain variable domain of TCR clone 323863 (TRBV18, TRBJ2-2)
CASSPSDPWQNTGEMFF

SEQ ID NO: 647727 - protein, 17 aa, Homo sapiens
  CDR3 for alpha chain variable domain of TCR clone 323864 (TRAV3, TRAJ6)
CAVRDGPRAGGSYIPTF

SEQ ID NO: 647728 - protein, 15 aa, Homo sapiens
  CDR3 for beta chain variable domain of TCR clone 323864 (TRBV7-2, TRBJ2-1)
CDSSSGLAGGNEQFF

SEQ ID NO: 647729 - protein, 17 aa, Homo sapiens
  CDR3 for alpha chain variable domain of TCR clone 323865 (TRAV3, TRAJ6)
CAVRDGPRAGGSYIPTF

SEQ ID NO: 647730 - protein, 13 aa, Homo sapiens
  CDR3 for beta chain variable domain of TCR clone 323865 (TRBV27, TRBJ2-1)
CASSTLGVGEQFF

SEQ ID NO: 647731 - protein, 10 aa, Homo sapiens
  CDR3 for alpha chain variable domain of TCR clone 323866 (TRAV27, TRAJ58)
SETSGSRLTF

SEQ ID NO: 647732 - protein, 16 aa, Homo sapiens
  CDR3 for beta chain variable domain of TCR clone 323866 (TRBV12-5, TRBJ2-5)
CASGPRTSGNQETQYF

SEQ ID NO: 647733 - protein, 17 aa, Homo sapiens
  CDR3 for alpha chain variable domain of TCR clone 323867 (TRAV3, TRAJ42)
CAVRDRDYGGSQGNLIF

SEQ ID NO: 647734 - protein, 14 aa, Homo sapiens
  CDR3 for beta chain variable domain of TCR clone 323867 (TRBV7-2, TRBJ2-5)
CASSTRGSSETQYF

SEQ ID NO: 647735 - protein, 12 aa, Homo sapiens
  CDR3 for alpha chain variable domain of TCR clone 323868 (TRAV12-2, TRAJ9)
CAVYNGGFKTIF

SEQ ID NO: 647736 - protein, 14 aa, Homo sapiens
  CDR3 for beta chain variable domain of TCR clone 323868 (TRBV6-1, TRBJ1-3)
RASVQGGGGNTIYF

SEQ ID NO: 647737 - protein, 14 aa, Homo sapiens
  CDR3 for alpha chain variable domain of TCR clone 323869 (TRAV8-2, TRAJ11)
CVVSEKSGYSTLTF

SEQ ID NO: 647738 - protein, 12 aa, Homo sapiens
  CDR3 for beta chain variable domain of TCR clone 323869 (TRBV28, TRBJ2-1)
CASKTSGNEQFF

SEQ ID NO: 647739 - protein, 15 aa, Homo sapiens
  CDR3 for alpha chain variable domain of TCR clone 323870 (TRAV30, TRAJ32)
CGIEILGGATNKPIF

SEQ ID NO: 647740 - protein, 17 aa, Homo sapiens
  CDR3 for beta chain variable domain of TCR clone 323870 (TRBV5-4, TRBJ2-1)
CASSSAGGRGPYNEQFF

SEQ ID NO: 647741 - protein, 15 aa, Homo sapiens
  CDR3 for alpha chain variable domain of TCR clone 323871 (TRAV26-1, TRAJ40)
CIVRVTTSGTYKYIF

SEQ ID NO: 647742 - protein, 12 aa, Homo sapiens
  CDR3 for beta chain variable domain of TCR clone 323871 (TRBV7-9, TRBJ1-4)
CASSTDRQKLFF

SEQ ID NO: 647743 - protein, 14 aa, Homo sapiens
  CDR3 for alpha chain variable domain of TCR clone 323872 (TRAV12-3, TRAJ10)
SHLPLTGGGNKLTF

SEQ ID NO: 647744 - protein, 17 aa, Homo sapiens
  CDR3 for beta chain variable domain of TCR clone 323872 (TRBV28, TRBJ2-5)
CASSTPEGDALQETQNF

SEQ ID NO: 647745 - protein, 14 aa, Homo sapiens
  CDR3 for alpha chain variable domain of TCR clone 323873 (TRAV20, TRAJ10)
CAVRVEGGGTKLTF

SEQ ID NO: 647746 - protein, 13 aa, Homo sapiens
  CDR3 for beta chain variable domain of TCR clone 323873 (TRBV13, TRBJ2-2)
CASSPGLTGELFF

SEQ ID NO: 647747 - protein, 14 aa, Homo sapiens
  CDR3 for alpha chain variable domain of TCR clone 323874 (TRAV12-2, TRAJ13)
CAVKKTGGYQKVTF

SEQ ID NO: 647748 - protein, 13 aa, Homo sapiens
  CDR3 for beta chain variable domain of TCR clone 323874 (TRBV20-1, TRBJ2-5)
CSAREGGKETQYF

SEQ ID NO: 647749 - protein, 11 aa, Homo sapiens
  CDR3 for alpha chain variable domain of TCR clone 323875 (TRAV2, TRAJ33)
CAVNSNYQLIW

SEQ ID NO: 647750 - protein, 15 aa, Homo sapiens
  CDR3 for beta chain variable domain of TCR clone 323875 (TRBV19, TRBJ1-2)
CASSVGQVLNYGYTF

SEQ ID NO: 647751 - protein, 18 aa, Homo sapiens
  CDR3 for alpha chain variable domain of TCR clone 323876 (TRAV21, TRAJ45)
CCGGPQGGSGGGAGGLTF

SEQ ID NO: 647752 - protein, 10 aa, Homo sapiens
  CDR3 for beta chain variable domain of TCR clone 323876 (TRBV4-1, TRBJ2-7)
SRGDRHEQYF

SEQ ID NO: 647753 - protein, 13 aa, Homo sapiens
  CDR3 for alpha chain variable domain of TCR clone 323877 (TRAV13-1, TRAJ21)
CAAGIYNFNKFYF

SEQ ID NO: 647754 - protein, 13 aa, Homo sapiens
  CDR3 for beta chain variable domain of TCR clone 323877 (TRBV27, TRBJ1-4)
CASSLMGDEKLFF

SEQ ID NO: 647755 - protein, 13 aa, Homo sapiens
  CDR3 for alpha chain variable domain of TCR clone 323878 (TRAV27, TRAJ49)
CAPRPYTGNQFYF

SEQ ID NO: 647756 - protein, 16 aa, Homo sapiens
  CDR3 for beta chain variable domain of TCR clone 323878 (TRBV4-1, TRBJ1-2)
CASSQDAGQVVYGYTF

SEQ ID NO: 647757 - protein, 14 aa, Homo sapiens
  CDR3 for alpha chain variable domain of TCR clone 323879 (TRAV1-1, TRAJ27)
CAVIYNTNAGKSTS

SEQ ID NO: 647758 - protein, 18 aa, Homo sapiens
  CDR3 for beta chain variable domain of TCR clone 323879 (TRBV7-3, TRBJ2-1)
CASSLTLASGRAMVSSSS

SEQ ID NO: 647759 - protein, 14 aa, Homo sapiens
  CDR3 for alpha chain variable domain of TCR clone 323880 (TRAV8-3, TRAJ28)
CAVVPGAGSYQLTF

SEQ ID NO: 647760 - protein, 13 aa, Homo sapiens
  CDR3 for beta chain variable domain of TCR clone 323880 (TRBV19, TRBJ2-1)
CASSIGTGNEQFF

SEQ ID NO: 647761 - protein, 10 aa, Homo sapiens
  CDR3 for alpha chain variable domain of TCR clone 323881 (TRAV12-1, TRAJ43)
CVVHNIDMRF

SEQ ID NO: 647762 - protein, 13 aa, Homo sapiens
  CDR3 for beta chain variable domain of TCR clone 323881 (TRBV12-4, TRBJ1-2)
CASSSGLTVISTF

SEQ ID NO: 647763 - protein, 14 aa, Homo sapiens
  CDR3 for alpha chain variable domain of TCR clone 323882 (TRAV17, TRAJ35)
CATDRPGFGTVLHC

SEQ ID NO: 647764 - protein, 19 aa, Homo sapiens
  CDR3 for beta chain variable domain of TCR clone 323882 (TRBV11-3, TRBJ2-2)
CASSTRPGAKTTNTGELFF

SEQ ID NO: 647765 - protein, 15 aa, Homo sapiens
  CDR3 for alpha chain variable domain of TCR clone 323883 (TRAV30, TRAJ13)
CGTQGVTGGNQKVTF

SEQ ID NO: 647766 - protein, 17 aa, Homo sapiens
  CDR3 for beta chain variable domain of TCR clone 323883 (TRBV20-1, TRBJ2-2)
CSARVKRTHVRSGELFF

SEQ ID NO: 647767 - protein, 16 aa, Homo sapiens
  CDR3 for alpha chain variable domain of TCR clone 323884 (TRAV13-1, TRAJ13)
CTAFFLGVTRKLPLEL

SEQ ID NO: 647768 - protein, 11 aa, Homo sapiens
  CDR3 for beta chain variable domain of TCR clone 323884 (TRBV29-1, TRBJ2-5)
CSEDRTGTQYF

SEQ ID NO: 647769 - protein, 17 aa, Homo sapiens
  CDR3 for alpha chain variable domain of TCR clone 323885 (TRAV13-1, TRAJ31)
CAPRDRLMFGDGTQLVV

SEQ ID NO: 647770 - protein, 13 aa, Homo sapiens
  CDR3 for beta chain variable domain of TCR clone 323885 (TRBV29-1, TRBJ2-1)
CSVEGGRVNEQFF

SEQ ID NO: 647771 - protein, 11 aa, Homo sapiens
  CDR3 for alpha chain variable domain of TCR clone 323886 (TRAV20, TRAJ23)
CACNQGGKLFF

SEQ ID NO: 647772 - protein, 16 aa, Homo sapiens
  CDR3 for beta chain variable domain of TCR clone 323886 (TRBV7-8, TRBJ2-5)
CASSFGGQPAQETQYF

SEQ ID NO: 647773 - protein, 13 aa, Homo sapiens
  CDR3 for alpha chain variable domain of TCR clone 323887 (TRAV29/DV5, TRAJ37)
CAAVPGNTGKLIF

SEQ ID NO: 647774 - protein, 13 aa, Homo sapiens
  CDR3 for beta chain variable domain of TCR clone 323887 (TRBV28, TRBJ2-7)
CASSPTLKREQYV

SEQ ID NO: 647775 - protein, 13 aa, Homo sapiens
  CDR3 for alpha chain variable domain of TCR clone 323888 (TRAV38-2/DV8, TRAJ34)
CAYRTWNTDKLIF

SEQ ID NO: 647776 - protein, 18 aa, Homo sapiens
  CDR3 for beta chain variable domain of TCR clone 323888 (TRBV7-9, TRBJ2-1)
CASSLAVSGTSGRNEQFF

SEQ ID NO: 647777 - protein, 16 aa, Homo sapiens
  CDR3 for alpha chain variable domain of TCR clone 323889 (TRAV12-3, TRAJ50)
CAMRDPMKTSYGKGIF

SEQ ID NO: 647778 - protein, 13 aa, Homo sapiens
  CDR3 for beta chain variable domain of TCR clone 323889 (TRBV4-1, TRBJ2-3)
CASSLDFTDTQYF

SEQ ID NO: 647779 - protein, 14 aa, Homo sapiens
  CDR3 for alpha chain variable domain of TCR clone 323890 (TRAV38-1, TRAJ45)
CASHSGGGADGLTF

SEQ ID NO: 647780 - protein, 13 aa, Homo sapiens
  CDR3 for beta chain variable domain of TCR clone 323890 (TRBV10-3, TRBJ1-2)
CAISERDSYGDTC

SEQ ID NO: 647781 - protein, 15 aa, Homo sapiens
  CDR3 for alpha chain variable domain of TCR clone 323891 (TRAV8-3, TRAJ45)
CASSYSGGGADGLTF

SEQ ID NO: 647782 - protein, 15 aa, Homo sapiens
  CDR3 for beta chain variable domain of TCR clone 323891 (TRBV11-3, TRBJ2-7)
CASSPGPASSYEQYF

SEQ ID NO: 647783 - protein, 18 aa, Homo sapiens
  CDR3 for alpha chain variable domain of TCR clone 323892 (TRAV26-1, TRAJ23)
CIVRVGLEVWNQGGKLIF

SEQ ID NO: 647784 - protein, 13 aa, Homo sapiens
  CDR3 for beta chain variable domain of TCR clone 323892 (TRBV19, TRBJ1-2)
CASSRGQVYGYTF

SEQ ID NO: 647785 - protein, 14 aa, Homo sapiens
  CDR3 for alpha chain variable domain of TCR clone 323893 (TRAV1-1, TRAJ27)
CAVIYNTNTGKSTF

SEQ ID NO: 647786 - protein, 15 aa, Homo sapiens
  CDR3 for beta chain variable domain of TCR clone 323893 (TRBV7-2, TRBJ2-1)
CAGSSGLAVGNEQFF

SEQ ID NO: 647787 - protein, 14 aa, Homo sapiens
  CDR3 for alpha chain variable domain of TCR clone 323894 (TRAV19, TRAJ34)
CALSEGVGTDKLIF

SEQ ID NO: 647788 - protein, 14 aa, Homo sapiens
  CDR3 for beta chain variable domain of TCR clone 323894 (TRBV11-2, TRBJ2-3)
CASSRLARTDTQYF

SEQ ID NO: 647789 - protein, 11 aa, Homo sapiens
  CDR3 for alpha chain variable domain of TCR clone 323895 (TRAV3, TRAJ21)
CAVGNFNKFYS

SEQ ID NO: 647790 - protein, 15 aa, Homo sapiens
  CDR3 for beta chain variable domain of TCR clone 323895 (TRBV5-1, TRBJ2-1)
CASSWGPGPGGEQFF

SEQ ID NO: 647791 - protein, 13 aa, Homo sapiens
  CDR3 for alpha chain variable domain of TCR clone 323896 (TRAV12-3, TRAJ13)
FAMSSGGYQKVTF

SEQ ID NO: 647792 - protein, 14 aa, Homo sapiens
  CDR3 for beta chain variable domain of TCR clone 323896 (TRBV2, TRBJ2-1)
CASRTGSSYNEQFF

SEQ ID NO: 647793 - protein, 14 aa, Homo sapiens
  CDR3 for alpha chain variable domain of TCR clone 323897 (TRAV1-2, TRAJ16)
CAVNRFSDGQKLLF

SEQ ID NO: 647794 - protein, 15 aa, Homo sapiens
  CDR3 for beta chain variable domain of TCR clone 323897 (TRBV7-2, TRBJ1-5)
CASSSTGVDNQPQHF

SEQ ID NO: 647795 - protein, 13 aa, Homo sapiens
  CDR3 for alpha chain variable domain of TCR clone 323898 (TRAV8-3, TRAJ48)
CAVVPFGNEKLTF

SEQ ID NO: 647796 - protein, 12 aa, Homo sapiens
  CDR3 for beta chain variable domain of TCR clone 323898 (TRBV11-2, TRBJ2-2)
CASSLGGRELFF

SEQ ID NO: 647797 - protein, 13 aa, Homo sapiens
  CDR3 for alpha chain variable domain of TCR clone 323899 (TRAV12-3, TRAJ13)
RAMTSGGYQKVTF

SEQ ID NO: 647798 - protein, 13 aa, Homo sapiens
  CDR3 for beta chain variable domain of TCR clone 323899 (TRBV20-1, TRBJ2-2)
CMALSGGAGELFF

SEQ ID NO: 647799 - protein, 12 aa, Homo sapiens
  CDR3 for alpha chain variable domain of TCR clone 323900 (TRAV1-2, TRAJ37)
CAFPGNTGKLIF

SEQ ID NO: 647800 - protein, 17 aa, Homo sapiens
  CDR3 for beta chain variable domain of TCR clone 323900 (TRBV4-2, TRBJ1-1)
CASSQVATGGMNSEAFF

SEQ ID NO: 647801 - protein, 15 aa, Homo sapiens
  CDR3 for alpha chain variable domain of TCR clone 323901 (TRAV3, TRAJ3)
CAVRDRDSSASKIIF

SEQ ID NO: 647802 - protein, 15 aa, Homo sapiens
  CDR3 for beta chain variable domain of TCR clone 323901 (TRBV29-1, TRBJ2-7)
CSVEFFDRGSYEQYF

SEQ ID NO: 647803 - protein, 16 aa, Homo sapiens
  CDR3 for alpha chain variable domain of TCR clone 323902 (TRAV14/DV4, TRAJ21)
CAMREGPENNFNKFYF

SEQ ID NO: 647804 - protein, 12 aa, Homo sapiens
  CDR3 for beta chain variable domain of TCR clone 323902 (TRBV29-1, TRBJ2-2)
CSVDKYAGELFF

SEQ ID NO: 647805 - protein, 14 aa, Homo sapiens
  CDR3 for alpha chain variable domain of TCR clone 323903 (TRAV12-2, TRAJ11)
CAVNMNSGYSTLTF

SEQ ID NO: 647806 - protein, 13 aa, Homo sapiens
  CDR3 for beta chain variable domain of TCR clone 323903 (TRBV6-1, TRBJ1-2)
CASSDSPSYGYTV

SEQ ID NO: 647807 - protein, 22 aa, Homo sapiens
  CDR3 for alpha chain variable domain of TCR clone 323904 (TRAV12-2, TRAJ53)
SPVIQPPASVPPILSSNYKLTF

SEQ ID NO: 647808 - protein, 13 aa, Homo sapiens
  CDR3 for beta chain variable domain of TCR clone 323904 (TRBV7-7, TRBJ2-3)
CASSLSRADTQYF

SEQ ID NO: 647809 - protein, 12 aa, Homo sapiens
  CDR3 for alpha chain variable domain of TCR clone 323905 (TRAV29/DV5, TRAJ34)
CAASGNTDNLIF

SEQ ID NO: 647810 - protein, 13 aa, Homo sapiens
  CDR3 for beta chain variable domain of TCR clone 323905 (TRBV10-3, TRBJ2-7)
CASKLAVNYEQYF

SEQ ID NO: 647811 - protein, 14 aa, Homo sapiens
  CDR3 for alpha chain variable domain of TCR clone 323906 (TRAV12-3, TRAJ10)
SHLPLTGGGNKLTF

SEQ ID NO: 647812 - protein, 15 aa, Homo sapiens
  CDR3 for beta chain variable domain of TCR clone 323906 (TRBV10-2, TRBJ2-6)
CASSEQWTGANVLTF

SEQ ID NO: 647813 - protein, 15 aa, Homo sapiens
  CDR3 for alpha chain variable domain of TCR clone 323907 (TRAV23/DV6, TRAJ4)
CAASPLRGGYNKLIF

SEQ ID NO: 647814 - protein, 15 aa, Homo sapiens
  CDR3 for beta chain variable domain of TCR clone 323907 (TRBV7-9, TRBJ1-6)
CASSSPGRGNSTLHF

SEQ ID NO: 647815 - protein, 15 aa, Homo sapiens
  CDR3 for alpha chain variable domain of TCR clone 323908 (TRAV21, TRAJ40)
CAVRPQTSGTYKYIF

SEQ ID NO: 647816 - protein, 14 aa, Homo sapiens
  CDR3 for beta chain variable domain of TCR clone 323908 (TRBV7-9, TRBJ2-5)
CASSPAQDQETQYF

SEQ ID NO: 647817 - protein, 10 aa, Homo sapiens
  CDR3 for alpha chain variable domain of TCR clone 323909 (TRAV8-3, TRAJ43)
CAVALADMRF

SEQ ID NO: 647818 - protein, 17 aa, Homo sapiens
  CDR3 for beta chain variable domain of TCR clone 323909 (TRBV10-1, TRBJ2-1)
CASSPQRAGAPSMSSSS

SEQ ID NO: 647819 - protein, 18 aa, Homo sapiens
  CDR3 for alpha chain variable domain of TCR clone 323910 (TRAV16, TRAJ4)
CALSRMFSGGYNRLILEQ

SEQ ID NO: 647820 - protein, 16 aa, Homo sapiens
  CDR3 for beta chain variable domain of TCR clone 323910 (TRBV24-1, TRBJ2-3)
CATSDPGTGATDTQYF

SEQ ID NO: 647821 - protein, 12 aa, Homo sapiens
  CDR3 for alpha chain variable domain of TCR clone 323911 (TRAV21, TRAJ33)
CAKMDSNYQLIW

SEQ ID NO: 647822 - protein, 13 aa, Homo sapiens
  CDR3 for beta chain variable domain of TCR clone 323911 (TRBV5-1, TRBJ2-7)
CASSATGGNEQYF

SEQ ID NO: 647823 - protein, 12 aa, Homo sapiens
  CDR3 for alpha chain variable domain of TCR clone 323912 (TRAV12-3, TRAJ17)
CAMTLTGNKLTF

SEQ ID NO: 647824 - protein, 15 aa, Homo sapiens
  CDR3 for beta chain variable domain of TCR clone 323912 (TRBV12-4, TRBJ2-1)
CASSRGLAEYNEQFF

SEQ ID NO: 647825 - protein, 14 aa, Homo sapiens
  CDR3 for alpha chain variable domain of TCR clone 323913 (TRAV20, TRAJ22)
CAVALGGSARKLTF

SEQ ID NO: 647826 - protein, 15 aa, Homo sapiens
  CDR3 for beta chain variable domain of TCR clone 323913 (TRBV7-2, TRBJ1-1)
CASSFAGDRDTEAFF

SEQ ID NO: 647827 - protein, 12 aa, Homo sapiens
  CDR3 for alpha chain variable domain of TCR clone 323914 (TRAV12-3, TRAJ17)
CAMTLTGNKLTF

SEQ ID NO: 647828 - protein, 15 aa, Homo sapiens
  CDR3 for beta chain variable domain of TCR clone 323914 (TRBV20-1, TRBJ2-7)
CSARARVSGVDEQYF

SEQ ID NO: 647829 - protein, 14 aa, Homo sapiens
  CDR3 for alpha chain variable domain of TCR clone 323915 (TRAV27, TRAJ12)
CAGARMDSSYNLIF

SEQ ID NO: 647830 - protein, 18 aa, Homo sapiens
  CDR3 for beta chain variable domain of TCR clone 323915 (TRBV10-3, TRBJ2-7)
CAISESGRPSGGRVEQYF

SEQ ID NO: 647831 - protein, 17 aa, Homo sapiens
  CDR3 for alpha chain variable domain of TCR clone 323916 (TRAV3, TRAJ42)
CAVRGREYGGSQGNLIF

SEQ ID NO: 647832 - protein, 13 aa, Homo sapiens
  CDR3 for beta chain variable domain of TCR clone 323916 (TRBV24-1, TRBJ2-2)
CATSDWSTGELFF

SEQ ID NO: 647833 - protein, 12 aa, Homo sapiens
  CDR3 for alpha chain variable domain of TCR clone 323917 (TRAV3, TRAJ26)
CAVRDYGQNFVS

SEQ ID NO: 647834 - protein, 13 aa, Homo sapiens
  CDR3 for beta chain variable domain of TCR clone 323917 (TRBV25-1, TRBJ2-6)
CASRGPGANVLTF

SEQ ID NO: 647835 - protein, 12 aa, Homo sapiens
  CDR3 for alpha chain variable domain of TCR clone 323918 (TRAV21, TRAJ33)
CAKMDSNYRLIW

SEQ ID NO: 647836 - protein, 14 aa, Homo sapiens
  CDR3 for beta chain variable domain of TCR clone 323918 (TRBV2, TRBJ2-7)
CARSLTSGGYEQYF

SEQ ID NO: 647837 - protein, 14 aa, Homo sapiens
  CDR3 for alpha chain variable domain of TCR clone 323919 (TRAV12-2, TRAJ5)
YAVNRSTGRRALPF

SEQ ID NO: 647838 - protein, 12 aa, Homo sapiens
  CDR3 for beta chain variable domain of TCR clone 323919 (TRBV19, TRBJ1-5)
CASSIAQQPQHF

SEQ ID NO: 647839 - protein, 12 aa, Homo sapiens
  CDR3 for alpha chain variable domain of TCR clone 323920 (TRAV17, TRAJ12)
CATLRSSYKLIF

SEQ ID NO: 647840 - protein, 15 aa, Homo sapiens
  CDR3 for beta chain variable domain of TCR clone 323920 (TRBV28, TRBJ2-5)
CASSSGRTIQETQYF

SEQ ID NO: 647841 - protein, 14 aa, Homo sapiens
  CDR3 for alpha chain variable domain of TCR clone 323921 (TRAV12-1, TRAJ43)
CVVNGRSNNNDMRF

SEQ ID NO: 647842 - protein, 12 aa, Homo sapiens
  CDR3 for beta chain variable domain of TCR clone 323921 (TRBV29-1, TRBJ2-3)
CSVTGGEDTQYF

SEQ ID NO: 647843 - protein, 11 aa, Homo sapiens
  CDR3 for alpha chain variable domain of TCR clone 323922 (TRAV3, TRAJ21)
CAVGNFDKFYF

SEQ ID NO: 647844 - protein, 16 aa, Homo sapiens
  CDR3 for beta chain variable domain of TCR clone 323922 (TRBV19, TRBJ2-1)
CASSKAGPSAYNEQFF

SEQ ID NO: 647845 - protein, 15 aa, Homo sapiens
  CDR3 for alpha chain variable domain of TCR clone 323923 (TRAV20, TRAJ6)
CAVRLQSGGSYIPKF

SEQ ID NO: 647846 - protein, 14 aa, Homo sapiens
  CDR3 for beta chain variable domain of TCR clone 323923 (TRBV12-4, TRBJ2-7)
CASSASGGWYEQYF

SEQ ID NO: 647847 - protein, 12 aa, Homo sapiens
  CDR3 for alpha chain variable domain of TCR clone 323924 (TRAV38-1, TRAJ47)
FAFETYGNKLVF

SEQ ID NO: 647848 - protein, 15 aa, Homo sapiens
  CDR3 for beta chain variable domain of TCR clone 323924 (TRBV5-7, TRBJ2-7)
CASSGGRPVPYEQYF

SEQ ID NO: 647849 - protein, 12 aa, Homo sapiens
  CDR3 for alpha chain variable domain of TCR clone 323925 (TRAV25, TRAJ11)
CAGASGYSTLTF

SEQ ID NO: 647850 - protein, 14 aa, Homo sapiens
  CDR3 for beta chain variable domain of TCR clone 323925 (TRBV7-3, TRBJ1-1)
CASSLGTGYTEAFF

SEQ ID NO: 647851 - protein, 12 aa, Homo sapiens
  CDR3 for alpha chain variable domain of TCR clone 323926 (TRAV38-1, TRAJ57)
CAFMKLPPTLVF

SEQ ID NO: 647852 - protein, 13 aa, Homo sapiens
  CDR3 for beta chain variable domain of TCR clone 323926 (TRBV19, TRBJ2-7)
FASSTSGSYEQYF

SEQ ID NO: 647853 - protein, 13 aa, Homo sapiens
  CDR3 for alpha chain variable domain of TCR clone 323927 (TRAV3, TRAJ21)
CAVREPDFNKFYF

SEQ ID NO: 647854 - protein, 13 aa, Homo sapiens
  CDR3 for beta chain variable domain of TCR clone 323927 (TRBV9, TRBJ2-1)
CACSPSGGNEQFF

SEQ ID NO: 647855 - protein, 14 aa, Homo sapiens
  CDR3 for alpha chain variable domain of TCR clone 323928 (TRAV17, TRAJ9)
TSVTDYTGGFKTIF

SEQ ID NO: 647856 - protein, 14 aa, Homo sapiens
  CDR3 for beta chain variable domain of TCR clone 323928 (TRBV19, TRBJ2-5)
CASGMTGQQETQYF

SEQ ID NO: 647857 - protein, 18 aa, Homo sapiens
  CDR3 for alpha chain variable domain of TCR clone 323929 (TRAV21, TRAJ52)
CAMRPSPAGGTIYGKLTF

SEQ ID NO: 647858 - protein, 17 aa, Homo sapiens
  CDR3 for beta chain variable domain of TCR clone 323929 (TRBV13, TRBJ2-3)
CASSLSRVAGGRNTQYF

SEQ ID NO: 647859 - protein, 13 aa, Homo sapiens
  CDR3 for alpha chain variable domain of TCR clone 323930 (TRAV8-6, TRAJ21)
CAVSPSSLNKFYF

SEQ ID NO: 647860 - protein, 13 aa, Homo sapiens
  CDR3 for beta chain variable domain of TCR clone 323930 (TRBV29-1, TRBJ2-1)
CSVEGGRVSEQFF

SEQ ID NO: 647861 - protein, 14 aa, Homo sapiens
  CDR3 for alpha chain variable domain of TCR clone 323931 (TRAV1-2, TRAJ16)
CAVNRFSDGQKLLF

SEQ ID NO: 647862 - protein, 13 aa, Homo sapiens
  CDR3 for beta chain variable domain of TCR clone 323931 (TRBV10-3, TRBJ2-7)
CASKLAVNDEQYF

SEQ ID NO: 647863 - protein, 14 aa, Homo sapiens
  CDR3 for alpha chain variable domain of TCR clone 323932 (TRAV23/DV6, TRAJ17)
CAASVQAAGNKLTF

SEQ ID NO: 647864 - protein, 16 aa, Homo sapiens
  CDR3 for beta chain variable domain of TCR clone 323932 (TRBV2, TRBJ2-3)
CASSTSVEGVTDTQYF

SEQ ID NO: 647865 - protein, 14 aa, Homo sapiens
  CDR3 for alpha chain variable domain of TCR clone 323933 (TRAV12-2, TRAJ40)
CAVKIPSGTYKYIF

SEQ ID NO: 647866 - protein, 15 aa, Homo sapiens
  CDR3 for beta chain variable domain of TCR clone 323933 (TRBV7-2, TRBJ2-2)
CASSLVAGSAGELFF

SEQ ID NO: 647867 - protein, 14 aa, Homo sapiens
  CDR3 for alpha chain variable domain of TCR clone 323934 (TRAV1-2, TRAJ16)
CAVNRVSDGQKLLF

SEQ ID NO: 647868 - protein, 14 aa, Homo sapiens
  CDR3 for beta chain variable domain of TCR clone 323934 (TRBV19, TRBJ2-7)
CASSVDSESYEQYF

SEQ ID NO: 647869 - protein, 16 aa, Homo sapiens
  CDR3 for alpha chain variable domain of TCR clone 323935 (TRAV38-1, TRAJ32)
CAFMKGGGGATNKLIF

SEQ ID NO: 647870 - protein, 14 aa, Homo sapiens
  CDR3 for beta chain variable domain of TCR clone 323935 (TRBV11-2, TRBJ2-5)
CASSRTGGIETQYF

SEQ ID NO: 647871 - protein, 13 aa, Homo sapiens
  CDR3 for alpha chain variable domain of TCR clone 323936 (TRAV2, TRAJ15)
CAVASQAGTALIF

SEQ ID NO: 647872 - protein, 15 aa, Homo sapiens
  CDR3 for beta chain variable domain of TCR clone 323936 (TRBV2, TRBJ2-7)
CASTLLGSGATEQYF

SEQ ID NO: 647873 - protein, 12 aa, Homo sapiens
  CDR3 for alpha chain variable domain of TCR clone 323937 (TRAV2, TRAJ10)
CASTGGGNKLTF

SEQ ID NO: 647874 - protein, 16 aa, Homo sapiens
  CDR3 for beta chain variable domain of TCR clone 323937 (TRBV13, TRBJ2-2)
CASSPRTGEHTGELFF

SEQ ID NO: 647875 - protein, 13 aa, Homo sapiens
  CDR3 for alpha chain variable domain of TCR clone 323938 (TRAV26-1, TRAJ33)
CIVRVDSNYQLIW

SEQ ID NO: 647876 - protein, 15 aa, Homo sapiens
  CDR3 for beta chain variable domain of TCR clone 323938 (TRBV7-2, TRBJ1-5)
CASSFAAGINQPQHF

SEQ ID NO: 647877 - protein, 16 aa, Homo sapiens
  CDR3 for alpha chain variable domain of TCR clone 323939 (TRAV8-3, TRAJ13)
CAVGAYPSGGYQTVTF

SEQ ID NO: 647878 - protein, 14 aa, Homo sapiens
  CDR3 for beta chain variable domain of TCR clone 323939 (TRBV18, TRBJ2-5)
CASSPRASSETQYF

SEQ ID NO: 647879 - protein, 16 aa, Homo sapiens
  CDR3 for alpha chain variable domain of TCR clone 323940 (TRAV27, TRAJ13)
CAGAKSDSGGYQKVTF

SEQ ID NO: 647880 - protein, 15 aa, Homo sapiens
  CDR3 for beta chain variable domain of TCR clone 323940 (TRBV9, TRBJ1-6)
CASSVAGTGDSTLHF

SEQ ID NO: 647881 - protein, 16 aa, Homo sapiens
  CDR3 for alpha chain variable domain of TCR clone 323941 (TRAV12-1, TRAJ22)
CVVNSISSGSARQLTF

SEQ ID NO: 647882 - protein, 17 aa, Homo sapiens
  CDR3 for beta chain variable domain of TCR clone 323941 (TRBV18, TRBJ2-1)
CASSKGLSGGADNEQFF

SEQ ID NO: 647883 - protein, 11 aa, Homo sapiens
  CDR3 for alpha chain variable domain of TCR clone 323942 (TRAV1-1, TRAJ20)
CAVFNDYKLSF

SEQ ID NO: 647884 - protein, 13 aa, Homo sapiens
  CDR3 for beta chain variable domain of TCR clone 323942 (TRBV10-3, TRBJ2-7)
CASKLAVNYEQYF

SEQ ID NO: 647885 - protein, 17 aa, Homo sapiens
  CDR3 for alpha chain variable domain of TCR clone 323943 (TRAV21, TRAJ52)
CAVGTNAGGTSYGKLTF

SEQ ID NO: 647886 - protein, 13 aa, Homo sapiens
  CDR3 for beta chain variable domain of TCR clone 323943 (TRBV5-1, TRBJ1-2)
CASSFSGNLGYSF

SEQ ID NO: 647887 - protein, 15 aa, Homo sapiens
  CDR3 for alpha chain variable domain of TCR clone 323944 (TRAV12-3, TRAJ22)
CAMRSSAGSARQLTF

SEQ ID NO: 647888 - protein, 19 aa, Homo sapiens
  CDR3 for beta chain variable domain of TCR clone 323944 (TRBV6-3, TRBJ1-2)
CASSYSKGRTGPPNYGYTF

SEQ ID NO: 647889 - protein, 14 aa, Homo sapiens
  CDR3 for alpha chain variable domain of TCR clone 323945 (TRAV12-1, TRAJ12)
CVVISMDSSYKLIF

SEQ ID NO: 647890 - protein, 16 aa, Homo sapiens
  CDR3 for beta chain variable domain of TCR clone 323945 (TRBV11-2, TRBJ1-2)
CASSLDTGGADYGYTF

SEQ ID NO: 647891 - protein, 14 aa, Homo sapiens
  CDR3 for alpha chain variable domain of TCR clone 323946 (TRAV16, TRAJ31)
CSKWRRGDNARLMF

SEQ ID NO: 647892 - protein, 16 aa, Homo sapiens
  CDR3 for beta chain variable domain of TCR clone 323946 (TRBV28, TRBJ2-7)
CARSLFFETGGPEQYF

SEQ ID NO: 647893 - protein, 18 aa, Homo sapiens
  CDR3 for alpha chain variable domain of TCR clone 323947 (TRAV26-2, TRAJ45)
CILRLWGYSGGGADGLTF

SEQ ID NO: 647894 - protein, 11 aa, Homo sapiens
  CDR3 for beta chain variable domain of TCR clone 323947 (TRBV19, TRBJ1-1)
CASSIGSGAFF

SEQ ID NO: 647895 - protein, 15 aa, Homo sapiens
  CDR3 for alpha chain variable domain of TCR clone 323948 (TRAV23/DV6, TRAJ7)
CAASVGRSGNNRLAF

SEQ ID NO: 647896 - protein, 15 aa, Homo sapiens
  CDR3 for beta chain variable domain of TCR clone 323948 (TRBV12-4, TRBJ1-6)
RASSLLGGSNSPLHF

SEQ ID NO: 647897 - protein, 14 aa, Homo sapiens
  CDR3 for alpha chain variable domain of TCR clone 323949 (TRAV12-2, TRAJ13)
CAVKKTGGYQKVTF

SEQ ID NO: 647898 - protein, 17 aa, Homo sapiens
  CDR3 for beta chain variable domain of TCR clone 323949 (TRBV3-1, TRBJ2-5)
CASSNWGGTSGQETQYF

SEQ ID NO: 647899 - protein, 12 aa, Homo sapiens
  CDR3 for alpha chain variable domain of TCR clone 323950 (TRAV30, TRAJ43)
CGTEERGNDMRF

SEQ ID NO: 647900 - protein, 16 aa, Homo sapiens
  CDR3 for beta chain variable domain of TCR clone 323950 (TRBV5-1, TRBJ2-2)
CASSSRTGGRTGELFF

SEQ ID NO: 647901 - protein, 14 aa, Homo sapiens
  CDR3 for alpha chain variable domain of TCR clone 323951 (TRAV12-3, TRAJ10)
SHLPLTGGGNKLTF

SEQ ID NO: 647902 - protein, 14 aa, Homo sapiens
  CDR3 for beta chain variable domain of TCR clone 323951 (TRBV7-2, TRBJ1-1)
CASSFLTGTTEALF

SEQ ID NO: 647903 - protein, 13 aa, Homo sapiens
  CDR3 for alpha chain variable domain of TCR clone 323952 (TRAV13-1, TRAJ49)
CAASIGTGNQFYF

SEQ ID NO: 647904 - protein, 16 aa, Homo sapiens
  CDR3 for beta chain variable domain of TCR clone 323952 (TRBV7-3, TRBJ2-2)
CASSLKRGTSSGELFF

SEQ ID NO: 647905 - protein, 14 aa, Homo sapiens
  CDR3 for alpha chain variable domain of TCR clone 323953 (TRAV12-1, TRAJ26)
CVVKGSNYGQNFVF

SEQ ID NO: 647906 - protein, 15 aa, Homo sapiens
  CDR3 for beta chain variable domain of TCR clone 323953 (TRBV11-1, TRBJ2-7)
CASSLNYGASYEQYF

SEQ ID NO: 647907 - protein, 15 aa, Homo sapiens
  CDR3 for alpha chain variable domain of TCR clone 323954 (TRAV12-2, TRAJ43)
CAFDMRFGAGTRLTV

SEQ ID NO: 647908 - protein, 20 aa, Homo sapiens
  CDR3 for beta chain variable domain of TCR clone 323954 (TRBV3-1, TRBJ2-6)
CASGPRPGLEGGAGANVLTF

SEQ ID NO: 647909 - protein, 14 aa, Homo sapiens
  CDR3 for alpha chain variable domain of TCR clone 323955 (TRAV26-1, TRAJ45)
CIEVTGGGADGLTF

SEQ ID NO: 647910 - protein, 14 aa, Homo sapiens
  CDR3 for beta chain variable domain of TCR clone 323955 (TRBV2, TRBJ1-5)
CASSHGNSNQPQHF

SEQ ID NO: 647911 - protein, 16 aa, Homo sapiens
  CDR3 for alpha chain variable domain of TCR clone 323956 (TRAV3, TRAJ10)
CAVRDMNAGGGNKLTF

SEQ ID NO: 647912 - protein, 14 aa, Homo sapiens
  CDR3 for beta chain variable domain of TCR clone 323956 (TRBV19, TRBJ2-1)
CASPTFVLSGEQFF

SEQ ID NO: 647913 - protein, 15 aa, Homo sapiens
  CDR3 for alpha chain variable domain of TCR clone 323957 (TRAV17, TRAJ54)
CATTRSEQGAQKLVF

SEQ ID NO: 647914 - protein, 15 aa, Homo sapiens
  CDR3 for beta chain variable domain of TCR clone 323957 (TRBV7-9, TRBJ2-5)
CASSDTGRGRETQYF

SEQ ID NO: 647915 - protein, 14 aa, Homo sapiens
  CDR3 for alpha chain variable domain of TCR clone 323958 (TRAV27, TRAJ13)
CRSSNSGGYQKVTF

SEQ ID NO: 647916 - protein, 11 aa, Homo sapiens
  CDR3 for beta chain variable domain of TCR clone 323958 (TRBV14, TRBJ2-5)
CQQQLKETQYF

SEQ ID NO: 647917 - protein, 14 aa, Homo sapiens
  CDR3 for alpha chain variable domain of TCR clone 323959 (TRAV29/DV5, TRAJ32)
CAAAFGGATNKLIF

SEQ ID NO: 647918 - protein, 15 aa, Homo sapiens
  CDR3 for beta chain variable domain of TCR clone 323959 (TRBV27, TRBJ2-7)
CASSTAGTGSYEQYF

SEQ ID NO: 647919 - protein, 18 aa, Homo sapiens
  CDR3 for alpha chain variable domain of TCR clone 323960 (TRAV17, TRAJ28)
CATDPPRGSGAGRYQLTF

SEQ ID NO: 647920 - protein, 14 aa, Homo sapiens
  CDR3 for beta chain variable domain of TCR clone 323960 (TRBV13, TRBJ2-5)
CASSLDYPQEAQFF

SEQ ID NO: 647921 - protein, 12 aa, Homo sapiens
  CDR3 for alpha chain variable domain of TCR clone 323961 (TRAV1-1, TRAJ8)
CAGGTGFQKLVF

SEQ ID NO: 647922 - protein, 15 aa, Homo sapiens
  CDR3 for beta chain variable domain of TCR clone 323961 (TRBV7-9, TRBJ1-4)
CAGSRTGGFNEELFF

SEQ ID NO: 647923 - protein, 13 aa, Homo sapiens
  CDR3 for alpha chain variable domain of TCR clone 323962 (TRAV13-2, TRAJ13)
CSERPGGYQKVTF

SEQ ID NO: 647924 - protein, 13 aa, Homo sapiens
  CDR3 for beta chain variable domain of TCR clone 323962 (TRBV7-9, TRBJ1-2)
CASSLKQNYGYTF

SEQ ID NO: 647925 - protein, 14 aa, Homo sapiens
  CDR3 for alpha chain variable domain of TCR clone 323963 (TRAV20, TRAJ56)
CAVQFGGANSKLTF

SEQ ID NO: 647926 - protein, 13 aa, Homo sapiens
  CDR3 for beta chain variable domain of TCR clone 323963 (TRBV7-3, TRBJ2-1)
CASSPVAYNEQFF

SEQ ID NO: 647927 - protein, 16 aa, Homo sapiens
  CDR3 for alpha chain variable domain of TCR clone 323964 (TRAV23/DV6, TRAJ10)
CAASIVTHGRRKQTHF

SEQ ID NO: 647928 - protein, 13 aa, Homo sapiens
  CDR3 for beta chain variable domain of TCR clone 323964 (TRBV11-1, TRBJ1-2)
CASVGSWGYGYTF

SEQ ID NO: 647929 - protein, 14 aa, Homo sapiens
  CDR3 for alpha chain variable domain of TCR clone 323965 (TRAV1-2, TRAJ8)
CAVREDTGFQKLVF

SEQ ID NO: 647930 - protein, 15 aa, Homo sapiens
  CDR3 for beta chain variable domain of TCR clone 323965 (TRBV28, TRBJ2-4)
CAAGSGTLLMGIQYS

SEQ ID NO: 647931 - protein, 15 aa, Homo sapiens
  CDR3 for alpha chain variable domain of TCR clone 323966 (TRAV26-1, TRAJ37)
CIVRVGSGNTGKLIF

SEQ ID NO: 647932 - protein, 12 aa, Homo sapiens
  CDR3 for beta chain variable domain of TCR clone 323966 (TRBV11-2, TRBJ2-2)
CASSLGGGELFF

SEQ ID NO: 647933 - protein, 14 aa, Homo sapiens
  CDR3 for alpha chain variable domain of TCR clone 323967 (TRAV1-2, TRAJ16)
CAVNRFSDGQKLPF

SEQ ID NO: 647934 - protein, 13 aa, Homo sapiens
  CDR3 for beta chain variable domain of TCR clone 323967 (TRBV15, TRBJ2-7)
CATSTTGHYEQYF

SEQ ID NO: 647935 - protein, 16 aa, Homo sapiens
  CDR3 for alpha chain variable domain of TCR clone 323968 (TRAV26-1, TRAJ56)
CIVRVAETGANSKLTF

SEQ ID NO: 647936 - protein, 15 aa, Homo sapiens
  CDR3 for beta chain variable domain of TCR clone 323968 (TRBV5-7, TRBJ1-4)
CASSLWNQGGEKLFF

SEQ ID NO: 647937 - protein, 14 aa, Homo sapiens
  CDR3 for alpha chain variable domain of TCR clone 323969 (TRAV14/DV4, TRAJ54)
CAMREAPGAQKLVF

SEQ ID NO: 647938 - protein, 13 aa, Homo sapiens
  CDR3 for beta chain variable domain of TCR clone 323969 (TRBV10-3, TRBJ2-7)
CASKLAVNYEQYF

SEQ ID NO: 647939 - protein, 14 aa, Homo sapiens
  CDR3 for alpha chain variable domain of TCR clone 323970 (TRAV16, TRAJ39)
CALIKNNAGNMLTF

SEQ ID NO: 647940 - protein, 17 aa, Homo sapiens
  CDR3 for beta chain variable domain of TCR clone 323970 (TRBV23-1, TRBJ1-2)
CASSNTGGGLLWLHLRF

SEQ ID NO: 647941 - protein, 12 aa, Homo sapiens
  CDR3 for alpha chain variable domain of TCR clone 323971 (TRAV9-2, TRAJ26)
CALRGYGQNFVF

SEQ ID NO: 647942 - protein, 13 aa, Homo sapiens
  CDR3 for beta chain variable domain of TCR clone 323971 (TRBV7-7, TRBJ1-1)
CASSLGANTEAFF

SEQ ID NO: 647943 - protein, 11 aa, Homo sapiens
  CDR3 for alpha chain variable domain of TCR clone 323972 (TRAV21, TRAJ48)
CAVVGNEKLTF

SEQ ID NO: 647944 - protein, 16 aa, Homo sapiens
  CDR3 for beta chain variable domain of TCR clone 323972 (TRBV12-4, TRBJ1-5)
CASSSGPRGSNQPQHF

SEQ ID NO: 647945 - protein, 12 aa, Homo sapiens
  CDR3 for alpha chain variable domain of TCR clone 323973 (TRAV12-3, TRAJ17)
CAITLTGNKLTF

SEQ ID NO: 647946 - protein, 14 aa, Homo sapiens
  CDR3 for beta chain variable domain of TCR clone 323973 (TRBV19, TRBJ2-1)
CASPTFVLSGEQFF

SEQ ID NO: 647947 - protein, 13 aa, Homo sapiens
  CDR3 for alpha chain variable domain of TCR clone 323974 (TRAV8-4, TRAJ34)
RAVTLYNTDKLIF

SEQ ID NO: 647948 - protein, 17 aa, Homo sapiens
  CDR3 for beta chain variable domain of TCR clone 323974 (TRBV7-2, TRBJ2-2)
CASSPSGRGGGTGELFF

SEQ ID NO: 647949 - protein, 14 aa, Homo sapiens
  CDR3 for alpha chain variable domain of TCR clone 323975 (TRAV8-3, TRAJ6)
CAVGASGGSYIPTF

SEQ ID NO: 647950 - protein, 16 aa, Homo sapiens
  CDR3 for beta chain variable domain of TCR clone 323975 (TRBV18, TRBJ2-2)
CQLTIGSLAEHGELFF

SEQ ID NO: 647951 - protein, 13 aa, Homo sapiens
  CDR3 for alpha chain variable domain of TCR clone 323976 (TRAV1-2, TRAJ9)
CAVLNTGGFKTIF

SEQ ID NO: 647952 - protein, 14 aa, Homo sapiens
  CDR3 for beta chain variable domain of TCR clone 323976 (TRBV7-8, TRBJ2-3)
CASSLEAGTDTQYF

SEQ ID NO: 647953 - protein, 12 aa, Homo sapiens
  CDR3 for alpha chain variable domain of TCR clone 323977 (TRAV1-1, TRAJ39)
CAVPVVGNMLTF

SEQ ID NO: 647954 - protein, 12 aa, Homo sapiens
  CDR3 for beta chain variable domain of TCR clone 323977 (TRBV11-2, TRBJ2-7)
CASSLGDREQYF

SEQ ID NO: 647955 - protein, 12 aa, Homo sapiens
  CDR3 for alpha chain variable domain of TCR clone 323978 (TRAV17, TRAJ53)
CATEGSNYKLTF

SEQ ID NO: 647956 - protein, 13 aa, Homo sapiens
  CDR3 for beta chain variable domain of TCR clone 323978 (TRBV7-3, TRBJ2-7)
CASSQAGGYEQYF

SEQ ID NO: 647957 - protein, 15 aa, Homo sapiens
  CDR3 for alpha chain variable domain of TCR clone 323979 (TRAV3, TRAJ4)
CTVRDGTGGYNKLIF

SEQ ID NO: 647958 - protein, 16 aa, Homo sapiens
  CDR3 for beta chain variable domain of TCR clone 323979 (TRBV27, TRBJ2-2)
CASSSSGVSNTGELFF

SEQ ID NO: 647959 - protein, 14 aa, Homo sapiens
  CDR3 for alpha chain variable domain of TCR clone 323980 (TRAV12-2, TRAJ13)
CAVKKTGGYQKVTF

SEQ ID NO: 647960 - protein, 12 aa, Homo sapiens
  CDR3 for beta chain variable domain of TCR clone 323980 (TRBV12-4, TRBJ2-7)
CASRNDRDEHYF

SEQ ID NO: 647961 - protein, 18 aa, Homo sapiens
  CDR3 for alpha chain variable domain of TCR clone 323981 (TRAV26-1, TRAJ52)
CIVRVEGSGGTSYGKLRF

SEQ ID NO: 647962 - protein, 13 aa, Homo sapiens
  CDR3 for beta chain variable domain of TCR clone 323981 (TRBV7-3, TRBJ1-2)
CASSLKRGYGYTF

SEQ ID NO: 647963 - protein, 13 aa, Homo sapiens
  CDR3 for alpha chain variable domain of TCR clone 323982 (TRAV12-1, TRAJ6)
CVVNRGGSYIPTF

SEQ ID NO: 647964 - protein, 16 aa, Homo sapiens
  CDR3 for beta chain variable domain of TCR clone 323982 (TRBV20-1, TRBJ2-5)
CSPGGTSGGYMETQYF

SEQ ID NO: 647965 - protein, 13 aa, Homo sapiens
  CDR3 for alpha chain variable domain of TCR clone 323983 (TRAV1-1, TRAJ9)
CAAKNTGGFKTIF

SEQ ID NO: 647966 - protein, 15 aa, Homo sapiens
  CDR3 for beta chain variable domain of TCR clone 323983 (TRBV19, TRBJ2-4)
CASRGPRRGENIQYF

SEQ ID NO: 647967 - protein, 12 aa, Homo sapiens
  CDR3 for alpha chain variable domain of TCR clone 323984 (TRAV8-6, TRAJ11)
CAVSSGYSTLPF

SEQ ID NO: 647968 - protein, 11 aa, Homo sapiens
  CDR3 for beta chain variable domain of TCR clone 323984 (TRBV20-1, TRBJ1-5)
CSAQGDQPQHF

SEQ ID NO: 647969 - protein, 14 aa, Homo sapiens
  CDR3 for alpha chain variable domain of TCR clone 323985 (TRAV12-2, TRAJ13)
CAVKKTGGYQKVTF

SEQ ID NO: 647970 - protein, 17 aa, Homo sapiens
  CDR3 for beta chain variable domain of TCR clone 323985 (TRBV15, TRBJ2-4)
CATSRDNPQTGLDIQFF

SEQ ID NO: 647971 - protein, 14 aa, Homo sapiens
  CDR3 for alpha chain variable domain of TCR clone 323986 (TRAV4, TRAJ43)
CLVGPMYNNNAMRF

SEQ ID NO: 647972 - protein, 21 aa, Homo sapiens
  CDR3 for beta chain variable domain of TCR clone 323986 (TRBV11-1, TRBJ2-1)
CASSARERLRPEGPSYNEQFF

SEQ ID NO: 647973 - protein, 13 aa, Homo sapiens
  CDR3 for alpha chain variable domain of TCR clone 323987 (TRAV38-2/DV8, TRAJ34)
CAYKTWNTDKLIF

SEQ ID NO: 647974 - protein, 18 aa, Homo sapiens
  CDR3 for beta chain variable domain of TCR clone 323987 (TRBV6-6, TRBJ1-3)
CASSYSKWDSISGNTIYF

SEQ ID NO: 647975 - protein, 13 aa, Homo sapiens
  CDR3 for alpha chain variable domain of TCR clone 323988 (TRAV21, TRAJ27)
CAARPGNAGKPTF

SEQ ID NO: 647976 - protein, 13 aa, Homo sapiens
  CDR3 for beta chain variable domain of TCR clone 323988 (TRBV13, TRBJ2-1)
CASILGGRGEHFF

SEQ ID NO: 647977 - protein, 16 aa, Homo sapiens
  CDR3 for alpha chain variable domain of TCR clone 323989 (TRAV30, TRAJ49)
SAAQRVGPNTGNQFYF

SEQ ID NO: 647978 - protein, 13 aa, Homo sapiens
  CDR3 for beta chain variable domain of TCR clone 323989 (TRBV12-4, TRBJ2-5)
CASSPGTEETQYF

SEQ ID NO: 647979 - protein, 12 aa, Homo sapiens
  CDR3 for alpha chain variable domain of TCR clone 323990 (TRAV12-3, TRAJ20)
CAMVRGYYKLSF

SEQ ID NO: 647980 - protein, 16 aa, Homo sapiens
  CDR3 for beta chain variable domain of TCR clone 323990 (TRBV5-1, TRBJ2-3)
CASSLGLAVYTDTQYF

SEQ ID NO: 647981 - protein, 15 aa, Homo sapiens
  CDR3 for alpha chain variable domain of TCR clone 323991 (TRAV8-4, TRAJ36)
CAVRKSWTGANNLFF

SEQ ID NO: 647982 - protein, 13 aa, Homo sapiens
  CDR3 for beta chain variable domain of TCR clone 323991 (TRBV4-2, TRBJ1-1)
CASSQAGNTEAFF

SEQ ID NO: 647983 - protein, 16 aa, Homo sapiens
  CDR3 for alpha chain variable domain of TCR clone 323992 (TRAV35, TRAJ28)
CAGYLYSGAGSYQLTF

SEQ ID NO: 647984 - protein, 16 aa, Homo sapiens
  CDR3 for beta chain variable domain of TCR clone 323992 (TRBV5-1, TRBJ2-1)
CASSHGLAGPQNKQFF

SEQ ID NO: 647985 - protein, 13 aa, Homo sapiens
  CDR3 for alpha chain variable domain of TCR clone 323993 (TRAV12-1, TRAJ16)
CVVNGPDGQKRPF

SEQ ID NO: 647986 - protein, 13 aa, Homo sapiens
  CDR3 for beta chain variable domain of TCR clone 323993 (TRBV2, TRBJ1-1)
CARNPTGGFHAFF

SEQ ID NO: 647987 - protein, 11 aa, Homo sapiens
  CDR3 for alpha chain variable domain of TCR clone 323994 (TRAV12-1, TRAJ30)
RVVNGQDKIIF

SEQ ID NO: 647988 - protein, 16 aa, Homo sapiens
  CDR3 for beta chain variable domain of TCR clone 323994 (TRBV24-1, TRBJ2-3)
CATSDAISGITDTQYF

SEQ ID NO: 647989 - protein, 14 aa, Homo sapiens
  CDR3 for alpha chain variable domain of TCR clone 323995 (TRAV3, TRAJ34)
CAVRDINNTDKRIF

SEQ ID NO: 647990 - protein, 14 aa, Homo sapiens
  CDR3 for beta chain variable domain of TCR clone 323995 (TRBV7-2, TRBJ2-2)
CASSLGQNTGELFF

SEQ ID NO: 647991 - protein, 16 aa, Homo sapiens
  CDR3 for alpha chain variable domain of TCR clone 323996 (TRAV26-1, TRAJ40)
CIVRVGTTSGTYKYIF

SEQ ID NO: 647992 - protein, 11 aa, Homo sapiens
  CDR3 for beta chain variable domain of TCR clone 323996 (TRBV19, TRBJ1-1)
CASSIGSEAFF

SEQ ID NO: 647993 - protein, 12 aa, Homo sapiens
  CDR3 for alpha chain variable domain of TCR clone 323997 (TRAV12-3, TRAJ17)
CAMTLTGNKLTF

SEQ ID NO: 647994 - protein, 15 aa, Homo sapiens
  CDR3 for beta chain variable domain of TCR clone 323997 (TRBV20-1, TRBJ2-7)
FSARDRVSGMDELYF

SEQ ID NO: 647995 - protein, 11 aa, Homo sapiens
  CDR3 for alpha chain variable domain of TCR clone 323998 (TRAV21, TRAJ41)
CAVRSGYALNF

SEQ ID NO: 647996 - protein, 13 aa, Homo sapiens
  CDR3 for beta chain variable domain of TCR clone 323998 (TRBV7-9, TRBJ1-2)
CPSSLKQNYGYTF

SEQ ID NO: 647997 - protein, 12 aa, Homo sapiens
  CDR3 for alpha chain variable domain of TCR clone 323999 (TRAV13-1, TRAJ48)
CAANFGNKKLTF

SEQ ID NO: 647998 - protein, 14 aa, Homo sapiens
  CDR3 for beta chain variable domain of TCR clone 323999 (TRBV6-1, TRBJ1-3)
CASVQGGGGNTIYF

SEQ ID NO: 647999 - protein, 12 aa, Homo sapiens
  CDR3 for alpha chain variable domain of TCR clone 324000 (TRAV12-3, TRAJ17)
SAMTLTGNKLTF

SEQ ID NO: 648000 - protein, 15 aa, Homo sapiens
  CDR3 for beta chain variable domain of TCR clone 324000 (TRBV20-1, TRBJ2-7)
CSARDRVSGMDEQYF

SEQ ID NO: 648001 - protein, 12 aa, Homo sapiens
  CDR3 for alpha chain variable domain of TCR clone 324001 (TRAV2, TRAJ31)
CAVEDNNTRLMF

SEQ ID NO: 648002 - protein, 14 aa, Homo sapiens
  CDR3 for beta chain variable domain of TCR clone 324001 (TRBV19, TRBJ2-5)
CASSMTGQQETQYF

SEQ ID NO: 648003 - protein, 14 aa, Homo sapiens
  CDR3 for alpha chain variable domain of TCR clone 324002 (TRAV29/DV5, TRAJ22)
CAASATGSARQLTF

SEQ ID NO: 648004 - protein, 14 aa, Homo sapiens
  CDR3 for beta chain variable domain of TCR clone 324002 (TRBV19, TRBJ2-1)
CASSPGLAPNVQFF

SEQ ID NO: 648005 - protein, 13 aa, Homo sapiens
  CDR3 for alpha chain variable domain of TCR clone 324003 (TRAV3, TRAJ21)
CAVREPAFNKFYF

SEQ ID NO: 648006 - protein, 15 aa, Homo sapiens
  CDR3 for beta chain variable domain of TCR clone 324003 (TRBV2, TRBJ2-1)
CASSELAGGYNEQFF

SEQ ID NO: 648007 - protein, 17 aa, Homo sapiens
  CDR3 for alpha chain variable domain of TCR clone 324004 (TRAV13-1, TRAJ52)
CAAGRNAGGTSYGKLTF

SEQ ID NO: 648008 - protein, 18 aa, Homo sapiens
  CDR3 for beta chain variable domain of TCR clone 324004 (TRBV18, TRBJ2-3)
CASSYTSGAAGGTDTQYF

SEQ ID NO: 648009 - protein, 14 aa, Homo sapiens
  CDR3 for alpha chain variable domain of TCR clone 324005 (TRAV1-2, TRAJ16)
CAVNRFSDGQKLLF

SEQ ID NO: 648010 - protein, 13 aa, Homo sapiens
  CDR3 for beta chain variable domain of TCR clone 324005 (TRBV10-3, TRBJ1-2)
CAINERDSYGYTF

SEQ ID NO: 648011 - protein, 16 aa, Homo sapiens
  CDR3 for alpha chain variable domain of TCR clone 324006 (TRAV30, TRAJ24)
CGTEIVDADSCRKFQF

SEQ ID NO: 648012 - protein, 14 aa, Homo sapiens
  CDR3 for beta chain variable domain of TCR clone 324006 (TRBV12-5, TRBJ2-5)
CASGSRTHQETQYF

SEQ ID NO: 648013 - protein, 13 aa, Homo sapiens
  CDR3 for alpha chain variable domain of TCR clone 324007 (TRAV8-3, TRAJ4)
WVFYSGGYNNLIF

SEQ ID NO: 648014 - protein, 14 aa, Homo sapiens
  CDR3 for beta chain variable domain of TCR clone 324007 (TRBV7-9, TRBJ2-3)
CASSLEDGTDTQYF

SEQ ID NO: 648015 - protein, 13 aa, Homo sapiens
  CDR3 for alpha chain variable domain of TCR clone 324008 (TRAV3, TRAJ29)
CAVRDLGNTPLVF

SEQ ID NO: 648016 - protein, 15 aa, Homo sapiens
  CDR3 for beta chain variable domain of TCR clone 324008 (TRBV12-4, TRBJ2-5)
CASIGRTGEGETQYF

SEQ ID NO: 648017 - protein, 14 aa, Homo sapiens
  CDR3 for alpha chain variable domain of TCR clone 324009 (TRAV12-1, TRAJ17)
CVMNYKAAGNKLTF

SEQ ID NO: 648018 - protein, 16 aa, Homo sapiens
  CDR3 for beta chain variable domain of TCR clone 324009 (TRBV12-4, TRBJ1-5)
CASSRPVGGSNQPQHF

SEQ ID NO: 648019 - protein, 12 aa, Homo sapiens
  CDR3 for alpha chain variable domain of TCR clone 324010 (TRAV3, TRAJ13)
CAVSGGYQKVTF

SEQ ID NO: 648020 - protein, 15 aa, Homo sapiens
  CDR3 for beta chain variable domain of TCR clone 324010 (TRBV10-2, TRBJ2-6)
CASSEQGTGANVLTF

SEQ ID NO: 648021 - protein, 13 aa, Homo sapiens
  CDR3 for alpha chain variable domain of TCR clone 324011 (TRAV39, TRAJ57)
CAVDRGGSEKLVF

SEQ ID NO: 648022 - protein, 16 aa, Homo sapiens
  CDR3 for beta chain variable domain of TCR clone 324011 (TRBV4-1, TRBJ1-2)
CASSRRTGQDWQGYTF

SEQ ID NO: 648023 - protein, 13 aa, Homo sapiens
  CDR3 for alpha chain variable domain of TCR clone 324012 (TRAV20, TRAJ31)
CAVQAIGGARLMF

SEQ ID NO: 648024 - protein, 11 aa, Homo sapiens
  CDR3 for beta chain variable domain of TCR clone 324012 (TRBV11-2, TRBJ2-2)
CASSLPGELFF

SEQ ID NO: 648025 - protein, 18 aa, Homo sapiens
  CDR3 for alpha chain variable domain of TCR clone 324013 (TRAV12-1, TRAJ26)
SSVIQPPTSVPYGQTFVF

SEQ ID NO: 648026 - protein, 14 aa, Homo sapiens
  CDR3 for beta chain variable domain of TCR clone 324013 (TRBV5-4, TRBJ2-1)
CASSLDQGLNEQFF

SEQ ID NO: 648027 - protein, 12 aa, Homo sapiens
  CDR3 for alpha chain variable domain of TCR clone 324014 (TRAV12-3, TRAJ17)
CSMTLTGNKLTF

SEQ ID NO: 648028 - protein, 12 aa, Homo sapiens
  CDR3 for beta chain variable domain of TCR clone 324014 (TRBV2, TRBJ2-1)
CAYGPPGNEQFF

SEQ ID NO: 648029 - protein, 13 aa, Homo sapiens
  CDR3 for alpha chain variable domain of TCR clone 324015 (TRAV21, TRAJ20)
CAVGLRVDYKLSF

SEQ ID NO: 648030 - protein, 13 aa, Homo sapiens
  CDR3 for beta chain variable domain of TCR clone 324015 (TRBV6-1, TRBJ1-1)
CASSRQGHTEAFF

SEQ ID NO: 648031 - protein, 19 aa, Homo sapiens
  CDR3 for alpha chain variable domain of TCR clone 324016 (TRAV8-3, TRAJ8)
LSTSVLWDPMNTGFQKLVF

SEQ ID NO: 648032 - protein, 13 aa, Homo sapiens
  CDR3 for beta chain variable domain of TCR clone 324016 (TRBV10-2, TRBJ2-3)
YASSESGDHTQYF

SEQ ID NO: 648033 - protein, 16 aa, Homo sapiens
  CDR3 for alpha chain variable domain of TCR clone 324017 (TRAV12-2, TRAJ28)
CAVIRGSGAGSYQLTF

SEQ ID NO: 648034 - protein, 14 aa, Homo sapiens
  CDR3 for beta chain variable domain of TCR clone 324017 (TRBV20-1, TRBJ2-1)
CSAQIGGSANEQFF

SEQ ID NO: 648035 - protein, 14 aa, Homo sapiens
  CDR3 for alpha chain variable domain of TCR clone 324018 (TRAV1-2, TRAJ8)
CAVREDKGFQKLVF

SEQ ID NO: 648036 - protein, 15 aa, Homo sapiens
  CDR3 for beta chain variable domain of TCR clone 324018 (TRBV6-3, TRBJ2-7)
CASRSPGTVFYEPYF

SEQ ID NO: 648037 - protein, 12 aa, Homo sapiens
  CDR3 for alpha chain variable domain of TCR clone 324019 (TRAV8-4, TRAJ43)
CAVSVNNNDMRF

SEQ ID NO: 648038 - protein, 13 aa, Homo sapiens
  CDR3 for beta chain variable domain of TCR clone 324019 (TRBV4-2, TRBJ1-1)
CASSQAGNTEAFF

SEQ ID NO: 648039 - protein, 17 aa, Homo sapiens
  CDR3 for alpha chain variable domain of TCR clone 324020 (TRAV12-1, TRAJ52)
CVVTPNAGGTSYGKLTF

SEQ ID NO: 648040 - protein, 12 aa, Homo sapiens
  CDR3 for beta chain variable domain of TCR clone 324020 (TRBV7-8, TRBJ2-7)
CASSLGDREQYF

SEQ ID NO: 648041 - protein, 13 aa, Homo sapiens
  CDR3 for alpha chain variable domain of TCR clone 324021 (TRAV8-2, TRAJ22)
CVVSEGSARQLTF

SEQ ID NO: 648042 - protein, 14 aa, Homo sapiens
  CDR3 for beta chain variable domain of TCR clone 324021 (TRBV19, TRBJ2-1)
CASPTFVLSGEQFF

SEQ ID NO: 648043 - protein, 12 aa, Homo sapiens
  CDR3 for alpha chain variable domain of TCR clone 324022 (TRAV12-3, TRAJ17)
CAMTLTGNKLTF

SEQ ID NO: 648044 - protein, 13 aa, Homo sapiens
  CDR3 for beta chain variable domain of TCR clone 324022 (TRBV6-3, TRBJ2-3)
CASTLQGIDTQYF

SEQ ID NO: 648045 - protein, 23 aa, Homo sapiens
  CDR3 for alpha chain variable domain of TCR clone 324023 (TRAV21, TRAJ13)
CAVPRSFWGLPESYLWNWNKLQV

SEQ ID NO: 648046 - protein, 15 aa, Homo sapiens
  CDR3 for beta chain variable domain of TCR clone 324023 (TRBV27, TRBJ2-5)
CASSLYPRGGETQYF

SEQ ID NO: 648047 - protein, 13 aa, Homo sapiens
  CDR3 for alpha chain variable domain of TCR clone 324024 (TRAV13-1, TRAJ21)
CAESIYNFNKFYF

SEQ ID NO: 648048 - protein, 13 aa, Homo sapiens
  CDR3 for beta chain variable domain of TCR clone 324024 (TRBV27, TRBJ1-4)
CASSLMGDEKLFF

SEQ ID NO: 648049 - protein, 15 aa, Homo sapiens
  CDR3 for alpha chain variable domain of TCR clone 324025 (TRAV12-1, TRAJ44)
CVVDEYTGTASKLTF

SEQ ID NO: 648050 - protein, 15 aa, Homo sapiens
  CDR3 for beta chain variable domain of TCR clone 324025 (TRBV5-1, TRBJ1-2)
CASSLEPVKWLHLRF

SEQ ID NO: 648051 - protein, 12 aa, Homo sapiens
  CDR3 for alpha chain variable domain of TCR clone 324026 (TRAV13-1, TRAJ21)
CAAKEGFNRFYF

SEQ ID NO: 648052 - protein, 15 aa, Homo sapiens
  CDR3 for beta chain variable domain of TCR clone 324026 (TRBV25-1, TRBJ1-4)
CASSPGDSTNETLFF

SEQ ID NO: 648053 - protein, 13 aa, Homo sapiens
  CDR3 for alpha chain variable domain of TCR clone 324027 (TRAV38-2/DV8, TRAJ34)
CAYRTWNTDKLIF

SEQ ID NO: 648054 - protein, 16 aa, Homo sapiens
  CDR3 for beta chain variable domain of TCR clone 324027 (TRBV5-1, TRBJ2-3)
CASSLQGRVGADTQYF

SEQ ID NO: 648055 - protein, 17 aa, Homo sapiens
  CDR3 for alpha chain variable domain of TCR clone 324028 (TRAV3, TRAJ12)
CCERRDGTVDSSYKLIF

SEQ ID NO: 648056 - protein, 15 aa, Homo sapiens
  CDR3 for beta chain variable domain of TCR clone 324028 (TRBV5-5, TRBJ1-5)
CASSLKGGGEQPQHF

SEQ ID NO: 648057 - protein, 18 aa, Homo sapiens
  CDR3 for alpha chain variable domain of TCR clone 324029 (TRAV12-3, TRAJ52)
CAMTVGGAGGTSYGKLTF

SEQ ID NO: 648058 - protein, 15 aa, Homo sapiens
  CDR3 for beta chain variable domain of TCR clone 324029 (TRBV27, TRBJ1-6)
CASSFDRGLGSPLHF

SEQ ID NO: 648059 - protein, 16 aa, Homo sapiens
  CDR3 for alpha chain variable domain of TCR clone 324030 (TRAV3, TRAJ37)
CAVRGKWSGNTGKPIF

SEQ ID NO: 648060 - protein, 13 aa, Homo sapiens
  CDR3 for beta chain variable domain of TCR clone 324030 (TRBV14, TRBJ2-7)
CASSQDRRYEQYF

SEQ ID NO: 648061 - protein, 14 aa, Homo sapiens
  CDR3 for alpha chain variable domain of TCR clone 324031 (TRAV12-1, TRAJ17)
CVVNYKAAGNKLTF

SEQ ID NO: 648062 - protein, 17 aa, Homo sapiens
  CDR3 for beta chain variable domain of TCR clone 324031 (TRBV20-1, TRBJ2-1)
CSASSSGLACSYNEQFF

SEQ ID NO: 648063 - protein, 16 aa, Homo sapiens
  CDR3 for alpha chain variable domain of TCR clone 324032 (TRAV12-1, TRAJ43)
CVVNPHRFGAGPRLTV

SEQ ID NO: 648064 - protein, 14 aa, Homo sapiens
  CDR3 for beta chain variable domain of TCR clone 324032 (TRBV7-2, TRBJ2-7)
CASRSQGAAYEQYF

SEQ ID NO: 648065 - protein, 21 aa, Homo sapiens
  CDR3 for alpha chain variable domain of TCR clone 324033 (TRAV1-1, TRAJ6)
CLLLLRCERLERTGGSYIPTF

SEQ ID NO: 648066 - protein, 18 aa, Homo sapiens
  CDR3 for beta chain variable domain of TCR clone 324033 (TRBV7-2, TRBJ2-5)
GRVSLGQQLVRGGETQYF

SEQ ID NO: 648067 - protein, 11 aa, Homo sapiens
  CDR3 for alpha chain variable domain of TCR clone 324034 (TRAV17, TRAJ43)
CATPRSTDIRF

SEQ ID NO: 648068 - protein, 15 aa, Homo sapiens
  CDR3 for beta chain variable domain of TCR clone 324034 (TRBV11-2, TRBJ2-1)
CASSLGTSGLNEQFF

SEQ ID NO: 648069 - protein, 13 aa, Homo sapiens
  CDR3 for alpha chain variable domain of TCR clone 324035 (TRAV29/DV5, TRAJ31)
CAASRNNNARLMF

SEQ ID NO: 648070 - protein, 14 aa, Homo sapiens
  CDR3 for beta chain variable domain of TCR clone 324035 (TRBV19, TRBJ2-7)
CASSIGGAVAEQYF

SEQ ID NO: 648071 - protein, 13 aa, Homo sapiens
  CDR3 for alpha chain variable domain of TCR clone 324036 (TRAV23/DV6, TRAJ22)
CAPYSGSARQLTF

SEQ ID NO: 648072 - protein, 15 aa, Homo sapiens
  CDR3 for beta chain variable domain of TCR clone 324036 (TRBV11-2, TRBJ1-6)
CASSLDAWAVSPLHF

SEQ ID NO: 648073 - protein, 14 aa, Homo sapiens
  CDR3 for alpha chain variable domain of TCR clone 324037 (TRAV1-2, TRAJ16)
CAVYRFSDGQKLLF

SEQ ID NO: 648074 - protein, 16 aa, Homo sapiens
  CDR3 for beta chain variable domain of TCR clone 324037 (TRBV12-5, TRBJ2-5)
CASGPRTSGNPETQYF

SEQ ID NO: 648075 - protein, 15 aa, Homo sapiens
  CDR3 for alpha chain variable domain of TCR clone 324038 (TRAV26-1, TRAJ38)
CIVRAEGGNNRKLVW

SEQ ID NO: 648076 - protein, 14 aa, Homo sapiens
  CDR3 for beta chain variable domain of TCR clone 324038 (TRBV7-6, TRBJ2-5)
CASSSPSGSETQYF

SEQ ID NO: 648077 - protein, 14 aa, Homo sapiens
  CDR3 for alpha chain variable domain of TCR clone 324039 (TRAV17, TRAJ56)
CATVPAGANSKLTF

SEQ ID NO: 648078 - protein, 16 aa, Homo sapiens
  CDR3 for beta chain variable domain of TCR clone 324039 (TRBV7-3, TRBJ2-2)
CASSLKRGTLSGELFF

SEQ ID NO: 648079 - protein, 13 aa, Homo sapiens
  CDR3 for alpha chain variable domain of TCR clone 324040 (TRAV8-6, TRAJ33)
CAVSEGSNYQLIW

SEQ ID NO: 648080 - protein, 14 aa, Homo sapiens
  CDR3 for beta chain variable domain of TCR clone 324040 (TRBV13, TRBJ2-3)
CASSLGGPQRPQYF

SEQ ID NO: 648081 - protein, 10 aa, Homo sapiens
  CDR3 for alpha chain variable domain of TCR clone 324041 (TRAV36/DV7, TRAJ48)
CAVGNEKLTF

SEQ ID NO: 648082 - protein, 14 aa, Homo sapiens
  CDR3 for beta chain variable domain of TCR clone 324041 (TRBV7-8, TRBJ2-3)
CARSLEAGTDTQYF

SEQ ID NO: 648083 - protein, 11 aa, Homo sapiens
  CDR3 for alpha chain variable domain of TCR clone 324042 (TRAV13-1, TRAJ39)
CASHAGSMLTF

SEQ ID NO: 648084 - protein, 14 aa, Homo sapiens
  CDR3 for beta chain variable domain of TCR clone 324042 (TRBV11-2, TRBJ1-5)
CASSLDRGRQPQHF

SEQ ID NO: 648085 - protein, 13 aa, Homo sapiens
  CDR3 for alpha chain variable domain of TCR clone 324043 (TRAV2, TRAJ29)
CAAQNSGNTHLVF

SEQ ID NO: 648086 - protein, 14 aa, Homo sapiens
  CDR3 for beta chain variable domain of TCR clone 324043 (TRBV7-9, TRBJ2-4)
CASSLAMGGNVQYF

SEQ ID NO: 648087 - protein, 13 aa, Homo sapiens
  CDR3 for alpha chain variable domain of TCR clone 324044 (TRAV12-3, TRAJ33)
CAMSVNSNYQLVW

SEQ ID NO: 648088 - protein, 13 aa, Homo sapiens
  CDR3 for beta chain variable domain of TCR clone 324044 (TRBV4-1, TRBJ2-2)
CASSQENTGELFF

SEQ ID NO: 648089 - protein, 12 aa, Homo sapiens
  CDR3 for alpha chain variable domain of TCR clone 324045 (TRAV17, TRAJ49)
CATVTTGNKFYF

SEQ ID NO: 648090 - protein, 18 aa, Homo sapiens
  CDR3 for beta chain variable domain of TCR clone 324045 (TRBV11-2, TRBJ2-6)
CASSLNPFLGTGANVLTF

SEQ ID NO: 648091 - protein, 16 aa, Homo sapiens
  CDR3 for alpha chain variable domain of TCR clone 324046 (TRAV26-1, TRAJ23)
CIGRPHGNNQGGKLIF

SEQ ID NO: 648092 - protein, 14 aa, Homo sapiens
  CDR3 for beta chain variable domain of TCR clone 324046 (TRBV19, TRBJ2-1)
CASPTFVLSGEQFF

SEQ ID NO: 648093 - protein, 16 aa, Homo sapiens
  CDR3 for alpha chain variable domain of TCR clone 324047 (TRAV3, TRAJ10)
CAVRDMRAGGGNKLTF

SEQ ID NO: 648094 - protein, 15 aa, Homo sapiens
  CDR3 for beta chain variable domain of TCR clone 324047 (TRBV27, TRBJ2-5)
CASSLIPSGGETQYF

SEQ ID NO: 648095 - protein, 16 aa, Homo sapiens
  CDR3 for alpha chain variable domain of TCR clone 324048 (TRAV1-2, TRAJ10)
CAVRGVLTGGGNKLTF

SEQ ID NO: 648096 - protein, 14 aa, Homo sapiens
  CDR3 for beta chain variable domain of TCR clone 324048 (TRBV2, TRBJ2-5)
CASKRDGTTETQYF

SEQ ID NO: 648097 - protein, 14 aa, Homo sapiens
  CDR3 for alpha chain variable domain of TCR clone 324049 (TRAV12-1, TRAJ12)
CVVNRMDSSYKLIF

SEQ ID NO: 648098 - protein, 15 aa, Homo sapiens
  CDR3 for beta chain variable domain of TCR clone 324049 (TRBV20-1, TRBJ2-7)
CSARDRVSGMDEQYF

SEQ ID NO: 648099 - protein, 13 aa, Homo sapiens
  CDR3 for alpha chain variable domain of TCR clone 324050 (TRAV12-2, TRAJ40)
CAVKRTGTYKYIF

SEQ ID NO: 648100 - protein, 19 aa, Homo sapiens
  CDR3 for beta chain variable domain of TCR clone 324050 (TRBV7-3, TRBJ2-2)
CASSLRAGGSGPNTGELFF

SEQ ID NO: 648101 - protein, 15 aa, Homo sapiens
  CDR3 for alpha chain variable domain of TCR clone 324051 (TRAV38-2/DV8, TRAJ47)
CAYRSAKGYGNKLVF

SEQ ID NO: 648102 - protein, 16 aa, Homo sapiens
  CDR3 for beta chain variable domain of TCR clone 324051 (TRBV12-5, TRBJ2-5)
CASGPRTSGNQETQYF

SEQ ID NO: 648103 - protein, 14 aa, Homo sapiens
  CDR3 for alpha chain variable domain of TCR clone 324052 (TRAV12-1, TRAJ3)
CVVNPGSSASKIIF

SEQ ID NO: 648104 - protein, 14 aa, Homo sapiens
  CDR3 for beta chain variable domain of TCR clone 324052 (TRBV20-1, TRBJ2-3)
CSARGGTSTDTQYF

SEQ ID NO: 648105 - protein, 12 aa, Homo sapiens
  CDR3 for alpha chain variable domain of TCR clone 324053 (TRAV35, TRAJ30)
CSGLNRDDKIIF

SEQ ID NO: 648106 - protein, 15 aa, Homo sapiens
  CDR3 for beta chain variable domain of TCR clone 324053 (TRBV9, TRBJ1-6)
CASSVAGTGDSTLHF

SEQ ID NO: 648107 - protein, 11 aa, Homo sapiens
  CDR3 for alpha chain variable domain of TCR clone 324054 (TRAV2, TRAJ13)
YASGGYQKVTF

SEQ ID NO: 648108 - protein, 13 aa, Homo sapiens
  CDR3 for beta chain variable domain of TCR clone 324054 (TRBV20-1, TRBJ1-1)
CSAPLGGGTEAFF

SEQ ID NO: 648109 - protein, 10 aa, Homo sapiens
  CDR3 for alpha chain variable domain of TCR clone 324055 (TRAV12-3, TRAJ34)
CAMSADKLIF

SEQ ID NO: 648110 - protein, 15 aa, Homo sapiens
  CDR3 for beta chain variable domain of TCR clone 324055 (TRBV27, TRBJ2-1)
CASSNGGGSSNEHFF

SEQ ID NO: 648111 - protein, 12 aa, Homo sapiens
  CDR3 for alpha chain variable domain of TCR clone 324056 (TRAV25, TRAJ11)
CAGASGYSTLTF

SEQ ID NO: 648112 - protein, 15 aa, Homo sapiens
  CDR3 for beta chain variable domain of TCR clone 324056 (TRBV10-2, TRBJ2-6)
CASSEQGTGANVLIF

SEQ ID NO: 648113 - protein, 13 aa, Homo sapiens
  CDR3 for alpha chain variable domain of TCR clone 324057 (TRAV35, TRAJ48)
CAGHEFGNEKLTF

SEQ ID NO: 648114 - protein, 16 aa, Homo sapiens
  CDR3 for beta chain variable domain of TCR clone 324057 (TRBV12-5, TRBJ2-5)
CASGPRTSGNQETKYF

SEQ ID NO: 648115 - protein, 14 aa, Homo sapiens
  CDR3 for alpha chain variable domain of TCR clone 324058 (TRAV9-2, TRAJ6)
CALSDPGGSYIPTF

SEQ ID NO: 648116 - protein, 15 aa, Homo sapiens
  CDR3 for beta chain variable domain of TCR clone 324058 (TRBV7-9, TRBJ1-4)
CASSARTGGNEKLFF

SEQ ID NO: 648117 - protein, 16 aa, Homo sapiens
  CDR3 for alpha chain variable domain of TCR clone 324059 (TRAV3, TRAJ37)
CAVRGKGSGNTGKLIF

SEQ ID NO: 648118 - protein, 13 aa, Homo sapiens
  CDR3 for beta chain variable domain of TCR clone 324059 (TRBV28, TRBJ1-2)
CAGRDRGNYGYTF

SEQ ID NO: 648119 - protein, 12 aa, Homo sapiens
  CDR3 for alpha chain variable domain of TCR clone 324060 (TRAV8-6, TRAJ37)
CAVTTGTGKLIF

SEQ ID NO: 648120 - protein, 15 aa, Homo sapiens
  CDR3 for beta chain variable domain of TCR clone 324060 (TRBV6-3, TRBJ1-6)
CASSYEGSHRSPLHF

SEQ ID NO: 648121 - protein, 15 aa, Homo sapiens
  CDR3 for alpha chain variable domain of TCR clone 324061 (TRAV16, TRAJ4)
CALEDPSGGYNKLIF

SEQ ID NO: 648122 - protein, 15 aa, Homo sapiens
  CDR3 for beta chain variable domain of TCR clone 324061 (TRBV27, TRBJ2-1)
CASSNGGGSSNEQFF

SEQ ID NO: 648123 - protein, 18 aa, Homo sapiens
  CDR3 for alpha chain variable domain of TCR clone 324062 (TRAV12-3, TRAJ52)
CAMSVGGAGGTSYGKLTF

SEQ ID NO: 648124 - protein, 14 aa, Homo sapiens
  CDR3 for beta chain variable domain of TCR clone 324062 (TRBV12-4, TRBJ2-1)
CASSLGSSPLEQFF

SEQ ID NO: 648125 - protein, 12 aa, Homo sapiens
  CDR3 for alpha chain variable domain of TCR clone 324063 (TRAV29/DV5, TRAJ15)
CAASGKGTALIF

SEQ ID NO: 648126 - protein, 15 aa, Homo sapiens
  CDR3 for beta chain variable domain of TCR clone 324063 (TRBV4-3, TRBJ1-5)
CASSHDSGGGQPQHF

SEQ ID NO: 648127 - protein, 14 aa, Homo sapiens
  CDR3 for alpha chain variable domain of TCR clone 324064 (TRAV12-2, TRAJ44)
CAVNPAGTASKLTF

SEQ ID NO: 648128 - protein, 13 aa, Homo sapiens
  CDR3 for beta chain variable domain of TCR clone 324064 (TRBV13, TRBJ2-7)
CASSQGVSYEQYF

SEQ ID NO: 648129 - protein, 17 aa, Homo sapiens
  CDR3 for alpha chain variable domain of TCR clone 324065 (TRAV14/DV4, TRAJ28)
CAMREVSSGAGSHQLTF

SEQ ID NO: 648130 - protein, 15 aa, Homo sapiens
  CDR3 for beta chain variable domain of TCR clone 324065 (TRBV11-2, TRBJ1-6)
CASTLRETGNSPLHF

SEQ ID NO: 648131 - protein, 13 aa, Homo sapiens
  CDR3 for alpha chain variable domain of TCR clone 324066 (TRAV27, TRAJ49)
CAPRPYTGNQFYF

SEQ ID NO: 648132 - protein, 18 aa, Homo sapiens
  CDR3 for beta chain variable domain of TCR clone 324066 (TRBV7-3, TRBJ2-5)
CASSVGGAAQGRWENQYF

SEQ ID NO: 648133 - protein, 14 aa, Homo sapiens
  CDR3 for alpha chain variable domain of TCR clone 324067 (TRAV26-1, TRAJ48)
CIVRVGFGNAKLTF

SEQ ID NO: 648134 - protein, 14 aa, Homo sapiens
  CDR3 for beta chain variable domain of TCR clone 324067 (TRBV19, TRBJ2-1)
CASPTFVLSGEQFF

SEQ ID NO: 648135 - protein, 14 aa, Homo sapiens
  CDR3 for alpha chain variable domain of TCR clone 324068 (TRAV1-2, TRAJ8)
CAVREDTGFQKLVL

SEQ ID NO: 648136 - protein, 12 aa, Homo sapiens
  CDR3 for beta chain variable domain of TCR clone 324068 (TRBV7-9, TRBJ2-7)
CASSLEGYEQYF

SEQ ID NO: 648137 - protein, 14 aa, Homo sapiens
  CDR3 for alpha chain variable domain of TCR clone 324069 (TRAV3, TRAJ28)
CCEGPLAGSYQLTF

SEQ ID NO: 648138 - protein, 14 aa, Homo sapiens
  CDR3 for beta chain variable domain of TCR clone 324069 (TRBV7-8, TRBJ2-7)
CASSPRDRVYEQYF

SEQ ID NO: 648139 - protein, 15 aa, Homo sapiens
  CDR3 for alpha chain variable domain of TCR clone 324070 (TRAV13-2, TRAJ10)
CAENRDTGGGNKLSF

SEQ ID NO: 648140 - protein, 20 aa, Homo sapiens
  CDR3 for beta chain variable domain of TCR clone 324070 (TRBV28, TRBJ2-1)
CASTPIGRSPGLAGGNEQFF

SEQ ID NO: 648141 - protein, 12 aa, Homo sapiens
  CDR3 for alpha chain variable domain of TCR clone 324071 (TRAV23/DV6, TRAJ30)
CAASKGDDKIIF

SEQ ID NO: 648142 - protein, 15 aa, Homo sapiens
  CDR3 for beta chain variable domain of TCR clone 324071 (TRBV29-1, TRBJ2-1)
CSGRDRKSSYNEQFC

SEQ ID NO: 648143 - protein, 17 aa, Homo sapiens
  CDR3 for alpha chain variable domain of TCR clone 324072 (TRAV26-1, TRAJ47)
CIVPSLLYMEYGNKRVF

SEQ ID NO: 648144 - protein, 14 aa, Homo sapiens
  CDR3 for beta chain variable domain of TCR clone 324072 (TRBV7-3, TRBJ1-5)
RASSFSGCNQPQHF

SEQ ID NO: 648145 - protein, 13 aa, Homo sapiens
  CDR3 for alpha chain variable domain of TCR clone 324073 (TRAV21, TRAJ27)
CAARPGNAGKSTS

SEQ ID NO: 648146 - protein, 16 aa, Homo sapiens
  CDR3 for beta chain variable domain of TCR clone 324073 (TRBV20-1, TRBJ1-2)
CSAWMGQGVANYGYTF

SEQ ID NO: 648147 - protein, 19 aa, Homo sapiens
  CDR3 for alpha chain variable domain of TCR clone 324074 (TRAV13-1, TRAJ52)
CAASPYQNAGGTSYGKLTF

SEQ ID NO: 648148 - protein, 14 aa, Homo sapiens
  CDR3 for beta chain variable domain of TCR clone 324074 (TRBV19, TRBJ2-1)
CASPTFVLSGEQFF

SEQ ID NO: 648149 - protein, 15 aa, Homo sapiens
  CDR3 for alpha chain variable domain of TCR clone 324075 (TRAV29/DV5, TRAJ24)
CAASGATDSWGKFQF

SEQ ID NO: 648150 - protein, 13 aa, Homo sapiens
  CDR3 for beta chain variable domain of TCR clone 324075 (TRBV11-2, TRBJ2-5)
CASGHGAKETQYF

SEQ ID NO: 648151 - protein, 13 aa, Homo sapiens
  CDR3 for alpha chain variable domain of TCR clone 324076 (TRAV21, TRAJ57)
RAVIEGGSEKLVF

SEQ ID NO: 648152 - protein, 15 aa, Homo sapiens
  CDR3 for beta chain variable domain of TCR clone 324076 (TRBV10-3, TRBJ2-5)
CAISEFGRGQETQYF

SEQ ID NO: 648153 - protein, 12 aa, Homo sapiens
  CDR3 for alpha chain variable domain of TCR clone 324077 (TRAV29/DV5, TRAJ49)
CAATDTGNQFNF

SEQ ID NO: 648154 - protein, 19 aa, Homo sapiens
  CDR3 for beta chain variable domain of TCR clone 324077 (TRBV25-1, TRBJ2-2)
CAILVYRVDRGRKTGELFF

SEQ ID NO: 648155 - protein, 15 aa, Homo sapiens
  CDR3 for alpha chain variable domain of TCR clone 324078 (TRAV14/DV4, TRAJ48)
CAMREGSFGNEKLTF

SEQ ID NO: 648156 - protein, 14 aa, Homo sapiens
  CDR3 for beta chain variable domain of TCR clone 324078 (TRBV12-5, TRBJ1-3)
CASGPAGSGNTIYF

SEQ ID NO: 648157 - protein, 15 aa, Homo sapiens
  CDR3 for alpha chain variable domain of TCR clone 324079 (TRAV27, TRAJ33)
CAGADIMESNYQLIW

SEQ ID NO: 648158 - protein, 13 aa, Homo sapiens
  CDR3 for beta chain variable domain of TCR clone 324079 (TRBV28, TRBJ1-2)
CASSLQGRGGYSF

SEQ ID NO: 648159 - protein, 15 aa, Homo sapiens
  CDR3 for alpha chain variable domain of TCR clone 324080 (TRAV2, TRAJ22)
CAVPSRGGSARQLTF

SEQ ID NO: 648160 - protein, 15 aa, Homo sapiens
  CDR3 for beta chain variable domain of TCR clone 324080 (TRBV19, TRBJ1-2)
CASSVGQVLNYGYTF

SEQ ID NO: 648161 - protein, 12 aa, Homo sapiens
  CDR3 for alpha chain variable domain of TCR clone 324081 (TRAV12-3, TRAJ17)
CAMTLTGNKLTL

SEQ ID NO: 648162 - protein, 13 aa, Homo sapiens
  CDR3 for beta chain variable domain of TCR clone 324081 (TRBV24-1, TRBJ2-2)
CATSDWSTGELFF

SEQ ID NO: 648163 - protein, 13 aa, Homo sapiens
  CDR3 for alpha chain variable domain of TCR clone 324082 (TRAV1-1, TRAJ31)
CASYLNNNARLIF

SEQ ID NO: 648164 - protein, 13 aa, Homo sapiens
  CDR3 for beta chain variable domain of TCR clone 324082 (TRBV15, TRBJ1-6)
CATSGGLNSPLHF

SEQ ID NO: 648165 - protein, 16 aa, Homo sapiens
  CDR3 for alpha chain variable domain of TCR clone 324083 (TRAV12-2, TRAJ50)
CAVGTATKTSYDKVIF

SEQ ID NO: 648166 - protein, 12 aa, Homo sapiens
  CDR3 for beta chain variable domain of TCR clone 324083 (TRBV12-4, TRBJ1-5)
CASSLGRQPQYF

SEQ ID NO: 648167 - protein, 13 aa, Homo sapiens
  CDR3 for alpha chain variable domain of TCR clone 324084 (TRAV12-3, TRAJ13)
CAMTSGGYQKVTF

SEQ ID NO: 648168 - protein, 13 aa, Homo sapiens
  CDR3 for beta chain variable domain of TCR clone 324084 (TRBV20-1, TRBJ2-2)
CSAVSGGAGELFF

SEQ ID NO: 648169 - protein, 14 aa, Homo sapiens
  CDR3 for alpha chain variable domain of TCR clone 324085 (TRAV2, TRAJ9)
CAVDPNTGGFKTIF

SEQ ID NO: 648170 - protein, 14 aa, Homo sapiens
  CDR3 for beta chain variable domain of TCR clone 324085 (TRBV7-2, TRBJ2-7)
CASSPKTSFHEQYF

SEQ ID NO: 648171 - protein, 12 aa, Homo sapiens
  CDR3 for alpha chain variable domain of TCR clone 324086 (TRAV8-4, TRAJ43)
CAVGGNNNDMRF

SEQ ID NO: 648172 - protein, 13 aa, Homo sapiens
  CDR3 for beta chain variable domain of TCR clone 324086 (TRBV7-9, TRBJ1-2)
CASSLKQNYGYTF

SEQ ID NO: 648173 - protein, 15 aa, Homo sapiens
  CDR3 for alpha chain variable domain of TCR clone 324087 (TRAV3, TRAJ5)
CAVRDLDTGRRALTF

SEQ ID NO: 648174 - protein, 13 aa, Homo sapiens
  CDR3 for beta chain variable domain of TCR clone 324087 (TRBV12-4, TRBJ2-5)
CASSPTETYEQYF

SEQ ID NO: 648175 - protein, 15 aa, Homo sapiens
  CDR3 for alpha chain variable domain of TCR clone 324088 (TRAV13-1, TRAJ17)
CAASIARAAGKKLTF

SEQ ID NO: 648176 - protein, 13 aa, Homo sapiens
  CDR3 for beta chain variable domain of TCR clone 324088 (TRBV19, TRBJ1-2)
CASSVPGQDGYAF

SEQ ID NO: 648177 - protein, 13 aa, Homo sapiens
  CDR3 for alpha chain variable domain of TCR clone 324089 (TRAV26-1, TRAJ35)
CIFSRRVGEMLHC

SEQ ID NO: 648178 - protein, 17 aa, Homo sapiens
  CDR3 for beta chain variable domain of TCR clone 324089 (TRBV7-9, TRBJ2-7)
CASSFDGSRGGAYEQYF

SEQ ID NO: 648179 - protein, 16 aa, Homo sapiens
  CDR3 for alpha chain variable domain of TCR clone 324090 (TRAV26-2, TRAJ48)
CILRPPFNFGNEKLTF

SEQ ID NO: 648180 - protein, 15 aa, Homo sapiens
  CDR3 for beta chain variable domain of TCR clone 324090 (TRBV20-1, TRBJ2-3)
CSARVEGTYPDTQYF

SEQ ID NO: 648181 - protein, 12 aa, Homo sapiens
  CDR3 for alpha chain variable domain of TCR clone 324091 (TRAV1-1, TRAJ8)
CAGGTGFQKVVF

SEQ ID NO: 648182 - protein, 13 aa, Homo sapiens
  CDR3 for beta chain variable domain of TCR clone 324091 (TRBV7-9, TRBJ1-2)
CASSLKQNYGYTF

SEQ ID NO: 648183 - protein, 16 aa, Homo sapiens
  CDR3 for alpha chain variable domain of TCR clone 324092 (TRAV12-2, TRAJ6)
CAAPLAGSGGSYIPTF

SEQ ID NO: 648184 - protein, 15 aa, Homo sapiens
  CDR3 for beta chain variable domain of TCR clone 324092 (TRBV7-2, TRBJ2-7)
CASSLDPAQGQEQYF

SEQ ID NO: 648185 - protein, 15 aa, Homo sapiens
  CDR3 for alpha chain variable domain of TCR clone 324093 (TRAV40, TRAJ45)
SLLGDLGGGADGLTF

SEQ ID NO: 648186 - protein, 13 aa, Homo sapiens
  CDR3 for beta chain variable domain of TCR clone 324093 (TRBV7-9, TRBJ1-2)
CASSLKQNYGYTF

SEQ ID NO: 648187 - protein, 17 aa, Homo sapiens
  CDR3 for alpha chain variable domain of TCR clone 324094 (TRAV3, TRAJ42)
CAVRDRDSGGSQGNLIF

SEQ ID NO: 648188 - protein, 15 aa, Homo sapiens
  CDR3 for beta chain variable domain of TCR clone 324094 (TRBV5-1, TRBJ2-1)
CASSPPRAPYNEQFF

SEQ ID NO: 648189 - protein, 15 aa, Homo sapiens
  CDR3 for alpha chain variable domain of TCR clone 324095 (TRAV16, TRAJ50)
CALSGWETSYDKLIF

SEQ ID NO: 648190 - protein, 14 aa, Homo sapiens
  CDR3 for beta chain variable domain of TCR clone 324095 (TRBV18, TRBJ2-3)
CASSETSASDTQYF

SEQ ID NO: 648191 - protein, 15 aa, Homo sapiens
  CDR3 for alpha chain variable domain of TCR clone 324096 (TRAV30, TRAJ32)
CGTEILGGATNKLIF

SEQ ID NO: 648192 - protein, 17 aa, Homo sapiens
  CDR3 for beta chain variable domain of TCR clone 324096 (TRBV5-4, TRBJ2-1)
CANSSAGGRGPYNEQFF

SEQ ID NO: 648193 - protein, 23 aa, Homo sapiens
  CDR3 for alpha chain variable domain of TCR clone 324097 (TRAV26-1, TRAJ22)
CIVRVSFWFCKATDLWICTQLTV

SEQ ID NO: 648194 - protein, 13 aa, Homo sapiens
  CDR3 for beta chain variable domain of TCR clone 324097 (TRBV7-9, TRBJ1-2)
CASSLKQNYGYTF

SEQ ID NO: 648195 - protein, 14 aa, Homo sapiens
  CDR3 for alpha chain variable domain of TCR clone 324098 (TRAV23/DV6, TRAJ27)
CAASRDTNAGKSTF

SEQ ID NO: 648196 - protein, 15 aa, Homo sapiens
  CDR3 for beta chain variable domain of TCR clone 324098 (TRBV7-9, TRBJ1-1)
CASSLLEQGGTEAFF

SEQ ID NO: 648197 - protein, 15 aa, Homo sapiens
  CDR3 for alpha chain variable domain of TCR clone 324099 (TRAV12-3, TRAJ6)
CAMSATSGGSCIPTF

SEQ ID NO: 648198 - protein, 11 aa, Homo sapiens
  CDR3 for beta chain variable domain of TCR clone 324099 (TRBV6-4, TRBJ2-1)
CASSDSYAQFF

SEQ ID NO: 648199 - protein, 11 aa, Homo sapiens
  CDR3 for alpha chain variable domain of TCR clone 324100 (TRAV1-1, TRAJ23)
CAVRQGGKLIS

SEQ ID NO: 648200 - protein, 12 aa, Homo sapiens
  CDR3 for beta chain variable domain of TCR clone 324100 (TRBV19, TRBJ1-5)
CASSIAQQPQHF

SEQ ID NO: 648201 - protein, 14 aa, Homo sapiens
  CDR3 for alpha chain variable domain of TCR clone 324101 (TRAV2, TRAJ42)
CAVVGGGSQGYLIF

SEQ ID NO: 648202 - protein, 15 aa, Homo sapiens
  CDR3 for beta chain variable domain of TCR clone 324101 (TRBV11-3, TRBJ2-3)
CASSFRAAFPDTQYF

SEQ ID NO: 648203 - protein, 16 aa, Homo sapiens
  CDR3 for alpha chain variable domain of TCR clone 324102 (TRAV12-3, TRAJ53)
CAVSPGSGGSNYKLTF

SEQ ID NO: 648204 - protein, 20 aa, Homo sapiens
  CDR3 for beta chain variable domain of TCR clone 324102 (TRBV7-8, TRBJ2-2)
CASSHLFPGPTIHITGELFF

SEQ ID NO: 648205 - protein, 15 aa, Homo sapiens
  CDR3 for alpha chain variable domain of TCR clone 324103 (TRAV17, TRAJ16)
CATALRFSDGQKLLF

SEQ ID NO: 648206 - protein, 12 aa, Homo sapiens
  CDR3 for beta chain variable domain of TCR clone 324103 (TRBV2, TRBJ2-7)
CASSEPDYEQYF

SEQ ID NO: 648207 - protein, 14 aa, Homo sapiens
  CDR3 for alpha chain variable domain of TCR clone 324104 (TRAV13-1, TRAJ44)
CAAKATGTASNLTF

SEQ ID NO: 648208 - protein, 15 aa, Homo sapiens
  CDR3 for beta chain variable domain of TCR clone 324104 (TRBV4-3, TRBJ1-1)
CASSQELGRGTEAFF

SEQ ID NO: 648209 - protein, 12 aa, Homo sapiens
  CDR3 for alpha chain variable domain of TCR clone 324105 (TRAV12-1, TRAJ40)
CVVYSGTYKYIF

SEQ ID NO: 648210 - protein, 17 aa, Homo sapiens
  CDR3 for beta chain variable domain of TCR clone 324105 (TRBV18, TRBJ1-5)
CASSPTMGQGTNQPQHF

SEQ ID NO: 648211 - protein, 14 aa, Homo sapiens
  CDR3 for alpha chain variable domain of TCR clone 324106 (TRAV12-3, TRAJ56)
CAMRVTGANSKLTF

SEQ ID NO: 648212 - protein, 17 aa, Homo sapiens
  CDR3 for beta chain variable domain of TCR clone 324106 (TRBV11-2, TRBJ2-1)
CASSLYPPGVEYNEQFF

SEQ ID NO: 648213 - protein, 17 aa, Homo sapiens
  CDR3 for alpha chain variable domain of TCR clone 324107 (TRAV36/DV7, TRAJ52)
CAVAQRAGGTSNGKLTF

SEQ ID NO: 648214 - protein, 15 aa, Homo sapiens
  CDR3 for beta chain variable domain of TCR clone 324107 (TRBV28, TRBJ2-1)
CASSIIAGGRSEQFF

SEQ ID NO: 648215 - protein, 14 aa, Homo sapiens
  CDR3 for alpha chain variable domain of TCR clone 324108 (TRAV26-1, TRAJ54)
CIVRALQGAQKLVF

SEQ ID NO: 648216 - protein, 12 aa, Homo sapiens
  CDR3 for beta chain variable domain of TCR clone 324108 (TRBV2, TRBJ2-1)
CAYGPPGNEQFF

SEQ ID NO: 648217 - protein, 15 aa, Homo sapiens
  CDR3 for alpha chain variable domain of TCR clone 324109 (TRAV3, TRAJ3)
CAGRDRDSSASKIIF

SEQ ID NO: 648218 - protein, 15 aa, Homo sapiens
  CDR3 for beta chain variable domain of TCR clone 324109 (TRBV29-1, TRBJ2-7)
CSVEFFDRGSYEQYF

SEQ ID NO: 648219 - protein, 14 aa, Homo sapiens
  CDR3 for alpha chain variable domain of TCR clone 324110 (TRAV8-1, TRAJ22)
CAAPSSGSTRQLTF

SEQ ID NO: 648220 - protein, 14 aa, Homo sapiens
  CDR3 for beta chain variable domain of TCR clone 324110 (TRBV9, TRBJ2-2)
CASSVGQGAGELFF

SEQ ID NO: 648221 - protein, 13 aa, Homo sapiens
  CDR3 for alpha chain variable domain of TCR clone 324111 (TRAV1-2, TRAJ9)
CAALNTGGFKTIF

SEQ ID NO: 648222 - protein, 13 aa, Homo sapiens
  CDR3 for beta chain variable domain of TCR clone 324111 (TRBV5-5, TRBJ2-1)
CASRPDIYNEQFF

SEQ ID NO: 648223 - protein, 18 aa, Homo sapiens
  CDR3 for alpha chain variable domain of TCR clone 324112 (TRAV21, TRAJ52)
CAVRPSPAGGTSYGKLTF

SEQ ID NO: 648224 - protein, 17 aa, Homo sapiens
  CDR3 for beta chain variable domain of TCR clone 324112 (TRBV4-1, TRBJ1-4)
CASSHEGPRGVEEKLFF

SEQ ID NO: 648225 - protein, 16 aa, Homo sapiens
  CDR3 for alpha chain variable domain of TCR clone 324113 (TRAV12-2, TRAJ40)
CAVIRGGTSGTYKYIF

SEQ ID NO: 648226 - protein, 16 aa, Homo sapiens
  CDR3 for beta chain variable domain of TCR clone 324113 (TRBV28, TRBJ2-7)
CASSPWVATGDHTQYF

SEQ ID NO: 648227 - protein, 15 aa, Homo sapiens
  CDR3 for alpha chain variable domain of TCR clone 324114 (TRAV35, TRAJ58)
CAGRRQETSGSRLTF

SEQ ID NO: 648228 - protein, 11 aa, Homo sapiens
  CDR3 for beta chain variable domain of TCR clone 324114 (TRBV11-2, TRBJ1-1)
CASSIITEAFF

SEQ ID NO: 648229 - protein, 11 aa, Homo sapiens
  CDR3 for alpha chain variable domain of TCR clone 324115 (TRAV35, TRAJ30)
CAPGGDDKIIF

SEQ ID NO: 648230 - protein, 15 aa, Homo sapiens
  CDR3 for beta chain variable domain of TCR clone 324115 (TRBV7-3, TRBJ2-1)
CASILDGNSYNEQFF

SEQ ID NO: 648231 - protein, 15 aa, Homo sapiens
  CDR3 for alpha chain variable domain of TCR clone 324116 (TRAV12-1, TRAJ4)
CVVNPFSGGYNKLIF

SEQ ID NO: 648232 - protein, 13 aa, Homo sapiens
  CDR3 for beta chain variable domain of TCR clone 324116 (TRBV20-1, TRBJ1-2)
CSSRGTADYGYTF

SEQ ID NO: 648233 - protein, 11 aa, Homo sapiens
  CDR3 for alpha chain variable domain of TCR clone 324117 (TRAV17, TRAJ31)
CATSNNARLMF

SEQ ID NO: 648234 - protein, 15 aa, Homo sapiens
  CDR3 for beta chain variable domain of TCR clone 324117 (TRBV9, TRBJ1-6)
CASSVAGTGDSPLHF

SEQ ID NO: 648235 - protein, 14 aa, Homo sapiens
  CDR3 for alpha chain variable domain of TCR clone 324118 (TRAV12-2, TRAJ40)
CAVKIPSGTYKYIF

SEQ ID NO: 648236 - protein, 14 aa, Homo sapiens
  CDR3 for beta chain variable domain of TCR clone 324118 (TRBV7-3, TRBJ2-1)
CASSLGTSANEQFF

SEQ ID NO: 648237 - protein, 15 aa, Homo sapiens
  CDR3 for alpha chain variable domain of TCR clone 324119 (TRAV35, TRAJ58)
CAGRRQETSGSRVTV

SEQ ID NO: 648238 - protein, 11 aa, Homo sapiens
  CDR3 for beta chain variable domain of TCR clone 324119 (TRBV11-2, TRBJ1-1)
CASSINTEAFF

SEQ ID NO: 648239 - protein, 16 aa, Homo sapiens
  CDR3 for alpha chain variable domain of TCR clone 324120 (TRAV12-1, TRAJ42)
CVVTPYYGGSQGNLIF

SEQ ID NO: 648240 - protein, 15 aa, Homo sapiens
  CDR3 for beta chain variable domain of TCR clone 324120 (TRBV4-3, TRBJ2-7)
CASSRGGRGIYEQYF

SEQ ID NO: 648241 - protein, 17 aa, Homo sapiens
  CDR3 for alpha chain variable domain of TCR clone 324121 (TRAV3, TRAJ6)
CAVRDGPSAGGSYIPTF

SEQ ID NO: 648242 - protein, 14 aa, Homo sapiens
  CDR3 for beta chain variable domain of TCR clone 324121 (TRBV7-2, TRBJ2-7)
CVSSPKTSFYEQYF

SEQ ID NO: 648243 - protein, 14 aa, Homo sapiens
  CDR3 for alpha chain variable domain of TCR clone 324122 (TRAV12-2, TRAJ17)
CAVLFKAAGNKLTF

SEQ ID NO: 648244 - protein, 14 aa, Homo sapiens
  CDR3 for beta chain variable domain of TCR clone 324122 (TRBV20-1, TRBJ2-5)
CSALVPGYQETQYF

SEQ ID NO: 648245 - protein, 14 aa, Homo sapiens
  CDR3 for alpha chain variable domain of TCR clone 324123 (TRAV38-1, TRAJ45)
CAYYSGGGSDGFTF

SEQ ID NO: 648246 - protein, 20 aa, Homo sapiens
  CDR3 for beta chain variable domain of TCR clone 324123 (TRBV28, TRBJ2-1)
CASTPIGRSPGLAGGNEQFF

SEQ ID NO: 648247 - protein, 14 aa, Homo sapiens
  CDR3 for alpha chain variable domain of TCR clone 324124 (TRAV12-2, TRAJ17)
CAVNIKAAGNKLTF

SEQ ID NO: 648248 - protein, 16 aa, Homo sapiens
  CDR3 for beta chain variable domain of TCR clone 324124 (TRBV7-2, TRBJ1-2)
CASSSNQDRRGHGYTF

SEQ ID NO: 648249 - protein, 10 aa, Homo sapiens
  CDR3 for alpha chain variable domain of TCR clone 324125 (TRAV35, TRAJ49)
DANTGNQLYF

SEQ ID NO: 648250 - protein, 13 aa, Homo sapiens
  CDR3 for beta chain variable domain of TCR clone 324125 (TRBV6-3, TRBJ2-5)
CASSWAGEETQYF

SEQ ID NO: 648251 - protein, 15 aa, Homo sapiens
  CDR3 for alpha chain variable domain of TCR clone 324126 (TRAV26-1, TRAJ42)
CIVRVAEGSQGNLIF

SEQ ID NO: 648252 - protein, 13 aa, Homo sapiens
  CDR3 for beta chain variable domain of TCR clone 324126 (TRBV12-4, TRBJ1-2)
CASSLRQGEGYTF

SEQ ID NO: 648253 - protein, 15 aa, Homo sapiens
  CDR3 for alpha chain variable domain of TCR clone 324127 (TRAV12-3, TRAJ6)
CAMSAPTGGSYIPTF

SEQ ID NO: 648254 - protein, 17 aa, Homo sapiens
  CDR3 for beta chain variable domain of TCR clone 324127 (TRBV20-1, TRBJ2-1)
CSARSPSGGPPTMSSSS

SEQ ID NO: 648255 - protein, 12 aa, Homo sapiens
  CDR3 for alpha chain variable domain of TCR clone 324128 (TRAV12-1, TRAJ40)
CEVYSGTYKYIF

SEQ ID NO: 648256 - protein, 14 aa, Homo sapiens
  CDR3 for beta chain variable domain of TCR clone 324128 (TRBV7-9, TRBJ2-5)
CASSLDTAQETQYF

SEQ ID NO: 648257 - protein, 14 aa, Homo sapiens
  CDR3 for alpha chain variable domain of TCR clone 324129 (TRAV20, TRAJ42)
CGVQAGGSQGNLIF

SEQ ID NO: 648258 - protein, 14 aa, Homo sapiens
  CDR3 for beta chain variable domain of TCR clone 324129 (TRBV28, TRBJ1-2)
CASRIQGANYGYTF

SEQ ID NO: 648259 - protein, 14 aa, Homo sapiens
  CDR3 for alpha chain variable domain of TCR clone 324130 (TRAV12-3, TRAJ12)
CAMSRMDSSYKLIF

SEQ ID NO: 648260 - protein, 15 aa, Homo sapiens
  CDR3 for beta chain variable domain of TCR clone 324130 (TRBV25-1, TRBJ1-4)
CASSKRIATNEKLFF

SEQ ID NO: 648261 - protein, 17 aa, Homo sapiens
  CDR3 for alpha chain variable domain of TCR clone 324131 (TRAV3, TRAJ6)
CALRDGPRAGGSYIATF

SEQ ID NO: 648262 - protein, 14 aa, Homo sapiens
  CDR3 for beta chain variable domain of TCR clone 324131 (TRBV7-2, TRBJ2-7)
CASSPKTSFYEQYF

SEQ ID NO: 648263 - protein, 14 aa, Homo sapiens
  CDR3 for alpha chain variable domain of TCR clone 324132 (TRAV38-2/DV8, TRAJ30)
CAYGGGDRDDKIIF

SEQ ID NO: 648264 - protein, 14 aa, Homo sapiens
  CDR3 for beta chain variable domain of TCR clone 324132 (TRBV4-2, TRBJ1-2)
CASSQDRREGGYTF

SEQ ID NO: 648265 - protein, 14 aa, Homo sapiens
  CDR3 for alpha chain variable domain of TCR clone 324133 (TRAV9-2, TRAJ39)
CALYIYNAGNMLNF

SEQ ID NO: 648266 - protein, 16 aa, Homo sapiens
  CDR3 for beta chain variable domain of TCR clone 324133 (TRBV19, TRBJ2-1)
CASSKAGPSSYNEQFF

SEQ ID NO: 648267 - protein, 13 aa, Homo sapiens
  CDR3 for alpha chain variable domain of TCR clone 324134 (TRAV8-3, TRAJ28)
CAVRAVGSYQLTF

SEQ ID NO: 648268 - protein, 15 aa, Homo sapiens
  CDR3 for beta chain variable domain of TCR clone 324134 (TRBV7-9, TRBJ1-5)
CASSQGHQPNQPQHF

SEQ ID NO: 648269 - protein, 12 aa, Homo sapiens
  CDR3 for alpha chain variable domain of TCR clone 324135 (TRAV12-3, TRAJ33)
CAFMDSNYQLIW

SEQ ID NO: 648270 - protein, 15 aa, Homo sapiens
  CDR3 for beta chain variable domain of TCR clone 324135 (TRBV6-6, TRBJ2-7)
CASSYSYGGSYEQYF

SEQ ID NO: 648271 - protein, 13 aa, Homo sapiens
  CDR3 for alpha chain variable domain of TCR clone 324136 (TRAV12-2, TRAJ20)
CAVYPSNDYKFSF

SEQ ID NO: 648272 - protein, 16 aa, Homo sapiens
  CDR3 for beta chain variable domain of TCR clone 324136 (TRBV11-3, TRBJ2-5)
CASSSVVAGSTETQYF

SEQ ID NO: 648273 - protein, 14 aa, Homo sapiens
  CDR3 for alpha chain variable domain of TCR clone 324137 (TRAV35, TRAJ33)
CAGSSQDSNYQLIW

SEQ ID NO: 648274 - protein, 15 aa, Homo sapiens
  CDR3 for beta chain variable domain of TCR clone 324137 (TRBV28, TRBJ2-5)
CASSPPWSYQETQYF

SEQ ID NO: 648275 - protein, 10 aa, Homo sapiens
  CDR3 for alpha chain variable domain of TCR clone 324138 (TRAV8-4, TRAJ39)
CAVAGNMLTF

SEQ ID NO: 648276 - protein, 16 aa, Homo sapiens
  CDR3 for beta chain variable domain of TCR clone 324138 (TRBV27, TRBJ2-2)
CASSFRGLVRTGELFF

SEQ ID NO: 648277 - protein, 12 aa, Homo sapiens
  CDR3 for alpha chain variable domain of TCR clone 324139 (TRAV23/DV6, TRAJ30)
CAASKGDDKIIF

SEQ ID NO: 648278 - protein, 17 aa, Homo sapiens
  CDR3 for beta chain variable domain of TCR clone 324139 (TRBV13, TRBJ2-3)
CASSLSRVAGGGNTQYF

SEQ ID NO: 648279 - protein, 15 aa, Homo sapiens
  CDR3 for alpha chain variable domain of TCR clone 324140 (TRAV13-1, TRAJ10)
CAATILTGGGKKLTF

SEQ ID NO: 648280 - protein, 15 aa, Homo sapiens
  CDR3 for beta chain variable domain of TCR clone 324140 (TRBV2, TRBJ2-7)
CASTLLGSGATEQYF

SEQ ID NO: 648281 - protein, 12 aa, Homo sapiens
  CDR3 for alpha chain variable domain of TCR clone 324141 (TRAV25, TRAJ20)
CAGSSNDYKLSF

SEQ ID NO: 648282 - protein, 14 aa, Homo sapiens
  CDR3 for beta chain variable domain of TCR clone 324141 (TRBV3-1, TRBJ2-5)
CASSQGPDQETQYF

SEQ ID NO: 648283 - protein, 11 aa, Homo sapiens
  CDR3 for alpha chain variable domain of TCR clone 324142 (TRAV12-3, TRAJ43)
FAMSVSNDMHF

SEQ ID NO: 648284 - protein, 13 aa, Homo sapiens
  CDR3 for beta chain variable domain of TCR clone 324142 (TRBV20-1, TRBJ1-1)
CSAPLGGGTEAFF

SEQ ID NO: 648285 - protein, 14 aa, Homo sapiens
  CDR3 for alpha chain variable domain of TCR clone 324143 (TRAV12-2, TRAJ36)
CAVKISTGAHNLFF

SEQ ID NO: 648286 - protein, 14 aa, Homo sapiens
  CDR3 for beta chain variable domain of TCR clone 324143 (TRBV25-1, TRBJ1-2)
CASSDTTGVGGYTF

SEQ ID NO: 648287 - protein, 15 aa, Homo sapiens
  CDR3 for alpha chain variable domain of TCR clone 324144 (TRAV8-3, TRAJ45)
CASSYSGGGADGLTF

SEQ ID NO: 648288 - protein, 15 aa, Homo sapiens
  CDR3 for beta chain variable domain of TCR clone 324144 (TRBV11-2, TRBJ1-6)
CASTGFGTAVSPLHF

SEQ ID NO: 648289 - protein, 14 aa, Homo sapiens
  CDR3 for alpha chain variable domain of TCR clone 324145 (TRAV12-2, TRAJ13)
CAVKKTGGYKKVTF

SEQ ID NO: 648290 - protein, 16 aa, Homo sapiens
  CDR3 for beta chain variable domain of TCR clone 324145 (TRBV4-2, TRBJ2-3)
CASSQELAGDTDTQYF

SEQ ID NO: 648291 - protein, 13 aa, Homo sapiens
  CDR3 for alpha chain variable domain of TCR clone 324146 (TRAV27, TRAJ56)
CAGKPGANSKLTF

SEQ ID NO: 648292 - protein, 11 aa, Homo sapiens
  CDR3 for beta chain variable domain of TCR clone 324146 (TRBV7-2, TRBJ2-3)
CASSLGDTQYF

SEQ ID NO: 648293 - protein, 14 aa, Homo sapiens
  CDR3 for alpha chain variable domain of TCR clone 324147 (TRAV1-1, TRAJ27)
CAVIYNTNAGKSTF

SEQ ID NO: 648294 - protein, 14 aa, Homo sapiens
  CDR3 for beta chain variable domain of TCR clone 324147 (TRBV25-1, TRBJ1-1)
CASTQLGGNTEAFF

SEQ ID NO: 648295 - protein, 12 aa, Homo sapiens
  CDR3 for alpha chain variable domain of TCR clone 324148 (TRAV26-1, TRAJ36)
CIVRVRADNLFF

SEQ ID NO: 648296 - protein, 13 aa, Homo sapiens
  CDR3 for beta chain variable domain of TCR clone 324148 (TRBV11-2, TRBJ2-5)
CSSSRGPSETQYF

SEQ ID NO: 648297 - protein, 13 aa, Homo sapiens
  CDR3 for alpha chain variable domain of TCR clone 324149 (TRAV23/DV6, TRAJ22)
CACGAGSARQLTF

SEQ ID NO: 648298 - protein, 14 aa, Homo sapiens
  CDR3 for beta chain variable domain of TCR clone 324149 (TRBV7-2, TRBJ2-7)
CASSPKTSFYEQYF

SEQ ID NO: 648299 - protein, 14 aa, Homo sapiens
  CDR3 for alpha chain variable domain of TCR clone 324150 (TRAV13-1, TRAJ13)
CAASMVGGYQKVTF

SEQ ID NO: 648300 - protein, 17 aa, Homo sapiens
  CDR3 for beta chain variable domain of TCR clone 324150 (TRBV15, TRBJ1-5)
CATSRAPPGTRNQPQHF

SEQ ID NO: 648301 - protein, 14 aa, Homo sapiens
  CDR3 for alpha chain variable domain of TCR clone 324151 (TRAV1-1, TRAJ28)
CAAPSGAGSYQITF

SEQ ID NO: 648302 - protein, 15 aa, Homo sapiens
  CDR3 for beta chain variable domain of TCR clone 324151 (TRBV7-2, TRBJ1-2)
CASSLVSGGDYGYTF

SEQ ID NO: 648303 - protein, 13 aa, Homo sapiens
  CDR3 for alpha chain variable domain of TCR clone 324152 (TRAV12-2, TRAJ13)
CAVTAGGYQKVTF

SEQ ID NO: 648304 - protein, 12 aa, Homo sapiens
  CDR3 for beta chain variable domain of TCR clone 324152 (TRBV11-2, TRBJ2-2)
CASSLGGGELFF

SEQ ID NO: 648305 - protein, 14 aa, Homo sapiens
  CDR3 for alpha chain variable domain of TCR clone 324153 (TRAV1-2, TRAJ16)
CAVNRFSDGQKLLF

SEQ ID NO: 648306 - protein, 16 aa, Homo sapiens
  CDR3 for beta chain variable domain of TCR clone 324153 (TRBV5-1, TRBJ2-7)
CASSLEGLAGLYEQYF

SEQ ID NO: 648307 - protein, 13 aa, Homo sapiens
  CDR3 for alpha chain variable domain of TCR clone 324154 (TRAV12-1, TRAJ33)
CGDAPDSNYQLIW

SEQ ID NO: 648308 - protein, 15 aa, Homo sapiens
  CDR3 for beta chain variable domain of TCR clone 324154 (TRBV27, TRBJ2-1)
CASSNGGGSSNEQFV

SEQ ID NO: 648309 - protein, 14 aa, Homo sapiens
  CDR3 for alpha chain variable domain of TCR clone 324155 (TRAV1-2, TRAJ8)
CAVREDTGLQKLVF

SEQ ID NO: 648310 - protein, 12 aa, Homo sapiens
  CDR3 for beta chain variable domain of TCR clone 324155 (TRBV7-9, TRBJ2-7)
CASSIKREEQYF

SEQ ID NO: 648311 - protein, 11 aa, Homo sapiens
  CDR3 for alpha chain variable domain of TCR clone 324156 (TRAV17, TRAJ20)
CATDAGYKLSF

SEQ ID NO: 648312 - protein, 16 aa, Homo sapiens
  CDR3 for beta chain variable domain of TCR clone 324156 (TRBV12-4, TRBJ1-5)
CASSRPVGGSNQPQHF

SEQ ID NO: 648313 - protein, 17 aa, Homo sapiens
  CDR3 for alpha chain variable domain of TCR clone 324157 (TRAV3, TRAJ6)
CAVRDGPRAGGSYIPTF

SEQ ID NO: 648314 - protein, 19 aa, Homo sapiens
  CDR3 for beta chain variable domain of TCR clone 324157 (TRBV28, TRBJ2-7)
CASSYSGTSRLGWVYEQYF

SEQ ID NO: 648315 - protein, 14 aa, Homo sapiens
  CDR3 for alpha chain variable domain of TCR clone 324158 (TRAV8-1, TRAJ5)
CAVRTDTCGRALTF

SEQ ID NO: 648316 - protein, 12 aa, Homo sapiens
  CDR3 for beta chain variable domain of TCR clone 324158 (TRBV11-2, TRBJ2-1)
CASSPGNNEQFF

SEQ ID NO: 648317 - protein, 14 aa, Homo sapiens
  CDR3 for alpha chain variable domain of TCR clone 324159 (TRAV3, TRAJ32)
CCERRAGATNKLIF

SEQ ID NO: 648318 - protein, 14 aa, Homo sapiens
  CDR3 for beta chain variable domain of TCR clone 324159 (TRBV12-5, TRBJ2-5)
CASGSRTHQETQYF

SEQ ID NO: 648319 - protein, 14 aa, Homo sapiens
  CDR3 for alpha chain variable domain of TCR clone 324160 (TRAV8-3, TRAJ48)
CCGCGQFGNEKLTF

SEQ ID NO: 648320 - protein, 14 aa, Homo sapiens
  CDR3 for beta chain variable domain of TCR clone 324160 (TRBV5-1, TRBJ2-7)
CASSRGESLYEQYF

SEQ ID NO: 648321 - protein, 18 aa, Homo sapiens
  CDR3 for alpha chain variable domain of TCR clone 324161 (TRAV26-2, TRAJ54)
CILRDVEVGIQGAQKLVF

SEQ ID NO: 648322 - protein, 17 aa, Homo sapiens
  CDR3 for beta chain variable domain of TCR clone 324161 (TRBV4-1, TRBJ2-3)
CASSQGYVSGGTDTQYF

SEQ ID NO: 648323 - protein, 14 aa, Homo sapiens
  CDR3 for alpha chain variable domain of TCR clone 324162 (TRAV17, TRAJ57)
CATDPQGGSEKLVF

SEQ ID NO: 648324 - protein, 15 aa, Homo sapiens
  CDR3 for beta chain variable domain of TCR clone 324162 (TRBV5-1, TRBJ2-7)
CASSLDLTSPYEQYF

SEQ ID NO: 648325 - protein, 14 aa, Homo sapiens
  CDR3 for alpha chain variable domain of TCR clone 324163 (TRAV12-3, TRAJ10)
SHLPLAGGGNKLTF

SEQ ID NO: 648326 - protein, 13 aa, Homo sapiens
  CDR3 for beta chain variable domain of TCR clone 324163 (TRBV24-1, TRBJ2-1)
CATSAGPYNEQFF

SEQ ID NO: 648327 - protein, 14 aa, Homo sapiens
  CDR3 for alpha chain variable domain of TCR clone 324164 (TRAV12-3, TRAJ10)
SHLPLTGGGNKLTF

SEQ ID NO: 648328 - protein, 12 aa, Homo sapiens
  CDR3 for beta chain variable domain of TCR clone 324164 (TRBV12-4, TRBJ2-7)
CASSSGPRGQYF

SEQ ID NO: 648329 - protein, 15 aa, Homo sapiens
  CDR3 for alpha chain variable domain of TCR clone 324165 (TRAV8-3, TRAJ37)
CAVGGLSSNTGKLLF

SEQ ID NO: 648330 - protein, 15 aa, Homo sapiens
  CDR3 for beta chain variable domain of TCR clone 324165 (TRBV10-3, TRBJ2-7)
CATREQGLRSYEQYF

SEQ ID NO: 648331 - protein, 16 aa, Homo sapiens
  CDR3 for alpha chain variable domain of TCR clone 324166 (TRAV3, TRAJ37)
CAARGKGSGNTGKLIF

SEQ ID NO: 648332 - protein, 12 aa, Homo sapiens
  CDR3 for beta chain variable domain of TCR clone 324166 (TRBV12-4, TRBJ2-3)
CASSTLPDTQYF

SEQ ID NO: 648333 - protein, 12 aa, Homo sapiens
  CDR3 for alpha chain variable domain of TCR clone 324167 (TRAV12-3, TRAJ17)
CAMTLTGHKLTF

SEQ ID NO: 648334 - protein, 12 aa, Homo sapiens
  CDR3 for beta chain variable domain of TCR clone 324167 (TRBV14, TRBJ2-5)
CASSQLKETQYF

SEQ ID NO: 648335 - protein, 12 aa, Homo sapiens
  CDR3 for alpha chain variable domain of TCR clone 324168 (TRAV3, TRAJ39)
CAVIEWSNMLTF

SEQ ID NO: 648336 - protein, 14 aa, Homo sapiens
  CDR3 for beta chain variable domain of TCR clone 324168 (TRBV7-8, TRBJ2-3)
CASSFPDGQDTQNF

SEQ ID NO: 648337 - protein, 17 aa, Homo sapiens
  CDR3 for alpha chain variable domain of TCR clone 324169 (TRAV3, TRAJ6)
CAVRDGPRAGGGYIPTF

SEQ ID NO: 648338 - protein, 18 aa, Homo sapiens
  CDR3 for beta chain variable domain of TCR clone 324169 (TRBV7-9, TRBJ2-7)
CASSLTTSGSRTRYEQYF

SEQ ID NO: 648339 - protein, 15 aa, Homo sapiens
  CDR3 for alpha chain variable domain of TCR clone 324170 (TRAV25, TRAJ53)
CPTSNSGGSNYKLTF

SEQ ID NO: 648340 - protein, 12 aa, Homo sapiens
  CDR3 for beta chain variable domain of TCR clone 324170 (TRBV11-2, TRBJ2-2)
CASSLPTGELFF

SEQ ID NO: 648341 - protein, 14 aa, Homo sapiens
  CDR3 for alpha chain variable domain of TCR clone 324171 (TRAV8-6, TRAJ53)
CAALVLGSNYKLTF

SEQ ID NO: 648342 - protein, 15 aa, Homo sapiens
  CDR3 for beta chain variable domain of TCR clone 324171 (TRBV20-1, TRBJ2-3)
RSAEPLAGHGDTQYF

SEQ ID NO: 648343 - protein, 22 aa, Homo sapiens
  CDR3 for alpha chain variable domain of TCR clone 324172 (TRAV27, TRAJ36)
TSLRPSLVIQASTPAGANNLFF

SEQ ID NO: 648344 - protein, 13 aa, Homo sapiens
  CDR3 for beta chain variable domain of TCR clone 324172 (TRBV7-9, TRBJ2-3)
CASSPGSTDMQYF

SEQ ID NO: 648345 - protein, 14 aa, Homo sapiens
  CDR3 for alpha chain variable domain of TCR clone 324173 (TRAV38-2/DV8, TRAJ23)
CAYRKPNQGGKLIF

SEQ ID NO: 648346 - protein, 13 aa, Homo sapiens
  CDR3 for beta chain variable domain of TCR clone 324173 (TRBV28, TRBJ2-5)
CASSFAGGETQYF

SEQ ID NO: 648347 - protein, 14 aa, Homo sapiens
  CDR3 for alpha chain variable domain of TCR clone 324174 (TRAV2, TRAJ9)
CAVDPNTRGFKTIF

SEQ ID NO: 648348 - protein, 13 aa, Homo sapiens
  CDR3 for beta chain variable domain of TCR clone 324174 (TRBV20-1, TRBJ2-1)
CSASTGTSNEQFF

SEQ ID NO: 648349 - protein, 16 aa, Homo sapiens
  CDR3 for alpha chain variable domain of TCR clone 324175 (TRAV16, TRAJ4)
FALSRMFSGGYNNLIF

SEQ ID NO: 648350 - protein, 16 aa, Homo sapiens
  CDR3 for beta chain variable domain of TCR clone 324175 (TRBV24-1, TRBJ2-3)
CATSDPGTGATDTQYF

SEQ ID NO: 648351 - protein, 14 aa, Homo sapiens
  CDR3 for alpha chain variable domain of TCR clone 324176 (TRAV23/DV6, TRAJ24)
CAASLSDSWGKLQF

SEQ ID NO: 648352 - protein, 15 aa, Homo sapiens
  CDR3 for beta chain variable domain of TCR clone 324176 (TRBV9, TRBJ1-6)
CASSVAGTGDSPLHC

SEQ ID NO: 648353 - protein, 15 aa, Homo sapiens
  CDR3 for alpha chain variable domain of TCR clone 324177 (TRAV36/DV7, TRAJ53)
CAVEGSGGSNYKLTF

SEQ ID NO: 648354 - protein, 18 aa, Homo sapiens
  CDR3 for beta chain variable domain of TCR clone 324177 (TRBV6-3, TRBJ2-2)
CASSYRPGGLDRPGELFF

SEQ ID NO: 648355 - protein, 17 aa, Homo sapiens
  CDR3 for alpha chain variable domain of TCR clone 324178 (TRAV26-1, TRAJ47)
CIVPYLLYMEYGNKLVF

SEQ ID NO: 648356 - protein, 14 aa, Homo sapiens
  CDR3 for beta chain variable domain of TCR clone 324178 (TRBV7-3, TRBJ1-5)
RASSFSGCNQPQHF

SEQ ID NO: 648357 - protein, 11 aa, Homo sapiens
  CDR3 for alpha chain variable domain of TCR clone 324179 (TRAV12-1, TRAJ34)
CVVNKGRELIF

SEQ ID NO: 648358 - protein, 12 aa, Homo sapiens
  CDR3 for beta chain variable domain of TCR clone 324179 (TRBV11-2, TRBJ2-1)
CASSPGNNEQFF

SEQ ID NO: 648359 - protein, 16 aa, Homo sapiens
  CDR3 for alpha chain variable domain of TCR clone 324180 (TRAV12-3, TRAJ53)
CAMSPGSGGSNYKRTF

SEQ ID NO: 648360 - protein, 12 aa, Homo sapiens
  CDR3 for beta chain variable domain of TCR clone 324180 (TRBV11-2, TRBJ2-2)
CASSLGGGELFF

SEQ ID NO: 648361 - protein, 13 aa, Homo sapiens
  CDR3 for alpha chain variable domain of TCR clone 324181 (TRAV30, TRAJ24)
CSTVTDSWGKLQF

SEQ ID NO: 648362 - protein, 14 aa, Homo sapiens
  CDR3 for beta chain variable domain of TCR clone 324181 (TRBV6-3, TRBJ2-2)
CASTYTPDTGELFF

SEQ ID NO: 648363 - protein, 18 aa, Homo sapiens
  CDR3 for alpha chain variable domain of TCR clone 324182 (TRAV1-1, TRAJ12)
CLLLLRCERGVSSYKLIF

SEQ ID NO: 648364 - protein, 15 aa, Homo sapiens
  CDR3 for beta chain variable domain of TCR clone 324182 (TRBV18, TRBJ2-5)
CASTDRGPRQETQYF

SEQ ID NO: 648365 - protein, 14 aa, Homo sapiens
  CDR3 for alpha chain variable domain of TCR clone 324183 (TRAV16, TRAJ33)
CALSAIDSNYQLIW

SEQ ID NO: 648366 - protein, 16 aa, Homo sapiens
  CDR3 for beta chain variable domain of TCR clone 324183 (TRBV25-1, TRBJ2-7)
CASSELTGGGIYEQYF

SEQ ID NO: 648367 - protein, 12 aa, Homo sapiens
  CDR3 for alpha chain variable domain of TCR clone 324184 (TRAV35, TRAJ49)
CAGWNTGIQFYF

SEQ ID NO: 648368 - protein, 16 aa, Homo sapiens
  CDR3 for beta chain variable domain of TCR clone 324184 (TRBV5-1, TRBJ2-2)
CASSLWDTTNTGELFF

SEQ ID NO: 648369 - protein, 13 aa, Homo sapiens
  CDR3 for alpha chain variable domain of TCR clone 324185 (TRAV21, TRAJ56)
CAVMLGANSKLTF

SEQ ID NO: 648370 - protein, 12 aa, Homo sapiens
  CDR3 for beta chain variable domain of TCR clone 324185 (TRBV12-4, TRBJ2-3)
CASSSTTDTQYF

SEQ ID NO: 648371 - protein, 19 aa, Homo sapiens
  CDR3 for alpha chain variable domain of TCR clone 324186 (TRAV1-2, TRAJ26)
CLLPLCCERPDNYGQNFVF

SEQ ID NO: 648372 - protein, 12 aa, Homo sapiens
  CDR3 for beta chain variable domain of TCR clone 324186 (TRBV7-9, TRBJ2-7)
CATRTDAYEQSF

SEQ ID NO: 648373 - protein, 16 aa, Homo sapiens
  CDR3 for alpha chain variable domain of TCR clone 324187 (TRAV30, TRAJ24)
CVTEIVDADSWGKFQL

SEQ ID NO: 648374 - protein, 14 aa, Homo sapiens
  CDR3 for beta chain variable domain of TCR clone 324187 (TRBV12-5, TRBJ2-5)
CASGSRTHQETQYF

SEQ ID NO: 648375 - protein, 14 aa, Homo sapiens
  CDR3 for alpha chain variable domain of TCR clone 324188 (TRAV36/DV7, TRAJ40)
CAVETTSGTHKYIF

SEQ ID NO: 648376 - protein, 12 aa, Homo sapiens
  CDR3 for beta chain variable domain of TCR clone 324188 (TRBV28, TRBJ2-7)
CASSFSSYEQYF

SEQ ID NO: 648377 - protein, 12 aa, Homo sapiens
  CDR3 for alpha chain variable domain of TCR clone 324189 (TRAV12-3, TRAJ17)
CAMTLTGNKLNF

SEQ ID NO: 648378 - protein, 12 aa, Homo sapiens
  CDR3 for beta chain variable domain of TCR clone 324189 (TRBV6-3, TRBJ2-1)
CASSGSYNEQFF

SEQ ID NO: 648379 - protein, 12 aa, Homo sapiens
  CDR3 for alpha chain variable domain of TCR clone 324190 (TRAV12-3, TRAJ17)
CAMTLTGNKLTF

SEQ ID NO: 648380 - protein, 15 aa, Homo sapiens
  CDR3 for beta chain variable domain of TCR clone 324190 (TRBV28, TRBJ1-3)
CASSMGWVSGNTIYF

SEQ ID NO: 648381 - protein, 23 aa, Homo sapiens
  CDR3 for alpha chain variable domain of TCR clone 324191 (TRAV26-1, )
CIADNAGNNHTQNPDPAVYQLRD

SEQ ID NO: 648382 - protein, 13 aa, Homo sapiens
  CDR3 for beta chain variable domain of TCR clone 324191 (TRBV20-1, TRBJ1-1)
CSARGGGNTEAFF

SEQ ID NO: 648383 - protein, 15 aa, Homo sapiens
  CDR3 for alpha chain variable domain of TCR clone 324192 (TRAV17, TRAJ16)
CASALRFSDGQKLLF

SEQ ID NO: 648384 - protein, 15 aa, Homo sapiens
  CDR3 for beta chain variable domain of TCR clone 324192 (TRBV13, TRBJ1-5)
CASSFGQGGVQAQHF

SEQ ID NO: 648385 - protein, 14 aa, Homo sapiens
  CDR3 for alpha chain variable domain of TCR clone 324193 (TRAV2, TRAJ20)
CAVEDVVNDYKLSF

SEQ ID NO: 648386 - protein, 18 aa, Homo sapiens
  CDR3 for beta chain variable domain of TCR clone 324193 (TRBV7-2, TRBJ2-3)
CASSLKREGSGITDTQYF

SEQ ID NO: 648387 - protein, 13 aa, Homo sapiens
  CDR3 for alpha chain variable domain of TCR clone 324194 (TRAV12-1, TRAJ6)
CVVFPGGSYIPTF

SEQ ID NO: 648388 - protein, 15 aa, Homo sapiens
  CDR3 for beta chain variable domain of TCR clone 324194 (TRBV27, TRBJ2-1)
CASSNGGGSSNEQLF

SEQ ID NO: 648389 - protein, 13 aa, Homo sapiens
  CDR3 for alpha chain variable domain of TCR clone 324195 (TRAV14/DV4, TRAJ27)
CAMPEHQCRQINL

SEQ ID NO: 648390 - protein, 15 aa, Homo sapiens
  CDR3 for beta chain variable domain of TCR clone 324195 (TRBV5-8, TRBJ2-2)
CASSLEGLDTGELFF

SEQ ID NO: 648391 - protein, 14 aa, Homo sapiens
  CDR3 for alpha chain variable domain of TCR clone 324196 (TRAV12-1, TRAJ22)
CVVPYRGSARQLTF

SEQ ID NO: 648392 - protein, 15 aa, Homo sapiens
  CDR3 for beta chain variable domain of TCR clone 324196 (TRBV12-4, TRBJ2-1)
CASSLWTSAVNEQFF

SEQ ID NO: 648393 - protein, 20 aa, Homo sapiens
  CDR3 for alpha chain variable domain of TCR clone 324197 (TRAV8-3, TRAJ44)
LSTSVLWVRLYTGTASKLTF

SEQ ID NO: 648394 - protein, 16 aa, Homo sapiens
  CDR3 for beta chain variable domain of TCR clone 324197 (TRBV6-4, TRBJ1-2)
CASSEAVGDPNYGYSF

SEQ ID NO: 648395 - protein, 12 aa, Homo sapiens
  CDR3 for alpha chain variable domain of TCR clone 324198 (TRAV12-3, TRAJ17)
CAMTLTGNKLTF

SEQ ID NO: 648396 - protein, 15 aa, Homo sapiens
  CDR3 for beta chain variable domain of TCR clone 324198 (TRBV20-1, TRBJ2-7)
CSARYRVSGMEEQYF

SEQ ID NO: 648397 - protein, 13 aa, Homo sapiens
  CDR3 for alpha chain variable domain of TCR clone 324199 (TRAV8-4, TRAJ10)
CAAFTGGGNKLTF

SEQ ID NO: 648398 - protein, 12 aa, Homo sapiens
  CDR3 for beta chain variable domain of TCR clone 324199 (TRBV3-1, TRBJ2-1)
CASSQGYSGQFF

SEQ ID NO: 648399 - protein, 15 aa, Homo sapiens
  CDR3 for alpha chain variable domain of TCR clone 324200 (TRAV12-3, TRAJ6)
CAMSATTGRSYIPTF

SEQ ID NO: 648400 - protein, 15 aa, Homo sapiens
  CDR3 for beta chain variable domain of TCR clone 324200 (TRBV28, TRBJ2-1)
CASSIIAGGRSEQFF

SEQ ID NO: 648401 - protein, 14 aa, Homo sapiens
  CDR3 for alpha chain variable domain of TCR clone 324201 (TRAV27, TRAJ58)
CAGDGETSGSRLTF

SEQ ID NO: 648402 - protein, 13 aa, Homo sapiens
  CDR3 for beta chain variable domain of TCR clone 324201 (TRBV7-7, TRBJ2-3)
CASSVSRADTQYF

SEQ ID NO: 648403 - protein, 13 aa, Homo sapiens
  CDR3 for alpha chain variable domain of TCR clone 324202 (TRAV13-1, TRAJ5)
CAAEHTGRRALTF

SEQ ID NO: 648404 - protein, 14 aa, Homo sapiens
  CDR3 for beta chain variable domain of TCR clone 324202 (TRBV25-1, TRBJ1-1)
CASTHLGGNTEAFF

SEQ ID NO: 648405 - protein, 14 aa, Homo sapiens
  CDR3 for alpha chain variable domain of TCR clone 324203 (TRAV1-2, TRAJ16)
CAVNRFSDGKKLSL

SEQ ID NO: 648406 - protein, 15 aa, Homo sapiens
  CDR3 for beta chain variable domain of TCR clone 324203 (TRBV9, TRBJ1-6)
CASSVAGTGDSPLHF

SEQ ID NO: 648407 - protein, 14 aa, Homo sapiens
  CDR3 for alpha chain variable domain of TCR clone 324204 (TRAV27, TRAJ15)
CAGFDNQSGTALIF

SEQ ID NO: 648408 - protein, 11 aa, Homo sapiens
  CDR3 for beta chain variable domain of TCR clone 324204 (TRBV29-1, TRBJ1-1)
CSVEVGTRTFF

SEQ ID NO: 648409 - protein, 15 aa, Homo sapiens
  CDR3 for alpha chain variable domain of TCR clone 324205 (TRAV2, TRAJ11)
CAVGGRTSGYSTLTF

SEQ ID NO: 648410 - protein, 14 aa, Homo sapiens
  CDR3 for beta chain variable domain of TCR clone 324205 (TRBV20-1, TRBJ2-1)
CSAQIGGSANEQFF

SEQ ID NO: 648411 - protein, 14 aa, Homo sapiens
  CDR3 for alpha chain variable domain of TCR clone 324206 (TRAV8-2, TRAJ4)
CVVSPSGGYNKLLF

SEQ ID NO: 648412 - protein, 15 aa, Homo sapiens
  CDR3 for beta chain variable domain of TCR clone 324206 (TRBV4-1, TRBJ1-4)
CASSDTGGTNGKLFF

SEQ ID NO: 648413 - protein, 16 aa, Homo sapiens
  CDR3 for alpha chain variable domain of TCR clone 324207 (TRAV12-3, TRAJ53)
RAMSPGRGGSNYKLTF

SEQ ID NO: 648414 - protein, 11 aa, Homo sapiens
  CDR3 for beta chain variable domain of TCR clone 324207 (TRBV29-1, TRBJ2-5)
CSEDRTGTQYF

SEQ ID NO: 648415 - protein, 12 aa, Homo sapiens
  CDR3 for alpha chain variable domain of TCR clone 324208 (TRAV2, TRAJ33)
CAVPDNNYQLIW

SEQ ID NO: 648416 - protein, 15 aa, Homo sapiens
  CDR3 for beta chain variable domain of TCR clone 324208 (TRBV15, TRBJ1-5)
CATSRDPVSNQPQHF

SEQ ID NO: 648417 - protein, 14 aa, Homo sapiens
  CDR3 for alpha chain variable domain of TCR clone 324209 (TRAV16, TRAJ17)
CAPRIKAAGNKLTL

SEQ ID NO: 648418 - protein, 17 aa, Homo sapiens
  CDR3 for beta chain variable domain of TCR clone 324209 (TRBV7-2, TRBJ2-3)
CASSSYSGTRRADTQYF

SEQ ID NO: 648419 - protein, 16 aa, Homo sapiens
  CDR3 for alpha chain variable domain of TCR clone 324210 (TRAV12-2, TRAJ43)
CAGDDMRFGAGTRLTV

SEQ ID NO: 648420 - protein, 14 aa, Homo sapiens
  CDR3 for beta chain variable domain of TCR clone 324210 (TRBV10-3, TRBJ1-1)
CAISDGSGVTEAFF

SEQ ID NO: 648421 - protein, 11 aa, Homo sapiens
  CDR3 for alpha chain variable domain of TCR clone 324211 (TRAV3, TRAJ17)
RAEAAGNKLTF

SEQ ID NO: 648422 - protein, 15 aa, Homo sapiens
  CDR3 for beta chain variable domain of TCR clone 324211 (TRBV12-4, TRBJ2-7)
CASSLGSGGPYEQYF

SEQ ID NO: 648423 - protein, 12 aa, Homo sapiens
  CDR3 for alpha chain variable domain of TCR clone 324212 (TRAV2, TRAJ31)
CAVEDNNARLMF

SEQ ID NO: 648424 - protein, 14 aa, Homo sapiens
  CDR3 for beta chain variable domain of TCR clone 324212 (TRBV7-2, TRBJ1-3)
CASSLGTAGNTIYF

SEQ ID NO: 648425 - protein, 14 aa, Homo sapiens
  CDR3 for alpha chain variable domain of TCR clone 324213 (TRAV8-3, TRAJ4)
CAVGAAGGYNKLIF

SEQ ID NO: 648426 - protein, 19 aa, Homo sapiens
  CDR3 for beta chain variable domain of TCR clone 324213 (TRBV25-1, TRBJ2-2)
CAILVYRVDRGRKTGELFF

SEQ ID NO: 648427 - protein, 14 aa, Homo sapiens
  CDR3 for alpha chain variable domain of TCR clone 324214 (TRAV12-3, TRAJ29)
CAIILLSGNTPLVF

SEQ ID NO: 648428 - protein, 16 aa, Homo sapiens
  CDR3 for beta chain variable domain of TCR clone 324214 (TRBV28, TRBJ2-7)
CASSSGASGRGYEQYF

SEQ ID NO: 648429 - protein, 16 aa, Homo sapiens
  CDR3 for alpha chain variable domain of TCR clone 324215 (TRAV14/DV4, TRAJ21)
CAMREGPENNFNKFYF

SEQ ID NO: 648430 - protein, 12 aa, Homo sapiens
  CDR3 for beta chain variable domain of TCR clone 324215 (TRBV29-1, TRBJ2-2)
CSVDKYTVELFF

SEQ ID NO: 648431 - protein, 14 aa, Homo sapiens
  CDR3 for alpha chain variable domain of TCR clone 324216 (TRAV12-2, TRAJ13)
CVVKKTGGYQKVTF

SEQ ID NO: 648432 - protein, 16 aa, Homo sapiens
  CDR3 for beta chain variable domain of TCR clone 324216 (TRBV12-4, TRBJ2-5)
CASSFFVRGRQETQYF

SEQ ID NO: 648433 - protein, 11 aa, Homo sapiens
  CDR3 for alpha chain variable domain of TCR clone 324217 (TRAV1-2, TRAJ31)
CAVNNNARLMF

SEQ ID NO: 648434 - protein, 14 aa, Homo sapiens
  CDR3 for beta chain variable domain of TCR clone 324217 (TRBV2, TRBJ2-5)
CASSEVLAQETQYF

SEQ ID NO: 648435 - protein, 15 aa, Homo sapiens
  CDR3 for alpha chain variable domain of TCR clone 324218 (TRAV16, TRAJ50)
FALSGWETSYDKVIF

SEQ ID NO: 648436 - protein, 14 aa, Homo sapiens
  CDR3 for beta chain variable domain of TCR clone 324218 (TRBV18, TRBJ2-3)
CASSETSASDTQYF

SEQ ID NO: 648437 - protein, 15 aa, Homo sapiens
  CDR3 for alpha chain variable domain of TCR clone 324219 (TRAV8-6, TRAJ23)
CAVREFYNQGGKLSF

SEQ ID NO: 648438 - protein, 15 aa, Homo sapiens
  CDR3 for beta chain variable domain of TCR clone 324219 (TRBV20-1, TRBJ2-1)
CSAITGTSGSNEQFF

SEQ ID NO: 648439 - protein, 11 aa, Homo sapiens
  CDR3 for alpha chain variable domain of TCR clone 324220 (TRAV12-2, TRAJ23)
RAYNQGGKLIF

SEQ ID NO: 648440 - protein, 13 aa, Homo sapiens
  CDR3 for beta chain variable domain of TCR clone 324220 (TRBV6-1, TRBJ1-1)
CASSRQGNTEAFF

SEQ ID NO: 648441 - protein, 12 aa, Homo sapiens
  CDR3 for alpha chain variable domain of TCR clone 324221 (TRAV23/DV6, TRAJ30)
CAASKGDDKIIF

SEQ ID NO: 648442 - protein, 16 aa, Homo sapiens
  CDR3 for beta chain variable domain of TCR clone 324221 (TRBV12-5, TRBJ2-5)
CASGPRTSGNQETQYF

SEQ ID NO: 648443 - protein, 17 aa, Homo sapiens
  CDR3 for alpha chain variable domain of TCR clone 324222 (TRAV4, TRAJ13)
CLVGVQGSSGGYQKVTF

SEQ ID NO: 648444 - protein, 11 aa, Homo sapiens
  CDR3 for beta chain variable domain of TCR clone 324222 (TRBV13, TRBJ2-3)
CASGNADTQYF

SEQ ID NO: 648445 - protein, 13 aa, Homo sapiens
  CDR3 for alpha chain variable domain of TCR clone 324223 (TRAV29/DV5, TRAJ31)
CAASRNNNARLMI

SEQ ID NO: 648446 - protein, 14 aa, Homo sapiens
  CDR3 for beta chain variable domain of TCR clone 324223 (TRBV7-6, TRBJ2-3)
CASSLGTVTDTQYF

SEQ ID NO: 648447 - protein, 12 aa, Homo sapiens
  CDR3 for alpha chain variable domain of TCR clone 324224 (TRAV1-1, TRAJ30)
CAVRGRDDKIIF

SEQ ID NO: 648448 - protein, 13 aa, Homo sapiens
  CDR3 for beta chain variable domain of TCR clone 324224 (TRBV11-3, TRBJ2-7)
CASSLDKLYDQYF

SEQ ID NO: 648449 - protein, 18 aa, Homo sapiens
  CDR3 for alpha chain variable domain of TCR clone 324225 (TRAV3, TRAJ10)
CAVRDPRGLTGGGNKLTF

SEQ ID NO: 648450 - protein, 16 aa, Homo sapiens
  CDR3 for beta chain variable domain of TCR clone 324225 (TRBV7-3, TRBJ2-2)
CASSLKRGTLSGELFF

SEQ ID NO: 648451 - protein, 16 aa, Homo sapiens
  CDR3 for alpha chain variable domain of TCR clone 324226 (TRAV8-2, TRAJ7)
CVVSEGPYSGNNRLAF

SEQ ID NO: 648452 - protein, 15 aa, Homo sapiens
  CDR3 for beta chain variable domain of TCR clone 324226 (TRBV27, TRBJ2-3)
CASSLGLAAADTQYF

SEQ ID NO: 648453 - protein, 14 aa, Homo sapiens
  CDR3 for alpha chain variable domain of TCR clone 324227 (TRAV1-2, TRAJ13)
CAVKHSGGYQKVTF

SEQ ID NO: 648454 - protein, 17 aa, Homo sapiens
  CDR3 for beta chain variable domain of TCR clone 324227 (TRBV7-8, TRBJ2-6)
CASSAGTGGAGANVLTF

SEQ ID NO: 648455 - protein, 11 aa, Homo sapiens
  CDR3 for alpha chain variable domain of TCR clone 324228 (TRAV3, TRAJ21)
CAVVNFNKFSF

SEQ ID NO: 648456 - protein, 16 aa, Homo sapiens
  CDR3 for beta chain variable domain of TCR clone 324228 (TRBV19, TRBJ2-1)
CASSKAGPSSYNEQFF

SEQ ID NO: 648457 - protein, 13 aa, Homo sapiens
  CDR3 for alpha chain variable domain of TCR clone 324229 (TRAV21, TRAJ15)
CAVRNQAGTALIF

SEQ ID NO: 648458 - protein, 16 aa, Homo sapiens
  CDR3 for beta chain variable domain of TCR clone 324229 (TRBV20-1, TRBJ2-5)
WSPGGTSGGYMETQYF

SEQ ID NO: 648459 - protein, 14 aa, Homo sapiens
  CDR3 for alpha chain variable domain of TCR clone 324230 (TRAV26-1, TRAJ38)
CIADNAGNNRKLIL

SEQ ID NO: 648460 - protein, 13 aa, Homo sapiens
  CDR3 for beta chain variable domain of TCR clone 324230 (TRBV20-1, TRBJ1-1)
CSARGVGNTEAFF

SEQ ID NO: 648461 - protein, 13 aa, Homo sapiens
  CDR3 for alpha chain variable domain of TCR clone 324231 (TRAV21, TRAJ20)
CAVGLRVDYKLSF

SEQ ID NO: 648462 - protein, 16 aa, Homo sapiens
  CDR3 for beta chain variable domain of TCR clone 324231 (TRBV19, TRBJ1-1)
CASSPTRFWPGTEAFF

SEQ ID NO: 648463 - protein, 17 aa, Homo sapiens
  CDR3 for alpha chain variable domain of TCR clone 324232 (TRAV14/DV4, TRAJ52)
CAMRGNAGGTSYGKLTF

SEQ ID NO: 648464 - protein, 16 aa, Homo sapiens
  CDR3 for beta chain variable domain of TCR clone 324232 (TRBV4-1, TRBJ2-4)
CASSLLRGTAKNMQYF

SEQ ID NO: 648465 - protein, 14 aa, Homo sapiens
  CDR3 for alpha chain variable domain of TCR clone 324233 (TRAV17, TRAJ22)
CATSPSVSERQLTF

SEQ ID NO: 648466 - protein, 15 aa, Homo sapiens
  CDR3 for beta chain variable domain of TCR clone 324233 (TRBV4-1, TRBJ2-5)
CASSQWDLYQETQYF

SEQ ID NO: 648467 - protein, 17 aa, Homo sapiens
  CDR3 for alpha chain variable domain of TCR clone 324234 (TRAV21, TRAJ52)
CAVGVNAGGTSYGKLTF

SEQ ID NO: 648468 - protein, 16 aa, Homo sapiens
  CDR3 for beta chain variable domain of TCR clone 324234 (TRBV12-5, TRBJ2-5)
CASGPRTSGNQETQFF

SEQ ID NO: 648469 - protein, 16 aa, Homo sapiens
  CDR3 for alpha chain variable domain of TCR clone 324235 (TRAV3, TRAJ10)
CAVRDMNAGGGNKLTF

SEQ ID NO: 648470 - protein, 15 aa, Homo sapiens
  CDR3 for beta chain variable domain of TCR clone 324235 (TRBV5-5, TRBJ2-2)
CASSRQASGAGELFF

SEQ ID NO: 648471 - protein, 13 aa, Homo sapiens
  CDR3 for alpha chain variable domain of TCR clone 324236 (TRAV23/DV6, TRAJ47)
CAASSQYGNKLVF

SEQ ID NO: 648472 - protein, 15 aa, Homo sapiens
  CDR3 for beta chain variable domain of TCR clone 324236 (TRBV7-3, TRBJ1-2)
CASSITWTGNYGYTF

SEQ ID NO: 648473 - protein, 15 aa, Homo sapiens
  CDR3 for alpha chain variable domain of TCR clone 324237 (TRAV12-2, TRAJ53)
CAMNGGGGSNYKLTF

SEQ ID NO: 648474 - protein, 15 aa, Homo sapiens
  CDR3 for beta chain variable domain of TCR clone 324237 (TRBV5-1, TRBJ2-7)
CASSLNGGPAREQYF

SEQ ID NO: 648475 - protein, 14 aa, Homo sapiens
  CDR3 for alpha chain variable domain of TCR clone 324238 (TRAV12-2, TRAJ13)
CAVKKTGGYQKVTF

SEQ ID NO: 648476 - protein, 15 aa, Homo sapiens
  CDR3 for beta chain variable domain of TCR clone 324238 (TRBV28, TRBJ2-5)
CASSPPWSYQETQSF

SEQ ID NO: 648477 - protein, 15 aa, Homo sapiens
  CDR3 for alpha chain variable domain of TCR clone 324239 (TRAV36/DV7, TRAJ52)
CCGGAGGTSYGKLTF

SEQ ID NO: 648478 - protein, 14 aa, Homo sapiens
  CDR3 for beta chain variable domain of TCR clone 324239 (TRBV7-2, TRBJ2-7)
CASSPKTSFYEQYF

SEQ ID NO: 648479 - protein, 10 aa, Homo sapiens
  CDR3 for alpha chain variable domain of TCR clone 324240 (TRAV8-4, TRAJ43)
CAVSADDMRF

SEQ ID NO: 648480 - protein, 15 aa, Homo sapiens
  CDR3 for beta chain variable domain of TCR clone 324240 (TRBV2, TRBJ1-1)
CASTEPGQGASGAFF

SEQ ID NO: 648481 - protein, 18 aa, Homo sapiens
  CDR3 for alpha chain variable domain of TCR clone 324241 (TRAV13-1, TRAJ52)
CAAKNPNAGGTSYGKLTF

SEQ ID NO: 648482 - protein, 15 aa, Homo sapiens
  CDR3 for beta chain variable domain of TCR clone 324241 (TRBV2, TRBJ2-2)
CASSRGTVGTGELFF

SEQ ID NO: 648483 - protein, 15 aa, Homo sapiens
  CDR3 for alpha chain variable domain of TCR clone 324242 (TRAV21, TRAJ53)
CATLNSGGSNYKLTF

SEQ ID NO: 648484 - protein, 12 aa, Homo sapiens
  CDR3 for beta chain variable domain of TCR clone 324242 (TRBV14, TRBJ2-4)
CASSNLKSIQSF

SEQ ID NO: 648485 - protein, 11 aa, Homo sapiens
  CDR3 for alpha chain variable domain of TCR clone 324243 (TRAV12-2, TRAJ33)
CAVTSNYQLIW

SEQ ID NO: 648486 - protein, 12 aa, Homo sapiens
  CDR3 for beta chain variable domain of TCR clone 324243 (TRBV7-9, TRBJ1-1)
CASSLVRGEAFF

SEQ ID NO: 648487 - protein, 17 aa, Homo sapiens
  CDR3 for alpha chain variable domain of TCR clone 324244 (TRAV3, TRAJ6)
CAVRDGPRAGGSYIPTF

SEQ ID NO: 648488 - protein, 14 aa, Homo sapiens
  CDR3 for beta chain variable domain of TCR clone 324244 (TRBV12-4, TRBJ1-1)
CASRLPPGVKEAFF

SEQ ID NO: 648489 - protein, 13 aa, Homo sapiens
  CDR3 for alpha chain variable domain of TCR clone 324245 (TRAV1-1, TRAJ28)
CVTSGAGSYQLTF

SEQ ID NO: 648490 - protein, 17 aa, Homo sapiens
  CDR3 for beta chain variable domain of TCR clone 324245 (TRBV18, TRBJ2-2)
CASSQRSSGEGPGELFF

SEQ ID NO: 648491 - protein, 12 aa, Homo sapiens
  CDR3 for alpha chain variable domain of TCR clone 324246 (TRAV3, TRAJ31)
FAAQRANARLMF

SEQ ID NO: 648492 - protein, 14 aa, Homo sapiens
  CDR3 for beta chain variable domain of TCR clone 324246 (TRBV5-5, TRBJ1-5)
CASSGQGVDQPQHF

SEQ ID NO: 648493 - protein, 16 aa, Homo sapiens
  CDR3 for alpha chain variable domain of TCR clone 324247 (TRAV3, TRAJ13)
CTVRDPNSGGYQKVTF

SEQ ID NO: 648494 - protein, 13 aa, Homo sapiens
  CDR3 for beta chain variable domain of TCR clone 324247 (TRBV7-9, TRBJ2-7)
CASSLQGSYEQYF

SEQ ID NO: 648495 - protein, 14 aa, Homo sapiens
  CDR3 for alpha chain variable domain of TCR clone 324248 (TRAV8-2, TRAJ4)
CVVSPSGGYNKLVF

SEQ ID NO: 648496 - protein, 16 aa, Homo sapiens
  CDR3 for beta chain variable domain of TCR clone 324248 (TRBV7-3, TRBJ2-1)
CASSLEGYRSYNEQFF

SEQ ID NO: 648497 - protein, 14 aa, Homo sapiens
  CDR3 for alpha chain variable domain of TCR clone 324249 (TRAV17, TRAJ40)
CATALTSGNYKYIF

SEQ ID NO: 648498 - protein, 13 aa, Homo sapiens
  CDR3 for beta chain variable domain of TCR clone 324249 (TRBV27, TRBJ2-1)
CASSSGSYNEQFF

SEQ ID NO: 648499 - protein, 13 aa, Homo sapiens
  CDR3 for alpha chain variable domain of TCR clone 324250 (TRAV1-1, TRAJ31)
CASYLNNNARLMF

SEQ ID NO: 648500 - protein, 14 aa, Homo sapiens
  CDR3 for beta chain variable domain of TCR clone 324250 (TRBV18, TRBJ2-3)
CASSGLADTDTQYF

SEQ ID NO: 648501 - protein, 14 aa, Homo sapiens
  CDR3 for alpha chain variable domain of TCR clone 324251 (TRAV26-1, TRAJ39)
CIVRGSRAGNMLTF

SEQ ID NO: 648502 - protein, 15 aa, Homo sapiens
  CDR3 for beta chain variable domain of TCR clone 324251 (TRBV7-9, TRBJ1-5)
CASCQGHQPNEPQHF

SEQ ID NO: 648503 - protein, 13 aa, Homo sapiens
  CDR3 for alpha chain variable domain of TCR clone 324252 (TRAV13-1, TRAJ43)
CAASLSNNNDMRF

SEQ ID NO: 648504 - protein, 15 aa, Homo sapiens
  CDR3 for beta chain variable domain of TCR clone 324252 (TRBV19, TRBJ1-1)
CASTSGQIQNTEAFF

SEQ ID NO: 648505 - protein, 11 aa, Homo sapiens
  CDR3 for alpha chain variable domain of TCR clone 324253 (TRAV2, TRAJ13)
CASVGYQKVTF

SEQ ID NO: 648506 - protein, 13 aa, Homo sapiens
  CDR3 for beta chain variable domain of TCR clone 324253 (TRBV24-1, TRBJ2-3)
CATSTGGTDTQYF

SEQ ID NO: 648507 - protein, 13 aa, Homo sapiens
  CDR3 for alpha chain variable domain of TCR clone 324254 (TRAV3, TRAJ43)
CAVRDTRGGDMRF

SEQ ID NO: 648508 - protein, 15 aa, Homo sapiens
  CDR3 for beta chain variable domain of TCR clone 324254 (TRBV6-5, TRBJ1-5)
CASSYSRRSNQPQHS

SEQ ID NO: 648509 - protein, 12 aa, Homo sapiens
  CDR3 for alpha chain variable domain of TCR clone 324255 (TRAV8-3, TRAJ34)
WASGYNTDKLIF

SEQ ID NO: 648510 - protein, 12 aa, Homo sapiens
  CDR3 for beta chain variable domain of TCR clone 324255 (TRBV11-2, TRBJ2-2)
CASSLGGGELFF

SEQ ID NO: 648511 - protein, 14 aa, Homo sapiens
  CDR3 for alpha chain variable domain of TCR clone 324256 (TRAV12-2, TRAJ17)
CAVPFKAAGNKLTF

SEQ ID NO: 648512 - protein, 17 aa, Homo sapiens
  CDR3 for beta chain variable domain of TCR clone 324256 (TRBV11-2, TRBJ2-1)
CASSLYPPGVEYNEQFF

SEQ ID NO: 648513 - protein, 12 aa, Homo sapiens
  CDR3 for alpha chain variable domain of TCR clone 324257 (TRAV12-3, TRAJ34)
CAMGYNTDKLIF

SEQ ID NO: 648514 - protein, 14 aa, Homo sapiens
  CDR3 for beta chain variable domain of TCR clone 324257 (TRBV4-1, TRBJ2-2)
CASSQEVNTGELFF

SEQ ID NO: 648515 - protein, 15 aa, Homo sapiens
  CDR3 for alpha chain variable domain of TCR clone 324258 (TRAV27, TRAJ38)
CAARRNAGNNRKLIW

SEQ ID NO: 648516 - protein, 13 aa, Homo sapiens
  CDR3 for beta chain variable domain of TCR clone 324258 (TRBV20-1, TRBJ1-1)
CSARAGGNAEAFF

SEQ ID NO: 648517 - protein, 14 aa, Homo sapiens
  CDR3 for alpha chain variable domain of TCR clone 324259 (TRAV12-1, TRAJ29)
CVVNEGSGNTPLVF

SEQ ID NO: 648518 - protein, 13 aa, Homo sapiens
  CDR3 for beta chain variable domain of TCR clone 324259 (TRBV7-9, TRBJ2-3)
CANSPGSTDTQYF

SEQ ID NO: 648519 - protein, 16 aa, Homo sapiens
  CDR3 for alpha chain variable domain of TCR clone 324260 (TRAV30, TRAJ24)
CGTEIVDADSWGKFQF

SEQ ID NO: 648520 - protein, 13 aa, Homo sapiens
  CDR3 for beta chain variable domain of TCR clone 324260 (TRBV11-2, TRBJ1-6)
CASSLAGVSPLHF

SEQ ID NO: 648521 - protein, 13 aa, Homo sapiens
  CDR3 for alpha chain variable domain of TCR clone 324261 (TRAV13-1, TRAJ39)
CSKYSNAGNMLTF

SEQ ID NO: 648522 - protein, 14 aa, Homo sapiens
  CDR3 for beta chain variable domain of TCR clone 324261 (TRBV7-2, TRBJ2-5)
CATSPRGSSETQYF

SEQ ID NO: 648523 - protein, 16 aa, Homo sapiens
  CDR3 for alpha chain variable domain of TCR clone 324262 (TRAV3, TRAJ10)
CAVRDMRAGGGNKLTF

SEQ ID NO: 648524 - protein, 14 aa, Homo sapiens
  CDR3 for beta chain variable domain of TCR clone 324262 (TRBV25-1, TRBJ1-1)
CASTHLGGDTEAFF

SEQ ID NO: 648525 - protein, 12 aa, Homo sapiens
  CDR3 for alpha chain variable domain of TCR clone 324263 (TRAV12-3, TRAJ17)
CAMTLTCNKLTF

SEQ ID NO: 648526 - protein, 15 aa, Homo sapiens
  CDR3 for beta chain variable domain of TCR clone 324263 (TRBV19, TRBJ2-5)
CASHGLAGAQETQYF

SEQ ID NO: 648527 - protein, 15 aa, Homo sapiens
  CDR3 for alpha chain variable domain of TCR clone 324264 (TRAV2, TRAJ11)
CAVGGRNSGYSTLTF

SEQ ID NO: 648528 - protein, 14 aa, Homo sapiens
  CDR3 for beta chain variable domain of TCR clone 324264 (TRBV4-1, TRBJ2-2)
CASSQAVNTGELYF

SEQ ID NO: 648529 - protein, 14 aa, Homo sapiens
  CDR3 for alpha chain variable domain of TCR clone 324265 (TRAV20, TRAJ22)
CAVALGGSARQLTF

SEQ ID NO: 648530 - protein, 17 aa, Homo sapiens
  CDR3 for beta chain variable domain of TCR clone 324265 (TRBV13, TRBJ2-3)
CASSLSRAAGGRNTQYF

SEQ ID NO: 648531 - protein, 10 aa, Homo sapiens
  CDR3 for alpha chain variable domain of TCR clone 324266 (TRAV8-4, TRAJ43)
CAVSADDMGF

SEQ ID NO: 648532 - protein, 16 aa, Homo sapiens
  CDR3 for beta chain variable domain of TCR clone 324266 (TRBV7-3, TRBJ2-2)
CASSLKRGTLSGELFF

SEQ ID NO: 648533 - protein, 10 aa, Homo sapiens
  CDR3 for alpha chain variable domain of TCR clone 324267 (TRAV36/DV7, TRAJ48)
CAVGNEELTF

SEQ ID NO: 648534 - protein, 15 aa, Homo sapiens
  CDR3 for beta chain variable domain of TCR clone 324267 (TRBV9, TRBJ2-1)
CASSLAGSSYNEQFF

SEQ ID NO: 648535 - protein, 18 aa, Homo sapiens
  CDR3 for alpha chain variable domain of TCR clone 324268 (TRAV21, TRAJ52)
CAVSPSPAGGTSYGKLTF

SEQ ID NO: 648536 - protein, 14 aa, Homo sapiens
  CDR3 for beta chain variable domain of TCR clone 324268 (TRBV11-2, TRBJ2-7)
CASSLGAGAYEQYF

SEQ ID NO: 648537 - protein, 13 aa, Homo sapiens
  CDR3 for alpha chain variable domain of TCR clone 324269 (TRAV29/DV5, TRAJ31)
CAASRNSNARLMF

SEQ ID NO: 648538 - protein, 12 aa, Homo sapiens
  CDR3 for beta chain variable domain of TCR clone 324269 (TRBV14, TRBJ2-7)
CASSLYKDEQYF

SEQ ID NO: 648539 - protein, 13 aa, Homo sapiens
  CDR3 for alpha chain variable domain of TCR clone 324270 (TRAV8-1, TRAJ28)
CAVSGAGSYQLTF

SEQ ID NO: 648540 - protein, 14 aa, Homo sapiens
  CDR3 for beta chain variable domain of TCR clone 324270 (TRBV7-6, TRBJ2-3)
CASSLGTVTDTQYF

SEQ ID NO: 648541 - protein, 20 aa, Homo sapiens
  CDR3 for alpha chain variable domain of TCR clone 324271 (TRAV26-1, TRAJ42)
CCVLLHRQTYYGGSQGNLSF

SEQ ID NO: 648542 - protein, 16 aa, Homo sapiens
  CDR3 for beta chain variable domain of TCR clone 324271 (TRBV7-3, TRBJ2-2)
CASSLKRGTLSGELFF

SEQ ID NO: 648543 - protein, 13 aa, Homo sapiens
  CDR3 for alpha chain variable domain of TCR clone 324272 (TRAV12-3, TRAJ46)
CAMKKSSGAKLTF

SEQ ID NO: 648544 - protein, 17 aa, Homo sapiens
  CDR3 for beta chain variable domain of TCR clone 324272 (TRBV3-1, TRBJ2-5)
CASSQGLAGMYQETQYF

SEQ ID NO: 648545 - protein, 13 aa, Homo sapiens
  CDR3 for alpha chain variable domain of TCR clone 324273 (TRAV21, TRAJ20)
CAVSRLGDYKLSF

SEQ ID NO: 648546 - protein, 13 aa, Homo sapiens
  CDR3 for beta chain variable domain of TCR clone 324273 (TRBV20-1, TRBJ2-2)
CSASAAGTGELFF

SEQ ID NO: 648547 - protein, 17 aa, Homo sapiens
  CDR3 for alpha chain variable domain of TCR clone 324274 (TRAV3, TRAJ6)
CAVRDGPRAGGSYIPTF

SEQ ID NO: 648548 - protein, 13 aa, Homo sapiens
  CDR3 for beta chain variable domain of TCR clone 324274 (TRBV7-2, TRBJ1-5)
CASSLAEGGANEF

SEQ ID NO: 648549 - protein, 13 aa, Homo sapiens
  CDR3 for alpha chain variable domain of TCR clone 324275 (TRAV2, TRAJ10)
CAVETGGGNKPTF

SEQ ID NO: 648550 - protein, 14 aa, Homo sapiens
  CDR3 for beta chain variable domain of TCR clone 324275 (TRBV20-1, TRBJ2-3)
CSAGGRRGTDTQYF

SEQ ID NO: 648551 - protein, 14 aa, Homo sapiens
  CDR3 for alpha chain variable domain of TCR clone 324276 (TRAV13-1, TRAJ35)
CAASKGGFGNVLHC

SEQ ID NO: 648552 - protein, 17 aa, Homo sapiens
  CDR3 for beta chain variable domain of TCR clone 324276 (TRBV4-1, TRBJ1-3)
CASSPQRGIRFGNTMYF

SEQ ID NO: 648553 - protein, 13 aa, Homo sapiens
  CDR3 for alpha chain variable domain of TCR clone 324277 (TRAV8-6, TRAJ8)
CAFMNTRFQKLVF

SEQ ID NO: 648554 - protein, 15 aa, Homo sapiens
  CDR3 for beta chain variable domain of TCR clone 324277 (TRBV28, TRBJ2-5)
CASSSGRVIQETQYF

SEQ ID NO: 648555 - protein, 16 aa, Homo sapiens
  CDR3 for alpha chain variable domain of TCR clone 324278 (TRAV12-1, TRAJ45)
GVVIRYSGGGADGLTF

SEQ ID NO: 648556 - protein, 12 aa, Homo sapiens
  CDR3 for beta chain variable domain of TCR clone 324278 (TRBV6-5, TRBJ2-2)
CASRQITGELFF

SEQ ID NO: 648557 - protein, 13 aa, Homo sapiens
  CDR3 for alpha chain variable domain of TCR clone 324279 (TRAV3, TRAJ21)
CAVREPDFNKFYF

SEQ ID NO: 648558 - protein, 14 aa, Homo sapiens
  CDR3 for beta chain variable domain of TCR clone 324279 (TRBV7-2, TRBJ2-5)
CASSFTQGQETQYF

SEQ ID NO: 648559 - protein, 17 aa, Homo sapiens
  CDR3 for alpha chain variable domain of TCR clone 324280 (TRAV1-2, TRAJ8)
CAVRDPDENTGFQKLVS

SEQ ID NO: 648560 - protein, 16 aa, Homo sapiens
  CDR3 for beta chain variable domain of TCR clone 324280 (TRBV7-9, TRBJ2-2)
CASSGFGGANTGELFF

SEQ ID NO: 648561 - protein, 13 aa, Homo sapiens
  CDR3 for alpha chain variable domain of TCR clone 324281 (TRAV17, TRAJ9)
CATSLTGGFKTIF

SEQ ID NO: 648562 - protein, 16 aa, Homo sapiens
  CDR3 for beta chain variable domain of TCR clone 324281 (TRBV5-7, TRBJ1-4)
CASSPSGGLKTEKLFF

SEQ ID NO: 648563 - protein, 15 aa, Homo sapiens
  CDR3 for alpha chain variable domain of TCR clone 324282 (TRAV20, TRAJ43)
CAVQAGKSSKNDMRF

SEQ ID NO: 648564 - protein, 14 aa, Homo sapiens
  CDR3 for beta chain variable domain of TCR clone 324282 (TRBV27, TRBJ2-1)
CASGHLGGGNEQFF

SEQ ID NO: 648565 - protein, 14 aa, Homo sapiens
  CDR3 for alpha chain variable domain of TCR clone 324283 (TRAV1-2, TRAJ16)
CAVNRFSDGQKLLC

SEQ ID NO: 648566 - protein, 14 aa, Homo sapiens
  CDR3 for beta chain variable domain of TCR clone 324283 (TRBV4-1, TRBJ2-2)
CASSQAVNTGELFF

SEQ ID NO: 648567 - protein, 16 aa, Homo sapiens
  CDR3 for alpha chain variable domain of TCR clone 324284 (TRAV20, TRAJ53)
CAVQGNSGGSNYKLTF

SEQ ID NO: 648568 - protein, 15 aa, Homo sapiens
  CDR3 for beta chain variable domain of TCR clone 324284 (TRBV19, TRBJ1-2)
CASSVGQVLNYGYTF

SEQ ID NO: 648569 - protein, 17 aa, Homo sapiens
  CDR3 for alpha chain variable domain of TCR clone 324285 (TRAV3, TRAJ6)
CAVRDGPRAGGSYITTF

SEQ ID NO: 648570 - protein, 15 aa, Homo sapiens
  CDR3 for beta chain variable domain of TCR clone 324285 (TRBV28, TRBJ2-1)
CASSIIAGGRSEQFF

SEQ ID NO: 648571 - protein, 12 aa, Homo sapiens
  CDR3 for alpha chain variable domain of TCR clone 324286 (TRAV2, TRAJ33)
CAFMDSNYQLIW

SEQ ID NO: 648572 - protein, 21 aa, Homo sapiens
  CDR3 for beta chain variable domain of TCR clone 324286 (TRBV7-2, TRBJ1-4)
RRTRPCISVPAASIHTVKLFF

SEQ ID NO: 648573 - protein, 12 aa, Homo sapiens
  CDR3 for alpha chain variable domain of TCR clone 324287 (TRAV13-1, TRAJ21)
CAAKEGFNKFYF

SEQ ID NO: 648574 - protein, 13 aa, Homo sapiens
  CDR3 for beta chain variable domain of TCR clone 324287 (TRBV19, TRBJ1-2)
CASSVPGQDGYAF

SEQ ID NO: 648575 - protein, 11 aa, Homo sapiens
  CDR3 for alpha chain variable domain of TCR clone 324288 (TRAV35, TRAJ34)
CWARNTDKLIF

SEQ ID NO: 648576 - protein, 13 aa, Homo sapiens
  CDR3 for beta chain variable domain of TCR clone 324288 (TRBV5-5, TRBJ1-2)
CASSFWRGEDYTF

SEQ ID NO: 648577 - protein, 12 aa, Homo sapiens
  CDR3 for alpha chain variable domain of TCR clone 324289 (TRAV21, TRAJ49)
CAVNDGGNQFYF

SEQ ID NO: 648578 - protein, 15 aa, Homo sapiens
  CDR3 for beta chain variable domain of TCR clone 324289 (TRBV28, TRBJ2-2)
CASKTGTTGAGELSF

SEQ ID NO: 648579 - protein, 18 aa, Homo sapiens
  CDR3 for alpha chain variable domain of TCR clone 324290 (TRAV12-2, )
CAVEDIQNPDPAVYQLRD

SEQ ID NO: 648580 - protein, 19 aa, Homo sapiens
  CDR3 for beta chain variable domain of TCR clone 324290 (TRBV2, TRBJ2-7)
CASSDDETSGRANDYEQYF

SEQ ID NO: 648581 - protein, 14 aa, Homo sapiens
  CDR3 for alpha chain variable domain of TCR clone 324291 (TRAV35, TRAJ22)
CAGLRPGSARQLTF

SEQ ID NO: 648582 - protein, 15 aa, Homo sapiens
  CDR3 for beta chain variable domain of TCR clone 324291 (TRBV12-4, TRBJ2-5)
CASSPPTGLQATQYF

SEQ ID NO: 648583 - protein, 16 aa, Homo sapiens
  CDR3 for alpha chain variable domain of TCR clone 324292 (TRAV30, TRAJ54)
CGTESQPLQGSQKLVF

SEQ ID NO: 648584 - protein, 15 aa, Homo sapiens
  CDR3 for beta chain variable domain of TCR clone 324292 (TRBV5-4, TRBJ2-7)
CASSLGAGGLYEQYF

SEQ ID NO: 648585 - protein, 15 aa, Homo sapiens
  CDR3 for alpha chain variable domain of TCR clone 324293 (TRAV3, TRAJ22)
CAVRDRRGSARQLTF

SEQ ID NO: 648586 - protein, 14 aa, Homo sapiens
  CDR3 for beta chain variable domain of TCR clone 324293 (TRBV19, TRBJ1-5)
CASSLGLIGQPQHF

SEQ ID NO: 648587 - protein, 15 aa, Homo sapiens
  CDR3 for alpha chain variable domain of TCR clone 324294 (TRAV3, TRAJ5)
CAVRAMDTGRRALTF

SEQ ID NO: 648588 - protein, 14 aa, Homo sapiens
  CDR3 for beta chain variable domain of TCR clone 324294 (TRBV18, TRBJ2-5)
CASSPGVSQETQYF

SEQ ID NO: 648589 - protein, 17 aa, Homo sapiens
  CDR3 for alpha chain variable domain of TCR clone 324295 (TRAV3, TRAJ6)
CAARDGPRAGGSYITTF

SEQ ID NO: 648590 - protein, 14 aa, Homo sapiens
  CDR3 for beta chain variable domain of TCR clone 324295 (TRBV7-2, TRBJ2-7)
CASSPKTSFYEQYF

SEQ ID NO: 648591 - protein, 18 aa, Homo sapiens
  CDR3 for alpha chain variable domain of TCR clone 324296 (TRAV26-2, TRAJ45)
CILRVDKYSGGGADGLPF

SEQ ID NO: 648592 - protein, 14 aa, Homo sapiens
  CDR3 for beta chain variable domain of TCR clone 324296 (TRBV7-2, TRBJ2-7)
CASRSQGAAYEQYF

SEQ ID NO: 648593 - protein, 15 aa, Homo sapiens
  CDR3 for alpha chain variable domain of TCR clone 324297 (TRAV14/DV4, TRAJ26)
CAMREGQNYGQNFGF

SEQ ID NO: 648594 - protein, 13 aa, Homo sapiens
  CDR3 for beta chain variable domain of TCR clone 324297 (TRBV24-1, TRBJ2-2)
CATSDWSTGELFL

SEQ ID NO: 648595 - protein, 12 aa, Homo sapiens
  CDR3 for alpha chain variable domain of TCR clone 324298 (TRAV21, TRAJ58)
FAAETSGSRLTF

SEQ ID NO: 648596 - protein, 15 aa, Homo sapiens
  CDR3 for beta chain variable domain of TCR clone 324298 (TRBV20-1, TRBJ2-7)
CSARDPVKGEGEQYF

SEQ ID NO: 648597 - protein, 13 aa, Homo sapiens
  CDR3 for alpha chain variable domain of TCR clone 324299 (TRAV12-2, TRAJ34)
CAVRGYNTDKIIF

SEQ ID NO: 648598 - protein, 18 aa, Homo sapiens
  CDR3 for beta chain variable domain of TCR clone 324299 (TRBV11-2, TRBJ2-3)
CASSLGGASRGAPNTQYF

SEQ ID NO: 648599 - protein, 16 aa, Homo sapiens
  CDR3 for alpha chain variable domain of TCR clone 324300 (TRAV30, TRAJ24)
CGTEIVDAVSWGKFQC

SEQ ID NO: 648600 - protein, 15 aa, Homo sapiens
  CDR3 for beta chain variable domain of TCR clone 324300 (TRBV12-4, TRBJ2-2)
CASSPNDSGTGELFF

SEQ ID NO: 648601 - protein, 15 aa, Homo sapiens
  CDR3 for alpha chain variable domain of TCR clone 324301 (TRAV21, TRAJ53)
CATLNSGGSNYKLTF

SEQ ID NO: 648602 - protein, 17 aa, Homo sapiens
  CDR3 for beta chain variable domain of TCR clone 324301 (TRBV20-1, TRBJ2-2)
CCASGSGQGGLTGELFF

SEQ ID NO: 648603 - protein, 14 aa, Homo sapiens
  CDR3 for alpha chain variable domain of TCR clone 324302 (TRAV26-1, TRAJ16)
CFAVPFSDGQKLLF

SEQ ID NO: 648604 - protein, 12 aa, Homo sapiens
  CDR3 for beta chain variable domain of TCR clone 324302 (TRBV4-2, TRBJ2-1)
CARSAQKNEQFF

SEQ ID NO: 648605 - protein, 16 aa, Homo sapiens
  CDR3 for alpha chain variable domain of TCR clone 324303 (TRAV38-1, TRAJ56)
CAFMKRQTGANSKLTF

SEQ ID NO: 648606 - protein, 15 aa, Homo sapiens
  CDR3 for beta chain variable domain of TCR clone 324303 (TRBV7-9, TRBJ2-1)
CASSLGWGRANEQFF

SEQ ID NO: 648607 - protein, 14 aa, Homo sapiens
  CDR3 for alpha chain variable domain of TCR clone 324304 (TRAV12-2, TRAJ13)
CSVKKTGGYQKVTF

SEQ ID NO: 648608 - protein, 14 aa, Homo sapiens
  CDR3 for beta chain variable domain of TCR clone 324304 (TRBV4-1, TRBJ2-2)
CASSQAVNTGELFF

SEQ ID NO: 648609 - protein, 14 aa, Homo sapiens
  CDR3 for alpha chain variable domain of TCR clone 324305 (TRAV9-2, TRAJ39)
CALYIYNAGNMLTF

SEQ ID NO: 648610 - protein, 15 aa, Homo sapiens
  CDR3 for beta chain variable domain of TCR clone 324305 (TRBV7-2, TRBJ2-1)
CASSLASGRVNEQFF

SEQ ID NO: 648611 - protein, 15 aa, Homo sapiens
  CDR3 for alpha chain variable domain of TCR clone 324306 (TRAV21, TRAJ40)
CAVRPQTSGTYIYIF

SEQ ID NO: 648612 - protein, 15 aa, Homo sapiens
  CDR3 for beta chain variable domain of TCR clone 324306 (TRBV5-1, TRBJ2-1)
CASSPPRAPYNEQSF

SEQ ID NO: 648613 - protein, 11 aa, Homo sapiens
  CDR3 for alpha chain variable domain of TCR clone 324307 (TRAV13-1, TRAJ6)
CATLGSYIPTF

SEQ ID NO: 648614 - protein, 13 aa, Homo sapiens
  CDR3 for beta chain variable domain of TCR clone 324307 (TRBV6-6, TRBJ2-1)
CASSLNQGAEQFF

SEQ ID NO: 648615 - protein, 14 aa, Homo sapiens
  CDR3 for alpha chain variable domain of TCR clone 324308 (TRAV8-4, TRAJ9)
CAVRINTGVFKTIF

SEQ ID NO: 648616 - protein, 15 aa, Homo sapiens
  CDR3 for beta chain variable domain of TCR clone 324308 (TRBV10-2, TRBJ2-6)
CASSEQGTGANVLTL

SEQ ID NO: 648617 - protein, 15 aa, Homo sapiens
  CDR3 for alpha chain variable domain of TCR clone 324309 (TRAV20, TRAJ23)
CAVQAVRNQGGKLNF

SEQ ID NO: 648618 - protein, 16 aa, Homo sapiens
  CDR3 for beta chain variable domain of TCR clone 324309 (TRBV27, TRBJ2-7)
CASSKQGRGWAYEQYF

SEQ ID NO: 648619 - protein, 17 aa, Homo sapiens
  CDR3 for alpha chain variable domain of TCR clone 324310 (TRAV4, TRAJ42)
CLVGVLNYGGSQGNLIF

SEQ ID NO: 648620 - protein, 12 aa, Homo sapiens
  CDR3 for beta chain variable domain of TCR clone 324310 (TRBV20-1, TRBJ2-1)
CSAQYTYIEQFF

SEQ ID NO: 648621 - protein, 20 aa, Homo sapiens
  CDR3 for alpha chain variable domain of TCR clone 324311 (TRAV13-1, )
CAASTMDIQNPDPAVYQLRD

SEQ ID NO: 648622 - protein, 13 aa, Homo sapiens
  CDR3 for beta chain variable domain of TCR clone 324311 (TRBV20-1, TRBJ2-2)
CSASAAGTGELFF

SEQ ID NO: 648623 - protein, 14 aa, Homo sapiens
  CDR3 for alpha chain variable domain of TCR clone 324312 (TRAV1-2, TRAJ16)
CAVNLFSDGQKLLF

SEQ ID NO: 648624 - protein, 13 aa, Homo sapiens
  CDR3 for beta chain variable domain of TCR clone 324312 (TRBV19, TRBJ1-2)
CASSVPGQDGYTF

SEQ ID NO: 648625 - protein, 12 aa, Homo sapiens
  CDR3 for alpha chain variable domain of TCR clone 324313 (TRAV4, TRAJ26)
CLVGDYGQNFVF

SEQ ID NO: 648626 - protein, 16 aa, Homo sapiens
  CDR3 for beta chain variable domain of TCR clone 324313 (TRBV19, TRBJ2-3)
CASSPGAASRTDTQYF

SEQ ID NO: 648627 - protein, 13 aa, Homo sapiens
  CDR3 for alpha chain variable domain of TCR clone 324314 (TRAV14/DV4, TRAJ23)
CAMIEVKGGKLSF

SEQ ID NO: 648628 - protein, 15 aa, Homo sapiens
  CDR3 for beta chain variable domain of TCR clone 324314 (TRBV6-3, TRBJ2-1)
CASSYASDSYNEQFF

SEQ ID NO: 648629 - protein, 13 aa, Homo sapiens
  CDR3 for alpha chain variable domain of TCR clone 324315 (TRAV29/DV5, TRAJ31)
CAASRNNNARLMF

SEQ ID NO: 648630 - protein, 13 aa, Homo sapiens
  CDR3 for beta chain variable domain of TCR clone 324315 (TRBV25-1, TRBJ2-7)
CASSEDGDYEQYF

SEQ ID NO: 648631 - protein, 13 aa, Homo sapiens
  CDR3 for alpha chain variable domain of TCR clone 324316 (TRAV35, TRAJ57)
CAGSQGGSEKLVF

SEQ ID NO: 648632 - protein, 15 aa, Homo sapiens
  CDR3 for beta chain variable domain of TCR clone 324316 (TRBV20-1, TRBJ2-7)
CSARDRFSGMDEQYF

SEQ ID NO: 648633 - protein, 12 aa, Homo sapiens
  CDR3 for alpha chain variable domain of TCR clone 324317 (TRAV21, TRAJ42)
CAVGGSQGNLIF

SEQ ID NO: 648634 - protein, 19 aa, Homo sapiens
  CDR3 for beta chain variable domain of TCR clone 324317 (TRBV5-1, TRBJ2-3)
CASSLTRNAADWSTDTQYF

SEQ ID NO: 648635 - protein, 14 aa, Homo sapiens
  CDR3 for alpha chain variable domain of TCR clone 324318 (TRAV8-3, TRAJ39)
CAVGANNAGNMLTF

SEQ ID NO: 648636 - protein, 15 aa, Homo sapiens
  CDR3 for beta chain variable domain of TCR clone 324318 (TRBV7-3, TRBJ2-1)
CASSPTGGGEVEQFF

SEQ ID NO: 648637 - protein, 14 aa, Homo sapiens
  CDR3 for alpha chain variable domain of TCR clone 324319 (TRAV8-4, TRAJ16)
WAVSPVGRWPEAAL

SEQ ID NO: 648638 - protein, 14 aa, Homo sapiens
  CDR3 for beta chain variable domain of TCR clone 324319 (TRBV23-1, TRBJ2-5)
CASSFLRSQETQYF

SEQ ID NO: 648639 - protein, 10 aa, Homo sapiens
  CDR3 for alpha chain variable domain of TCR clone 324320 (TRAV12-3, TRAJ49)
CAMNDDQFYF

SEQ ID NO: 648640 - protein, 17 aa, Homo sapiens
  CDR3 for beta chain variable domain of TCR clone 324320 (TRBV7-8, TRBJ2-6)
CASSAGTGGAGANVLNF

SEQ ID NO: 648641 - protein, 12 aa, Homo sapiens
  CDR3 for alpha chain variable domain of TCR clone 324321 (TRAV16, TRAJ10)
CSRTGGGNKLTF

SEQ ID NO: 648642 - protein, 15 aa, Homo sapiens
  CDR3 for beta chain variable domain of TCR clone 324321 (TRBV28, TRBJ2-7)
CASSPGGRGFYEQYF

SEQ ID NO: 648643 - protein, 13 aa, Homo sapiens
  CDR3 for alpha chain variable domain of TCR clone 324322 (TRAV12-3, TRAJ13)
CATSSGGYQKVTF

SEQ ID NO: 648644 - protein, 17 aa, Homo sapiens
  CDR3 for beta chain variable domain of TCR clone 324322 (TRBV4-1, TRBJ1-4)
CASSQEGPRGVEEKLFF

SEQ ID NO: 648645 - protein, 15 aa, Homo sapiens
  CDR3 for alpha chain variable domain of TCR clone 324323 (TRAV2, TRAJ15)
CAVGGHNQAGTALIF

SEQ ID NO: 648646 - protein, 13 aa, Homo sapiens
  CDR3 for beta chain variable domain of TCR clone 324323 (TRBV2, TRBJ1-5)
CATAGPGNQPQHF

SEQ ID NO: 648647 - protein, 13 aa, Homo sapiens
  CDR3 for alpha chain variable domain of TCR clone 324324 (TRAV12-3, TRAJ46)
CAMKKSSGDKLTF

SEQ ID NO: 648648 - protein, 17 aa, Homo sapiens
  CDR3 for beta chain variable domain of TCR clone 324324 (TRBV3-1, TRBJ2-5)
CASSQGLAGMYQETQYV

SEQ ID NO: 648649 - protein, 12 aa, Homo sapiens
  CDR3 for alpha chain variable domain of TCR clone 324325 (TRAV27, TRAJ9)
CAGESGGFKTIF

SEQ ID NO: 648650 - protein, 16 aa, Homo sapiens
  CDR3 for beta chain variable domain of TCR clone 324325 (TRBV12-4, TRBJ2-7)
CASSLIGGTGTYEQYF

SEQ ID NO: 648651 - protein, 14 aa, Homo sapiens
  CDR3 for alpha chain variable domain of TCR clone 324326 (TRAV12-2, TRAJ45)
CAAYSGGGADGLTF

SEQ ID NO: 648652 - protein, 14 aa, Homo sapiens
  CDR3 for beta chain variable domain of TCR clone 324326 (TRBV18, TRBJ2-7)
CASSPRGGAYEQYF

SEQ ID NO: 648653 - protein, 16 aa, Homo sapiens
  CDR3 for alpha chain variable domain of TCR clone 324327 (TRAV8-3, TRAJ42)
CAVGEGNGGSQGNLIF

SEQ ID NO: 648654 - protein, 13 aa, Homo sapiens
  CDR3 for beta chain variable domain of TCR clone 324327 (TRBV10-2, TRBJ2-7)
CASSEGQYYEQYF

SEQ ID NO: 648655 - protein, 13 aa, Homo sapiens
  CDR3 for alpha chain variable domain of TCR clone 324328 (TRAV12-3, TRAJ6)
CANPSGGSYIPTF

SEQ ID NO: 648656 - protein, 14 aa, Homo sapiens
  CDR3 for beta chain variable domain of TCR clone 324328 (TRBV19, TRBJ1-1)
CASSRDSDATEAFF

SEQ ID NO: 648657 - protein, 15 aa, Homo sapiens
  CDR3 for alpha chain variable domain of TCR clone 324329 (TRAV27, TRAJ38)
FAARRNAGNNRKLMW

SEQ ID NO: 648658 - protein, 13 aa, Homo sapiens
  CDR3 for beta chain variable domain of TCR clone 324329 (TRBV12-5, TRBJ2-3)
CASGDRQSDTQYF

SEQ ID NO: 648659 - protein, 14 aa, Homo sapiens
  CDR3 for alpha chain variable domain of TCR clone 324330 (TRAV12-2, TRAJ44)
CAVNPAGTASKLAF

SEQ ID NO: 648660 - protein, 13 aa, Homo sapiens
  CDR3 for beta chain variable domain of TCR clone 324330 (TRBV20-1, TRBJ1-6)
CSAPLGVGSHLHF

SEQ ID NO: 648661 - protein, 14 aa, Homo sapiens
  CDR3 for alpha chain variable domain of TCR clone 324331 (TRAV26-1, TRAJ31)
CIALPPNNNARLMF

SEQ ID NO: 648662 - protein, 12 aa, Homo sapiens
  CDR3 for beta chain variable domain of TCR clone 324331 (TRBV11-2, TRBJ2-2)
CASSLPTGELFF

SEQ ID NO: 648663 - protein, 17 aa, Homo sapiens
  CDR3 for alpha chain variable domain of TCR clone 324332 (TRAV26-2, TRAJ28)
CILRPLLIVAGSYQLTF

SEQ ID NO: 648664 - protein, 12 aa, Homo sapiens
  CDR3 for beta chain variable domain of TCR clone 324332 (TRBV11-2, TRBJ2-2)
CASSLGGGELFF

SEQ ID NO: 648665 - protein, 14 aa, Homo sapiens
  CDR3 for alpha chain variable domain of TCR clone 324333 (TRAV1-2, TRAJ8)
CALREDTGFQKLVF

SEQ ID NO: 648666 - protein, 15 aa, Homo sapiens
  CDR3 for beta chain variable domain of TCR clone 324333 (TRBV7-3, TRBJ2-2)
CASSETGQGTGELFF

SEQ ID NO: 648667 - protein, 10 aa, Homo sapiens
  CDR3 for alpha chain variable domain of TCR clone 324334 (TRAV5, TRAJ34)
CAEDTDKLIF

SEQ ID NO: 648668 - protein, 17 aa, Homo sapiens
  CDR3 for beta chain variable domain of TCR clone 324334 (TRBV13, TRBJ2-3)
CASSLSRVAGGRNTQYF

SEQ ID NO: 648669 - protein, 11 aa, Homo sapiens
  CDR3 for alpha chain variable domain of TCR clone 324335 (TRAV35, TRAJ30)
CAPGGDDKIIF

SEQ ID NO: 648670 - protein, 14 aa, Homo sapiens
  CDR3 for beta chain variable domain of TCR clone 324335 (TRBV7-2, TRBJ2-7)
CASSPKTSFYEQYF

SEQ ID NO: 648671 - protein, 11 aa, Homo sapiens
  CDR3 for alpha chain variable domain of TCR clone 324336 (TRAV13-1, TRAJ6)
CATLGSYRPTF

SEQ ID NO: 648672 - protein, 12 aa, Homo sapiens
  CDR3 for beta chain variable domain of TCR clone 324336 (TRBV11-2, TRBJ2-1)
CASSPGNNEQFF

SEQ ID NO: 648673 - protein, 14 aa, Homo sapiens
  CDR3 for alpha chain variable domain of TCR clone 324337 (TRAV17, TRAJ57)
CATDPRGGSEKLVF

SEQ ID NO: 648674 - protein, 14 aa, Homo sapiens
  CDR3 for beta chain variable domain of TCR clone 324337 (TRBV7-2, TRBJ2-7)
CASSPKTGFYEQYF

SEQ ID NO: 648675 - protein, 13 aa, Homo sapiens
  CDR3 for alpha chain variable domain of TCR clone 324338 (TRAV12-2, TRAJ39)
CAVNNNAGNMLTF

SEQ ID NO: 648676 - protein, 19 aa, Homo sapiens
  CDR3 for beta chain variable domain of TCR clone 324338 (TRBV2, TRBJ2-2)
CASSQPGRAGGGNTGELFF

SEQ ID NO: 648677 - protein, 15 aa, Homo sapiens
  CDR3 for alpha chain variable domain of TCR clone 324339 (TRAV8-4, TRAJ6)
CAVSAPSGGSYIPTF

SEQ ID NO: 648678 - protein, 15 aa, Homo sapiens
  CDR3 for beta chain variable domain of TCR clone 324339 (TRBV7-3, TRBJ2-2)
CASNANGANTGELFF

SEQ ID NO: 648679 - protein, 15 aa, Homo sapiens
  CDR3 for alpha chain variable domain of TCR clone 324340 (TRAV25, TRAJ53)
CPTSNSGGSTYKLTF

SEQ ID NO: 648680 - protein, 15 aa, Homo sapiens
  CDR3 for beta chain variable domain of TCR clone 324340 (TRBV6-4, TRBJ2-7)
CASSDQGPPNYEQYF

SEQ ID NO: 648681 - protein, 15 aa, Homo sapiens
  CDR3 for alpha chain variable domain of TCR clone 324341 (TRAV3, TRAJ5)
CAVRDRKTGRRAHTF

SEQ ID NO: 648682 - protein, 15 aa, Homo sapiens
  CDR3 for beta chain variable domain of TCR clone 324341 (TRBV7-8, TRBJ2-1)
CASSLADSLYNEQFF

SEQ ID NO: 648683 - protein, 19 aa, Homo sapiens
  CDR3 for alpha chain variable domain of TCR clone 324342 (TRAV36/DV7, TRAJ23)
CAVEARESLSSDRERSYLL

SEQ ID NO: 648684 - protein, 14 aa, Homo sapiens
  CDR3 for beta chain variable domain of TCR clone 324342 (TRBV5-1, TRBJ2-3)
CASRGQTSTDTQYF

SEQ ID NO: 648685 - protein, 15 aa, Homo sapiens
  CDR3 for alpha chain variable domain of TCR clone 324343 (TRAV2, TRAJ22)
CAVPSRGGSARQLTF

SEQ ID NO: 648686 - protein, 14 aa, Homo sapiens
  CDR3 for beta chain variable domain of TCR clone 324343 (TRBV7-6, TRBJ2-3)
CASSLRTVTDTQYF

SEQ ID NO: 648687 - protein, 15 aa, Homo sapiens
  CDR3 for alpha chain variable domain of TCR clone 324344 (TRAV12-1, TRAJ4)
CVVNGFSGGYNKLIF

SEQ ID NO: 648688 - protein, 18 aa, Homo sapiens
  CDR3 for beta chain variable domain of TCR clone 324344 (TRBV11-2, TRBJ2-3)
CASSLGGASRGAPNTQYF

SEQ ID NO: 648689 - protein, 12 aa, Homo sapiens
  CDR3 for alpha chain variable domain of TCR clone 324345 (TRAV26-1, TRAJ43)
CIVRPRGDDMRF

SEQ ID NO: 648690 - protein, 14 aa, Homo sapiens
  CDR3 for beta chain variable domain of TCR clone 324345 (TRBV18, TRBJ2-3)
CASSRDRGTDTQYF

SEQ ID NO: 648691 - protein, 16 aa, Homo sapiens
  CDR3 for alpha chain variable domain of TCR clone 324346 (TRAV30, TRAJ24)
CGTEIVDADSWGKFQF

SEQ ID NO: 648692 - protein, 14 aa, Homo sapiens
  CDR3 for beta chain variable domain of TCR clone 324346 (TRBV7-9, TRBJ2-4)
CASSSAMGGNIQYF

SEQ ID NO: 648693 - protein, 16 aa, Homo sapiens
  CDR3 for alpha chain variable domain of TCR clone 324347 (TRAV8-3, TRAJ22)
CAVDLLGPGSARQLTF

SEQ ID NO: 648694 - protein, 14 aa, Homo sapiens
  CDR3 for beta chain variable domain of TCR clone 324347 (TRBV11-2, TRBJ2-7)
CTSSLELEGYEQYF

SEQ ID NO: 648695 - protein, 16 aa, Homo sapiens
  CDR3 for alpha chain variable domain of TCR clone 324348 (TRAV12-1, TRAJ53)
CVVTSVAGGSNYKLTF

SEQ ID NO: 648696 - protein, 15 aa, Homo sapiens
  CDR3 for beta chain variable domain of TCR clone 324348 (TRBV5-1, TRBJ2-3)
CASSVTSGSTDTQYF

SEQ ID NO: 648697 - protein, 13 aa, Homo sapiens
  CDR3 for alpha chain variable domain of TCR clone 324349 (TRAV21, TRAJ26)
CAVLDNYGQNFVF

SEQ ID NO: 648698 - protein, 13 aa, Homo sapiens
  CDR3 for beta chain variable domain of TCR clone 324349 (TRBV13, TRBJ2-1)
CASILGGRGEQFF

SEQ ID NO: 648699 - protein, 15 aa, Homo sapiens
  CDR3 for alpha chain variable domain of TCR clone 324350 (TRAV26-1, TRAJ29)
CIVRVEGSGNTPLVF

SEQ ID NO: 648700 - protein, 13 aa, Homo sapiens
  CDR3 for beta chain variable domain of TCR clone 324350 (TRBV7-2, TRBJ1-1)
CASNLKGAKVAFF

SEQ ID NO: 648701 - protein, 18 aa, Homo sapiens
  CDR3 for alpha chain variable domain of TCR clone 324351 (TRAV21, TRAJ52)
CAVRPSPAGGTSYGKLTF

SEQ ID NO: 648702 - protein, 13 aa, Homo sapiens
  CDR3 for beta chain variable domain of TCR clone 324351 (TRBV19, TRBJ1-2)
RASSVPGQDGYTF

SEQ ID NO: 648703 - protein, 14 aa, Homo sapiens
  CDR3 for alpha chain variable domain of TCR clone 324352 (TRAV21, TRAJ36)
CAVPDQTGANNLFF

SEQ ID NO: 648704 - protein, 14 aa, Homo sapiens
  CDR3 for beta chain variable domain of TCR clone 324352 (TRBV19, TRBJ2-1)
CASPTFVLSGEQFF

SEQ ID NO: 648705 - protein, 13 aa, Homo sapiens
  CDR3 for alpha chain variable domain of TCR clone 324353 (TRAV12-2, TRAJ37)
CAGGSGNKGKLIF

SEQ ID NO: 648706 - protein, 14 aa, Homo sapiens
  CDR3 for beta chain variable domain of TCR clone 324353 (TRBV6-1, TRBJ2-6)
CASQQGAGANVLTF

SEQ ID NO: 648707 - protein, 16 aa, Homo sapiens
  CDR3 for alpha chain variable domain of TCR clone 324354 (TRAV3, TRAJ37)
CAVRGKGSGNTGKLIF

SEQ ID NO: 648708 - protein, 13 aa, Homo sapiens
  CDR3 for beta chain variable domain of TCR clone 324354 (TRBV19, TRBJ1-2)
CASSVPEQDGYTF

SEQ ID NO: 648709 - protein, 12 aa, Homo sapiens
  CDR3 for alpha chain variable domain of TCR clone 324355 (TRAV13-1, TRAJ15)
CAASQAGTALIF

SEQ ID NO: 648710 - protein, 18 aa, Homo sapiens
  CDR3 for beta chain variable domain of TCR clone 324355 (TRBV7-9, TRBJ2-3)
CASILPINGQISTDTQYF

SEQ ID NO: 648711 - protein, 14 aa, Homo sapiens
  CDR3 for alpha chain variable domain of TCR clone 324356 (TRAV17, TRAJ57)
CATDHQGGSEKLVF

SEQ ID NO: 648712 - protein, 18 aa, Homo sapiens
  CDR3 for beta chain variable domain of TCR clone 324356 (TRBV20-1, TRBJ2-3)
CSASGLAGGAGTTETQYF

SEQ ID NO: 648713 - protein, 18 aa, Homo sapiens
  CDR3 for alpha chain variable domain of TCR clone 324357 (TRAV21, TRAJ52)
CAVRPSPAGGTSYGTPTF

SEQ ID NO: 648714 - protein, 13 aa, Homo sapiens
  CDR3 for beta chain variable domain of TCR clone 324357 (TRBV7-3, TRBJ1-1)
CASSQDWGAEAFF

SEQ ID NO: 648715 - protein, 13 aa, Homo sapiens
  CDR3 for alpha chain variable domain of TCR clone 324358 (TRAV1-2, TRAJ9)
CAALNTGGFKTIF

SEQ ID NO: 648716 - protein, 13 aa, Homo sapiens
  CDR3 for beta chain variable domain of TCR clone 324358 (TRBV12-4, TRBJ1-2)
CASSLDSNYGYNF

SEQ ID NO: 648717 - protein, 15 aa, Homo sapiens
  CDR3 for alpha chain variable domain of TCR clone 324359 (TRAV13-1, TRAJ43)
CAATPELGGNNDMRF

SEQ ID NO: 648718 - protein, 15 aa, Homo sapiens
  CDR3 for beta chain variable domain of TCR clone 324359 (TRBV10-2, TRBJ2-6)
CASSEQGTGANVLSF

SEQ ID NO: 648719 - protein, 14 aa, Homo sapiens
  CDR3 for alpha chain variable domain of TCR clone 324360 (TRAV12-2, TRAJ5)
CAVNRSTGRRALTF

SEQ ID NO: 648720 - protein, 17 aa, Homo sapiens
  CDR3 for beta chain variable domain of TCR clone 324360 (TRBV7-3, TRBJ2-2)
CASSLSGTSGGTGELSF

SEQ ID NO: 648721 - protein, 10 aa, Homo sapiens
  CDR3 for alpha chain variable domain of TCR clone 324361 (TRAV12-1, TRAJ43)
CVVHNNDMRF

SEQ ID NO: 648722 - protein, 12 aa, Homo sapiens
  CDR3 for beta chain variable domain of TCR clone 324361 (TRBV7-9, TRBJ2-7)
CASSLFDYEQYF

SEQ ID NO: 648723 - protein, 12 aa, Homo sapiens
  CDR3 for alpha chain variable domain of TCR clone 324362 (TRAV26-1, TRAJ26)
CIVCNYGQNFVF

SEQ ID NO: 648724 - protein, 14 aa, Homo sapiens
  CDR3 for beta chain variable domain of TCR clone 324362 (TRBV4-2, TRBJ2-1)
CASGLDRAYNEQFF

SEQ ID NO: 648725 - protein, 11 aa, Homo sapiens
  CDR3 for alpha chain variable domain of TCR clone 324363 (TRAV13-1, TRAJ6)
CATLGSYIPTF

SEQ ID NO: 648726 - protein, 13 aa, Homo sapiens
  CDR3 for beta chain variable domain of TCR clone 324363 (TRBV20-1, TRBJ1-1)
CSARGGGNTEAFF

SEQ ID NO: 648727 - protein, 15 aa, Homo sapiens
  CDR3 for alpha chain variable domain of TCR clone 324364 (TRAV8-3, TRAJ27)
CAVGPSKTNAGKSTF

SEQ ID NO: 648728 - protein, 13 aa, Homo sapiens
  CDR3 for beta chain variable domain of TCR clone 324364 (TRBV7-2, TRBJ2-2)
CASSSVRAGELFF

SEQ ID NO: 648729 - protein, 16 aa, Homo sapiens
  CDR3 for alpha chain variable domain of TCR clone 324365 (TRAV30, TRAJ24)
CGTEIVDADSWGKFQF

SEQ ID NO: 648730 - protein, 15 aa, Homo sapiens
  CDR3 for beta chain variable domain of TCR clone 324365 (TRBV5-8, TRBJ1-2)
CASSVGTGSRRGYTF

SEQ ID NO: 648731 - protein, 12 aa, Homo sapiens
  CDR3 for alpha chain variable domain of TCR clone 324366 (TRAV12-2, TRAJ6)
CAVKVGSYIPTF

SEQ ID NO: 648732 - protein, 14 aa, Homo sapiens
  CDR3 for beta chain variable domain of TCR clone 324366 (TRBV7-9, TRBJ2-2)
CASSGLADTGELFF

SEQ ID NO: 648733 - protein, 15 aa, Homo sapiens
  CDR3 for alpha chain variable domain of TCR clone 324367 (TRAV34, TRAJ38)
CGADFTPGNNRKLIW

SEQ ID NO: 648734 - protein, 14 aa, Homo sapiens
  CDR3 for beta chain variable domain of TCR clone 324367 (TRBV7-2, TRBJ2-7)
CASSPKTSSYEQYF

SEQ ID NO: 648735 - protein, 12 aa, Homo sapiens
  CDR3 for alpha chain variable domain of TCR clone 324368 (TRAV13-1, TRAJ21)
CAAKEGFNKFYF

SEQ ID NO: 648736 - protein, 16 aa, Homo sapiens
  CDR3 for beta chain variable domain of TCR clone 324368 (TRBV6-1, TRBJ2-5)
CASSETLDRVAETQYF

SEQ ID NO: 648737 - protein, 15 aa, Homo sapiens
  CDR3 for alpha chain variable domain of TCR clone 324369 (TRAV8-1, TRAJ6)
CAGNAGAGGSYIPTF

SEQ ID NO: 648738 - protein, 14 aa, Homo sapiens
  CDR3 for beta chain variable domain of TCR clone 324369 (TRBV25-1, TRBJ1-6)
CASSLSADISPLHF

SEQ ID NO: 648739 - protein, 19 aa, Homo sapiens
  CDR3 for alpha chain variable domain of TCR clone 324370 (TRAV1-2, TRAJ26)
CLLPLCCERPDNYGQNFVF

SEQ ID NO: 648740 - protein, 15 aa, Homo sapiens
  CDR3 for beta chain variable domain of TCR clone 324370 (TRBV12-4, TRBJ2-5)
CASSPPTGLQETQYF

SEQ ID NO: 648741 - protein, 12 aa, Homo sapiens
  CDR3 for alpha chain variable domain of TCR clone 324371 (TRAV38-2/DV8, TRAJ47)
CVLMEYGNKLVF

SEQ ID NO: 648742 - protein, 14 aa, Homo sapiens
  CDR3 for beta chain variable domain of TCR clone 324371 (TRBV20-1, TRBJ1-5)
CSATDRDSNQPQHF

SEQ ID NO: 648743 - protein, 14 aa, Homo sapiens
  CDR3 for alpha chain variable domain of TCR clone 324372 (TRAV12-3, TRAJ9)
CAMSPNTGGFKPIF

SEQ ID NO: 648744 - protein, 15 aa, Homo sapiens
  CDR3 for beta chain variable domain of TCR clone 324372 (TRBV15, TRBJ1-5)
CATSREQGGNQPQHF

SEQ ID NO: 648745 - protein, 13 aa, Homo sapiens
  CDR3 for alpha chain variable domain of TCR clone 324373 (TRAV8-2, TRAJ43)
CVVSDQGDNDMRI

SEQ ID NO: 648746 - protein, 12 aa, Homo sapiens
  CDR3 for beta chain variable domain of TCR clone 324373 (TRBV7-9, TRBJ2-7)
CASRTGFDEQYF

SEQ ID NO: 648747 - protein, 11 aa, Homo sapiens
  CDR3 for alpha chain variable domain of TCR clone 324374 (TRAV2, TRAJ33)
CAVDSNYQLIW

SEQ ID NO: 648748 - protein, 16 aa, Homo sapiens
  CDR3 for beta chain variable domain of TCR clone 324374 (TRBV27, TRBJ2-2)
CASSLRPGGAPGELFF

SEQ ID NO: 648749 - protein, 14 aa, Homo sapiens
  CDR3 for alpha chain variable domain of TCR clone 324375 (TRAV4, TRAJ17)
CLVGDMAAGNKLTF

SEQ ID NO: 648750 - protein, 17 aa, Homo sapiens
  CDR3 for beta chain variable domain of TCR clone 324375 (TRBV7-2, TRBJ1-2)
CASSSRAGRGIVYGYTF

SEQ ID NO: 648751 - protein, 13 aa, Homo sapiens
  CDR3 for alpha chain variable domain of TCR clone 324376 (TRAV8-3, TRAJ43)
FAVGPDNNNDMRF

SEQ ID NO: 648752 - protein, 14 aa, Homo sapiens
  CDR3 for beta chain variable domain of TCR clone 324376 (TRBV19, TRBJ2-1)
CASPTFVLSGEQFF

SEQ ID NO: 648753 - protein, 12 aa, Homo sapiens
  CDR3 for alpha chain variable domain of TCR clone 324377 (TRAV26-1, TRAJ17)
CIVRSAGNKLTF

SEQ ID NO: 648754 - protein, 15 aa, Homo sapiens
  CDR3 for beta chain variable domain of TCR clone 324377 (TRBV7-6, TRBJ1-2)
CASSSGGRGGYGYTV

SEQ ID NO: 648755 - protein, 16 aa, Homo sapiens
  CDR3 for alpha chain variable domain of TCR clone 324378 (TRAV12-1, TRAJ12)
CVVNTLLMDSSYKLIF

SEQ ID NO: 648756 - protein, 13 aa, Homo sapiens
  CDR3 for beta chain variable domain of TCR clone 324378 (TRBV14, TRBJ2-7)
CARSQDRRYEQYF

SEQ ID NO: 648757 - protein, 14 aa, Homo sapiens
  CDR3 for alpha chain variable domain of TCR clone 324379 (TRAV17, TRAJ42)
CATAGGGSQGNLIF

SEQ ID NO: 648758 - protein, 14 aa, Homo sapiens
  CDR3 for beta chain variable domain of TCR clone 324379 (TRBV7-2, TRBJ2-3)
CASRFSRPSATQYF

SEQ ID NO: 648759 - protein, 20 aa, Homo sapiens
  CDR3 for alpha chain variable domain of TCR clone 324380 (TRAV8-3, TRAJ45)
LSTSVLWGSYSGGGADVLTF

SEQ ID NO: 648760 - protein, 11 aa, Homo sapiens
  CDR3 for beta chain variable domain of TCR clone 324380 (TRBV20-1, TRBJ2-5)
CSADRAETQYF

SEQ ID NO: 648761 - protein, 13 aa, Homo sapiens
  CDR3 for alpha chain variable domain of TCR clone 324381 (TRAV2, TRAJ15)
CAVASQAGTALIF

SEQ ID NO: 648762 - protein, 17 aa, Homo sapiens
  CDR3 for beta chain variable domain of TCR clone 324381 (TRBV25-1, TRBJ2-1)
CASSAYGQGRGVYEQFF

SEQ ID NO: 648763 - protein, 13 aa, Homo sapiens
  CDR3 for alpha chain variable domain of TCR clone 324382 (TRAV2, TRAJ34)
CAVEEDNTDKLIF

SEQ ID NO: 648764 - protein, 12 aa, Homo sapiens
  CDR3 for beta chain variable domain of TCR clone 324382 (TRBV7-8, TRBJ2-7)
CASSLGDREQYF

SEQ ID NO: 648765 - protein, 12 aa, Homo sapiens
  CDR3 for alpha chain variable domain of TCR clone 324383 (TRAV16, TRAJ10)
CSRTGGGNKLTF

SEQ ID NO: 648766 - protein, 16 aa, Homo sapiens
  CDR3 for beta chain variable domain of TCR clone 324383 (TRBV7-3, TRBJ2-2)
CASSLERGTLSGELFF

SEQ ID NO: 648767 - protein, 15 aa, Homo sapiens
  CDR3 for alpha chain variable domain of TCR clone 324384 (TRAV23/DV6, TRAJ12)
CAAIDLGAMDSSYKL

SEQ ID NO: 648768 - protein, 11 aa, Homo sapiens
  CDR3 for beta chain variable domain of TCR clone 324384 (TRBV10-3, TRBJ2-2)
CHQGKHRGAVF

SEQ ID NO: 648769 - protein, 13 aa, Homo sapiens
  CDR3 for alpha chain variable domain of TCR clone 324385 (TRAV27, TRAJ8)
CAGGPTGFQKLVF

SEQ ID NO: 648770 - protein, 15 aa, Homo sapiens
  CDR3 for beta chain variable domain of TCR clone 324385 (TRBV10-1, TRBJ2-3)
CASSATSGGFDTQYF

SEQ ID NO: 648771 - protein, 11 aa, Homo sapiens
  CDR3 for alpha chain variable domain of TCR clone 324386 (TRAV19, TRAJ33)
CARDSNYQLIS

SEQ ID NO: 648772 - protein, 17 aa, Homo sapiens
  CDR3 for beta chain variable domain of TCR clone 324386 (TRBV7-3, TRBJ2-3)
CASSLMKRMRGADTQYF

SEQ ID NO: 648773 - protein, 15 aa, Homo sapiens
  CDR3 for alpha chain variable domain of TCR clone 324387 (TRAV38-1, TRAJ37)
CAFIHGSGNTGKLIF

SEQ ID NO: 648774 - protein, 16 aa, Homo sapiens
  CDR3 for beta chain variable domain of TCR clone 324387 (TRBV12-4, TRBJ1-5)
CASSRPVGGSNQPQHF

SEQ ID NO: 648775 - protein, 17 aa, Homo sapiens
  CDR3 for alpha chain variable domain of TCR clone 324388 (TRAV3, TRAJ38)
CAVRGCLNAGNTRKLIW

SEQ ID NO: 648776 - protein, 16 aa, Homo sapiens
  CDR3 for beta chain variable domain of TCR clone 324388 (TRBV20-1, TRBJ1-4)
CSAPGQGLLTNEKLFF

SEQ ID NO: 648777 - protein, 11 aa, Homo sapiens
  CDR3 for alpha chain variable domain of TCR clone 324389 (TRAV3, TRAJ21)
CAVGNFNKFYF

SEQ ID NO: 648778 - protein, 16 aa, Homo sapiens
  CDR3 for beta chain variable domain of TCR clone 324389 (TRBV19, TRBJ2-1)
CASGEAGPSSYNEQFF

SEQ ID NO: 648779 - protein, 14 aa, Homo sapiens
  CDR3 for alpha chain variable domain of TCR clone 324390 (TRAV12-3, TRAJ29)
CAMIFLSGNTPLVF

SEQ ID NO: 648780 - protein, 16 aa, Homo sapiens
  CDR3 for beta chain variable domain of TCR clone 324390 (TRBV28, TRBJ2-7)
CASSSGTSGGGYEQYF

SEQ ID NO: 648781 - protein, 13 aa, Homo sapiens
  CDR3 for alpha chain variable domain of TCR clone 324391 (TRAV12-3, TRAJ40)
CAMSARGTYKYFF

SEQ ID NO: 648782 - protein, 16 aa, Homo sapiens
  CDR3 for beta chain variable domain of TCR clone 324391 (TRBV20-1, TRBJ2-3)
CSGEAGLAGGQDTQYF

SEQ ID NO: 648783 - protein, 16 aa, Homo sapiens
  CDR3 for alpha chain variable domain of TCR clone 324392 (TRAV2, TRAJ26)
TTVLGPPGDYGQNFVF

SEQ ID NO: 648784 - protein, 13 aa, Homo sapiens
  CDR3 for beta chain variable domain of TCR clone 324392 (TRBV12-4, TRBJ1-1)
CASSPGTGFEAFF

SEQ ID NO: 648785 - protein, 12 aa, Homo sapiens
  CDR3 for alpha chain variable domain of TCR clone 324393 (TRAV13-2, TRAJ23)
CAERHRGGKLIF

SEQ ID NO: 648786 - protein, 13 aa, Homo sapiens
  CDR3 for beta chain variable domain of TCR clone 324393 (TRBV7-9, TRBJ2-3)
FASSPGSTDTQYF

SEQ ID NO: 648787 - protein, 15 aa, Homo sapiens
  CDR3 for alpha chain variable domain of TCR clone 324394 (TRAV8-1, TRAJ42)
CAVTNYGGSQGNLIF

SEQ ID NO: 648788 - protein, 14 aa, Homo sapiens
  CDR3 for beta chain variable domain of TCR clone 324394 (TRBV20-1, TRBJ2-5)
CSARDGRAGETQYF

SEQ ID NO: 648789 - protein, 13 aa, Homo sapiens
  CDR3 for alpha chain variable domain of TCR clone 324395 (TRAV36/DV7, TRAJ53)
CALSGGSNYKLTF

SEQ ID NO: 648790 - protein, 13 aa, Homo sapiens
  CDR3 for beta chain variable domain of TCR clone 324395 (TRBV28, TRBJ2-4)
CASSQSSKNIQFF

SEQ ID NO: 648791 - protein, 15 aa, Homo sapiens
  CDR3 for alpha chain variable domain of TCR clone 324396 (TRAV10, TRAJ43)
CVVSAGRSNNNDMRF

SEQ ID NO: 648792 - protein, 14 aa, Homo sapiens
  CDR3 for beta chain variable domain of TCR clone 324396 (TRBV18, TRBJ1-2)
CASSPDRVVYGYTF

SEQ ID NO: 648793 - protein, 14 aa, Homo sapiens
  CDR3 for alpha chain variable domain of TCR clone 324397 (TRAV8-4, TRAJ5)
CAVSTDTGRRALTF

SEQ ID NO: 648794 - protein, 12 aa, Homo sapiens
  CDR3 for beta chain variable domain of TCR clone 324397 (TRBV7-8, TRBJ2-7)
CASSLGDREQYF

SEQ ID NO: 648795 - protein, 13 aa, Homo sapiens
  CDR3 for alpha chain variable domain of TCR clone 324398 (TRAV35, TRAJ21)
CAGQLSNFNKFYF

SEQ ID NO: 648796 - protein, 16 aa, Homo sapiens
  CDR3 for beta chain variable domain of TCR clone 324398 (TRBV12-5, TRBJ2-5)
CASGPRTSGNQDTQYV

SEQ ID NO: 648797 - protein, 22 aa, Homo sapiens
  CDR3 for alpha chain variable domain of TCR clone 324399 (TRAV12-2, TRAJ53)
SPVIQPPTSVPPILSSNFKLTF

SEQ ID NO: 648798 - protein, 13 aa, Homo sapiens
  CDR3 for beta chain variable domain of TCR clone 324399 (TRBV7-7, TRBJ2-3)
CASSLSRADTQYF

SEQ ID NO: 648799 - protein, 12 aa, Homo sapiens
  CDR3 for alpha chain variable domain of TCR clone 324400 (TRAV12-3, TRAJ42)
CAPGGSLGNLIF

SEQ ID NO: 648800 - protein, 15 aa, Homo sapiens
  CDR3 for beta chain variable domain of TCR clone 324400 (TRBV28, TRBJ2-5)
CASSSGRVIQETQYF

SEQ ID NO: 648801 - protein, 13 aa, Homo sapiens
  CDR3 for alpha chain variable domain of TCR clone 324401 (TRAV2, TRAJ40)
CVVVTSGTYKYIF

SEQ ID NO: 648802 - protein, 15 aa, Homo sapiens
  CDR3 for beta chain variable domain of TCR clone 324401 (TRBV7-9, TRBJ1-6)
CASSSPGRGNSPLHF

SEQ ID NO: 648803 - protein, 14 aa, Homo sapiens
  CDR3 for alpha chain variable domain of TCR clone 324402 (TRAV1-2, TRAJ16)
CAVNLFSDGQKLLF

SEQ ID NO: 648804 - protein, 14 aa, Homo sapiens
  CDR3 for beta chain variable domain of TCR clone 324402 (TRBV19, TRBJ2-7)
CASSVYSESYEQYF

SEQ ID NO: 648805 - protein, 14 aa, Homo sapiens
  CDR3 for alpha chain variable domain of TCR clone 324403 (TRAV3, TRAJ21)
CAVRDPYNFNKFYF

SEQ ID NO: 648806 - protein, 19 aa, Homo sapiens
  CDR3 for beta chain variable domain of TCR clone 324403 (TRBV19, TRBJ2-5)
CASSIGQVTDFFLGETQYF

SEQ ID NO: 648807 - protein, 13 aa, Homo sapiens
  CDR3 for alpha chain variable domain of TCR clone 324404 (TRAV13-2, TRAJ48)
CAEMDFGNEKLTF

SEQ ID NO: 648808 - protein, 14 aa, Homo sapiens
  CDR3 for beta chain variable domain of TCR clone 324404 (TRBV28, TRBJ1-2)
CASRIQGANYGYTF

SEQ ID NO: 648809 - protein, 12 aa, Homo sapiens
  CDR3 for alpha chain variable domain of TCR clone 324405 (TRAV13-1, TRAJ48)
CAANFGNEKLTF

SEQ ID NO: 648810 - protein, 15 aa, Homo sapiens
  CDR3 for beta chain variable domain of TCR clone 324405 (TRBV19, TRBJ1-2)
CASSTKTDTNYGYTF

SEQ ID NO: 648811 - protein, 13 aa, Homo sapiens
  CDR3 for alpha chain variable domain of TCR clone 324406 (TRAV16, TRAJ27)
CALRRTNAGKSTF

SEQ ID NO: 648812 - protein, 15 aa, Homo sapiens
  CDR3 for beta chain variable domain of TCR clone 324406 (TRBV18, TRBJ2-1)
CASSPPRASYKEQFF

SEQ ID NO: 648813 - protein, 19 aa, Homo sapiens
  CDR3 for alpha chain variable domain of TCR clone 324407 (TRAV25, TRAJ20)
TATQTTDVGILPHDYKLSF

SEQ ID NO: 648814 - protein, 16 aa, Homo sapiens
  CDR3 for beta chain variable domain of TCR clone 324407 (TRBV19, TRBJ2-3)
CASSPGAASRTDTQYF

SEQ ID NO: 648815 - protein, 13 aa, Homo sapiens
  CDR3 for alpha chain variable domain of TCR clone 324408 (TRAV8-3, TRAJ28)
CAVGAVGSYQLTF

SEQ ID NO: 648816 - protein, 14 aa, Homo sapiens
  CDR3 for beta chain variable domain of TCR clone 324408 (TRBV7-2, TRBJ2-7)
CASRSQGAANEQYF

SEQ ID NO: 648817 - protein, 11 aa, Homo sapiens
  CDR3 for alpha chain variable domain of TCR clone 324409 (TRAV2, TRAJ33)
CAVESHYQLIW

SEQ ID NO: 648818 - protein, 15 aa, Homo sapiens
  CDR3 for beta chain variable domain of TCR clone 324409 (TRBV19, TRBJ1-1)
CASTSGQIQNTEAFS

SEQ ID NO: 648819 - protein, 14 aa, Homo sapiens
  CDR3 for alpha chain variable domain of TCR clone 324410 (TRAV1-1, TRAJ27)
CAVIYNTNAGKSTF

SEQ ID NO: 648820 - protein, 15 aa, Homo sapiens
  CDR3 for beta chain variable domain of TCR clone 324410 (TRBV4-1, TRBJ2-5)
CASSQWDLYQETQYF

SEQ ID NO: 648821 - protein, 12 aa, Homo sapiens
  CDR3 for alpha chain variable domain of TCR clone 324411 (TRAV35, TRAJ31)
CAAASNNARLMF

SEQ ID NO: 648822 - protein, 16 aa, Homo sapiens
  CDR3 for beta chain variable domain of TCR clone 324411 (TRBV18, TRBJ2-5)
CASSPPSSGGAKTQYF

SEQ ID NO: 648823 - protein, 14 aa, Homo sapiens
  CDR3 for alpha chain variable domain of TCR clone 324412 (TRAV8-1, TRAJ22)
CAAPSSGSARQLTF

SEQ ID NO: 648824 - protein, 13 aa, Homo sapiens
  CDR3 for beta chain variable domain of TCR clone 324412 (TRBV7-2, TRBJ2-2)
CASSSVRAGELFF

SEQ ID NO: 648825 - protein, 14 aa, Homo sapiens
  CDR3 for alpha chain variable domain of TCR clone 324413 (TRAV12-2, TRAJ15)
CAPHTGQAGTALIF

SEQ ID NO: 648826 - protein, 14 aa, Homo sapiens
  CDR3 for beta chain variable domain of TCR clone 324413 (TRBV2, TRBJ1-2)
CASSEGGRNYGYTF

SEQ ID NO: 648827 - protein, 17 aa, Homo sapiens
  CDR3 for alpha chain variable domain of TCR clone 324414 (TRAV26-1, TRAJ22)
CIVIVPSHSGSARQLTF

SEQ ID NO: 648828 - protein, 16 aa, Homo sapiens
  CDR3 for beta chain variable domain of TCR clone 324414 (TRBV28, TRBJ2-1)
CASRRSGRVVGNEQFF

SEQ ID NO: 648829 - protein, 11 aa, Homo sapiens
  CDR3 for alpha chain variable domain of TCR clone 324415 (TRAV35, TRAJ30)
CAGESDDKIIF

SEQ ID NO: 648830 - protein, 16 aa, Homo sapiens
  CDR3 for beta chain variable domain of TCR clone 324415 (TRBV12-4, TRBJ1-5)
CASSRPVGGSNQPQHF

SEQ ID NO: 648831 - protein, 16 aa, Homo sapiens
  CDR3 for alpha chain variable domain of TCR clone 324416 (TRAV16, TRAJ21)
CACGWATPSTNFTLDL

SEQ ID NO: 648832 - protein, 15 aa, Homo sapiens
  CDR3 for beta chain variable domain of TCR clone 324416 (TRBV19, TRBJ2-1)
CASSIQATSYNEQFF

SEQ ID NO: 648833 - protein, 17 aa, Homo sapiens
  CDR3 for alpha chain variable domain of TCR clone 324417 (TRAV26-2, TRAJ42)
CILRDVGYGGSQGNLIF

SEQ ID NO: 648834 - protein, 12 aa, Homo sapiens
  CDR3 for beta chain variable domain of TCR clone 324417 (TRBV11-2, TRBJ2-2)
CASSLPTGELFF

SEQ ID NO: 648835 - protein, 14 aa, Homo sapiens
  CDR3 for alpha chain variable domain of TCR clone 324418 (TRAV13-1, TRAJ12)
CSNYPMDSSYILIF

SEQ ID NO: 648836 - protein, 11 aa, Homo sapiens
  CDR3 for beta chain variable domain of TCR clone 324418 (TRBV20-1, TRBJ2-1)
CSLSSGSEQFF

SEQ ID NO: 648837 - protein, 17 aa, Homo sapiens
  CDR3 for alpha chain variable domain of TCR clone 324419 (TRAV16, TRAJ42)
CAISPKLYGGSQGNIIF

SEQ ID NO: 648838 - protein, 13 aa, Homo sapiens
  CDR3 for beta chain variable domain of TCR clone 324419 (TRBV19, TRBJ1-5)
CASSTRRDQPQHF

SEQ ID NO: 648839 - protein, 10 aa, Homo sapiens
  CDR3 for alpha chain variable domain of TCR clone 324420 (TRAV38-2/DV8, TRAJ40)
CASGTYKYIF

SEQ ID NO: 648840 - protein, 14 aa, Homo sapiens
  CDR3 for beta chain variable domain of TCR clone 324420 (TRBV20-1, TRBJ1-1)
CSAQTRIGGTEAFF

SEQ ID NO: 648841 - protein, 17 aa, Homo sapiens
  CDR3 for alpha chain variable domain of TCR clone 324421 (TRAV3, TRAJ6)
CAVRDGPRAGGSYIPTF

SEQ ID NO: 648842 - protein, 14 aa, Homo sapiens
  CDR3 for beta chain variable domain of TCR clone 324421 (TRBV5-4, TRBJ1-1)
CASSLDSRSDEAFF

SEQ ID NO: 648843 - protein, 12 aa, Homo sapiens
  CDR3 for alpha chain variable domain of TCR clone 324422 (TRAV16, TRAJ36)
CALKTGANNLFF

SEQ ID NO: 648844 - protein, 16 aa, Homo sapiens
  CDR3 for beta chain variable domain of TCR clone 324422 (TRBV2, TRBJ2-1)
CASSVGGSLSYNEQFF

SEQ ID NO: 648845 - protein, 14 aa, Homo sapiens
  CDR3 for alpha chain variable domain of TCR clone 324423 (TRAV12-3, TRAJ13)
CAMKNSGGYQKVTF

SEQ ID NO: 648846 - protein, 13 aa, Homo sapiens
  CDR3 for beta chain variable domain of TCR clone 324423 (TRBV29-1, TRBJ2-5)
CSARHRAEETQYF

SEQ ID NO: 648847 - protein, 10 aa, Homo sapiens
  CDR3 for alpha chain variable domain of TCR clone 324424 (TRAV1-2, TRAJ23)
CAGQGGKLIF

SEQ ID NO: 648848 - protein, 16 aa, Homo sapiens
  CDR3 for beta chain variable domain of TCR clone 324424 (TRBV11-2, TRBJ1-1)
CASSLRQGGEHTKAFF

SEQ ID NO: 648849 - protein, 13 aa, Homo sapiens
  CDR3 for alpha chain variable domain of TCR clone 324425 (TRAV13-1, TRAJ26)
CAIVFGLGTRLSV

SEQ ID NO: 648850 - protein, 15 aa, Homo sapiens
  CDR3 for beta chain variable domain of TCR clone 324425 (TRBV12-4, TRBJ2-1)
CASSLLGRTYNEQFF

SEQ ID NO: 648851 - protein, 11 aa, Homo sapiens
  CDR3 for alpha chain variable domain of TCR clone 324426 (TRAV17, TRAJ31)
CATSNNARLMF

SEQ ID NO: 648852 - protein, 15 aa, Homo sapiens
  CDR3 for beta chain variable domain of TCR clone 324426 (TRBV7-9, TRBJ2-1)
CASSLGWGRANEQFF

SEQ ID NO: 648853 - protein, 20 aa, Homo sapiens
  CDR3 for alpha chain variable domain of TCR clone 324427 (TRAV14/DV4, TRAJ22)
CAMREGPFSISSGSARQLNF

SEQ ID NO: 648854 - protein, 13 aa, Homo sapiens
  CDR3 for beta chain variable domain of TCR clone 324427 (TRBV4-2, TRBJ2-3)
CASSQDWQHTQYF

SEQ ID NO: 648855 - protein, 14 aa, Homo sapiens
  CDR3 for alpha chain variable domain of TCR clone 324428 (TRAV2, TRAJ9)
CAVEDRSGGFKTIF

SEQ ID NO: 648856 - protein, 11 aa, Homo sapiens
  CDR3 for beta chain variable domain of TCR clone 324428 (TRBV7-9, TRBJ2-5)
CASSLGGTQYF

SEQ ID NO: 648857 - protein, 13 aa, Homo sapiens
  CDR3 for alpha chain variable domain of TCR clone 324429 (TRAV13-1, TRAJ54)
CAASSQGAQKLVF

SEQ ID NO: 648858 - protein, 14 aa, Homo sapiens
  CDR3 for beta chain variable domain of TCR clone 324429 (TRBV12-4, TRBJ1-1)
CARSLGAGFTEAFF

SEQ ID NO: 648859 - protein, 12 aa, Homo sapiens
  CDR3 for alpha chain variable domain of TCR clone 324430 (TRAV13-1, TRAJ9)
CAIPTGGFKTIF

SEQ ID NO: 648860 - protein, 15 aa, Homo sapiens
  CDR3 for beta chain variable domain of TCR clone 324430 (TRBV19, TRBJ2-1)
CASSMGSSSYNEQFF

SEQ ID NO: 648861 - protein, 12 aa, Homo sapiens
  CDR3 for alpha chain variable domain of TCR clone 324431 (TRAV12-2, TRAJ10)
WGVTGGGNKLTF

SEQ ID NO: 648862 - protein, 15 aa, Homo sapiens
  CDR3 for beta chain variable domain of TCR clone 324431 (TRBV19, TRBJ2-1)
CASSTPGLAYNEQFF

SEQ ID NO: 648863 - protein, 13 aa, Homo sapiens
  CDR3 for alpha chain variable domain of TCR clone 324432 (TRAV3, TRAJ29)
CAVRDIIDNPLVF

SEQ ID NO: 648864 - protein, 14 aa, Homo sapiens
  CDR3 for beta chain variable domain of TCR clone 324432 (TRBV27, TRBJ2-1)
CASSDTGGYNEQFF

SEQ ID NO: 648865 - protein, 14 aa, Homo sapiens
  CDR3 for alpha chain variable domain of TCR clone 324433 (TRAV35, TRAJ22)
CAGLRPGSARQLTF

SEQ ID NO: 648866 - protein, 16 aa, Homo sapiens
  CDR3 for beta chain variable domain of TCR clone 324433 (TRBV7-3, TRBJ2-1)
CASSLEGYRSYNEQFF

SEQ ID NO: 648867 - protein, 10 aa, Homo sapiens
  CDR3 for alpha chain variable domain of TCR clone 324434 (TRAV23/DV6, TRAJ22)
CAASSRGSRF

SEQ ID NO: 648868 - protein, 15 aa, Homo sapiens
  CDR3 for beta chain variable domain of TCR clone 324434 (TRBV10-3, TRBJ2-3)
CAIDPSGRRTDTQYS

SEQ ID NO: 648869 - protein, 13 aa, Homo sapiens
  CDR3 for alpha chain variable domain of TCR clone 324435 (TRAV27, TRAJ9)
CAGAYTGGFKTIF

SEQ ID NO: 648870 - protein, 16 aa, Homo sapiens
  CDR3 for beta chain variable domain of TCR clone 324435 (TRBV7-9, TRBJ1-2)
CASSLGFSSGEDGYAF

SEQ ID NO: 648871 - protein, 16 aa, Homo sapiens
  CDR3 for alpha chain variable domain of TCR clone 324436 (TRAV30, TRAJ24)
CGTEIVDADSWGKFQF

SEQ ID NO: 648872 - protein, 13 aa, Homo sapiens
  CDR3 for beta chain variable domain of TCR clone 324436 (TRBV7-3, TRBJ2-1)
CASSLWPYNEQFF

SEQ ID NO: 648873 - protein, 12 aa, Homo sapiens
  CDR3 for alpha chain variable domain of TCR clone 324437 (TRAV17, TRAJ12)
CATLRSSYKLIL

SEQ ID NO: 648874 - protein, 16 aa, Homo sapiens
  CDR3 for beta chain variable domain of TCR clone 324437 (TRBV28, TRBJ2-7)
CASSLVFETGGPEQYF

SEQ ID NO: 648875 - protein, 14 aa, Homo sapiens
  CDR3 for alpha chain variable domain of TCR clone 324438 (TRAV20, TRAJ56)
CAVQFGGANSKLTF

SEQ ID NO: 648876 - protein, 16 aa, Homo sapiens
  CDR3 for beta chain variable domain of TCR clone 324438 (TRBV2, TRBJ2-1)
CASSVGGSLSYDEQFF

SEQ ID NO: 648877 - protein, 17 aa, Homo sapiens
  CDR3 for alpha chain variable domain of TCR clone 324439 (TRAV26-1, TRAJ53)
CIVRVDDSGGSNYKLTF

SEQ ID NO: 648878 - protein, 16 aa, Homo sapiens
  CDR3 for beta chain variable domain of TCR clone 324439 (TRBV4-2, TRBJ1-2)
CASSQAGTKANYGYTF

SEQ ID NO: 648879 - protein, 13 aa, Homo sapiens
  CDR3 for alpha chain variable domain of TCR clone 324440 (TRAV12-1, TRAJ29)
CVVVVSGNTPLVF

SEQ ID NO: 648880 - protein, 14 aa, Homo sapiens
  CDR3 for beta chain variable domain of TCR clone 324440 (TRBV7-6, TRBJ2-3)
CASSLGTVTDTQYF

SEQ ID NO: 648881 - protein, 17 aa, Homo sapiens
  CDR3 for alpha chain variable domain of TCR clone 324441 (TRAV13-1, TRAJ52)
CAASSGAGGTSYGKLTF

SEQ ID NO: 648882 - protein, 15 aa, Homo sapiens
  CDR3 for beta chain variable domain of TCR clone 324441 (TRBV25-1, TRBJ1-4)
CASSPGDSTNEKLFF

SEQ ID NO: 648883 - protein, 12 aa, Homo sapiens
  CDR3 for alpha chain variable domain of TCR clone 324442 (TRAV17, TRAJ31)
CATEQGNARLMF

SEQ ID NO: 648884 - protein, 15 aa, Homo sapiens
  CDR3 for beta chain variable domain of TCR clone 324442 (TRBV7-2, TRBJ2-1)
CASSLVGSSYNEQFF

SEQ ID NO: 648885 - protein, 18 aa, Homo sapiens
  CDR3 for alpha chain variable domain of TCR clone 324443 (TRAV12-2, )
CAVEDIQNPAPAVYQLRD

SEQ ID NO: 648886 - protein, 11 aa, Homo sapiens
  CDR3 for beta chain variable domain of TCR clone 324443 (TRBV25-1, TRBJ2-1)
CATTRISEQFF

SEQ ID NO: 648887 - protein, 14 aa, Homo sapiens
  CDR3 for alpha chain variable domain of TCR clone 324444 (TRAV12-2, TRAJ15)
CAPHTGQAGTALIF

SEQ ID NO: 648888 - protein, 15 aa, Homo sapiens
  CDR3 for beta chain variable domain of TCR clone 324444 (TRBV7-2, TRBJ2-1)
CASSFQADEYNEQFF

SEQ ID NO: 648889 - protein, 13 aa, Homo sapiens
  CDR3 for alpha chain variable domain of TCR clone 324445 (TRAV2, TRAJ40)
CTVVTSGTYKYIF

SEQ ID NO: 648890 - protein, 14 aa, Homo sapiens
  CDR3 for beta chain variable domain of TCR clone 324445 (TRBV19, TRBJ2-1)
CASPTFVSSGEQFF

SEQ ID NO: 648891 - protein, 12 aa, Homo sapiens
  CDR3 for alpha chain variable domain of TCR clone 324446 (TRAV12-3, TRAJ17)
CAMTLTGNKLTF

SEQ ID NO: 648892 - protein, 14 aa, Homo sapiens
  CDR3 for beta chain variable domain of TCR clone 324446 (TRBV20-1, TRBJ2-7)
CSARYGTTYYEQYF

SEQ ID NO: 648893 - protein, 14 aa, Homo sapiens
  CDR3 for alpha chain variable domain of TCR clone 324447 (TRAV1-2, TRAJ16)
CAVNRFSDGQKLPF

SEQ ID NO: 648894 - protein, 15 aa, Homo sapiens
  CDR3 for beta chain variable domain of TCR clone 324447 (TRBV7-9, TRBJ1-6)
CASSSPGRGNSTLHF

SEQ ID NO: 648895 - protein, 14 aa, Homo sapiens
  CDR3 for alpha chain variable domain of TCR clone 324448 (TRAV1-2, TRAJ8)
CAVRGDTGFQKLVF

SEQ ID NO: 648896 - protein, 13 aa, Homo sapiens
  CDR3 for beta chain variable domain of TCR clone 324448 (TRBV12-5, TRBJ2-3)
CASGDRQSDTQYF

SEQ ID NO: 648897 - protein, 14 aa, Homo sapiens
  CDR3 for alpha chain variable domain of TCR clone 324449 (TRAV14/DV4, TRAJ15)
CAMRRDQAGTALIF

SEQ ID NO: 648898 - protein, 12 aa, Homo sapiens
  CDR3 for beta chain variable domain of TCR clone 324449 (TRBV7-9, TRBJ2-7)
CASSIKREEQYF

SEQ ID NO: 648899 - protein, 14 aa, Homo sapiens
  CDR3 for alpha chain variable domain of TCR clone 324450 (TRAV3, TRAJ34)
CAVRDINNTDKLIF

SEQ ID NO: 648900 - protein, 13 aa, Homo sapiens
  CDR3 for beta chain variable domain of TCR clone 324450 (TRBV20-1, TRBJ1-1)
CSARGGGNTETFF

SEQ ID NO: 648901 - protein, 17 aa, Homo sapiens
  CDR3 for alpha chain variable domain of TCR clone 324451 (TRAV3, TRAJ6)
CAVSDGPRAGGSYIPTF

SEQ ID NO: 648902 - protein, 19 aa, Homo sapiens
  CDR3 for beta chain variable domain of TCR clone 324451 (TRBV25-1, TRBJ2-2)
CAILVYRVDRGRKTGELFF

SEQ ID NO: 648903 - protein, 12 aa, Homo sapiens
  CDR3 for alpha chain variable domain of TCR clone 324452 (TRAV8-3, TRAJ26)
CAGDNYGQNFVF

SEQ ID NO: 648904 - protein, 14 aa, Homo sapiens
  CDR3 for beta chain variable domain of TCR clone 324452 (TRBV11-2, TRBJ1-1)
CASSLDRYGTEAFF

SEQ ID NO: 648905 - protein, 13 aa, Homo sapiens
  CDR3 for alpha chain variable domain of TCR clone 324453 (TRAV17, TRAJ5)
CAPMATGRRALTF

SEQ ID NO: 648906 - protein, 14 aa, Homo sapiens
  CDR3 for beta chain variable domain of TCR clone 324453 (TRBV29-1, TRBJ2-7)
CSVDQRQASYEQYF

SEQ ID NO: 648907 - protein, 23 aa, Homo sapiens
  CDR3 for alpha chain variable domain of TCR clone 324454 (TRAV12-2, TRAJ36)
SLLIRDSQPSDSATLERANNLFF

SEQ ID NO: 648908 - protein, 17 aa, Homo sapiens
  CDR3 for beta chain variable domain of TCR clone 324454 (TRBV11-2, TRBJ2-1)
CASSLYPPGVEYNEQFF

SEQ ID NO: 648909 - protein, 13 aa, Homo sapiens
  CDR3 for alpha chain variable domain of TCR clone 324455 (TRAV12-3, TRAJ30)
CAMSAKWDDKIIF

SEQ ID NO: 648910 - protein, 15 aa, Homo sapiens
  CDR3 for beta chain variable domain of TCR clone 324455 (TRBV11-3, TRBJ2-3)
CASLKDGREGDTQYF

SEQ ID NO: 648911 - protein, 14 aa, Homo sapiens
  CDR3 for alpha chain variable domain of TCR clone 324456 (TRAV35, TRAJ42)
CAGRYGGSPGNFIF

SEQ ID NO: 648912 - protein, 15 aa, Homo sapiens
  CDR3 for beta chain variable domain of TCR clone 324456 (TRBV7-9, TRBJ2-1)
CASSLGWGRANEQFF

SEQ ID NO: 648913 - protein, 14 aa, Homo sapiens
  CDR3 for alpha chain variable domain of TCR clone 324457 (TRAV13-1, TRAJ41)
CAARSGDSGYARNF

SEQ ID NO: 648914 - protein, 15 aa, Homo sapiens
  CDR3 for beta chain variable domain of TCR clone 324457 (TRBV29-1, TRBJ2-5)
CSVAGASGTQETQYF

SEQ ID NO: 648915 - protein, 15 aa, Homo sapiens
  CDR3 for alpha chain variable domain of TCR clone 324458 (TRAV20, TRAJ50)
CAVRQMKTSYDKVIF

SEQ ID NO: 648916 - protein, 15 aa, Homo sapiens
  CDR3 for beta chain variable domain of TCR clone 324458 (TRBV7-9, TRBJ2-7)
CASSPGGGLTYEQYF

SEQ ID NO: 648917 - protein, 13 aa, Homo sapiens
  CDR3 for alpha chain variable domain of TCR clone 324459 (TRAV8-3, TRAJ43)
CAVVPYDNNDMRF

SEQ ID NO: 648918 - protein, 16 aa, Homo sapiens
  CDR3 for beta chain variable domain of TCR clone 324459 (TRBV7-2, TRBJ2-5)
CASSPFPTGGEETQYF

SEQ ID NO: 648919 - protein, 14 aa, Homo sapiens
  CDR3 for alpha chain variable domain of TCR clone 324460 (TRAV2, TRAJ9)
CAVEDRSGGFKTIF

SEQ ID NO: 648920 - protein, 13 aa, Homo sapiens
  CDR3 for beta chain variable domain of TCR clone 324460 (TRBV10-2, TRBJ2-5)
CASSEGGKETQYF

SEQ ID NO: 648921 - protein, 15 aa, Homo sapiens
  CDR3 for alpha chain variable domain of TCR clone 324461 (TRAV3, TRAJ12)
CAVRDIRDSSYKLIF

SEQ ID NO: 648922 - protein, 13 aa, Homo sapiens
  CDR3 for beta chain variable domain of TCR clone 324461 (TRBV3-1, TRBJ1-1)
CASSPGVITEAFF

SEQ ID NO: 648923 - protein, 10 aa, Homo sapiens
  CDR3 for alpha chain variable domain of TCR clone 324462 (TRAV2, TRAJ33)
CCESNYQLIW

SEQ ID NO: 648924 - protein, 14 aa, Homo sapiens
  CDR3 for beta chain variable domain of TCR clone 324462 (TRBV25-1, TRBJ1-1)
CASTHLGGNTEAFF

SEQ ID NO: 648925 - protein, 18 aa, Homo sapiens
  CDR3 for alpha chain variable domain of TCR clone 324463 (TRAV21, TRAJ52)
CAVRPSPAGGTSYGKLTF

SEQ ID NO: 648926 - protein, 14 aa, Homo sapiens
  CDR3 for beta chain variable domain of TCR clone 324463 (TRBV7-2, TRBJ1-1)
CASSFLTGTTEAFL

SEQ ID NO: 648927 - protein, 13 aa, Homo sapiens
  CDR3 for alpha chain variable domain of TCR clone 324464 (TRAV8-1, TRAJ34)
CAVRPYNTDKLIF

SEQ ID NO: 648928 - protein, 15 aa, Homo sapiens
  CDR3 for beta chain variable domain of TCR clone 324464 (TRBV7-9, TRBJ1-3)
CASSLRSGAGNTIYF

SEQ ID NO: 648929 - protein, 14 aa, Homo sapiens
  CDR3 for alpha chain variable domain of TCR clone 324465 (TRAV12-1, TRAJ12)
CVVNRPDSSYKSIF

SEQ ID NO: 648930 - protein, 15 aa, Homo sapiens
  CDR3 for beta chain variable domain of TCR clone 324465 (TRBV5-1, TRBJ1-1)
CASSLGMGTSTEAFF

SEQ ID NO: 648931 - protein, 17 aa, Homo sapiens
  CDR3 for alpha chain variable domain of TCR clone 324466 (TRAV3, TRAJ6)
CAVRDGPRAGGSEIPTF

SEQ ID NO: 648932 - protein, 18 aa, Homo sapiens
  CDR3 for beta chain variable domain of TCR clone 324466 (TRBV7-3, TRBJ2-3)
CASSSTGTYPGSTDTQYF

SEQ ID NO: 648933 - protein, 14 aa, Homo sapiens
  CDR3 for alpha chain variable domain of TCR clone 324467 (TRAV12-2, TRAJ13)
CAVKKTGGYQQVTF

SEQ ID NO: 648934 - protein, 18 aa, Homo sapiens
  CDR3 for beta chain variable domain of TCR clone 324467 (TRBV20-1, TRBJ2-3)
CSASGLAGGPGTTDTQYF

SEQ ID NO: 648935 - protein, 19 aa, Homo sapiens
  CDR3 for alpha chain variable domain of TCR clone 324468 (TRAV1-2, TRAJ34)
CLLPLCCERWAYNTDKLIF

SEQ ID NO: 648936 - protein, 15 aa, Homo sapiens
  CDR3 for beta chain variable domain of TCR clone 324468 (TRBV10-3, TRBJ2-1)
CAIRNGTSGHNEQFF

SEQ ID NO: 648937 - protein, 14 aa, Homo sapiens
  CDR3 for alpha chain variable domain of TCR clone 324469 (TRAV29/DV5, TRAJ49)
CAASLSNTGHQFYF

SEQ ID NO: 648938 - protein, 21 aa, Homo sapiens
  CDR3 for beta chain variable domain of TCR clone 324469 (TRBV9, TRBJ2-5)
CASRGRLAGGPEDPVLRARHA

SEQ ID NO: 648939 - protein, 12 aa, Homo sapiens
  CDR3 for alpha chain variable domain of TCR clone 324470 (TRAV13-1, TRAJ42)
VNYGGSQGNLIF

SEQ ID NO: 648940 - protein, 14 aa, Homo sapiens
  CDR3 for beta chain variable domain of TCR clone 324470 (TRBV25-1, TRBJ1-1)
CASTHLGGNTEAFF

SEQ ID NO: 648941 - protein, 15 aa, Homo sapiens
  CDR3 for alpha chain variable domain of TCR clone 324471 (TRAV23/DV6, TRAJ37)
CAAGEGSSNTGKLIF

SEQ ID NO: 648942 - protein, 16 aa, Homo sapiens
  CDR3 for beta chain variable domain of TCR clone 324471 (TRBV7-3, TRBJ2-1)
CASSFTGRRSYNEQFF

SEQ ID NO: 648943 - protein, 16 aa, Homo sapiens
  CDR3 for alpha chain variable domain of TCR clone 324472 (TRAV12-2, TRAJ18)
CAVTTDRGSTLGRLYF

SEQ ID NO: 648944 - protein, 14 aa, Homo sapiens
  CDR3 for beta chain variable domain of TCR clone 324472 (TRBV4-2, TRBJ1-5)
CASSQDSINQPQHV

SEQ ID NO: 648945 - protein, 13 aa, Homo sapiens
  CDR3 for alpha chain variable domain of TCR clone 324473 (TRAV1-2, TRAJ9)
CAALNTGGFKTIF

SEQ ID NO: 648946 - protein, 13 aa, Homo sapiens
  CDR3 for beta chain variable domain of TCR clone 324473 (TRBV7-9, TRBJ2-2)
CASSLDPTGELFF

SEQ ID NO: 648947 - protein, 14 aa, Homo sapiens
  CDR3 for alpha chain variable domain of TCR clone 324474 (TRAV1-2, TRAJ6)
CAVRSSGGSYIPTF

SEQ ID NO: 648948 - protein, 18 aa, Homo sapiens
  CDR3 for beta chain variable domain of TCR clone 324474 (TRBV20-1, TRBJ2-3)
CSASGRAGGPGTTDTRYF

SEQ ID NO: 648949 - protein, 14 aa, Homo sapiens
  CDR3 for alpha chain variable domain of TCR clone 324475 (TRAV1-2, TRAJ16)
CAVNRFSDGQKLLF

SEQ ID NO: 648950 - protein, 12 aa, Homo sapiens
  CDR3 for beta chain variable domain of TCR clone 324475 (TRBV12-4, TRBJ1-2)
CASSVIWLHLRF

SEQ ID NO: 648951 - protein, 12 aa, Homo sapiens
  CDR3 for alpha chain variable domain of TCR clone 324476 (TRAV13-2, TRAJ23)
CSERHRGGKRIF

SEQ ID NO: 648952 - protein, 16 aa, Homo sapiens
  CDR3 for beta chain variable domain of TCR clone 324476 (TRBV20-1, TRBJ1-4)
CSAPGQGLLTNEKLFF

SEQ ID NO: 648953 - protein, 11 aa, Homo sapiens
  CDR3 for alpha chain variable domain of TCR clone 324477 (TRAV12-1, TRAJ43)
CVEYDNNDMRF

SEQ ID NO: 648954 - protein, 14 aa, Homo sapiens
  CDR3 for beta chain variable domain of TCR clone 324477 (TRBV9, TRBJ2-7)
CASSVGVGSYEQYF

SEQ ID NO: 648955 - protein, 14 aa, Homo sapiens
  CDR3 for alpha chain variable domain of TCR clone 324478 (TRAV13-1, TRAJ44)
CAAKGTGTASKLTF

SEQ ID NO: 648956 - protein, 13 aa, Homo sapiens
  CDR3 for beta chain variable domain of TCR clone 324478 (TRBV19, TRBJ1-2)
CASSQGQVYGYTF

SEQ ID NO: 648957 - protein, 14 aa, Homo sapiens
  CDR3 for alpha chain variable domain of TCR clone 324479 (TRAV17, TRAJ54)
CATDANQGAQKLVF

SEQ ID NO: 648958 - protein, 15 aa, Homo sapiens
  CDR3 for beta chain variable domain of TCR clone 324479 (TRBV12-4, TRBJ2-5)
CASSPPTGLQETQYF

SEQ ID NO: 648959 - protein, 12 aa, Homo sapiens
  CDR3 for alpha chain variable domain of TCR clone 324480 (TRAV16, TRAJ10)
CSRTGGGNKLTF

SEQ ID NO: 648960 - protein, 15 aa, Homo sapiens
  CDR3 for beta chain variable domain of TCR clone 324480 (TRBV7-3, TRBJ2-1)
CASSLDGNSYNEQFF

SEQ ID NO: 648961 - protein, 19 aa, Homo sapiens
  CDR3 for alpha chain variable domain of TCR clone 324481 (TRAV13-1, TRAJ52)
CAASPYQNAGGTSYGKLTF

SEQ ID NO: 648962 - protein, 14 aa, Homo sapiens
  CDR3 for beta chain variable domain of TCR clone 324481 (TRBV19, TRBJ2-7)
CASTVQGRPDEQYF

SEQ ID NO: 648963 - protein, 18 aa, Homo sapiens
  CDR3 for alpha chain variable domain of TCR clone 324482 (TRAV26-1, TRAJ36)
CIVRAIGRSGANNLFFVT

SEQ ID NO: 648964 - protein, 14 aa, Homo sapiens
  CDR3 for beta chain variable domain of TCR clone 324482 (TRBV25-1, TRBJ2-1)
CASSKTGGYNEQFF

SEQ ID NO: 648965 - protein, 14 aa, Homo sapiens
  CDR3 for alpha chain variable domain of TCR clone 324483 (TRAV38-2/DV8, TRAJ30)
CAYMDGLGGDKLIF

SEQ ID NO: 648966 - protein, 15 aa, Homo sapiens
  CDR3 for beta chain variable domain of TCR clone 324483 (TRBV7-9, TRBJ2-2)
CASRPADRDTGELFF

SEQ ID NO: 648967 - protein, 17 aa, Homo sapiens
  CDR3 for alpha chain variable domain of TCR clone 324484 (TRAV3, TRAJ42)
CAARERDYGGSQGNLIF

SEQ ID NO: 648968 - protein, 15 aa, Homo sapiens
  CDR3 for beta chain variable domain of TCR clone 324484 (TRBV27, TRBJ1-6)
CASSFDRGLGSPLHF

SEQ ID NO: 648969 - protein, 15 aa, Homo sapiens
  CDR3 for alpha chain variable domain of TCR clone 324485 (TRAV8-6, TRAJ11)
CAVNFMNSGYSTLTF

SEQ ID NO: 648970 - protein, 12 aa, Homo sapiens
  CDR3 for beta chain variable domain of TCR clone 324485 (TRBV14, TRBJ2-7)
CASSSLKGEQYF

SEQ ID NO: 648971 - protein, 14 aa, Homo sapiens
  CDR3 for alpha chain variable domain of TCR clone 324486 (TRAV12-2, TRAJ41)
CAVNRANSGYALNF

SEQ ID NO: 648972 - protein, 13 aa, Homo sapiens
  CDR3 for beta chain variable domain of TCR clone 324486 (TRBV7-9, TRBJ1-2)
CASSLKQNYGYSF

SEQ ID NO: 648973 - protein, 13 aa, Homo sapiens
  CDR3 for alpha chain variable domain of TCR clone 324487 (TRAV27, TRAJ45)
CRSSGGGAAGLTF

SEQ ID NO: 648974 - protein, 15 aa, Homo sapiens
  CDR3 for beta chain variable domain of TCR clone 324487 (TRBV9, TRBJ2-2)
CASSDFAGASGELFF

SEQ ID NO: 648975 - protein, 13 aa, Homo sapiens
  CDR3 for alpha chain variable domain of TCR clone 324488 (TRAV12-3, TRAJ13)
CAMSTGGYQKVTF

SEQ ID NO: 648976 - protein, 13 aa, Homo sapiens
  CDR3 for beta chain variable domain of TCR clone 324488 (TRBV20-1, TRBJ1-1)
CSAPPGGHTEAFF

SEQ ID NO: 648977 - protein, 22 aa, Homo sapiens
  CDR3 for alpha chain variable domain of TCR clone 324489 (TRAV3, TRAJ38)
CAVRDCLNAGNNHIQKPDPAVY

SEQ ID NO: 648978 - protein, 13 aa, Homo sapiens
  CDR3 for beta chain variable domain of TCR clone 324489 (TRBV12-4, TRBJ1-2)
CASSLRQGKGYTF

SEQ ID NO: 648979 - protein, 13 aa, Homo sapiens
  CDR3 for alpha chain variable domain of TCR clone 324490 (TRAV39, TRAJ58)
CAGEETSGSRLTF

SEQ ID NO: 648980 - protein, 17 aa, Homo sapiens
  CDR3 for beta chain variable domain of TCR clone 324490 (TRBV28, TRBJ2-2)
CASSLATGMGDAGELFF

SEQ ID NO: 648981 - protein, 13 aa, Homo sapiens
  CDR3 for alpha chain variable domain of TCR clone 324491 (TRAV26-1, TRAJ34)
CIVRPWITDKLIF

SEQ ID NO: 648982 - protein, 14 aa, Homo sapiens
  CDR3 for beta chain variable domain of TCR clone 324491 (TRBV7-2, TRBJ2-7)
CTSRSQGAAYEQYF

SEQ ID NO: 648983 - protein, 12 aa, Homo sapiens
  CDR3 for alpha chain variable domain of TCR clone 324492 (TRAV13-1, TRAJ27)
CAAHTNAGKSTF

SEQ ID NO: 648984 - protein, 20 aa, Homo sapiens
  CDR3 for beta chain variable domain of TCR clone 324492 (TRBV7-8, TRBJ2-2)
CASSHLFPGPTIHITGELFF

SEQ ID NO: 648985 - protein, 14 aa, Homo sapiens
  CDR3 for alpha chain variable domain of TCR clone 324493 (TRAV27, TRAJ49)
CAGRPAGTGSQFCF

SEQ ID NO: 648986 - protein, 16 aa, Homo sapiens
  CDR3 for beta chain variable domain of TCR clone 324493 (TRBV12-5, TRBJ2-5)
CASGPRTSGNQETQYF

SEQ ID NO: 648987 - protein, 11 aa, Homo sapiens
  CDR3 for alpha chain variable domain of TCR clone 324494 (TRAV13-1, TRAJ43)
CAASNDYDMRF

SEQ ID NO: 648988 - protein, 12 aa, Homo sapiens
  CDR3 for beta chain variable domain of TCR clone 324494 (TRBV5-1, TRBJ2-3)
CASTANTDTQYF

SEQ ID NO: 648989 - protein, 13 aa, Homo sapiens
  CDR3 for alpha chain variable domain of TCR clone 324495 (TRAV1-1, TRAJ9)
CAAKNTGGFKTIF

SEQ ID NO: 648990 - protein, 16 aa, Homo sapiens
  CDR3 for beta chain variable domain of TCR clone 324495 (TRBV18, TRBJ1-5)
CASSPYRVEGNQPQHF

SEQ ID NO: 648991 - protein, 15 aa, Homo sapiens
  CDR3 for alpha chain variable domain of TCR clone 324496 (TRAV8-2, TRAJ40)
CVVLGTTSGTYKYIF

SEQ ID NO: 648992 - protein, 16 aa, Homo sapiens
  CDR3 for beta chain variable domain of TCR clone 324496 (TRBV7-3, TRBJ2-1)
CARSLEGYRSYNEQFF

SEQ ID NO: 648993 - protein, 13 aa, Homo sapiens
  CDR3 for alpha chain variable domain of TCR clone 324497 (TRAV8-3, TRAJ28)
CAVSAVGSYQLTF

SEQ ID NO: 648994 - protein, 15 aa, Homo sapiens
  CDR3 for beta chain variable domain of TCR clone 324497 (TRBV7-9, TRBJ1-5)
CASSQGHQPNQPQHF

SEQ ID NO: 648995 - protein, 17 aa, Homo sapiens
  CDR3 for alpha chain variable domain of TCR clone 324498 (TRAV2, TRAJ22)
ILQVREADAAEQRQLTF

SEQ ID NO: 648996 - protein, 13 aa, Homo sapiens
  CDR3 for beta chain variable domain of TCR clone 324498 (TRBV12-5, TRBJ2-3)
CASGDRQSDTQYF

SEQ ID NO: 648997 - protein, 13 aa, Homo sapiens
  CDR3 for alpha chain variable domain of TCR clone 324499 (TRAV13-1, TRAJ21)
CAASIYNFNKFYF

SEQ ID NO: 648998 - protein, 15 aa, Homo sapiens
  CDR3 for beta chain variable domain of TCR clone 324499 (TRBV7-8, TRBJ1-5)
CDSSLAGQPNQPQHF

SEQ ID NO: 648999 - protein, 14 aa, Homo sapiens
  CDR3 for alpha chain variable domain of TCR clone 324500 (TRAV23/DV6, TRAJ45)
SAASWGGGADRLTF

SEQ ID NO: 649000 - protein, 15 aa, Homo sapiens
  CDR3 for beta chain variable domain of TCR clone 324500 (TRBV4-2, TRBJ1-2)
CASSRNTGAGYGYTF

SEQ ID NO: 649001 - protein, 14 aa, Homo sapiens
  CDR3 for alpha chain variable domain of TCR clone 324501 (TRAV4, TRAJ17)
CLVGDPLVGNKLTF

SEQ ID NO: 649002 - protein, 17 aa, Homo sapiens
  CDR3 for beta chain variable domain of TCR clone 324501 (TRBV7-3, TRBJ2-3)
CASSPRGQGYGTDTQYF

SEQ ID NO: 649003 - protein, 15 aa, Homo sapiens
  CDR3 for alpha chain variable domain of TCR clone 324502 (TRAV3, TRAJ22)
CAVRDRGGSARQRAF

SEQ ID NO: 649004 - protein, 15 aa, Homo sapiens
  CDR3 for beta chain variable domain of TCR clone 324502 (TRBV19, TRBJ2-5)
CASSIVRASQETQYF

SEQ ID NO: 649005 - protein, 14 aa, Homo sapiens
  CDR3 for alpha chain variable domain of TCR clone 324503 (TRAV12-1, TRAJ17)
CVVNYKAAGNKLTF

SEQ ID NO: 649006 - protein, 17 aa, Homo sapiens
  CDR3 for beta chain variable domain of TCR clone 324503 (TRBV20-1, TRBJ2-1)
CTASSSGLAGSYNEQFF

SEQ ID NO: 649007 - protein, 10 aa, Homo sapiens
  CDR3 for alpha chain variable domain of TCR clone 324504 (TRAV36/DV7, TRAJ56)
CAGPAVELTF

SEQ ID NO: 649008 - protein, 13 aa, Homo sapiens
  CDR3 for beta chain variable domain of TCR clone 324504 (TRBV7-9, TRBJ2-7)
CACSFWSSYEQYF

SEQ ID NO: 649009 - protein, 16 aa, Homo sapiens
  CDR3 for alpha chain variable domain of TCR clone 324505 (TRAV21, TRAJ37)
CAVRTAGSSNTGKLIF

SEQ ID NO: 649010 - protein, 15 aa, Homo sapiens
  CDR3 for beta chain variable domain of TCR clone 324505 (TRBV10-1, TRBJ2-3)
CASSATSGGFDTQYF

SEQ ID NO: 649011 - protein, 15 aa, Homo sapiens
  CDR3 for alpha chain variable domain of TCR clone 324506 (TRAV23/DV6, TRAJ30)
CAASSQESRDDKIIL

SEQ ID NO: 649012 - protein, 13 aa, Homo sapiens
  CDR3 for beta chain variable domain of TCR clone 324506 (TRBV27, TRBJ1-1)
CASSLSIGAEAFF

SEQ ID NO: 649013 - protein, 14 aa, Homo sapiens
  CDR3 for alpha chain variable domain of TCR clone 324507 (TRAV26-1, TRAJ21)
CIVRVAYNFNKFYS

SEQ ID NO: 649014 - protein, 11 aa, Homo sapiens
  CDR3 for beta chain variable domain of TCR clone 324507 (TRBV5-6, TRBJ2-5)
CASSLERTQYF

SEQ ID NO: 649015 - protein, 13 aa, Homo sapiens
  CDR3 for alpha chain variable domain of TCR clone 324508 (TRAV2, TRAJ21)
CAVEDLNFNKFYF

SEQ ID NO: 649016 - protein, 15 aa, Homo sapiens
  CDR3 for beta chain variable domain of TCR clone 324508 (TRBV28, TRBJ2-5)
CASSPGQGSIETQYS

SEQ ID NO: 649017 - protein, 10 aa, Homo sapiens
  CDR3 for alpha chain variable domain of TCR clone 324509 (TRAV1-2, TRAJ26)
CASGGQNFVF

SEQ ID NO: 649018 - protein, 14 aa, Homo sapiens
  CDR3 for beta chain variable domain of TCR clone 324509 (TRBV11-2, TRBJ2-5)
CASSRTGGIETQYF

SEQ ID NO: 649019 - protein, 18 aa, Homo sapiens
  CDR3 for alpha chain variable domain of TCR clone 324510 (TRAV8-3, TRAJ4)
WVRDPTSNDPGGYNKLIF

SEQ ID NO: 649020 - protein, 12 aa, Homo sapiens
  CDR3 for beta chain variable domain of TCR clone 324510 (TRBV12-4, TRBJ2-7)
CASSLGGYEQYF

SEQ ID NO: 649021 - protein, 12 aa, Homo sapiens
  CDR3 for alpha chain variable domain of TCR clone 324511 (TRAV1-1, TRAJ39)
CAVPVVRNMLTF

SEQ ID NO: 649022 - protein, 15 aa, Homo sapiens
  CDR3 for beta chain variable domain of TCR clone 324511 (TRBV19, TRBJ1-6)
CASSTQGAVGSPLHF

SEQ ID NO: 649023 - protein, 12 aa, Homo sapiens
  CDR3 for alpha chain variable domain of TCR clone 324512 (TRAV17, TRAJ36)
CATLTGANNLFF

SEQ ID NO: 649024 - protein, 15 aa, Homo sapiens
  CDR3 for beta chain variable domain of TCR clone 324512 (TRBV19, TRBJ1-2)
CASSTKTGTNYGYTF

SEQ ID NO: 649025 - protein, 11 aa, Homo sapiens
  CDR3 for alpha chain variable domain of TCR clone 324513 (TRAV16, TRAJ49)
CSLNTGNQFYF

SEQ ID NO: 649026 - protein, 12 aa, Homo sapiens
  CDR3 for beta chain variable domain of TCR clone 324513 (TRBV7-9, TRBJ1-4)
CASSTDPEKLFF

SEQ ID NO: 649027 - protein, 13 aa, Homo sapiens
  CDR3 for alpha chain variable domain of TCR clone 324514 (TRAV38-2/DV8, TRAJ34)
CAYRNYNTDKLIF

SEQ ID NO: 649028 - protein, 15 aa, Homo sapiens
  CDR3 for beta chain variable domain of TCR clone 324514 (TRBV20-1, TRBJ2-5)
CSAEGTGGLQETQYF

SEQ ID NO: 649029 - protein, 14 aa, Homo sapiens
  CDR3 for alpha chain variable domain of TCR clone 324515 (TRAV17, TRAJ57)
CATDTQGGSEKLVF

SEQ ID NO: 649030 - protein, 13 aa, Homo sapiens
  CDR3 for beta chain variable domain of TCR clone 324515 (TRBV19, TRBJ2-7)
CASSPRQSYEQYF

SEQ ID NO: 649031 - protein, 16 aa, Homo sapiens
  CDR3 for alpha chain variable domain of TCR clone 324516 (TRAV3, TRAJ37)
CAVRPHGSGNTGKLIF

SEQ ID NO: 649032 - protein, 15 aa, Homo sapiens
  CDR3 for beta chain variable domain of TCR clone 324516 (TRBV5-1, TRBJ2-3)
CASSSTSGSTDTQYF

SEQ ID NO: 649033 - protein, 11 aa, Homo sapiens
  CDR3 for alpha chain variable domain of TCR clone 324517 (TRAV21, TRAJ58)
CAVRKGSRLTF

SEQ ID NO: 649034 - protein, 15 aa, Homo sapiens
  CDR3 for beta chain variable domain of TCR clone 324517 (TRBV4-1, TRBJ2-2)
CASSQVLGQTGELFF

SEQ ID NO: 649035 - protein, 14 aa, Homo sapiens
  CDR3 for alpha chain variable domain of TCR clone 324518 (TRAV12-2, TRAJ33)
CAVTRARSNYQLIW

SEQ ID NO: 649036 - protein, 12 aa, Homo sapiens
  CDR3 for beta chain variable domain of TCR clone 324518 (TRBV24-1, TRBJ2-3)
CATSDSTDTQYF

SEQ ID NO: 649037 - protein, 14 aa, Homo sapiens
  CDR3 for alpha chain variable domain of TCR clone 324519 (TRAV20, TRAJ44)
CAVQDTGTASKLTF

SEQ ID NO: 649038 - protein, 13 aa, Homo sapiens
  CDR3 for beta chain variable domain of TCR clone 324519 (TRBV29-1, TRBJ1-3)
CSVGTGRGNTMYF

SEQ ID NO: 649039 - protein, 23 aa, Homo sapiens
  CDR3 for alpha chain variable domain of TCR clone 324520 (TRAV26-1, TRAJ38)
CIAANAGNNHIQNPDPAVSQLRA

SEQ ID NO: 649040 - protein, 13 aa, Homo sapiens
  CDR3 for beta chain variable domain of TCR clone 324520 (TRBV20-1, TRBJ1-1)
CSARGGGNTEAFF

SEQ ID NO: 649041 - protein, 14 aa, Homo sapiens
  CDR3 for alpha chain variable domain of TCR clone 324521 (TRAV14/DV4, TRAJ15)
CALRRDQAGTALIF

SEQ ID NO: 649042 - protein, 16 aa, Homo sapiens
  CDR3 for beta chain variable domain of TCR clone 324521 (TRBV12-5, TRBJ2-5)
CASGPRTSGNQETQYS

SEQ ID NO: 649043 - protein, 18 aa, Homo sapiens
  CDR3 for alpha chain variable domain of TCR clone 324522 (TRAV21, TRAJ52)
CAVRPSPAGGTSYGKLTF

SEQ ID NO: 649044 - protein, 16 aa, Homo sapiens
  CDR3 for beta chain variable domain of TCR clone 324522 (TRBV18, TRBJ2-2)
CASSPPRTANNGELFF

SEQ ID NO: 649045 - protein, 11 aa, Homo sapiens
  CDR3 for alpha chain variable domain of TCR clone 324523 (TRAV16, TRAJ31)
CALFNNARLMF

SEQ ID NO: 649046 - protein, 14 aa, Homo sapiens
  CDR3 for beta chain variable domain of TCR clone 324523 (TRBV20-1, TRBJ1-1)
CSARAVNGYTEAFF

SEQ ID NO: 649047 - protein, 15 aa, Homo sapiens
  CDR3 for alpha chain variable domain of TCR clone 324524 (TRAV4, TRAJ31)
CLVGGFLNNNARLMF

SEQ ID NO: 649048 - protein, 14 aa, Homo sapiens
  CDR3 for beta chain variable domain of TCR clone 324524 (TRBV7-2, TRBJ2-7)
CASSPKTSFYEHYF

SEQ ID NO: 649049 - protein, 10 aa, Homo sapiens
  CDR3 for alpha chain variable domain of TCR clone 324525 (TRAV25, TRAJ53)
CAGSNYKLTF

SEQ ID NO: 649050 - protein, 14 aa, Homo sapiens
  CDR3 for beta chain variable domain of TCR clone 324525 (TRBV7-7, TRBJ2-7)
CAGSLGRGVGEQYF

SEQ ID NO: 649051 - protein, 15 aa, Homo sapiens
  CDR3 for alpha chain variable domain of TCR clone 324526 (TRAV4, TRAJ12)
CLVGDLLDSSYKLIF

SEQ ID NO: 649052 - protein, 14 aa, Homo sapiens
  CDR3 for beta chain variable domain of TCR clone 324526 (TRBV7-2, TRBJ1-1)
CASSHRQGRTEAFF

SEQ ID NO: 649053 - protein, 12 aa, Homo sapiens
  CDR3 for alpha chain variable domain of TCR clone 324527 (TRAV21, TRAJ20)
CAVRRNDYKLSF

SEQ ID NO: 649054 - protein, 14 aa, Homo sapiens
  CDR3 for beta chain variable domain of TCR clone 324527 (TRBV7-3, TRBJ2-1)
CASSLAGGTNQQFF

SEQ ID NO: 649055 - protein, 14 aa, Homo sapiens
  CDR3 for alpha chain variable domain of TCR clone 324528 (TRAV13-1, TRAJ35)
CAASKGGVGNVLHF

SEQ ID NO: 649056 - protein, 13 aa, Homo sapiens
  CDR3 for beta chain variable domain of TCR clone 324528 (TRBV7-3, TRBJ1-1)
CASSQDWGAEAFF

SEQ ID NO: 649057 - protein, 15 aa, Homo sapiens
  CDR3 for alpha chain variable domain of TCR clone 324529 (TRAV12-3, TRAJ23)
CAMILIYTQGGKLIF

SEQ ID NO: 649058 - protein, 14 aa, Homo sapiens
  CDR3 for beta chain variable domain of TCR clone 324529 (TRBV27, TRBJ1-5)
CASSLDPRNQPQHF

SEQ ID NO: 649059 - protein, 14 aa, Homo sapiens
  CDR3 for alpha chain variable domain of TCR clone 324530 (TRAV1-2, TRAJ16)
CAVNRFSDGQKLLF

SEQ ID NO: 649060 - protein, 15 aa, Homo sapiens
  CDR3 for beta chain variable domain of TCR clone 324530 (TRBV5-1, TRBJ1-1)
CASSSTTGTNTEAFL

SEQ ID NO: 649061 - protein, 17 aa, Homo sapiens
  CDR3 for alpha chain variable domain of TCR clone 324531 (TRAV3, TRAJ42)
CAVRDRDYRGSQGNLIF

SEQ ID NO: 649062 - protein, 16 aa, Homo sapiens
  CDR3 for beta chain variable domain of TCR clone 324531 (TRBV20-1, TRBJ1-2)
CSASMGQGVANYGYTF

SEQ ID NO: 649063 - protein, 14 aa, Homo sapiens
  CDR3 for alpha chain variable domain of TCR clone 324532 (TRAV13-1, TRAJ35)
CAARKGGFGNVLHC

SEQ ID NO: 649064 - protein, 13 aa, Homo sapiens
  CDR3 for beta chain variable domain of TCR clone 324532 (TRBV7-3, TRBJ1-1)
CASSRDWGAEAFF

SEQ ID NO: 649065 - protein, 14 aa, Homo sapiens
  CDR3 for alpha chain variable domain of TCR clone 324533 (TRAV20, TRAJ42)
CAVQAGGSQGNLIF

SEQ ID NO: 649066 - protein, 14 aa, Homo sapiens
  CDR3 for beta chain variable domain of TCR clone 324533 (TRBV28, TRBJ1-2)
CAGRIQGANCGYTF

SEQ ID NO: 649067 - protein, 14 aa, Homo sapiens
  CDR3 for alpha chain variable domain of TCR clone 324534 (TRAV1-2, TRAJ16)
CAVNRFSDGQKLLF

SEQ ID NO: 649068 - protein, 18 aa, Homo sapiens
  CDR3 for beta chain variable domain of TCR clone 324534 (TRBV4-1, TRBJ2-7)
CASSQDTGAGSGLNEQYF

SEQ ID NO: 649069 - protein, 14 aa, Homo sapiens
  CDR3 for alpha chain variable domain of TCR clone 324535 (TRAV26-1, TRAJ38)
CVADNAGNNRKLIW

SEQ ID NO: 649070 - protein, 16 aa, Homo sapiens
  CDR3 for beta chain variable domain of TCR clone 324535 (TRBV20-1, TRBJ2-7)
CSASTSGRLSSYEQYF

SEQ ID NO: 649071 - protein, 11 aa, Homo sapiens
  CDR3 for alpha chain variable domain of TCR clone 324536 (TRAV1-2, TRAJ20)
CAVANDYKLSF

SEQ ID NO: 649072 - protein, 18 aa, Homo sapiens
  CDR3 for beta chain variable domain of TCR clone 324536 (TRBV25-1, TRBJ1-2)
CASSGLQNGQGLIFGYTF

SEQ ID NO: 649073 - protein, 13 aa, Homo sapiens
  CDR3 for alpha chain variable domain of TCR clone 324537 (TRAV8-2, TRAJ15)
CVVRNQAGTALIF

SEQ ID NO: 649074 - protein, 19 aa, Homo sapiens
  CDR3 for beta chain variable domain of TCR clone 324537 (TRBV19, TRBJ2-5)
CASSIGQVTDFFLGETQYF

SEQ ID NO: 649075 - protein, 15 aa, Homo sapiens
  CDR3 for alpha chain variable domain of TCR clone 324538 (TRAV3, TRAJ9)
CAVRARNTGGFKTIF

SEQ ID NO: 649076 - protein, 15 aa, Homo sapiens
  CDR3 for beta chain variable domain of TCR clone 324538 (TRBV28, TRBJ2-7)
CASSRWDRGSYEQYF

SEQ ID NO: 649077 - protein, 17 aa, Homo sapiens
  CDR3 for alpha chain variable domain of TCR clone 324539 (TRAV3, TRAJ42)
CAVRDRDYGGSQGNLIF

SEQ ID NO: 649078 - protein, 15 aa, Homo sapiens
  CDR3 for beta chain variable domain of TCR clone 324539 (TRBV12-4, TRBJ2-2)
CASGPGQLNTGELFF

SEQ ID NO: 649079 - protein, 14 aa, Homo sapiens
  CDR3 for alpha chain variable domain of TCR clone 324540 (TRAV13-1, TRAJ35)
FAASKGGFGNVLHC

SEQ ID NO: 649080 - protein, 13 aa, Homo sapiens
  CDR3 for beta chain variable domain of TCR clone 324540 (TRBV7-2, TRBJ2-7)
CASSSPSGSEQYF

SEQ ID NO: 649081 - protein, 18 aa, Homo sapiens
  CDR3 for alpha chain variable domain of TCR clone 324541 (TRAV13-1, TRAJ52)
CAAKNPNASGTSYGKLTF

SEQ ID NO: 649082 - protein, 14 aa, Homo sapiens
  CDR3 for beta chain variable domain of TCR clone 324541 (TRBV4-1, TRBJ2-2)
CASSQAVNTGELFF

SEQ ID NO: 649083 - protein, 14 aa, Homo sapiens
  CDR3 for alpha chain variable domain of TCR clone 324542 (TRAV2, TRAJ37)
CAVEDLGNTGKLIF

SEQ ID NO: 649084 - protein, 12 aa, Homo sapiens
  CDR3 for beta chain variable domain of TCR clone 324542 (TRBV25-1, TRBJ2-2)
VHRGTNTGELFF

SEQ ID NO: 649085 - protein, 10 aa, Homo sapiens
  CDR3 for alpha chain variable domain of TCR clone 324543 (TRAV8-3, TRAJ43)
WAVALADMRF

SEQ ID NO: 649086 - protein, 17 aa, Homo sapiens
  CDR3 for beta chain variable domain of TCR clone 324543 (TRBV10-1, TRBJ2-1)
CASSPQRAGGPFNEQFF

SEQ ID NO: 649087 - protein, 13 aa, Homo sapiens
  CDR3 for alpha chain variable domain of TCR clone 324544 (TRAV8-6, TRAJ49)
CAVITNTGNQFYF

SEQ ID NO: 649088 - protein, 14 aa, Homo sapiens
  CDR3 for beta chain variable domain of TCR clone 324544 (TRBV5-1, TRBJ2-7)
CASSRGESLYEQYV

SEQ ID NO: 649089 - protein, 15 aa, Homo sapiens
  CDR3 for alpha chain variable domain of TCR clone 324545 (TRAV27, TRAJ38)
CAARRNAGNNRKRIW

SEQ ID NO: 649090 - protein, 20 aa, Homo sapiens
  CDR3 for beta chain variable domain of TCR clone 324545 (TRBV7-8, TRBJ2-2)
CASSHLFPGPTIHITGELFF

SEQ ID NO: 649091 - protein, 14 aa, Homo sapiens
  CDR3 for alpha chain variable domain of TCR clone 324546 (TRAV1-2, TRAJ16)
CAVNRFSDGQKLLF

SEQ ID NO: 649092 - protein, 13 aa, Homo sapiens
  CDR3 for beta chain variable domain of TCR clone 324546 (TRBV12-5, TRBJ2-3)
CASGDRQSDTQYS

SEQ ID NO: 649093 - protein, 14 aa, Homo sapiens
  CDR3 for alpha chain variable domain of TCR clone 324547 (TRAV13-1, TRAJ24)
CAASRTDSWGKLQF

SEQ ID NO: 649094 - protein, 16 aa, Homo sapiens
  CDR3 for beta chain variable domain of TCR clone 324547 (TRBV7-3, TRBJ2-2)
CASSLKRGTLSGELFF

SEQ ID NO: 649095 - protein, 14 aa, Homo sapiens
  CDR3 for alpha chain variable domain of TCR clone 324548 (TRAV12-2, TRAJ9)
CAVNALEGGFKTIF

SEQ ID NO: 649096 - protein, 17 aa, Homo sapiens
  CDR3 for beta chain variable domain of TCR clone 324548 (TRBV7-2, TRBJ2-5)
CASSSGLAGDGQETQYF

SEQ ID NO: 649097 - protein, 13 aa, Homo sapiens
  CDR3 for alpha chain variable domain of TCR clone 324549 (TRAV13-2, TRAJ13)
CAERPGGYQKVTF

SEQ ID NO: 649098 - protein, 14 aa, Homo sapiens
  CDR3 for beta chain variable domain of TCR clone 324549 (TRBV19, TRBJ2-1)
CASPTCVLSGEQFF

SEQ ID NO: 649099 - protein, 13 aa, Homo sapiens
  CDR3 for alpha chain variable domain of TCR clone 324550 (TRAV8-3, TRAJ48)
CAVVPFGNEKLTF

SEQ ID NO: 649100 - protein, 15 aa, Homo sapiens
  CDR3 for beta chain variable domain of TCR clone 324550 (TRBV11-2, TRBJ2-1)
CASSSPAPRYNEQFF

SEQ ID NO: 649101 - protein, 17 aa, Homo sapiens
  CDR3 for alpha chain variable domain of TCR clone 324551 (TRAV8-3, TRAJ53)
CAVGRLNSGGSNYKLKF

SEQ ID NO: 649102 - protein, 14 aa, Homo sapiens
  CDR3 for beta chain variable domain of TCR clone 324551 (TRBV12-5, TRBJ2-5)
CASGSRTHQETQYF

SEQ ID NO: 649103 - protein, 15 aa, Homo sapiens
  CDR3 for alpha chain variable domain of TCR clone 324552 (TRAV25, TRAJ53)
CAGPRSGGSNYKMTF

SEQ ID NO: 649104 - protein, 15 aa, Homo sapiens
  CDR3 for beta chain variable domain of TCR clone 324552 (TRBV12-4, TRBJ2-5)
CASSGTGQAQETQYF

SEQ ID NO: 649105 - protein, 15 aa, Homo sapiens
  CDR3 for alpha chain variable domain of TCR clone 324553 (TRAV13-1, TRAJ10)
CAATILTGGGNKLTF

SEQ ID NO: 649106 - protein, 15 aa, Homo sapiens
  CDR3 for beta chain variable domain of TCR clone 324553 (TRBV2, TRBJ2-7)
CASTLLGSGETEQYF

SEQ ID NO: 649107 - protein, 15 aa, Homo sapiens
  CDR3 for alpha chain variable domain of TCR clone 324554 (TRAV12-3, TRAJ6)
CAMSATTGGSYIPTF

SEQ ID NO: 649108 - protein, 13 aa, Homo sapiens
  CDR3 for beta chain variable domain of TCR clone 324554 (TRBV7-9, TRBJ1-2)
CAGFLRQSFVDTF

SEQ ID NO: 649109 - protein, 12 aa, Homo sapiens
  CDR3 for alpha chain variable domain of TCR clone 324555 (TRAV13-1, TRAJ49)
CAASIRSNQFYV

SEQ ID NO: 649110 - protein, 14 aa, Homo sapiens
  CDR3 for beta chain variable domain of TCR clone 324555 (TRBV7-2, TRBJ2-1)
CASSPGLAGNEQFF

SEQ ID NO: 649111 - protein, 12 aa, Homo sapiens
  CDR3 for alpha chain variable domain of TCR clone 324556 (TRAV13-1, TRAJ16)
CAAVSDGQKLLF

SEQ ID NO: 649112 - protein, 16 aa, Homo sapiens
  CDR3 for beta chain variable domain of TCR clone 324556 (TRBV7-3, TRBJ2-2)
CASSLKRGTLSGELFF

SEQ ID NO: 649113 - protein, 13 aa, Homo sapiens
  CDR3 for alpha chain variable domain of TCR clone 324557 (TRAV13-1, TRAJ27)
CAAIGPEQANQPL

SEQ ID NO: 649114 - protein, 15 aa, Homo sapiens
  CDR3 for beta chain variable domain of TCR clone 324557 (TRBV20-1, TRBJ2-7)
CSARDRVSGMDEQYF

SEQ ID NO: 649115 - protein, 14 aa, Homo sapiens
  CDR3 for alpha chain variable domain of TCR clone 324558 (TRAV35, TRAJ53)
CAGNSGGSNYKLTF

SEQ ID NO: 649116 - protein, 14 aa, Homo sapiens
  CDR3 for beta chain variable domain of TCR clone 324558 (TRBV19, TRBJ2-7)
CASSIFAGTYEQYF

SEQ ID NO: 649117 - protein, 12 aa, Homo sapiens
  CDR3 for alpha chain variable domain of TCR clone 324559 (TRAV13-1, TRAJ9)
CASHTGGFKTIF

SEQ ID NO: 649118 - protein, 13 aa, Homo sapiens
  CDR3 for beta chain variable domain of TCR clone 324559 (TRBV28, TRBJ2-7)
CASKAGGVYEQYF

SEQ ID NO: 649119 - protein, 14 aa, Homo sapiens
  CDR3 for alpha chain variable domain of TCR clone 324560 (TRAV12-3, TRAJ54)
CAMSALQGAQKLVF

SEQ ID NO: 649120 - protein, 16 aa, Homo sapiens
  CDR3 for beta chain variable domain of TCR clone 324560 (TRBV20-1, TRBJ1-2)
CSASMGQGVANYGYTF

SEQ ID NO: 649121 - protein, 13 aa, Homo sapiens
  CDR3 for alpha chain variable domain of TCR clone 324561 (TRAV26-2, TRAJ43)
CILRAVNNHDMRF

SEQ ID NO: 649122 - protein, 15 aa, Homo sapiens
  CDR3 for beta chain variable domain of TCR clone 324561 (TRBV7-2, TRBJ2-1)
CASTHGTGIYNEQLF

SEQ ID NO: 649123 - protein, 13 aa, Homo sapiens
  CDR3 for alpha chain variable domain of TCR clone 324562 (TRAV21, TRAJ27)
CAARPGNAGKSTF

SEQ ID NO: 649124 - protein, 13 aa, Homo sapiens
  CDR3 for beta chain variable domain of TCR clone 324562 (TRBV7-3, TRBJ2-5)
CASSFRGGETQYF

SEQ ID NO: 649125 - protein, 14 aa, Homo sapiens
  CDR3 for alpha chain variable domain of TCR clone 324563 (TRAV1-2, TRAJ16)
CAVNRFSDGQKLLF

SEQ ID NO: 649126 - protein, 15 aa, Homo sapiens
  CDR3 for beta chain variable domain of TCR clone 324563 (TRBV27, TRBJ1-1)
CASSPYADPYTEAFY

SEQ ID NO: 649127 - protein, 13 aa, Homo sapiens
  CDR3 for alpha chain variable domain of TCR clone 324564 (TRAV27, TRAJ40)
CAGPPSGTSKYIF

SEQ ID NO: 649128 - protein, 13 aa, Homo sapiens
  CDR3 for beta chain variable domain of TCR clone 324564 (TRBV28, TRBJ1-2)
CAGRDRGNYGYTF

SEQ ID NO: 649129 - protein, 14 aa, Homo sapiens
  CDR3 for alpha chain variable domain of TCR clone 324565 (TRAV27, TRAJ23)
CAGLSYNQGGKLIF

SEQ ID NO: 649130 - protein, 14 aa, Homo sapiens
  CDR3 for beta chain variable domain of TCR clone 324565 (TRBV20-1, TRBJ2-1)
CSAQIGGSANEQFF

SEQ ID NO: 649131 - protein, 17 aa, Homo sapiens
  CDR3 for alpha chain variable domain of TCR clone 324566 (TRAV17, TRAJ52)
CATPPNAGGTSYGKLTF

SEQ ID NO: 649132 - protein, 16 aa, Homo sapiens
  CDR3 for beta chain variable domain of TCR clone 324566 (TRBV4-1, TRBJ1-4)
CASTRVRQPTNEKLFF

SEQ ID NO: 649133 - protein, 14 aa, Homo sapiens
  CDR3 for alpha chain variable domain of TCR clone 324567 (TRAV21, TRAJ45)
CAASSGGGADGLTF

SEQ ID NO: 649134 - protein, 14 aa, Homo sapiens
  CDR3 for beta chain variable domain of TCR clone 324567 (TRBV19, TRBJ2-3)
CASSIRQGADMQYF

SEQ ID NO: 649135 - protein, 14 aa, Homo sapiens
  CDR3 for alpha chain variable domain of TCR clone 324568 (TRAV12-2, TRAJ8)
CAVKENTGFQKLVC

SEQ ID NO: 649136 - protein, 13 aa, Homo sapiens
  CDR3 for beta chain variable domain of TCR clone 324568 (TRBV18, TRBJ1-2)
CASSASATEGYTF

SEQ ID NO: 649137 - protein, 10 aa, Homo sapiens
  CDR3 for alpha chain variable domain of TCR clone 324569 (TRAV8-4, TRAJ20)
CAVTNVLTTT

SEQ ID NO: 649138 - protein, 16 aa, Homo sapiens
  CDR3 for beta chain variable domain of TCR clone 324569 (TRBV6-1, TRBJ1-2)
CASSGAWQGRSHGDSF

SEQ ID NO: 649139 - protein, 13 aa, Homo sapiens
  CDR3 for alpha chain variable domain of TCR clone 324570 (TRAV27, TRAJ41)
CAGEVNSGYALNF

SEQ ID NO: 649140 - protein, 14 aa, Homo sapiens
  CDR3 for beta chain variable domain of TCR clone 324570 (TRBV25-1, TRBJ1-1)
CASTHLGGNTEAFF

SEQ ID NO: 649141 - protein, 11 aa, Homo sapiens
  CDR3 for alpha chain variable domain of TCR clone 324571 (TRAV20, TRAJ23)
CACNQGGKLIF

SEQ ID NO: 649142 - protein, 16 aa, Homo sapiens
  CDR3 for beta chain variable domain of TCR clone 324571 (TRBV7-8, TRBJ2-5)
CASSFGGQPAQENQYF

SEQ ID NO: 649143 - protein, 12 aa, Homo sapiens
  CDR3 for alpha chain variable domain of TCR clone 324572 (TRAV13-1, TRAJ11)
CAGPSVYSTLTF

SEQ ID NO: 649144 - protein, 13 aa, Homo sapiens
  CDR3 for beta chain variable domain of TCR clone 324572 (TRBV12-4, TRBJ2-1)
CASSVSPSNEQFF

SEQ ID NO: 649145 - protein, 15 aa, Homo sapiens
  CDR3 for alpha chain variable domain of TCR clone 324573 (TRAV5, TRAJ33)
YTEAPAMDSNYQLIW

SEQ ID NO: 649146 - protein, 12 aa, Homo sapiens
  CDR3 for beta chain variable domain of TCR clone 324573 (TRBV6-3, TRBJ2-7)
CASSLTPYEQYF

SEQ ID NO: 649147 - protein, 11 aa, Homo sapiens
  CDR3 for alpha chain variable domain of TCR clone 324574 (TRAV21, TRAJ11)
CAVNGYSTLTF

SEQ ID NO: 649148 - protein, 16 aa, Homo sapiens
  CDR3 for beta chain variable domain of TCR clone 324574 (TRBV28, TRBJ2-7)
CASSLFFETGGPEQYF

SEQ ID NO: 649149 - protein, 14 aa, Homo sapiens
  CDR3 for alpha chain variable domain of TCR clone 324575 (TRAV38-1, TRAJ45)
CASHSGGGADGLTF

SEQ ID NO: 649150 - protein, 15 aa, Homo sapiens
  CDR3 for beta chain variable domain of TCR clone 324575 (TRBV6-1, TRBJ2-3)
CASSERGGITDTQYF

SEQ ID NO: 649151 - protein, 14 aa, Homo sapiens
  CDR3 for alpha chain variable domain of TCR clone 324576 (TRAV8-4, TRAJ29)
CAGSAVEGNTTLVF

SEQ ID NO: 649152 - protein, 13 aa, Homo sapiens
  CDR3 for beta chain variable domain of TCR clone 324576 (TRBV12-4, TRBJ2-7)
CASSSQGRYEQYF

SEQ ID NO: 649153 - protein, 15 aa, Homo sapiens
  CDR3 for alpha chain variable domain of TCR clone 324577 (TRAV16, TRAJ10)
CALEGLTGGGNKLTF

SEQ ID NO: 649154 - protein, 16 aa, Homo sapiens
  CDR3 for beta chain variable domain of TCR clone 324577 (TRBV12-4, TRBJ1-5)
CASSRPVGGSNQTQHF

SEQ ID NO: 649155 - protein, 16 aa, Homo sapiens
  CDR3 for alpha chain variable domain of TCR clone 324578 (TRAV3, TRAJ6)
CAVRDGMGRRKLHTYI

SEQ ID NO: 649156 - protein, 16 aa, Homo sapiens
  CDR3 for beta chain variable domain of TCR clone 324578 (TRBV7-3, TRBJ2-2)
CASSLKRGTLSGELFF

SEQ ID NO: 649157 - protein, 14 aa, Homo sapiens
  CDR3 for alpha chain variable domain of TCR clone 324579 (TRAV13-1, TRAJ35)
CAASKGGFGNVLHC

SEQ ID NO: 649158 - protein, 17 aa, Homo sapiens
  CDR3 for beta chain variable domain of TCR clone 324579 (TRBV12-4, TRBJ2-1)
CASSPGLAGGRINEQFF

SEQ ID NO: 649159 - protein, 15 aa, Homo sapiens
  CDR3 for alpha chain variable domain of TCR clone 324580 (TRAV38-1, TRAJ37)
CAFIHGSGNTGKLIF

SEQ ID NO: 649160 - protein, 13 aa, Homo sapiens
  CDR3 for beta chain variable domain of TCR clone 324580 (TRBV11-2, TRBJ2-5)
CASSFSSQETQYF

SEQ ID NO: 649161 - protein, 16 aa, Homo sapiens
  CDR3 for alpha chain variable domain of TCR clone 324581 (TRAV3, TRAJ10)
CAVGDMRAGGGNKLTF

SEQ ID NO: 649162 - protein, 16 aa, Homo sapiens
  CDR3 for beta chain variable domain of TCR clone 324581 (TRBV19, TRBJ2-2)
CASSFPGQGLAGELFF

SEQ ID NO: 649163 - protein, 11 aa, Homo sapiens
  CDR3 for alpha chain variable domain of TCR clone 324582 (TRAV21, TRAJ31)
CAVRNNARLMF

SEQ ID NO: 649164 - protein, 17 aa, Homo sapiens
  CDR3 for beta chain variable domain of TCR clone 324582 (TRBV28, TRBJ1-5)
CGSSLAWLVSSNRPQHF

SEQ ID NO: 649165 - protein, 16 aa, Homo sapiens
  CDR3 for alpha chain variable domain of TCR clone 324583 (TRAV27, TRAJ13)
SAGAKSDSGGYQKVTF

SEQ ID NO: 649166 - protein, 15 aa, Homo sapiens
  CDR3 for beta chain variable domain of TCR clone 324583 (TRBV29-1, TRBJ2-1)
CSVGRHALFYNEQFF

SEQ ID NO: 649167 - protein, 14 aa, Homo sapiens
  CDR3 for alpha chain variable domain of TCR clone 324584 (TRAV13-2, TRAJ43)
CAEIPTYNNNDMRF

SEQ ID NO: 649168 - protein, 15 aa, Homo sapiens
  CDR3 for beta chain variable domain of TCR clone 324584 (TRBV7-9, TRBJ2-2)
WASGPLDTFPGELFF

SEQ ID NO: 649169 - protein, 13 aa, Homo sapiens
  CDR3 for alpha chain variable domain of TCR clone 324585 (TRAV16, TRAJ22)
SAMLAGSARQLTF

SEQ ID NO: 649170 - protein, 16 aa, Homo sapiens
  CDR3 for beta chain variable domain of TCR clone 324585 (TRBV20-1, TRBJ2-6)
CSASSQGYDGANVLTF

SEQ ID NO: 649171 - protein, 15 aa, Homo sapiens
  CDR3 for alpha chain variable domain of TCR clone 324586 (TRAV20, TRAJ52)
CAVQAGGTSYGKLTF

SEQ ID NO: 649172 - protein, 14 aa, Homo sapiens
  CDR3 for beta chain variable domain of TCR clone 324586 (TRBV7-2, TRBJ2-7)
CASSPKTSFYEQYF

SEQ ID NO: 649173 - protein, 11 aa, Homo sapiens
  CDR3 for alpha chain variable domain of TCR clone 324587 (TRAV27, TRAJ57)
CAGVRRADLKG

SEQ ID NO: 649174 - protein, 11 aa, Homo sapiens
  CDR3 for beta chain variable domain of TCR clone 324587 (TRBV11-2, TRBJ1-1)
CASSINTEAFF

SEQ ID NO: 649175 - protein, 13 aa, Homo sapiens
  CDR3 for alpha chain variable domain of TCR clone 324588 (TRAV13-2, TRAJ15)
CVERPQAGTALIF

SEQ ID NO: 649176 - protein, 15 aa, Homo sapiens
  CDR3 for beta chain variable domain of TCR clone 324588 (TRBV11-2, TRBJ2-7)
CASRFPGTGGYEQYF

SEQ ID NO: 649177 - protein, 14 aa, Homo sapiens
  CDR3 for alpha chain variable domain of TCR clone 324589 (TRAV20, TRAJ56)
CAVQFGGANSKLTF

SEQ ID NO: 649178 - protein, 14 aa, Homo sapiens
  CDR3 for beta chain variable domain of TCR clone 324589 (TRBV20-1, TRBJ2-7)
CSAPRGRRSSEQSF

SEQ ID NO: 649179 - protein, 15 aa, Homo sapiens
  CDR3 for alpha chain variable domain of TCR clone 324590 (TRAV8-6, TRAJ11)
CAVNFMNSGYSTLTF

SEQ ID NO: 649180 - protein, 18 aa, Homo sapiens
  CDR3 for beta chain variable domain of TCR clone 324590 (TRBV18, TRBJ2-3)
CASSYTSGAAGGTDTQYF

SEQ ID NO: 649181 - protein, 16 aa, Homo sapiens
  CDR3 for alpha chain variable domain of TCR clone 324591 (TRAV3, TRAJ37)
CAVRGKGSGITGKLIF

SEQ ID NO: 649182 - protein, 11 aa, Homo sapiens
  CDR3 for beta chain variable domain of TCR clone 324591 (TRBV12-4, TRBJ2-3)
CASTATDTQYF

SEQ ID NO: 649183 - protein, 19 aa, Homo sapiens
  CDR3 for alpha chain variable domain of TCR clone 324592 (TRAV13-1, TRAJ52)
CAASPYQNAGSTSYGKLTF

SEQ ID NO: 649184 - protein, 13 aa, Homo sapiens
  CDR3 for beta chain variable domain of TCR clone 324592 (TRBV29-1, TRBJ2-5)
CSATTSGGETQYV

SEQ ID NO: 649185 - protein, 14 aa, Homo sapiens
  CDR3 for alpha chain variable domain of TCR clone 324593 (TRAV8-3, TRAJ4)
CAVGASGGYNKLIF

SEQ ID NO: 649186 - protein, 16 aa, Homo sapiens
  CDR3 for beta chain variable domain of TCR clone 324593 (TRBV4-3, TRBJ2-2)
CASSRLQGSGTGKLFF

SEQ ID NO: 649187 - protein, 14 aa, Homo sapiens
  CDR3 for alpha chain variable domain of TCR clone 324594 (TRAV14/DV4, TRAJ20)
CAMRENLNDYKLSF

SEQ ID NO: 649188 - protein, 15 aa, Homo sapiens
  CDR3 for beta chain variable domain of TCR clone 324594 (TRBV7-9, TRBJ2-7)
CASSLALAEAYEQYF

SEQ ID NO: 649189 - protein, 12 aa, Homo sapiens
  CDR3 for alpha chain variable domain of TCR clone 324595 (TRAV17, TRAJ49)
CATVTTGNQFYC

SEQ ID NO: 649190 - protein, 18 aa, Homo sapiens
  CDR3 for beta chain variable domain of TCR clone 324595 (TRBV11-2, TRBJ2-6)
CASSLNPFLGTGANVLTF

SEQ ID NO: 649191 - protein, 14 aa, Homo sapiens
  CDR3 for alpha chain variable domain of TCR clone 324596 (TRAV21, TRAJ35)
CAVMPLGFGNVLHC

SEQ ID NO: 649192 - protein, 12 aa, Homo sapiens
  CDR3 for beta chain variable domain of TCR clone 324596 (TRBV7-9, TRBJ2-7)
CASSIKREEQYF

SEQ ID NO: 649193 - protein, 14 aa, Homo sapiens
  CDR3 for alpha chain variable domain of TCR clone 324597 (TRAV8-1, TRAJ5)
CAVSMDTGRRALTF

SEQ ID NO: 649194 - protein, 15 aa, Homo sapiens
  CDR3 for beta chain variable domain of TCR clone 324597 (TRBV19, TRBJ2-4)
CASRGPRRGENTQYF

SEQ ID NO: 649195 - protein, 17 aa, Homo sapiens
  CDR3 for alpha chain variable domain of TCR clone 324598 (TRAV13-1, TRAJ52)
CAASSGAGGTSYGKLTF

SEQ ID NO: 649196 - protein, 12 aa, Homo sapiens
  CDR3 for beta chain variable domain of TCR clone 324598 (TRBV11-2, TRBJ2-2)
CASSLGGRELFF

SEQ ID NO: 649197 - protein, 15 aa, Homo sapiens
  CDR3 for alpha chain variable domain of TCR clone 324599 (TRAV3, TRAJ17)
CAVSPKEAAGNKLTF

SEQ ID NO: 649198 - protein, 14 aa, Homo sapiens
  CDR3 for beta chain variable domain of TCR clone 324599 (TRBV5-1, TRBJ2-3)
CASSLFGPTDTPYF

SEQ ID NO: 649199 - protein, 14 aa, Homo sapiens
  CDR3 for alpha chain variable domain of TCR clone 324600 (TRAV12-3, TRAJ10)
SHLPLTGGGNKFTF

SEQ ID NO: 649200 - protein, 13 aa, Homo sapiens
  CDR3 for beta chain variable domain of TCR clone 324600 (TRBV4-1, TRBJ2-2)
CASSQENTGELFF

SEQ ID NO: 649201 - protein, 13 aa, Homo sapiens
  CDR3 for alpha chain variable domain of TCR clone 324601 (TRAV2, TRAJ40)
CAVVTSGTYKYIF

SEQ ID NO: 649202 - protein, 14 aa, Homo sapiens
  CDR3 for beta chain variable domain of TCR clone 324601 (TRBV6-1, TRBJ1-3)
SASVQGGGGNTIYF

SEQ ID NO: 649203 - protein, 13 aa, Homo sapiens
  CDR3 for alpha chain variable domain of TCR clone 324602 (TRAV3, TRAJ31)
CAVREGNDARLMF

SEQ ID NO: 649204 - protein, 15 aa, Homo sapiens
  CDR3 for beta chain variable domain of TCR clone 324602 (TRBV6-1, TRBJ1-1)
CASRTPGQLNTEAFF

SEQ ID NO: 649205 - protein, 13 aa, Homo sapiens
  CDR3 for alpha chain variable domain of TCR clone 324603 (TRAV12-3, TRAJ9)
CAMRNTGGFKTIF

SEQ ID NO: 649206 - protein, 18 aa, Homo sapiens
  CDR3 for beta chain variable domain of TCR clone 324603 (TRBV18, TRBJ2-3)
CASSYTSGAAGGTDTQYF

SEQ ID NO: 649207 - protein, 15 aa, Homo sapiens
  CDR3 for alpha chain variable domain of TCR clone 324604 (TRAV38-1, TRAJ37)
CAFIHGSGNTGKLSF

SEQ ID NO: 649208 - protein, 12 aa, Homo sapiens
  CDR3 for beta chain variable domain of TCR clone 324604 (TRBV7-9, TRBJ2-7)
CASSFGSYEQYF

SEQ ID NO: 649209 - protein, 17 aa, Homo sapiens
  CDR3 for alpha chain variable domain of TCR clone 324605 (TRAV35, TRAJ52)
CAGQLAAGGTSYGKVTF

SEQ ID NO: 649210 - protein, 12 aa, Homo sapiens
  CDR3 for beta chain variable domain of TCR clone 324605 (TRBV20-1, TRBJ2-7)
CSAGRRQSEQYF

SEQ ID NO: 649211 - protein, 17 aa, Homo sapiens
  CDR3 for alpha chain variable domain of TCR clone 324606 (TRAV17, TRAJ7)
CATLGRLAFGKGNQVVV

SEQ ID NO: 649212 - protein, 13 aa, Homo sapiens
  CDR3 for beta chain variable domain of TCR clone 324606 (TRBV12-4, TRBJ2-7)
CASSLERVREPYF

SEQ ID NO: 649213 - protein, 15 aa, Homo sapiens
  CDR3 for alpha chain variable domain of TCR clone 324607 (TRAV26-1, TRAJ29)
CIVRVEGAGNTPRVF

SEQ ID NO: 649214 - protein, 15 aa, Homo sapiens
  CDR3 for beta chain variable domain of TCR clone 324607 (TRBV7-9, TRBJ1-5)
CASSQGHPPNQPQHF

SEQ ID NO: 649215 - protein, 16 aa, Homo sapiens
  CDR3 for alpha chain variable domain of TCR clone 324608 (TRAV3, TRAJ37)
CAVRGKGSGNTGKLIF

SEQ ID NO: 649216 - protein, 14 aa, Homo sapiens
  CDR3 for beta chain variable domain of TCR clone 324608 (TRBV2, TRBJ1-5)
CASSGTVSNQPQHF

SEQ ID NO: 649217 - protein, 14 aa, Homo sapiens
  CDR3 for alpha chain variable domain of TCR clone 324609 (TRAV26-1, TRAJ22)
CIVRVYGSARQLTF

SEQ ID NO: 649218 - protein, 17 aa, Homo sapiens
  CDR3 for beta chain variable domain of TCR clone 324609 (TRBV7-3, TRBJ2-3)
CASSPGGLAGFRDTQYF

SEQ ID NO: 649219 - protein, 15 aa, Homo sapiens
  CDR3 for alpha chain variable domain of TCR clone 324610 (TRAV21, TRAJ38)
CPVRQDAGNNRKLIW

SEQ ID NO: 649220 - protein, 11 aa, Homo sapiens
  CDR3 for beta chain variable domain of TCR clone 324610 (TRBV12-4, TRBJ2-3)
CASTATDTQYF

SEQ ID NO: 649221 - protein, 13 aa, Homo sapiens
  CDR3 for alpha chain variable domain of TCR clone 324611 (TRAV21, TRAJ20)
CAVGLRVDYKLSF

SEQ ID NO: 649222 - protein, 15 aa, Homo sapiens
  CDR3 for beta chain variable domain of TCR clone 324611 (TRBV6-1, TRBJ2-1)
CASSEAAYSYNEQFF

SEQ ID NO: 649223 - protein, 21 aa, Homo sapiens
  CDR3 for alpha chain variable domain of TCR clone 324612 (TRAV8-4, TRAJ8)
CAVSGEHRLPETCIWNWHPTS

SEQ ID NO: 649224 - protein, 15 aa, Homo sapiens
  CDR3 for beta chain variable domain of TCR clone 324612 (TRBV5-4, TRBJ2-5)
CASSFFGEGMETQYF

SEQ ID NO: 649225 - protein, 15 aa, Homo sapiens
  CDR3 for alpha chain variable domain of TCR clone 324613 (TRAV17, TRAJ57)
CATGHSQGGSEKLVF

SEQ ID NO: 649226 - protein, 17 aa, Homo sapiens
  CDR3 for beta chain variable domain of TCR clone 324613 (TRBV20-1, TRBJ2-1)
CSASSSGLAGSYNEQFF

SEQ ID NO: 649227 - protein, 14 aa, Homo sapiens
  CDR3 for alpha chain variable domain of TCR clone 324614 (TRAV17, TRAJ57)
CATDPQGGSEKLVF

SEQ ID NO: 649228 - protein, 12 aa, Homo sapiens
  CDR3 for beta chain variable domain of TCR clone 324614 (TRBV12-4, TRBJ2-7)
CASNPGGGEQYF

SEQ ID NO: 649229 - protein, 15 aa, Homo sapiens
  CDR3 for alpha chain variable domain of TCR clone 324615 (TRAV26-1, TRAJ44)
CIVRANTGTASKLTF

SEQ ID NO: 649230 - protein, 13 aa, Homo sapiens
  CDR3 for beta chain variable domain of TCR clone 324615 (TRBV19, TRBJ1-5)
CASSIGGNQPQHF

SEQ ID NO: 649231 - protein, 16 aa, Homo sapiens
  CDR3 for alpha chain variable domain of TCR clone 324616 (TRAV3, TRAJ18)
CAVRYGRGSTLGRLYF

SEQ ID NO: 649232 - protein, 15 aa, Homo sapiens
  CDR3 for beta chain variable domain of TCR clone 324616 (TRBV7-9, TRBJ1-6)
CASSSPGCGNSPLHF

SEQ ID NO: 649233 - protein, 13 aa, Homo sapiens
  CDR3 for alpha chain variable domain of TCR clone 324617 (TRAV8-6, TRAJ13)
CAVSSGGYQKGTF

SEQ ID NO: 649234 - protein, 15 aa, Homo sapiens
  CDR3 for beta chain variable domain of TCR clone 324617 (TRBV7-9, TRBJ2-7)
CASSLPMGQANEQDF

SEQ ID NO: 649235 - protein, 14 aa, Homo sapiens
  CDR3 for alpha chain variable domain of TCR clone 324618 (TRAV8-2, TRAJ4)
CVVSPSGGYNKLIF

SEQ ID NO: 649236 - protein, 14 aa, Homo sapiens
  CDR3 for beta chain variable domain of TCR clone 324618 (TRBV10-3, TRBJ2-2)
CASSEVSHSGELFF

SEQ ID NO: 649237 - protein, 11 aa, Homo sapiens
  CDR3 for alpha chain variable domain of TCR clone 324619 (TRAV8-4, TRAJ20)
CAVTNVLTTTS

SEQ ID NO: 649238 - protein, 14 aa, Homo sapiens
  CDR3 for beta chain variable domain of TCR clone 324619 (TRBV19, TRBJ2-1)
CASPTFVLSGEQFF

SEQ ID NO: 649239 - protein, 14 aa, Homo sapiens
  CDR3 for alpha chain variable domain of TCR clone 324620 (TRAV12-2, TRAJ40)
CAVTIPSGTSTTFF

SEQ ID NO: 649240 - protein, 15 aa, Homo sapiens
  CDR3 for beta chain variable domain of TCR clone 324620 (TRBV6-3, TRBJ2-7)
CASSSPGTVFYEQYF

SEQ ID NO: 649241 - protein, 11 aa, Homo sapiens
  CDR3 for alpha chain variable domain of TCR clone 324621 (TRAV1-1, TRAJ23)
CAVRQGGKLIF

SEQ ID NO: 649242 - protein, 20 aa, Homo sapiens
  CDR3 for beta chain variable domain of TCR clone 324621 (TRBV7-8, TRBJ2-2)
CASSHLFPGPTTHIPGELFF

SEQ ID NO: 649243 - protein, 14 aa, Homo sapiens
  CDR3 for alpha chain variable domain of TCR clone 324622 (TRAV12-3, TRAJ10)
SHLPLTGGGDKLTF

SEQ ID NO: 649244 - protein, 12 aa, Homo sapiens
  CDR3 for beta chain variable domain of TCR clone 324622 (TRBV7-9, TRBJ2-7)
CASRIKREEQYF

SEQ ID NO: 649245 - protein, 19 aa, Homo sapiens
  CDR3 for alpha chain variable domain of TCR clone 324623 (TRAV17, TRAJ40)
TASRAADTASYFCASKYIF

SEQ ID NO: 649246 - protein, 15 aa, Homo sapiens
  CDR3 for beta chain variable domain of TCR clone 324623 (TRBV27, TRBJ2-1)
CASSNGGGSSNEQFF

SEQ ID NO: 649247 - protein, 14 aa, Homo sapiens
  CDR3 for alpha chain variable domain of TCR clone 324624 (TRAV8-3, TRAJ36)
CAVGPITGANNLFF

SEQ ID NO: 649248 - protein, 15 aa, Homo sapiens
  CDR3 for beta chain variable domain of TCR clone 324624 (TRBV4-1, TRBJ2-1)
CASGQDPGNYNEQFF

SEQ ID NO: 649249 - protein, 11 aa, Homo sapiens
  CDR3 for alpha chain variable domain of TCR clone 324625 (TRAV17, TRAJ31)
CATSNNARPMF

SEQ ID NO: 649250 - protein, 16 aa, Homo sapiens
  CDR3 for beta chain variable domain of TCR clone 324625 (TRBV7-8, TRBJ2-4)
CASSSERTLAKNIQYF

SEQ ID NO: 649251 - protein, 14 aa, Homo sapiens
  CDR3 for alpha chain variable domain of TCR clone 324626 (TRAV2, TRAJ39)
CAVEGDNAGNMLTF

SEQ ID NO: 649252 - protein, 14 aa, Homo sapiens
  CDR3 for beta chain variable domain of TCR clone 324626 (TRBV28, TRBJ2-7)
CASSLRVRGNEQYF

SEQ ID NO: 649253 - protein, 16 aa, Homo sapiens
  CDR3 for alpha chain variable domain of TCR clone 324627 (TRAV30, TRAJ24)
CGTEIVDSDSWGKFQF

SEQ ID NO: 649254 - protein, 13 aa, Homo sapiens
  CDR3 for beta chain variable domain of TCR clone 324627 (TRBV7-3, TRBJ1-1)
CASSQDWGAEAFF

SEQ ID NO: 649255 - protein, 14 aa, Homo sapiens
  CDR3 for alpha chain variable domain of TCR clone 324628 (TRAV1-2, TRAJ8)
FAVREDTGFQKLVF

SEQ ID NO: 649256 - protein, 17 aa, Homo sapiens
  CDR3 for beta chain variable domain of TCR clone 324628 (TRBV20-1, TRBJ2-1)
CSASSSGLAGSYNEQFF

SEQ ID NO: 649257 - protein, 16 aa, Homo sapiens
  CDR3 for alpha chain variable domain of TCR clone 324629 (TRAV30, TRAJ24)
CGTEIVDADSWGKFQF

SEQ ID NO: 649258 - protein, 17 aa, Homo sapiens
  CDR3 for beta chain variable domain of TCR clone 324629 (TRBV3-1, TRBJ2-2)
CASSQFRDKVDTGELFF

SEQ ID NO: 649259 - protein, 13 aa, Homo sapiens
  CDR3 for alpha chain variable domain of TCR clone 324630 (TRAV1-2, TRAJ37)
CAGGSGNTGKLIF

SEQ ID NO: 649260 - protein, 14 aa, Homo sapiens
  CDR3 for beta chain variable domain of TCR clone 324630 (TRBV6-1, TRBJ2-6)
CASQQWAGANVLTF

SEQ ID NO: 649261 - protein, 13 aa, Homo sapiens
  CDR3 for alpha chain variable domain of TCR clone 324631 (TRAV12-2, TRAJ18)
CAVRGSTLGRLYF

SEQ ID NO: 649262 - protein, 18 aa, Homo sapiens
  CDR3 for beta chain variable domain of TCR clone 324631 (TRBV27, TRBJ2-3)
CASILSGTSGRGTDTQYF

SEQ ID NO: 649263 - protein, 12 aa, Homo sapiens
  CDR3 for alpha chain variable domain of TCR clone 324632 (TRAV12-3, TRAJ5)
CAMDTGRRALTF

SEQ ID NO: 649264 - protein, 12 aa, Homo sapiens
  CDR3 for beta chain variable domain of TCR clone 324632 (TRBV11-2, TRBJ2-2)
CASSLGGGELFF

SEQ ID NO: 649265 - protein, 14 aa, Homo sapiens
  CDR3 for alpha chain variable domain of TCR clone 324633 (TRAV13-1, TRAJ35)
CAASKGGFGTVLHF

SEQ ID NO: 649266 - protein, 13 aa, Homo sapiens
  CDR3 for beta chain variable domain of TCR clone 324633 (TRBV7-3, TRBJ1-1)
CASSQDWGAEAFF

SEQ ID NO: 649267 - protein, 14 aa, Homo sapiens
  CDR3 for alpha chain variable domain of TCR clone 324634 (TRAV2, TRAJ9)
CAVEDRSGGFKTIF

SEQ ID NO: 649268 - protein, 17 aa, Homo sapiens
  CDR3 for beta chain variable domain of TCR clone 324634 (TRBV15, TRBJ1-4)
CATSRYGTGDPNEKLFF

SEQ ID NO: 649269 - protein, 13 aa, Homo sapiens
  CDR3 for alpha chain variable domain of TCR clone 324635 (TRAV27, TRAJ23)
CAGVLPKGGKLIL

SEQ ID NO: 649270 - protein, 14 aa, Homo sapiens
  CDR3 for beta chain variable domain of TCR clone 324635 (TRBV5-8, TRBJ2-3)
CASSLSPSTDTQYF

SEQ ID NO: 649271 - protein, 11 aa, Homo sapiens
  CDR3 for alpha chain variable domain of TCR clone 324636 (TRAV25, TRAJ49)
CAGNTGNQFYF

SEQ ID NO: 649272 - protein, 14 aa, Homo sapiens
  CDR3 for beta chain variable domain of TCR clone 324636 (TRBV20-1, TRBJ2-3)
CSARGGTSTDTQYF

SEQ ID NO: 649273 - protein, 13 aa, Homo sapiens
  CDR3 for alpha chain variable domain of TCR clone 324637 (TRAV3, TRAJ8)
CAVRHTGFQKLVF

SEQ ID NO: 649274 - protein, 15 aa, Homo sapiens
  CDR3 for beta chain variable domain of TCR clone 324637 (TRBV5-5, TRBJ1-2)
CASSPYGSSAEGYTF

SEQ ID NO: 649275 - protein, 14 aa, Homo sapiens
  CDR3 for alpha chain variable domain of TCR clone 324638 (TRAV13-1, TRAJ24)
CAASRTDSWGKLQF

SEQ ID NO: 649276 - protein, 15 aa, Homo sapiens
  CDR3 for beta chain variable domain of TCR clone 324638 (TRBV5-1, TRBJ2-1)
CASSPPRAPYNEQFF

SEQ ID NO: 649277 - protein, 14 aa, Homo sapiens
  CDR3 for alpha chain variable domain of TCR clone 324639 (TRAV14/DV4, TRAJ42)
CPQGSLRSQGNLIF

SEQ ID NO: 649278 - protein, 18 aa, Homo sapiens
  CDR3 for beta chain variable domain of TCR clone 324639 (TRBV20-1, TRBJ2-3)
CSASGLAGGPGTTDTQYF

SEQ ID NO: 649279 - protein, 14 aa, Homo sapiens
  CDR3 for alpha chain variable domain of TCR clone 324640 (TRAV4, TRAJ9)
CLVGSGTGGFKTIF

SEQ ID NO: 649280 - protein, 15 aa, Homo sapiens
  CDR3 for beta chain variable domain of TCR clone 324640 (TRBV10-2, TRBJ2-6)
CASSEQGTGANVLTF

SEQ ID NO: 649281 - protein, 18 aa, Homo sapiens
  CDR3 for alpha chain variable domain of TCR clone 324641 (TRAV17, TRAJ45)
CATSLDLYSGGGADGLTF

SEQ ID NO: 649282 - protein, 13 aa, Homo sapiens
  CDR3 for beta chain variable domain of TCR clone 324641 (TRBV3-1, TRBJ1-1)
CASSPGVITEAFF

SEQ ID NO: 649283 - protein, 16 aa, Homo sapiens
  CDR3 for alpha chain variable domain of TCR clone 324642 (TRAV3, TRAJ6)
CAARDGPRAGSYIPTF

SEQ ID NO: 649284 - protein, 14 aa, Homo sapiens
  CDR3 for beta chain variable domain of TCR clone 324642 (TRBV7-2, TRBJ2-7)
CASSPKTSFYEQYF

SEQ ID NO: 649285 - protein, 15 aa, Homo sapiens
  CDR3 for alpha chain variable domain of TCR clone 324643 (TRAV12-2, TRAJ53)
CAVNGGGGSNYKLTF

SEQ ID NO: 649286 - protein, 15 aa, Homo sapiens
  CDR3 for beta chain variable domain of TCR clone 324643 (TRBV4-1, TRBJ2-5)
CASSQWDLYQETQYF

SEQ ID NO: 649287 - protein, 13 aa, Homo sapiens
  CDR3 for alpha chain variable domain of TCR clone 324644 (TRAV17, TRAJ34)
CATDLYNTDKLIF

SEQ ID NO: 649288 - protein, 12 aa, Homo sapiens
  CDR3 for beta chain variable domain of TCR clone 324644 (TRBV11-3, TRBJ2-2)
CASSLGGGELFF

SEQ ID NO: 649289 - protein, 16 aa, Homo sapiens
  CDR3 for alpha chain variable domain of TCR clone 324645 (TRAV3, TRAJ37)
CAVRGEGSGDTGKLIF

SEQ ID NO: 649290 - protein, 13 aa, Homo sapiens
  CDR3 for beta chain variable domain of TCR clone 324645 (TRBV14, TRBJ2-7)
CASSQDRRYEQYF

SEQ ID NO: 649291 - protein, 14 aa, Homo sapiens
  CDR3 for alpha chain variable domain of TCR clone 324646 (TRAV2, TRAJ9)
CAVEGRSGGFKTIF

SEQ ID NO: 649292 - protein, 14 aa, Homo sapiens
  CDR3 for beta chain variable domain of TCR clone 324646 (TRBV11-2, TRBJ2-5)
CASRPLAGRETQYF

SEQ ID NO: 649293 - protein, 14 aa, Homo sapiens
  CDR3 for alpha chain variable domain of TCR clone 324647 (TRAV2, TRAJ37)
CAVDFTSNTGKLIF

SEQ ID NO: 649294 - protein, 16 aa, Homo sapiens
  CDR3 for beta chain variable domain of TCR clone 324647 (TRBV15, TRBJ2-1)
CATSRKTPGLRNEQFF

SEQ ID NO: 649295 - protein, 20 aa, Homo sapiens
  CDR3 for alpha chain variable domain of TCR clone 324648 (TRAV8-3, TRAJ44)
LSTSVLWVRLYTGTASKLNF

SEQ ID NO: 649296 - protein, 15 aa, Homo sapiens
  CDR3 for beta chain variable domain of TCR clone 324648 (TRBV7-2, TRBJ2-3)
CASSLEQGGTDTQYF

SEQ ID NO: 649297 - protein, 13 aa, Homo sapiens
  CDR3 for alpha chain variable domain of TCR clone 324649 (TRAV12-1, TRAJ39)
CVALNNAGNMLTF

SEQ ID NO: 649298 - protein, 17 aa, Homo sapiens
  CDR3 for beta chain variable domain of TCR clone 324649 (TRBV6-1, TRBJ2-3)
CASSVFVTGGPTDTQYF

SEQ ID NO: 649299 - protein, 13 aa, Homo sapiens
  CDR3 for alpha chain variable domain of TCR clone 324650 (TRAV8-3, TRAJ28)
CAVVAVGNYQLTF

SEQ ID NO: 649300 - protein, 15 aa, Homo sapiens
  CDR3 for beta chain variable domain of TCR clone 324650 (TRBV7-9, TRBJ1-5)
CASSQGHQPNQPQHF

SEQ ID NO: 649301 - protein, 14 aa, Homo sapiens
  CDR3 for alpha chain variable domain of TCR clone 324651 (TRAV1-2, TRAJ8)
YAVREDTGFQKLVF

SEQ ID NO: 649302 - protein, 15 aa, Homo sapiens
  CDR3 for beta chain variable domain of TCR clone 324651 (TRBV29-1, TRBJ2-7)
CSVEFFDRGSYEQYF

SEQ ID NO: 649303 - protein, 12 aa, Homo sapiens
  CDR3 for alpha chain variable domain of TCR clone 324652 (TRAV8-3, TRAJ53)
CAVVGSNYKLTF

SEQ ID NO: 649304 - protein, 13 aa, Homo sapiens
  CDR3 for beta chain variable domain of TCR clone 324652 (TRBV7-6, TRBJ2-3)
CQQRSGGTDTQYF

SEQ ID NO: 649305 - protein, 16 aa, Homo sapiens
  CDR3 for alpha chain variable domain of TCR clone 324653 (TRAV23/DV6, TRAJ9)
CAASIGGNTGGFKTIF

SEQ ID NO: 649306 - protein, 15 aa, Homo sapiens
  CDR3 for beta chain variable domain of TCR clone 324653 (TRBV11-3, TRBJ2-3)
CASLKDGREGDTQYF

SEQ ID NO: 649307 - protein, 12 aa, Homo sapiens
  CDR3 for alpha chain variable domain of TCR clone 324654 (TRAV13-1, TRAJ21)
CAAKEGFNKFYF

SEQ ID NO: 649308 - protein, 17 aa, Homo sapiens
  CDR3 for beta chain variable domain of TCR clone 324654 (TRBV5-1, TRBJ2-6)
CASSLLTGGTGANVLTF

SEQ ID NO: 649309 - protein, 15 aa, Homo sapiens
  CDR3 for alpha chain variable domain of TCR clone 324655 (TRAV23/DV6, TRAJ30)
CAASSQESRDDKIIF

SEQ ID NO: 649310 - protein, 13 aa, Homo sapiens
  CDR3 for beta chain variable domain of TCR clone 324655 (TRBV20-1, TRBJ1-1)
CSARAGGNTEAFF

SEQ ID NO: 649311 - protein, 13 aa, Homo sapiens
  CDR3 for alpha chain variable domain of TCR clone 324656 (TRAV3, TRAJ29)
CAVRDWGNTPLVF

SEQ ID NO: 649312 - protein, 15 aa, Homo sapiens
  CDR3 for beta chain variable domain of TCR clone 324656 (TRBV12-4, TRBJ2-5)
CASIGRTGVGETQYF

SEQ ID NO: 649313 - protein, 13 aa, Homo sapiens
  CDR3 for alpha chain variable domain of TCR clone 324657 (TRAV12-1, TRAJ3)
CVVNPRGASKIIF

SEQ ID NO: 649314 - protein, 13 aa, Homo sapiens
  CDR3 for beta chain variable domain of TCR clone 324657 (TRBV12-4, TRBJ2-2)
CASSITGSGELFF

SEQ ID NO: 649315 - protein, 11 aa, Homo sapiens
  CDR3 for alpha chain variable domain of TCR clone 324658 (TRAV12-1, TRAJ37)
CVVNTPGKIIF

SEQ ID NO: 649316 - protein, 13 aa, Homo sapiens
  CDR3 for beta chain variable domain of TCR clone 324658 (TRBV12-4, TRBJ1-5)
CASSPDRAQPQHS

SEQ ID NO: 649317 - protein, 14 aa, Homo sapiens
  CDR3 for alpha chain variable domain of TCR clone 324659 (TRAV21, TRAJ15)
CALSLNQAGTALIF

SEQ ID NO: 649318 - protein, 11 aa, Homo sapiens
  CDR3 for beta chain variable domain of TCR clone 324659 (TRBV20-1, TRBJ2-7)
CSARTSYEQYF

SEQ ID NO: 649319 - protein, 13 aa, Homo sapiens
  CDR3 for alpha chain variable domain of TCR clone 324660 (TRAV2, TRAJ40)
CAVVTSGTYKYIF

SEQ ID NO: 649320 - protein, 13 aa, Homo sapiens
  CDR3 for beta chain variable domain of TCR clone 324660 (TRBV7-3, TRBJ1-1)
CASSLTQGTEAFF

SEQ ID NO: 649321 - protein, 14 aa, Homo sapiens
  CDR3 for alpha chain variable domain of TCR clone 324661 (TRAV3, TRAJ9)
CAVRLNTGGFKTIF

SEQ ID NO: 649322 - protein, 16 aa, Homo sapiens
  CDR3 for beta chain variable domain of TCR clone 324661 (TRBV12-4, TRBJ1-5)
CASSRPVGGSNQPQHF

SEQ ID NO: 649323 - protein, 14 aa, Homo sapiens
  CDR3 for alpha chain variable domain of TCR clone 324662 (TRAV13-1, TRAJ44)
CAAKATGTASKLTF

SEQ ID NO: 649324 - protein, 16 aa, Homo sapiens
  CDR3 for beta chain variable domain of TCR clone 324662 (TRBV27, TRBJ2-2)
CASSFRGLVRTGELFF

SEQ ID NO: 649325 - protein, 17 aa, Homo sapiens
  CDR3 for alpha chain variable domain of TCR clone 324663 (TRAV3, TRAJ6)
CAVIDGPRARGSYIPTF

SEQ ID NO: 649326 - protein, 18 aa, Homo sapiens
  CDR3 for beta chain variable domain of TCR clone 324663 (TRBV7-8, TRBJ2-1)
CASSPYLGQRGSNNEQFF

SEQ ID NO: 649327 - protein, 12 aa, Homo sapiens
  CDR3 for alpha chain variable domain of TCR clone 324664 (TRAV12-3, TRAJ17)
CAMTLTGNKLTF

SEQ ID NO: 649328 - protein, 15 aa, Homo sapiens
  CDR3 for beta chain variable domain of TCR clone 324664 (TRBV20-1, TRBJ2-7)
CSARDRVSGMDEHFF

SEQ ID NO: 649329 - protein, 13 aa, Homo sapiens
  CDR3 for alpha chain variable domain of TCR clone 324665 (TRAV21, TRAJ37)
CAVSSGNTGKLIF

SEQ ID NO: 649330 - protein, 18 aa, Homo sapiens
  CDR3 for beta chain variable domain of TCR clone 324665 (TRBV11-2, TRBJ2-3)
CASSLGGASRGAPNTQYF

SEQ ID NO: 649331 - protein, 15 aa, Homo sapiens
  CDR3 for alpha chain variable domain of TCR clone 324666 (TRAV16, TRAJ12)
CSKWPLMDSSYKLIF

SEQ ID NO: 649332 - protein, 13 aa, Homo sapiens
  CDR3 for beta chain variable domain of TCR clone 324666 (TRBV4-2, TRBJ1-1)
CASSQAGNTEAFF

SEQ ID NO: 649333 - protein, 14 aa, Homo sapiens
  CDR3 for alpha chain variable domain of TCR clone 324667 (TRAV17, TRAJ35)
CATDRPGFGNVLHC

SEQ ID NO: 649334 - protein, 16 aa, Homo sapiens
  CDR3 for beta chain variable domain of TCR clone 324667 (TRBV10-3, TRBJ2-1)
CAISGVGDGGGGEQFF

SEQ ID NO: 649335 - protein, 14 aa, Homo sapiens
  CDR3 for alpha chain variable domain of TCR clone 324668 (TRAV20, TRAJ13)
CAVLNSGGYQKVTC

SEQ ID NO: 649336 - protein, 14 aa, Homo sapiens
  CDR3 for beta chain variable domain of TCR clone 324668 (TRBV7-2, TRBJ1-1)
CASSFLTGTTEAFF

SEQ ID NO: 649337 - protein, 15 aa, Homo sapiens
  CDR3 for alpha chain variable domain of TCR clone 324669 (TRAV27, TRAJ32)
CAGRGYGGATNKLIF

SEQ ID NO: 649338 - protein, 13 aa, Homo sapiens
  CDR3 for beta chain variable domain of TCR clone 324669 (TRBV10-3, TRBJ2-7)
CASKLAVNYEQYF

SEQ ID NO: 649339 - protein, 15 aa, Homo sapiens
  CDR3 for alpha chain variable domain of TCR clone 324670 (TRAV26-1, TRAJ9)
CIVRESNTGGFTTTF

SEQ ID NO: 649340 - protein, 11 aa, Homo sapiens
  CDR3 for beta chain variable domain of TCR clone 324670 (TRBV7-6, TRBJ2-5)
CASSFQETQYF

SEQ ID NO: 649341 - protein, 13 aa, Homo sapiens
  CDR3 for alpha chain variable domain of TCR clone 324671 (TRAV20, TRAJ54)
CALTFEGAQKLVF

SEQ ID NO: 649342 - protein, 12 aa, Homo sapiens
  CDR3 for beta chain variable domain of TCR clone 324671 (TRBV5-1, TRBJ2-5)
CASSFTWETQYF

SEQ ID NO: 649343 - protein, 14 aa, Homo sapiens
  CDR3 for alpha chain variable domain of TCR clone 324672 (TRAV13-1, TRAJ20)
CAARPGSNDYKLSF

SEQ ID NO: 649344 - protein, 14 aa, Homo sapiens
  CDR3 for beta chain variable domain of TCR clone 324672 (TRBV6-1, TRBJ1-3)
CASVQGGGGNTIYF

SEQ ID NO: 649345 - protein, 17 aa, Homo sapiens
  CDR3 for alpha chain variable domain of TCR clone 324673 (TRAV26-1, TRAJ28)
CIVRVPDSGAGSYQLTF

SEQ ID NO: 649346 - protein, 17 aa, Homo sapiens
  CDR3 for beta chain variable domain of TCR clone 324673 (TRBV28, TRBJ2-7)
CASSRLPAGGKSYEQYF

SEQ ID NO: 649347 - protein, 13 aa, Homo sapiens
  CDR3 for alpha chain variable domain of TCR clone 324674 (TRAV12-1, TRAJ16)
CVVNGPDGQKLLF

SEQ ID NO: 649348 - protein, 13 aa, Homo sapiens
  CDR3 for beta chain variable domain of TCR clone 324674 (TRBV2, TRBJ1-1)
CARYPTGGFHAFF

SEQ ID NO: 649349 - protein, 15 aa, Homo sapiens
  CDR3 for alpha chain variable domain of TCR clone 324675 (TRAV1-2, TRAJ17)
CAVRGYGAAGNKLTF

SEQ ID NO: 649350 - protein, 23 aa, Homo sapiens
  CDR3 for beta chain variable domain of TCR clone 324675 (TRBV11-2, TRBJ2-5)
CASSSPGGEGAAPRDPVLRARHA

SEQ ID NO: 649351 - protein, 14 aa, Homo sapiens
  CDR3 for alpha chain variable domain of TCR clone 324676 (TRAV12-1, TRAJ37)
CVVTGSSNTGKLIF

SEQ ID NO: 649352 - protein, 14 aa, Homo sapiens
  CDR3 for beta chain variable domain of TCR clone 324676 (TRBV11-2, TRBJ1-2)
CASSLGTANYGYTF

SEQ ID NO: 649353 - protein, 14 aa, Homo sapiens
  CDR3 for alpha chain variable domain of TCR clone 324677 (TRAV26-1, TRAJ38)
CLADNAGNNRKLIW

SEQ ID NO: 649354 - protein, 13 aa, Homo sapiens
  CDR3 for beta chain variable domain of TCR clone 324677 (TRBV7-9, TRBJ2-3)
CASSPGSTDTQYF

SEQ ID NO: 649355 - protein, 12 aa, Homo sapiens
  CDR3 for alpha chain variable domain of TCR clone 324678 (TRAV1-1, TRAJ43)
CAPRVSSNDMRF

SEQ ID NO: 649356 - protein, 14 aa, Homo sapiens
  CDR3 for beta chain variable domain of TCR clone 324678 (TRBV2, TRBJ2-7)
CASSLTSGGYEQYF

SEQ ID NO: 649357 - protein, 15 aa, Homo sapiens
  CDR3 for alpha chain variable domain of TCR clone 324679 (TRAV8-3, TRAJ40)
CAAPSLDSGTYKYIF

SEQ ID NO: 649358 - protein, 16 aa, Homo sapiens
  CDR3 for beta chain variable domain of TCR clone 324679 (TRBV7-3, TRBJ2-3)
CASSLSGYRPEDTQYF

SEQ ID NO: 649359 - protein, 15 aa, Homo sapiens
  CDR3 for alpha chain variable domain of TCR clone 324680 (TRAV8-3, TRAJ41)
CAVGSNSNSGYALNF

SEQ ID NO: 649360 - protein, 14 aa, Homo sapiens
  CDR3 for beta chain variable domain of TCR clone 324680 (TRBV19, TRBJ2-1)
CASPTFVLSGEQFF

SEQ ID NO: 649361 - protein, 14 aa, Homo sapiens
  CDR3 for alpha chain variable domain of TCR clone 324681 (TRAV12-2, TRAJ44)
CAVNKAGTASKLTF

SEQ ID NO: 649362 - protein, 15 aa, Homo sapiens
  CDR3 for beta chain variable domain of TCR clone 324681 (TRBV19, TRBJ1-5)
CASSIVWADNQPQHF

SEQ ID NO: 649363 - protein, 14 aa, Homo sapiens
  CDR3 for alpha chain variable domain of TCR clone 324682 (TRAV12-3, TRAJ22)
CAMSLFGSARELTF

SEQ ID NO: 649364 - protein, 11 aa, Homo sapiens
  CDR3 for beta chain variable domain of TCR clone 324682 (TRBV12-4, TRBJ2-2)
CASSSAGELFF

SEQ ID NO: 649365 - protein, 14 aa, Homo sapiens
  CDR3 for alpha chain variable domain of TCR clone 324683 (TRAV20, TRAJ32)
CCGRYGGATNKLIF

SEQ ID NO: 649366 - protein, 17 aa, Homo sapiens
  CDR3 for beta chain variable domain of TCR clone 324683 (TRBV13, TRBJ2-3)
CASSLSRVAGGRNTQYF

SEQ ID NO: 649367 - protein, 13 aa, Homo sapiens
  CDR3 for alpha chain variable domain of TCR clone 324684 (TRAV12-1, TRAJ39)
CVVSYNAGNMLTF

SEQ ID NO: 649368 - protein, 14 aa, Homo sapiens
  CDR3 for beta chain variable domain of TCR clone 324684 (TRBV27, TRBJ2-3)
CASSPLGTTDTQYF

SEQ ID NO: 649369 - protein, 12 aa, Homo sapiens
  CDR3 for alpha chain variable domain of TCR clone 324685 (TRAV8-3, TRAJ26)
CASDNYGQNFVF

SEQ ID NO: 649370 - protein, 11 aa, Homo sapiens
  CDR3 for beta chain variable domain of TCR clone 324685 (TRBV29-1, TRBJ2-5)
CSEDRTGTQYF

SEQ ID NO: 649371 - protein, 14 aa, Homo sapiens
  CDR3 for alpha chain variable domain of TCR clone 324686 (TRAV8-3, TRAJ4)
CAVGVAGGYNKRIF

SEQ ID NO: 649372 - protein, 15 aa, Homo sapiens
  CDR3 for beta chain variable domain of TCR clone 324686 (TRBV6-5, TRBJ2-1)
CASSYDAGAGNEQFF

SEQ ID NO: 649373 - protein, 16 aa, Homo sapiens
  CDR3 for alpha chain variable domain of TCR clone 324687 (TRAV3, TRAJ6)
CAVRDGMGRRKLHTYI

SEQ ID NO: 649374 - protein, 15 aa, Homo sapiens
  CDR3 for beta chain variable domain of TCR clone 324687 (TRBV5-1, TRBJ2-7)
CDSSLGDFTTYEQYF

SEQ ID NO: 649375 - protein, 16 aa, Homo sapiens
  CDR3 for alpha chain variable domain of TCR clone 324688 (TRAV3, TRAJ10)
CAVRDMRAGGGNKLTF

SEQ ID NO: 649376 - protein, 15 aa, Homo sapiens
  CDR3 for beta chain variable domain of TCR clone 324688 (TRBV11-2, TRBJ1-6)
CASTGFGTAVSTLDF

SEQ ID NO: 649377 - protein, 13 aa, Homo sapiens
  CDR3 for alpha chain variable domain of TCR clone 324689 (TRAV2, TRAJ40)
CAVVTSGTYKYIF

SEQ ID NO: 649378 - protein, 12 aa, Homo sapiens
  CDR3 for beta chain variable domain of TCR clone 324689 (TRBV6-5, TRBJ2-2)
CASRQITGELFF

SEQ ID NO: 649379 - protein, 12 aa, Homo sapiens
  CDR3 for alpha chain variable domain of TCR clone 324690 (TRAV35, TRAJ30)
CAGLNRDDKIIF

SEQ ID NO: 649380 - protein, 15 aa, Homo sapiens
  CDR3 for beta chain variable domain of TCR clone 324690 (TRBV18, TRBJ2-3)
CASSPLAGETDAQYF

SEQ ID NO: 649381 - protein, 14 aa, Homo sapiens
  CDR3 for alpha chain variable domain of TCR clone 324691 (TRAV12-3, TRAJ10)
SHLPLTGGGNKLTF

SEQ ID NO: 649382 - protein, 13 aa, Homo sapiens
  CDR3 for beta chain variable domain of TCR clone 324691 (TRBV29-1, TRBJ1-1)
CSVGDSRNTEAFF

SEQ ID NO: 649383 - protein, 12 aa, Homo sapiens
  CDR3 for alpha chain variable domain of TCR clone 324692 (TRAV1-1, TRAJ43)
CAPRVSSNDMRF

SEQ ID NO: 649384 - protein, 15 aa, Homo sapiens
  CDR3 for beta chain variable domain of TCR clone 324692 (TRBV7-2, TRBJ2-1)
CASSSGLAGGNEQFF

SEQ ID NO: 649385 - protein, 14 aa, Homo sapiens
  CDR3 for alpha chain variable domain of TCR clone 324693 (TRAV8-2, TRAJ4)
CVVSPSGCYYKLIF

SEQ ID NO: 649386 - protein, 15 aa, Homo sapiens
  CDR3 for beta chain variable domain of TCR clone 324693 (TRBV4-1, TRBJ1-4)
CASSDTGGTNEKLFF

SEQ ID NO: 649387 - protein, 11 aa, Homo sapiens
  CDR3 for alpha chain variable domain of TCR clone 324694 (TRAV12-1, TRAJ34)
CVAGSTDKLIF

SEQ ID NO: 649388 - protein, 12 aa, Homo sapiens
  CDR3 for beta chain variable domain of TCR clone 324694 (TRBV7-9, TRBJ1-1)
CASSLVRGEAFF

SEQ ID NO: 649389 - protein, 11 aa, Homo sapiens
  CDR3 for alpha chain variable domain of TCR clone 324695 (TRAV12-3, TRAJ43)
CAMSVSHDMRF

SEQ ID NO: 649390 - protein, 13 aa, Homo sapiens
  CDR3 for beta chain variable domain of TCR clone 324695 (TRBV20-1, TRBJ1-1)
SAVLHLGGTEAFF

SEQ ID NO: 649391 - protein, 11 aa, Homo sapiens
  CDR3 for alpha chain variable domain of TCR clone 324696 (TRAV1-1, TRAJ23)
CAVRQGGKLIF

SEQ ID NO: 649392 - protein, 11 aa, Homo sapiens
  CDR3 for beta chain variable domain of TCR clone 324696 (TRBV29-1, TRBJ2-5)
CSVLPGETQYF

SEQ ID NO: 649393 - protein, 15 aa, Homo sapiens
  CDR3 for alpha chain variable domain of TCR clone 324697 (TRAV8-3, TRAJ27)
CAVGPSKTNAGKSTF

SEQ ID NO: 649394 - protein, 13 aa, Homo sapiens
  CDR3 for beta chain variable domain of TCR clone 324697 (TRBV20-1, TRBJ2-7)
CSATHTSGYEQYF

SEQ ID NO: 649395 - protein, 11 aa, Homo sapiens
  CDR3 for alpha chain variable domain of TCR clone 324698 (TRAV12-3, TRAJ43)
CVEYDNNDMRF

SEQ ID NO: 649396 - protein, 16 aa, Homo sapiens
  CDR3 for beta chain variable domain of TCR clone 324698 (TRBV5-4, TRBJ2-1)
CASSLVGSGQDNEHFF

SEQ ID NO: 649397 - protein, 17 aa, Homo sapiens
  CDR3 for alpha chain variable domain of TCR clone 324699 (TRAV13-1, TRAJ28)
CAASPPYSGAGSYQLTF

SEQ ID NO: 649398 - protein, 18 aa, Homo sapiens
  CDR3 for beta chain variable domain of TCR clone 324699 (TRBV7-9, TRBJ2-7)
CASSLTTSGSRTWYEQYF

SEQ ID NO: 649399 - protein, 13 aa, Homo sapiens
  CDR3 for alpha chain variable domain of TCR clone 324700 (TRAV1-2, TRAJ9)
CAALNTGGFKTIF

SEQ ID NO: 649400 - protein, 12 aa, Homo sapiens
  CDR3 for beta chain variable domain of TCR clone 324700 (TRBV7-3, TRBJ1-5)
RASSIFSWTLHF

SEQ ID NO: 649401 - protein, 13 aa, Homo sapiens
  CDR3 for alpha chain variable domain of TCR clone 324701 (TRAV21, TRAJ27)
CAARPGNAGKSTF

SEQ ID NO: 649402 - protein, 13 aa, Homo sapiens
  CDR3 for beta chain variable domain of TCR clone 324701 (TRBV6-4, TRBJ1-5)
CASSADLNQPQHF

SEQ ID NO: 649403 - protein, 15 aa, Homo sapiens
  CDR3 for alpha chain variable domain of TCR clone 324702 (TRAV3, TRAJ9)
CAVRDSNTGGFKTIF

SEQ ID NO: 649404 - protein, 17 aa, Homo sapiens
  CDR3 for beta chain variable domain of TCR clone 324702 (TRBV4-1, TRBJ1-1)
CASRRPGGQTMNTEAFF

SEQ ID NO: 649405 - protein, 12 aa, Homo sapiens
  CDR3 for alpha chain variable domain of TCR clone 324703 (TRAV17, TRAJ21)
CALRYNFNKFYF

SEQ ID NO: 649406 - protein, 13 aa, Homo sapiens
  CDR3 for beta chain variable domain of TCR clone 324703 (TRBV24-1, TRBJ2-5)
CATSTGVTETQYF

SEQ ID NO: 649407 - protein, 22 aa, Homo sapiens
  CDR3 for alpha chain variable domain of TCR clone 324704 (TRAV40, )
CLLGDGIPDIQNPDPAVYQLRN

SEQ ID NO: 649408 - protein, 16 aa, Homo sapiens
  CDR3 for beta chain variable domain of TCR clone 324704 (TRBV20-1, TRBJ1-5)
CSAELPGQQTNQPQHF

SEQ ID NO: 649409 - protein, 14 aa, Homo sapiens
  CDR3 for alpha chain variable domain of TCR clone 324705 (TRAV2, TRAJ37)
CAVDFTSNTGKLIF

SEQ ID NO: 649410 - protein, 13 aa, Homo sapiens
  CDR3 for beta chain variable domain of TCR clone 324705 (TRBV12-4, TRBJ2-7)
CASSRQASYEQYF

SEQ ID NO: 649411 - protein, 12 aa, Homo sapiens
  CDR3 for alpha chain variable domain of TCR clone 324706 (TRAV8-3, TRAJ26)
CAGDNYGQNFVF

SEQ ID NO: 649412 - protein, 15 aa, Homo sapiens
  CDR3 for beta chain variable domain of TCR clone 324706 (TRBV9, TRBJ2-1)
CASSLAGSSYNEQCF

SEQ ID NO: 649413 - protein, 14 aa, Homo sapiens
  CDR3 for alpha chain variable domain of TCR clone 324707 (TRAV26-1, TRAJ31)
CIALPPNNNARLMF

SEQ ID NO: 649414 - protein, 16 aa, Homo sapiens
  CDR3 for beta chain variable domain of TCR clone 324707 (TRBV7-3, TRBJ2-2)
CASSLKRGTLSGELFF

SEQ ID NO: 649415 - protein, 15 aa, Homo sapiens
  CDR3 for alpha chain variable domain of TCR clone 324708 (TRAV8-3, TRAJ27)
CAVGPSKTNAGKSTF

SEQ ID NO: 649416 - protein, 15 aa, Homo sapiens
  CDR3 for beta chain variable domain of TCR clone 324708 (TRBV7-9, TRBJ2-7)
CASTPGVAGLYEQYF

SEQ ID NO: 649417 - protein, 11 aa, Homo sapiens
  CDR3 for alpha chain variable domain of TCR clone 324709 (TRAV17, TRAJ36)
CAPTGANNLFF

SEQ ID NO: 649418 - protein, 13 aa, Homo sapiens
  CDR3 for beta chain variable domain of TCR clone 324709 (TRBV12-4, TRBJ2-7)
CASSPTETYEQYV

SEQ ID NO: 649419 - protein, 14 aa, Homo sapiens
  CDR3 for alpha chain variable domain of TCR clone 324710 (TRAV13-1, TRAJ13)
CAASRVGGYQKVTF

SEQ ID NO: 649420 - protein, 15 aa, Homo sapiens
  CDR3 for beta chain variable domain of TCR clone 324710 (TRBV20-1, TRBJ2-7)
CSARDRVSGMDEQYF

SEQ ID NO: 649421 - protein, 13 aa, Homo sapiens
  CDR3 for alpha chain variable domain of TCR clone 324711 (TRAV2, TRAJ40)
CAVVTSGTYKYIF

SEQ ID NO: 649422 - protein, 15 aa, Homo sapiens
  CDR3 for beta chain variable domain of TCR clone 324711 (TRBV11-3, TRBJ2-3)
CASLKDVREGDTQYF

SEQ ID NO: 649423 - protein, 17 aa, Homo sapiens
  CDR3 for alpha chain variable domain of TCR clone 324712 (TRAV27, TRAJ52)
CAEAGWAGGTSYGKVTF

SEQ ID NO: 649424 - protein, 16 aa, Homo sapiens
  CDR3 for beta chain variable domain of TCR clone 324712 (TRBV19, TRBJ2-1)
CASSKAGPSSYNEQFF

SEQ ID NO: 649425 - protein, 12 aa, Homo sapiens
  CDR3 for alpha chain variable domain of TCR clone 324713 (TRAV20, TRAJ39)
CAVGNAGNMLTF

SEQ ID NO: 649426 - protein, 14 aa, Homo sapiens
  CDR3 for beta chain variable domain of TCR clone 324713 (TRBV5-1, TRBJ2-3)
CASSLFGPTDTQYF

SEQ ID NO: 649427 - protein, 14 aa, Homo sapiens
  CDR3 for alpha chain variable domain of TCR clone 324714 (TRAV12-2, TRAJ23)
CAVGGYNQGGTLIF

SEQ ID NO: 649428 - protein, 15 aa, Homo sapiens
  CDR3 for beta chain variable domain of TCR clone 324714 (TRBV20-1, TRBJ2-3)
CSASSGGPRTDTQYF

SEQ ID NO: 649429 - protein, 13 aa, Homo sapiens
  CDR3 for alpha chain variable domain of TCR clone 324715 (TRAV27, TRAJ41)
CAGEGNSGYALKF

SEQ ID NO: 649430 - protein, 13 aa, Homo sapiens
  CDR3 for beta chain variable domain of TCR clone 324715 (TRBV7-3, TRBJ2-1)
CASSLDSYNEQFF

SEQ ID NO: 649431 - protein, 12 aa, Homo sapiens
  CDR3 for alpha chain variable domain of TCR clone 324716 (TRAV12-2, TRAJ10)
WGVTGGGNKLTS

SEQ ID NO: 649432 - protein, 15 aa, Homo sapiens
  CDR3 for beta chain variable domain of TCR clone 324716 (TRBV10-2, TRBJ2-6)
CASSEQGTGANVLTF

SEQ ID NO: 649433 - protein, 14 aa, Homo sapiens
  CDR3 for alpha chain variable domain of TCR clone 324717 (TRAV8-6, TRAJ36)
CAVSEKDGANNLFF

SEQ ID NO: 649434 - protein, 13 aa, Homo sapiens
  CDR3 for beta chain variable domain of TCR clone 324717 (TRBV7-9, TRBJ1-2)
CASSLKQNYGYTF

SEQ ID NO: 649435 - protein, 15 aa, Homo sapiens
  CDR3 for alpha chain variable domain of TCR clone 324718 (TRAV12-3, TRAJ42)
CAMSGHGGSQGNLIF

SEQ ID NO: 649436 - protein, 15 aa, Homo sapiens
  CDR3 for beta chain variable domain of TCR clone 324718 (TRBV19, TRBJ1-1)
CASTSGQIQNTEAFF

SEQ ID NO: 649437 - protein, 16 aa, Homo sapiens
  CDR3 for alpha chain variable domain of TCR clone 324719 (TRAV26-1, TRAJ37)
SIVRGDGSGNTGKLIF

SEQ ID NO: 649438 - protein, 17 aa, Homo sapiens
  CDR3 for beta chain variable domain of TCR clone 324719 (TRBV4-1, TRBJ2-7)
CASSRDPLGVRGGEQYF

SEQ ID NO: 649439 - protein, 11 aa, Homo sapiens
  CDR3 for alpha chain variable domain of TCR clone 324720 (TRAV21, TRAJ34)
CAVTNTDNLIS

SEQ ID NO: 649440 - protein, 17 aa, Homo sapiens
  CDR3 for beta chain variable domain of TCR clone 324720 (TRBV20-1, TRBJ2-1)
CSARSPSGGPPTMSSSS

SEQ ID NO: 649441 - protein, 14 aa, Homo sapiens
  CDR3 for alpha chain variable domain of TCR clone 324721 (TRAV16, TRAJ39)
CALSKNNAGNMLTF

SEQ ID NO: 649442 - protein, 16 aa, Homo sapiens
  CDR3 for beta chain variable domain of TCR clone 324721 (TRBV6-6, TRBJ2-1)
CASSYSFSGSYNEQFS

SEQ ID NO: 649443 - protein, 11 aa, Homo sapiens
  CDR3 for alpha chain variable domain of TCR clone 324722 (TRAV12-2, TRAJ39)
CAVNNMLTFGG

SEQ ID NO: 649444 - protein, 15 aa, Homo sapiens
  CDR3 for beta chain variable domain of TCR clone 324722 (TRBV10-3, TRBJ2-3)
CAISLTSGGTDTQYF

SEQ ID NO: 649445 - protein, 13 aa, Homo sapiens
  CDR3 for alpha chain variable domain of TCR clone 324723 (TRAV38-2/DV8, TRAJ34)
CAFRNYNTDKLIF

SEQ ID NO: 649446 - protein, 15 aa, Homo sapiens
  CDR3 for beta chain variable domain of TCR clone 324723 (TRBV20-1, TRBJ2-5)
CSAEGTGGLQETQYF

SEQ ID NO: 649447 - protein, 13 aa, Homo sapiens
  CDR3 for alpha chain variable domain of TCR clone 324724 (TRAV20, TRAJ20)
CAVQNPHDYKFSF

SEQ ID NO: 649448 - protein, 12 aa, Homo sapiens
  CDR3 for beta chain variable domain of TCR clone 324724 (TRBV18, TRBJ2-7)
CASSPNNNEQYF

SEQ ID NO: 649449 - protein, 13 aa, Homo sapiens
  CDR3 for alpha chain variable domain of TCR clone 324725 (TRAV26-1, TRAJ29)
CIVRRSGNTPLVF

SEQ ID NO: 649450 - protein, 17 aa, Homo sapiens
  CDR3 for beta chain variable domain of TCR clone 324725 (TRBV7-8, TRBJ2-6)
CASSAGTGGAGANVLTF

SEQ ID NO: 649451 - protein, 14 aa, Homo sapiens
  CDR3 for alpha chain variable domain of TCR clone 324726 (TRAV20, TRAJ32)
CCGRYGGATSKLIF

SEQ ID NO: 649452 - protein, 16 aa, Homo sapiens
  CDR3 for beta chain variable domain of TCR clone 324726 (TRBV19, TRBJ2-2)
CASRSPGTGATGELLF

SEQ ID NO: 649453 - protein, 10 aa, Homo sapiens
  CDR3 for alpha chain variable domain of TCR clone 324727 (TRAV36/DV7, TRAJ38)
CAANNRKLIW

SEQ ID NO: 649454 - protein, 17 aa, Homo sapiens
  CDR3 for beta chain variable domain of TCR clone 324727 (TRBV7-8, TRBJ2-6)
GASSAGTGGAGANVLTF

SEQ ID NO: 649455 - protein, 14 aa, Homo sapiens
  CDR3 for alpha chain variable domain of TCR clone 324728 (TRAV25, TRAJ22)
CAVRSSGSARQLIF

SEQ ID NO: 649456 - protein, 16 aa, Homo sapiens
  CDR3 for beta chain variable domain of TCR clone 324728 (TRBV4-2, TRBJ1-1)
CASSPSPGRAAPEAFF

SEQ ID NO: 649457 - protein, 16 aa, Homo sapiens
  CDR3 for alpha chain variable domain of TCR clone 324729 (TRAV13-1, TRAJ18)
CAASRMRGSTLCRLYF

SEQ ID NO: 649458 - protein, 16 aa, Homo sapiens
  CDR3 for beta chain variable domain of TCR clone 324729 (TRBV27, TRBJ1-1)
CASSSRGRTGYTEAFF

SEQ ID NO: 649459 - protein, 14 aa, Homo sapiens
  CDR3 for alpha chain variable domain of TCR clone 324730 (TRAV1-2, TRAJ8)
CAVREDTGFQQLVF

SEQ ID NO: 649460 - protein, 15 aa, Homo sapiens
  CDR3 for beta chain variable domain of TCR clone 324730 (TRBV6-3, TRBJ2-7)
CASSSPGTVFYEQDF

SEQ ID NO: 649461 - protein, 11 aa, Homo sapiens
  CDR3 for alpha chain variable domain of TCR clone 324731 (TRAV23/DV6, TRAJ48)
CAPRWGVKLTF

SEQ ID NO: 649462 - protein, 13 aa, Homo sapiens
  CDR3 for beta chain variable domain of TCR clone 324731 (TRBV12-4, TRBJ2-5)
CASSPGTEETQYF

SEQ ID NO: 649463 - protein, 14 aa, Homo sapiens
  CDR3 for alpha chain variable domain of TCR clone 324732 (TRAV9-2, TRAJ39)
CALYIYNAGNMLTF

SEQ ID NO: 649464 - protein, 15 aa, Homo sapiens
  CDR3 for beta chain variable domain of TCR clone 324732 (TRBV7-9, TRBJ2-5)
CASSFKAGREETQYF

SEQ ID NO: 649465 - protein, 12 aa, Homo sapiens
  CDR3 for alpha chain variable domain of TCR clone 324733 (TRAV13-2, TRAJ23)
CAERHRGGKLIF

SEQ ID NO: 649466 - protein, 13 aa, Homo sapiens
  CDR3 for beta chain variable domain of TCR clone 324733 (TRBV7-6, TRBJ1-2)
CASSLVADYGYTF

SEQ ID NO: 649467 - protein, 18 aa, Homo sapiens
  CDR3 for alpha chain variable domain of TCR clone 324734 (TRAV12-3, TRAJ52)
CAMSVGGAGGTSYGKLAF

SEQ ID NO: 649468 - protein, 15 aa, Homo sapiens
  CDR3 for beta chain variable domain of TCR clone 324734 (TRBV27, TRBJ1-6)
CASSFDRGLGSPLRF

SEQ ID NO: 649469 - protein, 18 aa, Homo sapiens
  CDR3 for alpha chain variable domain of TCR clone 324735 (TRAV20, TRAJ4)
CAVQPSYMFSGGYNKLIF

SEQ ID NO: 649470 - protein, 13 aa, Homo sapiens
  CDR3 for beta chain variable domain of TCR clone 324735 (TRBV19, TRBJ2-3)
CATWDKITDTQYF

SEQ ID NO: 649471 - protein, 16 aa, Homo sapiens
  CDR3 for alpha chain variable domain of TCR clone 324736 (TRAV30, TRAJ24)
CGTEIVDADSWGKFQF

SEQ ID NO: 649472 - protein, 12 aa, Homo sapiens
  CDR3 for beta chain variable domain of TCR clone 324736 (TRBV7-3, TRBJ1-1)
CASSQDWGAEAF

SEQ ID NO: 649473 - protein, 15 aa, Homo sapiens
  CDR3 for alpha chain variable domain of TCR clone 324737 (TRAV3, TRAJ22)
CAVRDRGGSARPLTF

SEQ ID NO: 649474 - protein, 14 aa, Homo sapiens
  CDR3 for beta chain variable domain of TCR clone 324737 (TRBV19, TRBJ1-5)
CASSLGLIGQPQHF

SEQ ID NO: 649475 - protein, 15 aa, Homo sapiens
  CDR3 for alpha chain variable domain of TCR clone 324738 (TRAV4, TRAJ39)
CLVGPNNNAGNMLTF

SEQ ID NO: 649476 - protein, 13 aa, Homo sapiens
  CDR3 for beta chain variable domain of TCR clone 324738 (TRBV11-2, TRBJ2-5)
CACSSTGEETQYF

SEQ ID NO: 649477 - protein, 14 aa, Homo sapiens
  CDR3 for alpha chain variable domain of TCR clone 324739 (TRAV13-1, TRAJ35)
CAAGKGGFGNVLHC

SEQ ID NO: 649478 - protein, 17 aa, Homo sapiens
  CDR3 for beta chain variable domain of TCR clone 324739 (TRBV13, TRBJ2-3)
CASSLSRVAGGRNTQYF

SEQ ID NO: 649479 - protein, 14 aa, Homo sapiens
  CDR3 for alpha chain variable domain of TCR clone 324740 (TRAV12-2, TRAJ17)
CPVLFEAAGNKLTF

SEQ ID NO: 649480 - protein, 15 aa, Homo sapiens
  CDR3 for beta chain variable domain of TCR clone 324740 (TRBV5-1, TRBJ2-1)
CASSPPRAPYNEQFF

SEQ ID NO: 649481 - protein, 16 aa, Homo sapiens
  CDR3 for alpha chain variable domain of TCR clone 324741 (TRAV3, TRAJ32)
CAVRENYGGATNKLIF

SEQ ID NO: 649482 - protein, 12 aa, Homo sapiens
  CDR3 for beta chain variable domain of TCR clone 324741 (TRBV20-1, TRBJ1-2)
CSVTPEVYGYTF

SEQ ID NO: 649483 - protein, 12 aa, Homo sapiens
  CDR3 for alpha chain variable domain of TCR clone 324742 (TRAV13-1, TRAJ21)
CAAKEGFNKFYF

SEQ ID NO: 649484 - protein, 14 aa, Homo sapiens
  CDR3 for beta chain variable domain of TCR clone 324742 (TRBV7-9, TRBJ1-2)
CASSRQGANYGYTF

SEQ ID NO: 649485 - protein, 14 aa, Homo sapiens
  CDR3 for alpha chain variable domain of TCR clone 324743 (TRAV12-1, TRAJ3)
CVVNPGSSASKKIF

SEQ ID NO: 649486 - protein, 18 aa, Homo sapiens
  CDR3 for beta chain variable domain of TCR clone 324743 (TRBV4-2, TRBJ1-2)
CASSQDKVGHTVNYGYTF

SEQ ID NO: 649487 - protein, 11 aa, Homo sapiens
  CDR3 for alpha chain variable domain of TCR clone 324744 (TRAV35, TRAJ30)
CAGPGDDKIIF

SEQ ID NO: 649488 - protein, 14 aa, Homo sapiens
  CDR3 for beta chain variable domain of TCR clone 324744 (TRBV7-6, TRBJ1-6)
CASSQAGGGSPLHS

SEQ ID NO: 649489 - protein, 14 aa, Homo sapiens
  CDR3 for alpha chain variable domain of TCR clone 324745 (TRAV17, TRAJ16)
CATADFSDGQKLLF

SEQ ID NO: 649490 - protein, 13 aa, Homo sapiens
  CDR3 for beta chain variable domain of TCR clone 324745 (TRBV20-1, TRBJ1-1)
CSARGGGNTEAFF

SEQ ID NO: 649491 - protein, 14 aa, Homo sapiens
  CDR3 for alpha chain variable domain of TCR clone 324746 (TRAV12-1, TRAJ9)
CVVNRGTGGFKTIF

SEQ ID NO: 649492 - protein, 14 aa, Homo sapiens
  CDR3 for beta chain variable domain of TCR clone 324746 (TRBV7-2, TRBJ1-1)
CASSFLTGTTEAFF

SEQ ID NO: 649493 - protein, 13 aa, Homo sapiens
  CDR3 for alpha chain variable domain of TCR clone 324747 (TRAV35, TRAJ27)
CAGQEGDAGKSTF

SEQ ID NO: 649494 - protein, 16 aa, Homo sapiens
  CDR3 for beta chain variable domain of TCR clone 324747 (TRBV7-2, TRBJ2-5)
CASSYKTVISLETQYF

SEQ ID NO: 649495 - protein, 13 aa, Homo sapiens
  CDR3 for alpha chain variable domain of TCR clone 324748 (TRAV2, TRAJ29)
CAAQNSGNTPLVF

SEQ ID NO: 649496 - protein, 15 aa, Homo sapiens
  CDR3 for beta chain variable domain of TCR clone 324748 (TRBV6-1, TRBJ2-1)
CASSELRGQYNEQFF

SEQ ID NO: 649497 - protein, 19 aa, Homo sapiens
  CDR3 for alpha chain variable domain of TCR clone 324749 (TRAV26-1, TRAJ52)
CIVRVANNAGGTSYGKLTF

SEQ ID NO: 649498 - protein, 16 aa, Homo sapiens
  CDR3 for beta chain variable domain of TCR clone 324749 (TRBV20-1, TRBJ2-1)
CSARDLKQGMNNEQFF

SEQ ID NO: 649499 - protein, 16 aa, Homo sapiens
  CDR3 for alpha chain variable domain of TCR clone 324750 (TRAV12-3, TRAJ53)
CAMSPGSGGSNYKLTF

SEQ ID NO: 649500 - protein, 11 aa, Homo sapiens
  CDR3 for beta chain variable domain of TCR clone 324750 (TRBV29-1, TRBJ2-5)
CSADRTGTQYF

SEQ ID NO: 649501 - protein, 13 aa, Homo sapiens
  CDR3 for alpha chain variable domain of TCR clone 324751 (TRAV8-6, TRAJ8)
CAVSNTGFQKLVF

SEQ ID NO: 649502 - protein, 15 aa, Homo sapiens
  CDR3 for beta chain variable domain of TCR clone 324751 (TRBV28, TRBJ2-5)
CASSSGQTIQETQYF

SEQ ID NO: 649503 - protein, 16 aa, Homo sapiens
  CDR3 for alpha chain variable domain of TCR clone 324752 (TRAV35, TRAJ29)
CAGPIRGISGNTPLVF

SEQ ID NO: 649504 - protein, 18 aa, Homo sapiens
  CDR3 for beta chain variable domain of TCR clone 324752 (TRBV27, TRBJ2-1)
CASGNRAVGVGSKNEQFF

SEQ ID NO: 649505 - protein, 15 aa, Homo sapiens
  CDR3 for alpha chain variable domain of TCR clone 324753 (TRAV21, TRAJ40)
CAVRPQTSGTYKYIF

SEQ ID NO: 649506 - protein, 12 aa, Homo sapiens
  CDR3 for beta chain variable domain of TCR clone 324753 (TRBV7-2, TRBJ2-2)
CQQLGSGGELFF

SEQ ID NO: 649507 - protein, 12 aa, Homo sapiens
  CDR3 for alpha chain variable domain of TCR clone 324754 (TRAV8-3, TRAJ34)
WASGYNNDKLIF

SEQ ID NO: 649508 - protein, 13 aa, Homo sapiens
  CDR3 for beta chain variable domain of TCR clone 324754 (TRBV6-4, TRBJ2-3)
CASSVSWADTQYF

SEQ ID NO: 649509 - protein, 13 aa, Homo sapiens
  CDR3 for alpha chain variable domain of TCR clone 324755 (TRAV12-3, TRAJ33)
CAMSVNSDYQLIW

SEQ ID NO: 649510 - protein, 13 aa, Homo sapiens
  CDR3 for beta chain variable domain of TCR clone 324755 (TRBV7-2, TRBJ2-2)
CASSLAVTGELFV

SEQ ID NO: 649511 - protein, 12 aa, Homo sapiens
  CDR3 for alpha chain variable domain of TCR clone 324756 (TRAV27, TRAJ35)
RAGADFGNVLHC

SEQ ID NO: 649512 - protein, 13 aa, Homo sapiens
  CDR3 for beta chain variable domain of TCR clone 324756 (TRBV7-3, TRBJ1-1)
CASSQDWGAEAFF

SEQ ID NO: 649513 - protein, 11 aa, Homo sapiens
  CDR3 for alpha chain variable domain of TCR clone 324757 (TRAV2, TRAJ13)
CASGGYQKVTF

SEQ ID NO: 649514 - protein, 16 aa, Homo sapiens
  CDR3 for beta chain variable domain of TCR clone 324757 (TRBV6-1, TRBJ2-5)
CASSETLEGGAETQYF

SEQ ID NO: 649515 - protein, 14 aa, Homo sapiens
  CDR3 for alpha chain variable domain of TCR clone 324758 (TRAV8-3, TRAJ16)
CAVDRFSDGQKLLF

SEQ ID NO: 649516 - protein, 15 aa, Homo sapiens
  CDR3 for beta chain variable domain of TCR clone 324758 (TRBV7-6, TRBJ2-1)
CASSPGQGHYNEQFF

SEQ ID NO: 649517 - protein, 14 aa, Homo sapiens
  CDR3 for alpha chain variable domain of TCR clone 324759 (TRAV13-1, TRAJ44)
CAAKATGTASKLTF

SEQ ID NO: 649518 - protein, 15 aa, Homo sapiens
  CDR3 for beta chain variable domain of TCR clone 324759 (TRBV19, TRBJ2-1)
CASIKGRGPHNEQFF

SEQ ID NO: 649519 - protein, 14 aa, Homo sapiens
  CDR3 for alpha chain variable domain of TCR clone 324760 (TRAV2, TRAJ30)
CAVEDRYRDDKIIF

SEQ ID NO: 649520 - protein, 13 aa, Homo sapiens
  CDR3 for beta chain variable domain of TCR clone 324760 (TRBV7-9, TRBJ2-3)
CASSPGSTDTQYF

SEQ ID NO: 649521 - protein, 16 aa, Homo sapiens
  CDR3 for alpha chain variable domain of TCR clone 324761 (TRAV12-2, TRAJ40)
CAVIRGGTSGTYKYIF

SEQ ID NO: 649522 - protein, 14 aa, Homo sapiens
  CDR3 for beta chain variable domain of TCR clone 324761 (TRBV7-9, TRBJ2-1)
CASSLGGSLNEQFF

SEQ ID NO: 649523 - protein, 13 aa, Homo sapiens
  CDR3 for alpha chain variable domain of TCR clone 324762 (TRAV21, TRAJ57)
CAVTQGGSEKLVF

SEQ ID NO: 649524 - protein, 14 aa, Homo sapiens
  CDR3 for beta chain variable domain of TCR clone 324762 (TRBV13, TRBJ2-5)
CASSLERVGETQYF

SEQ ID NO: 649525 - protein, 12 aa, Homo sapiens
  CDR3 for alpha chain variable domain of TCR clone 324763 (TRAV2, TRAJ15)
CAVAQAGTALIF

SEQ ID NO: 649526 - protein, 13 aa, Homo sapiens
  CDR3 for beta chain variable domain of TCR clone 324763 (TRBV4-1, TRBJ1-1)
CASSQLGTGEAFF

SEQ ID NO: 649527 - protein, 12 aa, Homo sapiens
  CDR3 for alpha chain variable domain of TCR clone 324764 (TRAV1-2, TRAJ29)
CAVPSGNTPLVF

SEQ ID NO: 649528 - protein, 11 aa, Homo sapiens
  CDR3 for beta chain variable domain of TCR clone 324764 (TRBV29-1, TRBJ2-5)
CSEDRTGTQYF

SEQ ID NO: 649529 - protein, 15 aa, Homo sapiens
  CDR3 for alpha chain variable domain of TCR clone 324765 (TRAV9-2, TRAJ56)
CALSEVDGANSKLTF

SEQ ID NO: 649530 - protein, 16 aa, Homo sapiens
  CDR3 for beta chain variable domain of TCR clone 324765 (TRBV27, TRBJ2-2)
CASSFRGLVRTGELFF

SEQ ID NO: 649531 - protein, 16 aa, Homo sapiens
  CDR3 for alpha chain variable domain of TCR clone 324766 (TRAV14/DV4, TRAJ53)
CAMREGGGGSNYKLTF

SEQ ID NO: 649532 - protein, 13 aa, Homo sapiens
  CDR3 for beta chain variable domain of TCR clone 324766 (TRBV4-2, TRBJ1-1)
CASSQAGSTEAFF

SEQ ID NO: 649533 - protein, 14 aa, Homo sapiens
  CDR3 for alpha chain variable domain of TCR clone 324767 (TRAV6, TRAJ6)
CALPTSGGSYIPTF

SEQ ID NO: 649534 - protein, 17 aa, Homo sapiens
  CDR3 for beta chain variable domain of TCR clone 324767 (TRBV5-1, TRBJ2-5)
CASGPVALGQNQETQYF

SEQ ID NO: 649535 - protein, 13 aa, Homo sapiens
  CDR3 for alpha chain variable domain of TCR clone 324768 (TRAV1-2, TRAJ31)
CAVRPNNNARLMF

SEQ ID NO: 649536 - protein, 14 aa, Homo sapiens
  CDR3 for beta chain variable domain of TCR clone 324768 (TRBV11-2, TRBJ2-1)
CASSLSGHYNEQFF

SEQ ID NO: 649537 - protein, 16 aa, Homo sapiens
  CDR3 for alpha chain variable domain of TCR clone 324769 (TRAV14/DV4, TRAJ20)
CAMREGRSRDDYKLSV

SEQ ID NO: 649538 - protein, 17 aa, Homo sapiens
  CDR3 for beta chain variable domain of TCR clone 324769 (TRBV28, TRBJ2-5)
CASSTPEGDALQETQYF

SEQ ID NO: 649539 - protein, 14 aa, Homo sapiens
  CDR3 for alpha chain variable domain of TCR clone 324770 (TRAV8-3, TRAJ4)
CAVGAAGGYNTLIF

SEQ ID NO: 649540 - protein, 16 aa, Homo sapiens
  CDR3 for beta chain variable domain of TCR clone 324770 (TRBV7-9, TRBJ2-3)
CASSFSVAGGTDTQYF

SEQ ID NO: 649541 - protein, 16 aa, Homo sapiens
  CDR3 for alpha chain variable domain of TCR clone 324771 (TRAV21, TRAJ45)
CAVSWGSGGGADGLTF

SEQ ID NO: 649542 - protein, 14 aa, Homo sapiens
  CDR3 for beta chain variable domain of TCR clone 324771 (TRBV4-2, TRBJ1-2)
CATSPGGSNYGYTF

SEQ ID NO: 649543 - protein, 17 aa, Homo sapiens
  CDR3 for alpha chain variable domain of TCR clone 324772 (TRAV3, TRAJ12)
CAVRDGGRMDSSYKLIF

SEQ ID NO: 649544 - protein, 16 aa, Homo sapiens
  CDR3 for beta chain variable domain of TCR clone 324772 (TRBV4-1, TRBJ2-2)
CASSLRTLQNTGELFF

SEQ ID NO: 649545 - protein, 14 aa, Homo sapiens
  CDR3 for alpha chain variable domain of TCR clone 324773 (TRAV1-2, TRAJ16)
CAVNRFSDGQKLLF

SEQ ID NO: 649546 - protein, 15 aa, Homo sapiens
  CDR3 for beta chain variable domain of TCR clone 324773 (TRBV11-1, TRBJ1-6)
CASSSPGRGNSPLHF

SEQ ID NO: 649547 - protein, 11 aa, Homo sapiens
  CDR3 for alpha chain variable domain of TCR clone 324774 (TRAV2, TRAJ33)
CAVDSNYQLIW

SEQ ID NO: 649548 - protein, 12 aa, Homo sapiens
  CDR3 for beta chain variable domain of TCR clone 324774 (TRBV7-9, TRBJ1-5)
CASSPQGQPQHF

SEQ ID NO: 649549 - protein, 14 aa, Homo sapiens
  CDR3 for alpha chain variable domain of TCR clone 324775 (TRAV26-1, TRAJ38)
CIADNAGNNRKLMW

SEQ ID NO: 649550 - protein, 14 aa, Homo sapiens
  CDR3 for beta chain variable domain of TCR clone 324775 (TRBV18, TRBJ2-7)
CASSPRGGSYEQYF

SEQ ID NO: 649551 - protein, 14 aa, Homo sapiens
  CDR3 for alpha chain variable domain of TCR clone 324776 (TRAV2, TRAJ9)
CAVEARSGGFKTIF

SEQ ID NO: 649552 - protein, 15 aa, Homo sapiens
  CDR3 for beta chain variable domain of TCR clone 324776 (TRBV7-2, TRBJ2-7)
CASSLTGQGTYEQYF

SEQ ID NO: 649553 - protein, 14 aa, Homo sapiens
  CDR3 for alpha chain variable domain of TCR clone 324777 (TRAV12-3, TRAJ10)
SHLPLTGGGNKLTF

SEQ ID NO: 649554 - protein, 13 aa, Homo sapiens
  CDR3 for beta chain variable domain of TCR clone 324777 (TRBV7-3, TRBJ1-2)
CASSPGAGGSITF

SEQ ID NO: 649555 - protein, 13 aa, Homo sapiens
  CDR3 for alpha chain variable domain of TCR clone 324778 (TRAV12-1, TRAJ11)
CVVNRAGYSTLTF

SEQ ID NO: 649556 - protein, 15 aa, Homo sapiens
  CDR3 for beta chain variable domain of TCR clone 324778 (TRBV7-9, TRBJ1-6)
CASSSPGRGNSPLHF

SEQ ID NO: 649557 - protein, 12 aa, Homo sapiens
  CDR3 for alpha chain variable domain of TCR clone 324779 (TRAV3, TRAJ27)
CAVRHGAGKSTF

SEQ ID NO: 649558 - protein, 13 aa, Homo sapiens
  CDR3 for beta chain variable domain of TCR clone 324779 (TRBV10-3, TRBJ1-2)
CAINADLNYGYTF

SEQ ID NO: 649559 - protein, 13 aa, Homo sapiens
  CDR3 for alpha chain variable domain of TCR clone 324780 (TRAV16, TRAJ44)
CALSAGTASKLTF

SEQ ID NO: 649560 - protein, 14 aa, Homo sapiens
  CDR3 for beta chain variable domain of TCR clone 324780 (TRBV10-2, TRBJ1-5)
CASSSTGRNQPQHF

SEQ ID NO: 649561 - protein, 11 aa, Homo sapiens
  CDR3 for alpha chain variable domain of TCR clone 324781 (TRAV2, TRAJ13)
CASGGYQKVTF

SEQ ID NO: 649562 - protein, 13 aa, Homo sapiens
  CDR3 for beta chain variable domain of TCR clone 324781 (TRBV6-5, TRBJ2-6)
CVSSTSGPLRLDF

SEQ ID NO: 649563 - protein, 18 aa, Homo sapiens
  CDR3 for alpha chain variable domain of TCR clone 324782 (TRAV21, TRAJ52)
CAVRPFPAGGTSYGKLTF

SEQ ID NO: 649564 - protein, 17 aa, Homo sapiens
  CDR3 for beta chain variable domain of TCR clone 324782 (TRBV13, TRBJ2-3)
CARSLSRVAGGRNTQYF

SEQ ID NO: 649565 - protein, 14 aa, Homo sapiens
  CDR3 for alpha chain variable domain of TCR clone 324783 (TRAV1-2, TRAJ16)
FAVNRFSDGQKLLF

SEQ ID NO: 649566 - protein, 12 aa, Homo sapiens
  CDR3 for beta chain variable domain of TCR clone 324783 (TRBV7-9, TRBJ2-7)
CASSLEGYEQYF

SEQ ID NO: 649567 - protein, 13 aa, Homo sapiens
  CDR3 for alpha chain variable domain of TCR clone 324784 (TRAV35, TRAJ42)
CAGFPGSQGNLIF

SEQ ID NO: 649568 - protein, 14 aa, Homo sapiens
  CDR3 for beta chain variable domain of TCR clone 324784 (TRBV4-1, TRBJ2-2)
CTSSQAVNTGELFF

SEQ ID NO: 649569 - protein, 16 aa, Homo sapiens
  CDR3 for alpha chain variable domain of TCR clone 324785 (TRAV1-2, TRAJ10)
CALRGVLTGGGNKLTF

SEQ ID NO: 649570 - protein, 15 aa, Homo sapiens
  CDR3 for beta chain variable domain of TCR clone 324785 (TRBV27, TRBJ2-7)
CASSPIVTGAYEQYF

SEQ ID NO: 649571 - protein, 13 aa, Homo sapiens
  CDR3 for alpha chain variable domain of TCR clone 324786 (TRAV13-1, TRAJ11)
CAASNRGYSTLTF

SEQ ID NO: 649572 - protein, 14 aa, Homo sapiens
  CDR3 for beta chain variable domain of TCR clone 324786 (TRBV4-2, TRBJ2-1)
CASGLDRAYNEQFF

SEQ ID NO: 649573 - protein, 15 aa, Homo sapiens
  CDR3 for alpha chain variable domain of TCR clone 324787 (TRAV3, TRAJ22)
CAVRDRGGSARPLTF

SEQ ID NO: 649574 - protein, 17 aa, Homo sapiens
  CDR3 for beta chain variable domain of TCR clone 324787 (TRBV24-1, TRBJ2-1)
CATSDVSTSGTYNEQFF

SEQ ID NO: 649575 - protein, 17 aa, Homo sapiens
  CDR3 for alpha chain variable domain of TCR clone 324788 (TRAV14/DV4, TRAJ28)
CAMREGYSGAGSYRLTF

SEQ ID NO: 649576 - protein, 15 aa, Homo sapiens
  CDR3 for beta chain variable domain of TCR clone 324788 (TRBV6-3, TRBJ2-7)
CASSSPGTVFYEQYF

SEQ ID NO: 649577 - protein, 15 aa, Homo sapiens
  CDR3 for alpha chain variable domain of TCR clone 324789 (TRAV35, TRAJ40)
CAGQLGTSGTYKFIL

SEQ ID NO: 649578 - protein, 14 aa, Homo sapiens
  CDR3 for beta chain variable domain of TCR clone 324789 (TRBV5-1, TRBJ2-7)
CASSRGESLYEQYF

SEQ ID NO: 649579 - protein, 17 aa, Homo sapiens
  CDR3 for alpha chain variable domain of TCR clone 324790 (TRAV3, TRAJ6)
CAVRDGPRAGGSYIPTL

SEQ ID NO: 649580 - protein, 15 aa, Homo sapiens
  CDR3 for beta chain variable domain of TCR clone 324790 (TRBV7-6, TRBJ2-3)
CASSPIIDSTDTQYF

SEQ ID NO: 649581 - protein, 15 aa, Homo sapiens
  CDR3 for alpha chain variable domain of TCR clone 324791 (TRAV23/DV6, TRAJ44)
CAASGGTGTASKLPF

SEQ ID NO: 649582 - protein, 16 aa, Homo sapiens
  CDR3 for beta chain variable domain of TCR clone 324791 (TRBV20-1, TRBJ2-3)
CSALAFDTGDPDTQYF

SEQ ID NO: 649583 - protein, 14 aa, Homo sapiens
  CDR3 for alpha chain variable domain of TCR clone 324792 (TRAV8-1, TRAJ24)
CAVNAADSWGNCRL

SEQ ID NO: 649584 - protein, 16 aa, Homo sapiens
  CDR3 for beta chain variable domain of TCR clone 324792 (TRBV4-3, TRBJ2-1)
CASSPALDRGVNEQFF

SEQ ID NO: 649585 - protein, 17 aa, Homo sapiens
  CDR3 for alpha chain variable domain of TCR clone 324793 (TRAV12-3, TRAJ6)
CAMSARGGAGGSDIPTV

SEQ ID NO: 649586 - protein, 12 aa, Homo sapiens
  CDR3 for beta chain variable domain of TCR clone 324793 (TRBV12-4, TRBJ2-3)
CASSTLPDTQYF

SEQ ID NO: 649587 - protein, 16 aa, Homo sapiens
  CDR3 for alpha chain variable domain of TCR clone 324794 (TRAV1-2, TRAJ10)
CAVRGVLTGGGNKLTF

SEQ ID NO: 649588 - protein, 13 aa, Homo sapiens
  CDR3 for beta chain variable domain of TCR clone 324794 (TRBV7-8, TRBJ2-7)
CASSLTGGREQYF

SEQ ID NO: 649589 - protein, 12 aa, Homo sapiens
  CDR3 for alpha chain variable domain of TCR clone 324795 (TRAV1-2, TRAJ29)
CAVSSGNTPLVF

SEQ ID NO: 649590 - protein, 13 aa, Homo sapiens
  CDR3 for beta chain variable domain of TCR clone 324795 (TRBV12-4, TRBJ2-7)
CASSPTETYEQYF

SEQ ID NO: 649591 - protein, 17 aa, Homo sapiens
  CDR3 for alpha chain variable domain of TCR clone 324796 (TRAV3, TRAJ6)
CAVRDGPRAGGSYIPTF

SEQ ID NO: 649592 - protein, 14 aa, Homo sapiens
  CDR3 for beta chain variable domain of TCR clone 324796 (TRBV7-9, TRBJ2-2)
CASSLGHRTGELFF

SEQ ID NO: 649593 - protein, 13 aa, Homo sapiens
  CDR3 for alpha chain variable domain of TCR clone 324797 (TRAV35, TRAJ27)
CAGQEGDAGKSTF

SEQ ID NO: 649594 - protein, 13 aa, Homo sapiens
  CDR3 for beta chain variable domain of TCR clone 324797 (TRBV6-5, TRBJ2-3)
CASSYLRGGTQYF

SEQ ID NO: 649595 - protein, 14 aa, Homo sapiens
  CDR3 for alpha chain variable domain of TCR clone 324798 (TRAV3, TRAJ36)
CAVRDGTGANSLFF

SEQ ID NO: 649596 - protein, 16 aa, Homo sapiens
  CDR3 for beta chain variable domain of TCR clone 324798 (TRBV20-1, TRBJ2-6)
CSAREGPGVGANGLTF

SEQ ID NO: 649597 - protein, 14 aa, Homo sapiens
  CDR3 for alpha chain variable domain of TCR clone 324799 (TRAV9-2, TRAJ39)
CALYIYNAGNMLTF

SEQ ID NO: 649598 - protein, 15 aa, Homo sapiens
  CDR3 for beta chain variable domain of TCR clone 324799 (TRBV19, TRBJ2-4)
CASRGPRRGENSQYF

SEQ ID NO: 649599 - protein, 18 aa, Homo sapiens
  CDR3 for alpha chain variable domain of TCR clone 324800 (TRAV26-2, TRAJ32)
CILRAPLHYGGATNKLIF

SEQ ID NO: 649600 - protein, 13 aa, Homo sapiens
  CDR3 for beta chain variable domain of TCR clone 324800 (TRBV7-3, TRBJ2-1)
CASSLWPYNEQFF

SEQ ID NO: 649601 - protein, 13 aa, Homo sapiens
  CDR3 for alpha chain variable domain of TCR clone 324801 (TRAV21, TRAJ33)
CAVAGDSNYQLIW

SEQ ID NO: 649602 - protein, 13 aa, Homo sapiens
  CDR3 for beta chain variable domain of TCR clone 324801 (TRBV15, TRBJ1-6)
CATSGGLNSPLHF

SEQ ID NO: 649603 - protein, 12 aa, Homo sapiens
  CDR3 for alpha chain variable domain of TCR clone 324802 (TRAV13-2, TRAJ8)
FAPWLGFQKLVF

SEQ ID NO: 649604 - protein, 15 aa, Homo sapiens
  CDR3 for beta chain variable domain of TCR clone 324802 (TRBV12-4, TRBJ2-5)
CASSLSGAFQETQFF

SEQ ID NO: 649605 - protein, 17 aa, Homo sapiens
  CDR3 for alpha chain variable domain of TCR clone 324803 (TRAV3, TRAJ12)
CAVRDGGRMDSSYKLIF

SEQ ID NO: 649606 - protein, 13 aa, Homo sapiens
  CDR3 for beta chain variable domain of TCR clone 324803 (TRBV15, TRBJ1-6)
CATSGGLNSPLHY

SEQ ID NO: 649607 - protein, 14 aa, Homo sapiens
  CDR3 for alpha chain variable domain of TCR clone 324804 (TRAV16, TRAJ33)
CALSAMDSNYQLIW

SEQ ID NO: 649608 - protein, 15 aa, Homo sapiens
  CDR3 for beta chain variable domain of TCR clone 324804 (TRBV2, TRBJ2-1)
CASSEARSAYNEQFF

SEQ ID NO: 649609 - protein, 19 aa, Homo sapiens
  CDR3 for alpha chain variable domain of TCR clone 324805 (TRAV26-1, TRAJ52)
CIVRAHRNAGGTSYGKLTF

SEQ ID NO: 649610 - protein, 15 aa, Homo sapiens
  CDR3 for beta chain variable domain of TCR clone 324805 (TRBV27, TRBJ2-4)
CASSLGSTGTNIQYF

SEQ ID NO: 649611 - protein, 12 aa, Homo sapiens
  CDR3 for alpha chain variable domain of TCR clone 324806 (TRAV16, TRAJ26)
CASKDGGQKFVF

SEQ ID NO: 649612 - protein, 13 aa, Homo sapiens
  CDR3 for beta chain variable domain of TCR clone 324806 (TRBV25-1, TRBJ1-1)
CASSDRGRAEAFF

SEQ ID NO: 649613 - protein, 17 aa, Homo sapiens
  CDR3 for alpha chain variable domain of TCR clone 324807 (TRAV3, TRAJ42)
CAVRDRDTGGSKGNLIF

SEQ ID NO: 649614 - protein, 15 aa, Homo sapiens
  CDR3 for beta chain variable domain of TCR clone 324807 (TRBV4-1, TRBJ2-5)
CASSQWDLYQETQYF

SEQ ID NO: 649615 - protein, 14 aa, Homo sapiens
  CDR3 for alpha chain variable domain of TCR clone 324808 (TRAV1-2, TRAJ16)
CAVNRFSDGQKLLF

SEQ ID NO: 649616 - protein, 16 aa, Homo sapiens
  CDR3 for beta chain variable domain of TCR clone 324808 (TRBV19, TRBJ2-3)
CASSPEWDRGTYTQYF

SEQ ID NO: 649617 - protein, 17 aa, Homo sapiens
  CDR3 for alpha chain variable domain of TCR clone 324809 (TRAV3, TRAJ6)
CAVRDGPRAGGSYIPTF

SEQ ID NO: 649618 - protein, 13 aa, Homo sapiens
  CDR3 for beta chain variable domain of TCR clone 324809 (TRBV7-9, TRBJ2-1)
CASSLGTVNEQFF

SEQ ID NO: 649619 - protein, 13 aa, Homo sapiens
  CDR3 for alpha chain variable domain of TCR clone 324810 (TRAV8-4, TRAJ47)
CAVTALYGNKLVF

SEQ ID NO: 649620 - protein, 14 aa, Homo sapiens
  CDR3 for beta chain variable domain of TCR clone 324810 (TRBV7-6, TRBJ2-1)
CASSLGGGADEQFF

SEQ ID NO: 649621 - protein, 12 aa, Homo sapiens
  CDR3 for alpha chain variable domain of TCR clone 324811 (TRAV3, TRAJ43)
CAGRDPNNDIRF

SEQ ID NO: 649622 - protein, 13 aa, Homo sapiens
  CDR3 for beta chain variable domain of TCR clone 324811 (TRBV19, TRBJ1-2)
CASSVPGQDGYTF

SEQ ID NO: 649623 - protein, 12 aa, Homo sapiens
  CDR3 for alpha chain variable domain of TCR clone 324812 (TRAV26-2, TRAJ21)
CILKVNFNKFYF

SEQ ID NO: 649624 - protein, 14 aa, Homo sapiens
  CDR3 for beta chain variable domain of TCR clone 324812 (TRBV12-4, TRBJ1-1)
CASSLGTGGTEAFF

SEQ ID NO: 649625 - protein, 12 aa, Homo sapiens
  CDR3 for alpha chain variable domain of TCR clone 324813 (TRAV13-1, TRAJ3)
CAATGVQRCFQD

SEQ ID NO: 649626 - protein, 16 aa, Homo sapiens
  CDR3 for beta chain variable domain of TCR clone 324813 (TRBV7-3, TRBJ2-2)
CASSLKRGTLSGELFF

SEQ ID NO: 649627 - protein, 13 aa, Homo sapiens
  CDR3 for alpha chain variable domain of TCR clone 324814 (TRAV1-2, TRAJ13)
CAVNSGGYQKVTF

SEQ ID NO: 649628 - protein, 13 aa, Homo sapiens
  CDR3 for beta chain variable domain of TCR clone 324814 (TRBV15, TRBJ1-6)
CATSGGLNSPLHF

SEQ ID NO: 649629 - protein, 15 aa, Homo sapiens
  CDR3 for alpha chain variable domain of TCR clone 324815 (TRAV23/DV6, TRAJ39)
CAASMGNNAGNMLTF

SEQ ID NO: 649630 - protein, 16 aa, Homo sapiens
  CDR3 for beta chain variable domain of TCR clone 324815 (TRBV4-1, TRBJ2-1)
CASSPYAGGHDNEQFF

SEQ ID NO: 649631 - protein, 14 aa, Homo sapiens
  CDR3 for alpha chain variable domain of TCR clone 324816 (TRAV3, TRAJ8)
CAVSLNTGFPKLVF

SEQ ID NO: 649632 - protein, 14 aa, Homo sapiens
  CDR3 for beta chain variable domain of TCR clone 324816 (TRBV6-6, TRBJ1-5)
CASVDSGFNQPQHF

SEQ ID NO: 649633 - protein, 14 aa, Homo sapiens
  CDR3 for alpha chain variable domain of TCR clone 324817 (TRAV12-2, TRAJ6)
CASKWVGGSYIPTF

SEQ ID NO: 649634 - protein, 13 aa, Homo sapiens
  CDR3 for beta chain variable domain of TCR clone 324817 (TRBV2, TRBJ1-1)
CASSEGGNTEAFF

SEQ ID NO: 649635 - protein, 15 aa, Homo sapiens
  CDR3 for alpha chain variable domain of TCR clone 324818 (TRAV13-2, TRAJ40)
CAENRSRQGTYKYIF

SEQ ID NO: 649636 - protein, 16 aa, Homo sapiens
  CDR3 for beta chain variable domain of TCR clone 324818 (TRBV19, TRBJ2-1)
CASSKAGPSSYNEQFF

SEQ ID NO: 649637 - protein, 13 aa, Homo sapiens
  CDR3 for alpha chain variable domain of TCR clone 324819 (TRAV29/DV5, TRAJ44)
CPASTGTASKLTF

SEQ ID NO: 649638 - protein, 13 aa, Homo sapiens
  CDR3 for beta chain variable domain of TCR clone 324819 (TRBV19, TRBJ2-7)
CASRKAGGSEQYF

SEQ ID NO: 649639 - protein, 16 aa, Homo sapiens
  CDR3 for alpha chain variable domain of TCR clone 324820 (TRAV1-2, TRAJ6)
CAVRDQGTGGSYIPTF

SEQ ID NO: 649640 - protein, 15 aa, Homo sapiens
  CDR3 for beta chain variable domain of TCR clone 324820 (TRBV28, TRBJ2-5)
CASSPGQGSIETQYF

SEQ ID NO: 649641 - protein, 11 aa, Homo sapiens
  CDR3 for alpha chain variable domain of TCR clone 324821 (TRAV12-1, TRAJ30)
CVVNGQDKIIF

SEQ ID NO: 649642 - protein, 13 aa, Homo sapiens
  CDR3 for beta chain variable domain of TCR clone 324821 (TRBV10-2, TRBJ2-7)
CASGASGGYEQYF

SEQ ID NO: 649643 - protein, 13 aa, Homo sapiens
  CDR3 for alpha chain variable domain of TCR clone 324822 (TRAV8-4, TRAJ8)
CAVRNTGFQKLVF

SEQ ID NO: 649644 - protein, 13 aa, Homo sapiens
  CDR3 for beta chain variable domain of TCR clone 324822 (TRBV11-3, TRBJ2-7)
CASSLEDGSKQYF

SEQ ID NO: 649645 - protein, 15 aa, Homo sapiens
  CDR3 for alpha chain variable domain of TCR clone 324823 (TRAV8-3, TRAJ45)
CASSYSGGGADGLTF

SEQ ID NO: 649646 - protein, 15 aa, Homo sapiens
  CDR3 for beta chain variable domain of TCR clone 324823 (TRBV4-1, TRBJ2-1)
CASSQAQREIYEQFF

SEQ ID NO: 649647 - protein, 16 aa, Homo sapiens
  CDR3 for alpha chain variable domain of TCR clone 324824 (TRAV3, TRAJ37)
CDVRGKGSGNTGKLIF

SEQ ID NO: 649648 - protein, 13 aa, Homo sapiens
  CDR3 for beta chain variable domain of TCR clone 324824 (TRBV19, TRBJ1-2)
CASSVPGQDGYTF

SEQ ID NO: 649649 - protein, 16 aa, Homo sapiens
  CDR3 for alpha chain variable domain of TCR clone 324825 (TRAV30, TRAJ24)
CGTEIVDADSWGKFQF

SEQ ID NO: 649650 - protein, 15 aa, Homo sapiens
  CDR3 for beta chain variable domain of TCR clone 324825 (TRBV15, TRBJ1-5)
CATSSDPVSNQPQHF

SEQ ID NO: 649651 - protein, 13 aa, Homo sapiens
  CDR3 for alpha chain variable domain of TCR clone 324826 (TRAV12-1, TRAJ40)
CVVPTSGTYKYNF

SEQ ID NO: 649652 - protein, 16 aa, Homo sapiens
  CDR3 for beta chain variable domain of TCR clone 324826 (TRBV7-9, TRBJ1-2)
CASSLGFSSGEDGYTF

SEQ ID NO: 649653 - protein, 13 aa, Homo sapiens
  CDR3 for alpha chain variable domain of TCR clone 324827 (TRAV2, TRAJ40)
CAVVTSGTYKYIF

SEQ ID NO: 649654 - protein, 18 aa, Homo sapiens
  CDR3 for beta chain variable domain of TCR clone 324827 (TRBV28, TRBJ2-1)
CASSSPSGLAGAIYEQFF

SEQ ID NO: 649655 - protein, 14 aa, Homo sapiens
  CDR3 for alpha chain variable domain of TCR clone 324828 (TRAV17, TRAJ57)
CATDPQGGSEKLVF

SEQ ID NO: 649656 - protein, 14 aa, Homo sapiens
  CDR3 for beta chain variable domain of TCR clone 324828 (TRBV7-9, TRBJ2-2)
CASSFDRGTGELFF

SEQ ID NO: 649657 - protein, 14 aa, Homo sapiens
  CDR3 for alpha chain variable domain of TCR clone 324829 (TRAV1-2, TRAJ8)
CAVREDTGFQKLVF

SEQ ID NO: 649658 - protein, 13 aa, Homo sapiens
  CDR3 for beta chain variable domain of TCR clone 324829 (TRBV7-9, TRBJ1-2)
CASSLKQNYVYTF

SEQ ID NO: 649659 - protein, 12 aa, Homo sapiens
  CDR3 for alpha chain variable domain of TCR clone 324830 (TRAV2, TRAJ5)
CALDTGRRALTF

SEQ ID NO: 649660 - protein, 18 aa, Homo sapiens
  CDR3 for beta chain variable domain of TCR clone 324830 (TRBV7-7, TRBJ2-1)
CASSLALTSGRSYNEQFF

SEQ ID NO: 649661 - protein, 18 aa, Homo sapiens
  CDR3 for alpha chain variable domain of TCR clone 324831 (TRAV21, TRAJ52)
CAVRPSPAGGTSYVKLTF

SEQ ID NO: 649662 - protein, 13 aa, Homo sapiens
  CDR3 for beta chain variable domain of TCR clone 324831 (TRBV20-1, TRBJ2-5)
CSAREAFQGTQYF

SEQ ID NO: 649663 - protein, 14 aa, Homo sapiens
  CDR3 for alpha chain variable domain of TCR clone 324832 (TRAV20, TRAJ42)
CAVQAGGSQGKIIF

SEQ ID NO: 649664 - protein, 14 aa, Homo sapiens
  CDR3 for beta chain variable domain of TCR clone 324832 (TRBV28, TRBJ1-2)
CASRIQGANYGYTF

SEQ ID NO: 649665 - protein, 14 aa, Homo sapiens
  CDR3 for alpha chain variable domain of TCR clone 324833 (TRAV12-2, TRAJ11)
CAVSRESGYSTLTF

SEQ ID NO: 649666 - protein, 10 aa, Homo sapiens
  CDR3 for beta chain variable domain of TCR clone 324833 (TRBV20-1, TRBJ2-5)
CSARFETQYF

SEQ ID NO: 649667 - protein, 13 aa, Homo sapiens
  CDR3 for alpha chain variable domain of TCR clone 324834 (TRAV12-2, TRAJ4)
CAVRSGGYNKLIF

SEQ ID NO: 649668 - protein, 15 aa, Homo sapiens
  CDR3 for beta chain variable domain of TCR clone 324834 (TRBV10-3, TRBJ2-1)
CSISDVQDRAYEQFF

SEQ ID NO: 649669 - protein, 18 aa, Homo sapiens
  CDR3 for alpha chain variable domain of TCR clone 324835 (TRAV26-2, TRAJ54)
CILRDVEVGIQGAQKLVF

SEQ ID NO: 649670 - protein, 15 aa, Homo sapiens
  CDR3 for beta chain variable domain of TCR clone 324835 (TRBV27, TRBJ2-1)
CASSNGGGSSNEQFF

SEQ ID NO: 649671 - protein, 10 aa, Homo sapiens
  CDR3 for alpha chain variable domain of TCR clone 324836 (TRAV1-2, TRAJ23)
CAGQGGKLIF

SEQ ID NO: 649672 - protein, 16 aa, Homo sapiens
  CDR3 for beta chain variable domain of TCR clone 324836 (TRBV7-3, TRBJ2-2)
CASSLKRGTLSGELFF

SEQ ID NO: 649673 - protein, 10 aa, Homo sapiens
  CDR3 for alpha chain variable domain of TCR clone 324837 (TRAV12-3, TRAJ49)
CAMNDDQFYF

SEQ ID NO: 649674 - protein, 13 aa, Homo sapiens
  CDR3 for beta chain variable domain of TCR clone 324837 (TRBV2, TRBJ1-1)
CASSVLMNTEAFF

SEQ ID NO: 649675 - protein, 12 aa, Homo sapiens
  CDR3 for alpha chain variable domain of TCR clone 324838 (TRAV12-2, TRAJ43)
CAVNLNNNDMRF

SEQ ID NO: 649676 - protein, 14 aa, Homo sapiens
  CDR3 for beta chain variable domain of TCR clone 324838 (TRBV25-1, TRBJ2-2)
CASSELGLPGELFF

SEQ ID NO: 649677 - protein, 17 aa, Homo sapiens
  CDR3 for alpha chain variable domain of TCR clone 324839 (TRAV3, TRAJ6)
CAMRVGPRAGGSYIPTF

SEQ ID NO: 649678 - protein, 14 aa, Homo sapiens
  CDR3 for beta chain variable domain of TCR clone 324839 (TRBV7-2, TRBJ2-7)
CASSPKTSFYEQYF

SEQ ID NO: 649679 - protein, 13 aa, Homo sapiens
  CDR3 for alpha chain variable domain of TCR clone 324840 (TRAV12-2, TRAJ24)
CAVSTDSWGKLQF

SEQ ID NO: 649680 - protein, 16 aa, Homo sapiens
  CDR3 for beta chain variable domain of TCR clone 324840 (TRBV19, TRBJ2-1)
CASSKAGPSSYNEQFF

SEQ ID NO: 649681 - protein, 16 aa, Homo sapiens
  CDR3 for alpha chain variable domain of TCR clone 324841 (TRAV3, TRAJ10)
CAVRDMNAGGGNKLTF

SEQ ID NO: 649682 - protein, 14 aa, Homo sapiens
  CDR3 for beta chain variable domain of TCR clone 324841 (TRBV10-3, TRBJ1-1)
CAISDGSGVTEAFF

SEQ ID NO: 649683 - protein, 11 aa, Homo sapiens
  CDR3 for alpha chain variable domain of TCR clone 324842 (TRAV2, TRAJ20)
CAVADDYKLSF

SEQ ID NO: 649684 - protein, 11 aa, Homo sapiens
  CDR3 for beta chain variable domain of TCR clone 324842 (TRBV19, TRBJ1-1)
CASSIGSEAFF

SEQ ID NO: 649685 - protein, 15 aa, Homo sapiens
  CDR3 for alpha chain variable domain of TCR clone 324843 (TRAV23/DV6, TRAJ45)
CAASSAGGGADGRTF

SEQ ID NO: 649686 - protein, 16 aa, Homo sapiens
  CDR3 for beta chain variable domain of TCR clone 324843 (TRBV6-6, TRBJ2-5)
CASSYDWAGGSETQYF

SEQ ID NO: 649687 - protein, 11 aa, Homo sapiens
  CDR3 for alpha chain variable domain of TCR clone 324844 (TRAV21, TRAJ48)
CAVDGNEKLTS

SEQ ID NO: 649688 - protein, 16 aa, Homo sapiens
  CDR3 for beta chain variable domain of TCR clone 324844 (TRBV12-4, TRBJ1-5)
CASSSGPRGSKQPQHF

SEQ ID NO: 649689 - protein, 15 aa, Homo sapiens
  CDR3 for alpha chain variable domain of TCR clone 324845 (TRAV2, TRAJ13)
CCLLLCFRGYQKVTF

SEQ ID NO: 649690 - protein, 17 aa, Homo sapiens
  CDR3 for beta chain variable domain of TCR clone 324845 (TRBV20-1, TRBJ2-7)
CSAAGTSGGGSSYEQYF

SEQ ID NO: 649691 - protein, 12 aa, Homo sapiens
  CDR3 for alpha chain variable domain of TCR clone 324846 (TRAV21, TRAJ13)
PGPSGGYQKVTF

SEQ ID NO: 649692 - protein, 15 aa, Homo sapiens
  CDR3 for beta chain variable domain of TCR clone 324846 (TRBV27, TRBJ2-5)
CSSSLYPRGGETQYF

SEQ ID NO: 649693 - protein, 14 aa, Homo sapiens
  CDR3 for alpha chain variable domain of TCR clone 324847 (TRAV29/DV5, TRAJ36)
CAARRKTGANNLFL

SEQ ID NO: 649694 - protein, 14 aa, Homo sapiens
  CDR3 for beta chain variable domain of TCR clone 324847 (TRBV28, TRBJ2-3)
CASSFASGTDTQYF

SEQ ID NO: 649695 - protein, 13 aa, Homo sapiens
  CDR3 for alpha chain variable domain of TCR clone 324848 (TRAV12-2, TRAJ40)
CAVKGPGTYKYIF

SEQ ID NO: 649696 - protein, 18 aa, Homo sapiens
  CDR3 for beta chain variable domain of TCR clone 324848 (TRBV23-1, TRBJ2-7)
CASSQYRRTDSTSSTSGR

SEQ ID NO: 649697 - protein, 12 aa, Homo sapiens
  CDR3 for alpha chain variable domain of TCR clone 324849 (TRAV27, TRAJ13)
CAGAGGYQKVTF

SEQ ID NO: 649698 - protein, 15 aa, Homo sapiens
  CDR3 for beta chain variable domain of TCR clone 324849 (TRBV29-1, TRBJ2-7)
CSVEFFDRGSYEQYF

SEQ ID NO: 649699 - protein, 13 aa, Homo sapiens
  CDR3 for alpha chain variable domain of TCR clone 324850 (TRAV22, TRAJ44)
CALNPGTASKLTF

SEQ ID NO: 649700 - protein, 14 aa, Homo sapiens
  CDR3 for beta chain variable domain of TCR clone 324850 (TRBV7-8, TRBJ2-3)
CASSSRDSTDTQYF

SEQ ID NO: 649701 - protein, 15 aa, Homo sapiens
  CDR3 for alpha chain variable domain of TCR clone 324851 (TRAV35, TRAJ20)
CAGQLVGSNDYKLSF

SEQ ID NO: 649702 - protein, 13 aa, Homo sapiens
  CDR3 for beta chain variable domain of TCR clone 324851 (TRBV19, TRBJ2-7)
CASSKTGTQEQYF

SEQ ID NO: 649703 - protein, 15 aa, Homo sapiens
  CDR3 for alpha chain variable domain of TCR clone 324852 (TRAV12-3, TRAJ6)
CAMSATTGGSYIPTF

SEQ ID NO: 649704 - protein, 13 aa, Homo sapiens
  CDR3 for beta chain variable domain of TCR clone 324852 (TRBV6-5, TRBJ2-1)
CASRGRVGNEQFF

SEQ ID NO: 649705 - protein, 15 aa, Homo sapiens
  CDR3 for alpha chain variable domain of TCR clone 324853 (TRAV35, TRAJ23)
CAGQLGYNQGGKPIF

SEQ ID NO: 649706 - protein, 16 aa, Homo sapiens
  CDR3 for beta chain variable domain of TCR clone 324853 (TRBV27, TRBJ2-1)
CASSSRLAGNYNEQFF

SEQ ID NO: 649707 - protein, 17 aa, Homo sapiens
  CDR3 for alpha chain variable domain of TCR clone 324854 (TRAV8-6, TRAJ8)
CAVKEGIENTGFQKLVF

SEQ ID NO: 649708 - protein, 12 aa, Homo sapiens
  CDR3 for beta chain variable domain of TCR clone 324854 (TRBV19, TRBJ1-4)
CASKYWPGGLFF

SEQ ID NO: 649709 - protein, 13 aa, Homo sapiens
  CDR3 for alpha chain variable domain of TCR clone 324855 (TRAV2, TRAJ15)
CAVASQAGIALIF

SEQ ID NO: 649710 - protein, 15 aa, Homo sapiens
  CDR3 for beta chain variable domain of TCR clone 324855 (TRBV13, TRBJ1-5)
CASSRTGRGHQPQHF

SEQ ID NO: 649711 - protein, 15 aa, Homo sapiens
  CDR3 for alpha chain variable domain of TCR clone 324856 (TRAV8-3, TRAJ6)
CAVGPLGGGSYIPTF

SEQ ID NO: 649712 - protein, 14 aa, Homo sapiens
  CDR3 for beta chain variable domain of TCR clone 324856 (TRBV19, TRBJ2-2)
CASSTGQGAGELFS

SEQ ID NO: 649713 - protein, 17 aa, Homo sapiens
  CDR3 for alpha chain variable domain of TCR clone 324857 (TRAV3, TRAJ6)
CAVRDGPRAGGSYIPTF

SEQ ID NO: 649714 - protein, 13 aa, Homo sapiens
  CDR3 for beta chain variable domain of TCR clone 324857 (TRBV7-3, TRBJ1-1)
CASSQDGGAEALF

SEQ ID NO: 649715 - protein, 13 aa, Homo sapiens
  CDR3 for alpha chain variable domain of TCR clone 324858 (TRAV3, TRAJ43)
CAVKARNNNDMRF

SEQ ID NO: 649716 - protein, 18 aa, Homo sapiens
  CDR3 for beta chain variable domain of TCR clone 324858 (TRBV11-2, TRBJ1-1)
CASSLRQGGNARKLSLDK

SEQ ID NO: 649717 - protein, 16 aa, Homo sapiens
  CDR3 for alpha chain variable domain of TCR clone 324859 (TRAV8-3, TRAJ45)
CAVGVGSGGGADGLTF

SEQ ID NO: 649718 - protein, 16 aa, Homo sapiens
  CDR3 for beta chain variable domain of TCR clone 324859 (TRBV20-1, TRBJ2-1)
CSASGLTSVPYNEQFF

SEQ ID NO: 649719 - protein, 13 aa, Homo sapiens
  CDR3 for alpha chain variable domain of TCR clone 324860 (TRAV12-3, TRAJ7)
CAMTPYGNNRLAF

SEQ ID NO: 649720 - protein, 13 aa, Homo sapiens
  CDR3 for beta chain variable domain of TCR clone 324860 (TRBV10-3, TRBJ1-2)
CAINGDLNYGYTF

SEQ ID NO: 649721 - protein, 16 aa, Homo sapiens
  CDR3 for alpha chain variable domain of TCR clone 324861 (TRAV3, TRAJ10)
CAVRDRLTGGGNKLTF

SEQ ID NO: 649722 - protein, 20 aa, Homo sapiens
  CDR3 for beta chain variable domain of TCR clone 324861 (TRBV7-8, TRBJ2-2)
CASSHLFPGPTIHITGELFF

SEQ ID NO: 649723 - protein, 14 aa, Homo sapiens
  CDR3 for alpha chain variable domain of TCR clone 324862 (TRAV21, TRAJ23)
CAPRLYNQGGKLIF

SEQ ID NO: 649724 - protein, 14 aa, Homo sapiens
  CDR3 for beta chain variable domain of TCR clone 324862 (TRBV7-8, TRBJ2-7)
CASSPRDRVYEQYF

SEQ ID NO: 649725 - protein, 14 aa, Homo sapiens
  CDR3 for alpha chain variable domain of TCR clone 324863 (TRAV3, TRAJ27)
CALRDDTNAGKSTF

SEQ ID NO: 649726 - protein, 13 aa, Homo sapiens
  CDR3 for beta chain variable domain of TCR clone 324863 (TRBV7-8, TRBJ2-1)
CASSAGTGNEQFF

SEQ ID NO: 649727 - protein, 15 aa, Homo sapiens
  CDR3 for alpha chain variable domain of TCR clone 324864 (TRAV25, TRAJ52)
CAGTSGGTSYGKLTF

SEQ ID NO: 649728 - protein, 14 aa, Homo sapiens
  CDR3 for beta chain variable domain of TCR clone 324864 (TRBV20-1, TRBJ2-3)
CSARGGTSTDTQYF

SEQ ID NO: 649729 - protein, 14 aa, Homo sapiens
  CDR3 for alpha chain variable domain of TCR clone 324865 (TRAV16, TRAJ31)
CSKWRRGDNARLMF

SEQ ID NO: 649730 - protein, 14 aa, Homo sapiens
  CDR3 for beta chain variable domain of TCR clone 324865 (TRBV27, TRBJ2-2)
CASRPGVNTGELFF

SEQ ID NO: 649731 - protein, 16 aa, Homo sapiens
  CDR3 for alpha chain variable domain of TCR clone 324866 (TRAV26-1, TRAJ40)
CIVRGYPTSGTYKYIF

SEQ ID NO: 649732 - protein, 14 aa, Homo sapiens
  CDR3 for beta chain variable domain of TCR clone 324866 (TRBV5-1, IGHJ2)
CASSSGQGGEKLFF

SEQ ID NO: 649733 - protein, 10 aa, Homo sapiens
  CDR3 for alpha chain variable domain of TCR clone 324867 (TRAV36/DV7, TRAJ48)
CAVGNEKLTF

SEQ ID NO: 649734 - protein, 12 aa, Homo sapiens
  CDR3 for beta chain variable domain of TCR clone 324867 (TRBV7-8, TRBJ2-7)
CASSLGDREQYF

SEQ ID NO: 649735 - protein, 13 aa, Homo sapiens
  CDR3 for alpha chain variable domain of TCR clone 324868 (TRAV8-3, TRAJ31)
CAVGARNNARLMF

SEQ ID NO: 649736 - protein, 16 aa, Homo sapiens
  CDR3 for beta chain variable domain of TCR clone 324868 (TRBV18, TRBJ1-3)
CASSLGILNGENIIYF

SEQ ID NO: 649737 - protein, 17 aa, Homo sapiens
  CDR3 for alpha chain variable domain of TCR clone 324869 (TRAV35, TRAJ47)
GLLDCLTHTEYGKKLVF

SEQ ID NO: 649738 - protein, 11 aa, Homo sapiens
  CDR3 for beta chain variable domain of TCR clone 324869 (TRBV29-1, TRBJ1-1)
CSVEVGTRTFF

SEQ ID NO: 649739 - protein, 14 aa, Homo sapiens
  CDR3 for alpha chain variable domain of TCR clone 324870 (TRAV27, TRAJ41)
CAVRTQIPGMHSNS

SEQ ID NO: 649740 - protein, 15 aa, Homo sapiens
  CDR3 for beta chain variable domain of TCR clone 324870 (TRBV9, TRBJ1-6)
CASSVAGTGDSPLHF

SEQ ID NO: 649741 - protein, 14 aa, Homo sapiens
  CDR3 for alpha chain variable domain of TCR clone 324871 (TRAV1-2, TRAJ16)
CAVNRFSDGQKLLF

SEQ ID NO: 649742 - protein, 13 aa, Homo sapiens
  CDR3 for beta chain variable domain of TCR clone 324871 (TRBV4-1, TRBJ2-1)
CASSLAGGDEQFF

SEQ ID NO: 649743 - protein, 13 aa, Homo sapiens
  CDR3 for alpha chain variable domain of TCR clone 324872 (TRAV3, TRAJ20)
CAVRSLNDYKLSI

SEQ ID NO: 649744 - protein, 13 aa, Homo sapiens
  CDR3 for beta chain variable domain of TCR clone 324872 (TRBV6-1, TRBJ2-1)
CAGMDPTNNEQFF

SEQ ID NO: 649745 - protein, 14 aa, Homo sapiens
  CDR3 for alpha chain variable domain of TCR clone 324873 (TRAV29/DV5, TRAJ53)
CAANSGGSNYKLTF

SEQ ID NO: 649746 - protein, 15 aa, Homo sapiens
  CDR3 for beta chain variable domain of TCR clone 324873 (TRBV5-1, TRBJ2-1)
CASSPPRAPYNEQFF

SEQ ID NO: 649747 - protein, 15 aa, Homo sapiens
  CDR3 for alpha chain variable domain of TCR clone 324874 (TRAV38-2/DV8, TRAJ48)
CAYRSGGFGNEKLTF

SEQ ID NO: 649748 - protein, 15 aa, Homo sapiens
  CDR3 for beta chain variable domain of TCR clone 324874 (TRBV9, TRBJ1-6)
CASSVAGTGDSPLHF

SEQ ID NO: 649749 - protein, 14 aa, Homo sapiens
  CDR3 for alpha chain variable domain of TCR clone 324875 (TRAV2, TRAJ9)
CAVEDRRGGFKTIF

SEQ ID NO: 649750 - protein, 13 aa, Homo sapiens
  CDR3 for beta chain variable domain of TCR clone 324875 (TRBV7-9, TRBJ1-2)
CASSLKQNYGYTF

SEQ ID NO: 649751 - protein, 18 aa, Homo sapiens
  CDR3 for alpha chain variable domain of TCR clone 324876 (TRAV21, TRAJ52)
CAVRPSPAGGTSYGKLTF

SEQ ID NO: 649752 - protein, 16 aa, Homo sapiens
  CDR3 for beta chain variable domain of TCR clone 324876 (TRBV19, TRBJ2-1)
CASSKAGPSSHNEQFF

SEQ ID NO: 649753 - protein, 12 aa, Homo sapiens
  CDR3 for alpha chain variable domain of TCR clone 324877 (TRAV8-3, TRAJ22)
FGGQSSARQLTF

SEQ ID NO: 649754 - protein, 14 aa, Homo sapiens
  CDR3 for beta chain variable domain of TCR clone 324877 (TRBV7-9, TRBJ2-1)
CASSSMVGFGEQFF

SEQ ID NO: 649755 - protein, 16 aa, Homo sapiens
  CDR3 for alpha chain variable domain of TCR clone 324878 (TRAV30, TRAJ24)
CGTEIVDADSWGKFQF

SEQ ID NO: 649756 - protein, 17 aa, Homo sapiens
  CDR3 for beta chain variable domain of TCR clone 324878 (TRBV13, TRBJ2-3)
CASSLSRVAGGRNTQYC

SEQ ID NO: 649757 - protein, 18 aa, Homo sapiens
  CDR3 for alpha chain variable domain of TCR clone 324879 (TRAV29/DV5, TRAJ34)
CSVLLCSKRESGNRKLIF

SEQ ID NO: 649758 - protein, 15 aa, Homo sapiens
  CDR3 for beta chain variable domain of TCR clone 324879 (TRBV7-8, TRBJ2-7)
CASSLERAGSYEQYF

SEQ ID NO: 649759 - protein, 14 aa, Homo sapiens
  CDR3 for alpha chain variable domain of TCR clone 324880 (TRAV13-2, TRAJ43)
CAEIPTYNNNDMRF

SEQ ID NO: 649760 - protein, 12 aa, Homo sapiens
  CDR3 for beta chain variable domain of TCR clone 324880 (TRBV11-2, TRBJ2-2)
CASSLGGGELFF

SEQ ID NO: 649761 - protein, 13 aa, Homo sapiens
  CDR3 for alpha chain variable domain of TCR clone 324881 (TRAV12-1, TRAJ21)
RVVTLYNFNKFYF

SEQ ID NO: 649762 - protein, 20 aa, Homo sapiens
  CDR3 for beta chain variable domain of TCR clone 324881 (TRBV7-8, TRBJ2-1)
CASSLAHRLAVVRSYNEQFF

SEQ ID NO: 649763 - protein, 13 aa, Homo sapiens
  CDR3 for alpha chain variable domain of TCR clone 324882 (TRAV21, TRAJ27)
CAARPGNAGKSTF

SEQ ID NO: 649764 - protein, 16 aa, Homo sapiens
  CDR3 for beta chain variable domain of TCR clone 324882 (TRBV2, TRBJ1-3)
CASSRTGGSTGNTIYF

SEQ ID NO: 649765 - protein, 16 aa, Homo sapiens
  CDR3 for alpha chain variable domain of TCR clone 324883 (TRAV16, TRAJ4)
CALSRMFSGGYNKLIF

SEQ ID NO: 649766 - protein, 17 aa, Homo sapiens
  CDR3 for beta chain variable domain of TCR clone 324883 (TRBV13, TRBJ2-3)
CTSSLSRVAGGRNSQYF

SEQ ID NO: 649767 - protein, 14 aa, Homo sapiens
  CDR3 for alpha chain variable domain of TCR clone 324884 (TRAV29/DV5, TRAJ39)
CAASGGNAGNRLTF

SEQ ID NO: 649768 - protein, 13 aa, Homo sapiens
  CDR3 for beta chain variable domain of TCR clone 324884 (TRBV19, TRBJ1-2)
CASSVPGQDGYTF

SEQ ID NO: 649769 - protein, 15 aa, Homo sapiens
  CDR3 for alpha chain variable domain of TCR clone 324885 (TRAV8-3, TRAJ40)
RAAPSLGSGTYKYIF

SEQ ID NO: 649770 - protein, 16 aa, Homo sapiens
  CDR3 for beta chain variable domain of TCR clone 324885 (TRBV7-3, TRBJ2-3)
CASSLSSYRPEDTQYF

SEQ ID NO: 649771 - protein, 14 aa, Homo sapiens
  CDR3 for alpha chain variable domain of TCR clone 324886 (TRAV17, TRAJ22)
CATSPSGSARQLTF

SEQ ID NO: 649772 - protein, 15 aa, Homo sapiens
  CDR3 for beta chain variable domain of TCR clone 324886 (TRBV4-1, TRBJ2-5)
CASSQWALYQETQYF

SEQ ID NO: 649773 - protein, 18 aa, Homo sapiens
  CDR3 for alpha chain variable domain of TCR clone 324887 (TRAV1-1, TRAJ34)
CLLLLRCERRDNTDKLIF

SEQ ID NO: 649774 - protein, 18 aa, Homo sapiens
  CDR3 for beta chain variable domain of TCR clone 324887 (TRBV25-1, TRBJ1-2)
CASSGLQNGQGLIFGYTF

SEQ ID NO: 649775 - protein, 13 aa, Homo sapiens
  CDR3 for alpha chain variable domain of TCR clone 324888 (TRAV12-2, TRAJ7)
CAVNLYGNNRLAF

SEQ ID NO: 649776 - protein, 14 aa, Homo sapiens
  CDR3 for beta chain variable domain of TCR clone 324888 (TRBV25-1, TRBJ1-2)
CASSEATGPYGYTL

SEQ ID NO: 649777 - protein, 15 aa, Homo sapiens
  CDR3 for alpha chain variable domain of TCR clone 324889 (TRAV16, TRAJ16)
CALQGGGSDGQKLLF

SEQ ID NO: 649778 - protein, 15 aa, Homo sapiens
  CDR3 for beta chain variable domain of TCR clone 324889 (TRBV20-1, TRBJ2-5)
CSAPHRTGFGETQYF

SEQ ID NO: 649779 - protein, 17 aa, Homo sapiens
  CDR3 for alpha chain variable domain of TCR clone 324890 (TRAV26-1, TRAJ37)
CIVRVITVSSNTGKLIF

SEQ ID NO: 649780 - protein, 14 aa, Homo sapiens
  CDR3 for beta chain variable domain of TCR clone 324890 (TRBV7-3, TRBJ1-1)
CASSLGTGYTEAFF

SEQ ID NO: 649781 - protein, 14 aa, Homo sapiens
  CDR3 for alpha chain variable domain of TCR clone 324891 (TRAV27, TRAJ42)
CAGGDGGSQGNLIF

SEQ ID NO: 649782 - protein, 11 aa, Homo sapiens
  CDR3 for beta chain variable domain of TCR clone 324891 (TRBV29-1, TRBJ2-5)
CSEDRTGTQYF

SEQ ID NO: 649783 - protein, 14 aa, Homo sapiens
  CDR3 for alpha chain variable domain of TCR clone 324892 (TRAV8-6, TRAJ20)
CAVTVPWGDYKLSF

SEQ ID NO: 649784 - protein, 13 aa, Homo sapiens
  CDR3 for beta chain variable domain of TCR clone 324892 (TRBV12-5, TRBJ1-2)
CASGVRTGNGYTF

SEQ ID NO: 649785 - protein, 18 aa, Homo sapiens
  CDR3 for alpha chain variable domain of TCR clone 324893 (TRAV2, TRAJ32)
CCLLLCLRYGGATNKLIF

SEQ ID NO: 649786 - protein, 16 aa, Homo sapiens
  CDR3 for beta chain variable domain of TCR clone 324893 (TRBV7-9, TRBJ2-7)
CASSYPDREGGYEQYF

SEQ ID NO: 649787 - protein, 11 aa, Homo sapiens
  CDR3 for alpha chain variable domain of TCR clone 324894 (TRAV17, TRAJ39)
CATNHYNMLTF

SEQ ID NO: 649788 - protein, 13 aa, Homo sapiens
  CDR3 for beta chain variable domain of TCR clone 324894 (TRBV7-8, TRBJ2-1)
CASTRDAVDEQFF

SEQ ID NO: 649789 - protein, 16 aa, Homo sapiens
  CDR3 for alpha chain variable domain of TCR clone 324895 (TRAV3, TRAJ37)
CAVRPHGSGNTGQLIF

SEQ ID NO: 649790 - protein, 14 aa, Homo sapiens
  CDR3 for beta chain variable domain of TCR clone 324895 (TRBV6-1, TRBJ1-3)
CASVQGGGGNTIYF

SEQ ID NO: 649791 - protein, 15 aa, Homo sapiens
  CDR3 for alpha chain variable domain of TCR clone 324896 (TRAV26-2, TRAJ50)
CILRDEETSYDKVIF

SEQ ID NO: 649792 - protein, 16 aa, Homo sapiens
  CDR3 for beta chain variable domain of TCR clone 324896 (TRBV15, TRBJ2-3)
CATSRDLGIVTDTQYF

SEQ ID NO: 649793 - protein, 15 aa, Homo sapiens
  CDR3 for alpha chain variable domain of TCR clone 324897 (TRAV14/DV4, TRAJ12)
CAMREGWDSSYNLIF

SEQ ID NO: 649794 - protein, 16 aa, Homo sapiens
  CDR3 for beta chain variable domain of TCR clone 324897 (TRBV2, TRBJ2-5)
CASSETQGVGEETQYF

SEQ ID NO: 649795 - protein, 14 aa, Homo sapiens
  CDR3 for alpha chain variable domain of TCR clone 324898 (TRAV9-2, TRAJ48)
CALSSNFGNEKLTL

SEQ ID NO: 649796 - protein, 13 aa, Homo sapiens
  CDR3 for beta chain variable domain of TCR clone 324898 (TRBV7-2, TRBJ2-4)
CASSREHANIQYF

SEQ ID NO: 649797 - protein, 17 aa, Homo sapiens
  CDR3 for alpha chain variable domain of TCR clone 324899 (TRAV27, TRAJ42)
CAERVIYYGVSQGNLIF

SEQ ID NO: 649798 - protein, 15 aa, Homo sapiens
  CDR3 for beta chain variable domain of TCR clone 324899 (TRBV19, TRBJ1-6)
CASSTQGAVGSPLHF

SEQ ID NO: 649799 - protein, 17 aa, Homo sapiens
  CDR3 for alpha chain variable domain of TCR clone 324900 (TRAV17, TRAJ7)
CATLGRLAFGKGNQVVV

SEQ ID NO: 649800 - protein, 13 aa, Homo sapiens
  CDR3 for beta chain variable domain of TCR clone 324900 (TRBV12-4, TRBJ2-7)
CASSLERVREQYV

SEQ ID NO: 649801 - protein, 11 aa, Homo sapiens
  CDR3 for alpha chain variable domain of TCR clone 324901 (TRAV12-2, TRAJ33)
CAVGSNYQLIW

SEQ ID NO: 649802 - protein, 15 aa, Homo sapiens
  CDR3 for beta chain variable domain of TCR clone 324901 (TRBV28, TRBJ2-6)
CASSLAGSGANVLTF

SEQ ID NO: 649803 - protein, 13 aa, Homo sapiens
  CDR3 for alpha chain variable domain of TCR clone 324902 (TRAV2, TRAJ40)
CAVVTSGTYKYIF

SEQ ID NO: 649804 - protein, 13 aa, Homo sapiens
  CDR3 for beta chain variable domain of TCR clone 324902 (TRBV5-1, TRBJ2-5)
CASSLEGEETQYF

SEQ ID NO: 649805 - protein, 13 aa, Homo sapiens
  CDR3 for alpha chain variable domain of TCR clone 324903 (TRAV6, TRAJ45)
SPFSGGGADGLTF

SEQ ID NO: 649806 - protein, 14 aa, Homo sapiens
  CDR3 for beta chain variable domain of TCR clone 324903 (TRBV4-1, TRBJ2-7)
CASSPVAGGDEQYF

SEQ ID NO: 649807 - protein, 14 aa, Homo sapiens
  CDR3 for alpha chain variable domain of TCR clone 324904 (TRAV17, TRAJ22)
CATSPSGSARQLTF

SEQ ID NO: 649808 - protein, 13 aa, Homo sapiens
  CDR3 for beta chain variable domain of TCR clone 324904 (TRBV20-1, TRBJ1-1)
CSAPLGGGTEAFF

SEQ ID NO: 649809 - protein, 14 aa, Homo sapiens
  CDR3 for alpha chain variable domain of TCR clone 324905 (TRAV3, TRAJ27)
CAVRDDTKAGKSTF

SEQ ID NO: 649810 - protein, 17 aa, Homo sapiens
  CDR3 for beta chain variable domain of TCR clone 324905 (TRBV13, TRBJ2-3)
CASSLSRVAGGRNTQYF

SEQ ID NO: 649811 - protein, 12 aa, Homo sapiens
  CDR3 for alpha chain variable domain of TCR clone 324906 (TRAV1-1, TRAJ8)
CAGGTGFQKLVF

SEQ ID NO: 649812 - protein, 18 aa, Homo sapiens
  CDR3 for beta chain variable domain of TCR clone 324906 (TRBV5-5, TRBJ1-5)
CASSLRQVKGSSNQPQHF

SEQ ID NO: 649813 - protein, 12 aa, Homo sapiens
  CDR3 for alpha chain variable domain of TCR clone 324907 (TRAV12-3, TRAJ17)
RSMTLTGNKLTF

SEQ ID NO: 649814 - protein, 15 aa, Homo sapiens
  CDR3 for beta chain variable domain of TCR clone 324907 (TRBV20-1, TRBJ2-7)
CSARDRVSGMDEQYF

SEQ ID NO: 649815 - protein, 12 aa, Homo sapiens
  CDR3 for alpha chain variable domain of TCR clone 324908 (TRAV12-3, TRAJ17)
CAMTLTGNKLTF

SEQ ID NO: 649816 - protein, 15 aa, Homo sapiens
  CDR3 for beta chain variable domain of TCR clone 324908 (TRBV9, TRBJ1-6)
CASSVAGTGDSALHF

SEQ ID NO: 649817 - protein, 14 aa, Homo sapiens
  CDR3 for alpha chain variable domain of TCR clone 324909 (TRAV1-2, TRAJ8)
CAVREDTGFQKPVF

SEQ ID NO: 649818 - protein, 13 aa, Homo sapiens
  CDR3 for beta chain variable domain of TCR clone 324909 (TRBV12-4, TRBJ1-2)
CASSSGLTVISTF

SEQ ID NO: 649819 - protein, 15 aa, Homo sapiens
  CDR3 for alpha chain variable domain of TCR clone 324910 (TRAV8-3, TRAJ27)
CAVGPSKTNAGQSTF

SEQ ID NO: 649820 - protein, 15 aa, Homo sapiens
  CDR3 for beta chain variable domain of TCR clone 324910 (TRBV9, TRBJ1-6)
CASSVAGTGDSPLHF

SEQ ID NO: 649821 - protein, 14 aa, Homo sapiens
  CDR3 for alpha chain variable domain of TCR clone 324911 (TRAV2, TRAJ42)
CAVVGGGSQGNLIF

SEQ ID NO: 649822 - protein, 13 aa, Homo sapiens
  CDR3 for beta chain variable domain of TCR clone 324911 (TRBV2, TRBJ1-1)
CARNPTGGFHAFF

SEQ ID NO: 649823 - protein, 17 aa, Homo sapiens
  CDR3 for alpha chain variable domain of TCR clone 324912 (TRAV13-1, TRAJ52)
CAASSGAGGTSYGKMTF

SEQ ID NO: 649824 - protein, 15 aa, Homo sapiens
  CDR3 for beta chain variable domain of TCR clone 324912 (TRBV28, TRBJ2-4)
CAAGSGTLLMGIQYF

SEQ ID NO: 649825 - protein, 11 aa, Homo sapiens
  CDR3 for alpha chain variable domain of TCR clone 324913 (TRAV13-2, TRAJ23)
CAESPRGQLIF

SEQ ID NO: 649826 - protein, 14 aa, Homo sapiens
  CDR3 for beta chain variable domain of TCR clone 324913 (TRBV12-4, TRBJ1-1)
CASTWTGHDTEAFF

SEQ ID NO: 649827 - protein, 16 aa, Homo sapiens
  CDR3 for alpha chain variable domain of TCR clone 324914 (TRAV12-3, TRAJ28)
CAMRANSGAGSYQLTF

SEQ ID NO: 649828 - protein, 17 aa, Homo sapiens
  CDR3 for beta chain variable domain of TCR clone 324914 (TRBV13, TRBJ2-3)
CASSLSRVAGGRNTQYF

SEQ ID NO: 649829 - protein, 10 aa, Homo sapiens
  CDR3 for alpha chain variable domain of TCR clone 324915 (TRAV2, TRAJ34)
CAVVNDKLIF

SEQ ID NO: 649830 - protein, 16 aa, Homo sapiens
  CDR3 for beta chain variable domain of TCR clone 324915 (TRBV12-5, TRBJ2-5)
CASGPRTSGNQETQYF

SEQ ID NO: 649831 - protein, 16 aa, Homo sapiens
  CDR3 for alpha chain variable domain of TCR clone 324916 (TRAV3, TRAJ10)
CAVRDMRAGGGNKLTF

SEQ ID NO: 649832 - protein, 20 aa, Homo sapiens
  CDR3 for beta chain variable domain of TCR clone 324916 (TRBV11-3, TRBJ2-7)
CASSQGTSGSLRAVLRAGHQ

SEQ ID NO: 649833 - protein, 15 aa, Homo sapiens
  CDR3 for alpha chain variable domain of TCR clone 324917 (TRAV35, TRAJ28)
CWQRYSGAGRYQLTF

SEQ ID NO: 649834 - protein, 13 aa, Homo sapiens
  CDR3 for beta chain variable domain of TCR clone 324917 (TRBV19, TRBJ1-2)
CASSQGQVYGYTF

SEQ ID NO: 649835 - protein, 17 aa, Homo sapiens
  CDR3 for alpha chain variable domain of TCR clone 324918 (TRAV14/DV4, TRAJ10)
CAMREGRTTGGGNKLAF

SEQ ID NO: 649836 - protein, 15 aa, Homo sapiens
  CDR3 for beta chain variable domain of TCR clone 324918 (TRBV4-1, TRBJ2-3)
CASSRGQGIPDTQYF

SEQ ID NO: 649837 - protein, 14 aa, Homo sapiens
  CDR3 for alpha chain variable domain of TCR clone 324919 (TRAV12-2, TRAJ40)
CAVKIPSGPYKYIF

SEQ ID NO: 649838 - protein, 14 aa, Homo sapiens
  CDR3 for beta chain variable domain of TCR clone 324919 (TRBV20-1, TRBJ1-1)
CSAQTRIGGTEAVF

SEQ ID NO: 649839 - protein, 12 aa, Homo sapiens
  CDR3 for alpha chain variable domain of TCR clone 324920 (TRAV13-2, TRAJ8)
CAPWLGFQTLVF

SEQ ID NO: 649840 - protein, 13 aa, Homo sapiens
  CDR3 for beta chain variable domain of TCR clone 324920 (TRBV12-4, TRBJ1-5)
CASSPDRAQPQHF

SEQ ID NO: 649841 - protein, 12 aa, Homo sapiens
  CDR3 for alpha chain variable domain of TCR clone 324921 (TRAV12-1, TRAJ23)
CVVNIPGGKLIF

SEQ ID NO: 649842 - protein, 15 aa, Homo sapiens
  CDR3 for beta chain variable domain of TCR clone 324921 (TRBV7-2, TRBJ2-7)
CASSLVSGGSYEQYF

SEQ ID NO: 649843 - protein, 14 aa, Homo sapiens
  CDR3 for alpha chain variable domain of TCR clone 324922 (TRAV23/DV6, TRAJ22)
CADISSGSARHLTF

SEQ ID NO: 649844 - protein, 16 aa, Homo sapiens
  CDR3 for beta chain variable domain of TCR clone 324922 (TRBV5-7, TRBJ2-5)
CASIRGQTGYQETQYF

SEQ ID NO: 649845 - protein, 12 aa, Homo sapiens
  CDR3 for alpha chain variable domain of TCR clone 324923 (TRAV1-1, TRAJ24)
CAVRGSWGNFQF

SEQ ID NO: 649846 - protein, 16 aa, Homo sapiens
  CDR3 for beta chain variable domain of TCR clone 324923 (TRBV27, TRBJ2-5)
CASSSQTSGFQETQYF

SEQ ID NO: 649847 - protein, 12 aa, Homo sapiens
  CDR3 for alpha chain variable domain of TCR clone 324924 (TRAV12-1, TRAJ40)
CVVYSGTYKYIF

SEQ ID NO: 649848 - protein, 18 aa, Homo sapiens
  CDR3 for beta chain variable domain of TCR clone 324924 (TRBV11-2, TRBJ2-3)
CASSLGGGPRGAPNTQYF

SEQ ID NO: 649849 - protein, 13 aa, Homo sapiens
  CDR3 for alpha chain variable domain of TCR clone 324925 (TRAV8-3, TRAJ28)
CAVGAVGSYQLTF

SEQ ID NO: 649850 - protein, 17 aa, Homo sapiens
  CDR3 for beta chain variable domain of TCR clone 324925 (TRBV4-1, TRBJ2-5)
CASSQDLTGGPIETQYF

SEQ ID NO: 649851 - protein, 14 aa, Homo sapiens
  CDR3 for alpha chain variable domain of TCR clone 324926 (TRAV8-3, TRAJ3)
CAVVPRSSASKIIF

SEQ ID NO: 649852 - protein, 15 aa, Homo sapiens
  CDR3 for beta chain variable domain of TCR clone 324926 (TRBV7-2, TRBJ2-1)
CASTHGTGIYNEQFF

SEQ ID NO: 649853 - protein, 15 aa, Homo sapiens
  CDR3 for alpha chain variable domain of TCR clone 324927 (TRAV38-1, TRAJ57)
CAFMDSQVGSEKLVF

SEQ ID NO: 649854 - protein, 16 aa, Homo sapiens
  CDR3 for beta chain variable domain of TCR clone 324927 (TRBV10-3, TRBJ2-1)
CAIRGGGRGDYNEQVF

SEQ ID NO: 649855 - protein, 13 aa, Homo sapiens
  CDR3 for alpha chain variable domain of TCR clone 324928 (TRAV17, TRAJ5)
CAPMDTGRRALTF

SEQ ID NO: 649856 - protein, 14 aa, Homo sapiens
  CDR3 for beta chain variable domain of TCR clone 324928 (TRBV7-7, TRBJ2-2)
CASSTRASGGELFF

SEQ ID NO: 649857 - protein, 14 aa, Homo sapiens
  CDR3 for alpha chain variable domain of TCR clone 324929 (TRAV13-1, TRAJ35)
CAASKGGFGDVLHC

SEQ ID NO: 649858 - protein, 12 aa, Homo sapiens
  CDR3 for beta chain variable domain of TCR clone 324929 (TRBV11-2, TRBJ2-2)
CASSLGGGELFF

SEQ ID NO: 649859 - protein, 11 aa, Homo sapiens
  CDR3 for alpha chain variable domain of TCR clone 324930 (TRAV3, TRAJ21)
CAVGNFNKFYF

SEQ ID NO: 649860 - protein, 10 aa, Homo sapiens
  CDR3 for beta chain variable domain of TCR clone 324930 (TRBV5-1, TRBJ2-5)
CASAVTRQFG

SEQ ID NO: 649861 - protein, 15 aa, Homo sapiens
  CDR3 for alpha chain variable domain of TCR clone 324931 (TRAV17, TRAJ57)
CATGPSQGGSETRVF

SEQ ID NO: 649862 - protein, 14 aa, Homo sapiens
  CDR3 for beta chain variable domain of TCR clone 324931 (TRBV12-5, TRBJ2-5)
CASGSRTHQETQYF

SEQ ID NO: 649863 - protein, 14 aa, Homo sapiens
  CDR3 for alpha chain variable domain of TCR clone 324932 (TRAV1-2, TRAJ16)
CAVNRFSDGQKLLF

SEQ ID NO: 649864 - protein, 12 aa, Homo sapiens
  CDR3 for beta chain variable domain of TCR clone 324932 (TRBV20-1, TRBJ1-5)
CSAAGWDHPQHF

SEQ ID NO: 649865 - protein, 13 aa, Homo sapiens
  CDR3 for alpha chain variable domain of TCR clone 324933 (TRAV36/DV7, TRAJ54)
CAVDIQGAQKLVF

SEQ ID NO: 649866 - protein, 14 aa, Homo sapiens
  CDR3 for beta chain variable domain of TCR clone 324933 (TRBV19, TRBJ2-7)
CARNFRDTFTGMYF

SEQ ID NO: 649867 - protein, 14 aa, Homo sapiens
  CDR3 for alpha chain variable domain of TCR clone 324934 (TRAV1-2, TRAJ8)
CAVREETGFQKLVF

SEQ ID NO: 649868 - protein, 12 aa, Homo sapiens
  CDR3 for beta chain variable domain of TCR clone 324934 (TRBV29-1, TRBJ2-3)
CSVTGGADTQYF

SEQ ID NO: 649869 - protein, 13 aa, Homo sapiens
  CDR3 for alpha chain variable domain of TCR clone 324935 (TRAV13-1, TRAJ12)
CAASPDSSYKSIF

SEQ ID NO: 649870 - protein, 16 aa, Homo sapiens
  CDR3 for beta chain variable domain of TCR clone 324935 (TRBV15, TRBJ2-1)
CATSRERLAGAYEQFF

SEQ ID NO: 649871 - protein, 14 aa, Homo sapiens
  CDR3 for alpha chain variable domain of TCR clone 324936 (TRAV1-2, TRAJ16)
CDVNRFSDGQNLPF

SEQ ID NO: 649872 - protein, 13 aa, Homo sapiens
  CDR3 for beta chain variable domain of TCR clone 324936 (TRBV4-1, TRBJ2-1)
CASSQAGGDEQFF

SEQ ID NO: 649873 - protein, 15 aa, Homo sapiens
  CDR3 for alpha chain variable domain of TCR clone 324937 (TRAV3, TRAJ22)
CAVRDRGGSARQLTF

SEQ ID NO: 649874 - protein, 14 aa, Homo sapiens
  CDR3 for beta chain variable domain of TCR clone 324937 (TRBV19, TRBJ1-5)
CASSLGLIGQPQHF

SEQ ID NO: 649875 - protein, 12 aa, Homo sapiens
  CDR3 for alpha chain variable domain of TCR clone 324938 (TRAV8-3, TRAJ20)
WAVGANDYKLSF

SEQ ID NO: 649876 - protein, 17 aa, Homo sapiens
  CDR3 for beta chain variable domain of TCR clone 324938 (TRBV13, TRBJ2-3)
CASSLSRVAGGRNTQYF

SEQ ID NO: 649877 - protein, 10 aa, Homo sapiens
  CDR3 for alpha chain variable domain of TCR clone 324939 (TRAV1-2, TRAJ31)
CVSEDARLMF

SEQ ID NO: 649878 - protein, 14 aa, Homo sapiens
  CDR3 for beta chain variable domain of TCR clone 324939 (TRBV20-1, TRBJ1-3)
CSASPTGAGNTIYC

SEQ ID NO: 649879 - protein, 13 aa, Homo sapiens
  CDR3 for alpha chain variable domain of TCR clone 324940 (TRAV12-1, TRAJ16)
CVVNGPDGQKLLF

SEQ ID NO: 649880 - protein, 16 aa, Homo sapiens
  CDR3 for beta chain variable domain of TCR clone 324940 (TRBV12-5, TRBJ2-5)
CASGPRTSGNQETQYF

SEQ ID NO: 649881 - protein, 10 aa, Homo sapiens
  CDR3 for alpha chain variable domain of TCR clone 324941 (TRAV36/DV7, TRAJ49)
CALTGNEFYF

SEQ ID NO: 649882 - protein, 13 aa, Homo sapiens
  CDR3 for beta chain variable domain of TCR clone 324941 (TRBV4-2, TRBJ1-1)
CASSQAGNTEAFF

SEQ ID NO: 649883 - protein, 13 aa, Homo sapiens
  CDR3 for alpha chain variable domain of TCR clone 324942 (TRAV27, TRAJ17)
CAGAATAGNKLTF

SEQ ID NO: 649884 - protein, 15 aa, Homo sapiens
  CDR3 for beta chain variable domain of TCR clone 324942 (TRBV5-1, TRBJ2-3)
CASRNQAWSTDTQYF

SEQ ID NO: 649885 - protein, 15 aa, Homo sapiens
  CDR3 for alpha chain variable domain of TCR clone 324943 (TRAV4, TRAJ48)
CLVGDIDFGNEKLTF

SEQ ID NO: 649886 - protein, 15 aa, Homo sapiens
  CDR3 for beta chain variable domain of TCR clone 324943 (TRBV9, TRBJ1-6)
CASSVAGTGDSPLHF

SEQ ID NO: 649887 - protein, 16 aa, Homo sapiens
  CDR3 for alpha chain variable domain of TCR clone 324944 (TRAV30, TRAJ24)
CGTEIVDADSWGKFQF

SEQ ID NO: 649888 - protein, 17 aa, Homo sapiens
  CDR3 for beta chain variable domain of TCR clone 324944 (TRBV20-1, TRBJ2-1)
CSARDRRRASSYNDQFF

SEQ ID NO: 649889 - protein, 14 aa, Homo sapiens
  CDR3 for alpha chain variable domain of TCR clone 324945 (TRAV6, TRAJ37)
CALGSQGNTGKLIF

SEQ ID NO: 649890 - protein, 15 aa, Homo sapiens
  CDR3 for beta chain variable domain of TCR clone 324945 (TRBV2, TRBJ2-1)
CASSEEREGDNEHFF

SEQ ID NO: 649891 - protein, 16 aa, Homo sapiens
  CDR3 for alpha chain variable domain of TCR clone 324946 (TRAV26-1, TRAJ37)
CIVRGDGSGNTGKLIF

SEQ ID NO: 649892 - protein, 15 aa, Homo sapiens
  CDR3 for beta chain variable domain of TCR clone 324946 (TRBV19, TRBJ1-5)
CASSIVWADNQPQHF

SEQ ID NO: 649893 - protein, 15 aa, Homo sapiens
  CDR3 for alpha chain variable domain of TCR clone 324947 (TRAV8-6, TRAJ45)
CAVSEQGGGADGLTF

SEQ ID NO: 649894 - protein, 14 aa, Homo sapiens
  CDR3 for beta chain variable domain of TCR clone 324947 (TRBV28, TRBJ2-5)
CASRGSSCWETQYF

SEQ ID NO: 649895 - protein, 12 aa, Homo sapiens
  CDR3 for alpha chain variable domain of TCR clone 324948 (TRAV1-1, TRAJ43)
CAPRVSSNDMRF

SEQ ID NO: 649896 - protein, 15 aa, Homo sapiens
  CDR3 for beta chain variable domain of TCR clone 324948 (TRBV20-1, TRBJ2-7)
CSAESGTSGAYEQYF

SEQ ID NO: 649897 - protein, 10 aa, Homo sapiens
  CDR3 for alpha chain variable domain of TCR clone 324949 (TRAV26-1, TRAJ22)
CIVSLNFFWF

SEQ ID NO: 649898 - protein, 15 aa, Homo sapiens
  CDR3 for beta chain variable domain of TCR clone 324949 (TRBV4-2, TRBJ1-2)
CASSQWTGGRDGYTF

SEQ ID NO: 649899 - protein, 15 aa, Homo sapiens
  CDR3 for alpha chain variable domain of TCR clone 324950 (TRAV38-2/DV8, TRAJ57)
CASARAQGGSEKLVF

SEQ ID NO: 649900 - protein, 17 aa, Homo sapiens
  CDR3 for beta chain variable domain of TCR clone 324950 (TRBV18, TRBJ1-5)
CASSPTMGQWTNQPQHF

SEQ ID NO: 649901 - protein, 22 aa, Homo sapiens
  CDR3 for alpha chain variable domain of TCR clone 324951 (TRAV8-3, TRAJ32)
CAVEVGLQTSSSLELALCLLSS

SEQ ID NO: 649902 - protein, 15 aa, Homo sapiens
  CDR3 for beta chain variable domain of TCR clone 324951 (TRBV7-2, TRBJ2-1)
CASSSRTSREDEQFF

SEQ ID NO: 649903 - protein, 15 aa, Homo sapiens
  CDR3 for alpha chain variable domain of TCR clone 324952 (TRAV13-1, TRAJ32)
CAASMYGGATNKLIF

SEQ ID NO: 649904 - protein, 14 aa, Homo sapiens
  CDR3 for beta chain variable domain of TCR clone 324952 (TRBV7-9, TRBJ2-1)
CASSLASGSNEQFF

SEQ ID NO: 649905 - protein, 14 aa, Homo sapiens
  CDR3 for alpha chain variable domain of TCR clone 324953 (TRAV2, TRAJ9)
CAVEDRSGGFKTIF

SEQ ID NO: 649906 - protein, 15 aa, Homo sapiens
  CDR3 for beta chain variable domain of TCR clone 324953 (TRBV11-2, TRBJ1-2)
CASSLEGVQRNGYTF

SEQ ID NO: 649907 - protein, 12 aa, Homo sapiens
  CDR3 for alpha chain variable domain of TCR clone 324954 (TRAV12-3, TRAJ17)
CAMTLTGNKLTF

SEQ ID NO: 649908 - protein, 14 aa, Homo sapiens
  CDR3 for beta chain variable domain of TCR clone 324954 (TRBV18, TRBJ1-2)
CASSPEGQGSGYTF

SEQ ID NO: 649909 - protein, 12 aa, Homo sapiens
  CDR3 for alpha chain variable domain of TCR clone 324955 (TRAV23/DV6, TRAJ31)
CAARRIDARLMF

SEQ ID NO: 649910 - protein, 15 aa, Homo sapiens
  CDR3 for beta chain variable domain of TCR clone 324955 (TRBV28, TRBJ2-7)
CASKAGGYTSSTSGR

SEQ ID NO: 649911 - protein, 11 aa, Homo sapiens
  CDR3 for alpha chain variable domain of TCR clone 324956 (TRAV21, TRAJ39)
LLVDAGNTLTF

SEQ ID NO: 649912 - protein, 17 aa, Homo sapiens
  CDR3 for beta chain variable domain of TCR clone 324956 (TRBV7-8, TRBJ2-6)
CASSAGTGGAGANVLTF

SEQ ID NO: 649913 - protein, 12 aa, Homo sapiens
  CDR3 for alpha chain variable domain of TCR clone 324957 (TRAV8-6, TRAJ43)
CAVVHNNNDMLF

SEQ ID NO: 649914 - protein, 14 aa, Homo sapiens
  CDR3 for beta chain variable domain of TCR clone 324957 (TRBV10-3, TRBJ1-1)
CAISDGSGVTEAFF

SEQ ID NO: 649915 - protein, 11 aa, Homo sapiens
  CDR3 for alpha chain variable domain of TCR clone 324958 (TRAV12-3, TRAJ20)
CAMSYDYKLSF

SEQ ID NO: 649916 - protein, 13 aa, Homo sapiens
  CDR3 for beta chain variable domain of TCR clone 324958 (TRBV7-9, TRBJ1-2)
CASSLKQNYGYTF

SEQ ID NO: 649917 - protein, 15 aa, Homo sapiens
  CDR3 for alpha chain variable domain of TCR clone 324959 (TRAV35, TRAJ58)
CAGRRQEKSGSRLTF

SEQ ID NO: 649918 - protein, 16 aa, Homo sapiens
  CDR3 for beta chain variable domain of TCR clone 324959 (TRBV2, TRBJ2-1)
CASSVGGSLSYNEQFF

SEQ ID NO: 649919 - protein, 13 aa, Homo sapiens
  CDR3 for alpha chain variable domain of TCR clone 324960 (TRAV13-2, TRAJ53)
CAENMGSNYKLTF

SEQ ID NO: 649920 - protein, 13 aa, Homo sapiens
  CDR3 for beta chain variable domain of TCR clone 324960 (TRBV4-1, TRBJ2-2)
CASSQENTWELFF

SEQ ID NO: 649921 - protein, 11 aa, Homo sapiens
  CDR3 for alpha chain variable domain of TCR clone 324961 (TRAV21, TRAJ31)
CAVRNNARLMF

SEQ ID NO: 649922 - protein, 14 aa, Homo sapiens
  CDR3 for beta chain variable domain of TCR clone 324961 (TRBV7-8, TRBJ2-3)
CASSLEAGTDTQYF

SEQ ID NO: 649923 - protein, 15 aa, Homo sapiens
  CDR3 for alpha chain variable domain of TCR clone 324962 (TRAV12-1, TRAJ5)
CVVNMLETGRRALTF

SEQ ID NO: 649924 - protein, 15 aa, Homo sapiens
  CDR3 for beta chain variable domain of TCR clone 324962 (TRBV5-1, TRBJ2-1)
CASSPPRAPYNEQFF

SEQ ID NO: 649925 - protein, 12 aa, Homo sapiens
  CDR3 for alpha chain variable domain of TCR clone 324963 (TRAV29/DV5, TRAJ49)
CAATDTGNPLHF

SEQ ID NO: 649926 - protein, 12 aa, Homo sapiens
  CDR3 for beta chain variable domain of TCR clone 324963 (TRBV12-4, TRBJ2-7)
CASSLGGYEQYF

SEQ ID NO: 649927 - protein, 12 aa, Homo sapiens
  CDR3 for alpha chain variable domain of TCR clone 324964 (TRAV8-3, TRAJ26)
CAGDNYGQNFVF

SEQ ID NO: 649928 - protein, 12 aa, Homo sapiens
  CDR3 for beta chain variable domain of TCR clone 324964 (TRBV11-2, TRBJ2-1)
CASSPGSNEQFF

SEQ ID NO: 649929 - protein, 13 aa, Homo sapiens
  CDR3 for alpha chain variable domain of TCR clone 324965 (TRAV13-1, TRAJ12)
CAASPDSSYKLLF

SEQ ID NO: 649930 - protein, 16 aa, Homo sapiens
  CDR3 for beta chain variable domain of TCR clone 324965 (TRBV15, TRBJ2-1)
CATSRERLAGAYEQFF

SEQ ID NO: 649931 - protein, 14 aa, Homo sapiens
  CDR3 for alpha chain variable domain of TCR clone 324966 (TRAV13-1, TRAJ6)
CAASITGGSYIPTF

SEQ ID NO: 649932 - protein, 17 aa, Homo sapiens
  CDR3 for beta chain variable domain of TCR clone 324966 (TRBV11-2, TRBJ2-1)
CASSLYPPGVEYNEQFF

SEQ ID NO: 649933 - protein, 17 aa, Homo sapiens
  CDR3 for alpha chain variable domain of TCR clone 324967 (TRAV3, TRAJ6)
CAVRDGPRAGGSYIPTF

SEQ ID NO: 649934 - protein, 16 aa, Homo sapiens
  CDR3 for beta chain variable domain of TCR clone 324967 (TRBV10-2, TRBJ1-5)
CASSRDRDYSNQPQHF

SEQ ID NO: 649935 - protein, 12 aa, Homo sapiens
  CDR3 for alpha chain variable domain of TCR clone 324968 (TRAV1-2, TRAJ33)
WAALDSNYQLIW

SEQ ID NO: 649936 - protein, 20 aa, Homo sapiens
  CDR3 for beta chain variable domain of TCR clone 324968 (TRBV7-8, TRBJ2-2)
CASSHLFPGPTIHITGELFF

SEQ ID NO: 649937 - protein, 13 aa, Homo sapiens
  CDR3 for alpha chain variable domain of TCR clone 324969 (TRAV12-1, TRAJ17)
CVVNKAAGNKLTF

SEQ ID NO: 649938 - protein, 13 aa, Homo sapiens
  CDR3 for beta chain variable domain of TCR clone 324969 (TRBV15, TRBJ1-6)
CATSGGLNSPLHF

SEQ ID NO: 649939 - protein, 13 aa, Homo sapiens
  CDR3 for alpha chain variable domain of TCR clone 324970 (TRAV16, TRAJ5)
CALTNTGRRALTF

SEQ ID NO: 649940 - protein, 15 aa, Homo sapiens
  CDR3 for beta chain variable domain of TCR clone 324970 (TRBV11-2, TRBJ2-4)
CASSRPGTGLNIQYF

SEQ ID NO: 649941 - protein, 13 aa, Homo sapiens
  CDR3 for alpha chain variable domain of TCR clone 324971 (TRAV12-1, TRAJ34)
CVVTGYNTDKLIF

SEQ ID NO: 649942 - protein, 14 aa, Homo sapiens
  CDR3 for beta chain variable domain of TCR clone 324971 (TRBV19, TRBJ2-1)
CASPTFVVSGEQFF

SEQ ID NO: 649943 - protein, 14 aa, Homo sapiens
  CDR3 for alpha chain variable domain of TCR clone 324972 (TRAV12-3, TRAJ10)
SHLPLTGGGNNLTF

SEQ ID NO: 649944 - protein, 15 aa, Homo sapiens
  CDR3 for beta chain variable domain of TCR clone 324972 (TRBV6-3, TRBJ2-7)
CASSSPGTVFYEQYF

SEQ ID NO: 649945 - protein, 14 aa, Homo sapiens
  CDR3 for alpha chain variable domain of TCR clone 324973 (TRAV12-2, TRAJ11)
CAVEGGSGYSTLTF

SEQ ID NO: 649946 - protein, 15 aa, Homo sapiens
  CDR3 for beta chain variable domain of TCR clone 324973 (TRBV27, TRBJ2-1)
CASSNGGGSSNEQFF

SEQ ID NO: 649947 - protein, 14 aa, Homo sapiens
  CDR3 for alpha chain variable domain of TCR clone 324974 (TRAV3, TRAJ9)
CAVRLNTGGFKTIF

SEQ ID NO: 649948 - protein, 14 aa, Homo sapiens
  CDR3 for beta chain variable domain of TCR clone 324974 (TRBV28, TRBJ2-3)
CASSWRGRADTQYF

SEQ ID NO: 649949 - protein, 12 aa, Homo sapiens
  CDR3 for alpha chain variable domain of TCR clone 324975 (TRAV13-1, TRAJ49)
CAASPMGNQFYF

SEQ ID NO: 649950 - protein, 13 aa, Homo sapiens
  CDR3 for beta chain variable domain of TCR clone 324975 (TRBV7-3, TRBJ1-1)
CASSQDWGAEAFF

SEQ ID NO: 649951 - protein, 13 aa, Homo sapiens
  CDR3 for alpha chain variable domain of TCR clone 324976 (TRAV8-6, TRAJ16)
CAVSRWVGQKLLF

SEQ ID NO: 649952 - protein, 18 aa, Homo sapiens
  CDR3 for beta chain variable domain of TCR clone 324976 (TRBV12-4, TRBJ2-4)
CASSRTGAVDVAKNIQYF

SEQ ID NO: 649953 - protein, 16 aa, Homo sapiens
  CDR3 for alpha chain variable domain of TCR clone 324977 (TRAV9-2, TRAJ52)
CALQGAGGTSYGKLTF

SEQ ID NO: 649954 - protein, 13 aa, Homo sapiens
  CDR3 for beta chain variable domain of TCR clone 324977 (TRBV20-1, TRBJ1-1)
CSARAGGNTEAFF

SEQ ID NO: 649955 - protein, 14 aa, Homo sapiens
  CDR3 for alpha chain variable domain of TCR clone 324978 (TRAV23/DV6, TRAJ17)
CAARGRAAGNKLTF

SEQ ID NO: 649956 - protein, 11 aa, Homo sapiens
  CDR3 for beta chain variable domain of TCR clone 324978 (TRBV12-4, TRBJ2-3)
CASTATDTQYF

SEQ ID NO: 649957 - protein, 14 aa, Homo sapiens
  CDR3 for alpha chain variable domain of TCR clone 324979 (TRAV21, TRAJ12)
CAVRNGDSSSKLIF

SEQ ID NO: 649958 - protein, 14 aa, Homo sapiens
  CDR3 for beta chain variable domain of TCR clone 324979 (TRBV7-6, TRBJ2-7)
CASSLTGTGNEQYF

SEQ ID NO: 649959 - protein, 11 aa, Homo sapiens
  CDR3 for alpha chain variable domain of TCR clone 324980 (TRAV12-2, TRAJ33)
CAVTSNYQLIW

SEQ ID NO: 649960 - protein, 14 aa, Homo sapiens
  CDR3 for beta chain variable domain of TCR clone 324980 (TRBV12-4, TRBJ2-2)
CASNQGANTGELFF

SEQ ID NO: 649961 - protein, 14 aa, Homo sapiens
  CDR3 for alpha chain variable domain of TCR clone 324981 (TRAV1-2, TRAJ16)
CAVNRFSDGQKLRF

SEQ ID NO: 649962 - protein, 14 aa, Homo sapiens
  CDR3 for beta chain variable domain of TCR clone 324981 (TRBV7-9, TRBJ2-2)
CASSTVLGRGELFF

SEQ ID NO: 649963 - protein, 15 aa, Homo sapiens
  CDR3 for alpha chain variable domain of TCR clone 324982 (TRAV17, TRAJ16)
CATALRFSGGQKLLF

SEQ ID NO: 649964 - protein, 13 aa, Homo sapiens
  CDR3 for beta chain variable domain of TCR clone 324982 (TRBV7-2, TRBJ2-4)
CASSREHANIQYF

SEQ ID NO: 649965 - protein, 14 aa, Homo sapiens
  CDR3 for alpha chain variable domain of TCR clone 324983 (TRAV8-3, TRAJ13)
CAVGARGCYQKVTF

SEQ ID NO: 649966 - protein, 16 aa, Homo sapiens
  CDR3 for beta chain variable domain of TCR clone 324983 (TRBV27, TRBJ2-7)
CASSLGSGTGPYEQYF

SEQ ID NO: 649967 - protein, 12 aa, Homo sapiens
  CDR3 for alpha chain variable domain of TCR clone 324984 (TRAV2, TRAJ9)
CAVGAGGFKTIF

SEQ ID NO: 649968 - protein, 14 aa, Homo sapiens
  CDR3 for beta chain variable domain of TCR clone 324984 (TRBV5-5, TRBJ1-2)
CASSLDPYNYGYTF

SEQ ID NO: 649969 - protein, 12 aa, Homo sapiens
  CDR3 for alpha chain variable domain of TCR clone 324985 (TRAV8-4, TRAJ43)
CAVSVNNNDMRF

SEQ ID NO: 649970 - protein, 17 aa, Homo sapiens
  CDR3 for beta chain variable domain of TCR clone 324985 (TRBV18, TRBJ2-1)
CASSPPLTASSYNEQFF

SEQ ID NO: 649971 - protein, 14 aa, Homo sapiens
  CDR3 for alpha chain variable domain of TCR clone 324986 (TRAV12-2, TRAJ13)
CAVKKTGGYQKVTF

SEQ ID NO: 649972 - protein, 16 aa, Homo sapiens
  CDR3 for beta chain variable domain of TCR clone 324986 (TRBV12-4, TRBJ1-5)
CASSQPVGGSNQPQHF

SEQ ID NO: 649973 - protein, 13 aa, Homo sapiens
  CDR3 for alpha chain variable domain of TCR clone 324987 (TRAV26-1, )
CIVSHRVEWFWNQ

SEQ ID NO: 649974 - protein, 14 aa, Homo sapiens
  CDR3 for beta chain variable domain of TCR clone 324987 (TRBV20-1, TRBJ2-7)
CSAWTALSSYEQYF

SEQ ID NO: 649975 - protein, 15 aa, Homo sapiens
  CDR3 for alpha chain variable domain of TCR clone 324988 (TRAV21, TRAJ13)
CAVSPTSGGYQKVTF

SEQ ID NO: 649976 - protein, 15 aa, Homo sapiens
  CDR3 for beta chain variable domain of TCR clone 324988 (TRBV28, TRBJ2-7)
CASSPGGRGFYEQYF

SEQ ID NO: 649977 - protein, 14 aa, Homo sapiens
  CDR3 for alpha chain variable domain of TCR clone 324989 (TRAV17, TRAJ33)
CATDARRSIYQLTW

SEQ ID NO: 649978 - protein, 14 aa, Homo sapiens
  CDR3 for beta chain variable domain of TCR clone 324989 (TRBV25-1, TRBJ1-4)
CASSGGGQPEKLFF

SEQ ID NO: 649979 - protein, 12 aa, Homo sapiens
  CDR3 for alpha chain variable domain of TCR clone 324990 (TRAV8-3, TRAJ26)
CAGDYYGRNFVF

SEQ ID NO: 649980 - protein, 15 aa, Homo sapiens
  CDR3 for beta chain variable domain of TCR clone 324990 (TRBV9, TRBJ2-1)
CASSLAGSSYNEQFF

SEQ ID NO: 649981 - protein, 14 aa, Homo sapiens
  CDR3 for alpha chain variable domain of TCR clone 324991 (TRAV1-2, TRAJ16)
CAVNRFSDGQKLLL

SEQ ID NO: 649982 - protein, 15 aa, Homo sapiens
  CDR3 for beta chain variable domain of TCR clone 324991 (TRBV27, TRBJ1-1)
CASSPYADPYTEAFF

SEQ ID NO: 649983 - protein, 12 aa, Homo sapiens
  CDR3 for alpha chain variable domain of TCR clone 324992 (TRAV23/DV6, TRAJ24)
CAANDSWGKLQS

SEQ ID NO: 649984 - protein, 16 aa, Homo sapiens
  CDR3 for beta chain variable domain of TCR clone 324992 (TRBV12-4, TRBJ2-5)
CASSLSTSGGKETQYF

SEQ ID NO: 649985 - protein, 15 aa, Homo sapiens
  CDR3 for alpha chain variable domain of TCR clone 324993 (TRAV1-2, TRAJ30)
CAVRPHGNRDDKIIF

SEQ ID NO: 649986 - protein, 16 aa, Homo sapiens
  CDR3 for beta chain variable domain of TCR clone 324993 (TRBV19, TRBJ2-2)
CASRSPGTGATGELFF

SEQ ID NO: 649987 - protein, 13 aa, Homo sapiens
  CDR3 for alpha chain variable domain of TCR clone 324994 (TRAV23/DV6, TRAJ33)
CAASIGSNYQLIW

SEQ ID NO: 649988 - protein, 15 aa, Homo sapiens
  CDR3 for beta chain variable domain of TCR clone 324994 (TRBV7-9, TRBJ2-7)
CASSLALAEAYEQYF

SEQ ID NO: 649989 - protein, 15 aa, Homo sapiens
  CDR3 for alpha chain variable domain of TCR clone 324995 (TRAV38-1, TRAJ57)
GAFMDSQGGSEKLVF

SEQ ID NO: 649990 - protein, 16 aa, Homo sapiens
  CDR3 for beta chain variable domain of TCR clone 324995 (TRBV10-3, TRBJ2-1)
CAIRGGGRGDYNEQFF

SEQ ID NO: 649991 - protein, 11 aa, Homo sapiens
  CDR3 for alpha chain variable domain of TCR clone 324996 (TRAV12-2, TRAJ34)
CAHYNTDKLIF

SEQ ID NO: 649992 - protein, 13 aa, Homo sapiens
  CDR3 for beta chain variable domain of TCR clone 324996 (TRBV7-6, TRBJ1-2)
CASSLVADYGYTF

SEQ ID NO: 649993 - protein, 18 aa, Homo sapiens
  CDR3 for alpha chain variable domain of TCR clone 324997 (TRAV38-1, TRAJ31)
CDVFCAFMKHDNNARLMF

SEQ ID NO: 649994 - protein, 16 aa, Homo sapiens
  CDR3 for beta chain variable domain of TCR clone 324997 (TRBV23-1, TRBJ2-1)
CISAPATGPTYNEQFF

SEQ ID NO: 649995 - protein, 13 aa, Homo sapiens
  CDR3 for alpha chain variable domain of TCR clone 324998 (TRAV26-1, TRAJ40)
CIVATSGTYQYIF

SEQ ID NO: 649996 - protein, 16 aa, Homo sapiens
  CDR3 for beta chain variable domain of TCR clone 324998 (TRBV7-2, TRBJ2-2)
CASSLYRGPNTGELFF

SEQ ID NO: 649997 - protein, 13 aa, Homo sapiens
  CDR3 for alpha chain variable domain of TCR clone 324999 (TRAV27, TRAJ41)
YAGEGNSGYALNF

SEQ ID NO: 649998 - protein, 13 aa, Homo sapiens
  CDR3 for beta chain variable domain of TCR clone 324999 (TRBV19, TRBJ1-2)
CASSAPGQDGYTF

SEQ ID NO: 649999 - protein, 12 aa, Homo sapiens
  CDR3 for alpha chain variable domain of TCR clone 325000 (TRAV2, TRAJ9)
CAVGAGGFKTIF

SEQ ID NO: 650000 - protein, 11 aa, Homo sapiens
  CDR3 for beta chain variable domain of TCR clone 325000 (TRBV13, TRBJ2-2)
CASSPRTGEHI

SEQ ID NO: 650001 - protein, 13 aa, Homo sapiens
  CDR3 for alpha chain variable domain of TCR clone 325001 (TRAV17, TRAJ5)
CATGDTGRRALTF

SEQ ID NO: 650002 - protein, 13 aa, Homo sapiens
  CDR3 for beta chain variable domain of TCR clone 325001 (TRBV19, TRBJ1-5)
CASRIEPVQPQHF

SEQ ID NO: 650003 - protein, 14 aa, Homo sapiens
  CDR3 for alpha chain variable domain of TCR clone 325002 (TRAV12-3, TRAJ22)
CAMSLFGSPRQLTF

SEQ ID NO: 650004 - protein, 11 aa, Homo sapiens
  CDR3 for beta chain variable domain of TCR clone 325002 (TRBV12-4, TRBJ2-2)
CASSSAGELFF

SEQ ID NO: 650005 - protein, 13 aa, Homo sapiens
  CDR3 for alpha chain variable domain of TCR clone 325003 (TRAV35, TRAJ42)
CAGFPGSQGNLIF

SEQ ID NO: 650006 - protein, 15 aa, Homo sapiens
  CDR3 for beta chain variable domain of TCR clone 325003 (TRBV5-1, TRBJ2-7)
CASSLMTSGSNEQYF

SEQ ID NO: 650007 - protein, 16 aa, Homo sapiens
  CDR3 for alpha chain variable domain of TCR clone 325004 (TRAV30, TRAJ24)
CGTEIVDADSWGKFQF

SEQ ID NO: 650008 - protein, 15 aa, Homo sapiens
  CDR3 for beta chain variable domain of TCR clone 325004 (TRBV11-2, TRBJ2-3)
CASSARRGRGDTQYF

SEQ ID NO: 650009 - protein, 18 aa, Homo sapiens
  CDR3 for alpha chain variable domain of TCR clone 325005 (TRAV29/DV5, TRAJ52)
CAAVFRVAGGTSYGKLTF

SEQ ID NO: 650010 - protein, 16 aa, Homo sapiens
  CDR3 for beta chain variable domain of TCR clone 325005 (TRBV7-3, TRBJ2-2)
CASSLKRGTLSGELFF

SEQ ID NO: 650011 - protein, 14 aa, Homo sapiens
  CDR3 for alpha chain variable domain of TCR clone 325006 (TRAV8-2, TRAJ4)
CVVSPSGGYNKLIL

SEQ ID NO: 650012 - protein, 15 aa, Homo sapiens
  CDR3 for beta chain variable domain of TCR clone 325006 (TRBV4-1, TRBJ1-4)
CASSDTGGTNENLFF

SEQ ID NO: 650013 - protein, 14 aa, Homo sapiens
  CDR3 for alpha chain variable domain of TCR clone 325007 (TRAV12-3, TRAJ9)
CAMSPNTGGFKTIF

SEQ ID NO: 650014 - protein, 15 aa, Homo sapiens
  CDR3 for beta chain variable domain of TCR clone 325007 (TRBV20-1, TRBJ2-7)
CSAESGTSGAYEQYF

SEQ ID NO: 650015 - protein, 16 aa, Homo sapiens
  CDR3 for alpha chain variable domain of TCR clone 325008 (TRAV3, TRAJ37)
CAVRPHGSGNTGKLIF

SEQ ID NO: 650016 - protein, 13 aa, Homo sapiens
  CDR3 for beta chain variable domain of TCR clone 325008 (TRBV5-5, TRBJ1-2)
CASSFWRGEDYTF

SEQ ID NO: 650017 - protein, 12 aa, Homo sapiens
  CDR3 for alpha chain variable domain of TCR clone 325009 (TRAV1-1, TRAJ43)
CAPRVSSNDMGF

SEQ ID NO: 650018 - protein, 15 aa, Homo sapiens
  CDR3 for beta chain variable domain of TCR clone 325009 (TRBV5-1, TRBJ2-7)
CASSLGDFTTYEQYF

SEQ ID NO: 650019 - protein, 13 aa, Homo sapiens
  CDR3 for alpha chain variable domain of TCR clone 325010 (TRAV12-3, TRAJ13)
CAMSSGGYQKVTF

SEQ ID NO: 650020 - protein, 16 aa, Homo sapiens
  CDR3 for beta chain variable domain of TCR clone 325010 (TRBV7-8, TRBJ2-6)
CASRVGDSSGANVLTF

SEQ ID NO: 650021 - protein, 12 aa, Homo sapiens
  CDR3 for alpha chain variable domain of TCR clone 325011 (TRAV27, TRAJ35)
CAGADFGNVLNC

SEQ ID NO: 650022 - protein, 15 aa, Homo sapiens
  CDR3 for beta chain variable domain of TCR clone 325011 (TRBV7-2, TRBJ1-2)
CASSLVSGGDYGYTF

SEQ ID NO: 650023 - protein, 14 aa, Homo sapiens
  CDR3 for alpha chain variable domain of TCR clone 325012 (TRAV26-1, TRAJ39)
FIVRGSRAGNILTF

SEQ ID NO: 650024 - protein, 15 aa, Homo sapiens
  CDR3 for beta chain variable domain of TCR clone 325012 (TRBV7-9, TRBJ1-5)
CASSQGHQPNQPQHF

SEQ ID NO: 650025 - protein, 14 aa, Homo sapiens
  CDR3 for alpha chain variable domain of TCR clone 325013 (TRAV8-4, TRAJ13)
CAVTLSGGYQKVTF

SEQ ID NO: 650026 - protein, 15 aa, Homo sapiens
  CDR3 for beta chain variable domain of TCR clone 325013 (TRBV11-2, TRBJ2-2)
CVSSSDRVNAGELFF

SEQ ID NO: 650027 - protein, 13 aa, Homo sapiens
  CDR3 for alpha chain variable domain of TCR clone 325014 (TRAV3, TRAJ43)
CAVRGFGTMTCAL

SEQ ID NO: 650028 - protein, 12 aa, Homo sapiens
  CDR3 for beta chain variable domain of TCR clone 325014 (TRBV5-1, TRBJ2-7)
CASSLDSYEQYF

SEQ ID NO: 650029 - protein, 17 aa, Homo sapiens
  CDR3 for alpha chain variable domain of TCR clone 325015 (TRAV8-3, TRAJ44)
CAVGARAALPVNSPLGL

SEQ ID NO: 650030 - protein, 12 aa, Homo sapiens
  CDR3 for beta chain variable domain of TCR clone 325015 (TRBV2, TRBJ1-5)
CASRGDGQPQHF

SEQ ID NO: 650031 - protein, 13 aa, Homo sapiens
  CDR3 for alpha chain variable domain of TCR clone 325016 (TRAV2, TRAJ15)
CAVGSQAGTALIF

SEQ ID NO: 650032 - protein, 14 aa, Homo sapiens
  CDR3 for beta chain variable domain of TCR clone 325016 (TRBV11-3, TRBJ2-7)
CASSPAVPPYEQYF

SEQ ID NO: 650033 - protein, 12 aa, Homo sapiens
  CDR3 for alpha chain variable domain of TCR clone 325017 (TRAV12-3, TRAJ17)
CAMTLTDNKLTF

SEQ ID NO: 650034 - protein, 14 aa, Homo sapiens
  CDR3 for beta chain variable domain of TCR clone 325017 (TRBV4-1, TRBJ2-7)
CASSQDREHVEKYF

SEQ ID NO: 650035 - protein, 12 aa, Homo sapiens
  CDR3 for alpha chain variable domain of TCR clone 325018 (TRAV12-2, TRAJ42)
CAVGGSQGKLIF

SEQ ID NO: 650036 - protein, 15 aa, Homo sapiens
  CDR3 for beta chain variable domain of TCR clone 325018 (TRBV9, TRBJ1-6)
CASSVAGTGDSPLHF

SEQ ID NO: 650037 - protein, 15 aa, Homo sapiens
  CDR3 for alpha chain variable domain of TCR clone 325019 (TRAV21, TRAJ24)
CAARSSTDSWGKLQF

SEQ ID NO: 650038 - protein, 15 aa, Homo sapiens
  CDR3 for beta chain variable domain of TCR clone 325019 (TRBV5-1, TRBJ2-2)
CASSSQGGNTGELFF

SEQ ID NO: 650039 - protein, 16 aa, Homo sapiens
  CDR3 for alpha chain variable domain of TCR clone 325020 (TRAV21, TRAJ52)
CAVTNAGGTSYGKLTF

SEQ ID NO: 650040 - protein, 13 aa, Homo sapiens
  CDR3 for beta chain variable domain of TCR clone 325020 (TRBV20-1, TRBJ2-3)
CSARLAGTDTQYC

SEQ ID NO: 650041 - protein, 15 aa, Homo sapiens
  CDR3 for alpha chain variable domain of TCR clone 325021 (TRAV17, TRAJ22)
CATVAPSGSARQLTF

SEQ ID NO: 650042 - protein, 12 aa, Homo sapiens
  CDR3 for beta chain variable domain of TCR clone 325021 (TRBV11-2, TRBJ2-2)
CASSLGGGELFF

SEQ ID NO: 650043 - protein, 12 aa, Homo sapiens
  CDR3 for alpha chain variable domain of TCR clone 325022 (TRAV13-1, TRAJ49)
CAASIWGHQFYF

SEQ ID NO: 650044 - protein, 14 aa, Homo sapiens
  CDR3 for beta chain variable domain of TCR clone 325022 (TRBV12-4, TRBJ1-1)
CASSLDGLNTEAFF

SEQ ID NO: 650045 - protein, 17 aa, Homo sapiens
  CDR3 for alpha chain variable domain of TCR clone 325023 (TRAV36/DV7, TRAJ52)
CAVAQRAGGTSYGKLTF

SEQ ID NO: 650046 - protein, 15 aa, Homo sapiens
  CDR3 for beta chain variable domain of TCR clone 325023 (TRBV6-5, TRBJ1-2)
CASSYPQAFNYGYTF

SEQ ID NO: 650047 - protein, 14 aa, Homo sapiens
  CDR3 for alpha chain variable domain of TCR clone 325024 (TRAV8-3, TRAJ44)
CAAGLTGTASKLTF

SEQ ID NO: 650048 - protein, 12 aa, Homo sapiens
  CDR3 for beta chain variable domain of TCR clone 325024 (TRBV7-3, TRBJ2-1)
CASSLGFNEQFF

SEQ ID NO: 650049 - protein, 14 aa, Homo sapiens
  CDR3 for alpha chain variable domain of TCR clone 325025 (TRAV17, TRAJ53)
CALNIGGSNYKLTF

SEQ ID NO: 650050 - protein, 12 aa, Homo sapiens
  CDR3 for beta chain variable domain of TCR clone 325025 (TRBV6-5, TRBJ2-5)
CASSEGSETQYF

SEQ ID NO: 650051 - protein, 14 aa, Homo sapiens
  CDR3 for alpha chain variable domain of TCR clone 325026 (TRAV9-2, TRAJ6)
CALSDPGGSYIPTF

SEQ ID NO: 650052 - protein, 13 aa, Homo sapiens
  CDR3 for beta chain variable domain of TCR clone 325026 (TRBV28, TRBJ1-1)
CASGKEGWTEAFF

SEQ ID NO: 650053 - protein, 14 aa, Homo sapiens
  CDR3 for alpha chain variable domain of TCR clone 325027 (TRAV12-1, TRAJ8)
CVVNSNTGFQKLVF

SEQ ID NO: 650054 - protein, 17 aa, Homo sapiens
  CDR3 for beta chain variable domain of TCR clone 325027 (TRBV7-8, TRBJ2-6)
CARSAGTGGAGANVLTF

SEQ ID NO: 650055 - protein, 15 aa, Homo sapiens
  CDR3 for alpha chain variable domain of TCR clone 325028 (TRAV3, TRAJ5)
CAVRDLDTGRRALTS

SEQ ID NO: 650056 - protein, 13 aa, Homo sapiens
  CDR3 for beta chain variable domain of TCR clone 325028 (TRBV12-4, TRBJ2-7)
CVSSPTETYEQYF

SEQ ID NO: 650057 - protein, 13 aa, Homo sapiens
  CDR3 for alpha chain variable domain of TCR clone 325029 (TRAV17, TRAJ13)
CATDSGGYQKVTF

SEQ ID NO: 650058 - protein, 19 aa, Homo sapiens
  CDR3 for beta chain variable domain of TCR clone 325029 (TRBV7-2, TRBJ2-3)
CASSFLSRNWGGGTDTQYF

SEQ ID NO: 650059 - protein, 15 aa, Homo sapiens
  CDR3 for alpha chain variable domain of TCR clone 325030 (TRAV21, TRAJ53)
CATLNSGGSNYKLTF

SEQ ID NO: 650060 - protein, 15 aa, Homo sapiens
  CDR3 for beta chain variable domain of TCR clone 325030 (TRBV19, TRBJ1-1)
CASTSGQIQNTEAVF

SEQ ID NO: 650061 - protein, 16 aa, Homo sapiens
  CDR3 for alpha chain variable domain of TCR clone 325031 (TRAV30, TRAJ24)
CGPEIVDADSWGKFQF

SEQ ID NO: 650062 - protein, 13 aa, Homo sapiens
  CDR3 for beta chain variable domain of TCR clone 325031 (TRBV6-3, TRBJ2-3)
CASTLQGIDTQYF

SEQ ID NO: 650063 - protein, 13 aa, Homo sapiens
  CDR3 for alpha chain variable domain of TCR clone 325032 (TRAV12-3, TRAJ13)
CAMGTGGYQKVTC

SEQ ID NO: 650064 - protein, 14 aa, Homo sapiens
  CDR3 for beta chain variable domain of TCR clone 325032 (TRBV7-2, TRBJ2-5)
CASSTGGELKTQYF

SEQ ID NO: 650065 - protein, 13 aa, Homo sapiens
  CDR3 for alpha chain variable domain of TCR clone 325033 (TRAV12-3, TRAJ13)
CAMGTGGYQKVTF

SEQ ID NO: 650066 - protein, 14 aa, Homo sapiens
  CDR3 for beta chain variable domain of TCR clone 325033 (TRBV7-2, TRBJ2-5)
CASSRGGELKTQYF

SEQ ID NO: 650067 - protein, 11 aa, Homo sapiens
  CDR3 for alpha chain variable domain of TCR clone 325034 (TRAV1-1, TRAJ23)
CAVRPGGKLVF

SEQ ID NO: 650068 - protein, 20 aa, Homo sapiens
  CDR3 for beta chain variable domain of TCR clone 325034 (TRBV7-8, TRBJ2-2)
CASSYLFPGPTIHITGELFF

SEQ ID NO: 650069 - protein, 14 aa, Homo sapiens
  CDR3 for alpha chain variable domain of TCR clone 325035 (TRAV26-1, TRAJ38)
CIADNAGNNRKLIW

SEQ ID NO: 650070 - protein, 13 aa, Homo sapiens
  CDR3 for beta chain variable domain of TCR clone 325035 (TRBV28, TRBJ1-1)
CASSDFTLPEAFF

SEQ ID NO: 650071 - protein, 15 aa, Homo sapiens
  CDR3 for alpha chain variable domain of TCR clone 325036 (TRAV3, TRAJ5)
CAVRDLDTGRRELTF

SEQ ID NO: 650072 - protein, 14 aa, Homo sapiens
  CDR3 for beta chain variable domain of TCR clone 325036 (TRBV7-2, TRBJ2-7)
CASRSQGAAYEQYF

SEQ ID NO: 650073 - protein, 15 aa, Homo sapiens
  CDR3 for alpha chain variable domain of TCR clone 325037 (TRAV8-3, TRAJ45)
CASSHSGGGADGLTF

SEQ ID NO: 650074 - protein, 15 aa, Homo sapiens
  CDR3 for beta chain variable domain of TCR clone 325037 (TRBV7-2, TRBJ2-2)
CASSSLTGGTGELFF

SEQ ID NO: 650075 - protein, 14 aa, Homo sapiens
  CDR3 for alpha chain variable domain of TCR clone 325038 (TRAV12-3, TRAJ42)
CAMNYGGSQGNLIF

SEQ ID NO: 650076 - protein, 13 aa, Homo sapiens
  CDR3 for beta chain variable domain of TCR clone 325038 (TRBV12-4, TRBJ2-7)
CASSLERVREQYF

SEQ ID NO: 650077 - protein, 16 aa, Homo sapiens
  CDR3 for alpha chain variable domain of TCR clone 325039 (TRAV3, TRAJ37)
CAVRGKGSGNTGKLIF

SEQ ID NO: 650078 - protein, 16 aa, Homo sapiens
  CDR3 for beta chain variable domain of TCR clone 325039 (TRBV19, TRBJ1-1)
CASRFGGPVTGTEAFF

SEQ ID NO: 650079 - protein, 10 aa, Homo sapiens
  CDR3 for alpha chain variable domain of TCR clone 325040 (TRAV1-2, TRAJ31)
CVSEDARLMF

SEQ ID NO: 650080 - protein, 15 aa, Homo sapiens
  CDR3 for beta chain variable domain of TCR clone 325040 (TRBV13, TRBJ2-7)
CASSLRPDRGHEQYF

SEQ ID NO: 650081 - protein, 14 aa, Homo sapiens
  CDR3 for alpha chain variable domain of TCR clone 325041 (TRAV38-1, TRAJ35)
CDFLTIGFGNVLHF

SEQ ID NO: 650082 - protein, 17 aa, Homo sapiens
  CDR3 for beta chain variable domain of TCR clone 325041 (TRBV28, TRBJ1-1)
CASSGDLRTESNTEAFF

SEQ ID NO: 650083 - protein, 19 aa, Homo sapiens
  CDR3 for alpha chain variable domain of TCR clone 325042 (TRAV13-1, TRAJ52)
CAASPYQNAGGTSYGKLTF

SEQ ID NO: 650084 - protein, 14 aa, Homo sapiens
  CDR3 for beta chain variable domain of TCR clone 325042 (TRBV19, TRBJ2-7)
CASTVQGRPYEQYV

SEQ ID NO: 650085 - protein, 12 aa, Homo sapiens
  CDR3 for alpha chain variable domain of TCR clone 325043 (TRAV3, TRAJ27)
CAVRDKAGKSTF

SEQ ID NO: 650086 - protein, 13 aa, Homo sapiens
  CDR3 for beta chain variable domain of TCR clone 325043 (TRBV6-5, TRBJ2-5)
CASSPHGGETQYF

SEQ ID NO: 650087 - protein, 12 aa, Homo sapiens
  CDR3 for alpha chain variable domain of TCR clone 325044 (TRAV17, TRAJ12)
CATLRSSYKLIF

SEQ ID NO: 650088 - protein, 15 aa, Homo sapiens
  CDR3 for beta chain variable domain of TCR clone 325044 (TRBV4-3, TRBJ1-1)
CASSQELGRGTEAFF

SEQ ID NO: 650089 - protein, 13 aa, Homo sapiens
  CDR3 for alpha chain variable domain of TCR clone 325045 (TRAV2, TRAJ9)
CAVESTGGFNTIF

SEQ ID NO: 650090 - protein, 15 aa, Homo sapiens
  CDR3 for beta chain variable domain of TCR clone 325045 (TRBV10-3, TRBJ2-1)
CAITFGGGTDNEQFF

SEQ ID NO: 650091 - protein, 14 aa, Homo sapiens
  CDR3 for alpha chain variable domain of TCR clone 325046 (TRAV8-3, TRAJ9)
CAVGYNTGGFKTIL

SEQ ID NO: 650092 - protein, 16 aa, Homo sapiens
  CDR3 for beta chain variable domain of TCR clone 325046 (TRBV7-3, TRBJ2-2)
CASSLKRGTLSGELFF

SEQ ID NO: 650093 - protein, 14 aa, Homo sapiens
  CDR3 for alpha chain variable domain of TCR clone 325047 (TRAV16, TRAJ33)
CALSSMDSNYQLIC

SEQ ID NO: 650094 - protein, 12 aa, Homo sapiens
  CDR3 for beta chain variable domain of TCR clone 325047 (TRBV5-1, TRBJ1-2)
CASSQDTYGYTF

SEQ ID NO: 650095 - protein, 17 aa, Homo sapiens
  CDR3 for alpha chain variable domain of TCR clone 325048 (TRAV3, TRAJ42)
CAVRDREYGGSQGNLIF

SEQ ID NO: 650096 - protein, 17 aa, Homo sapiens
  CDR3 for beta chain variable domain of TCR clone 325048 (TRBV7-9, TRBJ2-3)
CASSPTVAWDLTDTQYF

SEQ ID NO: 650097 - protein, 18 aa, Homo sapiens
  CDR3 for alpha chain variable domain of TCR clone 325049 (TRAV17, TRAJ45)
FATSLDLYSGGGADGLTF

SEQ ID NO: 650098 - protein, 13 aa, Homo sapiens
  CDR3 for beta chain variable domain of TCR clone 325049 (TRBV10-3, TRBJ2-7)
CASKLAVNYEQYF

SEQ ID NO: 650099 - protein, 13 aa, Homo sapiens
  CDR3 for alpha chain variable domain of TCR clone 325050 (TRAV21, TRAJ20)
CAVGLRVDYKLSF

SEQ ID NO: 650100 - protein, 19 aa, Homo sapiens
  CDR3 for beta chain variable domain of TCR clone 325050 (TRBV11-3, TRBJ2-2)
CASSTRPGAKTTNTGELFF

SEQ ID NO: 650101 - protein, 15 aa, Homo sapiens
  CDR3 for alpha chain variable domain of TCR clone 325051 (TRAV17, TRAJ35)
CATAFVIGFGNVLHC

SEQ ID NO: 650102 - protein, 16 aa, Homo sapiens
  CDR3 for beta chain variable domain of TCR clone 325051 (TRBV11-2, TRBJ2-7)
CASSTLAGGARYEQYF

SEQ ID NO: 650103 - protein, 17 aa, Homo sapiens
  CDR3 for alpha chain variable domain of TCR clone 325052 (TRAV26-2, TRAJ42)
CIMRDVGYGGSKGNLIF

SEQ ID NO: 650104 - protein, 16 aa, Homo sapiens
  CDR3 for beta chain variable domain of TCR clone 325052 (TRBV12-4, TRBJ2-7)
CASSLIGGTGTYEQYF

SEQ ID NO: 650105 - protein, 13 aa, Homo sapiens
  CDR3 for alpha chain variable domain of TCR clone 325053 (TRAV20, TRAJ21)
CAVEGYNFNKFYF

SEQ ID NO: 650106 - protein, 13 aa, Homo sapiens
  CDR3 for beta chain variable domain of TCR clone 325053 (TRBV4-2, TRBJ1-1)
CASSQAGNTEAFF

SEQ ID NO: 650107 - protein, 14 aa, Homo sapiens
  CDR3 for alpha chain variable domain of TCR clone 325054 (TRAV13-1, TRAJ44)
CAAKATGTASKLTF

SEQ ID NO: 650108 - protein, 15 aa, Homo sapiens
  CDR3 for beta chain variable domain of TCR clone 325054 (TRBV7-2, TRBJ2-7)
CASSTPGLTRGEQYF

SEQ ID NO: 650109 - protein, 14 aa, Homo sapiens
  CDR3 for alpha chain variable domain of TCR clone 325055 (TRAV1-2, TRAJ16)
CAVNRFSDGQKLLF

SEQ ID NO: 650110 - protein, 15 aa, Homo sapiens
  CDR3 for beta chain variable domain of TCR clone 325055 (TRBV28, TRBJ2-4)
CAAGSGTLLMGMQYF

SEQ ID NO: 650111 - protein, 12 aa, Homo sapiens
  CDR3 for alpha chain variable domain of TCR clone 325056 (TRAV21, TRAJ29)
CAVTPGNTPLVF

SEQ ID NO: 650112 - protein, 15 aa, Homo sapiens
  CDR3 for beta chain variable domain of TCR clone 325056 (TRBV10-2, TRBJ2-6)
CASSEQGTGANVLTF

SEQ ID NO: 650113 - protein, 14 aa, Homo sapiens
  CDR3 for alpha chain variable domain of TCR clone 325057 (TRAV38-1, TRAJ45)
CASHSGGGADGLTF

SEQ ID NO: 650114 - protein, 14 aa, Homo sapiens
  CDR3 for beta chain variable domain of TCR clone 325057 (TRBV7-9, TRBJ2-2)
CASSLGHRTGELFF

SEQ ID NO: 650115 - protein, 13 aa, Homo sapiens
  CDR3 for alpha chain variable domain of TCR clone 325058 (TRAV23/DV6, TRAJ12)
CAPRVDSSYKLIF

SEQ ID NO: 650116 - protein, 12 aa, Homo sapiens
  CDR3 for beta chain variable domain of TCR clone 325058 (TRBV7-6, TRBJ2-5)
CASSLSQETRYF

SEQ ID NO: 650117 - protein, 13 aa, Homo sapiens
  CDR3 for alpha chain variable domain of TCR clone 325059 (TRAV8-4, TRAJ34)
RAVTLYNTDKPIF

SEQ ID NO: 650118 - protein, 17 aa, Homo sapiens
  CDR3 for beta chain variable domain of TCR clone 325059 (TRBV7-2, TRBJ2-2)
CASSPSWRGGGTGELFF

SEQ ID NO: 650119 - protein, 16 aa, Homo sapiens
  CDR3 for alpha chain variable domain of TCR clone 325060 (TRAV3, TRAJ3)
CAVRDRAKSSASKIIF

SEQ ID NO: 650120 - protein, 15 aa, Homo sapiens
  CDR3 for beta chain variable domain of TCR clone 325060 (TRBV7-2, TRBJ2-1)
CASSSGLAGGNEQFF

SEQ ID NO: 650121 - protein, 16 aa, Homo sapiens
  CDR3 for alpha chain variable domain of TCR clone 325061 (TRAV21, TRAJ52)
CAVTNAGGTSCGKLTF

SEQ ID NO: 650122 - protein, 11 aa, Homo sapiens
  CDR3 for beta chain variable domain of TCR clone 325061 (TRBV2, TRBJ1-1)
CASREGTEAFF

SEQ ID NO: 650123 - protein, 14 aa, Homo sapiens
  CDR3 for alpha chain variable domain of TCR clone 325062 (TRAV13-2, TRAJ17)
CAENSKAAGNKLTF

SEQ ID NO: 650124 - protein, 15 aa, Homo sapiens
  CDR3 for beta chain variable domain of TCR clone 325062 (TRBV7-9, TRBJ2-7)
CASSLDLDRGYEQYF

SEQ ID NO: 650125 - protein, 14 aa, Homo sapiens
  CDR3 for alpha chain variable domain of TCR clone 325063 (TRAV9-2, TRAJ39)
CALYIYNAGNMLPF

SEQ ID NO: 650126 - protein, 13 aa, Homo sapiens
  CDR3 for beta chain variable domain of TCR clone 325063 (TRBV11-3, TRBJ1-1)
CASSRQPNTEAFF

SEQ ID NO: 650127 - protein, 16 aa, Homo sapiens
  CDR3 for alpha chain variable domain of TCR clone 325064 (TRAV30, TRAJ24)
CGTEIVDADSCWKFQF

SEQ ID NO: 650128 - protein, 14 aa, Homo sapiens
  CDR3 for beta chain variable domain of TCR clone 325064 (TRBV20-1, TRBJ1-1)
CSAQTRIGGTEAFF

SEQ ID NO: 650129 - protein, 14 aa, Homo sapiens
  CDR3 for alpha chain variable domain of TCR clone 325065 (TRAV26-1, TRAJ40)
FIVRLLSGTYKYIF

SEQ ID NO: 650130 - protein, 10 aa, Homo sapiens
  CDR3 for beta chain variable domain of TCR clone 325065 (TRBV15, TRBJ2-7)
AETGGYEQYF

SEQ ID NO: 650131 - protein, 17 aa, Homo sapiens
  CDR3 for alpha chain variable domain of TCR clone 325066 (TRAV3, TRAJ6)
CAVRDGPRTGGSYIPTF

SEQ ID NO: 650132 - protein, 13 aa, Homo sapiens
  CDR3 for beta chain variable domain of TCR clone 325066 (TRBV29-1, TRBJ1-1)
CSVGDSRNTEAFF

SEQ ID NO: 650133 - protein, 12 aa, Homo sapiens
  CDR3 for alpha chain variable domain of TCR clone 325067 (TRAV2, TRAJ32)
CAVGGATNKLIF

SEQ ID NO: 650134 - protein, 16 aa, Homo sapiens
  CDR3 for beta chain variable domain of TCR clone 325067 (TRBV19, TRBJ2-2)
CASRSPGTGATGELFF

SEQ ID NO: 650135 - protein, 13 aa, Homo sapiens
  CDR3 for alpha chain variable domain of TCR clone 325068 (TRAV29/DV5, TRAJ47)
CAASAEYGNKLVF

SEQ ID NO: 650136 - protein, 15 aa, Homo sapiens
  CDR3 for beta chain variable domain of TCR clone 325068 (TRBV5-1, TRBJ1-3)
CASSPDSSSGNTIYF

SEQ ID NO: 650137 - protein, 14 aa, Homo sapiens
  CDR3 for alpha chain variable domain of TCR clone 325069 (TRAV12-1, TRAJ27)
CGEHIRTNAGKSTF

SEQ ID NO: 650138 - protein, 13 aa, Homo sapiens
  CDR3 for beta chain variable domain of TCR clone 325069 (TRBV10-3, TRBJ2-7)
CASKLAVNYEQYF

SEQ ID NO: 650139 - protein, 12 aa, Homo sapiens
  CDR3 for alpha chain variable domain of TCR clone 325070 (TRAV27, TRAJ33)
CAGDGSNYQLIW

SEQ ID NO: 650140 - protein, 15 aa, Homo sapiens
  CDR3 for beta chain variable domain of TCR clone 325070 (TRBV7-3, TRBJ2-1)
CASSPTGGREVEQFF

SEQ ID NO: 650141 - protein, 11 aa, Homo sapiens
  CDR3 for alpha chain variable domain of TCR clone 325071 (TRAV1-2, TRAJ20)
CAVAIDYKLSF

SEQ ID NO: 650142 - protein, 18 aa, Homo sapiens
  CDR3 for beta chain variable domain of TCR clone 325071 (TRBV20-1, TRBJ2-6)
CSAETTPTHGSGANVLTF

SEQ ID NO: 650143 - protein, 17 aa, Homo sapiens
  CDR3 for alpha chain variable domain of TCR clone 325072 (TRAV26-1, TRAJ37)
CIVRVITVSSNTGKLIF

SEQ ID NO: 650144 - protein, 16 aa, Homo sapiens
  CDR3 for beta chain variable domain of TCR clone 325072 (TRBV4-1, TRBJ1-2)
CASSQDAGQVLYGYTF

SEQ ID NO: 650145 - protein, 12 aa, Homo sapiens
  CDR3 for alpha chain variable domain of TCR clone 325073 (TRAV2, TRAJ10)
CASTGGGNKLPF

SEQ ID NO: 650146 - protein, 14 aa, Homo sapiens
  CDR3 for beta chain variable domain of TCR clone 325073 (TRBV7-2, TRBJ2-2)
CASRGQGAAGELFF

SEQ ID NO: 650147 - protein, 14 aa, Homo sapiens
  CDR3 for alpha chain variable domain of TCR clone 325074 (TRAV12-3, TRAJ10)
SHLPLTGGGNRLTF

SEQ ID NO: 650148 - protein, 13 aa, Homo sapiens
  CDR3 for beta chain variable domain of TCR clone 325074 (TRBV7-9, TRBJ1-2)
CASSLKQNYGYTF

SEQ ID NO: 650149 - protein, 15 aa, Homo sapiens
  CDR3 for alpha chain variable domain of TCR clone 325075 (TRAV21, TRAJ22)
CAVRLFFWFCKAPDL

SEQ ID NO: 650150 - protein, 14 aa, Homo sapiens
  CDR3 for beta chain variable domain of TCR clone 325075 (TRBV19, TRBJ1-5)
CASRAPDSFLSQHF

SEQ ID NO: 650151 - protein, 15 aa, Homo sapiens
  CDR3 for alpha chain variable domain of TCR clone 325076 (TRAV10, TRAJ39)
CVVSASGDAGNMLTF

SEQ ID NO: 650152 - protein, 13 aa, Homo sapiens
  CDR3 for beta chain variable domain of TCR clone 325076 (TRBV18, TRBJ2-7)
CASQSGGGYEQYF

SEQ ID NO: 650153 - protein, 15 aa, Homo sapiens
  CDR3 for alpha chain variable domain of TCR clone 325077 (TRAV8-4, TRAJ37)
CAVTYGSSDTGKLIF

SEQ ID NO: 650154 - protein, 14 aa, Homo sapiens
  CDR3 for beta chain variable domain of TCR clone 325077 (TRBV25-1, TRBJ1-1)
CASTHLGGNTEAFF

SEQ ID NO: 650155 - protein, 14 aa, Homo sapiens
  CDR3 for alpha chain variable domain of TCR clone 325078 (TRAV2, TRAJ9)
CAVEDRSGGFKTIF

SEQ ID NO: 650156 - protein, 14 aa, Homo sapiens
  CDR3 for beta chain variable domain of TCR clone 325078 (TRBV7-9, TRBJ2-7)
CASSLSQGSYEQYF

SEQ ID NO: 650157 - protein, 14 aa, Homo sapiens
  CDR3 for alpha chain variable domain of TCR clone 325079 (TRAV12-1, TRAJ12)
CVVTRMDSSYKLIF

SEQ ID NO: 650158 - protein, 12 aa, Homo sapiens
  CDR3 for beta chain variable domain of TCR clone 325079 (TRBV2, TRBJ2-7)
CASTYRTDEQYF

SEQ ID NO: 650159 - protein, 13 aa, Homo sapiens
  CDR3 for alpha chain variable domain of TCR clone 325080 (TRAV3, TRAJ21)
CVVREPDFNKFYF

SEQ ID NO: 650160 - protein, 12 aa, Homo sapiens
  CDR3 for beta chain variable domain of TCR clone 325080 (TRBV12-4, TRBJ2-7)
CASSLGGYEQYF

SEQ ID NO: 650161 - protein, 14 aa, Homo sapiens
  CDR3 for alpha chain variable domain of TCR clone 325081 (TRAV12-1, TRAJ17)
CVVNYKAAGDKLTF

SEQ ID NO: 650162 - protein, 17 aa, Homo sapiens
  CDR3 for beta chain variable domain of TCR clone 325081 (TRBV11-2, TRBJ2-1)
CASSLYPPGVEYNEQFF

SEQ ID NO: 650163 - protein, 15 aa, Homo sapiens
  CDR3 for alpha chain variable domain of TCR clone 325082 (TRAV38-2/DV8, TRAJ57)
CAYKSGLGGSEKLVF

SEQ ID NO: 650164 - protein, 16 aa, Homo sapiens
  CDR3 for beta chain variable domain of TCR clone 325082 (TRBV28, TRBJ1-5)
CASSFRGGYSNQTQHF

SEQ ID NO: 650165 - protein, 12 aa, Homo sapiens
  CDR3 for alpha chain variable domain of TCR clone 325083 (TRAV17, TRAJ53)
CAFGGSNYKLTF

SEQ ID NO: 650166 - protein, 13 aa, Homo sapiens
  CDR3 for beta chain variable domain of TCR clone 325083 (TRBV11-2, TRBJ1-1)
CASSQAGNTEAFY

SEQ ID NO: 650167 - protein, 17 aa, Homo sapiens
  CDR3 for alpha chain variable domain of TCR clone 325084 (TRAV38-2/DV8, TRAJ23)
CALSRKLIFGQGTELSV

SEQ ID NO: 650168 - protein, 17 aa, Homo sapiens
  CDR3 for beta chain variable domain of TCR clone 325084 (TRBV5-4, TRBJ2-1)
CASSSAGWRGPYNEQFF

SEQ ID NO: 650169 - protein, 11 aa, Homo sapiens
  CDR3 for alpha chain variable domain of TCR clone 325085 (TRAV4, TRAJ31)
CLVGDNARLMF

SEQ ID NO: 650170 - protein, 16 aa, Homo sapiens
  CDR3 for beta chain variable domain of TCR clone 325085 (TRBV7-2, TRBJ2-5)
CAGSSKWLSGQETQYF

SEQ ID NO: 650171 - protein, 14 aa, Homo sapiens
  CDR3 for alpha chain variable domain of TCR clone 325086 (TRAV26-2, TRAJ38)
CILYNAGNNRKLIW

SEQ ID NO: 650172 - protein, 14 aa, Homo sapiens
  CDR3 for beta chain variable domain of TCR clone 325086 (TRBV19, TRBJ2-1)
FASPTFVLSGEQFF

SEQ ID NO: 650173 - protein, 14 aa, Homo sapiens
  CDR3 for alpha chain variable domain of TCR clone 325087 (TRAV2, TRAJ20)
CAVEDVVNDYKLSW

SEQ ID NO: 650174 - protein, 13 aa, Homo sapiens
  CDR3 for beta chain variable domain of TCR clone 325087 (TRBV19, TRBJ2-7)
CASRKAGGSEQYF

SEQ ID NO: 650175 - protein, 11 aa, Homo sapiens
  CDR3 for alpha chain variable domain of TCR clone 325088 (TRAV2, TRAJ13)
CASGGYQKVTF

SEQ ID NO: 650176 - protein, 16 aa, Homo sapiens
  CDR3 for beta chain variable domain of TCR clone 325088 (TRBV19, TRBJ1-1)
CAGSPTRFWPGTEAFF

SEQ ID NO: 650177 - protein, 11 aa, Homo sapiens
  CDR3 for alpha chain variable domain of TCR clone 325089 (TRAV13-1, TRAJ20)
CAASNDYKLSF

SEQ ID NO: 650178 - protein, 15 aa, Homo sapiens
  CDR3 for beta chain variable domain of TCR clone 325089 (TRBV9, TRBJ2-1)
CASSLAGSSYNEQFF

SEQ ID NO: 650179 - protein, 17 aa, Homo sapiens
  CDR3 for alpha chain variable domain of TCR clone 325090 (TRAV26-1, TRAJ53)
CIVRVDDSGGSNYKLTF

SEQ ID NO: 650180 - protein, 16 aa, Homo sapiens
  CDR3 for beta chain variable domain of TCR clone 325090 (TRBV6-1, TRBJ1-2)
CASSGAWQGRSHGYTF

SEQ ID NO: 650181 - protein, 11 aa, Homo sapiens
  CDR3 for alpha chain variable domain of TCR clone 325091 (TRAV3, TRAJ17)
PRGAAGNKLTC

SEQ ID NO: 650182 - protein, 12 aa, Homo sapiens
  CDR3 for beta chain variable domain of TCR clone 325091 (TRBV11-2, TRBJ2-2)
CASSLGGGELFF

SEQ ID NO: 650183 - protein, 17 aa, Homo sapiens
  CDR3 for alpha chain variable domain of TCR clone 325092 (TRAV26-1, TRAJ11)
CIVRVGQSNSGYSTLTF

SEQ ID NO: 650184 - protein, 15 aa, Homo sapiens
  CDR3 for beta chain variable domain of TCR clone 325092 (TRBV27, TRBJ2-5)
CASSLIHSGGETQYF

SEQ ID NO: 650185 - protein, 14 aa, Homo sapiens
  CDR3 for alpha chain variable domain of TCR clone 325093 (TRAV12-2, TRAJ13)
CAVKKTGGYQKVTF

SEQ ID NO: 650186 - protein, 15 aa, Homo sapiens
  CDR3 for beta chain variable domain of TCR clone 325093 (TRBV6-5, TRBJ2-1)
CASSYDAGAGNEQFF

SEQ ID NO: 650187 - protein, 14 aa, Homo sapiens
  CDR3 for alpha chain variable domain of TCR clone 325094 (TRAV1-2, TRAJ16)
CAVNRFSDGQKLLF

SEQ ID NO: 650188 - protein, 15 aa, Homo sapiens
  CDR3 for beta chain variable domain of TCR clone 325094 (TRBV28, TRBJ1-1)
CASSPWTGPNTEAFF

SEQ ID NO: 650189 - protein, 14 aa, Homo sapiens
  CDR3 for alpha chain variable domain of TCR clone 325095 (TRAV12-3, TRAJ10)
SHLPLTGGVNKLTF

SEQ ID NO: 650190 - protein, 12 aa, Homo sapiens
  CDR3 for beta chain variable domain of TCR clone 325095 (TRBV11-2, TRBJ2-2)
CASSLGGGELFF

SEQ ID NO: 650191 - protein, 15 aa, Homo sapiens
  CDR3 for alpha chain variable domain of TCR clone 325096 (TRAV26-2, TRAJ39)
CSLRGNNNAGNMLTF

SEQ ID NO: 650192 - protein, 14 aa, Homo sapiens
  CDR3 for beta chain variable domain of TCR clone 325096 (TRBV5-1, TRBJ1-2)
CASSLGPVNYGYTF

SEQ ID NO: 650193 - protein, 14 aa, Homo sapiens
  CDR3 for alpha chain variable domain of TCR clone 325097 (TRAV4, TRAJ9)
CLVGSGTGGFKTIF

SEQ ID NO: 650194 - protein, 17 aa, Homo sapiens
  CDR3 for beta chain variable domain of TCR clone 325097 (TRBV19, TRBJ1-5)
CASRGLGGANIGQPQHF

SEQ ID NO: 650195 - protein, 12 aa, Homo sapiens
  CDR3 for alpha chain variable domain of TCR clone 325098 (TRAV12-3, TRAJ17)
CAMTLTGNKLTF

SEQ ID NO: 650196 - protein, 15 aa, Homo sapiens
  CDR3 for beta chain variable domain of TCR clone 325098 (TRBV20-1, TRBJ2-7)
CSARDRVVGMDEQYF

SEQ ID NO: 650197 - protein, 15 aa, Homo sapiens
  CDR3 for alpha chain variable domain of TCR clone 325099 (TRAV8-3, TRAJ6)
CAVGHLGGGSYIPTF

SEQ ID NO: 650198 - protein, 12 aa, Homo sapiens
  CDR3 for beta chain variable domain of TCR clone 325099 (TRBV7-9, TRBJ2-7)
CASSQGVYEQYF

SEQ ID NO: 650199 - protein, 13 aa, Homo sapiens
  CDR3 for alpha chain variable domain of TCR clone 325100 (TRAV21, TRAJ37)
CAVSSCNTGKLIF

SEQ ID NO: 650200 - protein, 13 aa, Homo sapiens
  CDR3 for beta chain variable domain of TCR clone 325100 (TRBV7-6, TRBJ2-3)
CASSLRSDNTQYF

SEQ ID NO: 650201 - protein, 10 aa, Homo sapiens
  CDR3 for alpha chain variable domain of TCR clone 325101 (TRAV16, TRAJ22)
SAMYLRQLTF

SEQ ID NO: 650202 - protein, 19 aa, Homo sapiens
  CDR3 for beta chain variable domain of TCR clone 325101 (TRBV7-2, TRBJ2-3)
CASSFLSRNWGGGTDTQYF

SEQ ID NO: 650203 - protein, 13 aa, Homo sapiens
  CDR3 for alpha chain variable domain of TCR clone 325102 (TRAV23/DV6, TRAJ22)
CASRAGSARQLTF

SEQ ID NO: 650204 - protein, 15 aa, Homo sapiens
  CDR3 for beta chain variable domain of TCR clone 325102 (TRBV20-1, TRBJ2-7)
CSARDRVSGMDEQYF

SEQ ID NO: 650205 - protein, 12 aa, Homo sapiens
  CDR3 for alpha chain variable domain of TCR clone 325103 (TRAV17, TRAJ39)
CATGAAGNMLTF

SEQ ID NO: 650206 - protein, 12 aa, Homo sapiens
  CDR3 for beta chain variable domain of TCR clone 325103 (TRBV12-4, TRBJ2-3)
CASSTLPDTQYF

SEQ ID NO: 650207 - protein, 18 aa, Homo sapiens
  CDR3 for alpha chain variable domain of TCR clone 325104 (TRAV12-3, TRAJ10)
SPVIQHLPLTGGGNKLTF

SEQ ID NO: 650208 - protein, 14 aa, Homo sapiens
  CDR3 for beta chain variable domain of TCR clone 325104 (TRBV18, TRBJ2-5)
CASSPGVSQETQYF

SEQ ID NO: 650209 - protein, 13 aa, Homo sapiens
  CDR3 for alpha chain variable domain of TCR clone 325105 (TRAV26-1, TRAJ30)
CIVRVESNDKIIF

SEQ ID NO: 650210 - protein, 17 aa, Homo sapiens
  CDR3 for beta chain variable domain of TCR clone 325105 (TRBV13, TRBJ2-3)
CASSLSRVAGGRKTQYF

SEQ ID NO: 650211 - protein, 14 aa, Homo sapiens
  CDR3 for alpha chain variable domain of TCR clone 325106 (TRAV1-2, TRAJ8)
CAEREDTGFQKLVF

SEQ ID NO: 650212 - protein, 17 aa, Homo sapiens
  CDR3 for beta chain variable domain of TCR clone 325106 (TRBV13, TRBJ2-3)
CASSLSRVAGGRNTQYF

SEQ ID NO: 650213 - protein, 14 aa, Homo sapiens
  CDR3 for alpha chain variable domain of TCR clone 325107 (TRAV26-1, TRAJ52)
CIPAGGTSHGKLTF

SEQ ID NO: 650214 - protein, 15 aa, Homo sapiens
  CDR3 for beta chain variable domain of TCR clone 325107 (TRBV19, TRBJ2-2)
CQYHWSQGGRRGAVF

SEQ ID NO: 650215 - protein, 12 aa, Homo sapiens
  CDR3 for alpha chain variable domain of TCR clone 325108 (TRAV2, TRAJ37)
CTVTMNTGKLIF

SEQ ID NO: 650216 - protein, 15 aa, Homo sapiens
  CDR3 for beta chain variable domain of TCR clone 325108 (TRBV5-1, TRBJ2-5)
CASSFGGPPQETQYF

SEQ ID NO: 650217 - protein, 14 aa, Homo sapiens
  CDR3 for alpha chain variable domain of TCR clone 325109 (TRAV12-2, TRAJ45)
CAVNKGGGADGLTF

SEQ ID NO: 650218 - protein, 15 aa, Homo sapiens
  CDR3 for beta chain variable domain of TCR clone 325109 (TRBV27, TRBJ2-5)
CASSLYPRGGETQYF

SEQ ID NO: 650219 - protein, 14 aa, Homo sapiens
  CDR3 for alpha chain variable domain of TCR clone 325110 (TRAV12-1, TRAJ30)
CVPTGPNRDDKIIF

SEQ ID NO: 650220 - protein, 11 aa, Homo sapiens
  CDR3 for beta chain variable domain of TCR clone 325110 (TRBV4-1, TRBJ2-2)
CASEHTGELFF

SEQ ID NO: 650221 - protein, 14 aa, Homo sapiens
  CDR3 for alpha chain variable domain of TCR clone 325111 (TRAV3, TRAJ34)
CAVRDINNTDKLIF

SEQ ID NO: 650222 - protein, 16 aa, Homo sapiens
  CDR3 for beta chain variable domain of TCR clone 325111 (TRBV5-1, TRBJ2-3)
CASSLGLAVYTDTQYF

SEQ ID NO: 650223 - protein, 16 aa, Homo sapiens
  CDR3 for alpha chain variable domain of TCR clone 325112 (TRAV19, TRAJ42)
CALSVNYGGSQGNLIF

SEQ ID NO: 650224 - protein, 13 aa, Homo sapiens
  CDR3 for beta chain variable domain of TCR clone 325112 (TRBV7-3, TRBJ2-1)
CAISPVAYNEQFF

SEQ ID NO: 650225 - protein, 22 aa, Homo sapiens
  CDR3 for alpha chain variable domain of TCR clone 325113 (TRAV3, TRAJ38)
CAVRDCLNAGNNHIQNPDPAVY

SEQ ID NO: 650226 - protein, 13 aa, Homo sapiens
  CDR3 for beta chain variable domain of TCR clone 325113 (TRBV7-2, TRBJ2-2)
CASSLAVTGELFF

SEQ ID NO: 650227 - protein, 12 aa, Homo sapiens
  CDR3 for alpha chain variable domain of TCR clone 325114 (TRAV13-1, TRAJ15)
CAAGQAGTALIF

SEQ ID NO: 650228 - protein, 18 aa, Homo sapiens
  CDR3 for beta chain variable domain of TCR clone 325114 (TRBV7-9, TRBJ2-3)
CASSLPINGQISTDTQYF

SEQ ID NO: 650229 - protein, 16 aa, Homo sapiens
  CDR3 for alpha chain variable domain of TCR clone 325115 (TRAV3, TRAJ28)
CAVLPRSGAGSYQLTF

SEQ ID NO: 650230 - protein, 16 aa, Homo sapiens
  CDR3 for beta chain variable domain of TCR clone 325115 (TRBV12-4, TRBJ2-7)
CASSLIGGTGTYEQYF

SEQ ID NO: 650231 - protein, 17 aa, Homo sapiens
  CDR3 for alpha chain variable domain of TCR clone 325116 (TRAV3, TRAJ6)
CAVRDGPRAGGSDIPTF

SEQ ID NO: 650232 - protein, 15 aa, Homo sapiens
  CDR3 for beta chain variable domain of TCR clone 325116 (TRBV4-1, TRBJ1-4)
CASSDTGGTNEKLFF

SEQ ID NO: 650233 - protein, 17 aa, Homo sapiens
  CDR3 for alpha chain variable domain of TCR clone 325117 (TRAV17, TRAJ54)
LLLCYGRGVQGAQKLVF

SEQ ID NO: 650234 - protein, 13 aa, Homo sapiens
  CDR3 for beta chain variable domain of TCR clone 325117 (TRBV7-6, TRBJ1-2)
CASSLVADYGYTF

SEQ ID NO: 650235 - protein, 15 aa, Homo sapiens
  CDR3 for alpha chain variable domain of TCR clone 325118 (TRAV8-1, TRAJ6)
CAVNTPPGGGYIPSF

SEQ ID NO: 650236 - protein, 14 aa, Homo sapiens
  CDR3 for beta chain variable domain of TCR clone 325118 (TRBV12-4, TRBJ2-1)
CASSLGQGASEQFF

SEQ ID NO: 650237 - protein, 14 aa, Homo sapiens
  CDR3 for alpha chain variable domain of TCR clone 325119 (TRAV3, TRAJ21)
CAVESQANFNKFYF

SEQ ID NO: 650238 - protein, 18 aa, Homo sapiens
  CDR3 for beta chain variable domain of TCR clone 325119 (TRBV7-9, TRBJ2-1)
CASSLAVSWTSGRNEQFF

SEQ ID NO: 650239 - protein, 14 aa, Homo sapiens
  CDR3 for alpha chain variable domain of TCR clone 325120 (TRAV12-2, TRAJ5)
CAVNRSTGRRALTF

SEQ ID NO: 650240 - protein, 15 aa, Homo sapiens
  CDR3 for beta chain variable domain of TCR clone 325120 (TRBV5-1, TRBJ1-1)
CASSSTTGTNTEAFF

SEQ ID NO: 650241 - protein, 14 aa, Homo sapiens
  CDR3 for alpha chain variable domain of TCR clone 325121 (TRAV25, TRAJ48)
CAGPGGFGNEKLTF

SEQ ID NO: 650242 - protein, 16 aa, Homo sapiens
  CDR3 for beta chain variable domain of TCR clone 325121 (TRBV19, TRBJ2-1)
CASSKAGPSSYNEQFF

SEQ ID NO: 650243 - protein, 16 aa, Homo sapiens
  CDR3 for alpha chain variable domain of TCR clone 325122 (TRAV12-1, TRAJ48)
CVVSMVSNFGNEKLTF

SEQ ID NO: 650244 - protein, 18 aa, Homo sapiens
  CDR3 for beta chain variable domain of TCR clone 325122 (TRBV11-2, TRBJ2-6)
CASSLSPFLGTGANVLTF

SEQ ID NO: 650245 - protein, 14 aa, Homo sapiens
  CDR3 for alpha chain variable domain of TCR clone 325123 (TRAV4, TRAJ33)
CPVGDVQSNYQLIW

SEQ ID NO: 650246 - protein, 15 aa, Homo sapiens
  CDR3 for beta chain variable domain of TCR clone 325123 (TRBV6-5, TRBJ2-1)
CASSYDAGAGNEQFF

SEQ ID NO: 650247 - protein, 16 aa, Homo sapiens
  CDR3 for alpha chain variable domain of TCR clone 325124 (TRAV30, TRAJ24)
CGTEIVDADSQGKFQF

SEQ ID NO: 650248 - protein, 14 aa, Homo sapiens
  CDR3 for beta chain variable domain of TCR clone 325124 (TRBV12-5, TRBJ2-5)
CASGSRTHQETQYF

SEQ ID NO: 650249 - protein, 16 aa, Homo sapiens
  CDR3 for alpha chain variable domain of TCR clone 325125 (TRAV4, TRAJ22)
CLVGDLYSGSARQLTF

SEQ ID NO: 650250 - protein, 13 aa, Homo sapiens
  CDR3 for beta chain variable domain of TCR clone 325125 (TRBV2, TRBJ1-1)
CASRWTVNTEAFF

SEQ ID NO: 650251 - protein, 12 aa, Homo sapiens
  CDR3 for alpha chain variable domain of TCR clone 325126 (TRAV8-3, TRAJ6)
CAVARGSYIPTF

SEQ ID NO: 650252 - protein, 20 aa, Homo sapiens
  CDR3 for beta chain variable domain of TCR clone 325126 (TRBV28, TRBJ2-1)
CASTPIGRSPGLAGGNEQFF

SEQ ID NO: 650253 - protein, 16 aa, Homo sapiens
  CDR3 for alpha chain variable domain of TCR clone 325127 (TRAV3, TRAJ37)
CAVGVRGSGNTDKLIF

SEQ ID NO: 650254 - protein, 16 aa, Homo sapiens
  CDR3 for beta chain variable domain of TCR clone 325127 (TRBV11-2, TRBJ2-7)
CASSPTTGGVSYEQYF

SEQ ID NO: 650255 - protein, 16 aa, Homo sapiens
  CDR3 for alpha chain variable domain of TCR clone 325128 (TRAV14/DV4, TRAJ21)
CAMREGPENNFNKFYF

SEQ ID NO: 650256 - protein, 12 aa, Homo sapiens
  CDR3 for beta chain variable domain of TCR clone 325128 (TRBV29-1, TRBJ2-2)
CSVDKYTEELFF

SEQ ID NO: 650257 - protein, 15 aa, Homo sapiens
  CDR3 for alpha chain variable domain of TCR clone 325129 (TRAV12-3, TRAJ6)
CAMSATTGGSYIPTF

SEQ ID NO: 650258 - protein, 12 aa, Homo sapiens
  CDR3 for beta chain variable domain of TCR clone 325129 (TRBV28, TRBJ1-2)
CASSRPNYGYTF

SEQ ID NO: 650259 - protein, 14 aa, Homo sapiens
  CDR3 for alpha chain variable domain of TCR clone 325130 (TRAV2, TRAJ9)
CAVEDRSGGFKTIF

SEQ ID NO: 650260 - protein, 18 aa, Homo sapiens
  CDR3 for beta chain variable domain of TCR clone 325130 (TRBV7-9, TRBJ2-7)
CASSLTTGGSRTWYEQYF

SEQ ID NO: 650261 - protein, 16 aa, Homo sapiens
  CDR3 for alpha chain variable domain of TCR clone 325131 (TRAV16, TRAJ42)
CARKMNYGGSQGNLIF

SEQ ID NO: 650262 - protein, 13 aa, Homo sapiens
  CDR3 for beta chain variable domain of TCR clone 325131 (TRBV20-1, TRBJ2-7)
CSASPPSSYEQDV

SEQ ID NO: 650263 - protein, 13 aa, Homo sapiens
  CDR3 for alpha chain variable domain of TCR clone 325132 (TRAV38-1, TRAJ42)
CARWGGSQGNLTF

SEQ ID NO: 650264 - protein, 18 aa, Homo sapiens
  CDR3 for beta chain variable domain of TCR clone 325132 (TRBV11-2, TRBJ2-3)
CASSLGGASRGAPNTQYF

SEQ ID NO: 650265 - protein, 14 aa, Homo sapiens
  CDR3 for alpha chain variable domain of TCR clone 325133 (TRAV35, TRAJ33)
CAGSSQDSNYQLIC

SEQ ID NO: 650266 - protein, 15 aa, Homo sapiens
  CDR3 for beta chain variable domain of TCR clone 325133 (TRBV20-1, TRBJ2-7)
CSAESGTSGAYERYF

SEQ ID NO: 650267 - protein, 14 aa, Homo sapiens
  CDR3 for alpha chain variable domain of TCR clone 325134 (TRAV1-2, TRAJ16)
CAVNRFSDGQKLLF

SEQ ID NO: 650268 - protein, 16 aa, Homo sapiens
  CDR3 for beta chain variable domain of TCR clone 325134 (TRBV20-1, TRBJ1-4)
CSAPGQGLLTNEKVFF

SEQ ID NO: 650269 - protein, 13 aa, Homo sapiens
  CDR3 for alpha chain variable domain of TCR clone 325135 (TRAV27, TRAJ6)
CAGGTRGSYIPTL

SEQ ID NO: 650270 - protein, 13 aa, Homo sapiens
  CDR3 for beta chain variable domain of TCR clone 325135 (TRBV4-1, TRBJ2-5)
CASSLTRGETQYF

SEQ ID NO: 650271 - protein, 16 aa, Homo sapiens
  CDR3 for alpha chain variable domain of TCR clone 325136 (TRAV12-3, TRAJ53)
CAMSPGSGRSNYKMTF

SEQ ID NO: 650272 - protein, 11 aa, Homo sapiens
  CDR3 for beta chain variable domain of TCR clone 325136 (TRBV29-1, TRBJ2-5)
CSEDRTGTQYF

SEQ ID NO: 650273 - protein, 12 aa, Homo sapiens
  CDR3 for alpha chain variable domain of TCR clone 325137 (TRAV1-2, TRAJ26)
CAARYYGQNFVF

SEQ ID NO: 650274 - protein, 17 aa, Homo sapiens
  CDR3 for beta chain variable domain of TCR clone 325137 (TRBV19, TRBJ2-3)
CASSIDPAGGGTDTQYF

SEQ ID NO: 650275 - protein, 14 aa, Homo sapiens
  CDR3 for alpha chain variable domain of TCR clone 325138 (TRAV8-3, TRAJ39)
CAVGANNSGNMPTF

SEQ ID NO: 650276 - protein, 16 aa, Homo sapiens
  CDR3 for beta chain variable domain of TCR clone 325138 (TRBV12-5, TRBJ2-5)
CASGPRTSGNQETQYF

SEQ ID NO: 650277 - protein, 15 aa, Homo sapiens
  CDR3 for alpha chain variable domain of TCR clone 325139 (TRAV14/DV4, TRAJ28)
CAKLFSGAGSYQLTF

SEQ ID NO: 650278 - protein, 18 aa, Homo sapiens
  CDR3 for beta chain variable domain of TCR clone 325139 (TRBV7-9, TRBJ2-7)
CASSLTTSGSRTWYEQYF

SEQ ID NO: 650279 - protein, 13 aa, Homo sapiens
  CDR3 for alpha chain variable domain of TCR clone 325140 (TRAV12-1, TRAJ29)
CVVNGPVNTPLVF

SEQ ID NO: 650280 - protein, 13 aa, Homo sapiens
  CDR3 for beta chain variable domain of TCR clone 325140 (TRBV7-2, TRBJ2-5)
CASSRGGLETQYF

SEQ ID NO: 650281 - protein, 14 aa, Homo sapiens
  CDR3 for alpha chain variable domain of TCR clone 325141 (TRAV8-1, TRAJ39)
CAVNASNAGNMLTF

SEQ ID NO: 650282 - protein, 16 aa, Homo sapiens
  CDR3 for beta chain variable domain of TCR clone 325141 (TRBV19, TRBJ2-2)
CASRSPGTGATGELFF

SEQ ID NO: 650283 - protein, 15 aa, Homo sapiens
  CDR3 for alpha chain variable domain of TCR clone 325142 (TRAV38-1, TRAJ37)
CAFIHGSGNTGKLIF

SEQ ID NO: 650284 - protein, 12 aa, Homo sapiens
  CDR3 for beta chain variable domain of TCR clone 325142 (TRBV7-9, TRBJ2-7)
CASSSGSYEQCF

SEQ ID NO: 650285 - protein, 13 aa, Homo sapiens
  CDR3 for alpha chain variable domain of TCR clone 325143 (TRAV25, TRAJ29)
CAVRDIIDTPLVF

SEQ ID NO: 650286 - protein, 14 aa, Homo sapiens
  CDR3 for beta chain variable domain of TCR clone 325143 (TRBV27, TRBJ2-1)
CASSATGGYNEQFF

SEQ ID NO: 650287 - protein, 16 aa, Homo sapiens
  CDR3 for alpha chain variable domain of TCR clone 325144 (TRAV12-1, TRAJ53)
CVVTSAAGGSNYKLTF

SEQ ID NO: 650288 - protein, 16 aa, Homo sapiens
  CDR3 for beta chain variable domain of TCR clone 325144 (TRBV6-6, TRBJ2-3)
CASSYSHAGSTDTQYF

SEQ ID NO: 650289 - protein, 20 aa, Homo sapiens
  CDR3 for alpha chain variable domain of TCR clone 325145 (TRAV13-1, TRAJ57)
CTSVQQVPPLSQGGSEKLVF

SEQ ID NO: 650290 - protein, 17 aa, Homo sapiens
  CDR3 for beta chain variable domain of TCR clone 325145 (TRBV7-3, TRBJ2-3)
CASSLMKRMRGADTQYF

SEQ ID NO: 650291 - protein, 22 aa, Homo sapiens
  CDR3 for alpha chain variable domain of TCR clone 325146 (TRAV3, TRAJ20)
CAVRPSVTTTSSALEPEPQELE

SEQ ID NO: 650292 - protein, 15 aa, Homo sapiens
  CDR3 for beta chain variable domain of TCR clone 325146 (TRBV19, TRBJ2-6)
CASVRRDSGANVLTF

SEQ ID NO: 650293 - protein, 13 aa, Homo sapiens
  CDR3 for alpha chain variable domain of TCR clone 325147 (TRAV30, TRAJ49)
CGTEPDTGNQFYF

SEQ ID NO: 650294 - protein, 14 aa, Homo sapiens
  CDR3 for beta chain variable domain of TCR clone 325147 (TRBV29-1, TRBJ2-1)
CSVEFRGIPFEQFF

SEQ ID NO: 650295 - protein, 14 aa, Homo sapiens
  CDR3 for alpha chain variable domain of TCR clone 325148 (TRAV13-1, TRAJ35)
CAASKGGFGNVLLC

SEQ ID NO: 650296 - protein, 15 aa, Homo sapiens
  CDR3 for beta chain variable domain of TCR clone 325148 (TRBV9, TRBJ1-6)
CASSVAGTGDSPLHF

SEQ ID NO: 650297 - protein, 15 aa, Homo sapiens
  CDR3 for alpha chain variable domain of TCR clone 325149 (TRAV1-2, TRAJ28)
CAVQYSGAGSYQLTF

SEQ ID NO: 650298 - protein, 13 aa, Homo sapiens
  CDR3 for beta chain variable domain of TCR clone 325149 (TRBV6-6, TRBJ2-7)
CASSPKHLAEQYF

SEQ ID NO: 650299 - protein, 13 aa, Homo sapiens
  CDR3 for alpha chain variable domain of TCR clone 325150 (TRAV29/DV5, TRAJ31)
CAANRNNNARLMF

SEQ ID NO: 650300 - protein, 12 aa, Homo sapiens
  CDR3 for beta chain variable domain of TCR clone 325150 (TRBV14, TRBJ2-5)
CASSQLKETQYF

SEQ ID NO: 650301 - protein, 18 aa, Homo sapiens
  CDR3 for alpha chain variable domain of TCR clone 325151 (TRAV26-2, TRAJ45)
CILRLWGYSGGGADGLTF

SEQ ID NO: 650302 - protein, 17 aa, Homo sapiens
  CDR3 for beta chain variable domain of TCR clone 325151 (TRBV28, TRBJ2-3)
CASSPTPAGGRIDTQYF

SEQ ID NO: 650303 - protein, 14 aa, Homo sapiens
  CDR3 for alpha chain variable domain of TCR clone 325152 (TRAV12-3, TRAJ20)
CAMSARRGYYKLSF

SEQ ID NO: 650304 - protein, 14 aa, Homo sapiens
  CDR3 for beta chain variable domain of TCR clone 325152 (TRBV7-3, TRBJ2-3)
CASSPSARTDTQYF

SEQ ID NO: 650305 - protein, 15 aa, Homo sapiens
  CDR3 for alpha chain variable domain of TCR clone 325153 (TRAV26-1, TRAJ44)
CIVRANTGTASKLTF

SEQ ID NO: 650306 - protein, 15 aa, Homo sapiens
  CDR3 for beta chain variable domain of TCR clone 325153 (TRBV28, TRBJ2-1)
CASSGLAEVDNEQFF

SEQ ID NO: 650307 - protein, 13 aa, Homo sapiens
  CDR3 for alpha chain variable domain of TCR clone 325154 (TRAV12-2, TRAJ26)
CAVNENYGQNFFF

SEQ ID NO: 650308 - protein, 13 aa, Homo sapiens
  CDR3 for beta chain variable domain of TCR clone 325154 (TRBV18, TRBJ2-2)
CASSPTRGGELFF

SEQ ID NO: 650309 - protein, 14 aa, Homo sapiens
  CDR3 for alpha chain variable domain of TCR clone 325155 (TRAV13-1, TRAJ35)
CAASKGGFGNVLHC

SEQ ID NO: 650310 - protein, 17 aa, Homo sapiens
  CDR3 for beta chain variable domain of TCR clone 325155 (TRBV18, TRBJ1-5)
CASSPTMGQGTNQPQHF

SEQ ID NO: 650311 - protein, 14 aa, Homo sapiens
  CDR3 for alpha chain variable domain of TCR clone 325156 (TRAV21, TRAJ38)
CAVMGAGNNRNLIC

SEQ ID NO: 650312 - protein, 13 aa, Homo sapiens
  CDR3 for beta chain variable domain of TCR clone 325156 (TRBV7-3, TRBJ2-5)
CASSIGFFETQYF

SEQ ID NO: 650313 - protein, 13 aa, Homo sapiens
  CDR3 for alpha chain variable domain of TCR clone 325157 (TRAV21, TRAJ27)
CAARPGNAGKSTF

SEQ ID NO: 650314 - protein, 13 aa, Homo sapiens
  CDR3 for beta chain variable domain of TCR clone 325157 (TRBV7-9, TRBJ2-7)
CASSFAGAYEQYF

SEQ ID NO: 650315 - protein, 10 aa, Homo sapiens
  CDR3 for alpha chain variable domain of TCR clone 325158 (TRAV12-3, TRAJ49)
CAMNDDQFYF

SEQ ID NO: 650316 - protein, 18 aa, Homo sapiens
  CDR3 for beta chain variable domain of TCR clone 325158 (TRBV18, TRBJ1-3)
CASSPRGGAGPSGNTIYF

SEQ ID NO: 650317 - protein, 16 aa, Homo sapiens
  CDR3 for alpha chain variable domain of TCR clone 325159 (TRAV16, TRAJ52)
CALSAAGGTSYGKLTF

SEQ ID NO: 650318 - protein, 17 aa, Homo sapiens
  CDR3 for beta chain variable domain of TCR clone 325159 (TRBV11-2, TRBJ2-1)
CAISLYPPGVEYNEQFF

SEQ ID NO: 650319 - protein, 14 aa, Homo sapiens
  CDR3 for alpha chain variable domain of TCR clone 325160 (TRAV1-2, TRAJ16)
CAVNRFSDGQKLLF

SEQ ID NO: 650320 - protein, 16 aa, Homo sapiens
  CDR3 for beta chain variable domain of TCR clone 325160 (TRBV12-5, TRBJ2-5)
CASDPRTSGNQETQYF

SEQ ID NO: 650321 - protein, 13 aa, Homo sapiens
  CDR3 for alpha chain variable domain of TCR clone 325161 (TRAV2, TRAJ40)
CAVVTSGTYKYIF

SEQ ID NO: 650322 - protein, 16 aa, Homo sapiens
  CDR3 for beta chain variable domain of TCR clone 325161 (TRBV13, TRBJ2-3)
CQQPLQGSGGGNTQYF

SEQ ID NO: 650323 - protein, 14 aa, Homo sapiens
  CDR3 for alpha chain variable domain of TCR clone 325162 (TRAV21, TRAJ45)
CAVSSGGGADGLTF

SEQ ID NO: 650324 - protein, 15 aa, Homo sapiens
  CDR3 for beta chain variable domain of TCR clone 325162 (TRBV6-1, TRBJ2-4)
CASSEAVWTINIQYC

SEQ ID NO: 650325 - protein, 15 aa, Homo sapiens
  CDR3 for alpha chain variable domain of TCR clone 325163 (TRAV30, TRAJ57)
SVAAIPQGGSEKLVF

SEQ ID NO: 650326 - protein, 14 aa, Homo sapiens
  CDR3 for beta chain variable domain of TCR clone 325163 (TRBV4-1, TRBJ2-2)
CASSQAVNTGELFF

SEQ ID NO: 650327 - protein, 15 aa, Homo sapiens
  CDR3 for alpha chain variable domain of TCR clone 325164 (TRAV3, TRAJ38)
CAVRDCLNAGNNHIH

SEQ ID NO: 650328 - protein, 19 aa, Homo sapiens
  CDR3 for beta chain variable domain of TCR clone 325164 (TRBV7-2, TRBJ2-3)
CASSFLSRNWGGGTDTQYF

SEQ ID NO: 650329 - protein, 12 aa, Homo sapiens
  CDR3 for alpha chain variable domain of TCR clone 325165 (TRAV12-2, TRAJ52)
IGGGTSYGKLTF

SEQ ID NO: 650330 - protein, 13 aa, Homo sapiens
  CDR3 for beta chain variable domain of TCR clone 325165 (TRBV12-4, TRBJ1-2)
CASSLRQGKGYTF

SEQ ID NO: 650331 - protein, 17 aa, Homo sapiens
  CDR3 for alpha chain variable domain of TCR clone 325166 (TRAV13-1, TRAJ32)
CAASNGWWCYKQAHIWN

SEQ ID NO: 650332 - protein, 15 aa, Homo sapiens
  CDR3 for beta chain variable domain of TCR clone 325166 (TRBV20-1, TRBJ2-7)
CSARERVSGMDEQYF

SEQ ID NO: 650333 - protein, 11 aa, Homo sapiens
  CDR3 for alpha chain variable domain of TCR clone 325167 (TRAV17, TRAJ31)
CAADRTARLMF

SEQ ID NO: 650334 - protein, 14 aa, Homo sapiens
  CDR3 for beta chain variable domain of TCR clone 325167 (TRBV4-1, TRBJ2-2)
CASSQAVNTGELFF

SEQ ID NO: 650335 - protein, 14 aa, Homo sapiens
  CDR3 for alpha chain variable domain of TCR clone 325168 (TRAV12-1, TRAJ12)
CVVTRMDSSYKLIF

SEQ ID NO: 650336 - protein, 10 aa, Homo sapiens
  CDR3 for beta chain variable domain of TCR clone 325168 (TRBV20-1, TRBJ1-1)
EAGGNTEAFF

SEQ ID NO: 650337 - protein, 14 aa, Homo sapiens
  CDR3 for alpha chain variable domain of TCR clone 325169 (TRAV13-1, TRAJ35)
CAASKGGFGNVLHC

SEQ ID NO: 650338 - protein, 14 aa, Homo sapiens
  CDR3 for beta chain variable domain of TCR clone 325169 (TRBV5-1, TRBJ2-2)
CASSLGGGSGELFF

SEQ ID NO: 650339 - protein, 12 aa, Homo sapiens
  CDR3 for alpha chain variable domain of TCR clone 325170 (TRAV16, TRAJ56)
FAPTGANSKLTF

SEQ ID NO: 650340 - protein, 16 aa, Homo sapiens
  CDR3 for beta chain variable domain of TCR clone 325170 (TRBV7-9, TRBJ1-2)
CASSLGFSSGEDGYTF

SEQ ID NO: 650341 - protein, 13 aa, Homo sapiens
  CDR3 for alpha chain variable domain of TCR clone 325171 (TRAV12-1, TRAJ11)
CVVNRAGYSTLTF

SEQ ID NO: 650342 - protein, 16 aa, Homo sapiens
  CDR3 for beta chain variable domain of TCR clone 325171 (TRBV24-1, TRBJ2-3)
CATSDPGTGATDTQYF

SEQ ID NO: 650343 - protein, 14 aa, Homo sapiens
  CDR3 for alpha chain variable domain of TCR clone 325172 (TRAV12-2, TRAJ45)
CAVYSGGGADGLTF

SEQ ID NO: 650344 - protein, 16 aa, Homo sapiens
  CDR3 for beta chain variable domain of TCR clone 325172 (TRBV29-1, TRBJ2-7)
CSVEDAEDGTAYEQYF

SEQ ID NO: 650345 - protein, 15 aa, Homo sapiens
  CDR3 for alpha chain variable domain of TCR clone 325173 (TRAV30, TRAJ32)
CGTEILGGATNKLIF

SEQ ID NO: 650346 - protein, 13 aa, Homo sapiens
  CDR3 for beta chain variable domain of TCR clone 325173 (TRBV6-3, TRBJ2-7)
CAISFSGGYEQYF

SEQ ID NO: 650347 - protein, 11 aa, Homo sapiens
  CDR3 for alpha chain variable domain of TCR clone 325174 (TRAV12-1, TRAJ30)
CVVNGQDKIIF

SEQ ID NO: 650348 - protein, 13 aa, Homo sapiens
  CDR3 for beta chain variable domain of TCR clone 325174 (TRBV19, TRBJ2-1)
CATSRGVYNEQFF

SEQ ID NO: 650349 - protein, 14 aa, Homo sapiens
  CDR3 for alpha chain variable domain of TCR clone 325175 (TRAV8-3, TRAJ9)
CAVVYNTGGFKTIF

SEQ ID NO: 650350 - protein, 15 aa, Homo sapiens
  CDR3 for beta chain variable domain of TCR clone 325175 (TRBV7-9, TRBJ1-4)
CASSARTGGNEKLFF

SEQ ID NO: 650351 - protein, 11 aa, Homo sapiens
  CDR3 for alpha chain variable domain of TCR clone 325176 (TRAV26-1, TRAJ37)
CIVRVGRKLIF

SEQ ID NO: 650352 - protein, 15 aa, Homo sapiens
  CDR3 for beta chain variable domain of TCR clone 325176 (TRBV20-1, TRBJ2-5)
CSAPPRTGFGETQYF

SEQ ID NO: 650353 - protein, 13 aa, Homo sapiens
  CDR3 for alpha chain variable domain of TCR clone 325177 (TRAV27, TRAJ58)
CAGAETSGSRLTF

SEQ ID NO: 650354 - protein, 13 aa, Homo sapiens
  CDR3 for beta chain variable domain of TCR clone 325177 (TRBV7-2, TRBJ2-1)
CASNRDRWNEQYF

SEQ ID NO: 650355 - protein, 14 aa, Homo sapiens
  CDR3 for alpha chain variable domain of TCR clone 325178 (TRAV39, TRAJ33)
CAVGIKNSNYQLIW

SEQ ID NO: 650356 - protein, 13 aa, Homo sapiens
  CDR3 for beta chain variable domain of TCR clone 325178 (TRBV4-2, TRBJ2-1)
CASSPGTYNEQFF

SEQ ID NO: 650357 - protein, 11 aa, Homo sapiens
  CDR3 for alpha chain variable domain of TCR clone 325179 (TRAV3, TRAJ32)
CAVSPKGRVVL

SEQ ID NO: 650358 - protein, 15 aa, Homo sapiens
  CDR3 for beta chain variable domain of TCR clone 325179 (TRBV7-9, TRBJ1-6)
CASSSPGRGNSPLHF

SEQ ID NO: 650359 - protein, 16 aa, Homo sapiens
  CDR3 for alpha chain variable domain of TCR clone 325180 (TRAV38-2/DV8, TRAJ45)
CAYTTTSGGGAAGLTF

SEQ ID NO: 650360 - protein, 14 aa, Homo sapiens
  CDR3 for beta chain variable domain of TCR clone 325180 (TRBV7-9, TRBJ2-2)
CASSLGHRTGELFF

SEQ ID NO: 650361 - protein, 16 aa, Homo sapiens
  CDR3 for alpha chain variable domain of TCR clone 325181 (TRAV1-2, TRAJ10)
CAVRGVLTGGGNKLTF

SEQ ID NO: 650362 - protein, 14 aa, Homo sapiens
  CDR3 for beta chain variable domain of TCR clone 325181 (TRBV6-1, TRBJ1-3)
CASVQGGGGNTMYF

SEQ ID NO: 650363 - protein, 10 aa, Homo sapiens
  CDR3 for alpha chain variable domain of TCR clone 325182 (TRAV12-2, TRAJ52)
RSTSFGKLTF

SEQ ID NO: 650364 - protein, 11 aa, Homo sapiens
  CDR3 for beta chain variable domain of TCR clone 325182 (TRBV11-2, TRBJ2-2)
CASSLPGELFF

SEQ ID NO: 650365 - protein, 13 aa, Homo sapiens
  CDR3 for alpha chain variable domain of TCR clone 325183 (TRAV21, TRAJ57)
CAVTHGGSAKLVF

SEQ ID NO: 650366 - protein, 16 aa, Homo sapiens
  CDR3 for beta chain variable domain of TCR clone 325183 (TRBV29-1, TRBJ2-7)
CSVEDAEDGTAYEQYF

SEQ ID NO: 650367 - protein, 16 aa, Homo sapiens
  CDR3 for alpha chain variable domain of TCR clone 325184 (TRAV8-3, TRAJ42)
CAVAGDYGGSQGNLIF

SEQ ID NO: 650368 - protein, 15 aa, Homo sapiens
  CDR3 for beta chain variable domain of TCR clone 325184 (TRBV7-9, TRBJ1-5)
CASSQGHQPNQPQHF

SEQ ID NO: 650369 - protein, 14 aa, Homo sapiens
  CDR3 for alpha chain variable domain of TCR clone 325185 (TRAV17, TRAJ35)
CATDRPGFGNVLHG

SEQ ID NO: 650370 - protein, 14 aa, Homo sapiens
  CDR3 for beta chain variable domain of TCR clone 325185 (TRBV7-8, TRBJ2-3)
CASSLEAGTDTQYF

SEQ ID NO: 650371 - protein, 10 aa, Homo sapiens
  CDR3 for alpha chain variable domain of TCR clone 325186 (TRAV1-2, TRAJ23)
CAGQGGKLIF

SEQ ID NO: 650372 - protein, 16 aa, Homo sapiens
  CDR3 for beta chain variable domain of TCR clone 325186 (TRBV4-1, TRBJ2-7)
CASRPSGGGADNEQYF

SEQ ID NO: 650373 - protein, 15 aa, Homo sapiens
  CDR3 for alpha chain variable domain of TCR clone 325187 (TRAV27, TRAJ38)
CAARRNAGNNRKLIW

SEQ ID NO: 650374 - protein, 14 aa, Homo sapiens
  CDR3 for beta chain variable domain of TCR clone 325187 (TRBV2, TRBJ1-2)
CASSEGGRNYGYTF

SEQ ID NO: 650375 - protein, 14 aa, Homo sapiens
  CDR3 for alpha chain variable domain of TCR clone 325188 (TRAV12-1, TRAJ17)
CVVNYKAAGNKLTF

SEQ ID NO: 650376 - protein, 15 aa, Homo sapiens
  CDR3 for beta chain variable domain of TCR clone 325188 (TRBV28, TRBJ2-1)
CASSIIAGGRSERFF

SEQ ID NO: 650377 - protein, 14 aa, Homo sapiens
  CDR3 for alpha chain variable domain of TCR clone 325189 (TRAV12-1, TRAJ33)
CVVNPEDSNYQLIW

SEQ ID NO: 650378 - protein, 11 aa, Homo sapiens
  CDR3 for beta chain variable domain of TCR clone 325189 (TRBV7-6, TRBJ2-1)
CASSNCGEQFF

SEQ ID NO: 650379 - protein, 13 aa, Homo sapiens
  CDR3 for alpha chain variable domain of TCR clone 325190 (TRAV1-2, TRAJ26)
WAVRPNYGQNFVF

SEQ ID NO: 650380 - protein, 14 aa, Homo sapiens
  CDR3 for beta chain variable domain of TCR clone 325190 (TRBV4-1, TRBJ2-5)
CASSQDLALETQYF

SEQ ID NO: 650381 - protein, 14 aa, Homo sapiens
  CDR3 for alpha chain variable domain of TCR clone 325191 (TRAV1-2, TRAJ8)
CAVREDTGFQKLVF

SEQ ID NO: 650382 - protein, 14 aa, Homo sapiens
  CDR3 for beta chain variable domain of TCR clone 325191 (TRBV13, TRBJ1-1)
CASTVITVNTEAFF

SEQ ID NO: 650383 - protein, 16 aa, Homo sapiens
  CDR3 for alpha chain variable domain of TCR clone 325192 (TRAV3, TRAJ37)
CAVRGKGSGNTGKLIF

SEQ ID NO: 650384 - protein, 19 aa, Homo sapiens
  CDR3 for beta chain variable domain of TCR clone 325192 (TRBV4-3, TRBJ2-7)
CASSQEFIGWQVTPYEQYF

SEQ ID NO: 650385 - protein, 15 aa, Homo sapiens
  CDR3 for alpha chain variable domain of TCR clone 325193 (TRAV17, TRAJ6)
CATDLPSGGSYIPTL

SEQ ID NO: 650386 - protein, 16 aa, Homo sapiens
  CDR3 for beta chain variable domain of TCR clone 325193 (TRBV4-1, TRBJ2-7)
CASSQDPTGYSYEQYF

SEQ ID NO: 650387 - protein, 14 aa, Homo sapiens
  CDR3 for alpha chain variable domain of TCR clone 325194 (TRAV35, TRAJ33)
CAGSSQDSNYQLIW

SEQ ID NO: 650388 - protein, 14 aa, Homo sapiens
  CDR3 for beta chain variable domain of TCR clone 325194 (TRBV7-3, TRBJ2-1)
CASSLAGGANEQFF

SEQ ID NO: 650389 - protein, 14 aa, Homo sapiens
  CDR3 for alpha chain variable domain of TCR clone 325195 (TRAV1-2, TRAJ16)
CAVNRFSDGQKLLF

SEQ ID NO: 650390 - protein, 13 aa, Homo sapiens
  CDR3 for beta chain variable domain of TCR clone 325195 (TRBV19, TRBJ2-3)
CATWDKITDTQYF

SEQ ID NO: 650391 - protein, 16 aa, Homo sapiens
  CDR3 for alpha chain variable domain of TCR clone 325196 (TRAV3, TRAJ37)
CAVRGKGSGNTGKLIF

SEQ ID NO: 650392 - protein, 13 aa, Homo sapiens
  CDR3 for beta chain variable domain of TCR clone 325196 (TRBV7-3, TRBJ1-1)
CASSQDWGAEAFC

SEQ ID NO: 650393 - protein, 14 aa, Homo sapiens
  CDR3 for alpha chain variable domain of TCR clone 325197 (TRAV1-2, TRAJ8)
CAVREYTGFQKLVF

SEQ ID NO: 650394 - protein, 15 aa, Homo sapiens
  CDR3 for beta chain variable domain of TCR clone 325197 (TRBV20-1, TRBJ2-7)
CSARDRVSGMDEQYF

SEQ ID NO: 650395 - protein, 14 aa, Homo sapiens
  CDR3 for alpha chain variable domain of TCR clone 325198 (TRAV1-2, TRAJ27)
CAVRSGTNAGKSTF

SEQ ID NO: 650396 - protein, 13 aa, Homo sapiens
  CDR3 for beta chain variable domain of TCR clone 325198 (TRBV5-1, TRBJ1-5)
CASSLAQDQPQHF

SEQ ID NO: 650397 - protein, 14 aa, Homo sapiens
  CDR3 for alpha chain variable domain of TCR clone 325199 (TRAV12-3, TRAJ10)
SHLPLTGGGNKLTF

SEQ ID NO: 650398 - protein, 14 aa, Homo sapiens
  CDR3 for beta chain variable domain of TCR clone 325199 (TRBV20-1, TRBJ1-5)
CSATDRGSNQPQHF

SEQ ID NO: 650399 - protein, 15 aa, Homo sapiens
  CDR3 for alpha chain variable domain of TCR clone 325200 (TRAV8-3, TRAJ15)
CAVGAPNQARTALIF

SEQ ID NO: 650400 - protein, 14 aa, Homo sapiens
  CDR3 for beta chain variable domain of TCR clone 325200 (TRBV20-1, TRBJ2-1)
CSPNDEASYNEQFF

SEQ ID NO: 650401 - protein, 13 aa, Homo sapiens
  CDR3 for alpha chain variable domain of TCR clone 325201 (TRAV1-2, TRAJ9)
CAALNTGGFKTIF

SEQ ID NO: 650402 - protein, 15 aa, Homo sapiens
  CDR3 for beta chain variable domain of TCR clone 325201 (TRBV9, TRBJ1-6)
CASSVAGTGDSPLHC

SEQ ID NO: 650403 - protein, 14 aa, Homo sapiens
  CDR3 for alpha chain variable domain of TCR clone 325202 (TRAV21, TRAJ35)
CAVMPIGFGNVLHC

SEQ ID NO: 650404 - protein, 16 aa, Homo sapiens
  CDR3 for beta chain variable domain of TCR clone 325202 (TRBV7-6, TRBJ2-1)
CASSAPGPSSYNEQFF

SEQ ID NO: 650405 - protein, 16 aa, Homo sapiens
  CDR3 for alpha chain variable domain of TCR clone 325203 (TRAV8-2, TRAJ7)
CVVSEGPYYGNNRLAF

SEQ ID NO: 650406 - protein, 15 aa, Homo sapiens
  CDR3 for beta chain variable domain of TCR clone 325203 (TRBV7-2, TRBJ2-3)
CASSLVVRGPDTQYF

SEQ ID NO: 650407 - protein, 16 aa, Homo sapiens
  CDR3 for alpha chain variable domain of TCR clone 325204 (TRAV23/DV6, TRAJ9)
CAASTGGNTEGFKTIF

SEQ ID NO: 650408 - protein, 15 aa, Homo sapiens
  CDR3 for beta chain variable domain of TCR clone 325204 (TRBV6-3, TRBJ2-7)
CASSSPGTVLYEQYF

SEQ ID NO: 650409 - protein, 11 aa, Homo sapiens
  CDR3 for alpha chain variable domain of TCR clone 325205 (TRAV16, TRAJ42)
CALASQGNLIF

SEQ ID NO: 650410 - protein, 15 aa, Homo sapiens
  CDR3 for beta chain variable domain of TCR clone 325205 (TRBV5-1, TRBJ2-1)
CASSPPRAPYNEQFF

SEQ ID NO: 650411 - protein, 13 aa, Homo sapiens
  CDR3 for alpha chain variable domain of TCR clone 325206 (TRAV36/DV7, TRAJ37)
CAVFSSNTGKLIF

SEQ ID NO: 650412 - protein, 18 aa, Homo sapiens
  CDR3 for beta chain variable domain of TCR clone 325206 (TRBV11-2, TRBJ2-3)
WASSLGGASRGAPNTQYF

SEQ ID NO: 650413 - protein, 12 aa, Homo sapiens
  CDR3 for alpha chain variable domain of TCR clone 325207 (TRAV2, TRAJ33)
CAFMDSNYQLIW

SEQ ID NO: 650414 - protein, 16 aa, Homo sapiens
  CDR3 for beta chain variable domain of TCR clone 325207 (TRBV2, TRBJ2-7)
CASSEPWTGPSYERYF

SEQ ID NO: 650415 - protein, 14 aa, Homo sapiens
  CDR3 for alpha chain variable domain of TCR clone 325208 (TRAV1-2, TRAJ16)
CSVNRFSDGQKLLF

SEQ ID NO: 650416 - protein, 11 aa, Homo sapiens
  CDR3 for beta chain variable domain of TCR clone 325208 (TRBV7-8, TRBJ2-7)
CASSLSLEQYF

SEQ ID NO: 650417 - protein, 12 aa, Homo sapiens
  CDR3 for alpha chain variable domain of TCR clone 325209 (TRAV12-3, TRAJ17)
CAMTLTGNKLTF

SEQ ID NO: 650418 - protein, 14 aa, Homo sapiens
  CDR3 for beta chain variable domain of TCR clone 325209 (TRBV25-1, TRBJ1-1)
CASTRLGGNTEAFF

SEQ ID NO: 650419 - protein, 12 aa, Homo sapiens
  CDR3 for alpha chain variable domain of TCR clone 325210 (TRAV16, TRAJ36)
CALKTGANNLFF

SEQ ID NO: 650420 - protein, 15 aa, Homo sapiens
  CDR3 for beta chain variable domain of TCR clone 325210 (TRBV6-3, TRBJ2-7)
CASSSPGTVFYEQYF

SEQ ID NO: 650421 - protein, 12 aa, Homo sapiens
  CDR3 for alpha chain variable domain of TCR clone 325211 (TRAV35, TRAJ49)
CAGWNTGNQFYF

SEQ ID NO: 650422 - protein, 13 aa, Homo sapiens
  CDR3 for beta chain variable domain of TCR clone 325211 (TRBV3-1, TRBJ1-1)
CASSPGVITEAFF

SEQ ID NO: 650423 - protein, 12 aa, Homo sapiens
  CDR3 for alpha chain variable domain of TCR clone 325212 (TRAV2, TRAJ37)
CAVAGNTGKLIF

SEQ ID NO: 650424 - protein, 16 aa, Homo sapiens
  CDR3 for beta chain variable domain of TCR clone 325212 (TRBV28, TRBJ2-7)
CASSSGTSGRGYEQYF

SEQ ID NO: 650425 - protein, 15 aa, Homo sapiens
  CDR3 for alpha chain variable domain of TCR clone 325213 (TRAV26-1, TRAJ29)
CIVRVEGSGNTPLVF

SEQ ID NO: 650426 - protein, 15 aa, Homo sapiens
  CDR3 for beta chain variable domain of TCR clone 325213 (TRBV7-9, TRBJ1-5)
CASSQGHHTNQPQHF

SEQ ID NO: 650427 - protein, 17 aa, Homo sapiens
  CDR3 for alpha chain variable domain of TCR clone 325214 (TRAV23/DV6, TRAJ57)
CAASSTLSQGGSEKLVF

SEQ ID NO: 650428 - protein, 14 aa, Homo sapiens
  CDR3 for beta chain variable domain of TCR clone 325214 (TRBV19, TRBJ2-1)
CASPTFVLRGEQFF

SEQ ID NO: 650429 - protein, 16 aa, Homo sapiens
  CDR3 for alpha chain variable domain of TCR clone 325215 (TRAV12-2, TRAJ52)
CAVNNRGGTSYGKLTF

SEQ ID NO: 650430 - protein, 15 aa, Homo sapiens
  CDR3 for beta chain variable domain of TCR clone 325215 (TRBV12-4, TRBJ1-1)
CASSLAVSRGAEAFF

SEQ ID NO: 650431 - protein, 12 aa, Homo sapiens
  CDR3 for alpha chain variable domain of TCR clone 325216 (TRAV13-1, TRAJ42)
SVLRGSQGNLIF

SEQ ID NO: 650432 - protein, 13 aa, Homo sapiens
  CDR3 for beta chain variable domain of TCR clone 325216 (TRBV2, TRBJ1-4)
CASSELGVEKLFL

SEQ ID NO: 650433 - protein, 15 aa, Homo sapiens
  CDR3 for alpha chain variable domain of TCR clone 325217 (TRAV21, TRAJ45)
CAVSYSGGGADGLTF

SEQ ID NO: 650434 - protein, 15 aa, Homo sapiens
  CDR3 for beta chain variable domain of TCR clone 325217 (TRBV20-1, TRBJ2-7)
CSARGPLAGGREQYF

SEQ ID NO: 650435 - protein, 12 aa, Homo sapiens
  CDR3 for alpha chain variable domain of TCR clone 325218 (TRAV21, TRAJ23)
CAVGPQGGKLIF

SEQ ID NO: 650436 - protein, 13 aa, Homo sapiens
  CDR3 for beta chain variable domain of TCR clone 325218 (TRBV10-3, TRBJ2-7)
CASKLAVNYEQYF

SEQ ID NO: 650437 - protein, 18 aa, Homo sapiens
  CDR3 for alpha chain variable domain of TCR clone 325219 (TRAV3, TRAJ32)
CAVRDIRGYGGATNKLIF

SEQ ID NO: 650438 - protein, 15 aa, Homo sapiens
  CDR3 for beta chain variable domain of TCR clone 325219 (TRBV12-4, TRBJ2-2)
CASSLGFRHTGELFF

SEQ ID NO: 650439 - protein, 14 aa, Homo sapiens
  CDR3 for alpha chain variable domain of TCR clone 325220 (TRAV12-1, TRAJ23)
CVVIVYNQGGKLIF

SEQ ID NO: 650440 - protein, 13 aa, Homo sapiens
  CDR3 for beta chain variable domain of TCR clone 325220 (TRBV11-2, TRBJ2-5)
CASSFSSQEPQYF

SEQ ID NO: 650441 - protein, 16 aa, Homo sapiens
  CDR3 for alpha chain variable domain of TCR clone 325221 (TRAV30, TRAJ24)
CGTEIVDADSWGKFQF

SEQ ID NO: 650442 - protein, 14 aa, Homo sapiens
  CDR3 for beta chain variable domain of TCR clone 325221 (TRBV19, TRBJ2-2)
CTSSGQGIAGELFF

SEQ ID NO: 650443 - protein, 12 aa, Homo sapiens
  CDR3 for alpha chain variable domain of TCR clone 325222 (TRAV36/DV7, TRAJ54)
CAVVRGAQKLAF

SEQ ID NO: 650444 - protein, 13 aa, Homo sapiens
  CDR3 for beta chain variable domain of TCR clone 325222 (TRBV20-1, TRBJ1-1)
CSARGGGNTEALF

SEQ ID NO: 650445 - protein, 17 aa, Homo sapiens
  CDR3 for alpha chain variable domain of TCR clone 325223 (TRAV17, TRAJ52)
CATERPSGGTSFGKLTF

SEQ ID NO: 650446 - protein, 13 aa, Homo sapiens
  CDR3 for beta chain variable domain of TCR clone 325223 (TRBV6-4, TRBJ1-5)
CASSADLNQPQHF

SEQ ID NO: 650447 - protein, 14 aa, Homo sapiens
  CDR3 for alpha chain variable domain of TCR clone 325224 (TRAV12-3, TRAJ57)
CARALEGGSEKLVF

SEQ ID NO: 650448 - protein, 17 aa, Homo sapiens
  CDR3 for beta chain variable domain of TCR clone 325224 (TRBV11-3, TRBJ2-3)
CASSLGLTGGDTDTQYF

SEQ ID NO: 650449 - protein, 13 aa, Homo sapiens
  CDR3 for alpha chain variable domain of TCR clone 325225 (TRAV8-3, TRAJ21)
CAVGLYNFNKFYF

SEQ ID NO: 650450 - protein, 13 aa, Homo sapiens
  CDR3 for beta chain variable domain of TCR clone 325225 (TRBV7-7, TRBJ2-5)
CASSLRAIETQYF

SEQ ID NO: 650451 - protein, 16 aa, Homo sapiens
  CDR3 for alpha chain variable domain of TCR clone 325226 (TRAV30, TRAJ24)
CGTELVDADSWGKFQL

SEQ ID NO: 650452 - protein, 14 aa, Homo sapiens
  CDR3 for beta chain variable domain of TCR clone 325226 (TRBV12-5, TRBJ2-5)
CASGSRTHQETQYF

SEQ ID NO: 650453 - protein, 14 aa, Homo sapiens
  CDR3 for alpha chain variable domain of TCR clone 325227 (TRAV12-2, TRAJ17)
CAVLFKAAGNKLTF

SEQ ID NO: 650454 - protein, 15 aa, Homo sapiens
  CDR3 for beta chain variable domain of TCR clone 325227 (TRBV28, TRBJ1-4)
CASSVSGSGLEKLFF

SEQ ID NO: 650455 - protein, 14 aa, Homo sapiens
  CDR3 for alpha chain variable domain of TCR clone 325228 (TRAV12-1, TRAJ17)
CVVNYKAAGNKLTF

SEQ ID NO: 650456 - protein, 13 aa, Homo sapiens
  CDR3 for beta chain variable domain of TCR clone 325228 (TRBV28, TRBJ2-7)
CASTPGLAGEQYF

SEQ ID NO: 650457 - protein, 19 aa, Homo sapiens
  CDR3 for alpha chain variable domain of TCR clone 325229 (TRAV26-1, TRAJ28)
CIVRVAHAYSGAGSYQLTF

SEQ ID NO: 650458 - protein, 15 aa, Homo sapiens
  CDR3 for beta chain variable domain of TCR clone 325229 (TRBV11-3, TRBJ2-3)
CASLKDGREGDTQYF

SEQ ID NO: 650459 - protein, 15 aa, Homo sapiens
  CDR3 for alpha chain variable domain of TCR clone 325230 (TRAV26-1, TRAJ44)
CIVRANTGTASKLTF

SEQ ID NO: 650460 - protein, 14 aa, Homo sapiens
  CDR3 for beta chain variable domain of TCR clone 325230 (TRBV15, TRBJ2-5)
CATSIGGLGETQYF

SEQ ID NO: 650461 - protein, 16 aa, Homo sapiens
  CDR3 for alpha chain variable domain of TCR clone 325231 (TRAV38-1, TRAJ56)
CAFMKRQTGANSKLTF

SEQ ID NO: 650462 - protein, 13 aa, Homo sapiens
  CDR3 for beta chain variable domain of TCR clone 325231 (TRBV19, TRBJ1-2)
CASSVPGQDGYTF

SEQ ID NO: 650463 - protein, 15 aa, Homo sapiens
  CDR3 for alpha chain variable domain of TCR clone 325232 (TRAV3, TRAJ22)
CAVRDRGGSARQLTF

SEQ ID NO: 650464 - protein, 15 aa, Homo sapiens
  CDR3 for beta chain variable domain of TCR clone 325232 (TRBV27, TRBJ2-1)
CASSDGGGASNEQFF

SEQ ID NO: 650465 - protein, 11 aa, Homo sapiens
  CDR3 for alpha chain variable domain of TCR clone 325233 (TRAV1-1, TRAJ23)
CAVRQGGKPIF

SEQ ID NO: 650466 - protein, 20 aa, Homo sapiens
  CDR3 for beta chain variable domain of TCR clone 325233 (TRBV7-8, TRBJ2-2)
CASSHLFPGPTIHIAGELFF

SEQ ID NO: 650467 - protein, 22 aa, Homo sapiens
  CDR3 for alpha chain variable domain of TCR clone 325234 (TRAV26-1, TRAJ38)
CIADNAGNNRKLLWGLVPSLAV

SEQ ID NO: 650468 - protein, 13 aa, Homo sapiens
  CDR3 for beta chain variable domain of TCR clone 325234 (TRBV20-1, TRBJ1-1)
CSARGGGNTEAFF

SEQ ID NO: 650469 - protein, 15 aa, Homo sapiens
  CDR3 for alpha chain variable domain of TCR clone 325235 (TRAV2, TRAJ9)
CAVEDRGTGSFKTIF

SEQ ID NO: 650470 - protein, 16 aa, Homo sapiens
  CDR3 for beta chain variable domain of TCR clone 325235 (TRBV24-1, TRBJ2-3)
SATSDPGTGATDTQYF

SEQ ID NO: 650471 - protein, 12 aa, Homo sapiens
  CDR3 for alpha chain variable domain of TCR clone 325236 (TRAV21, TRAJ13)
PGPSGGYQKVTF

SEQ ID NO: 650472 - protein, 15 aa, Homo sapiens
  CDR3 for beta chain variable domain of TCR clone 325236 (TRBV7-9, TRBJ1-6)
CASSSPGRGNSTLLF

SEQ ID NO: 650473 - protein, 13 aa, Homo sapiens
  CDR3 for alpha chain variable domain of TCR clone 325237 (TRAV2, TRAJ40)
CAVVTSGTYKYIF

SEQ ID NO: 650474 - protein, 15 aa, Homo sapiens
  CDR3 for beta chain variable domain of TCR clone 325237 (TRBV9, TRBJ2-2)
CASSDFAGASGELFF

SEQ ID NO: 650475 - protein, 12 aa, Homo sapiens
  CDR3 for alpha chain variable domain of TCR clone 325238 (TRAV13-1, TRAJ9)
LSSHTLFFKTIF

SEQ ID NO: 650476 - protein, 18 aa, Homo sapiens
  CDR3 for beta chain variable domain of TCR clone 325238 (TRBV11-2, TRBJ2-3)
CDSSLGGASRGAPNTQYF

SEQ ID NO: 650477 - protein, 18 aa, Homo sapiens
  CDR3 for alpha chain variable domain of TCR clone 325239 (TRAV21, TRAJ52)
CAVRPSPAGGTSYGKLTF

SEQ ID NO: 650478 - protein, 12 aa, Homo sapiens
  CDR3 for beta chain variable domain of TCR clone 325239 (TRBV7-3, TRBJ1-1)
CQRPGWGAEAFF

SEQ ID NO: 650479 - protein, 15 aa, Homo sapiens
  CDR3 for alpha chain variable domain of TCR clone 325240 (TRAV17, TRAJ56)
CATEPFTVANTKLTF

SEQ ID NO: 650480 - protein, 15 aa, Homo sapiens
  CDR3 for beta chain variable domain of TCR clone 325240 (TRBV28, TRBJ1-5)
CASSRTGGYVQPQHF

SEQ ID NO: 650481 - protein, 11 aa, Homo sapiens
  CDR3 for alpha chain variable domain of TCR clone 325241 (TRAV3, TRAJ21)
CAVCNSNKFYF

SEQ ID NO: 650482 - protein, 16 aa, Homo sapiens
  CDR3 for beta chain variable domain of TCR clone 325241 (TRBV19, TRBJ2-1)
CASSKAGPSSYNEQFF

SEQ ID NO: 650483 - protein, 15 aa, Homo sapiens
  CDR3 for alpha chain variable domain of TCR clone 325242 (TRAV3, TRAJ5)
CAVRDRKTGRRALTF

SEQ ID NO: 650484 - protein, 15 aa, Homo sapiens
  CDR3 for beta chain variable domain of TCR clone 325242 (TRBV7-9, TRBJ2-2)
CASGPLDTFPGGLFF

SEQ ID NO: 650485 - protein, 16 aa, Homo sapiens
  CDR3 for alpha chain variable domain of TCR clone 325243 (TRAV8-3, TRAJ13)
CAVGAYPSGGYKKVTF

SEQ ID NO: 650486 - protein, 14 aa, Homo sapiens
  CDR3 for beta chain variable domain of TCR clone 325243 (TRBV18, TRBJ2-5)
CASSPRASSETQYF

SEQ ID NO: 650487 - protein, 17 aa, Homo sapiens
  CDR3 for alpha chain variable domain of TCR clone 325244 (TRAV3, TRAJ42)
CAVRDRAYGGSQGNLTF

SEQ ID NO: 650488 - protein, 15 aa, Homo sapiens
  CDR3 for beta chain variable domain of TCR clone 325244 (TRBV6-6, TRBJ2-7)
CASSYSYGGSYEQYF

SEQ ID NO: 650489 - protein, 14 aa, Homo sapiens
  CDR3 for alpha chain variable domain of TCR clone 325245 (TRAV12-2, TRAJ17)
CAVLFKAAGNKLTF

SEQ ID NO: 650490 - protein, 14 aa, Homo sapiens
  CDR3 for beta chain variable domain of TCR clone 325245 (TRBV11-2, TRBJ2-5)
CASRPLAGRETQYF

SEQ ID NO: 650491 - protein, 10 aa, Homo sapiens
  CDR3 for alpha chain variable domain of TCR clone 325246 (TRAV36/DV7, TRAJ48)
CAVGNEKLTF

SEQ ID NO: 650492 - protein, 16 aa, Homo sapiens
  CDR3 for beta chain variable domain of TCR clone 325246 (TRBV15, TRBJ2-3)
CASRLSGGRAPDTQYF

SEQ ID NO: 650493 - protein, 15 aa, Homo sapiens
  CDR3 for alpha chain variable domain of TCR clone 325247 (TRAV14/DV4, TRAJ10)
CAMRELTGGGNKLTF

SEQ ID NO: 650494 - protein, 15 aa, Homo sapiens
  CDR3 for beta chain variable domain of TCR clone 325247 (TRBV7-2, TRBJ2-1)
CASSLVAGRYNEQFF

SEQ ID NO: 650495 - protein, 13 aa, Homo sapiens
  CDR3 for alpha chain variable domain of TCR clone 325248 (TRAV12-3, TRAJ9)
CAMSADGGFKTIF

SEQ ID NO: 650496 - protein, 15 aa, Homo sapiens
  CDR3 for beta chain variable domain of TCR clone 325248 (TRBV20-1, TRBJ2-7)
CSARDRVSGMDEQYF

SEQ ID NO: 650497 - protein, 14 aa, Homo sapiens
  CDR3 for alpha chain variable domain of TCR clone 325249 (TRAV1-2, TRAJ8)
CAVREDTGFHKLVF

SEQ ID NO: 650498 - protein, 14 aa, Homo sapiens
  CDR3 for beta chain variable domain of TCR clone 325249 (TRBV5-4, TRBJ1-1)
CASSLDSRRDEAFF

SEQ ID NO: 650499 - protein, 10 aa, Homo sapiens
  CDR3 for alpha chain variable domain of TCR clone 325250 (TRAV36/DV7, TRAJ49)
CALTGNQFYF

SEQ ID NO: 650500 - protein, 12 aa, Homo sapiens
  CDR3 for beta chain variable domain of TCR clone 325250 (TRBV12-5, TRBJ2-5)
CASGQGVETQYF

SEQ ID NO: 650501 - protein, 12 aa, Homo sapiens
  CDR3 for alpha chain variable domain of TCR clone 325251 (TRAV21, TRAJ12)
CAVMDSSYKLIF

SEQ ID NO: 650502 - protein, 16 aa, Homo sapiens
  CDR3 for beta chain variable domain of TCR clone 325251 (TRBV7-9, TRBJ2-5)
CASRLEIETRKETQYF

SEQ ID NO: 650503 - protein, 16 aa, Homo sapiens
  CDR3 for alpha chain variable domain of TCR clone 325252 (TRAV3, TRAJ37)
CAFRPHCSGNTGKLIF

SEQ ID NO: 650504 - protein, 16 aa, Homo sapiens
  CDR3 for beta chain variable domain of TCR clone 325252 (TRBV9, TRBJ1-2)
CASSVEEKVSPYGYTF

SEQ ID NO: 650505 - protein, 13 aa, Homo sapiens
  CDR3 for alpha chain variable domain of TCR clone 325253 (TRAV20, TRAJ21)
CAVEGYNFNKFYF

SEQ ID NO: 650506 - protein, 14 aa, Homo sapiens
  CDR3 for beta chain variable domain of TCR clone 325253 (TRBV3-1, TRBJ2-5)
CASSRGPEQETQYF

SEQ ID NO: 650507 - protein, 10 aa, Homo sapiens
  CDR3 for alpha chain variable domain of TCR clone 325254 (TRAV20, TRAJ22)
CAAPARQLTF

SEQ ID NO: 650508 - protein, 14 aa, Homo sapiens
  CDR3 for beta chain variable domain of TCR clone 325254 (TRBV19, TRBJ2-1)
CASSMGSGATEQFC

SEQ ID NO: 650509 - protein, 17 aa, Homo sapiens
  CDR3 for alpha chain variable domain of TCR clone 325255 (TRAV4, TRAJ13)
CIVGVQGSSGGYQEVTF

SEQ ID NO: 650510 - protein, 18 aa, Homo sapiens
  CDR3 for beta chain variable domain of TCR clone 325255 (TRBV15, TRBJ2-3)
CATSRDGARSWGTDTQYF

SEQ ID NO: 650511 - protein, 13 aa, Homo sapiens
  CDR3 for alpha chain variable domain of TCR clone 325256 (TRAV8-3, TRAJ48)
CAVVPFGNEKLTF

SEQ ID NO: 650512 - protein, 14 aa, Homo sapiens
  CDR3 for beta chain variable domain of TCR clone 325256 (TRBV18, TRBJ2-7)
CVSSPRGGAYEQYF

SEQ ID NO: 650513 - protein, 23 aa, Homo sapiens
  CDR3 for alpha chain variable domain of TCR clone 325257 (TRAV3, )
CAVRDCLNAGNNHIQNPDPAVYQ

SEQ ID NO: 650514 - protein, 19 aa, Homo sapiens
  CDR3 for beta chain variable domain of TCR clone 325257 (TRBV7-2, TRBJ2-3)
CASSFLSRNWGGGTDTQYS

SEQ ID NO: 650515 - protein, 18 aa, Homo sapiens
  CDR3 for alpha chain variable domain of TCR clone 325258 (TRAV21, TRAJ52)
CAVRPSPAGGTSYGKLTF

SEQ ID NO: 650516 - protein, 12 aa, Homo sapiens
  CDR3 for beta chain variable domain of TCR clone 325258 (TRBV11-3, TRBJ2-2)
CASSLGGGELFF

SEQ ID NO: 650517 - protein, 15 aa, Homo sapiens
  CDR3 for alpha chain variable domain of TCR clone 325259 (TRAV13-2, TRAJ45)
CAESDSGVGADGLTF

SEQ ID NO: 650518 - protein, 17 aa, Homo sapiens
  CDR3 for beta chain variable domain of TCR clone 325259 (TRBV27, TRBJ1-6)
CASSLDQLSSYNSPLHF

SEQ ID NO: 650519 - protein, 14 aa, Homo sapiens
  CDR3 for alpha chain variable domain of TCR clone 325260 (TRAV17, TRAJ31)
CATVLRNNNARLTF

SEQ ID NO: 650520 - protein, 14 aa, Homo sapiens
  CDR3 for beta chain variable domain of TCR clone 325260 (TRBV12-4, TRBJ2-5)
CASSLWQKQETQYF

SEQ ID NO: 650521 - protein, 13 aa, Homo sapiens
  CDR3 for alpha chain variable domain of TCR clone 325261 (TRAV14/DV4, TRAJ49)
CAMVENTGNQFYF

SEQ ID NO: 650522 - protein, 16 aa, Homo sapiens
  CDR3 for beta chain variable domain of TCR clone 325261 (TRBV20-1, TRBJ1-4)
CSAPGQGLLTNEKLFF

SEQ ID NO: 650523 - protein, 18 aa, Homo sapiens
  CDR3 for alpha chain variable domain of TCR clone 325262 (TRAV21, TRAJ52)
CAVRPSPPGGTSYGKLPF

SEQ ID NO: 650524 - protein, 17 aa, Homo sapiens
  CDR3 for beta chain variable domain of TCR clone 325262 (TRBV13, TRBJ2-3)
CASSLSRVAGGRNTQYF

SEQ ID NO: 650525 - protein, 14 aa, Homo sapiens
  CDR3 for alpha chain variable domain of TCR clone 325263 (TRAV1-2, TRAJ8)
CAVREDTGFQKLVF

SEQ ID NO: 650526 - protein, 14 aa, Homo sapiens
  CDR3 for beta chain variable domain of TCR clone 325263 (TRBV7-9, TRBJ1-1)
CASTPLESYTEAFF

SEQ ID NO: 650527 - protein, 17 aa, Homo sapiens
  CDR3 for alpha chain variable domain of TCR clone 325264 (TRAV3, TRAJ6)
CAARDGPRAGGSYIPTF

SEQ ID NO: 650528 - protein, 14 aa, Homo sapiens
  CDR3 for beta chain variable domain of TCR clone 325264 (TRBV7-2, TRBJ2-7)
CASSLKTSFYEQYF

SEQ ID NO: 650529 - protein, 16 aa, Homo sapiens
  CDR3 for alpha chain variable domain of TCR clone 325265 (TRAV4, TRAJ5)
CLVGPDHGHGQESTYF

SEQ ID NO: 650530 - protein, 13 aa, Homo sapiens
  CDR3 for beta chain variable domain of TCR clone 325265 (TRBV24-1, TRBJ2-3)
CATSTGGTDTQYF

SEQ ID NO: 650531 - protein, 13 aa, Homo sapiens
  CDR3 for alpha chain variable domain of TCR clone 325266 (TRAV27, TRAJ6)
CAGGTRGRYIPTF

SEQ ID NO: 650532 - protein, 13 aa, Homo sapiens
  CDR3 for beta chain variable domain of TCR clone 325266 (TRBV4-1, TRBJ2-2)
CASSQENTGELFF

SEQ ID NO: 650533 - protein, 14 aa, Homo sapiens
  CDR3 for alpha chain variable domain of TCR clone 325267 (TRAV23/DV6, TRAJ22)
CAASVSGSARQLTF

SEQ ID NO: 650534 - protein, 16 aa, Homo sapiens
  CDR3 for beta chain variable domain of TCR clone 325267 (TRBV19, TRBJ2-2)
CASSFPGQGLAGELFL

SEQ ID NO: 650535 - protein, 12 aa, Homo sapiens
  CDR3 for alpha chain variable domain of TCR clone 325268 (TRAV36/DV7, TRAJ54)
CAVVLGAQKLVF

SEQ ID NO: 650536 - protein, 18 aa, Homo sapiens
  CDR3 for beta chain variable domain of TCR clone 325268 (TRBV20-1, TRBJ2-3)
CSASGLAGGPGTTDTQYF

SEQ ID NO: 650537 - protein, 17 aa, Homo sapiens
  CDR3 for alpha chain variable domain of TCR clone 325269 (TRAV23/DV6, TRAJ58)
CAARLLRGETRGSRLTF

SEQ ID NO: 650538 - protein, 15 aa, Homo sapiens
  CDR3 for beta chain variable domain of TCR clone 325269 (TRBV9, TRBJ1-6)
CASSVAGTGDSPLHF

SEQ ID NO: 650539 - protein, 14 aa, Homo sapiens
  CDR3 for alpha chain variable domain of TCR clone 325270 (TRAV1-2, TRAJ8)
CAVREDTGSQKLVF

SEQ ID NO: 650540 - protein, 16 aa, Homo sapiens
  CDR3 for beta chain variable domain of TCR clone 325270 (TRBV28, TRBJ1-4)
CACSPPYRGRSEKLFF

SEQ ID NO: 650541 - protein, 17 aa, Homo sapiens
  CDR3 for alpha chain variable domain of TCR clone 325271 (TRAV8-6, TRAJ58)
CAVSSWGGETSGSRLTF

SEQ ID NO: 650542 - protein, 15 aa, Homo sapiens
  CDR3 for beta chain variable domain of TCR clone 325271 (TRBV7-3, TRBJ2-1)
CASSPTGGGEVEQFF

SEQ ID NO: 650543 - protein, 18 aa, Homo sapiens
  CDR3 for alpha chain variable domain of TCR clone 325272 (TRAV21, TRAJ52)
CAVRPSPAGGTSYGKLTF

SEQ ID NO: 650544 - protein, 19 aa, Homo sapiens
  CDR3 for beta chain variable domain of TCR clone 325272 (TRBV2, TRBJ2-2)
CASSQPGLAGGGNTGELFF

SEQ ID NO: 650545 - protein, 12 aa, Homo sapiens
  CDR3 for alpha chain variable domain of TCR clone 325273 (TRAV27, TRAJ9)
CAGESGGFKTIF

SEQ ID NO: 650546 - protein, 18 aa, Homo sapiens
  CDR3 for beta chain variable domain of TCR clone 325273 (TRBV7-9, TRBJ2-7)
CASSLTTSGSRTWYEQYF

SEQ ID NO: 650547 - protein, 17 aa, Homo sapiens
  CDR3 for alpha chain variable domain of TCR clone 325274 (TRAV3, TRAJ42)
CAVGDRDYGGSQGNLIF

SEQ ID NO: 650548 - protein, 14 aa, Homo sapiens
  CDR3 for beta chain variable domain of TCR clone 325274 (TRBV7-2, TRBJ2-5)
CASSPRGSSETQYF

SEQ ID NO: 650549 - protein, 11 aa, Homo sapiens
  CDR3 for alpha chain variable domain of TCR clone 325275 (TRAV1-2, TRAJ31)
CAVNNNARLMF

SEQ ID NO: 650550 - protein, 15 aa, Homo sapiens
  CDR3 for beta chain variable domain of TCR clone 325275 (TRBV28, TRBJ1-5)
CASSRTGGYVQPQHF

SEQ ID NO: 650551 - protein, 12 aa, Homo sapiens
  CDR3 for alpha chain variable domain of TCR clone 325276 (TRAV12-1, TRAJ40)
CVVYSGTYKYIF

SEQ ID NO: 650552 - protein, 15 aa, Homo sapiens
  CDR3 for beta chain variable domain of TCR clone 325276 (TRBV11-2, TRBJ2-3)
CASSVTSGSTDTQYF

SEQ ID NO: 650553 - protein, 12 aa, Homo sapiens
  CDR3 for alpha chain variable domain of TCR clone 325277 (TRAV2, TRAJ33)
CAVWGSNYQLIW

SEQ ID NO: 650554 - protein, 16 aa, Homo sapiens
  CDR3 for beta chain variable domain of TCR clone 325277 (TRBV20-1, TRBJ1-4)
CSAPGQGLLTNGKLFF

SEQ ID NO: 650555 - protein, 14 aa, Homo sapiens
  CDR3 for alpha chain variable domain of TCR clone 325278 (TRAV12-3, TRAJ10)
SHLPLTGGGNKLTF

SEQ ID NO: 650556 - protein, 13 aa, Homo sapiens
  CDR3 for beta chain variable domain of TCR clone 325278 (TRBV2, TRBJ1-6)
CADSGSYNSPLHC

SEQ ID NO: 650557 - protein, 15 aa, Homo sapiens
  CDR3 for alpha chain variable domain of TCR clone 325279 (TRAV17, TRAJ57)
CATGPSQGGPEKLVF

SEQ ID NO: 650558 - protein, 20 aa, Homo sapiens
  CDR3 for beta chain variable domain of TCR clone 325279 (TRBV7-8, TRBJ2-2)
CASSHLFPGPTIHITGELFF

SEQ ID NO: 650559 - protein, 17 aa, Homo sapiens
  CDR3 for alpha chain variable domain of TCR clone 325280 (TRAV3, TRAJ6)
CAVGDGPRAGGSYIPTF

SEQ ID NO: 650560 - protein, 14 aa, Homo sapiens
  CDR3 for beta chain variable domain of TCR clone 325280 (TRBV2, TRBJ2-7)
CASSLTSGGYEQYF

SEQ ID NO: 650561 - protein, 15 aa, Homo sapiens
  CDR3 for alpha chain variable domain of TCR clone 325281 (TRAV12-1, TRAJ9)
CVVSFGDTGGFKTIF

SEQ ID NO: 650562 - protein, 19 aa, Homo sapiens
  CDR3 for beta chain variable domain of TCR clone 325281 (TRBV25-1, TRBJ2-2)
CAILVYRVDRGRKTGELFV

SEQ ID NO: 650563 - protein, 12 aa, Homo sapiens
  CDR3 for alpha chain variable domain of TCR clone 325282 (TRAV8-3, TRAJ20)
CAVCANDYKLSF

SEQ ID NO: 650564 - protein, 16 aa, Homo sapiens
  CDR3 for beta chain variable domain of TCR clone 325282 (TRBV19, TRBJ2-2)
CASLSPGTGATGELFF

SEQ ID NO: 650565 - protein, 14 aa, Homo sapiens
  CDR3 for alpha chain variable domain of TCR clone 325283 (TRAV1-2, TRAJ16)
CAVNRFSDGQKLLF

SEQ ID NO: 650566 - protein, 13 aa, Homo sapiens
  CDR3 for beta chain variable domain of TCR clone 325283 (TRBV10-3, TRBJ2-7)
CASTLAVNYEQYF

SEQ ID NO: 650567 - protein, 11 aa, Homo sapiens
  CDR3 for alpha chain variable domain of TCR clone 325284 (TRAV1-2, TRAJ31)
CAVNNNARLMF

SEQ ID NO: 650568 - protein, 13 aa, Homo sapiens
  CDR3 for beta chain variable domain of TCR clone 325284 (TRBV9, TRBJ2-1)
CASSPSGGNEQFF

SEQ ID NO: 650569 - protein, 13 aa, Homo sapiens
  CDR3 for alpha chain variable domain of TCR clone 325285 (TRAV8-6, TRAJ49)
CAVITNAGNQFYF

SEQ ID NO: 650570 - protein, 13 aa, Homo sapiens
  CDR3 for beta chain variable domain of TCR clone 325285 (TRBV19, TRBJ2-2)
CASQEGIHGELFF

SEQ ID NO: 650571 - protein, 13 aa, Homo sapiens
  CDR3 for alpha chain variable domain of TCR clone 325286 (TRAV8-3, TRAJ43)
CAVVPYNNNDMRF

SEQ ID NO: 650572 - protein, 15 aa, Homo sapiens
  CDR3 for beta chain variable domain of TCR clone 325286 (TRBV20-1, TRBJ2-7)
CSARDRVSGMDEQYF

SEQ ID NO: 650573 - protein, 14 aa, Homo sapiens
  CDR3 for alpha chain variable domain of TCR clone 325287 (TRAV17, TRAJ35)
CATDRPGFGNVLHC

SEQ ID NO: 650574 - protein, 13 aa, Homo sapiens
  CDR3 for beta chain variable domain of TCR clone 325287 (TRBV6-5, TRBJ2-7)
CASRTSGIHEQYF

SEQ ID NO: 650575 - protein, 12 aa, Homo sapiens
  CDR3 for alpha chain variable domain of TCR clone 325288 (TRAV26-1, TRAJ23)
CIVTPQGGKLIF

SEQ ID NO: 650576 - protein, 15 aa, Homo sapiens
  CDR3 for beta chain variable domain of TCR clone 325288 (TRBV2, TRBJ2-7)
CASSENRQGKGEQYF

SEQ ID NO: 650577 - protein, 11 aa, Homo sapiens
  CDR3 for alpha chain variable domain of TCR clone 325289 (TRAV21, TRAJ34)
CAHYNTDKLIF

SEQ ID NO: 650578 - protein, 17 aa, Homo sapiens
  CDR3 for beta chain variable domain of TCR clone 325289 (TRBV15, TRBJ1-4)
CATSRYGTGDPNEKLFF

SEQ ID NO: 650579 - protein, 13 aa, Homo sapiens
  CDR3 for alpha chain variable domain of TCR clone 325290 (TRAV6, TRAJ37)
CSRSRSNTGKLIF

SEQ ID NO: 650580 - protein, 13 aa, Homo sapiens
  CDR3 for beta chain variable domain of TCR clone 325290 (TRBV12-4, TRBJ1-2)
CASSLRQGKGYTF

SEQ ID NO: 650581 - protein, 12 aa, Homo sapiens
  CDR3 for alpha chain variable domain of TCR clone 325291 (TRAV21, TRAJ27)
CAANTNAGKSTF

SEQ ID NO: 650582 - protein, 15 aa, Homo sapiens
  CDR3 for beta chain variable domain of TCR clone 325291 (TRBV29-1, TRBJ1-4)
CSVVGIGDINENLFF

SEQ ID NO: 650583 - protein, 16 aa, Homo sapiens
  CDR3 for alpha chain variable domain of TCR clone 325292 (TRAV30, TRAJ24)
CVTEIVDADSWGKFQF

SEQ ID NO: 650584 - protein, 16 aa, Homo sapiens
  CDR3 for beta chain variable domain of TCR clone 325292 (TRBV6-3, TRBJ1-1)
CASTDLGTVPNTEAFF

SEQ ID NO: 650585 - protein, 14 aa, Homo sapiens
  CDR3 for alpha chain variable domain of TCR clone 325293 (TRAV13-1, TRAJ50)
CAARSKTSYDKVIF

SEQ ID NO: 650586 - protein, 17 aa, Homo sapiens
  CDR3 for beta chain variable domain of TCR clone 325293 (TRBV13, TRBJ2-3)
CASSLARVAGGRNTQYF

SEQ ID NO: 650587 - protein, 18 aa, Homo sapiens
  CDR3 for alpha chain variable domain of TCR clone 325294 (TRAV26-1, TRAJ37)
CIVRVDMHGPSNTGKLIF

SEQ ID NO: 650588 - protein, 15 aa, Homo sapiens
  CDR3 for beta chain variable domain of TCR clone 325294 (TRBV20-1, TRBJ2-7)
CSARVLASPLYEQYF

SEQ ID NO: 650589 - protein, 11 aa, Homo sapiens
  CDR3 for alpha chain variable domain of TCR clone 325295 (TRAV10, TRAJ20)
CVDLNDYKLSF

SEQ ID NO: 650590 - protein, 13 aa, Homo sapiens
  CDR3 for beta chain variable domain of TCR clone 325295 (TRBV19, TRBJ1-1)
CASSGQVNTEAFF

SEQ ID NO: 650591 - protein, 13 aa, Homo sapiens
  CDR3 for alpha chain variable domain of TCR clone 325296 (TRAV36/DV7, TRAJ26)
CAVADNYGQNFVF

SEQ ID NO: 650592 - protein, 15 aa, Homo sapiens
  CDR3 for beta chain variable domain of TCR clone 325296 (TRBV5-1, TRBJ2-1)
CASSPPRAPYNEQFF

SEQ ID NO: 650593 - protein, 14 aa, Homo sapiens
  CDR3 for alpha chain variable domain of TCR clone 325297 (TRAV12-2, TRAJ13)
CAVKKTGGYQKVTF

SEQ ID NO: 650594 - protein, 17 aa, Homo sapiens
  CDR3 for beta chain variable domain of TCR clone 325297 (TRBV4-1, TRBJ1-4)
CASSPEGPRGVEEKLFF

SEQ ID NO: 650595 - protein, 18 aa, Homo sapiens
  CDR3 for alpha chain variable domain of TCR clone 325298 (TRAV21, TRAJ52)
CAVRPSPAGGTSYGKLTF

SEQ ID NO: 650596 - protein, 17 aa, Homo sapiens
  CDR3 for beta chain variable domain of TCR clone 325298 (TRBV13, TRBJ2-3)
CTSSRSRVAGGRNTQYF

SEQ ID NO: 650597 - protein, 13 aa, Homo sapiens
  CDR3 for alpha chain variable domain of TCR clone 325299 (TRAV8-3, TRAJ28)
CAVGAVGSYLLTF

SEQ ID NO: 650598 - protein, 17 aa, Homo sapiens
  CDR3 for beta chain variable domain of TCR clone 325299 (TRBV11-2, TRBJ2-1)
CASSLYPPGVEYNEQFF

SEQ ID NO: 650599 - protein, 13 aa, Homo sapiens
  CDR3 for alpha chain variable domain of TCR clone 325300 (TRAV20, TRAJ15)
CATINQAGTALTF

SEQ ID NO: 650600 - protein, 13 aa, Homo sapiens
  CDR3 for beta chain variable domain of TCR clone 325300 (TRBV12-4, TRBJ2-1)
CASRQPSNNEQFF

SEQ ID NO: 650601 - protein, 13 aa, Homo sapiens
  CDR3 for alpha chain variable domain of TCR clone 325301 (TRAV27, TRAJ37)
CAGGPSNTGKLIF

SEQ ID NO: 650602 - protein, 16 aa, Homo sapiens
  CDR3 for beta chain variable domain of TCR clone 325301 (TRBV12-5, TRBJ2-5)
CASGPRTSGNQETQYF

SEQ ID NO: 650603 - protein, 13 aa, Homo sapiens
  CDR3 for alpha chain variable domain of TCR clone 325302 (TRAV16, TRAJ34)
CALSPYNTDKPIF

SEQ ID NO: 650604 - protein, 16 aa, Homo sapiens
  CDR3 for beta chain variable domain of TCR clone 325302 (TRBV19, TRBJ2-2)
CASRSPGTGATGELFF

SEQ ID NO: 650605 - protein, 14 aa, Homo sapiens
  CDR3 for alpha chain variable domain of TCR clone 325303 (TRAV13-1, TRAJ52)
CAALDGTSYGKLTF

SEQ ID NO: 650606 - protein, 16 aa, Homo sapiens
  CDR3 for beta chain variable domain of TCR clone 325303 (TRBV7-9, TRBJ2-3)
CASSPWREVGTDTQYF

SEQ ID NO: 650607 - protein, 12 aa, Homo sapiens
  CDR3 for alpha chain variable domain of TCR clone 325304 (TRAV21, TRAJ31)
CVLAGNNARLMF

SEQ ID NO: 650608 - protein, 16 aa, Homo sapiens
  CDR3 for beta chain variable domain of TCR clone 325304 (TRBV27, TRBJ2-5)
CASSFGPGGTKETQYF

SEQ ID NO: 650609 - protein, 13 aa, Homo sapiens
  CDR3 for alpha chain variable domain of TCR clone 325305 (TRAV2, TRAJ40)
CAVVTSGTYKYIF

SEQ ID NO: 650610 - protein, 12 aa, Homo sapiens
  CDR3 for beta chain variable domain of TCR clone 325305 (TRBV27, TRBJ2-5)
CASSPTGETQYF

SEQ ID NO: 650611 - protein, 14 aa, Homo sapiens
  CDR3 for alpha chain variable domain of TCR clone 325306 (TRAV8-3, TRAJ35)
CAVGRGGFGNVLHC

SEQ ID NO: 650612 - protein, 17 aa, Homo sapiens
  CDR3 for beta chain variable domain of TCR clone 325306 (TRBV7-8, TRBJ2-6)
CASSAGTGGAGANVLTF

SEQ ID NO: 650613 - protein, 17 aa, Homo sapiens
  CDR3 for alpha chain variable domain of TCR clone 325307 (TRAV3, TRAJ12)
CAVRDGGRVDSSYKLIF

SEQ ID NO: 650614 - protein, 13 aa, Homo sapiens
  CDR3 for beta chain variable domain of TCR clone 325307 (TRBV4-2, TRBJ1-1)
CASSQAGNTEAFF

SEQ ID NO: 650615 - protein, 15 aa, Homo sapiens
  CDR3 for alpha chain variable domain of TCR clone 325308 (TRAV3, TRAJ42)
CAVRGGTGSQGNLTF

SEQ ID NO: 650616 - protein, 14 aa, Homo sapiens
  CDR3 for beta chain variable domain of TCR clone 325308 (TRBV19, TRBJ1-2)
CASSSLFARDVYTF

SEQ ID NO: 650617 - protein, 16 aa, Homo sapiens
  CDR3 for alpha chain variable domain of TCR clone 325309 (TRAV16, TRAJ4)
CALSRMFSGGYNKMIF

SEQ ID NO: 650618 - protein, 14 aa, Homo sapiens
  CDR3 for beta chain variable domain of TCR clone 325309 (TRBV4-1, TRBJ2-2)
CASSQAVNTGELFF

SEQ ID NO: 650619 - protein, 15 aa, Homo sapiens
  CDR3 for alpha chain variable domain of TCR clone 325310 (TRAV26-1, TRAJ29)
CIVRVEGSGNTTLVF

SEQ ID NO: 650620 - protein, 16 aa, Homo sapiens
  CDR3 for beta chain variable domain of TCR clone 325310 (TRBV29-1, TRBJ2-7)
CSVEVVGTSGSYEQYF

SEQ ID NO: 650621 - protein, 15 aa, Homo sapiens
  CDR3 for alpha chain variable domain of TCR clone 325311 (TRAV8-2, TRAJ4)
CVVRGASGGYNKLIF

SEQ ID NO: 650622 - protein, 12 aa, Homo sapiens
  CDR3 for beta chain variable domain of TCR clone 325311 (TRBV12-4, TRBJ2-1)
CASSPGRNEQFF

SEQ ID NO: 650623 - protein, 13 aa, Homo sapiens
  CDR3 for alpha chain variable domain of TCR clone 325312 (TRAV21, TRAJ57)
CAVTQGGSEKLVF

SEQ ID NO: 650624 - protein, 17 aa, Homo sapiens
  CDR3 for beta chain variable domain of TCR clone 325312 (TRBV13, TRBJ2-3)
CASSPSRVAGGRNTQYF

SEQ ID NO: 650625 - protein, 15 aa, Homo sapiens
  CDR3 for alpha chain variable domain of TCR clone 325313 (TRAV26-2, TRAJ50)
CILRDEETYYDKVIF

SEQ ID NO: 650626 - protein, 14 aa, Homo sapiens
  CDR3 for beta chain variable domain of TCR clone 325313 (TRBV23-1, TRBJ2-7)
CASSPTVTSSTSGR

SEQ ID NO: 650627 - protein, 12 aa, Homo sapiens
  CDR3 for alpha chain variable domain of TCR clone 325314 (TRAV27, TRAJ35)
CAGADFGNVLHC

SEQ ID NO: 650628 - protein, 13 aa, Homo sapiens
  CDR3 for beta chain variable domain of TCR clone 325314 (TRBV7-9, TRBJ2-2)
CASSLDPTGELFF

SEQ ID NO: 650629 - protein, 13 aa, Homo sapiens
  CDR3 for alpha chain variable domain of TCR clone 325315 (TRAV2, TRAJ15)
CAVASQAGTALIF

SEQ ID NO: 650630 - protein, 16 aa, Homo sapiens
  CDR3 for beta chain variable domain of TCR clone 325315 (TRBV27, TRBJ2-5)
CASSFGPGGTKETQYF

SEQ ID NO: 650631 - protein, 18 aa, Homo sapiens
  CDR3 for alpha chain variable domain of TCR clone 325316 (TRAV3, TRAJ17)
CAVRARRGGRSCRQQSNF

SEQ ID NO: 650632 - protein, 14 aa, Homo sapiens
  CDR3 for beta chain variable domain of TCR clone 325316 (TRBV4-1, TRBJ2-2)
CASSQAVNTGELFF

SEQ ID NO: 650633 - protein, 15 aa, Homo sapiens
  CDR3 for alpha chain variable domain of TCR clone 325317 (TRAV8-6, TRAJ36)
CAVSGGYTGANNLFF

SEQ ID NO: 650634 - protein, 15 aa, Homo sapiens
  CDR3 for beta chain variable domain of TCR clone 325317 (TRBV29-1, TRBJ2-1)
CSVGRHALFYNEQFF

SEQ ID NO: 650635 - protein, 16 aa, Homo sapiens
  CDR3 for alpha chain variable domain of TCR clone 325318 (TRAV3, TRAJ21)
CAVRDIERGNFNKFYF

SEQ ID NO: 650636 - protein, 17 aa, Homo sapiens
  CDR3 for beta chain variable domain of TCR clone 325318 (TRBV7-3, TRBJ2-3)
CASSRGLAGEVPDTQYF

SEQ ID NO: 650637 - protein, 15 aa, Homo sapiens
  CDR3 for alpha chain variable domain of TCR clone 325319 (TRAV21, TRAJ53)
CAALNSGGSNYKLTF

SEQ ID NO: 650638 - protein, 15 aa, Homo sapiens
  CDR3 for beta chain variable domain of TCR clone 325319 (TRBV20-1, TRBJ2-7)
CSARDRVSGMDEHYF

SEQ ID NO: 650639 - protein, 17 aa, Homo sapiens
  CDR3 for alpha chain variable domain of TCR clone 325320 (TRAV4, TRAJ42)
CLVGVLNYGGSQGNPIF

SEQ ID NO: 650640 - protein, 17 aa, Homo sapiens
  CDR3 for beta chain variable domain of TCR clone 325320 (TRBV20-1, TRBJ2-1)
CSASSSGLAGSYNEQFF

SEQ ID NO: 650641 - protein, 15 aa, Homo sapiens
  CDR3 for alpha chain variable domain of TCR clone 325321 (TRAV34, TRAJ38)
CGADFTPGNNRKLIW

SEQ ID NO: 650642 - protein, 12 aa, Homo sapiens
  CDR3 for beta chain variable domain of TCR clone 325321 (TRBV7-9, TRBJ2-7)
CASSFGSYEQYF

SEQ ID NO: 650643 - protein, 11 aa, Homo sapiens
  CDR3 for alpha chain variable domain of TCR clone 325322 (TRAV12-3, TRAJ27)
CAMANAGKSTF

SEQ ID NO: 650644 - protein, 16 aa, Homo sapiens
  CDR3 for beta chain variable domain of TCR clone 325322 (TRBV27, TRBJ2-2)
CASSFRGLVRTGELFF

SEQ ID NO: 650645 - protein, 12 aa, Homo sapiens
  CDR3 for alpha chain variable domain of TCR clone 325323 (TRAV16, TRAJ58)
CALKRGNQWLQV

SEQ ID NO: 650646 - protein, 18 aa, Homo sapiens
  CDR3 for beta chain variable domain of TCR clone 325323 (TRBV11-2, TRBJ2-3)
CASSLGGASRGAPNTQYF

SEQ ID NO: 650647 - protein, 12 aa, Homo sapiens
  CDR3 for alpha chain variable domain of TCR clone 325324 (TRAV21, TRAJ23)
CAVMLQGGKLIF

SEQ ID NO: 650648 - protein, 16 aa, Homo sapiens
  CDR3 for beta chain variable domain of TCR clone 325324 (TRBV11-2, TRBJ1-2)
CASSPSGREANYGYTF

SEQ ID NO: 650649 - protein, 13 aa, Homo sapiens
  CDR3 for alpha chain variable domain of TCR clone 325325 (TRAV30, TRAJ39)
CGTEKNGGNMLTF

SEQ ID NO: 650650 - protein, 12 aa, Homo sapiens
  CDR3 for beta chain variable domain of TCR clone 325325 (TRBV12-4, TRBJ2-5)
CASSSAQETQYF

SEQ ID NO: 650651 - protein, 19 aa, Homo sapiens
  CDR3 for alpha chain variable domain of TCR clone 325326 (TRAV2, TRAJ20)
ILQVREADAAVYRDCKLSF

SEQ ID NO: 650652 - protein, 18 aa, Homo sapiens
  CDR3 for beta chain variable domain of TCR clone 325326 (TRBV20-1, TRBJ2-3)
CSAYGLAGGPGTTDTQYF

SEQ ID NO: 650653 - protein, 14 aa, Homo sapiens
  CDR3 for alpha chain variable domain of TCR clone 325327 (TRAV16, TRAJ17)
CAPRIKAAGNKLTF

SEQ ID NO: 650654 - protein, 16 aa, Homo sapiens
  CDR3 for beta chain variable domain of TCR clone 325327 (TRBV12-5, TRBJ2-5)
CASGPRTSGNQETQSF

SEQ ID NO: 650655 - protein, 15 aa, Homo sapiens
  CDR3 for alpha chain variable domain of TCR clone 325328 (TRAV8-3, TRAJ41)
CAVWSNSNSGYAPNF

SEQ ID NO: 650656 - protein, 17 aa, Homo sapiens
  CDR3 for beta chain variable domain of TCR clone 325328 (TRBV25-1, TRBJ2-1)
CASSAYGQGRGVYEQFF

SEQ ID NO: 650657 - protein, 17 aa, Homo sapiens
  CDR3 for alpha chain variable domain of TCR clone 325329 (TRAV3, TRAJ38)
YAVRGCLNAGNNRKLIW

SEQ ID NO: 650658 - protein, 16 aa, Homo sapiens
  CDR3 for beta chain variable domain of TCR clone 325329 (TRBV20-1, TRBJ1-4)
CSAPGQGLLTNEKLFF

SEQ ID NO: 650659 - protein, 14 aa, Homo sapiens
  CDR3 for alpha chain variable domain of TCR clone 325330 (TRAV12-2, TRAJ17)
CAVLFKAAGNKLTF

SEQ ID NO: 650660 - protein, 12 aa, Homo sapiens
  CDR3 for beta chain variable domain of TCR clone 325330 (TRBV19, TRBJ1-4)
CASKDWPGGLFF

SEQ ID NO: 650661 - protein, 17 aa, Homo sapiens
  CDR3 for alpha chain variable domain of TCR clone 325331 (TRAV3, TRAJ42)
CAVRDRDYGGSQGNLIF

SEQ ID NO: 650662 - protein, 17 aa, Homo sapiens
  CDR3 for beta chain variable domain of TCR clone 325331 (TRBV11-2, TRBJ2-1)
CASSLALAEFGRNEQFF

SEQ ID NO: 650663 - protein, 13 aa, Homo sapiens
  CDR3 for alpha chain variable domain of TCR clone 325332 (TRAV29/DV5, TRAJ44)
CAASTGTASKLTF

SEQ ID NO: 650664 - protein, 16 aa, Homo sapiens
  CDR3 for beta chain variable domain of TCR clone 325332 (TRBV13, TRBJ2-2)
CASSPRTGEHTGELFF

SEQ ID NO: 650665 - protein, 14 aa, Homo sapiens
  CDR3 for alpha chain variable domain of TCR clone 325333 (TRAV17, TRAJ16)
CATADFSDGQKLLF

SEQ ID NO: 650666 - protein, 15 aa, Homo sapiens
  CDR3 for beta chain variable domain of TCR clone 325333 (TRBV18, TRBJ2-1)
CASSPPGASYNEQLF

SEQ ID NO: 650667 - protein, 15 aa, Homo sapiens
  CDR3 for alpha chain variable domain of TCR clone 325334 (TRAV34, TRAJ38)
CGADFTAGNNSKLIW

SEQ ID NO: 650668 - protein, 16 aa, Homo sapiens
  CDR3 for beta chain variable domain of TCR clone 325334 (TRBV12-5, TRBJ2-5)
CASGPRTSGNQETQYF

SEQ ID NO: 650669 - protein, 12 aa, Homo sapiens
  CDR3 for alpha chain variable domain of TCR clone 325335 (TRAV21, TRAJ49)
CAVTNTGNQFFF

SEQ ID NO: 650670 - protein, 17 aa, Homo sapiens
  CDR3 for beta chain variable domain of TCR clone 325335 (TRBV13, TRBJ2-3)
CASSLSRVAGGRNTQYF

SEQ ID NO: 650671 - protein, 14 aa, Homo sapiens
  CDR3 for alpha chain variable domain of TCR clone 325336 (TRAV1-2, TRAJ16)
CAVRGFSDGQKLLF

SEQ ID NO: 650672 - protein, 14 aa, Homo sapiens
  CDR3 for beta chain variable domain of TCR clone 325336 (TRBV7-2, TRBJ1-1)
CASSFLTGTTEAFF

SEQ ID NO: 650673 - protein, 12 aa, Homo sapiens
  CDR3 for alpha chain variable domain of TCR clone 325337 (TRAV8-3, TRAJ20)
CAVGANDYKLSF

SEQ ID NO: 650674 - protein, 14 aa, Homo sapiens
  CDR3 for beta chain variable domain of TCR clone 325337 (TRBV7-8, TRBJ2-3)
CASSLEAGTDTQYF

SEQ ID NO: 650675 - protein, 13 aa, Homo sapiens
  CDR3 for alpha chain variable domain of TCR clone 325338 (TRAV9-2, TRAJ53)
CALSGGSNYKLTF

SEQ ID NO: 650676 - protein, 16 aa, Homo sapiens
  CDR3 for beta chain variable domain of TCR clone 325338 (TRBV12-4, TRBJ2-7)
CASSPEGQGSSYEQYF

SEQ ID NO: 650677 - protein, 14 aa, Homo sapiens
  CDR3 for alpha chain variable domain of TCR clone 325339 (TRAV23/DV6, TRAJ8)
CAASKNAGFQKLVF

SEQ ID NO: 650678 - protein, 16 aa, Homo sapiens
  CDR3 for beta chain variable domain of TCR clone 325339 (TRBV4-1, TRBJ2-6)
CASSQVGDPGANVLTF

SEQ ID NO: 650679 - protein, 13 aa, Homo sapiens
  CDR3 for alpha chain variable domain of TCR clone 325340 (TRAV12-2, TRAJ20)
CAVYPSNDYKLSF

SEQ ID NO: 650680 - protein, 13 aa, Homo sapiens
  CDR3 for beta chain variable domain of TCR clone 325340 (TRBV7-9, TRBJ2-3)
CASSPGSTDTQYF

SEQ ID NO: 650681 - protein, 16 aa, Homo sapiens
  CDR3 for alpha chain variable domain of TCR clone 325341 (TRAV3, TRAJ10)
CAVRDMMAGGGNKRTV

SEQ ID NO: 650682 - protein, 17 aa, Homo sapiens
  CDR3 for beta chain variable domain of TCR clone 325341 (TRBV6-5, TRBJ2-4)
CASRPTPGQGSKNIQYF

SEQ ID NO: 650683 - protein, 16 aa, Homo sapiens
  CDR3 for alpha chain variable domain of TCR clone 325342 (TRAV30, TRAJ24)
CGTEIVEADSWGKFQF

SEQ ID NO: 650684 - protein, 14 aa, Homo sapiens
  CDR3 for beta chain variable domain of TCR clone 325342 (TRBV12-5, TRBJ2-5)
CASGSRTHQGTQYF

SEQ ID NO: 650685 - protein, 12 aa, Homo sapiens
  CDR3 for alpha chain variable domain of TCR clone 325343 (TRAV12-3, TRAJ17)
CAMTLTGNKLTF

SEQ ID NO: 650686 - protein, 15 aa, Homo sapiens
  CDR3 for beta chain variable domain of TCR clone 325343 (TRBV20-1, TRBJ2-7)
CSARDRVSGVDEQYS

SEQ ID NO: 650687 - protein, 15 aa, Homo sapiens
  CDR3 for alpha chain variable domain of TCR clone 325344 (TRAV13-1, TRAJ44)
CAASRRGSTASKLTF

SEQ ID NO: 650688 - protein, 12 aa, Homo sapiens
  CDR3 for beta chain variable domain of TCR clone 325344 (TRBV11-2, TRBJ2-2)
CASSLGGGELFF

SEQ ID NO: 650689 - protein, 17 aa, Homo sapiens
  CDR3 for alpha chain variable domain of TCR clone 325345 (TRAV4, TRAJ18)
CLVGERSVGSTLGRLYF

SEQ ID NO: 650690 - protein, 12 aa, Homo sapiens
  CDR3 for beta chain variable domain of TCR clone 325345 (TRBV11-2, TRBJ2-1)
CASSPGNDEQFF

SEQ ID NO: 650691 - protein, 13 aa, Homo sapiens
  CDR3 for alpha chain variable domain of TCR clone 325346 (TRAV3, TRAJ33)
CAVRDRCNYQLIC

SEQ ID NO: 650692 - protein, 16 aa, Homo sapiens
  CDR3 for beta chain variable domain of TCR clone 325346 (TRBV4-2, TRBJ2-7)
CASSQDRGTSSYEQYF

SEQ ID NO: 650693 - protein, 18 aa, Homo sapiens
  CDR3 for alpha chain variable domain of TCR clone 325347 (TRAV13-1, TRAJ52)
CASSKRSAGGTSYGKLTF

SEQ ID NO: 650694 - protein, 13 aa, Homo sapiens
  CDR3 for beta chain variable domain of TCR clone 325347 (TRBV12-4, TRBJ1-2)
CASSLRQGKGYAF

SEQ ID NO: 650695 - protein, 14 aa, Homo sapiens
  CDR3 for alpha chain variable domain of TCR clone 325348 (TRAV9-2, TRAJ56)
CALSYTGANSKLTF

SEQ ID NO: 650696 - protein, 16 aa, Homo sapiens
  CDR3 for beta chain variable domain of TCR clone 325348 (TRBV13, TRBJ2-2)
CASSPRTGEHTGELFF

SEQ ID NO: 650697 - protein, 17 aa, Homo sapiens
  CDR3 for alpha chain variable domain of TCR clone 325349 (TRAV38-2/DV8, TRAJ28)
CAFLTLYSGAGSYELTF

SEQ ID NO: 650698 - protein, 14 aa, Homo sapiens
  CDR3 for beta chain variable domain of TCR clone 325349 (TRBV7-2, TRBJ2-5)
CASSLSGGGETQYF

SEQ ID NO: 650699 - protein, 13 aa, Homo sapiens
  CDR3 for alpha chain variable domain of TCR clone 325350 (TRAV8-3, TRAJ28)
CAVGAVGSYQLTF

SEQ ID NO: 650700 - protein, 12 aa, Homo sapiens
  CDR3 for beta chain variable domain of TCR clone 325350 (TRBV7-3, TRBJ2-5)
RASSPGKETQYF

SEQ ID NO: 650701 - protein, 19 aa, Homo sapiens
  CDR3 for alpha chain variable domain of TCR clone 325351 (TRAV2, TRAJ20)
ILQVREADAAVYRDCKLSF

SEQ ID NO: 650702 - protein, 12 aa, Homo sapiens
  CDR3 for beta chain variable domain of TCR clone 325351 (TRBV11-2, TRBJ2-1)
WASSPGNNEQFF

SEQ ID NO: 650703 - protein, 14 aa, Homo sapiens
  CDR3 for alpha chain variable domain of TCR clone 325352 (TRAV17, TRAJ16)
CATADFSDSQKLLF

SEQ ID NO: 650704 - protein, 15 aa, Homo sapiens
  CDR3 for beta chain variable domain of TCR clone 325352 (TRBV18, TRBJ2-1)
CAISPPSASYNEQFF

SEQ ID NO: 650705 - protein, 16 aa, Homo sapiens
  CDR3 for alpha chain variable domain of TCR clone 325353 (TRAV1-2, TRAJ10)
CAVRGVLTGGGNKLTF

SEQ ID NO: 650706 - protein, 14 aa, Homo sapiens
  CDR3 for beta chain variable domain of TCR clone 325353 (TRBV28, TRBJ2-3)
CASRSRDSTDTQYF

SEQ ID NO: 650707 - protein, 12 aa, Homo sapiens
  CDR3 for alpha chain variable domain of TCR clone 325354 (TRAV12-3, TRAJ17)
CAMKLTGNKLTF

SEQ ID NO: 650708 - protein, 12 aa, Homo sapiens
  CDR3 for beta chain variable domain of TCR clone 325354 (TRBV12-4, TRBJ2-7)
CASSLGGCEQYF

SEQ ID NO: 650709 - protein, 14 aa, Homo sapiens
  CDR3 for alpha chain variable domain of TCR clone 325355 (TRAV13-1, TRAJ35)
CAASKGGCGNVLHC

SEQ ID NO: 650710 - protein, 13 aa, Homo sapiens
  CDR3 for beta chain variable domain of TCR clone 325355 (TRBV7-3, TRBJ1-1)
CASSQDWGAEDFF

SEQ ID NO: 650711 - protein, 12 aa, Homo sapiens
  CDR3 for alpha chain variable domain of TCR clone 325356 (TRAV2, TRAJ9)
CAVGAGGVKTIV

SEQ ID NO: 650712 - protein, 16 aa, Homo sapiens
  CDR3 for beta chain variable domain of TCR clone 325356 (TRBV13, TRBJ2-2)
CASSPRTGEHTGELFF

SEQ ID NO: 650713 - protein, 15 aa, Homo sapiens
  CDR3 for alpha chain variable domain of TCR clone 325357 (TRAV8-4, TRAJ9)
CAASDLEGGGFKTIF

SEQ ID NO: 650714 - protein, 14 aa, Homo sapiens
  CDR3 for beta chain variable domain of TCR clone 325357 (TRBV12-5, TRBJ2-5)
CARGSRTHQETQYF

SEQ ID NO: 650715 - protein, 15 aa, Homo sapiens
  CDR3 for alpha chain variable domain of TCR clone 325358 (TRAV12-3, TRAJ53)
CNERPIEGSNYKLTF

SEQ ID NO: 650716 - protein, 15 aa, Homo sapiens
  CDR3 for beta chain variable domain of TCR clone 325358 (TRBV9, TRBJ1-6)
CASSVAGTGDSPLHF

SEQ ID NO: 650717 - protein, 17 aa, Homo sapiens
  CDR3 for alpha chain variable domain of TCR clone 325359 (TRAV8-6, TRAJ58)
CAVSSWVGETSGSSVTF

SEQ ID NO: 650718 - protein, 14 aa, Homo sapiens
  CDR3 for beta chain variable domain of TCR clone 325359 (TRBV4-2, TRBJ2-1)
CASGLDRAYNEQFF

SEQ ID NO: 650719 - protein, 13 aa, Homo sapiens
  CDR3 for alpha chain variable domain of TCR clone 325360 (TRAV8-3, TRAJ4)
WVFYSGGYNKLIF

SEQ ID NO: 650720 - protein, 14 aa, Homo sapiens
  CDR3 for beta chain variable domain of TCR clone 325360 (TRBV7-9, TRBJ2-3)
CASSLEDCTDTQYF

SEQ ID NO: 650721 - protein, 17 aa, Homo sapiens
  CDR3 for alpha chain variable domain of TCR clone 325361 (TRAV3, TRAJ6)
CAVRDGPRTGGSYIPTF

SEQ ID NO: 650722 - protein, 18 aa, Homo sapiens
  CDR3 for beta chain variable domain of TCR clone 325361 (TRBV7-9, TRBJ2-7)
WASSLTTSGSRTWYEQYF

SEQ ID NO: 650723 - protein, 14 aa, Homo sapiens
  CDR3 for alpha chain variable domain of TCR clone 325362 (TRAV13-1, TRAJ44)
CAAKATGTASKLTF

SEQ ID NO: 650724 - protein, 12 aa, Homo sapiens
  CDR3 for beta chain variable domain of TCR clone 325362 (TRBV5-5, TRBJ2-5)
CASSYFGETQYF

SEQ ID NO: 650725 - protein, 17 aa, Homo sapiens
  CDR3 for alpha chain variable domain of TCR clone 325363 (TRAV8-6, TRAJ58)
CAVSSWIGETSGSRLTF

SEQ ID NO: 650726 - protein, 15 aa, Homo sapiens
  CDR3 for beta chain variable domain of TCR clone 325363 (TRBV28, TRBJ1-3)
CASSMGWASGNTIYF

SEQ ID NO: 650727 - protein, 15 aa, Homo sapiens
  CDR3 for alpha chain variable domain of TCR clone 325364 (TRAV26-1, TRAJ29)
CVVRVEGSGNTPLVF

SEQ ID NO: 650728 - protein, 15 aa, Homo sapiens
  CDR3 for beta chain variable domain of TCR clone 325364 (TRBV7-9, TRBJ1-5)
CASSEGHQPNQPQHF

SEQ ID NO: 650729 - protein, 18 aa, Homo sapiens
  CDR3 for alpha chain variable domain of TCR clone 325365 (TRAV21, TRAJ52)
CAVRPSTAGGTSYGKLTF

SEQ ID NO: 650730 - protein, 15 aa, Homo sapiens
  CDR3 for beta chain variable domain of TCR clone 325365 (TRBV20-1, TRBJ2-7)
CSARDRVSGMDEQYF

SEQ ID NO: 650731 - protein, 16 aa, Homo sapiens
  CDR3 for alpha chain variable domain of TCR clone 325366 (TRAV30, TRAJ24)
CGTEIVDADSWGKFQF

SEQ ID NO: 650732 - protein, 15 aa, Homo sapiens
  CDR3 for beta chain variable domain of TCR clone 325366 (TRBV11-3, TRBJ1-1)
CASSLGGPGDTEAFF

SEQ ID NO: 650733 - protein, 16 aa, Homo sapiens
  CDR3 for alpha chain variable domain of TCR clone 325367 (TRAV3, TRAJ37)
CAVRPHGSGNTGKLIF

SEQ ID NO: 650734 - protein, 14 aa, Homo sapiens
  CDR3 for beta chain variable domain of TCR clone 325367 (TRBV2, TRBJ2-7)
CASSLTSGGYEQYF

SEQ ID NO: 650735 - protein, 17 aa, Homo sapiens
  CDR3 for alpha chain variable domain of TCR clone 325368 (TRAV3, TRAJ6)
CAVRDGPRAGGSYLPTF

SEQ ID NO: 650736 - protein, 16 aa, Homo sapiens
  CDR3 for beta chain variable domain of TCR clone 325368 (TRBV4-1, TRBJ2-7)
CASSLTAGQATYEQYC

SEQ ID NO: 650737 - protein, 11 aa, Homo sapiens
  CDR3 for alpha chain variable domain of TCR clone 325369 (TRAV12-3, TRAJ27)
CAMANAGKSTF

SEQ ID NO: 650738 - protein, 13 aa, Homo sapiens
  CDR3 for beta chain variable domain of TCR clone 325369 (TRBV2, TRBJ2-7)
CASSVGGSGEQYF

SEQ ID NO: 650739 - protein, 14 aa, Homo sapiens
  CDR3 for alpha chain variable domain of TCR clone 325370 (TRAV12-2, TRAJ11)
CAVEGGSGYSTLTF

SEQ ID NO: 650740 - protein, 15 aa, Homo sapiens
  CDR3 for beta chain variable domain of TCR clone 325370 (TRBV7-9, TRBJ1-5)
CASSQGHQPNQAQHF

SEQ ID NO: 650741 - protein, 14 aa, Homo sapiens
  CDR3 for alpha chain variable domain of TCR clone 325371 (TRAV1-2, TRAJ8)
CAVREDTGFQKLVF

SEQ ID NO: 650742 - protein, 13 aa, Homo sapiens
  CDR3 for beta chain variable domain of TCR clone 325371 (TRBV7-3, TRBJ2-1)
CASSLDSYNEQFL

SEQ ID NO: 650743 - protein, 13 aa, Homo sapiens
  CDR3 for alpha chain variable domain of TCR clone 325372 (TRAV12-1, TRAJ26)
CVVRRNYGQNFVF

SEQ ID NO: 650744 - protein, 15 aa, Homo sapiens
  CDR3 for beta chain variable domain of TCR clone 325372 (TRBV28, TRBJ2-1)
CASSIIAGGRSEHLF

SEQ ID NO: 650745 - protein, 13 aa, Homo sapiens
  CDR3 for alpha chain variable domain of TCR clone 325373 (TRAV36/DV7, TRAJ53)
CALSGGSNYKLTF

SEQ ID NO: 650746 - protein, 13 aa, Homo sapiens
  CDR3 for beta chain variable domain of TCR clone 325373 (TRBV28, TRBJ2-4)
CASSQSAKNIQYF

SEQ ID NO: 650747 - protein, 17 aa, Homo sapiens
  CDR3 for alpha chain variable domain of TCR clone 325374 (TRAV36/DV7, TRAJ42)
CAGGGMNYGGSQGNLIF

SEQ ID NO: 650748 - protein, 15 aa, Homo sapiens
  CDR3 for beta chain variable domain of TCR clone 325374 (TRBV7-9, TRBJ1-5)
CASSQGHQPNQPQHF

SEQ ID NO: 650749 - protein, 13 aa, Homo sapiens
  CDR3 for alpha chain variable domain of TCR clone 325375 (TRAV23/DV6, TRAJ47)
CAASIRNGIWKQT

SEQ ID NO: 650750 - protein, 13 aa, Homo sapiens
  CDR3 for beta chain variable domain of TCR clone 325375 (TRBV19, TRBJ1-2)
CASSQGKVYGYTF

SEQ ID NO: 650751 - protein, 12 aa, Homo sapiens
  CDR3 for alpha chain variable domain of TCR clone 325376 (TRAV1-2, TRAJ29)
CAVPSGNTPLVF

SEQ ID NO: 650752 - protein, 12 aa, Homo sapiens
  CDR3 for beta chain variable domain of TCR clone 325376 (TRBV12-4, TRBJ2-7)
FASSSGGYEQYF

SEQ ID NO: 650753 - protein, 13 aa, Homo sapiens
  CDR3 for alpha chain variable domain of TCR clone 325377 (TRAV26-1, TRAJ35)
CIVSRRVGEMLHC

SEQ ID NO: 650754 - protein, 17 aa, Homo sapiens
  CDR3 for beta chain variable domain of TCR clone 325377 (TRBV7-9, TRBJ2-7)
CASSFDGSRGGAYEQYV

SEQ ID NO: 650755 - protein, 13 aa, Homo sapiens
  CDR3 for alpha chain variable domain of TCR clone 325378 (TRAV36/DV7, TRAJ33)
CAVDMDSNYQLTW

SEQ ID NO: 650756 - protein, 16 aa, Homo sapiens
  CDR3 for beta chain variable domain of TCR clone 325378 (TRBV15, TRBJ2-3)
CATRLSGGRAPDTQYF

SEQ ID NO: 650757 - protein, 12 aa, Homo sapiens
  CDR3 for alpha chain variable domain of TCR clone 325379 (TRAV21, TRAJ49)
CAVTNTGHQFYF

SEQ ID NO: 650758 - protein, 17 aa, Homo sapiens
  CDR3 for beta chain variable domain of TCR clone 325379 (TRBV13, TRBJ2-3)
CASSLSRVAGGRNTQYF

SEQ ID NO: 650759 - protein, 16 aa, Homo sapiens
  CDR3 for alpha chain variable domain of TCR clone 325380 (TRAV3, TRAJ10)
CAVRDMRAGGGNKLTF

SEQ ID NO: 650760 - protein, 15 aa, Homo sapiens
  CDR3 for beta chain variable domain of TCR clone 325380 (TRBV6-1, TRBJ1-1)
CLGGSSRQGNTEAFF

SEQ ID NO: 650761 - protein, 14 aa, Homo sapiens
  CDR3 for alpha chain variable domain of TCR clone 325381 (TRAV12-1, TRAJ17)
CVVTPKAAGNKLTF

SEQ ID NO: 650762 - protein, 16 aa, Homo sapiens
  CDR3 for beta chain variable domain of TCR clone 325381 (TRBV20-1, TRBJ2-1)
CSASASGYSSYNEQFF

SEQ ID NO: 650763 - protein, 10 aa, Homo sapiens
  CDR3 for alpha chain variable domain of TCR clone 325382 (TRAV12-2, TRAJ20)
FAVYLYKLSF

SEQ ID NO: 650764 - protein, 14 aa, Homo sapiens
  CDR3 for beta chain variable domain of TCR clone 325382 (TRBV10-3, TRBJ2-2)
CAISEVSHSGELFF

SEQ ID NO: 650765 - protein, 15 aa, Homo sapiens
  CDR3 for alpha chain variable domain of TCR clone 325383 (TRAV3, TRAJ20)
CAVRDIKFSDYKLSF

SEQ ID NO: 650766 - protein, 15 aa, Homo sapiens
  CDR3 for beta chain variable domain of TCR clone 325383 (TRBV7-9, TRBJ1-6)
CASSSPGRGNPPLHF

SEQ ID NO: 650767 - protein, 14 aa, Homo sapiens
  CDR3 for alpha chain variable domain of TCR clone 325384 (TRAV8-3, TRAJ6)
CAVGASGGSYIPTF

SEQ ID NO: 650768 - protein, 15 aa, Homo sapiens
  CDR3 for beta chain variable domain of TCR clone 325384 (TRBV4-3, TRBJ1-1)
CASSQVGRMNTEAFF

SEQ ID NO: 650769 - protein, 16 aa, Homo sapiens
  CDR3 for alpha chain variable domain of TCR clone 325385 (TRAV8-2, TRAJ7)
CVVSEGPYYGNNRLAF

SEQ ID NO: 650770 - protein, 15 aa, Homo sapiens
  CDR3 for beta chain variable domain of TCR clone 325385 (TRBV7-2, TRBJ1-1)
CASSPQGGANTEAFF

SEQ ID NO: 650771 - protein, 14 aa, Homo sapiens
  CDR3 for alpha chain variable domain of TCR clone 325386 (TRAV26-1, TRAJ39)
CIVRGSRAGNMLTF

SEQ ID NO: 650772 - protein, 11 aa, Homo sapiens
  CDR3 for beta chain variable domain of TCR clone 325386 (TRBV11-2, TRBJ1-1)
CASSINTEAFF

SEQ ID NO: 650773 - protein, 14 aa, Homo sapiens
  CDR3 for alpha chain variable domain of TCR clone 325387 (TRAV22, TRAJ57)
FAVELQGGSEKLVF

SEQ ID NO: 650774 - protein, 15 aa, Homo sapiens
  CDR3 for beta chain variable domain of TCR clone 325387 (TRBV20-1, TRBJ2-5)
CSAPPRTGFGETQYF

SEQ ID NO: 650775 - protein, 14 aa, Homo sapiens
  CDR3 for alpha chain variable domain of TCR clone 325388 (TRAV8-3, TRAJ24)
CAVGSTDSWGKLPF

SEQ ID NO: 650776 - protein, 12 aa, Homo sapiens
  CDR3 for beta chain variable domain of TCR clone 325388 (TRBV7-8, TRBJ2-7)
CASSLGDREQYF

SEQ ID NO: 650777 - protein, 17 aa, Homo sapiens
  CDR3 for alpha chain variable domain of TCR clone 325389 (TRAV3, TRAJ6)
CAVRDGPRAGGRYIPTF

SEQ ID NO: 650778 - protein, 19 aa, Homo sapiens
  CDR3 for beta chain variable domain of TCR clone 325389 (TRBV25-1, TRBJ2-2)
CAILVYRVDRGRKTGKLFF

SEQ ID NO: 650779 - protein, 14 aa, Homo sapiens
  CDR3 for alpha chain variable domain of TCR clone 325390 (TRAV4, TRAJ17)
CLVGDMAAGNKLTF

SEQ ID NO: 650780 - protein, 16 aa, Homo sapiens
  CDR3 for beta chain variable domain of TCR clone 325390 (TRBV4-2, TRBJ1-1)
CASSQAGFGMNTEAFF

SEQ ID NO: 650781 - protein, 12 aa, Homo sapiens
  CDR3 for alpha chain variable domain of TCR clone 325391 (TRAV17, TRAJ12)
CAGGDSSYKLIF

SEQ ID NO: 650782 - protein, 12 aa, Homo sapiens
  CDR3 for beta chain variable domain of TCR clone 325391 (TRBV29-1, TRBJ1-1)
CSESNGNTEAFF

SEQ ID NO: 650783 - protein, 14 aa, Homo sapiens
  CDR3 for alpha chain variable domain of TCR clone 325392 (TRAV12-1, TRAJ26)
CVVKGSNYGQNFVF

SEQ ID NO: 650784 - protein, 15 aa, Homo sapiens
  CDR3 for beta chain variable domain of TCR clone 325392 (TRBV15, TRBJ2-2)
CATSRGLADTGELFF

SEQ ID NO: 650785 - protein, 15 aa, Homo sapiens
  CDR3 for alpha chain variable domain of TCR clone 325393 (TRAV38-1, TRAJ37)
CAFIFGSGNTGKLIF

SEQ ID NO: 650786 - protein, 16 aa, Homo sapiens
  CDR3 for beta chain variable domain of TCR clone 325393 (TRBV7-9, TRBJ1-2)
CASSLGFSSGEDGYTF

SEQ ID NO: 650787 - protein, 18 aa, Homo sapiens
  CDR3 for alpha chain variable domain of TCR clone 325394 (TRAV21, TRAJ52)
CAVRPSPAGGTSYGRLAF

SEQ ID NO: 650788 - protein, 17 aa, Homo sapiens
  CDR3 for beta chain variable domain of TCR clone 325394 (TRBV13, TRBJ2-3)
CASSLSRVAGGRNTQYF

SEQ ID NO: 650789 - protein, 18 aa, Homo sapiens
  CDR3 for alpha chain variable domain of TCR clone 325395 (TRAV26-1, TRAJ22)
CIVRVALISSGSARQLTF

SEQ ID NO: 650790 - protein, 13 aa, Homo sapiens
  CDR3 for beta chain variable domain of TCR clone 325395 (TRBV13, TRBJ2-5)
CASSPEVGEIQYF

SEQ ID NO: 650791 - protein, 13 aa, Homo sapiens
  CDR3 for alpha chain variable domain of TCR clone 325396 (TRAV35, TRAJ42)
CAGFPGSQGNLIF

SEQ ID NO: 650792 - protein, 13 aa, Homo sapiens
  CDR3 for beta chain variable domain of TCR clone 325396 (TRBV9, TRBJ2-1)
CASSPSGGNEQFF

SEQ ID NO: 650793 - protein, 14 aa, Homo sapiens
  CDR3 for alpha chain variable domain of TCR clone 325397 (TRAV8-3, TRAJ4)
CAVMFSGGYNKLIF

SEQ ID NO: 650794 - protein, 15 aa, Homo sapiens
  CDR3 for beta chain variable domain of TCR clone 325397 (TRBV20-1, TRBJ2-1)
CSARGLRGGVNEQFF

SEQ ID NO: 650795 - protein, 14 aa, Homo sapiens
  CDR3 for alpha chain variable domain of TCR clone 325398 (TRAV13-2, TRAJ10)
CAENITGGGNKLTF

SEQ ID NO: 650796 - protein, 12 aa, Homo sapiens
  CDR3 for beta chain variable domain of TCR clone 325398 (TRBV11-2, TRBJ2-1)
CASSPGNNERFF

SEQ ID NO: 650797 - protein, 12 aa, Homo sapiens
  CDR3 for alpha chain variable domain of TCR clone 325399 (TRAV3, TRAJ20)
SAVRDPDYKLSF

SEQ ID NO: 650798 - protein, 13 aa, Homo sapiens
  CDR3 for beta chain variable domain of TCR clone 325399 (TRBV9, TRBJ2-1)
CASSVGQGGEQFF

SEQ ID NO: 650799 - protein, 12 aa, Homo sapiens
  CDR3 for alpha chain variable domain of TCR clone 325400 (TRAV13-1, TRAJ53)
AASGGSHYKLTF

SEQ ID NO: 650800 - protein, 12 aa, Homo sapiens
  CDR3 for beta chain variable domain of TCR clone 325400 (TRBV18, TRBJ1-4)
CASSPSREKLFF

SEQ ID NO: 650801 - protein, 15 aa, Homo sapiens
  CDR3 for alpha chain variable domain of TCR clone 325401 (TRAV2, TRAJ9)
CAVEDRGTGGFKTIF

SEQ ID NO: 650802 - protein, 11 aa, Homo sapiens
  CDR3 for beta chain variable domain of TCR clone 325401 (TRBV29-1, TRBJ2-5)
CSEDRTGTQYF

SEQ ID NO: 650803 - protein, 13 aa, Homo sapiens
  CDR3 for alpha chain variable domain of TCR clone 325402 (TRAV12-2, TRAJ40)
CAVKRTGTYKYIF

SEQ ID NO: 650804 - protein, 15 aa, Homo sapiens
  CDR3 for beta chain variable domain of TCR clone 325402 (TRBV12-4, TRBJ1-2)
CASSPITGGGYGYIF

SEQ ID NO: 650805 - protein, 14 aa, Homo sapiens
  CDR3 for alpha chain variable domain of TCR clone 325403 (TRAV8-1, TRAJ23)
CAVGTYNQGGKLIF

SEQ ID NO: 650806 - protein, 13 aa, Homo sapiens
  CDR3 for beta chain variable domain of TCR clone 325403 (TRBV7-2, TRBJ2-5)
CASSQTSVETQYF

SEQ ID NO: 650807 - protein, 10 aa, Homo sapiens
  CDR3 for alpha chain variable domain of TCR clone 325404 (TRAV17, TRAJ36)
CATVAGNLFF

SEQ ID NO: 650808 - protein, 14 aa, Homo sapiens
  CDR3 for beta chain variable domain of TCR clone 325404 (TRBV11-2, TRBJ2-4)
CASSSASGSEYLAP

SEQ ID NO: 650809 - protein, 20 aa, Homo sapiens
  CDR3 for alpha chain variable domain of TCR clone 325405 (TRAV35, TRAJ52)
CAGQLPDPMLVVLAMESWHL

SEQ ID NO: 650810 - protein, 12 aa, Homo sapiens
  CDR3 for beta chain variable domain of TCR clone 325405 (TRBV11-2, TRBJ2-7)
CASSLPTYEQYF

SEQ ID NO: 650811 - protein, 14 aa, Homo sapiens
  CDR3 for alpha chain variable domain of TCR clone 325406 (TRAV41, TRAJ48)
CAVRPHFGNEKLTF

SEQ ID NO: 650812 - protein, 13 aa, Homo sapiens
  CDR3 for beta chain variable domain of TCR clone 325406 (TRBV4-2, TRBJ1-1)
CASSQAGNTEAFF

SEQ ID NO: 650813 - protein, 14 aa, Homo sapiens
  CDR3 for alpha chain variable domain of TCR clone 325407 (TRAV1-2, TRAJ16)
CAVNRFSDGQKLLF

SEQ ID NO: 650814 - protein, 14 aa, Homo sapiens
  CDR3 for beta chain variable domain of TCR clone 325407 (TRBV9, TRBJ2-2)
CASSVGQGAGELFF

SEQ ID NO: 650815 - protein, 15 aa, Homo sapiens
  CDR3 for alpha chain variable domain of TCR clone 325408 (TRAV29/DV5, TRAJ29)
CAASERSSGNTPLVF

SEQ ID NO: 650816 - protein, 15 aa, Homo sapiens
  CDR3 for beta chain variable domain of TCR clone 325408 (TRBV10-2, TRBJ2-6)
CASSEQGTGANVLTF

SEQ ID NO: 650817 - protein, 11 aa, Homo sapiens
  CDR3 for alpha chain variable domain of TCR clone 325409 (TRAV12-2, TRAJ33)
CAVTSNYQLIW

SEQ ID NO: 650818 - protein, 14 aa, Homo sapiens
  CDR3 for beta chain variable domain of TCR clone 325409 (TRBV12-4, TRBJ2-2)
CASNQAANTGELFF

SEQ ID NO: 650819 - protein, 12 aa, Homo sapiens
  CDR3 for alpha chain variable domain of TCR clone 325410 (TRAV12-2, TRAJ10)
WGVTGAGNKLTF

SEQ ID NO: 650820 - protein, 14 aa, Homo sapiens
  CDR3 for beta chain variable domain of TCR clone 325410 (TRBV12-4, TRBJ1-4)
CASSRQGANEKLFF

SEQ ID NO: 650821 - protein, 12 aa, Homo sapiens
  CDR3 for alpha chain variable domain of TCR clone 325411 (TRAV3, TRAJ20)
CAVRDPDYKLSF

SEQ ID NO: 650822 - protein, 15 aa, Homo sapiens
  CDR3 for beta chain variable domain of TCR clone 325411 (TRBV28, TRBJ2-5)
CASSPPWSYQETQYF

SEQ ID NO: 650823 - protein, 15 aa, Homo sapiens
  CDR3 for alpha chain variable domain of TCR clone 325412 (TRAV13-1, TRAJ16)
CAARYQMARSCSVQG

SEQ ID NO: 650824 - protein, 13 aa, Homo sapiens
  CDR3 for beta chain variable domain of TCR clone 325412 (TRBV4-1, TRBJ2-1)
CASSQAGGDEQFF

SEQ ID NO: 650825 - protein, 15 aa, Homo sapiens
  CDR3 for alpha chain variable domain of TCR clone 325413 (TRAV17, TRAJ57)
CAPGPSQGGSEKLVF

SEQ ID NO: 650826 - protein, 14 aa, Homo sapiens
  CDR3 for beta chain variable domain of TCR clone 325413 (TRBV12-5, TRBJ2-5)
CASGSRKHQETQYF

SEQ ID NO: 650827 - protein, 10 aa, Homo sapiens
  CDR3 for alpha chain variable domain of TCR clone 325414 (TRAV1-2, TRAJ18)
CAVRGEAQPW

SEQ ID NO: 650828 - protein, 20 aa, Homo sapiens
  CDR3 for beta chain variable domain of TCR clone 325414 (TRBV28, TRBJ2-1)
WASTPIGRSPGLAGGNEQFF

SEQ ID NO: 650829 - protein, 12 aa, Homo sapiens
  CDR3 for alpha chain variable domain of TCR clone 325415 (TRAV13-2, TRAJ23)
CAERRRGGKLIF

SEQ ID NO: 650830 - protein, 19 aa, Homo sapiens
  CDR3 for beta chain variable domain of TCR clone 325415 (TRBV19, TRBJ2-5)
CASSIGQVTDCFLGETQYF

SEQ ID NO: 650831 - protein, 12 aa, Homo sapiens
  CDR3 for alpha chain variable domain of TCR clone 325416 (TRAV12-1, TRAJ31)
CVSWNNNARLMV

SEQ ID NO: 650832 - protein, 15 aa, Homo sapiens
  CDR3 for beta chain variable domain of TCR clone 325416 (TRBV7-2, TRBJ1-5)
CASSLDRGQDQPQHF

SEQ ID NO: 650833 - protein, 21 aa, Homo sapiens
  CDR3 for alpha chain variable domain of TCR clone 325417 (TRAV35, TRAJ52)
CWEGYADGPNAGGTSYGKLTF

SEQ ID NO: 650834 - protein, 12 aa, Homo sapiens
  CDR3 for beta chain variable domain of TCR clone 325417 (TRBV5-1, TRBJ2-7)
CASSFRGYEQYF

SEQ ID NO: 650835 - protein, 11 aa, Homo sapiens
  CDR3 for alpha chain variable domain of TCR clone 325418 (TRAV21, TRAJ39)
LLVNAGNMLTF

SEQ ID NO: 650836 - protein, 15 aa, Homo sapiens
  CDR3 for beta chain variable domain of TCR clone 325418 (TRBV29-1, TRBJ2-1)
CSGRDRKSSYNGQFF

SEQ ID NO: 650837 - protein, 16 aa, Homo sapiens
  CDR3 for alpha chain variable domain of TCR clone 325419 (TRAV17, TRAJ35)
CATAEGGIGFGNVLHC

SEQ ID NO: 650838 - protein, 15 aa, Homo sapiens
  CDR3 for beta chain variable domain of TCR clone 325419 (TRBV7-9, TRBJ1-1)
CASSRPGTANTEAFF

SEQ ID NO: 650839 - protein, 16 aa, Homo sapiens
  CDR3 for alpha chain variable domain of TCR clone 325420 (TRAV12-3, TRAJ53)
CAVSPGSGGSNYKLTF

SEQ ID NO: 650840 - protein, 15 aa, Homo sapiens
  CDR3 for beta chain variable domain of TCR clone 325420 (TRBV7-9, TRBJ1-5)
CASSQGHQPNQPQHF

SEQ ID NO: 650841 - protein, 20 aa, Homo sapiens
  CDR3 for alpha chain variable domain of TCR clone 325421 (TRAV4, TRAJ29)
CCVLLPRGCVPFPGNTPLVF

SEQ ID NO: 650842 - protein, 17 aa, Homo sapiens
  CDR3 for beta chain variable domain of TCR clone 325421 (TRBV25-1, TRBJ2-7)
CASSDARVVVSSYEQYF

SEQ ID NO: 650843 - protein, 14 aa, Homo sapiens
  CDR3 for alpha chain variable domain of TCR clone 325422 (TRAV1-2, TRAJ8)
CAVREDTGSQKLEF

SEQ ID NO: 650844 - protein, 13 aa, Homo sapiens
  CDR3 for beta chain variable domain of TCR clone 325422 (TRBV10-3, TRBJ1-2)
CAISERDSYGYTF

SEQ ID NO: 650845 - protein, 12 aa, Homo sapiens
  CDR3 for alpha chain variable domain of TCR clone 325423 (TRAV13-1, TRAJ45)
VGSGGGADGLTF

SEQ ID NO: 650846 - protein, 16 aa, Homo sapiens
  CDR3 for beta chain variable domain of TCR clone 325423 (TRBV12-4, TRBJ2-7)
CASSLIGGTGTYEQYF

SEQ ID NO: 650847 - protein, 15 aa, Homo sapiens
  CDR3 for alpha chain variable domain of TCR clone 325424 (TRAV5, TRAJ33)
CAEAPAMDSNYQLIW

SEQ ID NO: 650848 - protein, 12 aa, Homo sapiens
  CDR3 for beta chain variable domain of TCR clone 325424 (TRBV6-3, TRBJ2-7)
CASSLTLYEQYF

SEQ ID NO: 650849 - protein, 13 aa, Homo sapiens
  CDR3 for alpha chain variable domain of TCR clone 325425 (TRAV1-2, TRAJ9)
CSVLNTGGFKTIF

SEQ ID NO: 650850 - protein, 13 aa, Homo sapiens
  CDR3 for beta chain variable domain of TCR clone 325425 (TRBV19, TRBJ2-7)
CASRKAGGSEQYF

SEQ ID NO: 650851 - protein, 16 aa, Homo sapiens
  CDR3 for alpha chain variable domain of TCR clone 325426 (TRAV3, TRAJ37)
CALRPHGSGNTGKLIF

SEQ ID NO: 650852 - protein, 14 aa, Homo sapiens
  CDR3 for beta chain variable domain of TCR clone 325426 (TRBV2, TRBJ2-1)
CASSDRAYYNEQFF

SEQ ID NO: 650853 - protein, 11 aa, Homo sapiens
  CDR3 for alpha chain variable domain of TCR clone 325427 (TRAV17, TRAJ36)
CAPTGANNIFF

SEQ ID NO: 650854 - protein, 13 aa, Homo sapiens
  CDR3 for beta chain variable domain of TCR clone 325427 (TRBV20-1, TRBJ1-1)
CSAPPGGHTEAFF

SEQ ID NO: 650855 - protein, 17 aa, Homo sapiens
  CDR3 for alpha chain variable domain of TCR clone 325428 (TRAV36/DV7, TRAJ52)
CAVAQRAGGTSYGKLTF

SEQ ID NO: 650856 - protein, 16 aa, Homo sapiens
  CDR3 for beta chain variable domain of TCR clone 325428 (TRBV7-2, TRBJ2-5)
CASSPCPTGGEETQYF

SEQ ID NO: 650857 - protein, 14 aa, Homo sapiens
  CDR3 for alpha chain variable domain of TCR clone 325429 (TRAV17, TRAJ57)
CATDPQGGSEKLVF

SEQ ID NO: 650858 - protein, 16 aa, Homo sapiens
  CDR3 for beta chain variable domain of TCR clone 325429 (TRBV5-1, TRBJ2-2)
CASSSRTGGRTGELFF

SEQ ID NO: 650859 - protein, 13 aa, Homo sapiens
  CDR3 for alpha chain variable domain of TCR clone 325430 (TRAV21, TRAJ20)
CAVGLRVDYKLSF

SEQ ID NO: 650860 - protein, 13 aa, Homo sapiens
  CDR3 for beta chain variable domain of TCR clone 325430 (TRBV6-1, TRBJ1-1)
CASSRQRNTEAFF

SEQ ID NO: 650861 - protein, 17 aa, Homo sapiens
  CDR3 for alpha chain variable domain of TCR clone 325431 (TRAV27, TRAJ42)
CAARVIYYGGSQGNLIF

SEQ ID NO: 650862 - protein, 15 aa, Homo sapiens
  CDR3 for beta chain variable domain of TCR clone 325431 (TRBV7-2, TRBJ2-1)
CASSLVAGGHNEQFF

SEQ ID NO: 650863 - protein, 16 aa, Homo sapiens
  CDR3 for alpha chain variable domain of TCR clone 325432 (TRAV12-1, TRAJ42)
CVVTPYYGGSQGNLII

SEQ ID NO: 650864 - protein, 15 aa, Homo sapiens
  CDR3 for beta chain variable domain of TCR clone 325432 (TRBV4-3, TRBJ2-7)
CASSQGGRGIYEQYF

SEQ ID NO: 650865 - protein, 13 aa, Homo sapiens
  CDR3 for alpha chain variable domain of TCR clone 325433 (TRAV8-4, TRAJ30)
CAVSVNRDDKIIF

SEQ ID NO: 650866 - protein, 14 aa, Homo sapiens
  CDR3 for beta chain variable domain of TCR clone 325433 (TRBV7-9, TRBJ2-7)
CASSLVSGTEYYYF

SEQ ID NO: 650867 - protein, 11 aa, Homo sapiens
  CDR3 for alpha chain variable domain of TCR clone 325434 (TRAV1-1, TRAJ23)
CAVRQGGKLIF

SEQ ID NO: 650868 - protein, 20 aa, Homo sapiens
  CDR3 for beta chain variable domain of TCR clone 325434 (TRBV11-2, TRBJ1-6)
CASSLVFATGDSVHPSTLGT

SEQ ID NO: 650869 - protein, 14 aa, Homo sapiens
  CDR3 for alpha chain variable domain of TCR clone 325435 (TRAV38-1, TRAJ11)
CAFMKHEGYSTLTF

SEQ ID NO: 650870 - protein, 14 aa, Homo sapiens
  CDR3 for beta chain variable domain of TCR clone 325435 (TRBV25-1, TRBJ1-1)
RASTHLGGNTEAFF

SEQ ID NO: 650871 - protein, 13 aa, Homo sapiens
  CDR3 for alpha chain variable domain of TCR clone 325436 (TRAV12-3, TRAJ33)
CGMSVNSNYQLIW

SEQ ID NO: 650872 - protein, 13 aa, Homo sapiens
  CDR3 for beta chain variable domain of TCR clone 325436 (TRBV7-2, TRBJ2-2)
CASSLAVTGELFF

SEQ ID NO: 650873 - protein, 15 aa, Homo sapiens
  CDR3 for alpha chain variable domain of TCR clone 325437 (TRAV26-1, TRAJ22)
CMVRVSFWFWKATDL

SEQ ID NO: 650874 - protein, 14 aa, Homo sapiens
  CDR3 for beta chain variable domain of TCR clone 325437 (TRBV18, TRBJ2-7)
CASSPRGGAYEQYF

SEQ ID NO: 650875 - protein, 15 aa, Homo sapiens
  CDR3 for alpha chain variable domain of TCR clone 325438 (TRAV13-1, TRAJ52)
CAGTSPRTSYGKLTF

SEQ ID NO: 650876 - protein, 15 aa, Homo sapiens
  CDR3 for beta chain variable domain of TCR clone 325438 (TRBV5-1, TRBJ2-1)
CASSPPRAPYNEQFF

SEQ ID NO: 650877 - protein, 14 aa, Homo sapiens
  CDR3 for alpha chain variable domain of TCR clone 325439 (TRAV1-2, TRAJ16)
CAGNRFSDGQKLLF

SEQ ID NO: 650878 - protein, 15 aa, Homo sapiens
  CDR3 for beta chain variable domain of TCR clone 325439 (TRBV19, TRBJ1-5)
CASSIVWADNQPQHF

SEQ ID NO: 650879 - protein, 16 aa, Homo sapiens
  CDR3 for alpha chain variable domain of TCR clone 325440 (TRAV12-2, TRAJ10)
CAVNRVLTGGGKKLTF

SEQ ID NO: 650880 - protein, 12 aa, Homo sapiens
  CDR3 for beta chain variable domain of TCR clone 325440 (TRBV28, TRBJ2-7)
CASSFSSYEQHF

SEQ ID NO: 650881 - protein, 16 aa, Homo sapiens
  CDR3 for alpha chain variable domain of TCR clone 325441 (TRAV38-1, TRAJ32)
CAFMKGGGGATNKLIF

SEQ ID NO: 650882 - protein, 18 aa, Homo sapiens
  CDR3 for beta chain variable domain of TCR clone 325441 (TRBV20-1, TRBJ2-6)
CSAETTPTHGSGANVLTF

SEQ ID NO: 650883 - protein, 17 aa, Homo sapiens
  CDR3 for alpha chain variable domain of TCR clone 325442 (TRAV4, TRAJ18)
CLVGERSVGSTLGRLYF

SEQ ID NO: 650884 - protein, 12 aa, Homo sapiens
  CDR3 for beta chain variable domain of TCR clone 325442 (TRBV7-8, TRBJ2-7)
CASSLGDREQYF

SEQ ID NO: 650885 - protein, 13 aa, Homo sapiens
  CDR3 for alpha chain variable domain of TCR clone 325443 (TRAV8-3, TRAJ36)
RAVGATGANNLFF

SEQ ID NO: 650886 - protein, 13 aa, Homo sapiens
  CDR3 for beta chain variable domain of TCR clone 325443 (TRBV19, TRBJ1-2)
CASSVPGQDGYTF

SEQ ID NO: 650887 - protein, 15 aa, Homo sapiens
  CDR3 for alpha chain variable domain of TCR clone 325444 (TRAV26-2, TRAJ54)
CILRDVGQGAQKLVF

SEQ ID NO: 650888 - protein, 13 aa, Homo sapiens
  CDR3 for beta chain variable domain of TCR clone 325444 (TRBV7-9, TRBJ1-1)
CASSLAGVTEAVF

SEQ ID NO: 650889 - protein, 13 aa, Homo sapiens
  CDR3 for alpha chain variable domain of TCR clone 325445 (TRAV17, TRAJ39)
CATVSNAGNMLTF

SEQ ID NO: 650890 - protein, 13 aa, Homo sapiens
  CDR3 for beta chain variable domain of TCR clone 325445 (TRBV7-2, TRBJ1-1)
CASNLKGAKVAFF

SEQ ID NO: 650891 - protein, 11 aa, Homo sapiens
  CDR3 for alpha chain variable domain of TCR clone 325446 (TRAV12-3, TRAJ27)
CKMANAGKSTF

SEQ ID NO: 650892 - protein, 15 aa, Homo sapiens
  CDR3 for beta chain variable domain of TCR clone 325446 (TRBV3-1, TRBJ1-2)
CASRHPGTPGYGYTF

SEQ ID NO: 650893 - protein, 15 aa, Homo sapiens
  CDR3 for alpha chain variable domain of TCR clone 325447 (TRAV16, TRAJ10)
CALRELTGGGNKLTF

SEQ ID NO: 650894 - protein, 14 aa, Homo sapiens
  CDR3 for beta chain variable domain of TCR clone 325447 (TRBV5-5, TRBJ2-7)
CASILGQGTYEQYF

SEQ ID NO: 650895 - protein, 14 aa, Homo sapiens
  CDR3 for alpha chain variable domain of TCR clone 325448 (TRAV17, TRAJ16)
CATADFSDVQKMLF

SEQ ID NO: 650896 - protein, 12 aa, Homo sapiens
  CDR3 for beta chain variable domain of TCR clone 325448 (TRBV24-1, TRBJ1-1)
CATLYPDTEAFF

SEQ ID NO: 650897 - protein, 14 aa, Homo sapiens
  CDR3 for alpha chain variable domain of TCR clone 325449 (TRAV3, TRAJ17)
CAGRDAAAGNKLTF

SEQ ID NO: 650898 - protein, 14 aa, Homo sapiens
  CDR3 for beta chain variable domain of TCR clone 325449 (TRBV12-4, TRBJ1-1)
CASSSARGYTEAFF

SEQ ID NO: 650899 - protein, 14 aa, Homo sapiens
  CDR3 for alpha chain variable domain of TCR clone 325450 (TRAV3, TRAJ9)
CAVRLNTGGFKTIF

SEQ ID NO: 650900 - protein, 16 aa, Homo sapiens
  CDR3 for beta chain variable domain of TCR clone 325450 (TRBV19, TRBJ2-1)
CASSKAGPSSYNEQFF

SEQ ID NO: 650901 - protein, 11 aa, Homo sapiens
  CDR3 for alpha chain variable domain of TCR clone 325451 (TRAV21, TRAJ34)
CAVTNTDKLIF

SEQ ID NO: 650902 - protein, 14 aa, Homo sapiens
  CDR3 for beta chain variable domain of TCR clone 325451 (TRBV7-2, TRBJ1-1)
CASSFLTGTTEAFF

SEQ ID NO: 650903 - protein, 16 aa, Homo sapiens
  CDR3 for alpha chain variable domain of TCR clone 325452 (TRAV22, TRAJ45)
CAVERGKRGGADGRTF

SEQ ID NO: 650904 - protein, 16 aa, Homo sapiens
  CDR3 for beta chain variable domain of TCR clone 325452 (TRBV7-3, TRBJ2-2)
CASSLKRGTLSGELFF

SEQ ID NO: 650905 - protein, 15 aa, Homo sapiens
  CDR3 for alpha chain variable domain of TCR clone 325453 (TRAV26-1, TRAJ29)
CIVKVEGSGNTLLVF

SEQ ID NO: 650906 - protein, 15 aa, Homo sapiens
  CDR3 for beta chain variable domain of TCR clone 325453 (TRBV7-9, TRBJ1-5)
CASSQGHQPNQPQHF

SEQ ID NO: 650907 - protein, 11 aa, Homo sapiens
  CDR3 for alpha chain variable domain of TCR clone 325454 (TRAV1-2, TRAJ20)
CAVSNDYKLSF

SEQ ID NO: 650908 - protein, 16 aa, Homo sapiens
  CDR3 for beta chain variable domain of TCR clone 325454 (TRBV29-1, TRBJ2-6)
CSVEDINYSGANVLTF

SEQ ID NO: 650909 - protein, 18 aa, Homo sapiens
  CDR3 for alpha chain variable domain of TCR clone 325455 (TRAV12-3, TRAJ10)
SPVIQHLPLTGGGNKLTF

SEQ ID NO: 650910 - protein, 16 aa, Homo sapiens
  CDR3 for beta chain variable domain of TCR clone 325455 (TRBV12-4, TRBJ2-5)
CASSWRPSGDLETQYF

SEQ ID NO: 650911 - protein, 14 aa, Homo sapiens
  CDR3 for alpha chain variable domain of TCR clone 325456 (TRAV13-1, TRAJ9)
CAASALTGGFKTIF

SEQ ID NO: 650912 - protein, 14 aa, Homo sapiens
  CDR3 for beta chain variable domain of TCR clone 325456 (TRBV7-2, TRBJ1-2)
CASSRGGTNYGYTF

SEQ ID NO: 650913 - protein, 12 aa, Homo sapiens
  CDR3 for alpha chain variable domain of TCR clone 325457 (TRAV2, TRAJ29)
CCGYSGNTPLVF

SEQ ID NO: 650914 - protein, 14 aa, Homo sapiens
  CDR3 for beta chain variable domain of TCR clone 325457 (TRBV7-8, TRBJ2-3)
CASSLEAGTDTQYF

SEQ ID NO: 650915 - protein, 12 aa, Homo sapiens
  CDR3 for alpha chain variable domain of TCR clone 325458 (TRAV8-6, TRAJ11)
CAVSARYSTLTF

SEQ ID NO: 650916 - protein, 19 aa, Homo sapiens
  CDR3 for beta chain variable domain of TCR clone 325458 (TRBV4-1, TRBJ2-7)
CASSPVAGGGRAVLRAGHQ

SEQ ID NO: 650917 - protein, 12 aa, Homo sapiens
  CDR3 for alpha chain variable domain of TCR clone 325459 (TRAV8-3, TRAJ26)
CAGDNCGQNFVF

SEQ ID NO: 650918 - protein, 12 aa, Homo sapiens
  CDR3 for beta chain variable domain of TCR clone 325459 (TRBV12-4, TRBJ2-7)
CASSLGGYEQYF

SEQ ID NO: 650919 - protein, 13 aa, Homo sapiens
  CDR3 for alpha chain variable domain of TCR clone 325460 (TRAV8-3, TRAJ36)
CAVGATGASNLFF

SEQ ID NO: 650920 - protein, 13 aa, Homo sapiens
  CDR3 for beta chain variable domain of TCR clone 325460 (TRBV6-1, TRBJ1-1)
CASSRQGNTEAFF

SEQ ID NO: 650921 - protein, 11 aa, Homo sapiens
  CDR3 for alpha chain variable domain of TCR clone 325461 (TRAV30, TRAJ24)
WMLTAGGKFQF

SEQ ID NO: 650922 - protein, 14 aa, Homo sapiens
  CDR3 for beta chain variable domain of TCR clone 325461 (TRBV12-5, TRBJ2-5)
CASGSRTHQEAQYF

SEQ ID NO: 650923 - protein, 13 aa, Homo sapiens
  CDR3 for alpha chain variable domain of TCR clone 325462 (TRAV36/DV7, TRAJ7)
CAGTRYGNNRIAF

SEQ ID NO: 650924 - protein, 14 aa, Homo sapiens
  CDR3 for beta chain variable domain of TCR clone 325462 (TRBV19, TRBJ2-1)
CASPTFVLSGEQFF

SEQ ID NO: 650925 - protein, 11 aa, Homo sapiens
  CDR3 for alpha chain variable domain of TCR clone 325463 (TRAV12-1, TRAJ30)
CVVNGQDKSIF

SEQ ID NO: 650926 - protein, 15 aa, Homo sapiens
  CDR3 for beta chain variable domain of TCR clone 325463 (TRBV28, TRBJ2-5)
CASSSGRTIQETQYF

SEQ ID NO: 650927 - protein, 16 aa, Homo sapiens
  CDR3 for alpha chain variable domain of TCR clone 325464 (TRAV30, TRAJ24)
CGTEIVGADSWGKCQF

SEQ ID NO: 650928 - protein, 13 aa, Homo sapiens
  CDR3 for beta chain variable domain of TCR clone 325464 (TRBV7-2, TRBJ1-3)
CASSLAPGNTIYF

SEQ ID NO: 650929 - protein, 14 aa, Homo sapiens
  CDR3 for alpha chain variable domain of TCR clone 325465 (TRAV26-1, TRAJ38)
CIADNAGNNRKMIW

SEQ ID NO: 650930 - protein, 15 aa, Homo sapiens
  CDR3 for beta chain variable domain of TCR clone 325465 (TRBV7-3, TRBJ2-2)
CASSETGQGTGELFF

SEQ ID NO: 650931 - protein, 14 aa, Homo sapiens
  CDR3 for alpha chain variable domain of TCR clone 325466 (TRAV4, TRAJ6)
CLVGEAGGSYIPTF

SEQ ID NO: 650932 - protein, 13 aa, Homo sapiens
  CDR3 for beta chain variable domain of TCR clone 325466 (TRBV7-3, TRBJ1-1)
CASSQDWGAEDVF

SEQ ID NO: 650933 - protein, 13 aa, Homo sapiens
  CDR3 for alpha chain variable domain of TCR clone 325467 (TRAV13-1, TRAJ27)
CAASIHQCRQINL

SEQ ID NO: 650934 - protein, 16 aa, Homo sapiens
  CDR3 for beta chain variable domain of TCR clone 325467 (TRBV13, TRBJ2-2)
CQQLRFRGTKHRELFF

SEQ ID NO: 650935 - protein, 15 aa, Homo sapiens
  CDR3 for alpha chain variable domain of TCR clone 325468 (TRAV8-4, TRAJ40)
CAVGSITSGTYKYIF

SEQ ID NO: 650936 - protein, 13 aa, Homo sapiens
  CDR3 for beta chain variable domain of TCR clone 325468 (TRBV2, TRBJ2-1)
CAASRGTDNEQFF

SEQ ID NO: 650937 - protein, 13 aa, Homo sapiens
  CDR3 for alpha chain variable domain of TCR clone 325469 (TRAV12-2, TRAJ34)
CAVRGYSTDKLIF

SEQ ID NO: 650938 - protein, 17 aa, Homo sapiens
  CDR3 for beta chain variable domain of TCR clone 325469 (TRBV28, TRBJ2-7)
CASSPLPAGGKSYEQYF

SEQ ID NO: 650939 - protein, 14 aa, Homo sapiens
  CDR3 for alpha chain variable domain of TCR clone 325470 (TRAV12-1, TRAJ54)
CVVNIYQGAQKLVF

SEQ ID NO: 650940 - protein, 14 aa, Homo sapiens
  CDR3 for beta chain variable domain of TCR clone 325470 (TRBV19, TRBJ2-1)
CASPTFVLSGEQFF

SEQ ID NO: 650941 - protein, 14 aa, Homo sapiens
  CDR3 for alpha chain variable domain of TCR clone 325471 (TRAV35, TRAJ53)
CAGNSGGSNYKLTF

SEQ ID NO: 650942 - protein, 15 aa, Homo sapiens
  CDR3 for beta chain variable domain of TCR clone 325471 (TRBV4-1, TRBJ2-5)
CASSQSRGDQETQYF

SEQ ID NO: 650943 - protein, 14 aa, Homo sapiens
  CDR3 for alpha chain variable domain of TCR clone 325472 (TRAV38-1, TRAJ45)
CAYYSGGGADGLTF

SEQ ID NO: 650944 - protein, 16 aa, Homo sapiens
  CDR3 for beta chain variable domain of TCR clone 325472 (TRBV20-1, TRBJ1-2)
CSASMGQGVANYGYTF

SEQ ID NO: 650945 - protein, 12 aa, Homo sapiens
  CDR3 for alpha chain variable domain of TCR clone 325473 (TRAV13-1, TRAJ53)
AASGGSNYKLTF

SEQ ID NO: 650946 - protein, 15 aa, Homo sapiens
  CDR3 for beta chain variable domain of TCR clone 325473 (TRBV5-1, TRBJ2-1)
CASSPPSAPYNEQFF

SEQ ID NO: 650947 - protein, 15 aa, Homo sapiens
  CDR3 for alpha chain variable domain of TCR clone 325474 (TRAV26-1, TRAJ23)
CIVRVAINQGGKLIF

SEQ ID NO: 650948 - protein, 16 aa, Homo sapiens
  CDR3 for beta chain variable domain of TCR clone 325474 (TRBV2, TRBJ2-1)
CASSVGGSLAYNEQFF

SEQ ID NO: 650949 - protein, 14 aa, Homo sapiens
  CDR3 for alpha chain variable domain of TCR clone 325475 (TRAV12-3, TRAJ12)
CAMSALDSSYKLIF

SEQ ID NO: 650950 - protein, 14 aa, Homo sapiens
  CDR3 for beta chain variable domain of TCR clone 325475 (TRBV12-5, TRBJ2-5)
CASGSRTHQETQYF

SEQ ID NO: 650951 - protein, 18 aa, Homo sapiens
  CDR3 for alpha chain variable domain of TCR clone 325476 (TRAV21, TRAJ52)
CAVRPSPAGVTSYGKLTS

SEQ ID NO: 650952 - protein, 13 aa, Homo sapiens
  CDR3 for beta chain variable domain of TCR clone 325476 (TRBV7-3, TRBJ1-1)
CASSQDWGAEAFF

SEQ ID NO: 650953 - protein, 17 aa, Homo sapiens
  CDR3 for alpha chain variable domain of TCR clone 325477 (TRAV38-2/DV8, TRAJ28)
CAFLTLYSGAGSYQLTF

SEQ ID NO: 650954 - protein, 14 aa, Homo sapiens
  CDR3 for beta chain variable domain of TCR clone 325477 (TRBV7-2, TRBJ2-5)
WASSLSGGGETQYF

SEQ ID NO: 650955 - protein, 19 aa, Homo sapiens
  CDR3 for alpha chain variable domain of TCR clone 325478 (TRAV3, TRAJ6)
CAVRDRNPSRSVGSDIPTF

SEQ ID NO: 650956 - protein, 15 aa, Homo sapiens
  CDR3 for beta chain variable domain of TCR clone 325478 (TRBV18, TRBJ2-7)
CASSPNFMDSYEQYF

SEQ ID NO: 650957 - protein, 13 aa, Homo sapiens
  CDR3 for alpha chain variable domain of TCR clone 325479 (TRAV13-1, TRAJ20)
CAARVSNDYKLSF

SEQ ID NO: 650958 - protein, 12 aa, Homo sapiens
  CDR3 for beta chain variable domain of TCR clone 325479 (TRBV20-1, TRBJ2-1)
CSARLSTDEQFF

SEQ ID NO: 650959 - protein, 11 aa, Homo sapiens
  CDR3 for alpha chain variable domain of TCR clone 325480 (TRAV2, TRAJ13)
CASGGYQKVSF

SEQ ID NO: 650960 - protein, 14 aa, Homo sapiens
  CDR3 for beta chain variable domain of TCR clone 325480 (TRBV19, TRBJ2-1)
CASSKDRGQDEQFF

SEQ ID NO: 650961 - protein, 15 aa, Homo sapiens
  CDR3 for alpha chain variable domain of TCR clone 325481 (TRAV3, TRAJ4)
CAVRDGTGGYNKLIF

SEQ ID NO: 650962 - protein, 15 aa, Homo sapiens
  CDR3 for beta chain variable domain of TCR clone 325481 (TRBV5-1, TRBJ2-1)
CASSPPRAPYNEQFF

SEQ ID NO: 650963 - protein, 12 aa, Homo sapiens
  CDR3 for alpha chain variable domain of TCR clone 325482 (TRAV17, TRAJ4)
CATDGGCNKLIF

SEQ ID NO: 650964 - protein, 13 aa, Homo sapiens
  CDR3 for beta chain variable domain of TCR clone 325482 (TRBV29-1, TRBJ2-2)
CSTTGVNSGELFF

SEQ ID NO: 650965 - protein, 14 aa, Homo sapiens
  CDR3 for alpha chain variable domain of TCR clone 325483 (TRAV12-1, TRAJ30)
CVVNIGGRDAKIIF

SEQ ID NO: 650966 - protein, 13 aa, Homo sapiens
  CDR3 for beta chain variable domain of TCR clone 325483 (TRBV12-5, TRBJ2-1)
CASGLRRGNEHFF

SEQ ID NO: 650967 - protein, 14 aa, Homo sapiens
  CDR3 for alpha chain variable domain of TCR clone 325484 (TRAV1-2, TRAJ16)
CAVNRFSDGQKLLL

SEQ ID NO: 650968 - protein, 13 aa, Homo sapiens
  CDR3 for beta chain variable domain of TCR clone 325484 (TRBV7-9, TRBJ1-2)
CASSLKQNYGSTF

SEQ ID NO: 650969 - protein, 12 aa, Homo sapiens
  CDR3 for alpha chain variable domain of TCR clone 325485 (TRAV13-2, TRAJ41)
CAKNIGRYALNL

SEQ ID NO: 650970 - protein, 12 aa, Homo sapiens
  CDR3 for beta chain variable domain of TCR clone 325485 (TRBV7-9, TRBJ1-1)
CASSLSGGVAFF

SEQ ID NO: 650971 - protein, 16 aa, Homo sapiens
  CDR3 for alpha chain variable domain of TCR clone 325486 (TRAV3, TRAJ5)
CAVRDLMDTGRRALTF

SEQ ID NO: 650972 - protein, 16 aa, Homo sapiens
  CDR3 for beta chain variable domain of TCR clone 325486 (TRBV4-2, TRBJ2-7)
CASSQEGLANSYEQYF

SEQ ID NO: 650973 - protein, 13 aa, Homo sapiens
  CDR3 for alpha chain variable domain of TCR clone 325487 (TRAV17, TRAJ29)
CATFGSGNTPLVF

SEQ ID NO: 650974 - protein, 16 aa, Homo sapiens
  CDR3 for beta chain variable domain of TCR clone 325487 (TRBV7-8, TRBJ2-4)
CASSAERTLAKNIQYF

SEQ ID NO: 650975 - protein, 17 aa, Homo sapiens
  CDR3 for alpha chain variable domain of TCR clone 325488 (TRAV13-1, TRAJ28)
CTASPPYSGAGSYQLTF

SEQ ID NO: 650976 - protein, 18 aa, Homo sapiens
  CDR3 for beta chain variable domain of TCR clone 325488 (TRBV7-2, TRBJ2-3)
CASSLETSRGRKADTQYF

SEQ ID NO: 650977 - protein, 14 aa, Homo sapiens
  CDR3 for alpha chain variable domain of TCR clone 325489 (TRAV13-1, TRAJ4)
CAATLPIGYNKLIF

SEQ ID NO: 650978 - protein, 14 aa, Homo sapiens
  CDR3 for beta chain variable domain of TCR clone 325489 (TRBV25-1, TRBJ1-1)
CASTHLGGNTEAFF

SEQ ID NO: 650979 - protein, 14 aa, Homo sapiens
  CDR3 for alpha chain variable domain of TCR clone 325490 (TRAV17, TRAJ45)
CATASVGGADGLTF

SEQ ID NO: 650980 - protein, 15 aa, Homo sapiens
  CDR3 for beta chain variable domain of TCR clone 325490 (TRBV11-2, TRBJ2-1)
CASSRNRGLMYEQFF

SEQ ID NO: 650981 - protein, 11 aa, Homo sapiens
  CDR3 for alpha chain variable domain of TCR clone 325491 (TRAV1-1, TRAJ23)
CAVRQGGKLIF

SEQ ID NO: 650982 - protein, 12 aa, Homo sapiens
  CDR3 for beta chain variable domain of TCR clone 325491 (TRBV7-2, TRBJ1-4)
CASSQANEKLFF

SEQ ID NO: 650983 - protein, 15 aa, Homo sapiens
  CDR3 for alpha chain variable domain of TCR clone 325492 (TRAV27, TRAJ38)
CSARRNAGNNRKLIW

SEQ ID NO: 650984 - protein, 13 aa, Homo sapiens
  CDR3 for beta chain variable domain of TCR clone 325492 (TRBV12-5, TRBJ2-3)
CAGGDRQSDTQYF

SEQ ID NO: 650985 - protein, 13 aa, Homo sapiens
  CDR3 for alpha chain variable domain of TCR clone 325493 (TRAV21, TRAJ27)
CAARPGNAGKSTF

SEQ ID NO: 650986 - protein, 14 aa, Homo sapiens
  CDR3 for beta chain variable domain of TCR clone 325493 (TRBV20-1, TRBJ2-1)
CSAAGSGEYNEQFF

SEQ ID NO: 650987 - protein, 15 aa, Homo sapiens
  CDR3 for alpha chain variable domain of TCR clone 325494 (TRAV3, TRAJ5)
CAVRDLYTGRRALTF

SEQ ID NO: 650988 - protein, 15 aa, Homo sapiens
  CDR3 for beta chain variable domain of TCR clone 325494 (TRBV20-1, TRBJ1-4)
QCSGTGLLTNEKLFF

SEQ ID NO: 650989 - protein, 14 aa, Homo sapiens
  CDR3 for alpha chain variable domain of TCR clone 325495 (TRAV12-3, TRAJ29)
CAMSPYSGTTPLVF

SEQ ID NO: 650990 - protein, 15 aa, Homo sapiens
  CDR3 for beta chain variable domain of TCR clone 325495 (TRBV27, TRBJ2-1)
CASSNGGRSSNEHFF

SEQ ID NO: 650991 - protein, 12 aa, Homo sapiens
  CDR3 for alpha chain variable domain of TCR clone 325496 (TRAV12-3, TRAJ17)
CAMTLTGTKLTF

SEQ ID NO: 650992 - protein, 12 aa, Homo sapiens
  CDR3 for beta chain variable domain of TCR clone 325496 (TRBV12-4, TRBJ2-3)
CASSTLPDTQYF

SEQ ID NO: 650993 - protein, 12 aa, Homo sapiens
  CDR3 for alpha chain variable domain of TCR clone 325497 (TRAV21, TRAJ31)
CVLAGNNARLMF

SEQ ID NO: 650994 - protein, 14 aa, Homo sapiens
  CDR3 for beta chain variable domain of TCR clone 325497 (TRBV4-1, TRBJ2-2)
CASSQAVNTGELFF

SEQ ID NO: 650995 - protein, 13 aa, Homo sapiens
  CDR3 for alpha chain variable domain of TCR clone 325498 (TRAV26-2, TRAJ27)
CILRSTNAGKSTF

SEQ ID NO: 650996 - protein, 15 aa, Homo sapiens
  CDR3 for beta chain variable domain of TCR clone 325498 (TRBV10-2, TRBJ2-7)
CASWNRGQATYEQYF

SEQ ID NO: 650997 - protein, 12 aa, Homo sapiens
  CDR3 for alpha chain variable domain of TCR clone 325499 (TRAV12-3, TRAJ17)
CAMTLTGHKLTF

SEQ ID NO: 650998 - protein, 12 aa, Homo sapiens
  CDR3 for beta chain variable domain of TCR clone 325499 (TRBV7-8, TRBJ2-7)
CASSLGDREQYF

SEQ ID NO: 650999 - protein, 15 aa, Homo sapiens
  CDR3 for alpha chain variable domain of TCR clone 325500 (TRAV13-1, TRAJ17)
CAASIERAAGNKLTS

SEQ ID NO: 651000 - protein, 17 aa, Homo sapiens
  CDR3 for beta chain variable domain of TCR clone 325500 (TRBV11-2, TRBJ2-1)
CASSLYPPGVEYNEQFF

SEQ ID NO: 651001 - protein, 15 aa, Homo sapiens
  CDR3 for alpha chain variable domain of TCR clone 325501 (TRAV13-2, TRAJ50)
CSEEPLKTSYDKLIF

SEQ ID NO: 651002 - protein, 15 aa, Homo sapiens
  CDR3 for beta chain variable domain of TCR clone 325501 (TRBV20-1, TRBJ1-5)
CSARGSVDSNQPQHF

SEQ ID NO: 651003 - protein, 16 aa, Homo sapiens
  CDR3 for alpha chain variable domain of TCR clone 325502 (TRAV38-1, TRAJ37)
CAFKGDGSSNTGKLIF

SEQ ID NO: 651004 - protein, 13 aa, Homo sapiens
  CDR3 for beta chain variable domain of TCR clone 325502 (TRBV12-4, TRBJ2-2)
CASSITGSGELFF

SEQ ID NO: 651005 - protein, 12 aa, Homo sapiens
  CDR3 for alpha chain variable domain of TCR clone 325503 (TRAV12-3, TRAJ17)
CAMTLTGNKLTF

SEQ ID NO: 651006 - protein, 16 aa, Homo sapiens
  CDR3 for beta chain variable domain of TCR clone 325503 (TRBV7-3, TRBJ2-1)
CASILEGYRSYNEQFF

SEQ ID NO: 651007 - protein, 15 aa, Homo sapiens
  CDR3 for alpha chain variable domain of TCR clone 325504 (TRAV8-3, TRAJ11)
CAVGLLNSGYSTLTF

SEQ ID NO: 651008 - protein, 15 aa, Homo sapiens
  CDR3 for beta chain variable domain of TCR clone 325504 (TRBV20-1, TRBJ2-7)
CSARKGLAESYEQYF

SEQ ID NO: 651009 - protein, 14 aa, Homo sapiens
  CDR3 for alpha chain variable domain of TCR clone 325505 (TRAV17, TRAJ57)
CATDPQGGSEKLVF

SEQ ID NO: 651010 - protein, 14 aa, Homo sapiens
  CDR3 for beta chain variable domain of TCR clone 325505 (TRBV7-9, TRBJ2-4)
CASTTGGAKNIQYF

SEQ ID NO: 651011 - protein, 14 aa, Homo sapiens
  CDR3 for alpha chain variable domain of TCR clone 325506 (TRAV4, TRAJ23)
CLVGAGNQGGKLIF

SEQ ID NO: 651012 - protein, 14 aa, Homo sapiens
  CDR3 for beta chain variable domain of TCR clone 325506 (TRBV19, TRBJ2-1)
CASPTFVLSGEQFF

SEQ ID NO: 651013 - protein, 14 aa, Homo sapiens
  CDR3 for alpha chain variable domain of TCR clone 325507 (TRAV26-1, TRAJ38)
CIADNAGNNRKLIW

SEQ ID NO: 651014 - protein, 14 aa, Homo sapiens
  CDR3 for beta chain variable domain of TCR clone 325507 (TRBV12-4, TRBJ1-1)
CASSLGTGGTEAFF

SEQ ID NO: 651015 - protein, 15 aa, Homo sapiens
  CDR3 for alpha chain variable domain of TCR clone 325508 (TRAV21, TRAJ40)
CAMRPQTSGTYKYIF

SEQ ID NO: 651016 - protein, 15 aa, Homo sapiens
  CDR3 for beta chain variable domain of TCR clone 325508 (TRBV9, TRBJ1-6)
CASSVAGTGDSPLHF

SEQ ID NO: 651017 - protein, 14 aa, Homo sapiens
  CDR3 for alpha chain variable domain of TCR clone 325509 (TRAV8-2, TRAJ37)
CVVSISGNTGKLIF

SEQ ID NO: 651018 - protein, 16 aa, Homo sapiens
  CDR3 for beta chain variable domain of TCR clone 325509 (TRBV6-1, TRBJ2-5)
CASSETLDRGAETQYF

SEQ ID NO: 651019 - protein, 14 aa, Homo sapiens
  CDR3 for alpha chain variable domain of TCR clone 325510 (TRAV21, TRAJ21)
CAVGVEDNFNKFYF

SEQ ID NO: 651020 - protein, 17 aa, Homo sapiens
  CDR3 for beta chain variable domain of TCR clone 325510 (TRBV20-1, TRBJ2-1)
CSASSSGLAGYYNEQFF

SEQ ID NO: 651021 - protein, 11 aa, Homo sapiens
  CDR3 for alpha chain variable domain of TCR clone 325511 (TRAV17, TRAJ9)
CGFTGGFKTIF

SEQ ID NO: 651022 - protein, 15 aa, Homo sapiens
  CDR3 for beta chain variable domain of TCR clone 325511 (TRBV20-1, TRBJ2-1)
CSARGIGGTYNEQFF

SEQ ID NO: 651023 - protein, 15 aa, Homo sapiens
  CDR3 for alpha chain variable domain of TCR clone 325512 (TRAV17, TRAJ57)
CAAGPSPGGSEKLVF

SEQ ID NO: 651024 - protein, 16 aa, Homo sapiens
  CDR3 for beta chain variable domain of TCR clone 325512 (TRBV12-4, TRBJ1-5)
CASSRPVGGSNQPQHF

SEQ ID NO: 651025 - protein, 15 aa, Homo sapiens
  CDR3 for alpha chain variable domain of TCR clone 325513 (TRAV35, TRAJ20)
CAGQLVGSNDYELSF

SEQ ID NO: 651026 - protein, 13 aa, Homo sapiens
  CDR3 for beta chain variable domain of TCR clone 325513 (TRBV19, TRBJ2-7)
CASSKTGTHEQYF

SEQ ID NO: 651027 - protein, 15 aa, Homo sapiens
  CDR3 for alpha chain variable domain of TCR clone 325514 (TRAV12-2, TRAJ53)
CAVNGGGGSNYKLTF

SEQ ID NO: 651028 - protein, 14 aa, Homo sapiens
  CDR3 for beta chain variable domain of TCR clone 325514 (TRBV13, TRBJ2-3)
CASSSGSPTDTQYF

SEQ ID NO: 651029 - protein, 14 aa, Homo sapiens
  CDR3 for alpha chain variable domain of TCR clone 325515 (TRAV13-1, TRAJ35)
CAASKGGFWNVLHC

SEQ ID NO: 651030 - protein, 16 aa, Homo sapiens
  CDR3 for beta chain variable domain of TCR clone 325515 (TRBV12-4, TRBJ2-5)
CASSFFVRGRQETQYF

SEQ ID NO: 651031 - protein, 12 aa, Homo sapiens
  CDR3 for alpha chain variable domain of TCR clone 325516 (TRAV8-4, TRAJ31)
CAVRDSNARLMF

SEQ ID NO: 651032 - protein, 14 aa, Homo sapiens
  CDR3 for beta chain variable domain of TCR clone 325516 (TRBV20-1, TRBJ2-7)
CSAKRGRSSYEQYF

SEQ ID NO: 651033 - protein, 12 aa, Homo sapiens
  CDR3 for alpha chain variable domain of TCR clone 325517 (TRAV29/DV5, TRAJ49)
CAATDPGNQFYF

SEQ ID NO: 651034 - protein, 12 aa, Homo sapiens
  CDR3 for beta chain variable domain of TCR clone 325517 (TRBV12-4, TRBJ2-7)
CASSLGGYEQYF

SEQ ID NO: 651035 - protein, 14 aa, Homo sapiens
  CDR3 for alpha chain variable domain of TCR clone 325518 (TRAV12-2, TRAJ13)
CAVKKTGGYQKVTF

SEQ ID NO: 651036 - protein, 18 aa, Homo sapiens
  CDR3 for beta chain variable domain of TCR clone 325518 (TRBV12-5, TRBJ2-5)
CASGSHTSRDPVLRARHA

SEQ ID NO: 651037 - protein, 15 aa, Homo sapiens
  CDR3 for alpha chain variable domain of TCR clone 325519 (TRAV21, TRAJ53)
CATLNSGGSNYKLTF

SEQ ID NO: 651038 - protein, 13 aa, Homo sapiens
  CDR3 for beta chain variable domain of TCR clone 325519 (TRBV11-2, TRBJ2-1)
CASSLDLVNEQFF

SEQ ID NO: 651039 - protein, 11 aa, Homo sapiens
  CDR3 for alpha chain variable domain of TCR clone 325520 (TRAV2, TRAJ23)
CAVENRGKLIF

SEQ ID NO: 651040 - protein, 14 aa, Homo sapiens
  CDR3 for beta chain variable domain of TCR clone 325520 (TRBV2, TRBJ2-3)
CASSEGQNTDTQYF

SEQ ID NO: 651041 - protein, 13 aa, Homo sapiens
  CDR3 for alpha chain variable domain of TCR clone 325521 (TRAV13-2, TRAJ53)
CAENMGSNYKLTF

SEQ ID NO: 651042 - protein, 13 aa, Homo sapiens
  CDR3 for beta chain variable domain of TCR clone 325521 (TRBV4-1, TRBJ2-2)
CASSQENTGELIF

SEQ ID NO: 651043 - protein, 16 aa, Homo sapiens
  CDR3 for alpha chain variable domain of TCR clone 325522 (TRAV30, TRAJ24)
CGTEIVDADSWGKFQF

SEQ ID NO: 651044 - protein, 13 aa, Homo sapiens
  CDR3 for beta chain variable domain of TCR clone 325522 (TRBV11-2, TRBJ2-5)
CASSSTGEETEYF

SEQ ID NO: 651045 - protein, 12 aa, Homo sapiens
  CDR3 for alpha chain variable domain of TCR clone 325523 (TRAV13-1, TRAJ27)
CAAHTNAGKSTF

SEQ ID NO: 651046 - protein, 15 aa, Homo sapiens
  CDR3 for beta chain variable domain of TCR clone 325523 (TRBV3-1, TRBJ2-7)
CASSQEWTGSYEQYF

SEQ ID NO: 651047 - protein, 16 aa, Homo sapiens
  CDR3 for alpha chain variable domain of TCR clone 325524 (TRAV16, TRAJ52)
SALSAAGGTSYGKLTF

SEQ ID NO: 651048 - protein, 16 aa, Homo sapiens
  CDR3 for beta chain variable domain of TCR clone 325524 (TRBV12-4, TRBJ1-5)
CASSRPVGGSNQPQHF

SEQ ID NO: 651049 - protein, 16 aa, Homo sapiens
  CDR3 for alpha chain variable domain of TCR clone 325525 (TRAV21, TRAJ45)
CAVSWGSGGGADGLTF

SEQ ID NO: 651050 - protein, 15 aa, Homo sapiens
  CDR3 for beta chain variable domain of TCR clone 325525 (TRBV9, TRBJ1-6)
CASSVAGTGDSPLHF

SEQ ID NO: 651051 - protein, 13 aa, Homo sapiens
  CDR3 for alpha chain variable domain of TCR clone 325526 (TRAV8-1, TRAJ39)
CAGLNNAGTMLTF

SEQ ID NO: 651052 - protein, 17 aa, Homo sapiens
  CDR3 for beta chain variable domain of TCR clone 325526 (TRBV19, TRBJ2-3)
CASSIDPAGGGTDTQYF

SEQ ID NO: 651053 - protein, 14 aa, Homo sapiens
  CDR3 for alpha chain variable domain of TCR clone 325527 (TRAV12-3, TRAJ53)
CAVKGGGSNYKLTF

SEQ ID NO: 651054 - protein, 15 aa, Homo sapiens
  CDR3 for beta chain variable domain of TCR clone 325527 (TRBV11-2, TRBJ2-2)
CASSSDRVNAGELFF

SEQ ID NO: 651055 - protein, 11 aa, Homo sapiens
  CDR3 for alpha chain variable domain of TCR clone 325528 (TRAV20, TRAJ23)
CACNQGGKLIF

SEQ ID NO: 651056 - protein, 17 aa, Homo sapiens
  CDR3 for beta chain variable domain of TCR clone 325528 (TRBV15, TRBJ1-2)
CATSGREIDVVNYGYSF

SEQ ID NO: 651057 - protein, 15 aa, Homo sapiens
  CDR3 for alpha chain variable domain of TCR clone 325529 (TRAV21, TRAJ24)
CADRSSTYSWGKLQF

SEQ ID NO: 651058 - protein, 13 aa, Homo sapiens
  CDR3 for beta chain variable domain of TCR clone 325529 (TRBV11-2, TRBJ2-5)
CASSSTGEETQYF

SEQ ID NO: 651059 - protein, 19 aa, Homo sapiens
  CDR3 for alpha chain variable domain of TCR clone 325530 (TRAV1-2, TRAJ26)
CLLPLCCERPDNYGQTFVF

SEQ ID NO: 651060 - protein, 17 aa, Homo sapiens
  CDR3 for beta chain variable domain of TCR clone 325530 (TRBV28, TRBJ2-5)
CASSRQGGLAGAETQYF

SEQ ID NO: 651061 - protein, 14 aa, Homo sapiens
  CDR3 for alpha chain variable domain of TCR clone 325531 (TRAV17, TRAJ12)
CATDKKDSSYKLIF

SEQ ID NO: 651062 - protein, 18 aa, Homo sapiens
  CDR3 for beta chain variable domain of TCR clone 325531 (TRBV25-1, TRBJ1-2)
CASSGLQNGQGLIFGYTF

SEQ ID NO: 651063 - protein, 14 aa, Homo sapiens
  CDR3 for alpha chain variable domain of TCR clone 325532 (TRAV8-2, TRAJ45)
CVVSAGGGADGPTF

SEQ ID NO: 651064 - protein, 12 aa, Homo sapiens
  CDR3 for beta chain variable domain of TCR clone 325532 (TRBV12-4, TRBJ2-1)
CASSLVRVEQFF

SEQ ID NO: 651065 - protein, 12 aa, Homo sapiens
  CDR3 for alpha chain variable domain of TCR clone 325533 (TRAV21, TRAJ23)
CAVGPQGGTPIF

SEQ ID NO: 651066 - protein, 13 aa, Homo sapiens
  CDR3 for beta chain variable domain of TCR clone 325533 (TRBV20-1, TRBJ2-7)
CSARTGAGYEQYF

SEQ ID NO: 651067 - protein, 14 aa, Homo sapiens
  CDR3 for alpha chain variable domain of TCR clone 325534 (TRAV1-2, TRAJ24)
CAVLTTDSWWKFQF

SEQ ID NO: 651068 - protein, 15 aa, Homo sapiens
  CDR3 for beta chain variable domain of TCR clone 325534 (TRBV6-6, TRBJ2-7)
CASSYSYGGSYEQYF

SEQ ID NO: 651069 - protein, 14 aa, Homo sapiens
  CDR3 for alpha chain variable domain of TCR clone 325535 (TRAV16, TRAJ54)
CALTLIQGAQKLVF

SEQ ID NO: 651070 - protein, 17 aa, Homo sapiens
  CDR3 for beta chain variable domain of TCR clone 325535 (TRBV11-2, TRBJ2-4)
CASSSVGPGGHRNIQYF

SEQ ID NO: 651071 - protein, 20 aa, Homo sapiens
  CDR3 for alpha chain variable domain of TCR clone 325536 (TRAV21, TRAJ4)
AASQPGDSATLAGGYNKLIF

SEQ ID NO: 651072 - protein, 19 aa, Homo sapiens
  CDR3 for beta chain variable domain of TCR clone 325536 (TRBV18, TRBJ1-3)
CASSPRSRTGMSSGNTIYF

SEQ ID NO: 651073 - protein, 15 aa, Homo sapiens
  CDR3 for alpha chain variable domain of TCR clone 325537 (TRAV26-1, TRAJ40)
CIVRAVPSGTYKYIF

SEQ ID NO: 651074 - protein, 14 aa, Homo sapiens
  CDR3 for beta chain variable domain of TCR clone 325537 (TRBV19, TRBJ2-1)
CASNDPGLANEQFF

SEQ ID NO: 651075 - protein, 13 aa, Homo sapiens
  CDR3 for alpha chain variable domain of TCR clone 325538 (TRAV2, TRAJ23)
CAVMGNQVGKLIF

SEQ ID NO: 651076 - protein, 14 aa, Homo sapiens
  CDR3 for beta chain variable domain of TCR clone 325538 (TRBV11-2, TRBJ2-1)
CASSRATSYNEQFF

SEQ ID NO: 651077 - protein, 14 aa, Homo sapiens
  CDR3 for alpha chain variable domain of TCR clone 325539 (TRAV12-2, TRAJ9)
CAVNMAGGGFKTIF

SEQ ID NO: 651078 - protein, 14 aa, Homo sapiens
  CDR3 for beta chain variable domain of TCR clone 325539 (TRBV27, TRBJ2-3)
CASRKGGRTDTQYF

SEQ ID NO: 651079 - protein, 14 aa, Homo sapiens
  CDR3 for alpha chain variable domain of TCR clone 325540 (TRAV29/DV5, TRAJ30)
CAARLMNSDDKIIF

SEQ ID NO: 651080 - protein, 17 aa, Homo sapiens
  CDR3 for beta chain variable domain of TCR clone 325540 (TRBV12-4, TRBJ2-3)
CASSGPGLAGGADTQYF

SEQ ID NO: 651081 - protein, 13 aa, Homo sapiens
  CDR3 for alpha chain variable domain of TCR clone 325541 (TRAV17, TRAJ9)
CATDYTGGFKTIF

SEQ ID NO: 651082 - protein, 15 aa, Homo sapiens
  CDR3 for beta chain variable domain of TCR clone 325541 (TRBV19, TRBJ2-7)
CASSIAGTGGYEQYF

SEQ ID NO: 651083 - protein, 14 aa, Homo sapiens
  CDR3 for alpha chain variable domain of TCR clone 325542 (TRAV13-2, TRAJ15)
CAENPNQAGTALIF

SEQ ID NO: 651084 - protein, 16 aa, Homo sapiens
  CDR3 for beta chain variable domain of TCR clone 325542 (TRBV12-4, TRBJ1-2)
CASGPTATGKTRGYTF

SEQ ID NO: 651085 - protein, 12 aa, Homo sapiens
  CDR3 for alpha chain variable domain of TCR clone 325543 (TRAV12-3, TRAJ17)
CAMTLTGNKLTF

SEQ ID NO: 651086 - protein, 12 aa, Homo sapiens
  CDR3 for beta chain variable domain of TCR clone 325543 (TRBV24-1, TRBJ1-1)
CATSDPGLEAFF

SEQ ID NO: 651087 - protein, 14 aa, Homo sapiens
  CDR3 for alpha chain variable domain of TCR clone 325544 (TRAV12-2, TRAJ45)
CAVYSGGGADGLTF

SEQ ID NO: 651088 - protein, 16 aa, Homo sapiens
  CDR3 for beta chain variable domain of TCR clone 325544 (TRBV15, TRBJ1-2)
CATSRGPRTGGGGYTF

SEQ ID NO: 651089 - protein, 15 aa, Homo sapiens
  CDR3 for alpha chain variable domain of TCR clone 325545 (TRAV12-1, TRAJ44)
CVADLPTGTASKLTF

SEQ ID NO: 651090 - protein, 13 aa, Homo sapiens
  CDR3 for beta chain variable domain of TCR clone 325545 (TRBV12-5, TRBJ2-3)
CASGDRQSDTQYF

SEQ ID NO: 651091 - protein, 16 aa, Homo sapiens
  CDR3 for alpha chain variable domain of TCR clone 325546 (TRAV3, TRAJ3)
CAVRDRAKSSASKIIF

SEQ ID NO: 651092 - protein, 14 aa, Homo sapiens
  CDR3 for beta chain variable domain of TCR clone 325546 (TRBV20-1, TRBJ2-3)
CSASSGGSTDTQYF

SEQ ID NO: 651093 - protein, 16 aa, Homo sapiens
  CDR3 for alpha chain variable domain of TCR clone 325547 (TRAV26-1, TRAJ23)
CIVRVERYNQGGKLIF

SEQ ID NO: 651094 - protein, 15 aa, Homo sapiens
  CDR3 for beta chain variable domain of TCR clone 325547 (TRBV18, TRBJ2-7)
CASSPRGGKGYEKYF

SEQ ID NO: 651095 - protein, 11 aa, Homo sapiens
  CDR3 for alpha chain variable domain of TCR clone 325548 (TRAV22, TRAJ30)
CAGNRDDKIIF

SEQ ID NO: 651096 - protein, 15 aa, Homo sapiens
  CDR3 for beta chain variable domain of TCR clone 325548 (TRBV7-3, TRBJ2-1)
CASSPTGGGEVEQFF

SEQ ID NO: 651097 - protein, 13 aa, Homo sapiens
  CDR3 for alpha chain variable domain of TCR clone 325549 (TRAV13-2, TRAJ40)
CAEFTSGTYKYIF

SEQ ID NO: 651098 - protein, 15 aa, Homo sapiens
  CDR3 for beta chain variable domain of TCR clone 325549 (TRBV11-3, TRBJ2-3)
CASLKDGREGDTQYF

SEQ ID NO: 651099 - protein, 14 aa, Homo sapiens
  CDR3 for alpha chain variable domain of TCR clone 325550 (TRAV8-6, TRAJ29)
CAVSRASGNTPHVF

SEQ ID NO: 651100 - protein, 13 aa, Homo sapiens
  CDR3 for beta chain variable domain of TCR clone 325550 (TRBV19, TRBJ1-5)
CASSEGGNQPQHF

SEQ ID NO: 651101 - protein, 15 aa, Homo sapiens
  CDR3 for alpha chain variable domain of TCR clone 325551 (TRAV21, TRAJ17)
CAVRPGEEAGNKLTF

SEQ ID NO: 651102 - protein, 16 aa, Homo sapiens
  CDR3 for beta chain variable domain of TCR clone 325551 (TRBV2, TRBJ2-7)
CASSEPWTGPSYEQYF

SEQ ID NO: 651103 - protein, 16 aa, Homo sapiens
  CDR3 for alpha chain variable domain of TCR clone 325552 (TRAV17, TRAJ22)
GATGPISSGSARQLTF

SEQ ID NO: 651104 - protein, 13 aa, Homo sapiens
  CDR3 for beta chain variable domain of TCR clone 325552 (TRBV11-2, TRBJ2-1)
CASSLGLAGGRFF

SEQ ID NO: 651105 - protein, 21 aa, Homo sapiens
  CDR3 for alpha chain variable domain of TCR clone 325553 (TRAV1-1, TRAJ6)
CAVRRGEATYLHLEEEPALLF

SEQ ID NO: 651106 - protein, 15 aa, Homo sapiens
  CDR3 for beta chain variable domain of TCR clone 325553 (TRBV6-6, TRBJ2-1)
CATRQGVSSYNEQFF

SEQ ID NO: 651107 - protein, 14 aa, Homo sapiens
  CDR3 for alpha chain variable domain of TCR clone 325554 (TRAV13-1, TRAJ6)
CAASITGGSYIPTF

SEQ ID NO: 651108 - protein, 17 aa, Homo sapiens
  CDR3 for beta chain variable domain of TCR clone 325554 (TRBV7-3, TRBJ2-3)
CASSLMKRMRGADTQYF

SEQ ID NO: 651109 - protein, 14 aa, Homo sapiens
  CDR3 for alpha chain variable domain of TCR clone 325555 (TRAV13-2, TRAJ43)
CAEIPTYNNNDMRF

SEQ ID NO: 651110 - protein, 14 aa, Homo sapiens
  CDR3 for beta chain variable domain of TCR clone 325555 (TRBV4-1, TRBJ2-2)
CASSQAVNTGELFF

SEQ ID NO: 651111 - protein, 14 aa, Homo sapiens
  CDR3 for alpha chain variable domain of TCR clone 325556 (TRAV26-1, TRAJ34)
CIVRVAYNTDKLIF

SEQ ID NO: 651112 - protein, 15 aa, Homo sapiens
  CDR3 for beta chain variable domain of TCR clone 325556 (TRBV20-1, TRBJ2-7)
CSARVPAAYFSEQYF

SEQ ID NO: 651113 - protein, 14 aa, Homo sapiens
  CDR3 for alpha chain variable domain of TCR clone 325557 (TRAV12-3, TRAJ10)
SHLPLTGGGNKLTF

SEQ ID NO: 651114 - protein, 15 aa, Homo sapiens
  CDR3 for beta chain variable domain of TCR clone 325557 (TRBV11-2, TRBJ1-3)
CASSSDGTVGNTIYF

SEQ ID NO: 651115 - protein, 13 aa, Homo sapiens
  CDR3 for alpha chain variable domain of TCR clone 325558 (TRAV8-3, TRAJ5)
CAVGPRGRRALTF

SEQ ID NO: 651116 - protein, 15 aa, Homo sapiens
  CDR3 for beta chain variable domain of TCR clone 325558 (TRBV11-3, TRBJ2-3)
CQQPGGLLGTDTQYF

SEQ ID NO: 651117 - protein, 19 aa, Homo sapiens
  CDR3 for alpha chain variable domain of TCR clone 325559 (TRAV1-2, TRAJ26)
CLLPLCCERPDNFGQNFVF

SEQ ID NO: 651118 - protein, 13 aa, Homo sapiens
  CDR3 for beta chain variable domain of TCR clone 325559 (TRBV19, TRBJ1-2)
CASSQGQVYGYTF

SEQ ID NO: 651119 - protein, 19 aa, Homo sapiens
  CDR3 for alpha chain variable domain of TCR clone 325560 (TRAV13-1, TRAJ52)
CAASPYQNAGGTSYGKLTF

SEQ ID NO: 651120 - protein, 20 aa, Homo sapiens
  CDR3 for beta chain variable domain of TCR clone 325560 (TRBV7-8, TRBJ2-1)
CASSLAHRLAGVRSYNEQFF

SEQ ID NO: 651121 - protein, 11 aa, Homo sapiens
  CDR3 for alpha chain variable domain of TCR clone 325561 (TRAV1-1, TRAJ23)
CAVRQGGKLIF

SEQ ID NO: 651122 - protein, 15 aa, Homo sapiens
  CDR3 for beta chain variable domain of TCR clone 325561 (TRBV6-1, TRBJ2-5)
CASSEGWGIQETQYF

SEQ ID NO: 651123 - protein, 12 aa, Homo sapiens
  CDR3 for alpha chain variable domain of TCR clone 325562 (TRAV21, TRAJ13)
PGPSGGYQKVTF

SEQ ID NO: 651124 - protein, 15 aa, Homo sapiens
  CDR3 for beta chain variable domain of TCR clone 325562 (TRBV20-1, TRBJ2-3)
CSARPSGFYTDTQYF

SEQ ID NO: 651125 - protein, 15 aa, Homo sapiens
  CDR3 for alpha chain variable domain of TCR clone 325563 (TRAV14/DV4, TRAJ22)
CNERGPPGSARQMTF

SEQ ID NO: 651126 - protein, 16 aa, Homo sapiens
  CDR3 for beta chain variable domain of TCR clone 325563 (TRBV19, TRBJ1-6)
CASSVAPVAGNSPLHF

SEQ ID NO: 651127 - protein, 15 aa, Homo sapiens
  CDR3 for alpha chain variable domain of TCR clone 325564 (TRAV8-3, TRAJ11)
CAVGLFNSGYSTLTF

SEQ ID NO: 651128 - protein, 14 aa, Homo sapiens
  CDR3 for beta chain variable domain of TCR clone 325564 (TRBV4-1, TRBJ2-5)
CASSRSGSGETQYF

SEQ ID NO: 651129 - protein, 15 aa, Homo sapiens
  CDR3 for alpha chain variable domain of TCR clone 325565 (TRAV26-1, TRAJ23)
CIVRLLNNQGGKLIF

SEQ ID NO: 651130 - protein, 15 aa, Homo sapiens
  CDR3 for beta chain variable domain of TCR clone 325565 (TRBV7-3, TRBJ2-1)
CASSFGQSNYNEQFF

SEQ ID NO: 651131 - protein, 15 aa, Homo sapiens
  CDR3 for alpha chain variable domain of TCR clone 325566 (TRAV3, TRAJ12)
CAVRDIRDSRYKLIF

SEQ ID NO: 651132 - protein, 16 aa, Homo sapiens
  CDR3 for beta chain variable domain of TCR clone 325566 (TRBV19, TRBJ2-1)
CASSKAGPSSYNEQFF

SEQ ID NO: 651133 - protein, 13 aa, Homo sapiens
  CDR3 for alpha chain variable domain of TCR clone 325567 (TRAV27, TRAJ41)
CSGEGNAGYALNF

SEQ ID NO: 651134 - protein, 14 aa, Homo sapiens
  CDR3 for beta chain variable domain of TCR clone 325567 (TRBV7-2, TRBJ1-1)
CASSFLTGTTEAFF

SEQ ID NO: 651135 - protein, 12 aa, Homo sapiens
  CDR3 for alpha chain variable domain of TCR clone 325568 (TRAV12-3, TRAJ17)
CAMTLTGNKLTF

SEQ ID NO: 651136 - protein, 17 aa, Homo sapiens
  CDR3 for beta chain variable domain of TCR clone 325568 (TRBV13, TRBJ2-3)
CASGLSRVAGGRNTQYF

SEQ ID NO: 651137 - protein, 14 aa, Homo sapiens
  CDR3 for alpha chain variable domain of TCR clone 325569 (TRAV23/DV6, TRAJ11)
CAALIGGGYSTFTF

SEQ ID NO: 651138 - protein, 13 aa, Homo sapiens
  CDR3 for beta chain variable domain of TCR clone 325569 (TRBV11-3, TRBJ1-1)
CASSLGGNTEAFF

SEQ ID NO: 651139 - protein, 14 aa, Homo sapiens
  CDR3 for alpha chain variable domain of TCR clone 325570 (TRAV8-4, TRAJ13)
CAVTLSVGYQKVTF

SEQ ID NO: 651140 - protein, 16 aa, Homo sapiens
  CDR3 for beta chain variable domain of TCR clone 325570 (TRBV19, TRBJ2-2)
CASRSPGTGATGELFF

SEQ ID NO: 651141 - protein, 12 aa, Homo sapiens
  CDR3 for alpha chain variable domain of TCR clone 325571 (TRAV12-2, TRAJ10)
WGVTGGGNKLTF

SEQ ID NO: 651142 - protein, 16 aa, Homo sapiens
  CDR3 for beta chain variable domain of TCR clone 325571 (TRBV7-3, TRBJ2-1)
CASSLVSGSSNNEQFF

SEQ ID NO: 651143 - protein, 14 aa, Homo sapiens
  CDR3 for alpha chain variable domain of TCR clone 325572 (TRAV1-1, TRAJ27)
CAVIYNTNAGKSTF

SEQ ID NO: 651144 - protein, 13 aa, Homo sapiens
  CDR3 for beta chain variable domain of TCR clone 325572 (TRBV12-5, TRBJ1-2)
CASSVRTGNGYAF

SEQ ID NO: 651145 - protein, 17 aa, Homo sapiens
  CDR3 for alpha chain variable domain of TCR clone 325573 (TRAV3, TRAJ42)
CAVRDRDYGGSQGNLIF

SEQ ID NO: 651146 - protein, 16 aa, Homo sapiens
  CDR3 for beta chain variable domain of TCR clone 325573 (TRBV19, TRBJ2-2)
CASSAAGTGGTGELFF

SEQ ID NO: 651147 - protein, 13 aa, Homo sapiens
  CDR3 for alpha chain variable domain of TCR clone 325574 (TRAV23/DV6, TRAJ47)
CAASMTRVNKLVF

SEQ ID NO: 651148 - protein, 14 aa, Homo sapiens
  CDR3 for beta chain variable domain of TCR clone 325574 (TRBV7-3, TRBJ1-1)
CASSLKGGNTEAFF

SEQ ID NO: 651149 - protein, 14 aa, Homo sapiens
  CDR3 for alpha chain variable domain of TCR clone 325575 (TRAV12-2, TRAJ13)
CAVKKTGGYQKVTF

SEQ ID NO: 651150 - protein, 15 aa, Homo sapiens
  CDR3 for beta chain variable domain of TCR clone 325575 (TRBV29-1, TRBJ2-6)
CSVGDRGSGANVLTF

SEQ ID NO: 651151 - protein, 16 aa, Homo sapiens
  CDR3 for alpha chain variable domain of TCR clone 325576 (TRAV12-2, TRAJ6)
CAAPLAGPGGSYIPTF

SEQ ID NO: 651152 - protein, 10 aa, Homo sapiens
  CDR3 for beta chain variable domain of TCR clone 325576 (TRBV28, TRBJ1-2)
CASSSDRTVF

SEQ ID NO: 651153 - protein, 11 aa, Homo sapiens
  CDR3 for alpha chain variable domain of TCR clone 325577 (TRAV4, TRAJ23)
CLVAPGGKLIF

SEQ ID NO: 651154 - protein, 16 aa, Homo sapiens
  CDR3 for beta chain variable domain of TCR clone 325577 (TRBV7-8, TRBJ2-5)
CASSPAGGRNQETQYF

SEQ ID NO: 651155 - protein, 13 aa, Homo sapiens
  CDR3 for alpha chain variable domain of TCR clone 325578 (TRAV21, TRAJ20)
CAVGLRVDYKLSF

SEQ ID NO: 651156 - protein, 13 aa, Homo sapiens
  CDR3 for beta chain variable domain of TCR clone 325578 (TRBV2, TRBJ1-4)
CASNRGTNEKLFF

SEQ ID NO: 651157 - protein, 13 aa, Homo sapiens
  CDR3 for alpha chain variable domain of TCR clone 325579 (TRAV12-2, TRAJ39)
CAANNNAGNMLTF

SEQ ID NO: 651158 - protein, 13 aa, Homo sapiens
  CDR3 for beta chain variable domain of TCR clone 325579 (TRBV2, TRBJ1-5)
CATAGPSNQPQHF

SEQ ID NO: 651159 - protein, 16 aa, Homo sapiens
  CDR3 for alpha chain variable domain of TCR clone 325580 (TRAV3, TRAJ37)
CAVRPNGSGNTGKLIF

SEQ ID NO: 651160 - protein, 16 aa, Homo sapiens
  CDR3 for beta chain variable domain of TCR clone 325580 (TRBV9, TRBJ1-2)
CASSVEEKVPPYGYTF

SEQ ID NO: 651161 - protein, 13 aa, Homo sapiens
  CDR3 for alpha chain variable domain of TCR clone 325581 (TRAV13-1, TRAJ10)
CAATAGGGNELTF

SEQ ID NO: 651162 - protein, 14 aa, Homo sapiens
  CDR3 for beta chain variable domain of TCR clone 325581 (TRBV12-4, TRBJ2-7)
CASSPAGLKYEQYF

SEQ ID NO: 651163 - protein, 17 aa, Homo sapiens
  CDR3 for alpha chain variable domain of TCR clone 325582 (TRAV3, TRAJ6)
CAVRDGPRAGGSYIPTF

SEQ ID NO: 651164 - protein, 13 aa, Homo sapiens
  CDR3 for beta chain variable domain of TCR clone 325582 (TRBV2, TRBJ2-7)
CASSGGIAYEQYF

SEQ ID NO: 651165 - protein, 16 aa, Homo sapiens
  CDR3 for alpha chain variable domain of TCR clone 325583 (TRAV3, TRAJ37)
CAVRPHGYGNTGKRIF

SEQ ID NO: 651166 - protein, 16 aa, Homo sapiens
  CDR3 for beta chain variable domain of TCR clone 325583 (TRBV9, TRBJ1-2)
CASSVEEKVSPYGYTF

SEQ ID NO: 651167 - protein, 14 aa, Homo sapiens
  CDR3 for alpha chain variable domain of TCR clone 325584 (TRAV17, TRAJ54)
CATDANQGAQKLVF

SEQ ID NO: 651168 - protein, 12 aa, Homo sapiens
  CDR3 for beta chain variable domain of TCR clone 325584 (TRBV27, TRBJ2-1)
CASRGFYNEQFF

SEQ ID NO: 651169 - protein, 12 aa, Homo sapiens
  CDR3 for alpha chain variable domain of TCR clone 325585 (TRAV21, TRAJ11)
WAATSGYSTLTF

SEQ ID NO: 651170 - protein, 15 aa, Homo sapiens
  CDR3 for beta chain variable domain of TCR clone 325585 (TRBV6-3, TRBJ2-7)
CASSSPGTVFYEQYF

SEQ ID NO: 651171 - protein, 14 aa, Homo sapiens
  CDR3 for alpha chain variable domain of TCR clone 325586 (TRAV12-3, TRAJ10)
SHLPLPGGGNKLTF

SEQ ID NO: 651172 - protein, 13 aa, Homo sapiens
  CDR3 for beta chain variable domain of TCR clone 325586 (TRBV6-1, TRBJ2-1)
CASSPDRNNEQFF

SEQ ID NO: 651173 - protein, 16 aa, Homo sapiens
  CDR3 for alpha chain variable domain of TCR clone 325587 (TRAV8-2, TRAJ7)
CVVSEGPYYGNNRLAF

SEQ ID NO: 651174 - protein, 15 aa, Homo sapiens
  CDR3 for beta chain variable domain of TCR clone 325587 (TRBV20-1, TRBJ2-7)
CSARDRVSGMDEQYF

SEQ ID NO: 651175 - protein, 12 aa, Homo sapiens
  CDR3 for alpha chain variable domain of TCR clone 325588 (TRAV12-3, TRAJ41)
CAMSYSGYVLNF

SEQ ID NO: 651176 - protein, 13 aa, Homo sapiens
  CDR3 for beta chain variable domain of TCR clone 325588 (TRBV7-3, TRBJ2-1)
CASSVDSYNEQFF

SEQ ID NO: 651177 - protein, 13 aa, Homo sapiens
  CDR3 for alpha chain variable domain of TCR clone 325589 (TRAV35, TRAJ42)
CAGFPGSQGNLIF

SEQ ID NO: 651178 - protein, 16 aa, Homo sapiens
  CDR3 for beta chain variable domain of TCR clone 325589 (TRBV20-1, TRBJ2-3)
CSAVRDRGPIADTQYF

SEQ ID NO: 651179 - protein, 15 aa, Homo sapiens
  CDR3 for alpha chain variable domain of TCR clone 325590 (TRAV8-1, TRAJ6)
CAVNANPGGSYIPTF

SEQ ID NO: 651180 - protein, 14 aa, Homo sapiens
  CDR3 for beta chain variable domain of TCR clone 325590 (TRBV11-2, TRBJ1-2)
CASSLGTANYGYTF

SEQ ID NO: 651181 - protein, 16 aa, Homo sapiens
  CDR3 for alpha chain variable domain of TCR clone 325591 (TRAV23/DV6, TRAJ52)
CAARPSGGTGDGKLTF

SEQ ID NO: 651182 - protein, 14 aa, Homo sapiens
  CDR3 for beta chain variable domain of TCR clone 325591 (TRBV20-1, TRBJ2-3)
CSARDASSTDTQYF

SEQ ID NO: 651183 - protein, 11 aa, Homo sapiens
  CDR3 for alpha chain variable domain of TCR clone 325592 (TRAV12-2, TRAJ29)
CAVTLRNPLVF

SEQ ID NO: 651184 - protein, 16 aa, Homo sapiens
  CDR3 for beta chain variable domain of TCR clone 325592 (TRBV19, TRBJ1-5)
CASSIDRGGPRQPQHF

SEQ ID NO: 651185 - protein, 14 aa, Homo sapiens
  CDR3 for alpha chain variable domain of TCR clone 325593 (TRAV23/DV6, TRAJ36)
CAASFPTGANNLFF

SEQ ID NO: 651186 - protein, 14 aa, Homo sapiens
  CDR3 for beta chain variable domain of TCR clone 325593 (TRBV12-5, TRBJ2-5)
CASGSRTHQETQYF

SEQ ID NO: 651187 - protein, 16 aa, Homo sapiens
  CDR3 for alpha chain variable domain of TCR clone 325594 (TRAV3, TRAJ10)
CAVRDMRAGGGNKLTF

SEQ ID NO: 651188 - protein, 17 aa, Homo sapiens
  CDR3 for beta chain variable domain of TCR clone 325594 (TRBV28, TRBJ2-5)
CASSRQGGLAGAETQYF

SEQ ID NO: 651189 - protein, 14 aa, Homo sapiens
  CDR3 for alpha chain variable domain of TCR clone 325595 (TRAV1-2, TRAJ54)
CAVSEVLGAKKLVS

SEQ ID NO: 651190 - protein, 13 aa, Homo sapiens
  CDR3 for beta chain variable domain of TCR clone 325595 (TRBV27, TRBJ2-7)
CASSFVSSYEQYF

SEQ ID NO: 651191 - protein, 12 aa, Homo sapiens
  CDR3 for alpha chain variable domain of TCR clone 325596 (TRAV27, TRAJ35)
CAGADFGNVLHC

SEQ ID NO: 651192 - protein, 13 aa, Homo sapiens
  CDR3 for beta chain variable domain of TCR clone 325596 (TRBV7-3, TRBJ1-1)
CASSQDWGDEAFF

SEQ ID NO: 651193 - protein, 14 aa, Homo sapiens
  CDR3 for alpha chain variable domain of TCR clone 325597 (TRAV26-1, TRAJ38)
CIADNAGNNRKLTW

SEQ ID NO: 651194 - protein, 13 aa, Homo sapiens
  CDR3 for beta chain variable domain of TCR clone 325597 (TRBV20-1, TRBJ1-1)
CNARGGGNTEAFF

SEQ ID NO: 651195 - protein, 10 aa, Homo sapiens
  CDR3 for alpha chain variable domain of TCR clone 325598 (TRAV13-2, TRAJ34)
CAENTDKLIF

SEQ ID NO: 651196 - protein, 15 aa, Homo sapiens
  CDR3 for beta chain variable domain of TCR clone 325598 (TRBV9, TRBJ1-6)
CASSVAGTGDSPLHF

SEQ ID NO: 651197 - protein, 11 aa, Homo sapiens
  CDR3 for alpha chain variable domain of TCR clone 325599 (TRAV21, TRAJ34)
CAHYNTDKLIF

SEQ ID NO: 651198 - protein, 15 aa, Homo sapiens
  CDR3 for beta chain variable domain of TCR clone 325599 (TRBV5-7, TRBJ2-7)
CASSLGPGRGHEQYF

SEQ ID NO: 651199 - protein, 13 aa, Homo sapiens
  CDR3 for alpha chain variable domain of TCR clone 325600 (TRAV23/DV6, TRAJ20)
CEAGGFHDYKLSF

SEQ ID NO: 651200 - protein, 14 aa, Homo sapiens
  CDR3 for beta chain variable domain of TCR clone 325600 (TRBV3-1, TRBJ2-7)
CASSQSGAHYEQYF

SEQ ID NO: 651201 - protein, 14 aa, Homo sapiens
  CDR3 for alpha chain variable domain of TCR clone 325601 (TRAV26-1, TRAJ38)
CIADNAGNNRKLIL

SEQ ID NO: 651202 - protein, 13 aa, Homo sapiens
  CDR3 for beta chain variable domain of TCR clone 325601 (TRBV20-1, TRBJ1-1)
CSARDGGNTEAFF

SEQ ID NO: 651203 - protein, 14 aa, Homo sapiens
  CDR3 for alpha chain variable domain of TCR clone 325602 (TRAV17, TRAJ53)
CATDAGGSNYKLTF

SEQ ID NO: 651204 - protein, 16 aa, Homo sapiens
  CDR3 for beta chain variable domain of TCR clone 325602 (TRBV4-1, TRBJ1-1)
FASSQDAGMGNTEAFF

SEQ ID NO: 651205 - protein, 16 aa, Homo sapiens
  CDR3 for alpha chain variable domain of TCR clone 325603 (TRAV26-1, TRAJ38)
CIVRPLNAGNNRKLIW

SEQ ID NO: 651206 - protein, 13 aa, Homo sapiens
  CDR3 for beta chain variable domain of TCR clone 325603 (TRBV18, TRBJ1-1)
CASSLNGDTEAFF

SEQ ID NO: 651207 - protein, 14 aa, Homo sapiens
  CDR3 for alpha chain variable domain of TCR clone 325604 (TRAV38-1, TRAJ45)
CASHSGGGADGLTF

SEQ ID NO: 651208 - protein, 16 aa, Homo sapiens
  CDR3 for beta chain variable domain of TCR clone 325604 (TRBV19, TRBJ2-1)
CASSMGGGSFYNEQFF

SEQ ID NO: 651209 - protein, 16 aa, Homo sapiens
  CDR3 for alpha chain variable domain of TCR clone 325605 (TRAV3, TRAJ27)
CAVGDPQGTNAGKSTF

SEQ ID NO: 651210 - protein, 15 aa, Homo sapiens
  CDR3 for beta chain variable domain of TCR clone 325605 (TRBV20-1, TRBJ2-7)
CSARDRVSGMDEQYF

SEQ ID NO: 651211 - protein, 23 aa, Homo sapiens
  CDR3 for alpha chain variable domain of TCR clone 325606 (TRAV26-1, TRAJ38)
CIADNAGNNHIQNPDPAVYQLRD

SEQ ID NO: 651212 - protein, 13 aa, Homo sapiens
  CDR3 for beta chain variable domain of TCR clone 325606 (TRBV20-1, TRBJ1-1)
CSARRGGNTEAFF

SEQ ID NO: 651213 - protein, 16 aa, Homo sapiens
  CDR3 for alpha chain variable domain of TCR clone 325607 (TRAV3, TRAJ18)
CAVRAGRGSTLGRLYV

SEQ ID NO: 651214 - protein, 15 aa, Homo sapiens
  CDR3 for beta chain variable domain of TCR clone 325607 (TRBV7-9, TRBJ1-6)
CASSSPGRGNSPLHF

SEQ ID NO: 651215 - protein, 12 aa, Homo sapiens
  CDR3 for alpha chain variable domain of TCR clone 325608 (TRAV6, TRAJ37)
CSPEANTGKLIF

SEQ ID NO: 651216 - protein, 20 aa, Homo sapiens
  CDR3 for beta chain variable domain of TCR clone 325608 (TRBV7-8, TRBJ2-2)
CASSHLFPGPTIHITGELFF

SEQ ID NO: 651217 - protein, 13 aa, Homo sapiens
  CDR3 for alpha chain variable domain of TCR clone 325609 (TRAV1-2, TRAJ9)
CAALNTGGFKTIF

SEQ ID NO: 651218 - protein, 13 aa, Homo sapiens
  CDR3 for beta chain variable domain of TCR clone 325609 (TRBV27, TRBJ2-7)
CASSFSQGYEQYF

SEQ ID NO: 651219 - protein, 13 aa, Homo sapiens
  CDR3 for alpha chain variable domain of TCR clone 325610 (TRAV17, TRAJ5)
CAPMDTGRRSLTF

SEQ ID NO: 651220 - protein, 16 aa, Homo sapiens
  CDR3 for beta chain variable domain of TCR clone 325610 (TRBV27, TRBJ2-7)
CASSSERRDSAYEQYF

SEQ ID NO: 651221 - protein, 16 aa, Homo sapiens
  CDR3 for alpha chain variable domain of TCR clone 325611 (TRAV14/DV4, TRAJ15)
CAMREGPAQAGTALIF

SEQ ID NO: 651222 - protein, 13 aa, Homo sapiens
  CDR3 for beta chain variable domain of TCR clone 325611 (TRBV19, TRBJ1-2)
CASSQGQVYGYTF

SEQ ID NO: 651223 - protein, 12 aa, Homo sapiens
  CDR3 for alpha chain variable domain of TCR clone 325612 (TRAV20, TRAJ57)
CAVQGGSEKLVF

SEQ ID NO: 651224 - protein, 12 aa, Homo sapiens
  CDR3 for beta chain variable domain of TCR clone 325612 (TRBV7-8, TRBJ2-7)
CASSLGDREQYF

SEQ ID NO: 651225 - protein, 11 aa, Homo sapiens
  CDR3 for alpha chain variable domain of TCR clone 325613 (TRAV12-3, TRAJ27)
CAMANAGKSTF

SEQ ID NO: 651226 - protein, 11 aa, Homo sapiens
  CDR3 for beta chain variable domain of TCR clone 325613 (TRBV7-2, TRBJ2-7)
CASSLGWEQYF

SEQ ID NO: 651227 - protein, 13 aa, Homo sapiens
  CDR3 for alpha chain variable domain of TCR clone 325614 (TRAV12-1, TRAJ3)
CVVNPRGASKIIF

SEQ ID NO: 651228 - protein, 17 aa, Homo sapiens
  CDR3 for beta chain variable domain of TCR clone 325614 (TRBV24-1, TRBJ2-1)
CATSDVSTSGTYNEQFF

SEQ ID NO: 651229 - protein, 15 aa, Homo sapiens
  CDR3 for alpha chain variable domain of TCR clone 325615 (TRAV17, TRAJ57)
CATGPSQGGPEKLVF

SEQ ID NO: 651230 - protein, 16 aa, Homo sapiens
  CDR3 for beta chain variable domain of TCR clone 325615 (TRBV12-4, TRBJ1-5)
CASSRPDGGSNQPQHF

SEQ ID NO: 651231 - protein, 15 aa, Homo sapiens
  CDR3 for alpha chain variable domain of TCR clone 325616 (TRAV22, TRAJ56)
CAVEEYTGANSKLTF

SEQ ID NO: 651232 - protein, 15 aa, Homo sapiens
  CDR3 for beta chain variable domain of TCR clone 325616 (TRBV7-9, TRBJ1-5)
CASSQGHQPNQPQHF

SEQ ID NO: 651233 - protein, 14 aa, Homo sapiens
  CDR3 for alpha chain variable domain of TCR clone 325617 (TRAV12-2, TRAJ13)
CAVKKTGGYQKVTF

SEQ ID NO: 651234 - protein, 14 aa, Homo sapiens
  CDR3 for beta chain variable domain of TCR clone 325617 (TRBV19, TRBJ2-1)
CASPTFVWSGEQFF

SEQ ID NO: 651235 - protein, 13 aa, Homo sapiens
  CDR3 for alpha chain variable domain of TCR clone 325618 (TRAV2, TRAJ29)
CPVYSSGNTPLVF

SEQ ID NO: 651236 - protein, 14 aa, Homo sapiens
  CDR3 for beta chain variable domain of TCR clone 325618 (TRBV7-9, TRBJ1-1)
CASSLGGLKTEAFF

SEQ ID NO: 651237 - protein, 14 aa, Homo sapiens
  CDR3 for alpha chain variable domain of TCR clone 325619 (TRAV17, TRAJ45)
CATASGGGADGLTF

SEQ ID NO: 651238 - protein, 15 aa, Homo sapiens
  CDR3 for beta chain variable domain of TCR clone 325619 (TRBV11-2, TRBJ2-1)
CASSRNRALMYEQFF

SEQ ID NO: 651239 - protein, 14 aa, Homo sapiens
  CDR3 for alpha chain variable domain of TCR clone 325620 (TRAV8-4, TRAJ9)
CAVRINTGGFKTIF

SEQ ID NO: 651240 - protein, 12 aa, Homo sapiens
  CDR3 for beta chain variable domain of TCR clone 325620 (TRBV12-4, TRBJ1-3)
CASSFSGNTIYF

SEQ ID NO: 651241 - protein, 11 aa, Homo sapiens
  CDR3 for alpha chain variable domain of TCR clone 325621 (TRAV1-1, TRAJ23)
CAVRSGGKLIF

SEQ ID NO: 651242 - protein, 13 aa, Homo sapiens
  CDR3 for beta chain variable domain of TCR clone 325621 (TRBV7-3, TRBJ1-1)
CASSQDWGAEAFF

SEQ ID NO: 651243 - protein, 15 aa, Homo sapiens
  CDR3 for alpha chain variable domain of TCR clone 325622 (TRAV8-2, TRAJ40)
CAVLGTTSGTYKYIF

SEQ ID NO: 651244 - protein, 14 aa, Homo sapiens
  CDR3 for beta chain variable domain of TCR clone 325622 (TRBV6-1, TRBJ1-3)
CASVQGGGGNTIYF

SEQ ID NO: 651245 - protein, 12 aa, Homo sapiens
  CDR3 for alpha chain variable domain of TCR clone 325623 (TRAV1-1, TRAJ9)
CAVDTGGFKTIF

SEQ ID NO: 651246 - protein, 16 aa, Homo sapiens
  CDR3 for beta chain variable domain of TCR clone 325623 (TRBV7-9, TRBJ2-3)
CASSPWREVGTDTQYF

SEQ ID NO: 651247 - protein, 14 aa, Homo sapiens
  CDR3 for alpha chain variable domain of TCR clone 325624 (TRAV12-2, TRAJ40)
CAVKIPSGTYKYIF

SEQ ID NO: 651248 - protein, 14 aa, Homo sapiens
  CDR3 for beta chain variable domain of TCR clone 325624 (TRBV7-7, TRBJ2-7)
CASSLGRGVGEQYF

SEQ ID NO: 651249 - protein, 14 aa, Homo sapiens
  CDR3 for alpha chain variable domain of TCR clone 325625 (TRAV13-1, TRAJ40)
CAASRASGTYKSIF

SEQ ID NO: 651250 - protein, 13 aa, Homo sapiens
  CDR3 for beta chain variable domain of TCR clone 325625 (TRBV29-1, TRBJ2-7)
CSVGGTGGYEQYF

SEQ ID NO: 651251 - protein, 12 aa, Homo sapiens
  CDR3 for alpha chain variable domain of TCR clone 325626 (TRAV2, TRAJ31)
CAVEDNNARLMF

SEQ ID NO: 651252 - protein, 14 aa, Homo sapiens
  CDR3 for beta chain variable domain of TCR clone 325626 (TRBV7-6, TRBJ2-3)
CASSSGTVTDTQYF

SEQ ID NO: 651253 - protein, 16 aa, Homo sapiens
  CDR3 for alpha chain variable domain of TCR clone 325627 (TRAV21, TRAJ37)
CAVRPRGSSNTGKLVF

SEQ ID NO: 651254 - protein, 13 aa, Homo sapiens
  CDR3 for beta chain variable domain of TCR clone 325627 (TRBV7-9, TRBJ2-5)
FASLSPGQETQYF

SEQ ID NO: 651255 - protein, 12 aa, Homo sapiens
  CDR3 for alpha chain variable domain of TCR clone 325628 (TRAV1-2, TRAJ42)
CVAGGSQGKLIF

SEQ ID NO: 651256 - protein, 14 aa, Homo sapiens
  CDR3 for beta chain variable domain of TCR clone 325628 (TRBV5-4, TRBJ2-5)
CASSLVRGQETQYF

SEQ ID NO: 651257 - protein, 14 aa, Homo sapiens
  CDR3 for alpha chain variable domain of TCR clone 325629 (TRAV12-2, TRAJ13)
CAVKTTGGYQKVTF

SEQ ID NO: 651258 - protein, 14 aa, Homo sapiens
  CDR3 for beta chain variable domain of TCR clone 325629 (TRBV2, TRBJ1-5)
CASKKTDSNQPQHF

SEQ ID NO: 651259 - protein, 14 aa, Homo sapiens
  CDR3 for alpha chain variable domain of TCR clone 325630 (TRAV12-2, TRAJ53)
CAVKGGGSNYKLTF

SEQ ID NO: 651260 - protein, 20 aa, Homo sapiens
  CDR3 for beta chain variable domain of TCR clone 325630 (TRBV7-8, TRBJ2-2)
CASSHLFPGPTIHITGELFF

SEQ ID NO: 651261 - protein, 16 aa, Homo sapiens
  CDR3 for alpha chain variable domain of TCR clone 325631 (TRAV30, TRAJ24)
CGTEIVDADSWGKFQF

SEQ ID NO: 651262 - protein, 15 aa, Homo sapiens
  CDR3 for beta chain variable domain of TCR clone 325631 (TRBV7-2, TRBJ1-2)
CASRLGTGGNYGYTF

SEQ ID NO: 651263 - protein, 15 aa, Homo sapiens
  CDR3 for alpha chain variable domain of TCR clone 325632 (TRAV2, TRAJ28)
CAVPYSGAGSYQLTF

SEQ ID NO: 651264 - protein, 12 aa, Homo sapiens
  CDR3 for beta chain variable domain of TCR clone 325632 (TRBV20-1, TRBJ2-5)
CSAPRSQETQYF

SEQ ID NO: 651265 - protein, 12 aa, Homo sapiens
  CDR3 for alpha chain variable domain of TCR clone 325633 (TRAV12-2, TRAJ10)
WGVTGGGKKLTF

SEQ ID NO: 651266 - protein, 14 aa, Homo sapiens
  CDR3 for beta chain variable domain of TCR clone 325633 (TRBV19, TRBJ2-3)
CASSAPRGTYTQYF

SEQ ID NO: 651267 - protein, 13 aa, Homo sapiens
  CDR3 for alpha chain variable domain of TCR clone 325634 (TRAV12-1, TRAJ11)
CVVNIGGYSTLTF

SEQ ID NO: 651268 - protein, 16 aa, Homo sapiens
  CDR3 for beta chain variable domain of TCR clone 325634 (TRBV9, TRBJ2-1)
RASSVGGGGNYNEQFF

SEQ ID NO: 651269 - protein, 12 aa, Homo sapiens
  CDR3 for alpha chain variable domain of TCR clone 325635 (TRAV3, TRAJ27)
GAVRDGAGKSTF

SEQ ID NO: 651270 - protein, 13 aa, Homo sapiens
  CDR3 for beta chain variable domain of TCR clone 325635 (TRBV10-3, TRBJ1-2)
CAINADLNYGYTF

SEQ ID NO: 651271 - protein, 14 aa, Homo sapiens
  CDR3 for alpha chain variable domain of TCR clone 325636 (TRAV13-1, TRAJ44)
CAAKATGTASKLTF

SEQ ID NO: 651272 - protein, 16 aa, Homo sapiens
  CDR3 for beta chain variable domain of TCR clone 325636 (TRBV7-3, TRBJ2-3)
CQQLNEKDGGADTQYF

SEQ ID NO: 651273 - protein, 15 aa, Homo sapiens
  CDR3 for alpha chain variable domain of TCR clone 325637 (TRAV8-4, TRAJ12)
CAVSDRVDSSYKLIF

SEQ ID NO: 651274 - protein, 17 aa, Homo sapiens
  CDR3 for beta chain variable domain of TCR clone 325637 (TRBV13, TRBJ2-3)
CASSLSRVAGGRNTQYF

SEQ ID NO: 651275 - protein, 14 aa, Homo sapiens
  CDR3 for alpha chain variable domain of TCR clone 325638 (TRAV3, TRAJ9)
CAVRGNTGGFKTIF

SEQ ID NO: 651276 - protein, 17 aa, Homo sapiens
  CDR3 for beta chain variable domain of TCR clone 325638 (TRBV4-1, TRBJ1-4)
CASSQEGPRGVEEKLFF

SEQ ID NO: 651277 - protein, 12 aa, Homo sapiens
  CDR3 for alpha chain variable domain of TCR clone 325639 (TRAV13-2, TRAJ8)
CAPWLGFQKLVF

SEQ ID NO: 651278 - protein, 14 aa, Homo sapiens
  CDR3 for beta chain variable domain of TCR clone 325639 (TRBV29-1, TRBJ2-3)
CSARAGAGTDTQYF

SEQ ID NO: 651279 - protein, 12 aa, Homo sapiens
  CDR3 for alpha chain variable domain of TCR clone 325640 (TRAV21, TRAJ58)
CAAETSGSRLTF

SEQ ID NO: 651280 - protein, 14 aa, Homo sapiens
  CDR3 for beta chain variable domain of TCR clone 325640 (TRBV19, TRBJ2-1)
CASEVTGARNEQFF

SEQ ID NO: 651281 - protein, 10 aa, Homo sapiens
  CDR3 for alpha chain variable domain of TCR clone 325641 (TRAV13-1, TRAJ27)
CAPLARQISL

SEQ ID NO: 651282 - protein, 13 aa, Homo sapiens
  CDR3 for beta chain variable domain of TCR clone 325641 (TRBV7-3, TRBJ1-1)
CASSQDWGAEAFF

SEQ ID NO: 651283 - protein, 13 aa, Homo sapiens
  CDR3 for alpha chain variable domain of TCR clone 325642 (TRAV26-2, TRAJ43)
YILRAVNNNDMRF

SEQ ID NO: 651284 - protein, 15 aa, Homo sapiens
  CDR3 for beta chain variable domain of TCR clone 325642 (TRBV7-2, TRBJ2-1)
CASTHGTGIYNEQFF

SEQ ID NO: 651285 - protein, 14 aa, Homo sapiens
  CDR3 for alpha chain variable domain of TCR clone 325643 (TRAV1-2, TRAJ29)
CAVRELTSATPLVF

SEQ ID NO: 651286 - protein, 13 aa, Homo sapiens
  CDR3 for beta chain variable domain of TCR clone 325643 (TRBV9, TRBJ2-7)
CASSASDSYEQYF

SEQ ID NO: 651287 - protein, 13 aa, Homo sapiens
  CDR3 for alpha chain variable domain of TCR clone 325644 (TRAV27, TRAJ17)
CAGAATAGNKITF

SEQ ID NO: 651288 - protein, 22 aa, Homo sapiens
  CDR3 for beta chain variable domain of TCR clone 325644 (TRBV11-2, TRBJ1-4)
CASSLDITRRGIPRKDNEKLFF

SEQ ID NO: 651289 - protein, 14 aa, Homo sapiens
  CDR3 for alpha chain variable domain of TCR clone 325645 (TRAV12-2, TRAJ17)
CAVLFKAAGNKLTF

SEQ ID NO: 651290 - protein, 14 aa, Homo sapiens
  CDR3 for beta chain variable domain of TCR clone 325645 (TRBV19, TRBJ2-1)
CASPTFVLTGEQFF

SEQ ID NO: 651291 - protein, 13 aa, Homo sapiens
  CDR3 for alpha chain variable domain of TCR clone 325646 (TRAV21, TRAJ57)
CAVTQGGSEKLGF

SEQ ID NO: 651292 - protein, 16 aa, Homo sapiens
  CDR3 for beta chain variable domain of TCR clone 325646 (TRBV29-1, TRBJ2-7)
CSVEDAEDGTAYEQFF

SEQ ID NO: 651293 - protein, 13 aa, Homo sapiens
  CDR3 for alpha chain variable domain of TCR clone 325647 (TRAV3, TRAJ21)
CAVREPDFNQFYF

SEQ ID NO: 651294 - protein, 12 aa, Homo sapiens
  CDR3 for beta chain variable domain of TCR clone 325647 (TRBV6-5, TRBJ2-2)
CASRQITGELFF

SEQ ID NO: 651295 - protein, 12 aa, Homo sapiens
  CDR3 for alpha chain variable domain of TCR clone 325648 (TRAV13-1, TRAJ16)
CAASNGGEKLLF

SEQ ID NO: 651296 - protein, 14 aa, Homo sapiens
  CDR3 for beta chain variable domain of TCR clone 325648 (TRBV20-1, TRBJ2-7)
CSARDPTGLDEQYF

SEQ ID NO: 651297 - protein, 14 aa, Homo sapiens
  CDR3 for alpha chain variable domain of TCR clone 325649 (TRAV16, TRAJ15)
CALSGPQAGNALIF

SEQ ID NO: 651298 - protein, 12 aa, Homo sapiens
  CDR3 for beta chain variable domain of TCR clone 325649 (TRBV18, TRBJ2-5)
CASSPSKETQYF

SEQ ID NO: 651299 - protein, 13 aa, Homo sapiens
  CDR3 for alpha chain variable domain of TCR clone 325650 (TRAV12-1, TRAJ17)
CVVSKDAGNKLTF

SEQ ID NO: 651300 - protein, 17 aa, Homo sapiens
  CDR3 for beta chain variable domain of TCR clone 325650 (TRBV4-1, TRBJ2-5)
CASSQDPSGGPQETQYF

SEQ ID NO: 651301 - protein, 17 aa, Homo sapiens
  CDR3 for alpha chain variable domain of TCR clone 325651 (TRAV8-6, TRAJ8)
CAVKEGIESTGFQKLVF

SEQ ID NO: 651302 - protein, 17 aa, Homo sapiens
  CDR3 for beta chain variable domain of TCR clone 325651 (TRBV28, TRBJ2-5)
CASSRQGGLAGAETQYF

SEQ ID NO: 651303 - protein, 14 aa, Homo sapiens
  CDR3 for alpha chain variable domain of TCR clone 325652 (TRAV26-1, TRAJ34)
CIVRVAYNTDTLIF

SEQ ID NO: 651304 - protein, 15 aa, Homo sapiens
  CDR3 for beta chain variable domain of TCR clone 325652 (TRBV20-1, TRBJ2-7)
CSARVPAAYFYEQYL

SEQ ID NO: 651305 - protein, 13 aa, Homo sapiens
  CDR3 for alpha chain variable domain of TCR clone 325653 (TRAV13-1, TRAJ49)
FAAMLYTGNQFYF

SEQ ID NO: 651306 - protein, 14 aa, Homo sapiens
  CDR3 for beta chain variable domain of TCR clone 325653 (TRBV19, TRBJ2-1)
CASPTFVLSGEQFS

SEQ ID NO: 651307 - protein, 13 aa, Homo sapiens
  CDR3 for alpha chain variable domain of TCR clone 325654 (TRAV22, TRAJ48)
FAVGRFGNEKLTF

SEQ ID NO: 651308 - protein, 13 aa, Homo sapiens
  CDR3 for beta chain variable domain of TCR clone 325654 (TRBV20-1, TRBJ2-5)
CSARGDYQETQYF

SEQ ID NO: 651309 - protein, 13 aa, Homo sapiens
  CDR3 for alpha chain variable domain of TCR clone 325655 (TRAV35, TRAJ42)
CARFPGSQGNLIF

SEQ ID NO: 651310 - protein, 13 aa, Homo sapiens
  CDR3 for beta chain variable domain of TCR clone 325655 (TRBV29-1, TRBJ2-1)
CSVEGGRVNEQYF

SEQ ID NO: 651311 - protein, 13 aa, Homo sapiens
  CDR3 for alpha chain variable domain of TCR clone 325656 (TRAV12-3, TRAJ40)
CAMSDSGTYKYIF

SEQ ID NO: 651312 - protein, 14 aa, Homo sapiens
  CDR3 for beta chain variable domain of TCR clone 325656 (TRBV7-2, TRBJ1-5)
CASSTQGAGQPQHV

SEQ ID NO: 651313 - protein, 16 aa, Homo sapiens
  CDR3 for alpha chain variable domain of TCR clone 325657 (TRAV26-1, TRAJ23)
CIVRVERYNQGGKLFF

SEQ ID NO: 651314 - protein, 15 aa, Homo sapiens
  CDR3 for beta chain variable domain of TCR clone 325657 (TRBV18, TRBJ2-7)
CASSPRGGKGYEQYF

SEQ ID NO: 651315 - protein, 13 aa, Homo sapiens
  CDR3 for alpha chain variable domain of TCR clone 325658 (TRAV23/DV6, TRAJ36)
GAAGQTGANNLFF

SEQ ID NO: 651316 - protein, 18 aa, Homo sapiens
  CDR3 for beta chain variable domain of TCR clone 325658 (TRBV12-4, TRBJ2-2)
CASSLVAGTRGRTGELFF

SEQ ID NO: 651317 - protein, 15 aa, Homo sapiens
  CDR3 for alpha chain variable domain of TCR clone 325659 (TRAV8-4, TRAJ15)
CAVSDPVQAGTALIF

SEQ ID NO: 651318 - protein, 16 aa, Homo sapiens
  CDR3 for beta chain variable domain of TCR clone 325659 (TRBV24-1, TRBJ2-3)
CATSGYRDRDTDTQYF

SEQ ID NO: 651319 - protein, 11 aa, Homo sapiens
  CDR3 for alpha chain variable domain of TCR clone 325660 (TRAV17, TRAJ9)
CGFTGGFKTIF

SEQ ID NO: 651320 - protein, 15 aa, Homo sapiens
  CDR3 for beta chain variable domain of TCR clone 325660 (TRBV6-1, TRBJ2-1)
CASSEAAYSYNEQFF

SEQ ID NO: 651321 - protein, 12 aa, Homo sapiens
  CDR3 for alpha chain variable domain of TCR clone 325661 (TRAV25, TRAJ11)
FAGASGYSTLTF

SEQ ID NO: 651322 - protein, 14 aa, Homo sapiens
  CDR3 for beta chain variable domain of TCR clone 325661 (TRBV5-8, TRBJ2-3)
CAGSLGQGTDTQYF

SEQ ID NO: 651323 - protein, 14 aa, Homo sapiens
  CDR3 for alpha chain variable domain of TCR clone 325662 (TRAV8-4, TRAJ9)
CAVRINTGGFKTIF

SEQ ID NO: 651324 - protein, 12 aa, Homo sapiens
  CDR3 for beta chain variable domain of TCR clone 325662 (TRBV7-3, TRBJ1-2)
CASSKKGVPVTF

SEQ ID NO: 651325 - protein, 10 aa, Homo sapiens
  CDR3 for alpha chain variable domain of TCR clone 325663 (TRAV8-2, TRAJ23)
CVVLGGKLIF

SEQ ID NO: 651326 - protein, 15 aa, Homo sapiens
  CDR3 for beta chain variable domain of TCR clone 325663 (TRBV6-3, TRBJ2-7)
CASSSPGTVFYEQYF

SEQ ID NO: 651327 - protein, 14 aa, Homo sapiens
  CDR3 for alpha chain variable domain of TCR clone 325664 (TRAV2, TRAJ9)
CAVEDRSGGFKTIF

SEQ ID NO: 651328 - protein, 18 aa, Homo sapiens
  CDR3 for beta chain variable domain of TCR clone 325664 (TRBV20-1, TRBJ2-5)
CSQTGDSVRLGGKETQYF

SEQ ID NO: 651329 - protein, 11 aa, Homo sapiens
  CDR3 for alpha chain variable domain of TCR clone 325665 (TRAV13-1, TRAJ23)
CAASSRGKLIF

SEQ ID NO: 651330 - protein, 15 aa, Homo sapiens
  CDR3 for beta chain variable domain of TCR clone 325665 (TRBV27, TRBJ2-1)
CASSNGGGSSNEQFF

SEQ ID NO: 651331 - protein, 17 aa, Homo sapiens
  CDR3 for alpha chain variable domain of TCR clone 325666 (TRAV8-6, TRAJ58)
CAVSSWVGETSGSRLTF

SEQ ID NO: 651332 - protein, 16 aa, Homo sapiens
  CDR3 for beta chain variable domain of TCR clone 325666 (TRBV20-1, TRBJ1-2)
CSASMGQGVANYGYTF

SEQ ID NO: 651333 - protein, 14 aa, Homo sapiens
  CDR3 for alpha chain variable domain of TCR clone 325667 (TRAV25, TRAJ22)
CAVRSSGSARQLTF

SEQ ID NO: 651334 - protein, 17 aa, Homo sapiens
  CDR3 for beta chain variable domain of TCR clone 325667 (TRBV20-1, TRBJ2-2)
CSASGSGQGGLTGELFF

SEQ ID NO: 651335 - protein, 17 aa, Homo sapiens
  CDR3 for alpha chain variable domain of TCR clone 325668 (TRAV26-1, TRAJ28)
CFVRALYSGAGSYQLTF

SEQ ID NO: 651336 - protein, 12 aa, Homo sapiens
  CDR3 for beta chain variable domain of TCR clone 325668 (TRBV12-4, TRBJ2-1)
CASRQTENEQFF

SEQ ID NO: 651337 - protein, 13 aa, Homo sapiens
  CDR3 for alpha chain variable domain of TCR clone 325669 (TRAV1-1, TRAJ9)
CAAKNTGGFKTIF

SEQ ID NO: 651338 - protein, 12 aa, Homo sapiens
  CDR3 for beta chain variable domain of TCR clone 325669 (TRBV12-4, TRBJ2-3)
CASSTLPDTQYF

SEQ ID NO: 651339 - protein, 13 aa, Homo sapiens
  CDR3 for alpha chain variable domain of TCR clone 325670 (TRAV6, TRAJ5)
CAPTATGRRALTF

SEQ ID NO: 651340 - protein, 13 aa, Homo sapiens
  CDR3 for beta chain variable domain of TCR clone 325670 (TRBV20-1, TRBJ2-7)
CSASPFSSYEQYF

SEQ ID NO: 651341 - protein, 13 aa, Homo sapiens
  CDR3 for alpha chain variable domain of TCR clone 325671 (TRAV29/DV5, TRAJ31)
CAASRNNNARLML

SEQ ID NO: 651342 - protein, 15 aa, Homo sapiens
  CDR3 for beta chain variable domain of TCR clone 325671 (TRBV19, TRBJ1-2)
CASSVGQVLNYGYTF

SEQ ID NO: 651343 - protein, 13 aa, Homo sapiens
  CDR3 for alpha chain variable domain of TCR clone 325672 (TRAV24, TRAJ57)
CLPNSGGSEKLVF

SEQ ID NO: 651344 - protein, 15 aa, Homo sapiens
  CDR3 for beta chain variable domain of TCR clone 325672 (TRBV7-2, TRBJ2-1)
CASSLVAGGHNEQFF

SEQ ID NO: 651345 - protein, 15 aa, Homo sapiens
  CDR3 for alpha chain variable domain of TCR clone 325673 (TRAV12-1, TRAJ27)
CVVNIEEPMQANQPL

SEQ ID NO: 651346 - protein, 15 aa, Homo sapiens
  CDR3 for beta chain variable domain of TCR clone 325673 (TRBV19, TRBJ1-1)
CASTSGQIQNTEAFF

SEQ ID NO: 651347 - protein, 14 aa, Homo sapiens
  CDR3 for alpha chain variable domain of TCR clone 325674 (TRAV2, TRAJ9)
CAVEDRSGGFKTIF

SEQ ID NO: 651348 - protein, 13 aa, Homo sapiens
  CDR3 for beta chain variable domain of TCR clone 325674 (TRBV29-1, TRBJ1-3)
CSVEGGSGNTIYF

SEQ ID NO: 651349 - protein, 14 aa, Homo sapiens
  CDR3 for alpha chain variable domain of TCR clone 325675 (TRAV21, TRAJ21)
CAVGVEANFNKFYF

SEQ ID NO: 651350 - protein, 17 aa, Homo sapiens
  CDR3 for beta chain variable domain of TCR clone 325675 (TRBV20-1, TRBJ2-2)
CSASGSGQGGLTGELFF

SEQ ID NO: 651351 - protein, 14 aa, Homo sapiens
  CDR3 for alpha chain variable domain of TCR clone 325676 (TRAV8-2, TRAJ4)
CVVSPSGGYTKLIF

SEQ ID NO: 651352 - protein, 14 aa, Homo sapiens
  CDR3 for beta chain variable domain of TCR clone 325676 (TRBV10-3, TRBJ2-2)
CAISEVSHSGELFF

SEQ ID NO: 651353 - protein, 15 aa, Homo sapiens
  CDR3 for alpha chain variable domain of TCR clone 325677 (TRAV29/DV5, TRAJ42)
CAAIGYGGSQGNLIF

SEQ ID NO: 651354 - protein, 16 aa, Homo sapiens
  CDR3 for beta chain variable domain of TCR clone 325677 (TRBV24-1, TRBJ2-3)
CATSDPGTGATDTQYF

SEQ ID NO: 651355 - protein, 12 aa, Homo sapiens
  CDR3 for alpha chain variable domain of TCR clone 325678 (TRAV12-3, TRAJ17)
CAMTLTGNELTF

SEQ ID NO: 651356 - protein, 14 aa, Homo sapiens
  CDR3 for beta chain variable domain of TCR clone 325678 (TRBV7-7, TRBJ2-2)
CATRQDSDTGELFF

SEQ ID NO: 651357 - protein, 16 aa, Homo sapiens
  CDR3 for alpha chain variable domain of TCR clone 325679 (TRAV30, TRAJ24)
CGTEILDADSWGKFQF

SEQ ID NO: 651358 - protein, 16 aa, Homo sapiens
  CDR3 for beta chain variable domain of TCR clone 325679 (TRBV20-1, TRBJ1-1)
CSARALTQGMNTEAFF

SEQ ID NO: 651359 - protein, 14 aa, Homo sapiens
  CDR3 for alpha chain variable domain of TCR clone 325680 (TRAV1-2, TRAJ16)
CAVNRFSDGHKLLF

SEQ ID NO: 651360 - protein, 14 aa, Homo sapiens
  CDR3 for beta chain variable domain of TCR clone 325680 (TRBV4-1, TRBJ2-2)
CASSQAVNTGELFF

SEQ ID NO: 651361 - protein, 13 aa, Homo sapiens
  CDR3 for alpha chain variable domain of TCR clone 325681 (TRAV26-1, TRAJ34)
FIVRPWITDKLIF

SEQ ID NO: 651362 - protein, 14 aa, Homo sapiens
  CDR3 for beta chain variable domain of TCR clone 325681 (TRBV7-2, TRBJ2-7)
CASRSQGAAYEQYF

SEQ ID NO: 651363 - protein, 16 aa, Homo sapiens
  CDR3 for alpha chain variable domain of TCR clone 325682 (TRAV12-2, TRAJ40)
CAVIRGGTSGTYTYIF

SEQ ID NO: 651364 - protein, 16 aa, Homo sapiens
  CDR3 for beta chain variable domain of TCR clone 325682 (TRBV7-9, TRBJ2-1)
CASSDVAGGSYNEQFF

SEQ ID NO: 651365 - protein, 12 aa, Homo sapiens
  CDR3 for alpha chain variable domain of TCR clone 325683 (TRAV26-2, TRAJ21)
CILKGNLNKFYF

SEQ ID NO: 651366 - protein, 12 aa, Homo sapiens
  CDR3 for beta chain variable domain of TCR clone 325683 (TRBV12-4, TRBJ2-7)
CASSLGGYEQYF

SEQ ID NO: 651367 - protein, 12 aa, Homo sapiens
  CDR3 for alpha chain variable domain of TCR clone 325684 (TRAV12-3, TRAJ17)
CAMTLTGNKLTI

SEQ ID NO: 651368 - protein, 16 aa, Homo sapiens
  CDR3 for beta chain variable domain of TCR clone 325684 (TRBV29-1, TRBJ2-7)
CSVEVVGTSGGYEQYF

SEQ ID NO: 651369 - protein, 14 aa, Homo sapiens
  CDR3 for alpha chain variable domain of TCR clone 325685 (TRAV2, TRAJ37)
CAVDFTSNTGKLIF

SEQ ID NO: 651370 - protein, 15 aa, Homo sapiens
  CDR3 for beta chain variable domain of TCR clone 325685 (TRBV5-4, TRBJ2-7)
CASSRFGTGSYEQYF

SEQ ID NO: 651371 - protein, 12 aa, Homo sapiens
  CDR3 for alpha chain variable domain of TCR clone 325686 (TRAV20, TRAJ56)
CAVTGANSKLTF

SEQ ID NO: 651372 - protein, 13 aa, Homo sapiens
  CDR3 for beta chain variable domain of TCR clone 325686 (TRBV7-6, TRBJ2-7)
CAGSLGLASEQYF

SEQ ID NO: 651373 - protein, 13 aa, Homo sapiens
  CDR3 for alpha chain variable domain of TCR clone 325687 (TRAV30, TRAJ26)
CGTEIPLGQNFVF

SEQ ID NO: 651374 - protein, 13 aa, Homo sapiens
  CDR3 for beta chain variable domain of TCR clone 325687 (TRBV7-8, TRBJ2-7)
CASSLTGGREQYF

SEQ ID NO: 651375 - protein, 13 aa, Homo sapiens
  CDR3 for alpha chain variable domain of TCR clone 325688 (TRAV17, TRAJ26)
CATVDNYGQNFVF

SEQ ID NO: 651376 - protein, 15 aa, Homo sapiens
  CDR3 for beta chain variable domain of TCR clone 325688 (TRBV19, TRBJ1-5)
CASSIVWADNQPQHF

SEQ ID NO: 651377 - protein, 11 aa, Homo sapiens
  CDR3 for alpha chain variable domain of TCR clone 325689 (TRAV3, TRAJ21)
CAVGNFNKFYF

SEQ ID NO: 651378 - protein, 13 aa, Homo sapiens
  CDR3 for beta chain variable domain of TCR clone 325689 (TRBV27, TRBJ2-1)
CASRTLGVGEQFF

SEQ ID NO: 651379 - protein, 14 aa, Homo sapiens
  CDR3 for alpha chain variable domain of TCR clone 325690 (TRAV1-2, TRAJ16)
CAVNRSSDGQKLLF

SEQ ID NO: 651380 - protein, 12 aa, Homo sapiens
  CDR3 for beta chain variable domain of TCR clone 325690 (TRBV5-1, TRBJ2-7)
CASSSTTYEHYF

SEQ ID NO: 651381 - protein, 10 aa, Homo sapiens
  CDR3 for alpha chain variable domain of TCR clone 325691 (TRAV23/DV6, TRAJ57)
CAAISTLSQG

SEQ ID NO: 651382 - protein, 15 aa, Homo sapiens
  CDR3 for beta chain variable domain of TCR clone 325691 (TRBV27, TRBJ1-4)
CASSAQQDLNEKLFF

SEQ ID NO: 651383 - protein, 13 aa, Homo sapiens
  CDR3 for alpha chain variable domain of TCR clone 325692 (TRAV12-3, TRAJ7)
CAMSASGNNRLAF

SEQ ID NO: 651384 - protein, 15 aa, Homo sapiens
  CDR3 for beta chain variable domain of TCR clone 325692 (TRBV7-8, TRBJ2-5)
CASSDAAGSQETQYF

SEQ ID NO: 651385 - protein, 17 aa, Homo sapiens
  CDR3 for alpha chain variable domain of TCR clone 325693 (TRAV26-1, TRAJ27)
CIVSTPWIDTNAGKSTF

SEQ ID NO: 651386 - protein, 16 aa, Homo sapiens
  CDR3 for beta chain variable domain of TCR clone 325693 (TRBV7-9, TRBJ2-1)
CASSLDPGLAIDEQFF

SEQ ID NO: 651387 - protein, 14 aa, Homo sapiens
  CDR3 for alpha chain variable domain of TCR clone 325694 (TRAV17, TRAJ39)
CATNPVRAGNMLTF

SEQ ID NO: 651388 - protein, 15 aa, Homo sapiens
  CDR3 for beta chain variable domain of TCR clone 325694 (TRBV13, TRBJ1-5)
CASSFGQGGVQPQHF

SEQ ID NO: 651389 - protein, 14 aa, Homo sapiens
  CDR3 for alpha chain variable domain of TCR clone 325695 (TRAV20, TRAJ20)
CAVRRGYNDYKLSF

SEQ ID NO: 651390 - protein, 13 aa, Homo sapiens
  CDR3 for beta chain variable domain of TCR clone 325695 (TRBV19, TRBJ2-5)
CGSSETAPETQYF

SEQ ID NO: 651391 - protein, 16 aa, Homo sapiens
  CDR3 for alpha chain variable domain of TCR clone 325696 (TRAV23/DV6, TRAJ48)
CAASGVVNFGNEKLTF

SEQ ID NO: 651392 - protein, 15 aa, Homo sapiens
  CDR3 for beta chain variable domain of TCR clone 325696 (TRBV20-1, TRBJ2-5)
CSAGLTGVSQETQYF

SEQ ID NO: 651393 - protein, 13 aa, Homo sapiens
  CDR3 for alpha chain variable domain of TCR clone 325697 (TRAV12-1, TRAJ6)
CVVYPGGSYIPTS

SEQ ID NO: 651394 - protein, 13 aa, Homo sapiens
  CDR3 for beta chain variable domain of TCR clone 325697 (TRBV19, TRBJ1-2)
CASSVPGQVGYTF

SEQ ID NO: 651395 - protein, 16 aa, Homo sapiens
  CDR3 for alpha chain variable domain of TCR clone 325698 (TRAV27, TRAJ53)
CAAPEGSGGGNYKLTF

SEQ ID NO: 651396 - protein, 15 aa, Homo sapiens
  CDR3 for beta chain variable domain of TCR clone 325698 (TRBV20-1, TRBJ1-1)
CSASRGVTGNTEAFF

SEQ ID NO: 651397 - protein, 13 aa, Homo sapiens
  CDR3 for alpha chain variable domain of TCR clone 325699 (TRAV13-1, TRAJ44)
CSKGDGTASKLTF

SEQ ID NO: 651398 - protein, 17 aa, Homo sapiens
  CDR3 for beta chain variable domain of TCR clone 325699 (TRBV7-3, TRBJ2-3)
CASSLMKRMRGADTQYF

SEQ ID NO: 651399 - protein, 17 aa, Homo sapiens
  CDR3 for alpha chain variable domain of TCR clone 325700 (TRAV3, TRAJ6)
CAVRDGPRAGGSYIPTF

SEQ ID NO: 651400 - protein, 12 aa, Homo sapiens
  CDR3 for beta chain variable domain of TCR clone 325700 (TRBV7-2, TRBJ1-3)
CASSFSGNTIYF

SEQ ID NO: 651401 - protein, 13 aa, Homo sapiens
  CDR3 for alpha chain variable domain of TCR clone 325701 (TRAV30, TRAJ20)
CGTEDRSDYKLSF

SEQ ID NO: 651402 - protein, 15 aa, Homo sapiens
  CDR3 for beta chain variable domain of TCR clone 325701 (TRBV2, TRBJ1-2)
CASTKVQDSNYGYTF

SEQ ID NO: 651403 - protein, 14 aa, Homo sapiens
  CDR3 for alpha chain variable domain of TCR clone 325702 (TRAV12-1, TRAJ30)
CVVNIGGRDEKIIF

SEQ ID NO: 651404 - protein, 15 aa, Homo sapiens
  CDR3 for beta chain variable domain of TCR clone 325702 (TRBV18, TRBJ1-2)
CASSPSNTPNYGYTF

SEQ ID NO: 651405 - protein, 12 aa, Homo sapiens
  CDR3 for alpha chain variable domain of TCR clone 325703 (TRAV1-2, TRAJ33)
CAALDSNYQLIW

SEQ ID NO: 651406 - protein, 13 aa, Homo sapiens
  CDR3 for beta chain variable domain of TCR clone 325703 (TRBV7-2, TRBJ2-7)
CASSFGQEKDQYF

SEQ ID NO: 651407 - protein, 14 aa, Homo sapiens
  CDR3 for alpha chain variable domain of TCR clone 325704 (TRAV1-2, TRAJ16)
CAVNRFSDGQKLLF

SEQ ID NO: 651408 - protein, 12 aa, Homo sapiens
  CDR3 for beta chain variable domain of TCR clone 325704 (TRBV14, TRBJ1-1)
CASSELKGLAFF

SEQ ID NO: 651409 - protein, 15 aa, Homo sapiens
  CDR3 for alpha chain variable domain of TCR clone 325705 (TRAV29/DV5, TRAJ24)
CAASGATDSWGKFLF

SEQ ID NO: 651410 - protein, 14 aa, Homo sapiens
  CDR3 for beta chain variable domain of TCR clone 325705 (TRBV12-5, TRBJ2-5)
CASGSRTHQETQYF

SEQ ID NO: 651411 - protein, 15 aa, Homo sapiens
  CDR3 for alpha chain variable domain of TCR clone 325706 (TRAV3, TRAJ20)
CAVRDINLSDYKLSF

SEQ ID NO: 651412 - protein, 15 aa, Homo sapiens
  CDR3 for beta chain variable domain of TCR clone 325706 (TRBV7-9, TRBJ1-6)
CASSSPGRGNSALHF

SEQ ID NO: 651413 - protein, 20 aa, Homo sapiens
  CDR3 for alpha chain variable domain of TCR clone 325707 (TRAV8-3, TRAJ44)
LSTSVLWVRLYTGTASKLSF

SEQ ID NO: 651414 - protein, 13 aa, Homo sapiens
  CDR3 for beta chain variable domain of TCR clone 325707 (TRBV7-9, TRBJ2-3)
CASSPGSTDTQYF

SEQ ID NO: 651415 - protein, 16 aa, Homo sapiens
  CDR3 for alpha chain variable domain of TCR clone 325708 (TRAV35, TRAJ28)
CAGQKYSGAWSYKLTF

SEQ ID NO: 651416 - protein, 13 aa, Homo sapiens
  CDR3 for beta chain variable domain of TCR clone 325708 (TRBV19, TRBJ1-2)
CASSQGQVYGYTF

SEQ ID NO: 651417 - protein, 14 aa, Homo sapiens
  CDR3 for alpha chain variable domain of TCR clone 325709 (TRAV12-2, TRAJ13)
CAVKKTGGDQIVTF

SEQ ID NO: 651418 - protein, 12 aa, Homo sapiens
  CDR3 for beta chain variable domain of TCR clone 325709 (TRBV6-3, TRBJ2-7)
CASSLTPYEQYF

SEQ ID NO: 651419 - protein, 14 aa, Homo sapiens
  CDR3 for alpha chain variable domain of TCR clone 325710 (TRAV3, TRAJ21)
YAVRDAYNFNKSYF

SEQ ID NO: 651420 - protein, 15 aa, Homo sapiens
  CDR3 for beta chain variable domain of TCR clone 325710 (TRBV28, TRBJ2-1)
CASSLDTSSYNEQFF

SEQ ID NO: 651421 - protein, 18 aa, Homo sapiens
  CDR3 for alpha chain variable domain of TCR clone 325711 (TRAV8-4, TRAJ52)
CAVTRANAGGTSYGNLTF

SEQ ID NO: 651422 - protein, 12 aa, Homo sapiens
  CDR3 for beta chain variable domain of TCR clone 325711 (TRBV12-4, TRBJ2-7)
CASSLGGYEQYF

SEQ ID NO: 651423 - protein, 14 aa, Homo sapiens
  CDR3 for alpha chain variable domain of TCR clone 325712 (TRAV13-1, TRAJ44)
CAAKATGTASKLTF

SEQ ID NO: 651424 - protein, 17 aa, Homo sapiens
  CDR3 for beta chain variable domain of TCR clone 325712 (TRBV7-3, TRBJ2-3)
RASSFRKRMRGADTQYF

SEQ ID NO: 651425 - protein, 23 aa, Homo sapiens
  CDR3 for alpha chain variable domain of TCR clone 325713 (TRAV12-2, TRAJ36)
SLLIRDSQPSDSATLERANNLFF

SEQ ID NO: 651426 - protein, 13 aa, Homo sapiens
  CDR3 for beta chain variable domain of TCR clone 325713 (TRBV28, TRBJ2-7)
CAGAQQGLDEQYF

SEQ ID NO: 651427 - protein, 15 aa, Homo sapiens
  CDR3 for alpha chain variable domain of TCR clone 325714 (TRAV26-1, TRAJ22)
CIVRVSFWFCKATDL

SEQ ID NO: 651428 - protein, 16 aa, Homo sapiens
  CDR3 for beta chain variable domain of TCR clone 325714 (TRBV7-9, TRBJ1-2)
CASSISLDRGGYGYAF

SEQ ID NO: 651429 - protein, 13 aa, Homo sapiens
  CDR3 for alpha chain variable domain of TCR clone 325715 (TRAV12-2, TRAJ52)
CAAHGTSYGKLTF

SEQ ID NO: 651430 - protein, 16 aa, Homo sapiens
  CDR3 for beta chain variable domain of TCR clone 325715 (TRBV27, TRBJ2-7)
CASSSERRDSAYEQYF

SEQ ID NO: 651431 - protein, 14 aa, Homo sapiens
  CDR3 for alpha chain variable domain of TCR clone 325716 (TRAV17, TRAJ35)
CATDRPGFGNVLHC

SEQ ID NO: 651432 - protein, 15 aa, Homo sapiens
  CDR3 for beta chain variable domain of TCR clone 325716 (TRBV6-1, TRBJ2-3)
CASSERGGITDTQYF

SEQ ID NO: 651433 - protein, 14 aa, Homo sapiens
  CDR3 for alpha chain variable domain of TCR clone 325717 (TRAV8-1, TRAJ39)
CAVNASNAGNMLTF

SEQ ID NO: 651434 - protein, 14 aa, Homo sapiens
  CDR3 for beta chain variable domain of TCR clone 325717 (TRBV18, TRBJ2-7)
CASSPRGGAYEQYF

SEQ ID NO: 651435 - protein, 15 aa, Homo sapiens
  CDR3 for alpha chain variable domain of TCR clone 325718 (TRAV12-3, TRAJ6)
CAMSATTGGSYIHTF

SEQ ID NO: 651436 - protein, 19 aa, Homo sapiens
  CDR3 for beta chain variable domain of TCR clone 325718 (TRBV25-1, TRBJ2-2)
CAILVYRVDRGRKTGELFF

SEQ ID NO: 651437 - protein, 15 aa, Homo sapiens
  CDR3 for alpha chain variable domain of TCR clone 325719 (TRAV3, TRAJ32)
CAVRDPGGATNKLIF

SEQ ID NO: 651438 - protein, 14 aa, Homo sapiens
  CDR3 for beta chain variable domain of TCR clone 325719 (TRBV20-1, TRBJ2-1)
CSAQIGGSANEQFF

SEQ ID NO: 651439 - protein, 12 aa, Homo sapiens
  CDR3 for alpha chain variable domain of TCR clone 325720 (TRAV24, TRAJ37)
CASSSNTGKLIF

SEQ ID NO: 651440 - protein, 14 aa, Homo sapiens
  CDR3 for beta chain variable domain of TCR clone 325720 (TRBV12-5, TRBJ2-5)
CASGSRTHQETQYF

SEQ ID NO: 651441 - protein, 17 aa, Homo sapiens
  CDR3 for alpha chain variable domain of TCR clone 325721 (TRAV3, TRAJ6)
CAVRDGPRAGGSYRPTF

SEQ ID NO: 651442 - protein, 16 aa, Homo sapiens
  CDR3 for beta chain variable domain of TCR clone 325721 (TRBV4-1, TRBJ2-7)
CASSLTAGQATYEQYF

SEQ ID NO: 651443 - protein, 12 aa, Homo sapiens
  CDR3 for alpha chain variable domain of TCR clone 325722 (TRAV30, TRAJ39)
CVRGNAGNMLTF

SEQ ID NO: 651444 - protein, 13 aa, Homo sapiens
  CDR3 for beta chain variable domain of TCR clone 325722 (TRBV4-2, TRBJ1-1)
CASSQAGNTEAFF

SEQ ID NO: 651445 - protein, 12 aa, Homo sapiens
  CDR3 for alpha chain variable domain of TCR clone 325723 (TRAV12-3, TRAJ17)
CAITLTGNKLTF

SEQ ID NO: 651446 - protein, 13 aa, Homo sapiens
  CDR3 for beta chain variable domain of TCR clone 325723 (TRBV5-1, TRBJ1-2)
CASNSTGVYGYTF

SEQ ID NO: 651447 - protein, 12 aa, Homo sapiens
  CDR3 for alpha chain variable domain of TCR clone 325724 (TRAV12-3, TRAJ17)
CAMTLTGNKLTF

SEQ ID NO: 651448 - protein, 16 aa, Homo sapiens
  CDR3 for beta chain variable domain of TCR clone 325724 (TRBV5-4, TRBJ2-1)
CASSLALAGAYNEQFF

SEQ ID NO: 651449 - protein, 14 aa, Homo sapiens
  CDR3 for alpha chain variable domain of TCR clone 325725 (TRAV26-1, TRAJ38)
CIADNAGNNRKLTW

SEQ ID NO: 651450 - protein, 13 aa, Homo sapiens
  CDR3 for beta chain variable domain of TCR clone 325725 (TRBV7-9, TRBJ2-3)
CASSPGSTDTQYF

SEQ ID NO: 651451 - protein, 15 aa, Homo sapiens
  CDR3 for alpha chain variable domain of TCR clone 325726 (TRAV4, TRAJ10)
CLVGDGLGGGNKLTF

SEQ ID NO: 651452 - protein, 15 aa, Homo sapiens
  CDR3 for beta chain variable domain of TCR clone 325726 (TRBV27, TRBJ2-3)
CASSSLAGVIDTQYF

SEQ ID NO: 651453 - protein, 15 aa, Homo sapiens
  CDR3 for alpha chain variable domain of TCR clone 325727 (TRAV8-6, TRAJ28)
CAVRPLRAGSYQLTF

SEQ ID NO: 651454 - protein, 15 aa, Homo sapiens
  CDR3 for beta chain variable domain of TCR clone 325727 (TRBV20-1, TRBJ1-5)
CSARDPNNPNQPQHF

SEQ ID NO: 651455 - protein, 18 aa, Homo sapiens
  CDR3 for alpha chain variable domain of TCR clone 325728 (TRAV12-3, TRAJ52)
CAMRRTNAGGTSYGKMTF

SEQ ID NO: 651456 - protein, 17 aa, Homo sapiens
  CDR3 for beta chain variable domain of TCR clone 325728 (TRBV7-3, TRBJ2-3)
CASSLMKRMRGADTQYF

SEQ ID NO: 651457 - protein, 11 aa, Homo sapiens
  CDR3 for alpha chain variable domain of TCR clone 325729 (TRAV2, TRAJ33)
CAVDSNYQLIW

SEQ ID NO: 651458 - protein, 17 aa, Homo sapiens
  CDR3 for beta chain variable domain of TCR clone 325729 (TRBV20-1, TRBJ2-3)
GSARDGWNAKERDTQYF

SEQ ID NO: 651459 - protein, 15 aa, Homo sapiens
  CDR3 for alpha chain variable domain of TCR clone 325730 (TRAV17, TRAJ35)
CATAFVIGFGNVLHC

SEQ ID NO: 651460 - protein, 16 aa, Homo sapiens
  CDR3 for beta chain variable domain of TCR clone 325730 (TRBV5-7, TRBJ2-7)
PAANEGGGRGSYEQYF

SEQ ID NO: 651461 - protein, 14 aa, Homo sapiens
  CDR3 for alpha chain variable domain of TCR clone 325731 (TRAV8-3, TRAJ15)
CAVGRHQAGTSLIF

SEQ ID NO: 651462 - protein, 13 aa, Homo sapiens
  CDR3 for beta chain variable domain of TCR clone 325731 (TRBV9, TRBJ2-7)
CASSASDSYEQYF

SEQ ID NO: 651463 - protein, 15 aa, Homo sapiens
  CDR3 for alpha chain variable domain of TCR clone 325732 (TRAV8-3, TRAJ13)
CAVAPNSGGYQKVTF

SEQ ID NO: 651464 - protein, 14 aa, Homo sapiens
  CDR3 for beta chain variable domain of TCR clone 325732 (TRBV15, TRBJ2-5)
CATSIGGLGETQYF

SEQ ID NO: 651465 - protein, 15 aa, Homo sapiens
  CDR3 for alpha chain variable domain of TCR clone 325733 (TRAV21, TRAJ13)
CAVRPTSGGYQKATF

SEQ ID NO: 651466 - protein, 18 aa, Homo sapiens
  CDR3 for beta chain variable domain of TCR clone 325733 (TRBV11-3, TRBJ2-1)
CASSSYPGGRDSYNEQFF

SEQ ID NO: 651467 - protein, 14 aa, Homo sapiens
  CDR3 for alpha chain variable domain of TCR clone 325734 (TRAV16, TRAJ39)
CALSKNNAGNMLTF

SEQ ID NO: 651468 - protein, 16 aa, Homo sapiens
  CDR3 for beta chain variable domain of TCR clone 325734 (TRBV6-6, TRBJ2-1)
CASSYTFSGSYNEQFF

SEQ ID NO: 651469 - protein, 15 aa, Homo sapiens
  CDR3 for alpha chain variable domain of TCR clone 325735 (TRAV34, TRAJ38)
CGADFTPGNNRKLIW

SEQ ID NO: 651470 - protein, 14 aa, Homo sapiens
  CDR3 for beta chain variable domain of TCR clone 325735 (TRBV20-1, TRBJ2-1)
CSAQIGVSANEQFF

SEQ ID NO: 651471 - protein, 15 aa, Homo sapiens
  CDR3 for alpha chain variable domain of TCR clone 325736 (TRAV35, TRAJ58)
CAGRRQETSGSRSTF

SEQ ID NO: 651472 - protein, 11 aa, Homo sapiens
  CDR3 for beta chain variable domain of TCR clone 325736 (TRBV11-2, TRBJ1-1)
CASSINTEAFF

SEQ ID NO: 651473 - protein, 13 aa, Homo sapiens
  CDR3 for alpha chain variable domain of TCR clone 325737 (TRAV8-2, TRAJ21)
CVVSSYNFNKFYF

SEQ ID NO: 651474 - protein, 14 aa, Homo sapiens
  CDR3 for beta chain variable domain of TCR clone 325737 (TRBV7-3, TRBJ2-2)
CASSSGGYTGELFF

SEQ ID NO: 651475 - protein, 12 aa, Homo sapiens
  CDR3 for alpha chain variable domain of TCR clone 325738 (TRAV8-3, TRAJ26)
CAGDNYGQNFVF

SEQ ID NO: 651476 - protein, 17 aa, Homo sapiens
  CDR3 for beta chain variable domain of TCR clone 325738 (TRBV7-8, TRBJ2-6)
CASSAGTGGAGANILSF

SEQ ID NO: 651477 - protein, 13 aa, Homo sapiens
  CDR3 for alpha chain variable domain of TCR clone 325739 (TRAV3, TRAJ33)
CAVRDRSNYQLLW

SEQ ID NO: 651478 - protein, 16 aa, Homo sapiens
  CDR3 for beta chain variable domain of TCR clone 325739 (TRBV4-2, TRBJ2-7)
CASSQDRVTSSYEQYF

SEQ ID NO: 651479 - protein, 18 aa, Homo sapiens
  CDR3 for alpha chain variable domain of TCR clone 325740 (TRAV12-3, TRAJ52)
CAMSVGGAGGTSYGKLAF

SEQ ID NO: 651480 - protein, 15 aa, Homo sapiens
  CDR3 for beta chain variable domain of TCR clone 325740 (TRBV27, TRBJ1-6)
CASSFDRGLGSPFHF

SEQ ID NO: 651481 - protein, 15 aa, Homo sapiens
  CDR3 for alpha chain variable domain of TCR clone 325741 (TRAV26-1, TRAJ56)
CIVRVATGANSKLTF

SEQ ID NO: 651482 - protein, 14 aa, Homo sapiens
  CDR3 for beta chain variable domain of TCR clone 325741 (TRBV7-9, TRBJ1-5)
CASTQTGLNQPQHF

SEQ ID NO: 651483 - protein, 14 aa, Homo sapiens
  CDR3 for alpha chain variable domain of TCR clone 325742 (TRAV35, TRAJ22)
CAGLRPCSARQLTF

SEQ ID NO: 651484 - protein, 15 aa, Homo sapiens
  CDR3 for beta chain variable domain of TCR clone 325742 (TRBV20-1, TRBJ2-7)
CSARDRVSGMDEQYF

SEQ ID NO: 651485 - protein, 14 aa, Homo sapiens
  CDR3 for alpha chain variable domain of TCR clone 325743 (TRAV12-2, TRAJ17)
WAVLFKAAGNKLTF

SEQ ID NO: 651486 - protein, 14 aa, Homo sapiens
  CDR3 for beta chain variable domain of TCR clone 325743 (TRBV12-5, TRBJ2-5)
CASGSRTHHETQYF

SEQ ID NO: 651487 - protein, 13 aa, Homo sapiens
  CDR3 for alpha chain variable domain of TCR clone 325744 (TRAV21, TRAJ42)
CAVKGGSQGNLIF

SEQ ID NO: 651488 - protein, 17 aa, Homo sapiens
  CDR3 for beta chain variable domain of TCR clone 325744 (TRBV7-9, TRBJ2-6)
CASSPSQGLRGANVLTF

SEQ ID NO: 651489 - protein, 12 aa, Homo sapiens
  CDR3 for alpha chain variable domain of TCR clone 325745 (TRAV24, TRAJ17)
CASKAAGNKLTF

SEQ ID NO: 651490 - protein, 12 aa, Homo sapiens
  CDR3 for beta chain variable domain of TCR clone 325745 (TRBV12-4, TRBJ2-7)
CASSLGGYEQYF

SEQ ID NO: 651491 - protein, 12 aa, Homo sapiens
  CDR3 for alpha chain variable domain of TCR clone 325746 (TRAV16, TRAJ56)
CAPTGANSKLTF

SEQ ID NO: 651492 - protein, 17 aa, Homo sapiens
  CDR3 for beta chain variable domain of TCR clone 325746 (TRBV27, TRBJ2-6)
CASSLTGFASGANVLTC

SEQ ID NO: 651493 - protein, 18 aa, Homo sapiens
  CDR3 for alpha chain variable domain of TCR clone 325747 (TRAV3, TRAJ17)
CAVRARRGGRSCRQQANF

SEQ ID NO: 651494 - protein, 16 aa, Homo sapiens
  CDR3 for beta chain variable domain of TCR clone 325747 (TRBV9, TRBJ2-7)
CASSAGPDRSPYEQYF

SEQ ID NO: 651495 - protein, 15 aa, Homo sapiens
  CDR3 for alpha chain variable domain of TCR clone 325748 (TRAV3, TRAJ22)
CAVRDRGGSARQLTF

SEQ ID NO: 651496 - protein, 14 aa, Homo sapiens
  CDR3 for beta chain variable domain of TCR clone 325748 (TRBV19, TRBJ1-5)
CASSLGLIGQRQHF

SEQ ID NO: 651497 - protein, 13 aa, Homo sapiens
  CDR3 for alpha chain variable domain of TCR clone 325749 (TRAV12-1, TRAJ43)
CVVSHHNNNDMRF

SEQ ID NO: 651498 - protein, 16 aa, Homo sapiens
  CDR3 for beta chain variable domain of TCR clone 325749 (TRBV5-7, TRBJ2-7)
CASSSPGGRTPYEQYF

SEQ ID NO: 651499 - protein, 14 aa, Homo sapiens
  CDR3 for alpha chain variable domain of TCR clone 325750 (TRAV1-2, TRAJ16)
CAVNRFSDGQKLLF

SEQ ID NO: 651500 - protein, 16 aa, Homo sapiens
  CDR3 for beta chain variable domain of TCR clone 325750 (TRBV12-4, TRBJ2-5)
CASSFFVSGRQETQYF

SEQ ID NO: 651501 - protein, 14 aa, Homo sapiens
  CDR3 for alpha chain variable domain of TCR clone 325751 (TRAV12-2, TRAJ20)
CAVNVGGNDYKLSF

SEQ ID NO: 651502 - protein, 14 aa, Homo sapiens
  CDR3 for beta chain variable domain of TCR clone 325751 (TRBV12-5, TRBJ2-5)
CASGSRTHQETQYF

SEQ ID NO: 651503 - protein, 13 aa, Homo sapiens
  CDR3 for alpha chain variable domain of TCR clone 325752 (TRAV27, TRAJ45)
CRSSGGGADGLTF

SEQ ID NO: 651504 - protein, 17 aa, Homo sapiens
  CDR3 for beta chain variable domain of TCR clone 325752 (TRBV11-3, TRBJ2-1)
CASSLYPPGVEYNEQVF

SEQ ID NO: 651505 - protein, 12 aa, Homo sapiens
  CDR3 for alpha chain variable domain of TCR clone 325753 (TRAV12-2, TRAJ10)
WGVTGGGNKLTF

SEQ ID NO: 651506 - protein, 14 aa, Homo sapiens
  CDR3 for beta chain variable domain of TCR clone 325753 (TRBV7-2, TRBJ2-1)
CASSLGVGYNEQFF

SEQ ID NO: 651507 - protein, 16 aa, Homo sapiens
  CDR3 for alpha chain variable domain of TCR clone 325754 (TRAV30, TRAJ24)
CGTEIVDADSWGKFQF

SEQ ID NO: 651508 - protein, 15 aa, Homo sapiens
  CDR3 for beta chain variable domain of TCR clone 325754 (TRBV7-2, TRBJ2-7)
CASSLSGALTYEQYF

SEQ ID NO: 651509 - protein, 13 aa, Homo sapiens
  CDR3 for alpha chain variable domain of TCR clone 325755 (TRAV16, TRAJ29)
CALSRRGNTPLVF

SEQ ID NO: 651510 - protein, 15 aa, Homo sapiens
  CDR3 for beta chain variable domain of TCR clone 325755 (TRBV4-1, TRBJ2-3)
RASSRGQGIPDTQYF

SEQ ID NO: 651511 - protein, 13 aa, Homo sapiens
  CDR3 for alpha chain variable domain of TCR clone 325756 (TRAV21, TRAJ20)
CAVGLRVDYKLSF

SEQ ID NO: 651512 - protein, 13 aa, Homo sapiens
  CDR3 for beta chain variable domain of TCR clone 325756 (TRBV7-6, TRBJ2-7)
CASSLDHTHEQYF

SEQ ID NO: 651513 - protein, 15 aa, Homo sapiens
  CDR3 for alpha chain variable domain of TCR clone 325757 (TRAV8-4, TRAJ3)
CSVTGENLVQQCFQD

SEQ ID NO: 651514 - protein, 16 aa, Homo sapiens
  CDR3 for beta chain variable domain of TCR clone 325757 (TRBV4-2, TRBJ1-1)
CASSQARFGMNTEAFF

SEQ ID NO: 651515 - protein, 15 aa, Homo sapiens
  CDR3 for alpha chain variable domain of TCR clone 325758 (TRAV26-1, TRAJ38)
CIASSNAGNNRKMIW

SEQ ID NO: 651516 - protein, 12 aa, Homo sapiens
  CDR3 for beta chain variable domain of TCR clone 325758 (TRBV5-8, TRBJ1-2)
CASSFGVYGYTF

SEQ ID NO: 651517 - protein, 16 aa, Homo sapiens
  CDR3 for alpha chain variable domain of TCR clone 325759 (TRAV13-1, TRAJ48)
CAASIFGNFGNEKLTF

SEQ ID NO: 651518 - protein, 16 aa, Homo sapiens
  CDR3 for beta chain variable domain of TCR clone 325759 (TRBV18, TRBJ1-5)
CASAPYRVEGNQPQHF

SEQ ID NO: 651519 - protein, 15 aa, Homo sapiens
  CDR3 for alpha chain variable domain of TCR clone 325760 (TRAV13-1, TRAJ5)
CAVYISDTGRRALTF

SEQ ID NO: 651520 - protein, 15 aa, Homo sapiens
  CDR3 for beta chain variable domain of TCR clone 325760 (TRBV2, TRBJ2-1)
CASSELAGGYNEQFF

SEQ ID NO: 651521 - protein, 12 aa, Homo sapiens
  CDR3 for alpha chain variable domain of TCR clone 325761 (TRAV3, TRAJ20)
CAVRDPDYKLSF

SEQ ID NO: 651522 - protein, 16 aa, Homo sapiens
  CDR3 for beta chain variable domain of TCR clone 325761 (TRBV4-1, TRBJ2-7)
CASSQEWTSGPLEQYF

SEQ ID NO: 651523 - protein, 13 aa, Homo sapiens
  CDR3 for alpha chain variable domain of TCR clone 325762 (TRAV8-4, TRAJ48)
CAVSLFGNEKLTF

SEQ ID NO: 651524 - protein, 16 aa, Homo sapiens
  CDR3 for beta chain variable domain of TCR clone 325762 (TRBV27, TRBJ2-2)
CASSSSGVSNTGELFF

SEQ ID NO: 651525 - protein, 17 aa, Homo sapiens
  CDR3 for alpha chain variable domain of TCR clone 325763 (TRAV3, TRAJ12)
CAVRDGGRMDSRYKLIF

SEQ ID NO: 651526 - protein, 13 aa, Homo sapiens
  CDR3 for beta chain variable domain of TCR clone 325763 (TRBV12-4, TRBJ1-2)
CASSLRQGKGYTF

SEQ ID NO: 651527 - protein, 15 aa, Homo sapiens
  CDR3 for alpha chain variable domain of TCR clone 325764 (TRAV12-3, TRAJ42)
CAMSGHGGSQGNLIF

SEQ ID NO: 651528 - protein, 13 aa, Homo sapiens
  CDR3 for beta chain variable domain of TCR clone 325764 (TRBV19, TRBJ2-5)
CASSGRGGETQYF

SEQ ID NO: 651529 - protein, 16 aa, Homo sapiens
  CDR3 for alpha chain variable domain of TCR clone 325765 (TRAV17, TRAJ22)
CATGPISSVSARQLTF

SEQ ID NO: 651530 - protein, 13 aa, Homo sapiens
  CDR3 for beta chain variable domain of TCR clone 325765 (TRBV11-2, TRBJ2-1)
CASSLGLAGGRFF

SEQ ID NO: 651531 - protein, 14 aa, Homo sapiens
  CDR3 for alpha chain variable domain of TCR clone 325766 (TRAV23/DV6, TRAJ27)
CAASRDTNAGKSTF

SEQ ID NO: 651532 - protein, 14 aa, Homo sapiens
  CDR3 for beta chain variable domain of TCR clone 325766 (TRBV12-4, TRBJ2-5)
CASSFGASGGTQYF

SEQ ID NO: 651533 - protein, 16 aa, Homo sapiens
  CDR3 for alpha chain variable domain of TCR clone 325767 (TRAV35, TRAJ28)
CAGQRYSGAGSSQLTF

SEQ ID NO: 651534 - protein, 13 aa, Homo sapiens
  CDR3 for beta chain variable domain of TCR clone 325767 (TRBV19, TRBJ1-2)
CASSQGQVYGYTF

SEQ ID NO: 651535 - protein, 15 aa, Homo sapiens
  CDR3 for alpha chain variable domain of TCR clone 325768 (TRAV17, TRAJ23)
CASDAEDNQGGKLIF

SEQ ID NO: 651536 - protein, 12 aa, Homo sapiens
  CDR3 for beta chain variable domain of TCR clone 325768 (TRBV2, TRBJ2-1)
CAKREGYNEQFF

SEQ ID NO: 651537 - protein, 11 aa, Homo sapiens
  CDR3 for alpha chain variable domain of TCR clone 325769 (TRAV3, TRAJ21)
CAVDNFNKFYF

SEQ ID NO: 651538 - protein, 16 aa, Homo sapiens
  CDR3 for beta chain variable domain of TCR clone 325769 (TRBV7-3, TRBJ2-2)
CASSLKRGTLSGELFF

SEQ ID NO: 651539 - protein, 16 aa, Homo sapiens
  CDR3 for alpha chain variable domain of TCR clone 325770 (TRAV3, TRAJ37)
CVVRPHGSGNTGKLIF

SEQ ID NO: 651540 - protein, 17 aa, Homo sapiens
  CDR3 for beta chain variable domain of TCR clone 325770 (TRBV20-1, TRBJ2-1)
CSASSSGLAGSYNEQFF

SEQ ID NO: 651541 - protein, 13 aa, Homo sapiens
  CDR3 for alpha chain variable domain of TCR clone 325771 (TRAV12-2, TRAJ6)
CAVNVSRKLHTYI

SEQ ID NO: 651542 - protein, 16 aa, Homo sapiens
  CDR3 for beta chain variable domain of TCR clone 325771 (TRBV20-1, TRBJ1-2)
CSASMGQGVANYGYTF

SEQ ID NO: 651543 - protein, 13 aa, Homo sapiens
  CDR3 for alpha chain variable domain of TCR clone 325772 (TRAV2, TRAJ29)
CAAGNSGNTPLVF

SEQ ID NO: 651544 - protein, 16 aa, Homo sapiens
  CDR3 for beta chain variable domain of TCR clone 325772 (TRBV10-3, TRBJ2-1)
CAIRGGGRGDYNEQFF

SEQ ID NO: 651545 - protein, 12 aa, Homo sapiens
  CDR3 for alpha chain variable domain of TCR clone 325773 (TRAV12-3, TRAJ17)
CAMTLTGNKLNF

SEQ ID NO: 651546 - protein, 15 aa, Homo sapiens
  CDR3 for beta chain variable domain of TCR clone 325773 (TRBV20-1, TRBJ2-7)
CSASDRVSGMDEQYF

SEQ ID NO: 651547 - protein, 13 aa, Homo sapiens
  CDR3 for alpha chain variable domain of TCR clone 325774 (TRAV12-2, TRAJ53)
CAGVGGSNYKLTF

SEQ ID NO: 651548 - protein, 13 aa, Homo sapiens
  CDR3 for beta chain variable domain of TCR clone 325774 (TRBV7-9, TRBJ1-2)
CASSLKQNYGYTF

SEQ ID NO: 651549 - protein, 12 aa, Homo sapiens
  CDR3 for alpha chain variable domain of TCR clone 325775 (TRAV21, TRAJ23)
CAVMLQGGKLIF

SEQ ID NO: 651550 - protein, 14 aa, Homo sapiens
  CDR3 for beta chain variable domain of TCR clone 325775 (TRBV20-1, TRBJ1-1)
CSAQTLIGGTEAFF

SEQ ID NO: 651551 - protein, 13 aa, Homo sapiens
  CDR3 for alpha chain variable domain of TCR clone 325776 (TRAV17, TRAJ15)
CATVNQAGTALIF

SEQ ID NO: 651552 - protein, 15 aa, Homo sapiens
  CDR3 for beta chain variable domain of TCR clone 325776 (TRBV7-3, TRBJ2-1)
CASSPTGGGEVEQFF

SEQ ID NO: 651553 - protein, 14 aa, Homo sapiens
  CDR3 for alpha chain variable domain of TCR clone 325777 (TRAV8-2, TRAJ44)
CVVSLTGTASKLTF

SEQ ID NO: 651554 - protein, 13 aa, Homo sapiens
  CDR3 for beta chain variable domain of TCR clone 325777 (TRBV7-3, TRBJ1-1)
CASSQDWGAEAFF

SEQ ID NO: 651555 - protein, 18 aa, Homo sapiens
  CDR3 for alpha chain variable domain of TCR clone 325778 (TRAV21, TRAJ52)
CAVRPSPAGGTSYGKLTF

SEQ ID NO: 651556 - protein, 15 aa, Homo sapiens
  CDR3 for beta chain variable domain of TCR clone 325778 (TRBV20-1, TRBJ2-7)
CSARDRVSGMDGQYF

SEQ ID NO: 651557 - protein, 17 aa, Homo sapiens
  CDR3 for alpha chain variable domain of TCR clone 325779 (TRAV8-2, )
CVVNIQNPDPAVYQLRD

SEQ ID NO: 651558 - protein, 17 aa, Homo sapiens
  CDR3 for beta chain variable domain of TCR clone 325779 (TRBV7-3, TRBJ2-5)
CASSLGSGRSGSETQYF

SEQ ID NO: 651559 - protein, 12 aa, Homo sapiens
  CDR3 for alpha chain variable domain of TCR clone 325780 (TRAV38-2/DV8, TRAJ43)
CAYTINNNDMRF

SEQ ID NO: 651560 - protein, 13 aa, Homo sapiens
  CDR3 for beta chain variable domain of TCR clone 325780 (TRBV19, TRBJ1-2)
CASSVPGQDGYTF

SEQ ID NO: 651561 - protein, 16 aa, Homo sapiens
  CDR3 for alpha chain variable domain of TCR clone 325781 (TRAV17, TRAJ52)
CATSNAGGTGYGKLTF

SEQ ID NO: 651562 - protein, 15 aa, Homo sapiens
  CDR3 for beta chain variable domain of TCR clone 325781 (TRBV6-3, TRBJ2-7)
CASSSPGTVFYEQYF

SEQ ID NO: 651563 - protein, 10 aa, Homo sapiens
  CDR3 for alpha chain variable domain of TCR clone 325782 (TRAV13-2, TRAJ49)
CADTGNQFYF

SEQ ID NO: 651564 - protein, 11 aa, Homo sapiens
  CDR3 for beta chain variable domain of TCR clone 325782 (TRBV29-1, TRBJ2-5)
CSEDRTGTQYF

SEQ ID NO: 651565 - protein, 15 aa, Homo sapiens
  CDR3 for alpha chain variable domain of TCR clone 325783 (TRAV8-4, TRAJ29)
CAVSEDFRGNTPLGF

SEQ ID NO: 651566 - protein, 16 aa, Homo sapiens
  CDR3 for beta chain variable domain of TCR clone 325783 (TRBV7-6, TRBJ2-1)
CASSAPGPSSYNEQFF

SEQ ID NO: 651567 - protein, 14 aa, Homo sapiens
  CDR3 for alpha chain variable domain of TCR clone 325784 (TRAV3, TRAJ20)
CAVRDSFNDYKLSF

SEQ ID NO: 651568 - protein, 14 aa, Homo sapiens
  CDR3 for beta chain variable domain of TCR clone 325784 (TRBV7-2, TRBJ2-7)
CASRSQGAAYEQYF

SEQ ID NO: 651569 - protein, 11 aa, Homo sapiens
  CDR3 for alpha chain variable domain of TCR clone 325785 (TRAV12-1, TRAJ21)
CVVNNFNKFYF

SEQ ID NO: 651570 - protein, 17 aa, Homo sapiens
  CDR3 for beta chain variable domain of TCR clone 325785 (TRBV7-8, TRBJ2-1)
CASSPPTGTLAYNEQVF

SEQ ID NO: 651571 - protein, 14 aa, Homo sapiens
  CDR3 for alpha chain variable domain of TCR clone 325786 (TRAV21, TRAJ36)
CAVPDQTGANNLFF

SEQ ID NO: 651572 - protein, 12 aa, Homo sapiens
  CDR3 for beta chain variable domain of TCR clone 325786 (TRBV11-2, TRBJ2-2)
CASSLGGGELFF

SEQ ID NO: 651573 - protein, 14 aa, Homo sapiens
  CDR3 for alpha chain variable domain of TCR clone 325787 (TRAV4, TRAJ23)
CLVGSYNQGGKLIL

SEQ ID NO: 651574 - protein, 18 aa, Homo sapiens
  CDR3 for beta chain variable domain of TCR clone 325787 (TRBV6-5, TRBJ2-6)
CASRTPGQGKTGANVLTF

SEQ ID NO: 651575 - protein, 12 aa, Homo sapiens
  CDR3 for alpha chain variable domain of TCR clone 325788 (TRAV12-3, TRAJ17)
CALTLTGNKLTF

SEQ ID NO: 651576 - protein, 15 aa, Homo sapiens
  CDR3 for beta chain variable domain of TCR clone 325788 (TRBV20-1, TRBJ2-7)
CSARDRVSGMDEQYV

SEQ ID NO: 651577 - protein, 12 aa, Homo sapiens
  CDR3 for alpha chain variable domain of TCR clone 325789 (TRAV12-1, TRAJ6)
CVVSERSYIPTF

SEQ ID NO: 651578 - protein, 16 aa, Homo sapiens
  CDR3 for beta chain variable domain of TCR clone 325789 (TRBV7-3, TRBJ2-2)
CASSLKRGTLSGELFF

SEQ ID NO: 651579 - protein, 19 aa, Homo sapiens
  CDR3 for alpha chain variable domain of TCR clone 325790 (TRAV3, TRAJ6)
CAVRDGPRQEEATYLHLEE

SEQ ID NO: 651580 - protein, 14 aa, Homo sapiens
  CDR3 for beta chain variable domain of TCR clone 325790 (TRBV7-2, TRBJ2-7)
CASSRKTSFYEQYF

SEQ ID NO: 651581 - protein, 16 aa, Homo sapiens
  CDR3 for alpha chain variable domain of TCR clone 325791 (TRAV30, TRAJ24)
CGTEIVDADSWGKFQF

SEQ ID NO: 651582 - protein, 13 aa, Homo sapiens
  CDR3 for beta chain variable domain of TCR clone 325791 (TRBV19, TRBJ2-7)
CASSKTGTHEQYF

SEQ ID NO: 651583 - protein, 14 aa, Homo sapiens
  CDR3 for alpha chain variable domain of TCR clone 325792 (TRAV8-6, TRAJ12)
CAVKAADSSYKLIS

SEQ ID NO: 651584 - protein, 15 aa, Homo sapiens
  CDR3 for beta chain variable domain of TCR clone 325792 (TRBV5-1, TRBJ2-5)
CASSLGLAEQETQYF

SEQ ID NO: 651585 - protein, 12 aa, Homo sapiens
  CDR3 for alpha chain variable domain of TCR clone 325793 (TRAV1-1, TRAJ8)
CAGGTGFQKLVF

SEQ ID NO: 651586 - protein, 15 aa, Homo sapiens
  CDR3 for beta chain variable domain of TCR clone 325793 (TRBV7-9, TRBJ1-4)
CACSRTGGFDEKLFF

SEQ ID NO: 651587 - protein, 17 aa, Homo sapiens
  CDR3 for alpha chain variable domain of TCR clone 325794 (TRAV3, TRAJ6)
CAVRDGPRAGGSYIPTF

SEQ ID NO: 651588 - protein, 15 aa, Homo sapiens
  CDR3 for beta chain variable domain of TCR clone 325794 (TRBV2, TRBJ1-1)
CASSEAQTMNTEAFF

SEQ ID NO: 651589 - protein, 16 aa, Homo sapiens
  CDR3 for alpha chain variable domain of TCR clone 325795 (TRAV3, TRAJ37)
CAVRVRGSGHTGQLIF

SEQ ID NO: 651590 - protein, 11 aa, Homo sapiens
  CDR3 for beta chain variable domain of TCR clone 325795 (TRBV11-2, TRBJ2-2)
CASSLPGELFF

SEQ ID NO: 651591 - protein, 22 aa, Homo sapiens
  CDR3 for alpha chain variable domain of TCR clone 325796 (TRAV27, TRAJ23)
CAGAFDNREESLSSDRERSYLL

SEQ ID NO: 651592 - protein, 15 aa, Homo sapiens
  CDR3 for beta chain variable domain of TCR clone 325796 (TRBV7-3, TRBJ2-7)
CASSLTGQGKYEQYF

SEQ ID NO: 651593 - protein, 10 aa, Homo sapiens
  CDR3 for alpha chain variable domain of TCR clone 325797 (TRAV1-2, TRAJ18)
CAVRGEAQPW

SEQ ID NO: 651594 - protein, 13 aa, Homo sapiens
  CDR3 for beta chain variable domain of TCR clone 325797 (TRBV11-2, TRBJ2-5)
CASSRGPSETQYF

SEQ ID NO: 651595 - protein, 19 aa, Homo sapiens
  CDR3 for alpha chain variable domain of TCR clone 325798 (TRAV8-2, TRAJ48)
CVVSDLPSGSNFGNEKLTF

SEQ ID NO: 651596 - protein, 15 aa, Homo sapiens
  CDR3 for beta chain variable domain of TCR clone 325798 (TRBV5-1, TRBJ2-1)
CASSPPRAPYNEQFF

SEQ ID NO: 651597 - protein, 13 aa, Homo sapiens
  CDR3 for alpha chain variable domain of TCR clone 325799 (TRAV13-2, TRAJ13)
CAERPGGYQKVTF

SEQ ID NO: 651598 - protein, 15 aa, Homo sapiens
  CDR3 for beta chain variable domain of TCR clone 325799 (TRBV12-4, TRBJ2-5)
CASSPPTGLQETQYF

SEQ ID NO: 651599 - protein, 14 aa, Homo sapiens
  CDR3 for alpha chain variable domain of TCR clone 325800 (TRAV16, TRAJ33)
CALSAMDSNYQLIW

SEQ ID NO: 651600 - protein, 15 aa, Homo sapiens
  CDR3 for beta chain variable domain of TCR clone 325800 (TRBV28, TRBJ2-5)
CASSPPWSYQETQYF

SEQ ID NO: 651601 - protein, 13 aa, Homo sapiens
  CDR3 for alpha chain variable domain of TCR clone 325801 (TRAV27, TRAJ49)
CAPRPYTGNQFYF

SEQ ID NO: 651602 - protein, 14 aa, Homo sapiens
  CDR3 for beta chain variable domain of TCR clone 325801 (TRBV7-6, TRBJ2-3)
CAGSLGTVTDTQYF

SEQ ID NO: 651603 - protein, 14 aa, Homo sapiens
  CDR3 for alpha chain variable domain of TCR clone 325802 (TRAV26-1, TRAJ39)
CIVRGSRAGNMLTF

SEQ ID NO: 651604 - protein, 14 aa, Homo sapiens
  CDR3 for beta chain variable domain of TCR clone 325802 (TRBV25-1, TRBJ1-1)
CASTHLGGNTEAVF

SEQ ID NO: 651605 - protein, 19 aa, Homo sapiens
  CDR3 for alpha chain variable domain of TCR clone 325803 (TRAV13-1, TRAJ52)
CATSPYQNAGGTSYGKLTF

SEQ ID NO: 651606 - protein, 14 aa, Homo sapiens
  CDR3 for beta chain variable domain of TCR clone 325803 (TRBV19, TRBJ2-7)
CASTVQGRPYEQYF

SEQ ID NO: 651607 - protein, 14 aa, Homo sapiens
  CDR3 for alpha chain variable domain of TCR clone 325804 (TRAV8-4, TRAJ45)
RAVDSGGGADGLTF

SEQ ID NO: 651608 - protein, 14 aa, Homo sapiens
  CDR3 for beta chain variable domain of TCR clone 325804 (TRBV11-3, TRBJ2-1)
CASSATTSGSIQFF

SEQ ID NO: 651609 - protein, 15 aa, Homo sapiens
  CDR3 for alpha chain variable domain of TCR clone 325805 (TRAV12-1, TRAJ44)
CVVFVNTGTASKLTF

SEQ ID NO: 651610 - protein, 17 aa, Homo sapiens
  CDR3 for beta chain variable domain of TCR clone 325805 (TRBV7-8, TRBJ2-6)
CPSSAGTGGAGANVLTF

SEQ ID NO: 651611 - protein, 14 aa, Homo sapiens
  CDR3 for alpha chain variable domain of TCR clone 325806 (TRAV1-2, TRAJ16)
CAVNRFSDGQKLLF

SEQ ID NO: 651612 - protein, 15 aa, Homo sapiens
  CDR3 for beta chain variable domain of TCR clone 325806 (TRBV10-3, TRBJ2-7)
CASKLAVNYEQYLGR

SEQ ID NO: 651613 - protein, 12 aa, Homo sapiens
  CDR3 for alpha chain variable domain of TCR clone 325807 (TRAV1-2, TRAJ24)
CAVGGSWGKFQF

SEQ ID NO: 651614 - protein, 14 aa, Homo sapiens
  CDR3 for beta chain variable domain of TCR clone 325807 (TRBV4-2, TRBJ1-5)
CASSQDSINQPQHF

SEQ ID NO: 651615 - protein, 14 aa, Homo sapiens
  CDR3 for alpha chain variable domain of TCR clone 325808 (TRAV27, TRAJ36)
CAGPPKRGANNLFF

SEQ ID NO: 651616 - protein, 15 aa, Homo sapiens
  CDR3 for beta chain variable domain of TCR clone 325808 (TRBV18, TRBJ2-7)
CASSPASTPNYEQYY

SEQ ID NO: 651617 - protein, 12 aa, Homo sapiens
  CDR3 for alpha chain variable domain of TCR clone 325809 (TRAV35, TRAJ30)
CAGLNRDDKIIF

SEQ ID NO: 651618 - protein, 15 aa, Homo sapiens
  CDR3 for beta chain variable domain of TCR clone 325809 (TRBV18, TRBJ2-3)
CASSALAGETDTQYF

SEQ ID NO: 651619 - protein, 12 aa, Homo sapiens
  CDR3 for alpha chain variable domain of TCR clone 325810 (TRAV21, TRAJ49)
CAVSWTGNQFYF

SEQ ID NO: 651620 - protein, 18 aa, Homo sapiens
  CDR3 for beta chain variable domain of TCR clone 325810 (TRBV7-8, TRBJ2-1)
CASSPAEGLEGGLNEQFF

SEQ ID NO: 651621 - protein, 14 aa, Homo sapiens
  CDR3 for alpha chain variable domain of TCR clone 325811 (TRAV13-1, TRAJ24)
CAASPADSWGKFQF

SEQ ID NO: 651622 - protein, 14 aa, Homo sapiens
  CDR3 for beta chain variable domain of TCR clone 325811 (TRBV20-1, TRBJ2-3)
CSASSGGSTDTQYF

SEQ ID NO: 651623 - protein, 13 aa, Homo sapiens
  CDR3 for alpha chain variable domain of TCR clone 325812 (TRAV1-2, TRAJ31)
CAVRPNNNARLMF

SEQ ID NO: 651624 - protein, 13 aa, Homo sapiens
  CDR3 for beta chain variable domain of TCR clone 325812 (TRBV7-9, TRBJ1-6)
CASSLASLSPLHF

SEQ ID NO: 651625 - protein, 11 aa, Homo sapiens
  CDR3 for alpha chain variable domain of TCR clone 325813 (TRAV12-3, TRAJ43)
CAMSVSNDMRF

SEQ ID NO: 651626 - protein, 15 aa, Homo sapiens
  CDR3 for beta chain variable domain of TCR clone 325813 (TRBV2, TRBJ2-3)
CASSDFEKATDTQYF

SEQ ID NO: 651627 - protein, 15 aa, Homo sapiens
  CDR3 for alpha chain variable domain of TCR clone 325814 (TRAV13-1, TRAJ44)
CAASRNTGTARKLTF

SEQ ID NO: 651628 - protein, 14 aa, Homo sapiens
  CDR3 for beta chain variable domain of TCR clone 325814 (TRBV11-2, TRBJ1-2)
CASSLYRGNYGYTF

SEQ ID NO: 651629 - protein, 15 aa, Homo sapiens
  CDR3 for alpha chain variable domain of TCR clone 325815 (TRAV8-4, TRAJ9)
CAVSDRETGGFKTIF

SEQ ID NO: 651630 - protein, 13 aa, Homo sapiens
  CDR3 for beta chain variable domain of TCR clone 325815 (TRBV9, TRBJ2-1)
CASSPSRGSEQFL

SEQ ID NO: 651631 - protein, 15 aa, Homo sapiens
  CDR3 for alpha chain variable domain of TCR clone 325816 (TRAV21, TRAJ53)
CATLNSGGSNYKLTF

SEQ ID NO: 651632 - protein, 16 aa, Homo sapiens
  CDR3 for beta chain variable domain of TCR clone 325816 (TRBV9, TRBJ2-7)
CASSVGGGGNYNEQYF

SEQ ID NO: 651633 - protein, 13 aa, Homo sapiens
  CDR3 for alpha chain variable domain of TCR clone 325817 (TRAV8-6, TRAJ27)
CAVSNTNAGKSTF

SEQ ID NO: 651634 - protein, 14 aa, Homo sapiens
  CDR3 for beta chain variable domain of TCR clone 325817 (TRBV11-2, TRBJ1-2)
CASSLGTANYGYTF

SEQ ID NO: 651635 - protein, 17 aa, Homo sapiens
  CDR3 for alpha chain variable domain of TCR clone 325818 (TRAV29/DV5, TRAJ40)
CAASVIYTTSGNYKYIF

SEQ ID NO: 651636 - protein, 13 aa, Homo sapiens
  CDR3 for beta chain variable domain of TCR clone 325818 (TRBV6-1, TRBJ2-1)
CASSHDRNNEQFF

SEQ ID NO: 651637 - protein, 14 aa, Homo sapiens
  CDR3 for alpha chain variable domain of TCR clone 325819 (TRAV12-2, TRAJ44)
CAVNKAGSASKLTF

SEQ ID NO: 651638 - protein, 14 aa, Homo sapiens
  CDR3 for beta chain variable domain of TCR clone 325819 (TRBV12-5, TRBJ2-5)
CASGSRTHQETQYF

SEQ ID NO: 651639 - protein, 15 aa, Homo sapiens
  CDR3 for alpha chain variable domain of TCR clone 325820 (TRAV20, TRAJ43)
CAVQAGKSSNNDMRF

SEQ ID NO: 651640 - protein, 14 aa, Homo sapiens
  CDR3 for beta chain variable domain of TCR clone 325820 (TRBV12-5, TRBJ2-5)
CASGSRTHQETQYF

SEQ ID NO: 651641 - protein, 13 aa, Homo sapiens
  CDR3 for alpha chain variable domain of TCR clone 325821 (TRAV8-3, TRAJ42)
FARYGGSQGNLIF

SEQ ID NO: 651642 - protein, 14 aa, Homo sapiens
  CDR3 for beta chain variable domain of TCR clone 325821 (TRBV20-1, TRBJ2-1)
CSALDRGTYNEQFF

SEQ ID NO: 651643 - protein, 15 aa, Homo sapiens
  CDR3 for alpha chain variable domain of TCR clone 325822 (TRAV21, TRAJ40)
CAVRPPTSGTYKYIF

SEQ ID NO: 651644 - protein, 14 aa, Homo sapiens
  CDR3 for beta chain variable domain of TCR clone 325822 (TRBV7-8, TRBJ2-3)
CASSFKSSTDTQYF

SEQ ID NO: 651645 - protein, 16 aa, Homo sapiens
  CDR3 for alpha chain variable domain of TCR clone 325823 (TRAV3, TRAJ10)
CAVRDMRAGGGNKLTV

SEQ ID NO: 651646 - protein, 14 aa, Homo sapiens
  CDR3 for beta chain variable domain of TCR clone 325823 (TRBV7-2, TRBJ1-1)
CASSFLTGTTEAFF

SEQ ID NO: 651647 - protein, 11 aa, Homo sapiens
  CDR3 for alpha chain variable domain of TCR clone 325824 (TRAV35, TRAJ34)
CWARNTYKLIF

SEQ ID NO: 651648 - protein, 14 aa, Homo sapiens
  CDR3 for beta chain variable domain of TCR clone 325824 (TRBV5-1, TRBJ2-7)
CASSRGESLYEQYF

SEQ ID NO: 651649 - protein, 13 aa, Homo sapiens
  CDR3 for alpha chain variable domain of TCR clone 325825 (TRAV27, TRAJ45)
CRSSGGGADGLTF

SEQ ID NO: 651650 - protein, 14 aa, Homo sapiens
  CDR3 for beta chain variable domain of TCR clone 325825 (TRBV7-9, TRBJ2-1)
CGSSSMVGFGEQFF

SEQ ID NO: 651651 - protein, 14 aa, Homo sapiens
  CDR3 for alpha chain variable domain of TCR clone 325826 (TRAV1-2, TRAJ8)
CAVREDTGFQKLVF

SEQ ID NO: 651652 - protein, 15 aa, Homo sapiens
  CDR3 for beta chain variable domain of TCR clone 325826 (TRBV19, TRBJ1-1)
CASTSGQIQNTEDFF

SEQ ID NO: 651653 - protein, 15 aa, Homo sapiens
  CDR3 for alpha chain variable domain of TCR clone 325827 (TRAV20, TRAJ6)
CDVRLQSGGSYIPTF

SEQ ID NO: 651654 - protein, 14 aa, Homo sapiens
  CDR3 for beta chain variable domain of TCR clone 325827 (TRBV12-4, TRBJ2-7)
CASSASGGWYEQYF

SEQ ID NO: 651655 - protein, 15 aa, Homo sapiens
  CDR3 for alpha chain variable domain of TCR clone 325828 (TRAV8-3, TRAJ45)
CASSYSRGGADGLTF

SEQ ID NO: 651656 - protein, 13 aa, Homo sapiens
  CDR3 for beta chain variable domain of TCR clone 325828 (TRBV10-3, TRBJ2-7)
CASKIAVNYEQYF

SEQ ID NO: 651657 - protein, 14 aa, Homo sapiens
  CDR3 for alpha chain variable domain of TCR clone 325829 (TRAV13-1, TRAJ44)
CAAKATGTASKLTF

SEQ ID NO: 651658 - protein, 14 aa, Homo sapiens
  CDR3 for beta chain variable domain of TCR clone 325829 (TRBV7-2, TRBJ2-2)
CASSLNSNTGELFF

SEQ ID NO: 651659 - protein, 16 aa, Homo sapiens
  CDR3 for alpha chain variable domain of TCR clone 325830 (TRAV12-3, TRAJ53)
CAMIPGSGGSNYKLKF

SEQ ID NO: 651660 - protein, 11 aa, Homo sapiens
  CDR3 for beta chain variable domain of TCR clone 325830 (TRBV29-1, TRBJ2-5)
CSEGRTGTQYF

SEQ ID NO: 651661 - protein, 14 aa, Homo sapiens
  CDR3 for alpha chain variable domain of TCR clone 325831 (TRAV16, TRAJ17)
CALSGRAAGNKLTF

SEQ ID NO: 651662 - protein, 14 aa, Homo sapiens
  CDR3 for beta chain variable domain of TCR clone 325831 (TRBV12-5, TRBJ2-5)
CASGSRTHQETQYF

SEQ ID NO: 651663 - protein, 14 aa, Homo sapiens
  CDR3 for alpha chain variable domain of TCR clone 325832 (TRAV2, TRAJ37)
CAVDDQGNTGKLIF

SEQ ID NO: 651664 - protein, 14 aa, Homo sapiens
  CDR3 for beta chain variable domain of TCR clone 325832 (TRBV18, TRBJ2-1)
CASSPQGRFNEQFF

SEQ ID NO: 651665 - protein, 16 aa, Homo sapiens
  CDR3 for alpha chain variable domain of TCR clone 325833 (TRAV26-1, TRAJ37)
CIVRGDGSGNTGKLIF

SEQ ID NO: 651666 - protein, 16 aa, Homo sapiens
  CDR3 for beta chain variable domain of TCR clone 325833 (TRBV4-3, TRBJ2-7)
CASSPRTSGRSYEQYF

SEQ ID NO: 651667 - protein, 12 aa, Homo sapiens
  CDR3 for alpha chain variable domain of TCR clone 325834 (TRAV4, TRAJ26)
CLVGDYGQNFVF

SEQ ID NO: 651668 - protein, 15 aa, Homo sapiens
  CDR3 for beta chain variable domain of TCR clone 325834 (TRBV4-1, TRBJ2-7)
CASSQNTGRLYEQYF

SEQ ID NO: 651669 - protein, 15 aa, Homo sapiens
  CDR3 for alpha chain variable domain of TCR clone 325835 (TRAV2, TRAJ37)
CAVEAGSSNTGKLIF

SEQ ID NO: 651670 - protein, 15 aa, Homo sapiens
  CDR3 for beta chain variable domain of TCR clone 325835 (TRBV4-1, TRBJ2-7)
CASSQNTGRLYEQYF

SEQ ID NO: 651671 - protein, 11 aa, Homo sapiens
  CDR3 for alpha chain variable domain of TCR clone 325836 (TRAV2, TRAJ13)
CASGGYQKVTF

SEQ ID NO: 651672 - protein, 15 aa, Homo sapiens
  CDR3 for beta chain variable domain of TCR clone 325836 (TRBV5-4, TRBJ2-5)
CASSRFGTGSYEQYF

SEQ ID NO: 651673 - protein, 16 aa, Homo sapiens
  CDR3 for alpha chain variable domain of TCR clone 325837 (TRAV3, TRAJ37)
CAVRGKGSGNTGTLIF

SEQ ID NO: 651674 - protein, 15 aa, Homo sapiens
  CDR3 for beta chain variable domain of TCR clone 325837 (TRBV6-6, TRBJ2-5)
CASSYGKIIQETQYF

SEQ ID NO: 651675 - protein, 14 aa, Homo sapiens
  CDR3 for alpha chain variable domain of TCR clone 325838 (TRAV12-3, TRAJ22)
CAMSLFGSARQLTF

SEQ ID NO: 651676 - protein, 13 aa, Homo sapiens
  CDR3 for beta chain variable domain of TCR clone 325838 (TRBV7-3, TRBJ1-1)
CASSQDWGAESFF

SEQ ID NO: 651677 - protein, 15 aa, Homo sapiens
  CDR3 for alpha chain variable domain of TCR clone 325839 (TRAV12-2, TRAJ53)
CAVNGGGGSNYKLTF

SEQ ID NO: 651678 - protein, 17 aa, Homo sapiens
  CDR3 for beta chain variable domain of TCR clone 325839 (TRBV7-3, TRBJ2-3)
RASSLMKRMRGAYTQYF

SEQ ID NO: 651679 - protein, 11 aa, Homo sapiens
  CDR3 for alpha chain variable domain of TCR clone 325840 (TRAV2, TRAJ13)
CASGGYQKVTF

SEQ ID NO: 651680 - protein, 16 aa, Homo sapiens
  CDR3 for beta chain variable domain of TCR clone 325840 (TRBV27, TRBJ2-2)
CASSFRGLVRTGQLFF

SEQ ID NO: 651681 - protein, 13 aa, Homo sapiens
  CDR3 for alpha chain variable domain of TCR clone 325841 (TRAV13-2, TRAJ13)
CSERPGGYQKVTF

SEQ ID NO: 651682 - protein, 16 aa, Homo sapiens
  CDR3 for beta chain variable domain of TCR clone 325841 (TRBV18, TRBJ2-5)
CASSPPSSGGAKTQYF

SEQ ID NO: 651683 - protein, 12 aa, Homo sapiens
  CDR3 for alpha chain variable domain of TCR clone 325842 (TRAV21, TRAJ33)
CTKMDSHYQLIW

SEQ ID NO: 651684 - protein, 14 aa, Homo sapiens
  CDR3 for beta chain variable domain of TCR clone 325842 (TRBV12-4, TRBJ2-3)
CASTIAGWGDTQYF

SEQ ID NO: 651685 - protein, 12 aa, Homo sapiens
  CDR3 for alpha chain variable domain of TCR clone 325843 (TRAV13-1, TRAJ21)
CAAKEGLNRFYF

SEQ ID NO: 651686 - protein, 15 aa, Homo sapiens
  CDR3 for beta chain variable domain of TCR clone 325843 (TRBV25-1, TRBJ1-4)
CASSPGDSTNEKLFF

SEQ ID NO: 651687 - protein, 14 aa, Homo sapiens
  CDR3 for alpha chain variable domain of TCR clone 325844 (TRAV2, TRAJ37)
CAVDFTSNTDKLIF

SEQ ID NO: 651688 - protein, 16 aa, Homo sapiens
  CDR3 for beta chain variable domain of TCR clone 325844 (TRBV27, TRBJ2-7)
CASSSERRDSAYEQYF

SEQ ID NO: 651689 - protein, 14 aa, Homo sapiens
  CDR3 for alpha chain variable domain of TCR clone 325845 (TRAV23/DV6, TRAJ11)
CAASLEPGYSTLTF

SEQ ID NO: 651690 - protein, 15 aa, Homo sapiens
  CDR3 for beta chain variable domain of TCR clone 325845 (TRBV28, TRBJ2-7)
CASSSPGTEPFEQYF

SEQ ID NO: 651691 - protein, 14 aa, Homo sapiens
  CDR3 for alpha chain variable domain of TCR clone 325846 (TRAV1-2, TRAJ16)
CAVNRFSDGQKLPF

SEQ ID NO: 651692 - protein, 11 aa, Homo sapiens
  CDR3 for beta chain variable domain of TCR clone 325846 (TRBV7-8, TRBJ2-7)
CASSLSLEQYF

SEQ ID NO: 651693 - protein, 15 aa, Homo sapiens
  CDR3 for alpha chain variable domain of TCR clone 325847 (TRAV38-1, TRAJ45)
CAFMKGGGGAGGLTF

SEQ ID NO: 651694 - protein, 13 aa, Homo sapiens
  CDR3 for beta chain variable domain of TCR clone 325847 (TRBV7-9, TRBJ1-2)
CASSLKQSYGYTF

SEQ ID NO: 651695 - protein, 11 aa, Homo sapiens
  CDR3 for alpha chain variable domain of TCR clone 325848 (TRAV1-1, TRAJ23)
CAVRQGGKLIF

SEQ ID NO: 651696 - protein, 13 aa, Homo sapiens
  CDR3 for beta chain variable domain of TCR clone 325848 (TRBV10-2, TRBJ2-1)
CASEADSYNEQFF

SEQ ID NO: 651697 - protein, 15 aa, Homo sapiens
  CDR3 for alpha chain variable domain of TCR clone 325849 (TRAV21, TRAJ53)
CANLNSGGSNYKLTF

SEQ ID NO: 651698 - protein, 14 aa, Homo sapiens
  CDR3 for beta chain variable domain of TCR clone 325849 (TRBV7-2, TRBJ2-7)
CASSLPPGQGPQYF

SEQ ID NO: 651699 - protein, 14 aa, Homo sapiens
  CDR3 for alpha chain variable domain of TCR clone 325850 (TRAV23/DV6, TRAJ8)
CAASKATGFQKLVF

SEQ ID NO: 651700 - protein, 16 aa, Homo sapiens
  CDR3 for beta chain variable domain of TCR clone 325850 (TRBV7-2, TRBJ1-4)
CASSPVGRFDREKLFF

SEQ ID NO: 651701 - protein, 14 aa, Homo sapiens
  CDR3 for alpha chain variable domain of TCR clone 325851 (TRAV26-1, TRAJ34)
CIVSESYNTDKLIF

SEQ ID NO: 651702 - protein, 13 aa, Homo sapiens
  CDR3 for beta chain variable domain of TCR clone 325851 (TRBV19, TRBJ2-1)
CATSRGVYNEQFF

SEQ ID NO: 651703 - protein, 18 aa, Homo sapiens
  CDR3 for alpha chain variable domain of TCR clone 325852 (TRAV26-1, TRAJ22)
CIVRVSFWFCKATDLWIW

SEQ ID NO: 651704 - protein, 13 aa, Homo sapiens
  CDR3 for beta chain variable domain of TCR clone 325852 (TRBV7-9, TRBJ1-2)
CAISLKQNYGYTF

SEQ ID NO: 651705 - protein, 13 aa, Homo sapiens
  CDR3 for alpha chain variable domain of TCR clone 325853 (TRAV2, TRAJ15)
CAVASQAGTALIF

SEQ ID NO: 651706 - protein, 16 aa, Homo sapiens
  CDR3 for beta chain variable domain of TCR clone 325853 (TRBV5-1, TRBJ2-7)
CASSYASTSSGGEQYF

SEQ ID NO: 651707 - protein, 20 aa, Homo sapiens
  CDR3 for alpha chain variable domain of TCR clone 325854 (TRAV1-1, TRAJ4)
CLLLLRCEGFLSGGYNKLIF

SEQ ID NO: 651708 - protein, 15 aa, Homo sapiens
  CDR3 for beta chain variable domain of TCR clone 325854 (TRBV7-9, TRBJ1-6)
CASSSPGRGNSPLHF

SEQ ID NO: 651709 - protein, 18 aa, Homo sapiens
  CDR3 for alpha chain variable domain of TCR clone 325855 (TRAV27, TRAJ13)
ASTSVQELELWGYQKVTF

SEQ ID NO: 651710 - protein, 12 aa, Homo sapiens
  CDR3 for beta chain variable domain of TCR clone 325855 (TRBV14, TRBJ2-5)
CASSQLKETQYF

SEQ ID NO: 651711 - protein, 12 aa, Homo sapiens
  CDR3 for alpha chain variable domain of TCR clone 325856 (TRAV21, TRAJ56)
CAVYGANSKLTF

SEQ ID NO: 651712 - protein, 16 aa, Homo sapiens
  CDR3 for beta chain variable domain of TCR clone 325856 (TRBV29-1, TRBJ2-7)
CSVEAAEDGTAYEQYF

SEQ ID NO: 651713 - protein, 13 aa, Homo sapiens
  CDR3 for alpha chain variable domain of TCR clone 325857 (TRAV21, TRAJ27)
CAARPGNACKSTF

SEQ ID NO: 651714 - protein, 13 aa, Homo sapiens
  CDR3 for beta chain variable domain of TCR clone 325857 (TRBV18, TRBJ2-7)
CASQSGGGYEQYF

SEQ ID NO: 651715 - protein, 14 aa, Homo sapiens
  CDR3 for alpha chain variable domain of TCR clone 325858 (TRAV2, TRAJ9)
CAVEDRSGGFKTTF

SEQ ID NO: 651716 - protein, 12 aa, Homo sapiens
  CDR3 for beta chain variable domain of TCR clone 325858 (TRBV12-4, TRBJ2-4)
CASSSSGNIQYF

SEQ ID NO: 651717 - protein, 17 aa, Homo sapiens
  CDR3 for alpha chain variable domain of TCR clone 325859 (TRAV8-2, )
CVVNIQNPDPAVYQLRD

SEQ ID NO: 651718 - protein, 14 aa, Homo sapiens
  CDR3 for beta chain variable domain of TCR clone 325859 (TRBV7-9, TRBJ2-7)
CASSLVGGEETQYF

SEQ ID NO: 651719 - protein, 14 aa, Homo sapiens
  CDR3 for alpha chain variable domain of TCR clone 325860 (TRAV26-2, TRAJ32)
CILFRGGATNKRIF

SEQ ID NO: 651720 - protein, 14 aa, Homo sapiens
  CDR3 for beta chain variable domain of TCR clone 325860 (TRBV2, TRBJ2-7)
CASSVLGAAYEQYF

SEQ ID NO: 651721 - protein, 13 aa, Homo sapiens
  CDR3 for alpha chain variable domain of TCR clone 325861 (TRAV12-2, TRAJ34)
CAVRGYNTDKLIF

SEQ ID NO: 651722 - protein, 15 aa, Homo sapiens
  CDR3 for beta chain variable domain of TCR clone 325861 (TRBV28, TRBJ2-1)
CASRTGAGLIARQFF

SEQ ID NO: 651723 - protein, 13 aa, Homo sapiens
  CDR3 for alpha chain variable domain of TCR clone 325862 (TRAV2, TRAJ40)
CDVVTSGTYKYIF

SEQ ID NO: 651724 - protein, 13 aa, Homo sapiens
  CDR3 for beta chain variable domain of TCR clone 325862 (TRBV19, TRBJ2-1)
CSPTFVLSGEQFF

SEQ ID NO: 651725 - protein, 16 aa, Homo sapiens
  CDR3 for alpha chain variable domain of TCR clone 325863 (TRAV26-1, TRAJ33)
CIVPFCGEDSNYQLIW

SEQ ID NO: 651726 - protein, 14 aa, Homo sapiens
  CDR3 for beta chain variable domain of TCR clone 325863 (TRBV6-3, TRBJ1-1)
CASSYHSKNTEAFF

SEQ ID NO: 651727 - protein, 13 aa, Homo sapiens
  CDR3 for alpha chain variable domain of TCR clone 325864 (TRAV20, TRAJ17)
CAVLRDAGNKLTF

SEQ ID NO: 651728 - protein, 14 aa, Homo sapiens
  CDR3 for beta chain variable domain of TCR clone 325864 (TRBV4-2, TRBJ2-1)
CASGLDRAYNEQFF

SEQ ID NO: 651729 - protein, 14 aa, Homo sapiens
  CDR3 for alpha chain variable domain of TCR clone 325865 (TRAV26-1, TRAJ38)
CIADNAVNNRKLLW

SEQ ID NO: 651730 - protein, 13 aa, Homo sapiens
  CDR3 for beta chain variable domain of TCR clone 325865 (TRBV20-1, TRBJ2-1)
CSARSIPRDEQFF

SEQ ID NO: 651731 - protein, 12 aa, Homo sapiens
  CDR3 for alpha chain variable domain of TCR clone 325866 (TRAV12-1, TRAJ40)
CVVYSGTYKYIF

SEQ ID NO: 651732 - protein, 16 aa, Homo sapiens
  CDR3 for beta chain variable domain of TCR clone 325866 (TRBV4-1, TRBJ2-7)
CASSQEWTSGPLEQYF

SEQ ID NO: 651733 - protein, 14 aa, Homo sapiens
  CDR3 for alpha chain variable domain of TCR clone 325867 (TRAV29/DV5, TRAJ36)
CAARRKTGANNLFF

SEQ ID NO: 651734 - protein, 14 aa, Homo sapiens
  CDR3 for beta chain variable domain of TCR clone 325867 (TRBV19, TRBJ2-5)
CASSSSGIQETQYF

SEQ ID NO: 651735 - protein, 15 aa, Homo sapiens
  CDR3 for alpha chain variable domain of TCR clone 325868 (TRAV17, TRAJ57)
CATGPSQGGSEKLVF

SEQ ID NO: 651736 - protein, 16 aa, Homo sapiens
  CDR3 for beta chain variable domain of TCR clone 325868 (TRBV19, TRBJ2-2)
CASRSPGTGATGELFF

SEQ ID NO: 651737 - protein, 14 aa, Homo sapiens
  CDR3 for alpha chain variable domain of TCR clone 325869 (TRAV1-2, TRAJ16)
CAVNRFSGGQKLLF

SEQ ID NO: 651738 - protein, 11 aa, Homo sapiens
  CDR3 for beta chain variable domain of TCR clone 325869 (TRBV29-1, TRBJ2-5)
CSEDRTGTQCF

SEQ ID NO: 651739 - protein, 14 aa, Homo sapiens
  CDR3 for alpha chain variable domain of TCR clone 325870 (TRAV12-2, TRAJ40)
CAVKIPSGTHKYIF

SEQ ID NO: 651740 - protein, 17 aa, Homo sapiens
  CDR3 for beta chain variable domain of TCR clone 325870 (TRBV13, TRBJ2-3)
WASSPSRVAGGRNTQYF

SEQ ID NO: 651741 - protein, 17 aa, Homo sapiens
  CDR3 for alpha chain variable domain of TCR clone 325871 (TRAV12-1, TRAJ13)
CVVNKRGEFWGLPESYL

SEQ ID NO: 651742 - protein, 13 aa, Homo sapiens
  CDR3 for beta chain variable domain of TCR clone 325871 (TRBV10-3, TRBJ2-7)
CASKLAVNYEQYF

SEQ ID NO: 651743 - protein, 16 aa, Homo sapiens
  CDR3 for alpha chain variable domain of TCR clone 325872 (TRAV27, TRAJ13)
CAEAKSDSGGYQKVTF

SEQ ID NO: 651744 - protein, 15 aa, Homo sapiens
  CDR3 for beta chain variable domain of TCR clone 325872 (TRBV29-1, TRBJ2-1)
CSVGRHALFYNEQFF

SEQ ID NO: 651745 - protein, 14 aa, Homo sapiens
  CDR3 for alpha chain variable domain of TCR clone 325873 (TRAV29/DV5, TRAJ22)
CAASATGSERQLTF

SEQ ID NO: 651746 - protein, 14 aa, Homo sapiens
  CDR3 for beta chain variable domain of TCR clone 325873 (TRBV19, TRBJ2-1)
CASSPGLAPNEQFF

SEQ ID NO: 651747 - protein, 12 aa, Homo sapiens
  CDR3 for alpha chain variable domain of TCR clone 325874 (TRAV12-3, TRAJ17)
CAMTLTVNKLTF

SEQ ID NO: 651748 - protein, 15 aa, Homo sapiens
  CDR3 for beta chain variable domain of TCR clone 325874 (TRBV20-1, TRBJ2-7)
CSAREWVSGMDEQYF

SEQ ID NO: 651749 - protein, 13 aa, Homo sapiens
  CDR3 for alpha chain variable domain of TCR clone 325875 (TRAV13-1, TRAJ54)
CAASDQGAQKLVF

SEQ ID NO: 651750 - protein, 16 aa, Homo sapiens
  CDR3 for beta chain variable domain of TCR clone 325875 (TRBV7-3, TRBJ2-2)
CASSLKRGTLSGELFF

SEQ ID NO: 651751 - protein, 16 aa, Homo sapiens
  CDR3 for alpha chain variable domain of TCR clone 325876 (TRAV3, TRAJ10)
CAVRDMRAGGGNKLTF

SEQ ID NO: 651752 - protein, 14 aa, Homo sapiens
  CDR3 for beta chain variable domain of TCR clone 325876 (TRBV10-3, TRBJ2-1)
CAIRTDRGLNEQFF

SEQ ID NO: 651753 - protein, 13 aa, Homo sapiens
  CDR3 for alpha chain variable domain of TCR clone 325877 (TRAV13-1, TRAJ5)
CAARVTGRRALTF

SEQ ID NO: 651754 - protein, 15 aa, Homo sapiens
  CDR3 for beta chain variable domain of TCR clone 325877 (TRBV7-9, TRBJ2-7)
CASSPGVGLTYEQYF

SEQ ID NO: 651755 - protein, 15 aa, Homo sapiens
  CDR3 for alpha chain variable domain of TCR clone 325878 (TRAV8-3, TRAJ45)
FASSYSGGGADGLTF

SEQ ID NO: 651756 - protein, 15 aa, Homo sapiens
  CDR3 for beta chain variable domain of TCR clone 325878 (TRBV27, TRBJ2-1)
CASSNGGGSSNEQFF

SEQ ID NO: 651757 - protein, 13 aa, Homo sapiens
  CDR3 for alpha chain variable domain of TCR clone 325879 (TRAV12-2, TRAJ36)
CAVIATGANNLFF

SEQ ID NO: 651758 - protein, 15 aa, Homo sapiens
  CDR3 for beta chain variable domain of TCR clone 325879 (TRBV23-1, TRBJ2-1)
CASSQWPQLTMSSSS

SEQ ID NO: 651759 - protein, 14 aa, Homo sapiens
  CDR3 for alpha chain variable domain of TCR clone 325880 (TRAV12-1, TRAJ17)
CVVKYKAAGNKLTF

SEQ ID NO: 651760 - protein, 13 aa, Homo sapiens
  CDR3 for beta chain variable domain of TCR clone 325880 (TRBV18, TRBJ1-1)
CASSPNGDTEAFF

SEQ ID NO: 651761 - protein, 12 aa, Homo sapiens
  CDR3 for alpha chain variable domain of TCR clone 325881 (TRAV4, TRAJ6)
CLAQGGSYIPTF

SEQ ID NO: 651762 - protein, 12 aa, Homo sapiens
  CDR3 for beta chain variable domain of TCR clone 325881 (TRBV6-5, TRBJ2-3)
CASSDTTDTQHF

SEQ ID NO: 651763 - protein, 11 aa, Homo sapiens
  CDR3 for alpha chain variable domain of TCR clone 325882 (TRAV27, TRAJ45)
CAGAQEEVLTD

SEQ ID NO: 651764 - protein, 18 aa, Homo sapiens
  CDR3 for beta chain variable domain of TCR clone 325882 (TRBV11-2, TRBJ2-1)
SVPAAYTPPGVEYNEQFF

SEQ ID NO: 651765 - protein, 12 aa, Homo sapiens
  CDR3 for alpha chain variable domain of TCR clone 325883 (TRAV13-1, TRAJ49)
CAASAMGNQFYF

SEQ ID NO: 651766 - protein, 13 aa, Homo sapiens
  CDR3 for beta chain variable domain of TCR clone 325883 (TRBV20-1, TRBJ2-2)
CSASAADTGELFF

SEQ ID NO: 651767 - protein, 14 aa, Homo sapiens
  CDR3 for alpha chain variable domain of TCR clone 325884 (TRAV12-1, TRAJ10)
CVVNSAGGGNKPTF

SEQ ID NO: 651768 - protein, 14 aa, Homo sapiens
  CDR3 for beta chain variable domain of TCR clone 325884 (TRBV12-4, TRBJ1-1)
CASSLGTGGTEAFF

SEQ ID NO: 651769 - protein, 14 aa, Homo sapiens
  CDR3 for alpha chain variable domain of TCR clone 325885 (TRAV1-1, TRAJ12)
CAVRDQDSSYKLIF

SEQ ID NO: 651770 - protein, 14 aa, Homo sapiens
  CDR3 for beta chain variable domain of TCR clone 325885 (TRBV7-9, TRBJ2-1)
CASSPRDSLYEQFF

SEQ ID NO: 651771 - protein, 18 aa, Homo sapiens
  CDR3 for alpha chain variable domain of TCR clone 325886 (TRAV29/DV5, TRAJ26)
CSVLLCSKRKPEGQNFVF

SEQ ID NO: 651772 - protein, 11 aa, Homo sapiens
  CDR3 for beta chain variable domain of TCR clone 325886 (TRBV12-4, TRBJ2-7)
CATPEKGEQYF

SEQ ID NO: 651773 - protein, 12 aa, Homo sapiens
  CDR3 for alpha chain variable domain of TCR clone 325887 (TRAV13-1, TRAJ27)
CSAHTNAGQSTF

SEQ ID NO: 651774 - protein, 14 aa, Homo sapiens
  CDR3 for beta chain variable domain of TCR clone 325887 (TRBV19, TRBJ2-2)
CASSGQGIAGELFF

SEQ ID NO: 651775 - protein, 14 aa, Homo sapiens
  CDR3 for alpha chain variable domain of TCR clone 325888 (TRAV3, TRAJ40)
CAVRDRRGTYKYIF

SEQ ID NO: 651776 - protein, 16 aa, Homo sapiens
  CDR3 for beta chain variable domain of TCR clone 325888 (TRBV6-1, TRBJ1-3)
CASVQGGVETPYILER

SEQ ID NO: 651777 - protein, 12 aa, Homo sapiens
  CDR3 for alpha chain variable domain of TCR clone 325889 (TRAV3, TRAJ20)
CAVRDPDYKLSF

SEQ ID NO: 651778 - protein, 15 aa, Homo sapiens
  CDR3 for beta chain variable domain of TCR clone 325889 (TRBV6-5, TRBJ2-1)
CASSYDAGAGNEQFF

SEQ ID NO: 651779 - protein, 11 aa, Homo sapiens
  CDR3 for alpha chain variable domain of TCR clone 325890 (TRAV2, TRAJ21)
CAVFNFNKFYF

SEQ ID NO: 651780 - protein, 14 aa, Homo sapiens
  CDR3 for beta chain variable domain of TCR clone 325890 (TRBV11-2, TRBJ2-3)
CASSLYAGRDTQYF

SEQ ID NO: 651781 - protein, 16 aa, Homo sapiens
  CDR3 for alpha chain variable domain of TCR clone 325891 (TRAV30, TRAJ24)
CGTEIVDADSRGKFQF

SEQ ID NO: 651782 - protein, 12 aa, Homo sapiens
  CDR3 for beta chain variable domain of TCR clone 325891 (TRBV11-2, TRBJ2-2)
CASSLGGGELFF

SEQ ID NO: 651783 - protein, 15 aa, Homo sapiens
  CDR3 for alpha chain variable domain of TCR clone 325892 (TRAV8-3, TRAJ6)
CAVGEDRGGSYIPTF

SEQ ID NO: 651784 - protein, 14 aa, Homo sapiens
  CDR3 for beta chain variable domain of TCR clone 325892 (TRBV27, TRBJ2-2)
CASVRSPPGGELFF

SEQ ID NO: 651785 - protein, 15 aa, Homo sapiens
  CDR3 for alpha chain variable domain of TCR clone 325893 (TRAV26-1, TRAJ29)
CIVRVEGSGNTPLVF

SEQ ID NO: 651786 - protein, 15 aa, Homo sapiens
  CDR3 for beta chain variable domain of TCR clone 325893 (TRBV3-1, TRBJ1-2)
CASSHPGTPGYGYTF

SEQ ID NO: 651787 - protein, 15 aa, Homo sapiens
  CDR3 for alpha chain variable domain of TCR clone 325894 (TRAV34, TRAJ38)
CGADFTPGNNRKLIW

SEQ ID NO: 651788 - protein, 11 aa, Homo sapiens
  CDR3 for beta chain variable domain of TCR clone 325894 (TRBV7-3, TRBJ2-5)
CASSLSETQHF

SEQ ID NO: 651789 - protein, 11 aa, Homo sapiens
  CDR3 for alpha chain variable domain of TCR clone 325895 (TRAV12-3, TRAJ49)
CAANTGNQFYF

SEQ ID NO: 651790 - protein, 14 aa, Homo sapiens
  CDR3 for beta chain variable domain of TCR clone 325895 (TRBV7-8, TRBJ2-3)
CASSFKSSTDTQYF

SEQ ID NO: 651791 - protein, 12 aa, Homo sapiens
  CDR3 for alpha chain variable domain of TCR clone 325896 (TRAV3, TRAJ20)
CAVRDHDYKLSF

SEQ ID NO: 651792 - protein, 13 aa, Homo sapiens
  CDR3 for beta chain variable domain of TCR clone 325896 (TRBV9, TRBJ2-1)
CASSVGQGGEQSF

SEQ ID NO: 651793 - protein, 13 aa, Homo sapiens
  CDR3 for alpha chain variable domain of TCR clone 325897 (TRAV13-2, TRAJ53)
CAENMGSNYKLTF

SEQ ID NO: 651794 - protein, 15 aa, Homo sapiens
  CDR3 for beta chain variable domain of TCR clone 325897 (TRBV28, TRBJ2-7)
CASSLGRGLSYEQYF

SEQ ID NO: 651795 - protein, 14 aa, Homo sapiens
  CDR3 for alpha chain variable domain of TCR clone 325898 (TRAV12-2, TRAJ13)
CAVKKTGGYQKFTF

SEQ ID NO: 651796 - protein, 15 aa, Homo sapiens
  CDR3 for beta chain variable domain of TCR clone 325898 (TRBV7-2, TRBJ2-1)
CASSLASGRVNEQFF

SEQ ID NO: 651797 - protein, 16 aa, Homo sapiens
  CDR3 for alpha chain variable domain of TCR clone 325899 (TRAV3, TRAJ23)
CSVKIGIYNQGGKLIF

SEQ ID NO: 651798 - protein, 17 aa, Homo sapiens
  CDR3 for beta chain variable domain of TCR clone 325899 (TRBV10-3, TRBJ2-6)
CAISESTAPSGANVLTF

SEQ ID NO: 651799 - protein, 10 aa, Homo sapiens
  CDR3 for alpha chain variable domain of TCR clone 325900 (TRAV1-2, TRAJ31)
CVSEDARLMF

SEQ ID NO: 651800 - protein, 16 aa, Homo sapiens
  CDR3 for beta chain variable domain of TCR clone 325900 (TRBV13, TRBJ2-2)
CASSPRTGEHTGELFF

SEQ ID NO: 651801 - protein, 17 aa, Homo sapiens
  CDR3 for alpha chain variable domain of TCR clone 325901 (TRAV26-1, TRAJ58)
CIVRVGAEETSGSRVTF

SEQ ID NO: 651802 - protein, 18 aa, Homo sapiens
  CDR3 for beta chain variable domain of TCR clone 325901 (TRBV7-9, TRBJ2-7)
CVSSLTTSGSRTWYEQYF

SEQ ID NO: 651803 - protein, 14 aa, Homo sapiens
  CDR3 for alpha chain variable domain of TCR clone 325902 (TRAV3, TRAJ6)
CAVRDWEGSYIPTF

SEQ ID NO: 651804 - protein, 17 aa, Homo sapiens
  CDR3 for beta chain variable domain of TCR clone 325902 (TRBV6-5, TRBJ2-1)
CASRLSGRFESYNEQFF

SEQ ID NO: 651805 - protein, 13 aa, Homo sapiens
  CDR3 for alpha chain variable domain of TCR clone 325903 (TRAV8-3, TRAJ43)
CAVGPDNNNDMRF

SEQ ID NO: 651806 - protein, 14 aa, Homo sapiens
  CDR3 for beta chain variable domain of TCR clone 325903 (TRBV19, TRBJ2-1)
CASPTFVLSGEQFL

SEQ ID NO: 651807 - protein, 17 aa, Homo sapiens
  CDR3 for alpha chain variable domain of TCR clone 325904 (TRAV3, TRAJ7)
GAVRDMSPLEGTTDSLL

SEQ ID NO: 651808 - protein, 17 aa, Homo sapiens
  CDR3 for beta chain variable domain of TCR clone 325904 (TRBV15, TRBJ1-2)
CATSGREIDVVNYGYTF

SEQ ID NO: 651809 - protein, 12 aa, Homo sapiens
  CDR3 for alpha chain variable domain of TCR clone 325905 (TRAV21, TRAJ11)
CAATSGYSTLTF

SEQ ID NO: 651810 - protein, 14 aa, Homo sapiens
  CDR3 for beta chain variable domain of TCR clone 325905 (TRBV20-1, TRBJ2-7)
CSAPVLAGVGEQYF

SEQ ID NO: 651811 - protein, 18 aa, Homo sapiens
  CDR3 for alpha chain variable domain of TCR clone 325906 (TRAV21, TRAJ52)
CAVKPSPAGGTSYGKLTF

SEQ ID NO: 651812 - protein, 17 aa, Homo sapiens
  CDR3 for beta chain variable domain of TCR clone 325906 (TRBV25-1, TRBJ2-1)
CASSAYGQGRGVYEQFF

SEQ ID NO: 651813 - protein, 14 aa, Homo sapiens
  CDR3 for alpha chain variable domain of TCR clone 325907 (TRAV20, TRAJ42)
CAVQAGGSQGNLIF

SEQ ID NO: 651814 - protein, 16 aa, Homo sapiens
  CDR3 for beta chain variable domain of TCR clone 325907 (TRBV6-1, TRBJ2-5)
CASSETLDRGAETQYF

SEQ ID NO: 651815 - protein, 14 aa, Homo sapiens
  CDR3 for alpha chain variable domain of TCR clone 325908 (TRAV1-2, TRAJ16)
CAVNRFSDGQKLLF

SEQ ID NO: 651816 - protein, 11 aa, Homo sapiens
  CDR3 for beta chain variable domain of TCR clone 325908 (TRBV29-1, TRBJ2-5)
CSEDRTGTQHF

SEQ ID NO: 651817 - protein, 14 aa, Homo sapiens
  CDR3 for alpha chain variable domain of TCR clone 325909 (TRAV9-2, TRAJ39)
CALYIYNAGNMLTF

SEQ ID NO: 651818 - protein, 16 aa, Homo sapiens
  CDR3 for beta chain variable domain of TCR clone 325909 (TRBV20-1, TRBJ2-2)
QCSRIGQGGLTGELFF

SEQ ID NO: 651819 - protein, 11 aa, Homo sapiens
  CDR3 for alpha chain variable domain of TCR clone 325910 (TRAV2, TRAJ33)
CAVESNYQLIW

SEQ ID NO: 651820 - protein, 14 aa, Homo sapiens
  CDR3 for beta chain variable domain of TCR clone 325910 (TRBV19, TRBJ2-1)
CASPTVVLSGEQFF

SEQ ID NO: 651821 - protein, 12 aa, Homo sapiens
  CDR3 for alpha chain variable domain of TCR clone 325911 (TRAV13-1, TRAJ21)
CAAKEGFNKFHF

SEQ ID NO: 651822 - protein, 12 aa, Homo sapiens
  CDR3 for beta chain variable domain of TCR clone 325911 (TRBV7-6, TRBJ2-3)
CASSTGTDTQYF

SEQ ID NO: 651823 - protein, 12 aa, Homo sapiens
  CDR3 for alpha chain variable domain of TCR clone 325912 (TRAV21, TRAJ3)
CCFYSSASKIIF

SEQ ID NO: 651824 - protein, 15 aa, Homo sapiens
  CDR3 for beta chain variable domain of TCR clone 325912 (TRBV20-1, TRBJ2-7)
CSARDRVSGMDEQYV

SEQ ID NO: 651825 - protein, 13 aa, Homo sapiens
  CDR3 for alpha chain variable domain of TCR clone 325913 (TRAV12-2, TRAJ47)
RAVFMEYGNKLVF

SEQ ID NO: 651826 - protein, 14 aa, Homo sapiens
  CDR3 for beta chain variable domain of TCR clone 325913 (TRBV4-1, TRBJ1-5)
CASSQGPTNQPQHF

SEQ ID NO: 651827 - protein, 14 aa, Homo sapiens
  CDR3 for alpha chain variable domain of TCR clone 325914 (TRAV8-6, TRAJ49)
CAVSDTGTGNQFYF

SEQ ID NO: 651828 - protein, 16 aa, Homo sapiens
  CDR3 for beta chain variable domain of TCR clone 325914 (TRBV24-1, TRBJ2-1)
CATSGVAGANYNEQFF

SEQ ID NO: 651829 - protein, 13 aa, Homo sapiens
  CDR3 for alpha chain variable domain of TCR clone 325915 (TRAV12-2, TRAJ10)
CAVPTGGGNKLTF

SEQ ID NO: 651830 - protein, 13 aa, Homo sapiens
  CDR3 for beta chain variable domain of TCR clone 325915 (TRBV20-1, TRBJ1-6)
CSAPLGVGSPLHF

SEQ ID NO: 651831 - protein, 18 aa, Homo sapiens
  CDR3 for alpha chain variable domain of TCR clone 325916 (TRAV1-2, TRAJ18)
CAVRDMGDRGSTLGSLYF

SEQ ID NO: 651832 - protein, 13 aa, Homo sapiens
  CDR3 for beta chain variable domain of TCR clone 325916 (TRBV7-3, TRBJ2-2)
CASSSTPTGELFF

SEQ ID NO: 651833 - protein, 17 aa, Homo sapiens
  CDR3 for alpha chain variable domain of TCR clone 325917 (TRAV3, TRAJ6)
CAVRDGPRAGGSYIPTF

SEQ ID NO: 651834 - protein, 12 aa, Homo sapiens
  CDR3 for beta chain variable domain of TCR clone 325917 (TRBV5-1, TRBJ1-2)
CASSQDTYGYTF

SEQ ID NO: 651835 - protein, 13 aa, Homo sapiens
  CDR3 for alpha chain variable domain of TCR clone 325918 (TRAV12-3, TRAJ31)
CALSANNNARLMF

SEQ ID NO: 651836 - protein, 16 aa, Homo sapiens
  CDR3 for beta chain variable domain of TCR clone 325918 (TRBV7-9, TRBJ1-2)
CACSLGFSSGEGGYTF

SEQ ID NO: 651837 - protein, 13 aa, Homo sapiens
  CDR3 for alpha chain variable domain of TCR clone 325919 (TRAV8-2, TRAJ22)
CVVSEGSARQLTF

SEQ ID NO: 651838 - protein, 12 aa, Homo sapiens
  CDR3 for beta chain variable domain of TCR clone 325919 (TRBV11-2, TRBJ2-7)
CASSLPTYEQYF

SEQ ID NO: 651839 - protein, 13 aa, Homo sapiens
  CDR3 for alpha chain variable domain of TCR clone 325920 (TRAV17, TRAJ21)
CATDGGNFNKFYF

SEQ ID NO: 651840 - protein, 13 aa, Homo sapiens
  CDR3 for beta chain variable domain of TCR clone 325920 (TRBV4-1, TRBJ1-1)
CASSRKMNTEAFF

SEQ ID NO: 651841 - protein, 23 aa, Homo sapiens
  CDR3 for alpha chain variable domain of TCR clone 325921 (TRAV13-1, )
CAASTRRAQIPDIQNPDPAVYQL

SEQ ID NO: 651842 - protein, 12 aa, Homo sapiens
  CDR3 for beta chain variable domain of TCR clone 325921 (TRBV11-2, TRBJ2-2)
CASSLGGGELFF

SEQ ID NO: 651843 - protein, 11 aa, Homo sapiens
  CDR3 for alpha chain variable domain of TCR clone 325922 (TRAV12-3, TRAJ27)
CAMANAGKSTF

SEQ ID NO: 651844 - protein, 13 aa, Homo sapiens
  CDR3 for beta chain variable domain of TCR clone 325922 (TRBV20-1, TRBJ1-1)
CSARVGGNTVAFF

SEQ ID NO: 651845 - protein, 15 aa, Homo sapiens
  CDR3 for alpha chain variable domain of TCR clone 325923 (TRAV13-2, TRAJ5)
CAENPHWTGRGALTF

SEQ ID NO: 651846 - protein, 16 aa, Homo sapiens
  CDR3 for beta chain variable domain of TCR clone 325923 (TRBV7-9, TRBJ1-3)
CASSQTSGLRMGTIYF

SEQ ID NO: 651847 - protein, 15 aa, Homo sapiens
  CDR3 for alpha chain variable domain of TCR clone 325924 (TRAV26-1, TRAJ44)
CIVRIGTGTASKLTF

SEQ ID NO: 651848 - protein, 15 aa, Homo sapiens
  CDR3 for beta chain variable domain of TCR clone 325924 (TRBV7-6, TRBJ2-1)
CASSSLAAEGNEQFF

SEQ ID NO: 651849 - protein, 17 aa, Homo sapiens
  CDR3 for alpha chain variable domain of TCR clone 325925 (TRAV35, TRAJ28)
CVGLQVYSGAGSYQLTF

SEQ ID NO: 651850 - protein, 15 aa, Homo sapiens
  CDR3 for beta chain variable domain of TCR clone 325925 (TRBV2, TRBJ1-2)
CASSEIGGANYGYTF

SEQ ID NO: 651851 - protein, 14 aa, Homo sapiens
  CDR3 for alpha chain variable domain of TCR clone 325926 (TRAV26-1, TRAJ38)
CIADNAGNNRKLIW

SEQ ID NO: 651852 - protein, 16 aa, Homo sapiens
  CDR3 for beta chain variable domain of TCR clone 325926 (TRBV20-1, TRBJ2-7)
CSASTSGRRSSYEQYF

SEQ ID NO: 651853 - protein, 13 aa, Homo sapiens
  CDR3 for alpha chain variable domain of TCR clone 325927 (TRAV13-2, TRAJ5)
CAVMDTGRRALTF

SEQ ID NO: 651854 - protein, 12 aa, Homo sapiens
  CDR3 for beta chain variable domain of TCR clone 325927 (TRBV28, TRBJ2-7)
CASSFSSYEQNF

SEQ ID NO: 651855 - protein, 14 aa, Homo sapiens
  CDR3 for alpha chain variable domain of TCR clone 325928 (TRAV17, TRAJ39)
CATDPVRAGNMLTF

SEQ ID NO: 651856 - protein, 15 aa, Homo sapiens
  CDR3 for beta chain variable domain of TCR clone 325928 (TRBV13, TRBJ1-5)
CASSIGQGGVQPQHF

SEQ ID NO: 651857 - protein, 13 aa, Homo sapiens
  CDR3 for alpha chain variable domain of TCR clone 325929 (TRAV20, TRAJ32)
CGRYGGATHKLTF

SEQ ID NO: 651858 - protein, 16 aa, Homo sapiens
  CDR3 for beta chain variable domain of TCR clone 325929 (TRBV19, TRBJ2-2)
CASRSPGTGATGELFF

SEQ ID NO: 651859 - protein, 13 aa, Homo sapiens
  CDR3 for alpha chain variable domain of TCR clone 325930 (TRAV12-3, TRAJ7)
CAMSASGNNRLAF

SEQ ID NO: 651860 - protein, 17 aa, Homo sapiens
  CDR3 for beta chain variable domain of TCR clone 325930 (TRBV20-1, TRBJ2-1)
CSASSSGLAGSYNEQFF

SEQ ID NO: 651861 - protein, 14 aa, Homo sapiens
  CDR3 for alpha chain variable domain of TCR clone 325931 (TRAV12-2, TRAJ40)
CAVKIPSGTYKYIF

SEQ ID NO: 651862 - protein, 20 aa, Homo sapiens
  CDR3 for beta chain variable domain of TCR clone 325931 (TRBV28, TRBJ2-1)
CASTPIGRSPGLSGGNEQFF

SEQ ID NO: 651863 - protein, 13 aa, Homo sapiens
  CDR3 for alpha chain variable domain of TCR clone 325932 (TRAV26-1, TRAJ34)
CIVRGHNNDKLIF

SEQ ID NO: 651864 - protein, 15 aa, Homo sapiens
  CDR3 for beta chain variable domain of TCR clone 325932 (TRBV4-1, TRBJ2-7)
CASSQEWGPSYEQYF

SEQ ID NO: 651865 - protein, 19 aa, Homo sapiens
  CDR3 for alpha chain variable domain of TCR clone 325933 (TRAV29/DV5, TRAJ49)
CSVLLCSKLTVDTGNQFYF

SEQ ID NO: 651866 - protein, 16 aa, Homo sapiens
  CDR3 for beta chain variable domain of TCR clone 325933 (TRBV13, TRBJ2-3)
CQQPLQGSGGRNTQYL

SEQ ID NO: 651867 - protein, 15 aa, Homo sapiens
  CDR3 for alpha chain variable domain of TCR clone 325934 (TRAV35, TRAJ23)
CAGPLGNNQGEKLIF

SEQ ID NO: 651868 - protein, 14 aa, Homo sapiens
  CDR3 for beta chain variable domain of TCR clone 325934 (TRBV7-9, TRBJ1-1)
CASTPLQSYTEAFF

SEQ ID NO: 651869 - protein, 14 aa, Homo sapiens
  CDR3 for alpha chain variable domain of TCR clone 325935 (TRAV12-1, TRAJ3)
CVVNPSSSASKIIS

SEQ ID NO: 651870 - protein, 15 aa, Homo sapiens
  CDR3 for beta chain variable domain of TCR clone 325935 (TRBV5-7, TRBJ1-2)
CAGSSPGQGNYGYTF

SEQ ID NO: 651871 - protein, 16 aa, Homo sapiens
  CDR3 for alpha chain variable domain of TCR clone 325936 (TRAV30, TRAJ24)
CGTEIVDADSWGKFQF

SEQ ID NO: 651872 - protein, 15 aa, Homo sapiens
  CDR3 for beta chain variable domain of TCR clone 325936 (TRBV6-1, TRBJ1-5)
CASSESGVSHQPQHF

SEQ ID NO: 651873 - protein, 17 aa, Homo sapiens
  CDR3 for alpha chain variable domain of TCR clone 325937 (TRAV13-1, TRAJ31)
CAPRDRLMFGDGTQLVV

SEQ ID NO: 651874 - protein, 12 aa, Homo sapiens
  CDR3 for beta chain variable domain of TCR clone 325937 (TRBV28, TRBJ2-6)
CAIQAGANVLTF

SEQ ID NO: 651875 - protein, 16 aa, Homo sapiens
  CDR3 for alpha chain variable domain of TCR clone 325938 (TRAV13-1, TRAJ43)
CAAGDMRFGAGTRLTV

SEQ ID NO: 651876 - protein, 17 aa, Homo sapiens
  CDR3 for beta chain variable domain of TCR clone 325938 (TRBV28, TRBJ2-5)
CASSRQGGLAGAETQYF

SEQ ID NO: 651877 - protein, 14 aa, Homo sapiens
  CDR3 for alpha chain variable domain of TCR clone 325939 (TRAV36/DV7, TRAJ35)
CAGMPIGFGNVLHC

SEQ ID NO: 651878 - protein, 13 aa, Homo sapiens
  CDR3 for beta chain variable domain of TCR clone 325939 (TRBV19, TRBJ1-2)
CASSVPGQDGYTF

SEQ ID NO: 651879 - protein, 13 aa, Homo sapiens
  CDR3 for alpha chain variable domain of TCR clone 325940 (TRAV1-2, TRAJ9)
CAALNTGGFKPVF

SEQ ID NO: 651880 - protein, 13 aa, Homo sapiens
  CDR3 for beta chain variable domain of TCR clone 325940 (TRBV19, TRBJ1-2)
CASSVPGQDGYTF

SEQ ID NO: 651881 - protein, 14 aa, Homo sapiens
  CDR3 for alpha chain variable domain of TCR clone 325941 (TRAV1-2, TRAJ16)
CVVNRFSDGQKLLF

SEQ ID NO: 651882 - protein, 13 aa, Homo sapiens
  CDR3 for beta chain variable domain of TCR clone 325941 (TRBV7-9, TRBJ1-2)
CASSLKQNYGYTF

SEQ ID NO: 651883 - protein, 14 aa, Homo sapiens
  CDR3 for alpha chain variable domain of TCR clone 325942 (TRAV12-2, TRAJ40)
CAVKIPSGASKYIF

SEQ ID NO: 651884 - protein, 15 aa, Homo sapiens
  CDR3 for beta chain variable domain of TCR clone 325942 (TRBV2, TRBJ2-7)
CASSEGLARSYEQYF

SEQ ID NO: 651885 - protein, 15 aa, Homo sapiens
  CDR3 for alpha chain variable domain of TCR clone 325943 (TRAV12-3, TRAJ6)
CAMSATSGGSYIPTF

SEQ ID NO: 651886 - protein, 14 aa, Homo sapiens
  CDR3 for beta chain variable domain of TCR clone 325943 (TRBV7-8, TRBJ2-3)
CASSLEAGTETQYF

SEQ ID NO: 651887 - protein, 16 aa, Homo sapiens
  CDR3 for alpha chain variable domain of TCR clone 325944 (TRAV4, TRAJ22)
CLVGDLYSGSARQLTF

SEQ ID NO: 651888 - protein, 14 aa, Homo sapiens
  CDR3 for beta chain variable domain of TCR clone 325944 (TRBV11-2, TRBJ2-7)
CASSRGGGLYEQYL

SEQ ID NO: 651889 - protein, 13 aa, Homo sapiens
  CDR3 for alpha chain variable domain of TCR clone 325945 (TRAV12-1, TRAJ6)
CVVYPGGSYIPTF

SEQ ID NO: 651890 - protein, 17 aa, Homo sapiens
  CDR3 for beta chain variable domain of TCR clone 325945 (TRBV13, TRBJ2-3)
CASSLSRVAGGRNTQYF

SEQ ID NO: 651891 - protein, 13 aa, Homo sapiens
  CDR3 for alpha chain variable domain of TCR clone 325946 (TRAV30, TRAJ24)
CGTVTDSWGKLQF

SEQ ID NO: 651892 - protein, 14 aa, Homo sapiens
  CDR3 for beta chain variable domain of TCR clone 325946 (TRBV7-2, TRBJ2-7)
CASSPKTSFYEQYF

SEQ ID NO: 651893 - protein, 13 aa, Homo sapiens
  CDR3 for alpha chain variable domain of TCR clone 325947 (TRAV13-1, TRAJ5)
GAAEHTGRRALTF

SEQ ID NO: 651894 - protein, 15 aa, Homo sapiens
  CDR3 for beta chain variable domain of TCR clone 325947 (TRBV6-1, TRBJ2-1)
CASSELRGQYNEQFF

SEQ ID NO: 651895 - protein, 13 aa, Homo sapiens
  CDR3 for alpha chain variable domain of TCR clone 325948 (TRAV12-1, TRAJ34)
CVVTGYNTDKLIF

SEQ ID NO: 651896 - protein, 12 aa, Homo sapiens
  CDR3 for beta chain variable domain of TCR clone 325948 (TRBV11-2, TRBJ2-2)
CASSLGGGELFF

SEQ ID NO: 651897 - protein, 13 aa, Homo sapiens
  CDR3 for alpha chain variable domain of TCR clone 325949 (TRAV8-1, TRAJ30)
CAVSMNRDDKIIF

SEQ ID NO: 651898 - protein, 14 aa, Homo sapiens
  CDR3 for beta chain variable domain of TCR clone 325949 (TRBV7-2, TRBJ1-6)
CASSLQGANSPLHF

SEQ ID NO: 651899 - protein, 11 aa, Homo sapiens
  CDR3 for alpha chain variable domain of TCR clone 325950 (TRAV21, TRAJ34)
CAVTNTDKLIF

SEQ ID NO: 651900 - protein, 15 aa, Homo sapiens
  CDR3 for beta chain variable domain of TCR clone 325950 (TRBV29-1, TRBJ2-1)
CSVGRHALFYNEQFF

SEQ ID NO: 651901 - protein, 15 aa, Homo sapiens
  CDR3 for alpha chain variable domain of TCR clone 325951 (TRAV26-1, TRAJ22)
CIVGVSFWFCKATDL

SEQ ID NO: 651902 - protein, 13 aa, Homo sapiens
  CDR3 for beta chain variable domain of TCR clone 325951 (TRBV7-9, TRBJ1-2)
CASSLKQNYGYTL

SEQ ID NO: 651903 - protein, 14 aa, Homo sapiens
  CDR3 for alpha chain variable domain of TCR clone 325952 (TRAV35, TRAJ33)
CAGSSQDSNYQLIW

SEQ ID NO: 651904 - protein, 15 aa, Homo sapiens
  CDR3 for beta chain variable domain of TCR clone 325952 (TRBV20-1, TRBJ2-7)
CSAESGTSGAFEQYF

SEQ ID NO: 651905 - protein, 11 aa, Homo sapiens
  CDR3 for alpha chain variable domain of TCR clone 325953 (TRAV2, TRAJ13)
CASGGYRKVTF

SEQ ID NO: 651906 - protein, 17 aa, Homo sapiens
  CDR3 for beta chain variable domain of TCR clone 325953 (TRBV20-1, TRBJ2-2)
CSASGSGQGGLTGELFV

SEQ ID NO: 651907 - protein, 16 aa, Homo sapiens
  CDR3 for alpha chain variable domain of TCR clone 325954 (TRAV26-2, TRAJ23)
CIVRVERYNKGGKLIF

SEQ ID NO: 651908 - protein, 15 aa, Homo sapiens
  CDR3 for beta chain variable domain of TCR clone 325954 (TRBV18, TRBJ2-7)
CASSPRGGKGYEQYF

SEQ ID NO: 651909 - protein, 13 aa, Homo sapiens
  CDR3 for alpha chain variable domain of TCR clone 325955 (TRAV27, TRAJ49)
CAPRPYTGNQFYF

SEQ ID NO: 651910 - protein, 16 aa, Homo sapiens
  CDR3 for beta chain variable domain of TCR clone 325955 (TRBV4-1, TRBJ1-2)
CASSQDAGQVLYGNTF

SEQ ID NO: 651911 - protein, 12 aa, Homo sapiens
  CDR3 for alpha chain variable domain of TCR clone 325956 (TRAV16, TRAJ10)
CSRTGGVNKLTF

SEQ ID NO: 651912 - protein, 13 aa, Homo sapiens
  CDR3 for beta chain variable domain of TCR clone 325956 (TRBV7-3, TRBJ1-1)
CASSQDWGAEAFF

SEQ ID NO: 651913 - protein, 16 aa, Homo sapiens
  CDR3 for alpha chain variable domain of TCR clone 325957 (TRAV12-3, TRAJ53)
CAMSPGSGGSNYKLTF

SEQ ID NO: 651914 - protein, 13 aa, Homo sapiens
  CDR3 for beta chain variable domain of TCR clone 325957 (TRBV29-1, TRBJ2-2)
CSTTGVNTGELFF

SEQ ID NO: 651915 - protein, 13 aa, Homo sapiens
  CDR3 for alpha chain variable domain of TCR clone 325958 (TRAV12-1, TRAJ37)
CVVNAGNPGKLIF

SEQ ID NO: 651916 - protein, 14 aa, Homo sapiens
  CDR3 for beta chain variable domain of TCR clone 325958 (TRBV7-2, TRBJ2-3)
CASRRGLAADTQYF

SEQ ID NO: 651917 - protein, 14 aa, Homo sapiens
  CDR3 for alpha chain variable domain of TCR clone 325959 (TRAV12-2, TRAJ11)
CAVNMNSGYSTLPF

SEQ ID NO: 651918 - protein, 13 aa, Homo sapiens
  CDR3 for beta chain variable domain of TCR clone 325959 (TRBV6-1, TRBJ1-2)
CASSDSPSYGYTF

SEQ ID NO: 651919 - protein, 17 aa, Homo sapiens
  CDR3 for alpha chain variable domain of TCR clone 325960 (TRAV4, TRAJ13)
CLVGVQGSSGGYQKVTF

SEQ ID NO: 651920 - protein, 15 aa, Homo sapiens
  CDR3 for beta chain variable domain of TCR clone 325960 (TRBV20-1, TRBJ1-1)
CSASRGVTGNTEAFF

SEQ ID NO: 651921 - protein, 15 aa, Homo sapiens
  CDR3 for alpha chain variable domain of TCR clone 325961 (TRAV25, TRAJ52)
CAGRPGGTSYGKLTF

SEQ ID NO: 651922 - protein, 13 aa, Homo sapiens
  CDR3 for beta chain variable domain of TCR clone 325961 (TRBV7-8, TRBJ2-1)
CASSAGTGNEQFF

SEQ ID NO: 651923 - protein, 14 aa, Homo sapiens
  CDR3 for alpha chain variable domain of TCR clone 325962 (TRAV8-6, TRAJ4)
CAVSGSCGYNKLIF

SEQ ID NO: 651924 - protein, 13 aa, Homo sapiens
  CDR3 for beta chain variable domain of TCR clone 325962 (TRBV3-1, TRBJ2-5)
CASSPGLQETQYF

SEQ ID NO: 651925 - protein, 13 aa, Homo sapiens
  CDR3 for alpha chain variable domain of TCR clone 325963 (TRAV27, TRAJ49)
CAPRPYTGHQFYC

SEQ ID NO: 651926 - protein, 16 aa, Homo sapiens
  CDR3 for beta chain variable domain of TCR clone 325963 (TRBV4-1, TRBJ1-2)
CASSQDAGQVLYGYTF

SEQ ID NO: 651927 - protein, 14 aa, Homo sapiens
  CDR3 for alpha chain variable domain of TCR clone 325964 (TRAV26-1, TRAJ49)
CIVRLTNTGNQFYF

SEQ ID NO: 651928 - protein, 13 aa, Homo sapiens
  CDR3 for beta chain variable domain of TCR clone 325964 (TRBV4-1, TRBJ2-7)
CASSQGQAYEQCF

SEQ ID NO: 651929 - protein, 15 aa, Homo sapiens
  CDR3 for alpha chain variable domain of TCR clone 325965 (TRAV8-4, TRAJ47)
CAVSDPEEYGNKLVF

SEQ ID NO: 651930 - protein, 14 aa, Homo sapiens
  CDR3 for beta chain variable domain of TCR clone 325965 (TRBV11-2, TRBJ2-1)
CQQLRTDSYNEQFF

SEQ ID NO: 651931 - protein, 17 aa, Homo sapiens
  CDR3 for alpha chain variable domain of TCR clone 325966 (TRAV3, TRAJ6)
CAVRDGSRAGGSYIPTF

SEQ ID NO: 651932 - protein, 13 aa, Homo sapiens
  CDR3 for beta chain variable domain of TCR clone 325966 (TRBV20-1, TRBJ1-6)
CSAPLGVGSPLHF

SEQ ID NO: 651933 - protein, 15 aa, Homo sapiens
  CDR3 for alpha chain variable domain of TCR clone 325967 (TRAV4, TRAJ8)
CLVGEQHTGFQKLVF

SEQ ID NO: 651934 - protein, 15 aa, Homo sapiens
  CDR3 for beta chain variable domain of TCR clone 325967 (TRBV7-9, TRBJ2-5)
CASSNRDYWQETQYF

SEQ ID NO: 651935 - protein, 14 aa, Homo sapiens
  CDR3 for alpha chain variable domain of TCR clone 325968 (TRAV12-2, TRAJ36)
CAVKISTGTNNLFF

SEQ ID NO: 651936 - protein, 14 aa, Homo sapiens
  CDR3 for beta chain variable domain of TCR clone 325968 (TRBV25-1, TRBJ1-2)
CASSDTTGVVGYTF

SEQ ID NO: 651937 - protein, 14 aa, Homo sapiens
  CDR3 for alpha chain variable domain of TCR clone 325969 (TRAV1-1, TRAJ27)
CAVIYNTKAVKSTF

SEQ ID NO: 651938 - protein, 15 aa, Homo sapiens
  CDR3 for beta chain variable domain of TCR clone 325969 (TRBV7-2, TRBJ2-1)
CASSSGLAGGNEQFI

SEQ ID NO: 651939 - protein, 15 aa, Homo sapiens
  CDR3 for alpha chain variable domain of TCR clone 325970 (TRAV34, TRAJ38)
CGEDFTPGNNRKRIW

SEQ ID NO: 651940 - protein, 16 aa, Homo sapiens
  CDR3 for beta chain variable domain of TCR clone 325970 (TRBV12-5, TRBJ2-5)
CASGPRTSGNQETQYF

SEQ ID NO: 651941 - protein, 15 aa, Homo sapiens
  CDR3 for alpha chain variable domain of TCR clone 325971 (TRAV2, TRAJ22)
CAVPSRGGSARQLPF

SEQ ID NO: 651942 - protein, 14 aa, Homo sapiens
  CDR3 for beta chain variable domain of TCR clone 325971 (TRBV7-6, TRBJ2-3)
CASSLGTVTDTQYF

SEQ ID NO: 651943 - protein, 16 aa, Homo sapiens
  CDR3 for alpha chain variable domain of TCR clone 325972 (TRAV12-2, TRAJ43)
CAGDDMRFGAGTRLTV

SEQ ID NO: 651944 - protein, 16 aa, Homo sapiens
  CDR3 for beta chain variable domain of TCR clone 325972 (TRBV13, TRBJ2-2)
CASSPRTGEHTGELFF

SEQ ID NO: 651945 - protein, 11 aa, Homo sapiens
  CDR3 for alpha chain variable domain of TCR clone 325973 (TRAV1-2, TRAJ31)
CAVKNNARLMF

SEQ ID NO: 651946 - protein, 16 aa, Homo sapiens
  CDR3 for beta chain variable domain of TCR clone 325973 (TRBV20-1, TRBJ2-5)
CSPGGTSGGYMETQYF

SEQ ID NO: 651947 - protein, 15 aa, Homo sapiens
  CDR3 for alpha chain variable domain of TCR clone 325974 (TRAV12-1, TRAJ45)
CVVLSGGGGADGLTF

SEQ ID NO: 651948 - protein, 15 aa, Homo sapiens
  CDR3 for beta chain variable domain of TCR clone 325974 (TRBV7-3, TRBJ2-3)
CQQQTSGGRTDTQYF

SEQ ID NO: 651949 - protein, 13 aa, Homo sapiens
  CDR3 for alpha chain variable domain of TCR clone 325975 (TRAV2, TRAJ29)
CAEQNSGNTPLVF

SEQ ID NO: 651950 - protein, 13 aa, Homo sapiens
  CDR3 for beta chain variable domain of TCR clone 325975 (TRBV28, TRBJ1-2)
RASSPGSRNGYTF

SEQ ID NO: 651951 - protein, 11 aa, Homo sapiens
  CDR3 for alpha chain variable domain of TCR clone 325976 (TRAV21, TRAJ34)
CAVTNTDKLIL

SEQ ID NO: 651952 - protein, 13 aa, Homo sapiens
  CDR3 for beta chain variable domain of TCR clone 325976 (TRBV5-5, TRBJ1-2)
CASSFWRGEDYTF

SEQ ID NO: 651953 - protein, 12 aa, Homo sapiens
  CDR3 for alpha chain variable domain of TCR clone 325977 (TRAV2, TRAJ9)
CAVGAGGFKTIF

SEQ ID NO: 651954 - protein, 17 aa, Homo sapiens
  CDR3 for beta chain variable domain of TCR clone 325977 (TRBV13, TRBJ2-3)
CASSLSRGAGGRNTQYF

SEQ ID NO: 651955 - protein, 15 aa, Homo sapiens
  CDR3 for alpha chain variable domain of TCR clone 325978 (TRAV8-4, TRAJ8)
CAVSDLNTGFQKLVF

SEQ ID NO: 651956 - protein, 17 aa, Homo sapiens
  CDR3 for beta chain variable domain of TCR clone 325978 (TRBV11-2, TRBJ2-1)
CASSLYPPGVEYNEQFF

SEQ ID NO: 651957 - protein, 16 aa, Homo sapiens
  CDR3 for alpha chain variable domain of TCR clone 325979 (TRAV21, TRAJ17)
CAVRPGEEAAGNKLTF

SEQ ID NO: 651958 - protein, 14 aa, Homo sapiens
  CDR3 for beta chain variable domain of TCR clone 325979 (TRBV3-1, TRBJ2-5)
CASSQGPDQETQCF

SEQ ID NO: 651959 - protein, 12 aa, Homo sapiens
  CDR3 for alpha chain variable domain of TCR clone 325980 (TRAV12-3, TRAJ17)
CAMTLTGNKLTF

SEQ ID NO: 651960 - protein, 15 aa, Homo sapiens
  CDR3 for beta chain variable domain of TCR clone 325980 (TRBV20-1, TRBJ2-7)
CSARDLVSGMDEQYL

SEQ ID NO: 651961 - protein, 12 aa, Homo sapiens
  CDR3 for alpha chain variable domain of TCR clone 325981 (TRAV16, TRAJ10)
CSRTGGGNKLTF

SEQ ID NO: 651962 - protein, 17 aa, Homo sapiens
  CDR3 for beta chain variable domain of TCR clone 325981 (TRBV28, TRBJ2-1)
CASSAPWGTPSYNEQFF

SEQ ID NO: 651963 - protein, 15 aa, Homo sapiens
  CDR3 for alpha chain variable domain of TCR clone 325982 (TRAV36/DV7, TRAJ13)
FWGSGENGGYQKVTF

SEQ ID NO: 651964 - protein, 15 aa, Homo sapiens
  CDR3 for beta chain variable domain of TCR clone 325982 (TRBV19, TRBJ2-1)
CASSTGTSSYNEQFF

SEQ ID NO: 651965 - protein, 14 aa, Homo sapiens
  CDR3 for alpha chain variable domain of TCR clone 325983 (TRAV12-3, TRAJ29)
CAMSFYSGNTPLAF

SEQ ID NO: 651966 - protein, 15 aa, Homo sapiens
  CDR3 for beta chain variable domain of TCR clone 325983 (TRBV5-1, TRBJ2-3)
CASSPGGARTDTQYF

SEQ ID NO: 651967 - protein, 13 aa, Homo sapiens
  CDR3 for alpha chain variable domain of TCR clone 325984 (TRAV8-4, TRAJ21)
CAVSEYNFNKFYF

SEQ ID NO: 651968 - protein, 20 aa, Homo sapiens
  CDR3 for beta chain variable domain of TCR clone 325984 (TRBV7-9, TRBJ2-2)
CASSHLFPGPTIHITGELFF

SEQ ID NO: 651969 - protein, 12 aa, Homo sapiens
  CDR3 for alpha chain variable domain of TCR clone 325985 (TRAV25, TRAJ11)
CAGYSGYSTLTF

SEQ ID NO: 651970 - protein, 14 aa, Homo sapiens
  CDR3 for beta chain variable domain of TCR clone 325985 (TRBV7-2, TRBJ2-7)
CASRSQGAAYEQYF

SEQ ID NO: 651971 - protein, 13 aa, Homo sapiens
  CDR3 for alpha chain variable domain of TCR clone 325986 (TRAV12-1, TRAJ31)
CVVIPNNNARLMF

SEQ ID NO: 651972 - protein, 12 aa, Homo sapiens
  CDR3 for beta chain variable domain of TCR clone 325986 (TRBV11-2, TRBJ2-4)
CASSSASGSEYF

SEQ ID NO: 651973 - protein, 13 aa, Homo sapiens
  CDR3 for alpha chain variable domain of TCR clone 325987 (TRAV1-2, TRAJ9)
FAALNTGGFKTIF

SEQ ID NO: 651974 - protein, 13 aa, Homo sapiens
  CDR3 for beta chain variable domain of TCR clone 325987 (TRBV4-1, TRBJ2-1)
CASSQAGGDEQFF

SEQ ID NO: 651975 - protein, 14 aa, Homo sapiens
  CDR3 for alpha chain variable domain of TCR clone 325988 (TRAV12-3, TRAJ10)
SHLPLTGGGHKLTF

SEQ ID NO: 651976 - protein, 15 aa, Homo sapiens
  CDR3 for beta chain variable domain of TCR clone 325988 (TRBV7-3, TRBJ2-2)
CASSETGQGTGELFF

SEQ ID NO: 651977 - protein, 15 aa, Homo sapiens
  CDR3 for alpha chain variable domain of TCR clone 325989 (TRAV12-2, TRAJ43)
CAFDMRFGAGTRLTV

SEQ ID NO: 651978 - protein, 18 aa, Homo sapiens
  CDR3 for beta chain variable domain of TCR clone 325989 (TRBV20-1, TRBJ2-3)
CSAAGLAGGPWTTDTQYF

SEQ ID NO: 651979 - protein, 14 aa, Homo sapiens
  CDR3 for alpha chain variable domain of TCR clone 325990 (TRAV17, TRAJ30)
CATVTVNRDDKIIF

SEQ ID NO: 651980 - protein, 13 aa, Homo sapiens
  CDR3 for beta chain variable domain of TCR clone 325990 (TRBV5-1, TRBJ2-7)
CASSATGGNEQYF

SEQ ID NO: 651981 - protein, 14 aa, Homo sapiens
  CDR3 for alpha chain variable domain of TCR clone 325991 (TRAV13-1, TRAJ39)
CAASYNNAGNMLTF

SEQ ID NO: 651982 - protein, 16 aa, Homo sapiens
  CDR3 for beta chain variable domain of TCR clone 325991 (TRBV19, TRBJ2-1)
CASSKAGPSSYNEQFF

SEQ ID NO: 651983 - protein, 14 aa, Homo sapiens
  CDR3 for alpha chain variable domain of TCR clone 325992 (TRAV2, TRAJ9)
CAVEDRSGGFKTIF

SEQ ID NO: 651984 - protein, 17 aa, Homo sapiens
  CDR3 for beta chain variable domain of TCR clone 325992 (TRBV4-1, TRBJ2-7)
CTSSRDPLGVRGGEQYF

SEQ ID NO: 651985 - protein, 12 aa, Homo sapiens
  CDR3 for alpha chain variable domain of TCR clone 325993 (TRAV1-1, TRAJ39)
CAVPVVGNMLTF

SEQ ID NO: 651986 - protein, 13 aa, Homo sapiens
  CDR3 for beta chain variable domain of TCR clone 325993 (TRBV12-4, TRBJ1-1)
CASSPGTGFEAFF

SEQ ID NO: 651987 - protein, 13 aa, Homo sapiens
  CDR3 for alpha chain variable domain of TCR clone 325994 (TRAV2, TRAJ40)
CVVVTSGTYKYIF

SEQ ID NO: 651988 - protein, 16 aa, Homo sapiens
  CDR3 for beta chain variable domain of TCR clone 325994 (TRBV29-1, TRBJ2-6)
CSVEDITYSGANVLTF

SEQ ID NO: 651989 - protein, 15 aa, Homo sapiens
  CDR3 for alpha chain variable domain of TCR clone 325995 (TRAV5, TRAJ33)
CAEAPAMDSNYQLIW

SEQ ID NO: 651990 - protein, 14 aa, Homo sapiens
  CDR3 for beta chain variable domain of TCR clone 325995 (TRBV7-9, TRBJ2-7)
CASSLSAATYEQYF

SEQ ID NO: 651991 - protein, 17 aa, Homo sapiens
  CDR3 for alpha chain variable domain of TCR clone 325996 (TRAV13-1, TRAJ31)
CARRDRLMCGDGTQLVV

SEQ ID NO: 651992 - protein, 12 aa, Homo sapiens
  CDR3 for beta chain variable domain of TCR clone 325996 (TRBV7-9, TRBJ2-7)
CASSLEGYEQYF

SEQ ID NO: 651993 - protein, 17 aa, Homo sapiens
  CDR3 for alpha chain variable domain of TCR clone 325997 (TRAV23/DV6, TRAJ57)
CAASSTFSQGGSEKLVF

SEQ ID NO: 651994 - protein, 14 aa, Homo sapiens
  CDR3 for beta chain variable domain of TCR clone 325997 (TRBV7-8, TRBJ2-5)
CASSATGGQETQYF

SEQ ID NO: 651995 - protein, 13 aa, Homo sapiens
  CDR3 for alpha chain variable domain of TCR clone 325998 (TRAV38-1, TRAJ42)
CARWGGSQGNLIF

SEQ ID NO: 651996 - protein, 17 aa, Homo sapiens
  CDR3 for beta chain variable domain of TCR clone 325998 (TRBV20-1, TRBJ2-5)
CSARDPLAGVWDNEQFF

SEQ ID NO: 651997 - protein, 12 aa, Homo sapiens
  CDR3 for alpha chain variable domain of TCR clone 325999 (TRAV1-1, TRAJ39)
CAVPGVGNMLTF

SEQ ID NO: 651998 - protein, 18 aa, Homo sapiens
  CDR3 for beta chain variable domain of TCR clone 325999 (TRBV7-9, TRBJ2-7)
CASSLTTSGSRTWYEQYF

SEQ ID NO: 651999 - protein, 12 aa, Homo sapiens
  CDR3 for alpha chain variable domain of TCR clone 326000 (TRAV12-2, TRAJ16)
CAVAPDGQKLLF

SEQ ID NO: 652000 - protein, 15 aa, Homo sapiens
  CDR3 for beta chain variable domain of TCR clone 326000 (TRBV20-1, TRBJ2-7)
CSARDRVSGMDEQYF

SEQ ID NO: 652001 - protein, 16 aa, Homo sapiens
  CDR3 for alpha chain variable domain of TCR clone 326001 (TRAV24, TRAJ53)
CAFNMGGGGSNYKLTF

SEQ ID NO: 652002 - protein, 17 aa, Homo sapiens
  CDR3 for beta chain variable domain of TCR clone 326001 (TRBV13, TRBJ2-3)
CASSLSRVAGGRNTQYF

SEQ ID NO: 652003 - protein, 10 aa, Homo sapiens
  CDR3 for alpha chain variable domain of TCR clone 326002 (TRAV12-3, TRAJ18)
CAMSAEAQPW

SEQ ID NO: 652004 - protein, 13 aa, Homo sapiens
  CDR3 for beta chain variable domain of TCR clone 326002 (TRBV15, TRBJ1-6)
CATSGGLNSPLHF

SEQ ID NO: 652005 - protein, 11 aa, Homo sapiens
  CDR3 for alpha chain variable domain of TCR clone 326003 (TRAV21, TRAJ37)
CAVTDTGKLIF

SEQ ID NO: 652006 - protein, 14 aa, Homo sapiens
  CDR3 for beta chain variable domain of TCR clone 326003 (TRBV19, TRBJ2-1)
CASSMGSGATEQFF

SEQ ID NO: 652007 - protein, 16 aa, Homo sapiens
  CDR3 for alpha chain variable domain of TCR clone 326004 (TRAV23/DV6, TRAJ9)
CAASIGGNTGGFKTIF

SEQ ID NO: 652008 - protein, 14 aa, Homo sapiens
  CDR3 for beta chain variable domain of TCR clone 326004 (TRBV9, TRBJ2-7)
CASSVGVVSYEQYF

SEQ ID NO: 652009 - protein, 16 aa, Homo sapiens
  CDR3 for alpha chain variable domain of TCR clone 326005 (TRAV23/DV6, TRAJ9)
CAASIGGNTGGFKTIF

SEQ ID NO: 652010 - protein, 15 aa, Homo sapiens
  CDR3 for beta chain variable domain of TCR clone 326005 (TRBV7-3, TRBJ2-2)
CASSETGQGTGELFF

SEQ ID NO: 652011 - protein, 15 aa, Homo sapiens
  CDR3 for alpha chain variable domain of TCR clone 326006 (TRAV4, TRAJ17)
CLVGDIGAAGNKLTF

SEQ ID NO: 652012 - protein, 14 aa, Homo sapiens
  CDR3 for beta chain variable domain of TCR clone 326006 (TRBV6-3, TRBJ2-7)
CASSYGVRVYEQYF

SEQ ID NO: 652013 - protein, 12 aa, Homo sapiens
  CDR3 for alpha chain variable domain of TCR clone 326007 (TRAV20, TRAJ49)
CAVNKDGNRFYF

SEQ ID NO: 652014 - protein, 12 aa, Homo sapiens
  CDR3 for beta chain variable domain of TCR clone 326007 (TRBV11-2, TRBJ2-1)
CASSPGNNEQFF

SEQ ID NO: 652015 - protein, 16 aa, Homo sapiens
  CDR3 for alpha chain variable domain of TCR clone 326008 (TRAV30, TRAJ24)
CGTEIVDADSWGKFQL

SEQ ID NO: 652016 - protein, 14 aa, Homo sapiens
  CDR3 for beta chain variable domain of TCR clone 326008 (TRBV7-9, TRBJ2-4)
CASSLAMGGNIQYF

SEQ ID NO: 652017 - protein, 16 aa, Homo sapiens
  CDR3 for alpha chain variable domain of TCR clone 326009 (TRAV20, TRAJ26)
CAVQHRRDNYGQNFVF

SEQ ID NO: 652018 - protein, 17 aa, Homo sapiens
  CDR3 for beta chain variable domain of TCR clone 326009 (TRBV13, TRBJ2-3)
CTSSLSRVAGGRNTQYF

SEQ ID NO: 652019 - protein, 11 aa, Homo sapiens
  CDR3 for alpha chain variable domain of TCR clone 326010 (TRAV26-1, TRAJ37)
CIVRVGRKLIF

SEQ ID NO: 652020 - protein, 15 aa, Homo sapiens
  CDR3 for beta chain variable domain of TCR clone 326010 (TRBV19, TRBJ1-2)
CASSVGQVLNYGYTF

SEQ ID NO: 652021 - protein, 15 aa, Homo sapiens
  CDR3 for alpha chain variable domain of TCR clone 326011 (TRAV12-2, TRAJ8)
CAVREENTVFQKLVF

SEQ ID NO: 652022 - protein, 15 aa, Homo sapiens
  CDR3 for beta chain variable domain of TCR clone 326011 (TRBV28, TRBJ2-4)
CAAGSGTLLMGIQYF

SEQ ID NO: 652023 - protein, 15 aa, Homo sapiens
  CDR3 for alpha chain variable domain of TCR clone 326012 (TRAV8-3, TRAJ23)
CAVGDRYNQGGRLIF

SEQ ID NO: 652024 - protein, 15 aa, Homo sapiens
  CDR3 for beta chain variable domain of TCR clone 326012 (TRBV29-1, TRBJ2-5)
EDSSIYLCSAGTQYF

SEQ ID NO: 652025 - protein, 14 aa, Homo sapiens
  CDR3 for alpha chain variable domain of TCR clone 326013 (TRAV1-2, TRAJ16)
CSVNRFSDGQKLLF

SEQ ID NO: 652026 - protein, 14 aa, Homo sapiens
  CDR3 for beta chain variable domain of TCR clone 326013 (TRBV7-3, TRBJ1-1)
CASSLKGGNTEAFF

SEQ ID NO: 652027 - protein, 15 aa, Homo sapiens
  CDR3 for alpha chain variable domain of TCR clone 326014 (TRAV26-1, TRAJ29)
CIVRVEGSGNTPLVF

SEQ ID NO: 652028 - protein, 16 aa, Homo sapiens
  CDR3 for beta chain variable domain of TCR clone 326014 (TRBV5-1, TRBJ2-1)
CASSIRSGGSYNEQFF

SEQ ID NO: 652029 - protein, 11 aa, Homo sapiens
  CDR3 for alpha chain variable domain of TCR clone 326015 (TRAV2, TRAJ13)
CASGCYQKVTF

SEQ ID NO: 652030 - protein, 14 aa, Homo sapiens
  CDR3 for beta chain variable domain of TCR clone 326015 (TRBV19, TRBJ2-1)
CASPTFVLSGEQFF

SEQ ID NO: 652031 - protein, 13 aa, Homo sapiens
  CDR3 for alpha chain variable domain of TCR clone 326016 (TRAV16, TRAJ27)
CALRRTNAGKSTF

SEQ ID NO: 652032 - protein, 14 aa, Homo sapiens
  CDR3 for beta chain variable domain of TCR clone 326016 (TRBV6-1, TRBJ1-3)
CASVQGGGGNTMYF

SEQ ID NO: 652033 - protein, 14 aa, Homo sapiens
  CDR3 for alpha chain variable domain of TCR clone 326017 (TRAV12-2, TRAJ40)
CAVKIPSGNYKYLF

SEQ ID NO: 652034 - protein, 14 aa, Homo sapiens
  CDR3 for beta chain variable domain of TCR clone 326017 (TRBV20-1, TRBJ1-1)
CSAQTRIGGTEAFF

SEQ ID NO: 652035 - protein, 14 aa, Homo sapiens
  CDR3 for alpha chain variable domain of TCR clone 326018 (TRAV1-2, TRAJ16)
CAVNRFSDGQKLLF

SEQ ID NO: 652036 - protein, 14 aa, Homo sapiens
  CDR3 for beta chain variable domain of TCR clone 326018 (TRBV12-4, TRBJ1-3)
CQQLQLYSGNTIYF

SEQ ID NO: 652037 - protein, 12 aa, Homo sapiens
  CDR3 for alpha chain variable domain of TCR clone 326019 (TRAV13-1, TRAJ9)
CASHTGGFKTIF

SEQ ID NO: 652038 - protein, 16 aa, Homo sapiens
  CDR3 for beta chain variable domain of TCR clone 326019 (TRBV11-1, TRBJ2-2)
CASSAEGLKNTGELFF

SEQ ID NO: 652039 - protein, 13 aa, Homo sapiens
  CDR3 for alpha chain variable domain of TCR clone 326020 (TRAV12-2, TRAJ40)
CAVKRTGTYKYIF

SEQ ID NO: 652040 - protein, 15 aa, Homo sapiens
  CDR3 for beta chain variable domain of TCR clone 326020 (TRBV12-4, TRBJ1-2)
CASSPITGGGYCYTF

SEQ ID NO: 652041 - protein, 12 aa, Homo sapiens
  CDR3 for alpha chain variable domain of TCR clone 326021 (TRAV2, TRAJ9)
CAVGAGGFKTIF

SEQ ID NO: 652042 - protein, 15 aa, Homo sapiens
  CDR3 for beta chain variable domain of TCR clone 326021 (TRBV27, TRBJ2-1)
CASSLKYRESHEQFF

SEQ ID NO: 652043 - protein, 15 aa, Homo sapiens
  CDR3 for alpha chain variable domain of TCR clone 326022 (TRAV17, TRAJ57)
CATGPSQGGSEKLVF

SEQ ID NO: 652044 - protein, 14 aa, Homo sapiens
  CDR3 for beta chain variable domain of TCR clone 326022 (TRBV11-2, TRBJ2-1)
CASSLEVANNEQFF

SEQ ID NO: 652045 - protein, 14 aa, Homo sapiens
  CDR3 for alpha chain variable domain of TCR clone 326023 (TRAV2, TRAJ37)
CAVEGSSNTGKLIF

SEQ ID NO: 652046 - protein, 14 aa, Homo sapiens
  CDR3 for beta chain variable domain of TCR clone 326023 (TRBV24-1, TRBJ1-5)
CATRGPDSNQPQHF

SEQ ID NO: 652047 - protein, 12 aa, Homo sapiens
  CDR3 for alpha chain variable domain of TCR clone 326024 (TRAV35, TRAJ49)
CAGWNTGNQFYF

SEQ ID NO: 652048 - protein, 13 aa, Homo sapiens
  CDR3 for beta chain variable domain of TCR clone 326024 (TRBV4-1, TRBJ2-7)
CASSQGQAYEQYF

SEQ ID NO: 652049 - protein, 14 aa, Homo sapiens
  CDR3 for alpha chain variable domain of TCR clone 326025 (TRAV1-2, TRAJ16)
CAVNRFSDGQKLLF

SEQ ID NO: 652050 - protein, 15 aa, Homo sapiens
  CDR3 for beta chain variable domain of TCR clone 326025 (TRBV7-2, TRBJ2-7)
CASSLGGAKSGEQYF

SEQ ID NO: 652051 - protein, 18 aa, Homo sapiens
  CDR3 for alpha chain variable domain of TCR clone 326026 (TRAV21, TRAJ52)
CAVRPSPAGGTSYGKLTF

SEQ ID NO: 652052 - protein, 17 aa, Homo sapiens
  CDR3 for beta chain variable domain of TCR clone 326026 (TRBV7-2, TRBJ2-2)
CASSPRGAGEGTGELFF

SEQ ID NO: 652053 - protein, 12 aa, Homo sapiens
  CDR3 for alpha chain variable domain of TCR clone 326027 (TRAV2, TRAJ26)
CAGSPGGLWSEF

SEQ ID NO: 652054 - protein, 13 aa, Homo sapiens
  CDR3 for beta chain variable domain of TCR clone 326027 (TRBV7-9, TRBJ1-2)
CASSLKQNYGYSF

SEQ ID NO: 652055 - protein, 12 aa, Homo sapiens
  CDR3 for alpha chain variable domain of TCR clone 326028 (TRAV27, TRAJ13)
CSGAGGYQKVTF

SEQ ID NO: 652056 - protein, 15 aa, Homo sapiens
  CDR3 for beta chain variable domain of TCR clone 326028 (TRBV20-1, TRBJ2-6)
CSARDRGPGANVLTF

SEQ ID NO: 652057 - protein, 15 aa, Homo sapiens
  CDR3 for alpha chain variable domain of TCR clone 326029 (TRAV3, TRAJ4)
CAVRDGTGGYNKLIF

SEQ ID NO: 652058 - protein, 16 aa, Homo sapiens
  CDR3 for beta chain variable domain of TCR clone 326029 (TRBV27, TRBJ2-2)
CASSCSGVSNTGELFF

SEQ ID NO: 652059 - protein, 14 aa, Homo sapiens
  CDR3 for alpha chain variable domain of TCR clone 326030 (TRAV26-1, TRAJ45)
CIEVTGGGADGLTL

SEQ ID NO: 652060 - protein, 15 aa, Homo sapiens
  CDR3 for beta chain variable domain of TCR clone 326030 (TRBV20-1, TRBJ2-7)
CSARDRVSGMDEQYF

SEQ ID NO: 652061 - protein, 16 aa, Homo sapiens
  CDR3 for alpha chain variable domain of TCR clone 326031 (TRAV26-1, TRAJ36)
CIVRVPDQTGANNLFF

SEQ ID NO: 652062 - protein, 12 aa, Homo sapiens
  CDR3 for beta chain variable domain of TCR clone 326031 (TRBV28, TRBJ1-2)
CASLTLAEGYTF

SEQ ID NO: 652063 - protein, 13 aa, Homo sapiens
  CDR3 for alpha chain variable domain of TCR clone 326032 (TRAV30, TRAJ24)
CGTVTDSWGKLQF

SEQ ID NO: 652064 - protein, 15 aa, Homo sapiens
  CDR3 for beta chain variable domain of TCR clone 326032 (TRBV4-1, TRBJ2-1)
CDSSQDPGNYNEQFF

SEQ ID NO: 652065 - protein, 14 aa, Homo sapiens
  CDR3 for alpha chain variable domain of TCR clone 326033 (TRAV35, TRAJ13)
CAGRSPGGYQKVTF

SEQ ID NO: 652066 - protein, 14 aa, Homo sapiens
  CDR3 for beta chain variable domain of TCR clone 326033 (TRBV19, TRBJ2-2)
CAISMVGLSGELFF

SEQ ID NO: 652067 - protein, 14 aa, Homo sapiens
  CDR3 for alpha chain variable domain of TCR clone 326034 (TRAV20, TRAJ32)
CCGRYGGATSKLIF

SEQ ID NO: 652068 - protein, 16 aa, Homo sapiens
  CDR3 for beta chain variable domain of TCR clone 326034 (TRBV19, TRBJ2-2)
CASRSPGTGATGELFF

SEQ ID NO: 652069 - protein, 12 aa, Homo sapiens
  CDR3 for alpha chain variable domain of TCR clone 326035 (TRAV23/DV6, TRAJ30)
CAASKGDDTIIF

SEQ ID NO: 652070 - protein, 14 aa, Homo sapiens
  CDR3 for beta chain variable domain of TCR clone 326035 (TRBV7-9, TRBJ2-1)
CASSPRDSLYEQFF

SEQ ID NO: 652071 - protein, 14 aa, Homo sapiens
  CDR3 for alpha chain variable domain of TCR clone 326036 (TRAV39, TRAJ29)
CAVGQPSGNTPLVF

SEQ ID NO: 652072 - protein, 12 aa, Homo sapiens
  CDR3 for beta chain variable domain of TCR clone 326036 (TRBV20-1, TRBJ1-2)
CSASHPSGGYTF

SEQ ID NO: 652073 - protein, 12 aa, Homo sapiens
  CDR3 for alpha chain variable domain of TCR clone 326037 (TRAV1-1, TRAJ39)
CAVPVVGNMLTF

SEQ ID NO: 652074 - protein, 18 aa, Homo sapiens
  CDR3 for beta chain variable domain of TCR clone 326037 (TRBV7-9, TRBJ2-7)
CASSLTTGGSRTWYEQYF

SEQ ID NO: 652075 - protein, 10 aa, Homo sapiens
  CDR3 for alpha chain variable domain of TCR clone 326038 (TRAV13-1, TRAJ7)
LIGGNNRLAF

SEQ ID NO: 652076 - protein, 15 aa, Homo sapiens
  CDR3 for beta chain variable domain of TCR clone 326038 (TRBV5-1, TRBJ2-1)
CASSPPRAPYNEQFF

SEQ ID NO: 652077 - protein, 13 aa, Homo sapiens
  CDR3 for alpha chain variable domain of TCR clone 326039 (TRAV8-3, TRAJ48)
CDVVPFGNEKLTF

SEQ ID NO: 652078 - protein, 14 aa, Homo sapiens
  CDR3 for beta chain variable domain of TCR clone 326039 (TRBV18, TRBJ2-7)
CASSPRGGAYEQYF

SEQ ID NO: 652079 - protein, 12 aa, Homo sapiens
  CDR3 for alpha chain variable domain of TCR clone 326040 (TRAV12-2, TRAJ36)
CAAPRGANNLFF

SEQ ID NO: 652080 - protein, 15 aa, Homo sapiens
  CDR3 for beta chain variable domain of TCR clone 326040 (TRBV7-3, TRBJ2-1)
CASSLGQGPFGEQVF

SEQ ID NO: 652081 - protein, 16 aa, Homo sapiens
  CDR3 for alpha chain variable domain of TCR clone 326041 (TRAV3, TRAJ37)
CAVRGRGSGNTGKLSF

SEQ ID NO: 652082 - protein, 13 aa, Homo sapiens
  CDR3 for beta chain variable domain of TCR clone 326041 (TRBV14, TRBJ2-7)
CASSQDRRGEQYF

SEQ ID NO: 652083 - protein, 13 aa, Homo sapiens
  CDR3 for alpha chain variable domain of TCR clone 326042 (TRAV2, TRAJ15)
CAVASQAGTALIF

SEQ ID NO: 652084 - protein, 14 aa, Homo sapiens
  CDR3 for beta chain variable domain of TCR clone 326042 (TRBV7-9, TRBJ2-2)
CASSFDRGTGELFF

SEQ ID NO: 652085 - protein, 14 aa, Homo sapiens
  CDR3 for alpha chain variable domain of TCR clone 326043 (TRAV12-3, TRAJ10)
SHLPLTGGGNKLTF

SEQ ID NO: 652086 - protein, 14 aa, Homo sapiens
  CDR3 for beta chain variable domain of TCR clone 326043 (TRBV6-1, TRBJ1-3)
CATVHGGGGNTIYF

SEQ ID NO: 652087 - protein, 14 aa, Homo sapiens
  CDR3 for alpha chain variable domain of TCR clone 326044 (TRAV12-2, TRAJ40)
CAVKIPSGTYKYIF

SEQ ID NO: 652088 - protein, 14 aa, Homo sapiens
  CDR3 for beta chain variable domain of TCR clone 326044 (TRBV7-8, TRBJ2-7)
CASSPRDRVYERCF

SEQ ID NO: 652089 - protein, 13 aa, Homo sapiens
  CDR3 for alpha chain variable domain of TCR clone 326045 (TRAV12-2, TRAJ13)
CREEDWGYQKVNF

SEQ ID NO: 652090 - protein, 16 aa, Homo sapiens
  CDR3 for beta chain variable domain of TCR clone 326045 (TRBV10-3, TRBJ2-1)
CAISGVGDGGGGEQFF

SEQ ID NO: 652091 - protein, 13 aa, Homo sapiens
  CDR3 for alpha chain variable domain of TCR clone 326046 (TRAV27, TRAJ45)
CRSSGGGADGLTF

SEQ ID NO: 652092 - protein, 13 aa, Homo sapiens
  CDR3 for beta chain variable domain of TCR clone 326046 (TRBV4-2, TRBJ1-1)
CASSQAGNTEAFF

SEQ ID NO: 652093 - protein, 14 aa, Homo sapiens
  CDR3 for alpha chain variable domain of TCR clone 326047 (TRAV2, TRAJ9)
CAVEDRSGGFKTIF

SEQ ID NO: 652094 - protein, 12 aa, Homo sapiens
  CDR3 for beta chain variable domain of TCR clone 326047 (TRBV11-2, TRBJ2-1)
CASRPGNNEQFF

SEQ ID NO: 652095 - protein, 13 aa, Homo sapiens
  CDR3 for alpha chain variable domain of TCR clone 326048 (TRAV8-3, TRAJ16)
CAVALSDGQKLLF

SEQ ID NO: 652096 - protein, 14 aa, Homo sapiens
  CDR3 for beta chain variable domain of TCR clone 326048 (TRBV7-6, TRBJ2-3)
CASSLGTVTDTQYF

SEQ ID NO: 652097 - protein, 14 aa, Homo sapiens
  CDR3 for alpha chain variable domain of TCR clone 326049 (TRAV12-2, TRAJ17)
CAVLFKAAGNKLTF

SEQ ID NO: 652098 - protein, 15 aa, Homo sapiens
  CDR3 for beta chain variable domain of TCR clone 326049 (TRBV20-1, TRBJ2-7)
CSARDRVYGMDEQYF

SEQ ID NO: 652099 - protein, 16 aa, Homo sapiens
  CDR3 for alpha chain variable domain of TCR clone 326050 (TRAV12-1, TRAJ48)
YVVNMVSNFGNEKLTF

SEQ ID NO: 652100 - protein, 18 aa, Homo sapiens
  CDR3 for beta chain variable domain of TCR clone 326050 (TRBV11-2, TRBJ2-6)
CASSLNPFLGTGANVLTF

SEQ ID NO: 652101 - protein, 13 aa, Homo sapiens
  CDR3 for alpha chain variable domain of TCR clone 326051 (TRAV29/DV5, TRAJ48)
CAASRVGTEKLTF

SEQ ID NO: 652102 - protein, 14 aa, Homo sapiens
  CDR3 for beta chain variable domain of TCR clone 326051 (TRBV11-3, TRBJ2-1)
CASSVGGGASEQFF

SEQ ID NO: 652103 - protein, 14 aa, Homo sapiens
  CDR3 for alpha chain variable domain of TCR clone 326052 (TRAV3, TRAJ21)
CAVESQANFNKFYF

SEQ ID NO: 652104 - protein, 17 aa, Homo sapiens
  CDR3 for beta chain variable domain of TCR clone 326052 (TRBV7-9, TRBJ2-1)
CHSLAVSGTSGRNGQFF

SEQ ID NO: 652105 - protein, 12 aa, Homo sapiens
  CDR3 for alpha chain variable domain of TCR clone 326053 (TRAV12-3, TRAJ17)
CTMTLTGNKLTF

SEQ ID NO: 652106 - protein, 15 aa, Homo sapiens
  CDR3 for beta chain variable domain of TCR clone 326053 (TRBV20-1, TRBJ2-7)
CSARDRVSGMDEQYL

SEQ ID NO: 652107 - protein, 12 aa, Homo sapiens
  CDR3 for alpha chain variable domain of TCR clone 326054 (TRAV13-1, TRAJ23)
CAASKKGGKLIF

SEQ ID NO: 652108 - protein, 16 aa, Homo sapiens
  CDR3 for beta chain variable domain of TCR clone 326054 (TRBV7-3, TRBJ2-2)
CASSLKRGTLSGELFF

SEQ ID NO: 652109 - protein, 13 aa, Homo sapiens
  CDR3 for alpha chain variable domain of TCR clone 326055 (TRAV27, TRAJ45)
CRSSGGGADGLTF

SEQ ID NO: 652110 - protein, 15 aa, Homo sapiens
  CDR3 for beta chain variable domain of TCR clone 326055 (TRBV9, TRBJ1-6)
CASSVAGTGDSPLHV

SEQ ID NO: 652111 - protein, 17 aa, Homo sapiens
  CDR3 for alpha chain variable domain of TCR clone 326056 (TRAV13-1, TRAJ28)
CAASPPYSGAGSYHLTF

SEQ ID NO: 652112 - protein, 12 aa, Homo sapiens
  CDR3 for beta chain variable domain of TCR clone 326056 (TRBV11-2, TRBJ2-2)
CAGSLPTGELFF

SEQ ID NO: 652113 - protein, 12 aa, Homo sapiens
  CDR3 for alpha chain variable domain of TCR clone 326057 (TRAV29/DV5, TRAJ49)
CAATDTGNQFYF

SEQ ID NO: 652114 - protein, 19 aa, Homo sapiens
  CDR3 for beta chain variable domain of TCR clone 326057 (TRBV25-1, TRBJ2-2)
CAILVYRVDRGRKTGELVF

SEQ ID NO: 652115 - protein, 17 aa, Homo sapiens
  CDR3 for alpha chain variable domain of TCR clone 326058 (TRAV26-1, TRAJ11)
CIVRVGQSNSGYSTLTF

SEQ ID NO: 652116 - protein, 15 aa, Homo sapiens
  CDR3 for beta chain variable domain of TCR clone 326058 (TRBV27, TRBJ2-5)
CASSLIPSGGETRYF

SEQ ID NO: 652117 - protein, 16 aa, Homo sapiens
  CDR3 for alpha chain variable domain of TCR clone 326059 (TRAV3, TRAJ10)
CAVRDKRAGGGNKLTF

SEQ ID NO: 652118 - protein, 14 aa, Homo sapiens
  CDR3 for beta chain variable domain of TCR clone 326059 (TRBV11-2, TRBJ2-7)
CASSLGAGAYEQYF

SEQ ID NO: 652119 - protein, 15 aa, Homo sapiens
  CDR3 for alpha chain variable domain of TCR clone 326060 (TRAV8-6, TRAJ10)
CAVSDQAGGGKKRTF

SEQ ID NO: 652120 - protein, 16 aa, Homo sapiens
  CDR3 for beta chain variable domain of TCR clone 326060 (TRBV27, TRBJ2-7)
CASSSERRDSAYEQYF

SEQ ID NO: 652121 - protein, 13 aa, Homo sapiens
  CDR3 for alpha chain variable domain of TCR clone 326061 (TRAV27, TRAJ17)
CAGAATAGNKLTF

SEQ ID NO: 652122 - protein, 15 aa, Homo sapiens
  CDR3 for beta chain variable domain of TCR clone 326061 (TRBV5-1, TRBJ2-3)
CASRNQAVSTDTQYF

SEQ ID NO: 652123 - protein, 14 aa, Homo sapiens
  CDR3 for alpha chain variable domain of TCR clone 326062 (TRAV8-1, TRAJ34)
CAVNPSYNTAKLIF

SEQ ID NO: 652124 - protein, 16 aa, Homo sapiens
  CDR3 for beta chain variable domain of TCR clone 326062 (TRBV7-2, TRBJ2-6)
CASSLAGRSGANVLTF

SEQ ID NO: 652125 - protein, 16 aa, Homo sapiens
  CDR3 for alpha chain variable domain of TCR clone 326063 (TRAV38-2/DV8, TRAJ23)
WGMPMYFCALSRKLIF

SEQ ID NO: 652126 - protein, 17 aa, Homo sapiens
  CDR3 for beta chain variable domain of TCR clone 326063 (TRBV5-4, TRBJ2-1)
CASSSAGGRGPYNEQFF

SEQ ID NO: 652127 - protein, 14 aa, Homo sapiens
  CDR3 for alpha chain variable domain of TCR clone 326064 (TRAV35, TRAJ22)
CAGLRPDSARQLTF

SEQ ID NO: 652128 - protein, 17 aa, Homo sapiens
  CDR3 for beta chain variable domain of TCR clone 326064 (TRBV15, TRBJ1-4)
CATSRYGTGDPNEKLFF

SEQ ID NO: 652129 - protein, 14 aa, Homo sapiens
  CDR3 for alpha chain variable domain of TCR clone 326065 (TRAV13-1, TRAJ35)
CAASKGGFGNVLHC

SEQ ID NO: 652130 - protein, 12 aa, Homo sapiens
  CDR3 for beta chain variable domain of TCR clone 326065 (TRBV7-2, TRBJ1-2)
CASSSQGIGYTF

SEQ ID NO: 652131 - protein, 17 aa, Homo sapiens
  CDR3 for alpha chain variable domain of TCR clone 326066 (TRAV21, TRAJ52)
CCEAFPAGGTSYGKLTF

SEQ ID NO: 652132 - protein, 15 aa, Homo sapiens
  CDR3 for beta chain variable domain of TCR clone 326066 (TRBV2, TRBJ2-1)
CASSEEREGDNEQFF

SEQ ID NO: 652133 - protein, 13 aa, Homo sapiens
  CDR3 for alpha chain variable domain of TCR clone 326067 (TRAV13-2, TRAJ5)
CAVMDTGRRALTF

SEQ ID NO: 652134 - protein, 12 aa, Homo sapiens
  CDR3 for beta chain variable domain of TCR clone 326067 (TRBV11-2, TRBJ2-2)
CASSLGGGELFF

SEQ ID NO: 652135 - protein, 12 aa, Homo sapiens
  CDR3 for alpha chain variable domain of TCR clone 326068 (TRAV12-1, TRAJ40)
CVVYSGTYKYIF

SEQ ID NO: 652136 - protein, 17 aa, Homo sapiens
  CDR3 for beta chain variable domain of TCR clone 326068 (TRBV11-3, TRBJ1-5)
CASRPLTGLRGNQPQHF

SEQ ID NO: 652137 - protein, 13 aa, Homo sapiens
  CDR3 for alpha chain variable domain of TCR clone 326069 (TRAV3, TRAJ41)
CAVSSNSGYELNF

SEQ ID NO: 652138 - protein, 13 aa, Homo sapiens
  CDR3 for beta chain variable domain of TCR clone 326069 (TRBV20-1, TRBJ2-2)
CSVLSGGAGELFF

SEQ ID NO: 652139 - protein, 17 aa, Homo sapiens
  CDR3 for alpha chain variable domain of TCR clone 326070 (TRAV12-2, TRAJ22)
FAVNRIPFSGSARQLTF

SEQ ID NO: 652140 - protein, 13 aa, Homo sapiens
  CDR3 for beta chain variable domain of TCR clone 326070 (TRBV11-3, TRBJ1-1)
CASSSNRDTEAFF

SEQ ID NO: 652141 - protein, 13 aa, Homo sapiens
  CDR3 for alpha chain variable domain of TCR clone 326071 (TRAV21, TRAJ15)
CAVANQAGTALIF

SEQ ID NO: 652142 - protein, 13 aa, Homo sapiens
  CDR3 for beta chain variable domain of TCR clone 326071 (TRBV27, TRBJ2-2)
CQQFRGSNRGLFF

SEQ ID NO: 652143 - protein, 12 aa, Homo sapiens
  CDR3 for alpha chain variable domain of TCR clone 326072 (TRAV8-1, TRAJ26)
CAVNNYGQNFVF

SEQ ID NO: 652144 - protein, 15 aa, Homo sapiens
  CDR3 for beta chain variable domain of TCR clone 326072 (TRBV7-2, TRBJ2-3)
CASSLAGAFIDTQYF

SEQ ID NO: 652145 - protein, 14 aa, Homo sapiens
  CDR3 for alpha chain variable domain of TCR clone 326073 (TRAV13-2, TRAJ9)
CAENLATGGFKTIF

SEQ ID NO: 652146 - protein, 16 aa, Homo sapiens
  CDR3 for beta chain variable domain of TCR clone 326073 (TRBV28, TRBJ2-5)
CASSFSPAGGWETQYF

SEQ ID NO: 652147 - protein, 18 aa, Homo sapiens
  CDR3 for alpha chain variable domain of TCR clone 326074 (TRAV8-4, TRAJ52)
CAVTRANAGGTSYGKLTF

SEQ ID NO: 652148 - protein, 14 aa, Homo sapiens
  CDR3 for beta chain variable domain of TCR clone 326074 (TRBV19, TRBJ2-7)
CASTVQGRPYEQCF

SEQ ID NO: 652149 - protein, 16 aa, Homo sapiens
  CDR3 for alpha chain variable domain of TCR clone 326075 (TRAV3, TRAJ28)
CAVLPRSGAGSYQLTF

SEQ ID NO: 652150 - protein, 14 aa, Homo sapiens
  CDR3 for beta chain variable domain of TCR clone 326075 (TRBV7-6, TRBJ2-3)
CASSLGTVTDTQYF

SEQ ID NO: 652151 - protein, 15 aa, Homo sapiens
  CDR3 for alpha chain variable domain of TCR clone 326076 (TRAV17, TRAJ57)
CATGPSKGGSEKLVF

SEQ ID NO: 652152 - protein, 18 aa, Homo sapiens
  CDR3 for beta chain variable domain of TCR clone 326076 (TRBV7-9, TRBJ2-7)
CASSLTTSGSRTWYEQYF

SEQ ID NO: 652153 - protein, 18 aa, Homo sapiens
  CDR3 for alpha chain variable domain of TCR clone 326077 (TRAV12-3, TRAJ52)
CAMSVGGAGGTSYGKRTF

SEQ ID NO: 652154 - protein, 12 aa, Homo sapiens
  CDR3 for beta chain variable domain of TCR clone 326077 (TRBV11-2, TRBJ2-2)
CASGLGGGELFF

SEQ ID NO: 652155 - protein, 16 aa, Homo sapiens
  CDR3 for alpha chain variable domain of TCR clone 326078 (TRAV3, TRAJ10)
CAVRDMRAGGGNKLTF

SEQ ID NO: 652156 - protein, 13 aa, Homo sapiens
  CDR3 for beta chain variable domain of TCR clone 326078 (TRBV25-1, TRBJ1-1)
CQHPPGGHTEAFF

SEQ ID NO: 652157 - protein, 15 aa, Homo sapiens
  CDR3 for alpha chain variable domain of TCR clone 326079 (TRAV3, TRAJ5)
CAVRDLDTGRRALTF

SEQ ID NO: 652158 - protein, 13 aa, Homo sapiens
  CDR3 for beta chain variable domain of TCR clone 326079 (TRBV25-1, TRBJ2-5)
CASSPGGVETQYF

SEQ ID NO: 652159 - protein, 11 aa, Homo sapiens
  CDR3 for alpha chain variable domain of TCR clone 326080 (TRAV1-2, TRAJ20)
CAVANDYKLSL

SEQ ID NO: 652160 - protein, 17 aa, Homo sapiens
  CDR3 for beta chain variable domain of TCR clone 326080 (TRBV13, TRBJ2-3)
CASSLSRVAGGGNTQYF

SEQ ID NO: 652161 - protein, 15 aa, Homo sapiens
  CDR3 for alpha chain variable domain of TCR clone 326081 (TRAV21, TRAJ24)
CAARSSTDSWGKLLF

SEQ ID NO: 652162 - protein, 15 aa, Homo sapiens
  CDR3 for beta chain variable domain of TCR clone 326081 (TRBV5-1, TRBJ2-1)
CASSPPRAPYNEQFF

SEQ ID NO: 652163 - protein, 18 aa, Homo sapiens
  CDR3 for alpha chain variable domain of TCR clone 326082 (TRAV13-1, TRAJ52)
CAASKRSAGGTSYGKLTF

SEQ ID NO: 652164 - protein, 15 aa, Homo sapiens
  CDR3 for beta chain variable domain of TCR clone 326082 (TRBV12-4, TRBJ1-2)
CTSASSLRQGKGDTF

SEQ ID NO: 652165 - protein, 20 aa, Homo sapiens
  CDR3 for alpha chain variable domain of TCR clone 326083 (TRAV26-1, TRAJ42)
CCVLLHRQTYYGGSQGNLIF

SEQ ID NO: 652166 - protein, 15 aa, Homo sapiens
  CDR3 for beta chain variable domain of TCR clone 326083 (TRBV11-2, TRBJ2-1)
CASSKNRGLIYEQFF

SEQ ID NO: 652167 - protein, 13 aa, Homo sapiens
  CDR3 for alpha chain variable domain of TCR clone 326084 (TRAV2, TRAJ20)
CAVEDPFEYKLSF

SEQ ID NO: 652168 - protein, 16 aa, Homo sapiens
  CDR3 for beta chain variable domain of TCR clone 326084 (TRBV25-1, TRBJ2-7)
CASSELTGGGIYEQYF

SEQ ID NO: 652169 - protein, 17 aa, Homo sapiens
  CDR3 for alpha chain variable domain of TCR clone 326085 (TRAV1-1, TRAJ4)
CALYNKLTFGAGTRLAV

SEQ ID NO: 652170 - protein, 16 aa, Homo sapiens
  CDR3 for beta chain variable domain of TCR clone 326085 (TRBV7-3, TRBJ2-2)
CASSLKRGTLSGELFF

SEQ ID NO: 652171 - protein, 15 aa, Homo sapiens
  CDR3 for alpha chain variable domain of TCR clone 326086 (TRAV26-1, TRAJ9)
CIVRESNTGGFKTIF

SEQ ID NO: 652172 - protein, 11 aa, Homo sapiens
  CDR3 for beta chain variable domain of TCR clone 326086 (TRBV7-6, TRBJ2-5)
CASSCQETQYF

SEQ ID NO: 652173 - protein, 13 aa, Homo sapiens
  CDR3 for alpha chain variable domain of TCR clone 326087 (TRAV27, TRAJ29)
CAGAHSGNTPLGF

SEQ ID NO: 652174 - protein, 16 aa, Homo sapiens
  CDR3 for beta chain variable domain of TCR clone 326087 (TRBV7-9, TRBJ2-7)
CASSIGQGRASSTSGR

SEQ ID NO: 652175 - protein, 11 aa, Homo sapiens
  CDR3 for alpha chain variable domain of TCR clone 326088 (TRAV12-1, TRAJ21)
CVVNNFNKFYF

SEQ ID NO: 652176 - protein, 16 aa, Homo sapiens
  CDR3 for beta chain variable domain of TCR clone 326088 (TRBV20-1, TRBJ1-2)
CSASTFGGAENYGYTF

SEQ ID NO: 652177 - protein, 17 aa, Homo sapiens
  CDR3 for alpha chain variable domain of TCR clone 326089 (TRAV36/DV7, TRAJ52)
CAVAQRAGGTSFGKLTF

SEQ ID NO: 652178 - protein, 14 aa, Homo sapiens
  CDR3 for beta chain variable domain of TCR clone 326089 (TRBV19, TRBJ2-1)
CASPTFVLSGEQFF

SEQ ID NO: 652179 - protein, 12 aa, Homo sapiens
  CDR3 for alpha chain variable domain of TCR clone 326090 (TRAV12-1, TRAJ23)
CVVNIPGGKLIF

SEQ ID NO: 652180 - protein, 15 aa, Homo sapiens
  CDR3 for beta chain variable domain of TCR clone 326090 (TRBV7-2, TRBJ2-7)
CASSVVSSGSYVQYF

SEQ ID NO: 652181 - protein, 16 aa, Homo sapiens
  CDR3 for alpha chain variable domain of TCR clone 326091 (TRAV30, TRAJ57)
CGTGWAPQGGSEKLVF

SEQ ID NO: 652182 - protein, 14 aa, Homo sapiens
  CDR3 for beta chain variable domain of TCR clone 326091 (TRBV18, TRBJ1-1)
CASSPGFQGEEAFF

SEQ ID NO: 652183 - protein, 13 aa, Homo sapiens
  CDR3 for alpha chain variable domain of TCR clone 326092 (TRAV27, TRAJ3)
ASLRGSSASKIIF

SEQ ID NO: 652184 - protein, 15 aa, Homo sapiens
  CDR3 for beta chain variable domain of TCR clone 326092 (TRBV28, TRBJ1-3)
CASSMGGAAGNTIYF

SEQ ID NO: 652185 - protein, 20 aa, Homo sapiens
  CDR3 for alpha chain variable domain of TCR clone 326093 (TRAV12-1, TRAJ42)
SSVIQPPTSVKGGSQGNLIF

SEQ ID NO: 652186 - protein, 12 aa, Homo sapiens
  CDR3 for beta chain variable domain of TCR clone 326093 (TRBV7-8, TRBJ2-7)
CASSLRDREQYF

SEQ ID NO: 652187 - protein, 13 aa, Homo sapiens
  CDR3 for alpha chain variable domain of TCR clone 326094 (TRAV1-2, TRAJ9)
CAVLNTGGFKTIF

SEQ ID NO: 652188 - protein, 12 aa, Homo sapiens
  CDR3 for beta chain variable domain of TCR clone 326094 (TRBV12-4, TRBJ1-4)
CASSRSGARLFF

SEQ ID NO: 652189 - protein, 15 aa, Homo sapiens
  CDR3 for alpha chain variable domain of TCR clone 326095 (TRAV21, TRAJ32)
CAVNSYGGATNKLIF

SEQ ID NO: 652190 - protein, 18 aa, Homo sapiens
  CDR3 for beta chain variable domain of TCR clone 326095 (TRBV7-9, TRBJ2-1)
CASSTRLAEGSSYNEQFF

SEQ ID NO: 652191 - protein, 13 aa, Homo sapiens
  CDR3 for alpha chain variable domain of TCR clone 326096 (TRAV13-1, TRAJ6)
CAASKGGSYIPTF

SEQ ID NO: 652192 - protein, 16 aa, Homo sapiens
  CDR3 for beta chain variable domain of TCR clone 326096 (TRBV12-4, TRBJ1-5)
CASSRPVGGSNQPQHF

SEQ ID NO: 652193 - protein, 14 aa, Homo sapiens
  CDR3 for alpha chain variable domain of TCR clone 326097 (TRAV12-1, TRAJ4)
CVGDFSGSYNKLIF

SEQ ID NO: 652194 - protein, 15 aa, Homo sapiens
  CDR3 for beta chain variable domain of TCR clone 326097 (TRBV4-2, TRBJ2-7)
CASSQVDRSSYEQYF

SEQ ID NO: 652195 - protein, 16 aa, Homo sapiens
  CDR3 for alpha chain variable domain of TCR clone 326098 (TRAV16, TRAJ57)
CAPYLITQVGSEKLVF

SEQ ID NO: 652196 - protein, 17 aa, Homo sapiens
  CDR3 for beta chain variable domain of TCR clone 326098 (TRBV24-1, TRBJ2-4)
CATSDAEARGVRNRQYF

SEQ ID NO: 652197 - protein, 15 aa, Homo sapiens
  CDR3 for alpha chain variable domain of TCR clone 326099 (TRAV3, TRAJ17)
CAVRDTGAAGNKLNF

SEQ ID NO: 652198 - protein, 17 aa, Homo sapiens
  CDR3 for beta chain variable domain of TCR clone 326099 (TRBV6-1, TRBJ1-2)
CASSGTHSQRGNYGYTF

SEQ ID NO: 652199 - protein, 15 aa, Homo sapiens
  CDR3 for alpha chain variable domain of TCR clone 326100 (TRAV20, TRAJ58)
CAVQDLETSGSRLTF

SEQ ID NO: 652200 - protein, 17 aa, Homo sapiens
  CDR3 for beta chain variable domain of TCR clone 326100 (TRBV4-2, TRBJ2-5)
CASSPGRWRNFQETQYF

SEQ ID NO: 652201 - protein, 14 aa, Homo sapiens
  CDR3 for alpha chain variable domain of TCR clone 326101 (TRAV1-2, TRAJ16)
CAVNRFSDGQKLLF

SEQ ID NO: 652202 - protein, 17 aa, Homo sapiens
  CDR3 for beta chain variable domain of TCR clone 326101 (TRBV28, TRBJ2-5)
CASSFGGKWGGQETQYF

SEQ ID NO: 652203 - protein, 13 aa, Homo sapiens
  CDR3 for alpha chain variable domain of TCR clone 326102 (TRAV12-1, TRAJ17)
CVVNKAAGNKLTF

SEQ ID NO: 652204 - protein, 16 aa, Homo sapiens
  CDR3 for beta chain variable domain of TCR clone 326102 (TRBV11-2, TRBJ2-2)
SASSLRTGNLIGELFF

SEQ ID NO: 652205 - protein, 14 aa, Homo sapiens
  CDR3 for alpha chain variable domain of TCR clone 326103 (TRAV12-2, TRAJ17)
CAVLFNAAGNKLTF

SEQ ID NO: 652206 - protein, 14 aa, Homo sapiens
  CDR3 for beta chain variable domain of TCR clone 326103 (TRBV7-3, TRBJ1-1)
CASSLKGGNTEAFF

SEQ ID NO: 652207 - protein, 15 aa, Homo sapiens
  CDR3 for alpha chain variable domain of TCR clone 326104 (TRAV26-1, TRAJ29)
CIVRVEGSGKTPLVF

SEQ ID NO: 652208 - protein, 15 aa, Homo sapiens
  CDR3 for beta chain variable domain of TCR clone 326104 (TRBV12-4, TRBJ1-1)
CQQQDRVVANTEAFF

SEQ ID NO: 652209 - protein, 13 aa, Homo sapiens
  CDR3 for alpha chain variable domain of TCR clone 326105 (TRAV27, TRAJ24)
CAGVTDSWGKFQF

SEQ ID NO: 652210 - protein, 16 aa, Homo sapiens
  CDR3 for beta chain variable domain of TCR clone 326105 (TRBV7-7, TRBJ2-1)
CASSLASGTSYNEQFF

SEQ ID NO: 652211 - protein, 17 aa, Homo sapiens
  CDR3 for alpha chain variable domain of TCR clone 326106 (TRAV3, TRAJ42)
CAVRDRDHGGSQGNLIF

SEQ ID NO: 652212 - protein, 14 aa, Homo sapiens
  CDR3 for beta chain variable domain of TCR clone 326106 (TRBV7-2, TRBJ2-5)
CASSPRGSSETQYF

SEQ ID NO: 652213 - protein, 11 aa, Homo sapiens
  CDR3 for alpha chain variable domain of TCR clone 326107 (TRAV12-3, TRAJ41)
CAMNAREALSF

SEQ ID NO: 652214 - protein, 16 aa, Homo sapiens
  CDR3 for beta chain variable domain of TCR clone 326107 (TRBV7-8, TRBJ2-3)
CASSTEGQRETDTQYS

SEQ ID NO: 652215 - protein, 14 aa, Homo sapiens
  CDR3 for alpha chain variable domain of TCR clone 326108 (TRAV2, TRAJ9)
CAVEDRSGGFKTIF

SEQ ID NO: 652216 - protein, 12 aa, Homo sapiens
  CDR3 for beta chain variable domain of TCR clone 326108 (TRBV11-2, TRBJ2-1)
CASSPGNKEQFF

SEQ ID NO: 652217 - protein, 13 aa, Homo sapiens
  CDR3 for alpha chain variable domain of TCR clone 326109 (TRAV27, TRAJ41)
CAEEGNSGYALNF

SEQ ID NO: 652218 - protein, 11 aa, Homo sapiens
  CDR3 for beta chain variable domain of TCR clone 326109 (TRBV18, TRBJ2-5)
CASSPRETQYF

SEQ ID NO: 652219 - protein, 15 aa, Homo sapiens
  CDR3 for alpha chain variable domain of TCR clone 326110 (TRAV3, TRAJ22)
CAVRDWGGSARQLTF

SEQ ID NO: 652220 - protein, 15 aa, Homo sapiens
  CDR3 for beta chain variable domain of TCR clone 326110 (TRBV7-3, TRBJ2-2)
CASSETGQGTGELFF

SEQ ID NO: 652221 - protein, 13 aa, Homo sapiens
  CDR3 for alpha chain variable domain of TCR clone 326111 (TRAV2, TRAJ40)
CAVVTSGTYKYIF

SEQ ID NO: 652222 - protein, 16 aa, Homo sapiens
  CDR3 for beta chain variable domain of TCR clone 326111 (TRBV19, TRBJ2-2)
CASRSPGTGATGELYF

SEQ ID NO: 652223 - protein, 16 aa, Homo sapiens
  CDR3 for alpha chain variable domain of TCR clone 326112 (TRAV23/DV6, )
CADIQNPDPSVYQLRD

SEQ ID NO: 652224 - protein, 13 aa, Homo sapiens
  CDR3 for beta chain variable domain of TCR clone 326112 (TRBV28, TRBJ2-7)
CASRSSGVYEQYF

SEQ ID NO: 652225 - protein, 20 aa, Homo sapiens
  CDR3 for alpha chain variable domain of TCR clone 326113 (TRAV26-1, TRAJ42)
CCVLLHRQTYYGGSQGNLIF

SEQ ID NO: 652226 - protein, 14 aa, Homo sapiens
  CDR3 for beta chain variable domain of TCR clone 326113 (TRBV18, TRBJ2-7)
CASSPRGGAYEQYF

SEQ ID NO: 652227 - protein, 16 aa, Homo sapiens
  CDR3 for alpha chain variable domain of TCR clone 326114 (TRAV3, TRAJ37)
CAVRGKGSGNTGKLIF

SEQ ID NO: 652228 - protein, 14 aa, Homo sapiens
  CDR3 for beta chain variable domain of TCR clone 326114 (TRBV7-6, TRBJ2-5)
CASSLGGLRETQYF

SEQ ID NO: 652229 - protein, 14 aa, Homo sapiens
  CDR3 for alpha chain variable domain of TCR clone 326115 (TRAV13-1, TRAJ9)
CAASALTGGFKTIF

SEQ ID NO: 652230 - protein, 12 aa, Homo sapiens
  CDR3 for beta chain variable domain of TCR clone 326115 (TRBV20-1, TRBJ2-1)
CSAYRGAGEQFF

SEQ ID NO: 652231 - protein, 13 aa, Homo sapiens
  CDR3 for alpha chain variable domain of TCR clone 326116 (TRAV12-1, TRAJ40)
CVVPTSGHYKYIF

SEQ ID NO: 652232 - protein, 16 aa, Homo sapiens
  CDR3 for beta chain variable domain of TCR clone 326116 (TRBV7-9, TRBJ1-2)
CASSLGFSSGEDGYTF

SEQ ID NO: 652233 - protein, 17 aa, Homo sapiens
  CDR3 for alpha chain variable domain of TCR clone 326117 (TRAV8-6, TRAJ58)
CTVSSWVGETSGSRLTF

SEQ ID NO: 652234 - protein, 13 aa, Homo sapiens
  CDR3 for beta chain variable domain of TCR clone 326117 (TRBV7-3, TRBJ1-1)
CASSQDWGAEAFF

SEQ ID NO: 652235 - protein, 23 aa, Homo sapiens
  CDR3 for alpha chain variable domain of TCR clone 326118 (TRAV26-1, TRAJ38)
CIADNAGNNHIENPDPAVYQLRD

SEQ ID NO: 652236 - protein, 13 aa, Homo sapiens
  CDR3 for beta chain variable domain of TCR clone 326118 (TRBV20-1, TRBJ1-1)
CSARGGGNTEAFF

SEQ ID NO: 652237 - protein, 19 aa, Homo sapiens
  CDR3 for alpha chain variable domain of TCR clone 326119 (TRAV17, TRAJ40)
TASRAADTASYFCASKHIF

SEQ ID NO: 652238 - protein, 17 aa, Homo sapiens
  CDR3 for beta chain variable domain of TCR clone 326119 (TRBV11-2, TRBJ2-4)
CASSFLALGGAGDIQYF

SEQ ID NO: 652239 - protein, 15 aa, Homo sapiens
  CDR3 for alpha chain variable domain of TCR clone 326120 (TRAV20, TRAJ28)
CAVQYSGAGSYQLTF

SEQ ID NO: 652240 - protein, 14 aa, Homo sapiens
  CDR3 for beta chain variable domain of TCR clone 326120 (TRBV18, TRBJ1-5)
CASSPGNSNQPQHF

SEQ ID NO: 652241 - protein, 14 aa, Homo sapiens
  CDR3 for alpha chain variable domain of TCR clone 326121 (TRAV36/DV7, TRAJ40)
CAVETTSGTYKYIF

SEQ ID NO: 652242 - protein, 16 aa, Homo sapiens
  CDR3 for beta chain variable domain of TCR clone 326121 (TRBV28, TRBJ2-1)
CASSSPEYPRDNEQFF

SEQ ID NO: 652243 - protein, 18 aa, Homo sapiens
  CDR3 for alpha chain variable domain of TCR clone 326122 (TRAV12-3, TRAJ52)
CAMSVGGAGGTSSGKLTF

SEQ ID NO: 652244 - protein, 14 aa, Homo sapiens
  CDR3 for beta chain variable domain of TCR clone 326122 (TRBV7-2, TRBJ2-7)
CASRSQGAAYEQYF

SEQ ID NO: 652245 - protein, 12 aa, Homo sapiens
  CDR3 for alpha chain variable domain of TCR clone 326123 (TRAV2, TRAJ33)
CAVPDSNYQLIW

SEQ ID NO: 652246 - protein, 20 aa, Homo sapiens
  CDR3 for beta chain variable domain of TCR clone 326123 (TRBV19, TRBJ2-1)
CASSISRTVTSTRLNNEQSF

SEQ ID NO: 652247 - protein, 14 aa, Homo sapiens
  CDR3 for alpha chain variable domain of TCR clone 326124 (TRAV1-1, TRAJ27)
CAVIYNTYAGKSTF

SEQ ID NO: 652248 - protein, 13 aa, Homo sapiens
  CDR3 for beta chain variable domain of TCR clone 326124 (TRBV7-9, TRBJ1-2)
CASSLKQNYGYTF

SEQ ID NO: 652249 - protein, 14 aa, Homo sapiens
  CDR3 for alpha chain variable domain of TCR clone 326125 (TRAV38-1, TRAJ45)
CASHSGGGADGLTF

SEQ ID NO: 652250 - protein, 13 aa, Homo sapiens
  CDR3 for beta chain variable domain of TCR clone 326125 (TRBV10-3, TRBJ1-2)
CAISERVSYGYTF

SEQ ID NO: 652251 - protein, 14 aa, Homo sapiens
  CDR3 for alpha chain variable domain of TCR clone 326126 (TRAV12-2, TRAJ13)
CAMKKTGGYQKVTF

SEQ ID NO: 652252 - protein, 14 aa, Homo sapiens
  CDR3 for beta chain variable domain of TCR clone 326126 (TRBV7-6, TRBJ2-3)
CASSLGTVTDTQYF

SEQ ID NO: 652253 - protein, 18 aa, Homo sapiens
  CDR3 for alpha chain variable domain of TCR clone 326127 (TRAV21, TRAJ45)
CCGGPQGGSGGGAAGLTF

SEQ ID NO: 652254 - protein, 10 aa, Homo sapiens
  CDR3 for beta chain variable domain of TCR clone 326127 (TRBV4-1, TRBJ2-7)
SRGDRHEQYF

SEQ ID NO: 652255 - protein, 14 aa, Homo sapiens
  CDR3 for alpha chain variable domain of TCR clone 326128 (TRAV35, TRAJ33)
CWPRGRGSNYQLIW

SEQ ID NO: 652256 - protein, 11 aa, Homo sapiens
  CDR3 for beta chain variable domain of TCR clone 326128 (TRBV10-3, TRBJ2-7)
CAISEGFEQYF

SEQ ID NO: 652257 - protein, 11 aa, Homo sapiens
  CDR3 for alpha chain variable domain of TCR clone 326129 (TRAV12-1, TRAJ40)
CVVPGTYKYIF

SEQ ID NO: 652258 - protein, 13 aa, Homo sapiens
  CDR3 for beta chain variable domain of TCR clone 326129 (TRBV7-7, TRBJ2-2)
CASSLTSAGELFF

SEQ ID NO: 652259 - protein, 18 aa, Homo sapiens
  CDR3 for alpha chain variable domain of TCR clone 326130 (TRAV26-1, TRAJ37)
CIVRVDMHGSSNPGKLIF

SEQ ID NO: 652260 - protein, 15 aa, Homo sapiens
  CDR3 for beta chain variable domain of TCR clone 326130 (TRBV20-1, TRBJ2-7)
CSARVLASPLYEQYF

SEQ ID NO: 652261 - protein, 12 aa, Homo sapiens
  CDR3 for alpha chain variable domain of TCR clone 326131 (TRAV12-3, TRAJ17)
CAMTLTGNKLTF

SEQ ID NO: 652262 - protein, 15 aa, Homo sapiens
  CDR3 for beta chain variable domain of TCR clone 326131 (TRBV19, TRBJ2-1)
CANSILGEGRNEQFF

SEQ ID NO: 652263 - protein, 13 aa, Homo sapiens
  CDR3 for alpha chain variable domain of TCR clone 326132 (TRAV21, TRAJ20)
CAVGLRVDYKLSF

SEQ ID NO: 652264 - protein, 14 aa, Homo sapiens
  CDR3 for beta chain variable domain of TCR clone 326132 (TRBV2, TRBJ2-5)
CASSEVLAQETQYF

SEQ ID NO: 652265 - protein, 14 aa, Homo sapiens
  CDR3 for alpha chain variable domain of TCR clone 326133 (TRAV13-1, TRAJ44)
CAAKATGTARKLTF

SEQ ID NO: 652266 - protein, 15 aa, Homo sapiens
  CDR3 for beta chain variable domain of TCR clone 326133 (TRBV11-2, TRBJ2-7)
CASSLVGGRGYEQYF

SEQ ID NO: 652267 - protein, 16 aa, Homo sapiens
  CDR3 for alpha chain variable domain of TCR clone 326134 (TRAV17, TRAJ28)
CATALDSAAGSYQLPF

SEQ ID NO: 652268 - protein, 15 aa, Homo sapiens
  CDR3 for beta chain variable domain of TCR clone 326134 (TRBV12-4, TRBJ1-2)
CASSFEAGLGYGYTF

SEQ ID NO: 652269 - protein, 15 aa, Homo sapiens
  CDR3 for alpha chain variable domain of TCR clone 326135 (TRAV4, TRAJ36)
CLVGDRQTGANNLFF

SEQ ID NO: 652270 - protein, 12 aa, Homo sapiens
  CDR3 for beta chain variable domain of TCR clone 326135 (TRBV7-8, TRBJ2-7)
CASSLGDREQYF

SEQ ID NO: 652271 - protein, 16 aa, Homo sapiens
  CDR3 for alpha chain variable domain of TCR clone 326136 (TRAV17, TRAJ22)
CATVPSSSGSARQLTF

SEQ ID NO: 652272 - protein, 13 aa, Homo sapiens
  CDR3 for beta chain variable domain of TCR clone 326136 (TRBV11-2, TRBJ2-1)
CASSLGLAGGRFF

SEQ ID NO: 652273 - protein, 15 aa, Homo sapiens
  CDR3 for alpha chain variable domain of TCR clone 326137 (TRAV12-2, TRAJ43)
CAFDMRFGAGTRLTD

SEQ ID NO: 652274 - protein, 18 aa, Homo sapiens
  CDR3 for beta chain variable domain of TCR clone 326137 (TRBV20-1, TRBJ2-3)
CSASGLAGGPGTTDTQYF

SEQ ID NO: 652275 - protein, 11 aa, Homo sapiens
  CDR3 for alpha chain variable domain of TCR clone 326138 (TRAV21, TRAJ34)
CAVTNTDKLIF

SEQ ID NO: 652276 - protein, 14 aa, Homo sapiens
  CDR3 for beta chain variable domain of TCR clone 326138 (TRBV6-1, TRBJ1-3)
CGSVQGGGGNTMYF

SEQ ID NO: 652277 - protein, 17 aa, Homo sapiens
  CDR3 for alpha chain variable domain of TCR clone 326139 (TRAV17, TRAJ28)
CATDRRRGGAGSYQLTF

SEQ ID NO: 652278 - protein, 16 aa, Homo sapiens
  CDR3 for beta chain variable domain of TCR clone 326139 (TRBV25-1, TRBJ1-1)
CASSGDRDRGRIEAFF

SEQ ID NO: 652279 - protein, 13 aa, Homo sapiens
  CDR3 for alpha chain variable domain of TCR clone 326140 (TRAV1-2, TRAJ9)
CAALNTGGFETIF

SEQ ID NO: 652280 - protein, 16 aa, Homo sapiens
  CDR3 for beta chain variable domain of TCR clone 326140 (TRBV11-2, TRBJ2-1)
CASSPRLAGVYNERFF

SEQ ID NO: 652281 - protein, 12 aa, Homo sapiens
  CDR3 for alpha chain variable domain of TCR clone 326141 (TRAV26-1, TRAJ31)
CIVRTNNARLMF

SEQ ID NO: 652282 - protein, 13 aa, Homo sapiens
  CDR3 for beta chain variable domain of TCR clone 326141 (TRBV7-2, TRBJ2-7)
CASSSPSGSEQYF

SEQ ID NO: 652283 - protein, 12 aa, Homo sapiens
  CDR3 for alpha chain variable domain of TCR clone 326142 (TRAV12-3, TRAJ17)
CAMPLTGNKLTF

SEQ ID NO: 652284 - protein, 15 aa, Homo sapiens
  CDR3 for beta chain variable domain of TCR clone 326142 (TRBV20-1, TRBJ2-7)
CNARDRVSGMDEQYF

SEQ ID NO: 652285 - protein, 12 aa, Homo sapiens
  CDR3 for alpha chain variable domain of TCR clone 326143 (TRAV3, TRAJ27)
CAVRDGAGKSTF

SEQ ID NO: 652286 - protein, 13 aa, Homo sapiens
  CDR3 for beta chain variable domain of TCR clone 326143 (TRBV10-3, TRBJ1-2)
CAINADLNYGYNF

SEQ ID NO: 652287 - protein, 14 aa, Homo sapiens
  CDR3 for alpha chain variable domain of TCR clone 326144 (TRAV26-1, TRAJ40)
CIVRVARGTYTYIF

SEQ ID NO: 652288 - protein, 14 aa, Homo sapiens
  CDR3 for beta chain variable domain of TCR clone 326144 (TRBV7-3, TRBJ2-7)
CASSLKADSYEQYF

SEQ ID NO: 652289 - protein, 12 aa, Homo sapiens
  CDR3 for alpha chain variable domain of TCR clone 326145 (TRAV2, TRAJ10)
CASTGGGNKLTF

SEQ ID NO: 652290 - protein, 12 aa, Homo sapiens
  CDR3 for beta chain variable domain of TCR clone 326145 (TRBV5-1, TRBJ1-2)
CASSQDTYGYTF

SEQ ID NO: 652291 - protein, 15 aa, Homo sapiens
  CDR3 for alpha chain variable domain of TCR clone 326146 (TRAV26-1, TRAJ56)
CIVRVATGDNSKLTF

SEQ ID NO: 652292 - protein, 16 aa, Homo sapiens
  CDR3 for beta chain variable domain of TCR clone 326146 (TRBV12-5, TRBJ2-5)
CASGPRTSGNQETQYF

SEQ ID NO: 652293 - protein, 11 aa, Homo sapiens
  CDR3 for alpha chain variable domain of TCR clone 326147 (TRAV17, TRAJ9)
FGFTGGFKTIF

SEQ ID NO: 652294 - protein, 12 aa, Homo sapiens
  CDR3 for beta chain variable domain of TCR clone 326147 (TRBV29-1, TRBJ2-3)
CSVTGGADTQYF

SEQ ID NO: 652295 - protein, 14 aa, Homo sapiens
  CDR3 for alpha chain variable domain of TCR clone 326148 (TRAV8-3, TRAJ4)
YAVGAAGGYNKLIF

SEQ ID NO: 652296 - protein, 15 aa, Homo sapiens
  CDR3 for beta chain variable domain of TCR clone 326148 (TRBV6-5, TRBJ2-1)
CASSYDAGAGNEQFF

SEQ ID NO: 652297 - protein, 13 aa, Homo sapiens
  CDR3 for alpha chain variable domain of TCR clone 326149 (TRAV21, TRAJ57)
CAVTQGGSEKLVF

SEQ ID NO: 652298 - protein, 14 aa, Homo sapiens
  CDR3 for beta chain variable domain of TCR clone 326149 (TRBV5-1, TRBJ2-1)
CASSARWAGNEQFF

SEQ ID NO: 652299 - protein, 11 aa, Homo sapiens
  CDR3 for alpha chain variable domain of TCR clone 326150 (TRAV3, TRAJ21)
CALGNFNKFYF

SEQ ID NO: 652300 - protein, 16 aa, Homo sapiens
  CDR3 for beta chain variable domain of TCR clone 326150 (TRBV19, TRBJ2-1)
SASSKAGPSSYNEQFF

SEQ ID NO: 652301 - protein, 13 aa, Homo sapiens
  CDR3 for alpha chain variable domain of TCR clone 326151 (TRAV8-3, TRAJ36)
CAVGATGANNLVF

SEQ ID NO: 652302 - protein, 15 aa, Homo sapiens
  CDR3 for beta chain variable domain of TCR clone 326151 (TRBV7-2, TRBJ1-2)
CASSPRAGWNSGYTF

SEQ ID NO: 652303 - protein, 11 aa, Homo sapiens
  CDR3 for alpha chain variable domain of TCR clone 326152 (TRAV2, TRAJ13)
CASGGYEKVTF

SEQ ID NO: 652304 - protein, 16 aa, Homo sapiens
  CDR3 for beta chain variable domain of TCR clone 326152 (TRBV19, TRBJ2-1)
CASSMGGGSSYNEQFF

SEQ ID NO: 652305 - protein, 15 aa, Homo sapiens
  CDR3 for alpha chain variable domain of TCR clone 326153 (TRAV12-1, TRAJ6)
CVVNSPSGGSYIPTF

SEQ ID NO: 652306 - protein, 17 aa, Homo sapiens
  CDR3 for beta chain variable domain of TCR clone 326153 (TRBV18, TRBJ1-1)
CASSGRTGRLLKLSLDK

SEQ ID NO: 652307 - protein, 11 aa, Homo sapiens
  CDR3 for alpha chain variable domain of TCR clone 326154 (TRAV12-1, TRAJ30)
CVVNGQDKIIF

SEQ ID NO: 652308 - protein, 19 aa, Homo sapiens
  CDR3 for beta chain variable domain of TCR clone 326154 (TRBV25-1, TRBJ2-2)
CAILVYRVDRGRKTGELFF

SEQ ID NO: 652309 - protein, 12 aa, Homo sapiens
  CDR3 for alpha chain variable domain of TCR clone 326155 (TRAV22, TRAJ29)
CAPPSGNTPLVF

SEQ ID NO: 652310 - protein, 17 aa, Homo sapiens
  CDR3 for beta chain variable domain of TCR clone 326155 (TRBV11-2, TRBJ2-1)
CASSLYPPGVEYNEQFF

SEQ ID NO: 652311 - protein, 11 aa, Homo sapiens
  CDR3 for alpha chain variable domain of TCR clone 326156 (TRAV25, TRAJ47)
CAGLYGNKLVF

SEQ ID NO: 652312 - protein, 14 aa, Homo sapiens
  CDR3 for beta chain variable domain of TCR clone 326156 (TRBV19, TRBJ2-1)
CASKEGVQVSEQFF

SEQ ID NO: 652313 - protein, 13 aa, Homo sapiens
  CDR3 for alpha chain variable domain of TCR clone 326157 (TRAV12-3, TRAJ54)
CAMTLQGAQKLVF

SEQ ID NO: 652314 - protein, 14 aa, Homo sapiens
  CDR3 for beta chain variable domain of TCR clone 326157 (TRBV7-9, TRBJ1-2)
CASSFPLREYGYTF

SEQ ID NO: 652315 - protein, 12 aa, Homo sapiens
  CDR3 for alpha chain variable domain of TCR clone 326158 (TRAV21, TRAJ33)
CAKMDSNYQLIW

SEQ ID NO: 652316 - protein, 14 aa, Homo sapiens
  CDR3 for beta chain variable domain of TCR clone 326158 (TRBV7-3, TRBJ1-1)
CASTHLGGNTEAFF

SEQ ID NO: 652317 - protein, 15 aa, Homo sapiens
  CDR3 for alpha chain variable domain of TCR clone 326159 (TRAV13-2, TRAJ45)
CAESDSGGGADGLTF

SEQ ID NO: 652318 - protein, 16 aa, Homo sapiens
  CDR3 for beta chain variable domain of TCR clone 326159 (TRBV11-2, TRBJ2-7)
CDSSPTTGGVSYEQYF

SEQ ID NO: 652319 - protein, 18 aa, Homo sapiens
  CDR3 for alpha chain variable domain of TCR clone 326160 (TRAV21, TRAJ52)
CAVRPSPAGGTSYGKLTF

SEQ ID NO: 652320 - protein, 14 aa, Homo sapiens
  CDR3 for beta chain variable domain of TCR clone 326160 (TRBV13, TRBJ2-3)
CASSSGSPTDTQYF

SEQ ID NO: 652321 - protein, 13 aa, Homo sapiens
  CDR3 for alpha chain variable domain of TCR clone 326161 (TRAV3, TRAJ21)
CAVREPDFNKFYF

SEQ ID NO: 652322 - protein, 13 aa, Homo sapiens
  CDR3 for beta chain variable domain of TCR clone 326161 (TRBV12-4, TRBJ1-2)
CASSYRVNYGDTF

SEQ ID NO: 652323 - protein, 11 aa, Homo sapiens
  CDR3 for alpha chain variable domain of TCR clone 326162 (TRAV12-2, TRAJ21)
CAVEGFNKFYF

SEQ ID NO: 652324 - protein, 15 aa, Homo sapiens
  CDR3 for beta chain variable domain of TCR clone 326162 (TRBV20-1, TRBJ1-5)
CSASRRGDLGQPQRF

SEQ ID NO: 652325 - protein, 14 aa, Homo sapiens
  CDR3 for alpha chain variable domain of TCR clone 326163 (TRAV1-2, TRAJ8)
CAVREDTGFQRLVF

SEQ ID NO: 652326 - protein, 15 aa, Homo sapiens
  CDR3 for beta chain variable domain of TCR clone 326163 (TRBV27, TRBJ2-1)
CASSNGGGSSNEQFF

SEQ ID NO: 652327 - protein, 15 aa, Homo sapiens
  CDR3 for alpha chain variable domain of TCR clone 326164 (TRAV12-1, TRAJ36)
CVVNEHQTGANNLFF

SEQ ID NO: 652328 - protein, 14 aa, Homo sapiens
  CDR3 for beta chain variable domain of TCR clone 326164 (TRBV10-3, TRBJ2-5)
CASRTSGGQETQYF

SEQ ID NO: 652329 - protein, 14 aa, Homo sapiens
  CDR3 for alpha chain variable domain of TCR clone 326165 (TRAV12-1, TRAJ17)
CVVNYKAAGNKLTF

SEQ ID NO: 652330 - protein, 17 aa, Homo sapiens
  CDR3 for beta chain variable domain of TCR clone 326165 (TRBV20-1, TRBJ2-1)
CSATSSGLAGSYNEQFF

SEQ ID NO: 652331 - protein, 13 aa, Homo sapiens
  CDR3 for alpha chain variable domain of TCR clone 326166 (TRAV12-3, TRAJ13)
CAMSSGGYQKVTF

SEQ ID NO: 652332 - protein, 15 aa, Homo sapiens
  CDR3 for beta chain variable domain of TCR clone 326166 (TRBV6-6, TRBJ2-5)
CASSPGGGLEETQYF

SEQ ID NO: 652333 - protein, 11 aa, Homo sapiens
  CDR3 for alpha chain variable domain of TCR clone 326167 (TRAV12-1, TRAJ34)
CVVNKGRELIF

SEQ ID NO: 652334 - protein, 14 aa, Homo sapiens
  CDR3 for beta chain variable domain of TCR clone 326167 (TRBV27, TRBJ1-1)
CASSPQGKRAEAFF

SEQ ID NO: 652335 - protein, 15 aa, Homo sapiens
  CDR3 for alpha chain variable domain of TCR clone 326168 (TRAV4, TRAJ39)
CLVGPNNNAGNMLTS

SEQ ID NO: 652336 - protein, 14 aa, Homo sapiens
  CDR3 for beta chain variable domain of TCR clone 326168 (TRBV19, TRBJ2-1)
CASPTFVLNGEQFF

SEQ ID NO: 652337 - protein, 13 aa, Homo sapiens
  CDR3 for alpha chain variable domain of TCR clone 326169 (TRAV21, TRAJ52)
CAVRPSPAGGTSY

SEQ ID NO: 652338 - protein, 13 aa, Homo sapiens
  CDR3 for beta chain variable domain of TCR clone 326169 (TRBV29-1, TRBJ2-2)
CSVYREDTGELFF

SEQ ID NO: 652339 - protein, 13 aa, Homo sapiens
  CDR3 for alpha chain variable domain of TCR clone 326170 (TRAV12-1, TRAJ42)
CVVTDPRQGNLIF

SEQ ID NO: 652340 - protein, 15 aa, Homo sapiens
  CDR3 for beta chain variable domain of TCR clone 326170 (TRBV20-1, TRBJ2-3)
CSARESRGQGYTQYF

SEQ ID NO: 652341 - protein, 13 aa, Homo sapiens
  CDR3 for alpha chain variable domain of TCR clone 326171 (TRAV12-1, TRAJ40)
CVVKEAGTYKYIF

SEQ ID NO: 652342 - protein, 12 aa, Homo sapiens
  CDR3 for beta chain variable domain of TCR clone 326171 (TRBV29-1, TRBJ2-3)
CSVTGGADTQYF

SEQ ID NO: 652343 - protein, 15 aa, Homo sapiens
  CDR3 for alpha chain variable domain of TCR clone 326172 (TRAV16, TRAJ16)
YALQGGGSDGQKLLF

SEQ ID NO: 652344 - protein, 15 aa, Homo sapiens
  CDR3 for beta chain variable domain of TCR clone 326172 (TRBV20-1, TRBJ2-7)
CSARDRVSGMDEQYF

SEQ ID NO: 652345 - protein, 11 aa, Homo sapiens
  CDR3 for alpha chain variable domain of TCR clone 326173 (TRAV21, TRAJ48)
CAVDGNEKLTL

SEQ ID NO: 652346 - protein, 15 aa, Homo sapiens
  CDR3 for beta chain variable domain of TCR clone 326173 (TRBV27, TRBJ2-1)
CASSNGGGSSNEQFF

SEQ ID NO: 652347 - protein, 11 aa, Homo sapiens
  CDR3 for alpha chain variable domain of TCR clone 326174 (TRAV3, TRAJ21)
CAVGNFNKFYF

SEQ ID NO: 652348 - protein, 14 aa, Homo sapiens
  CDR3 for beta chain variable domain of TCR clone 326174 (TRBV19, TRBJ1-5)
CASGTEVYNQPQHF

SEQ ID NO: 652349 - protein, 15 aa, Homo sapiens
  CDR3 for alpha chain variable domain of TCR clone 326175 (TRAV4, TRAJ39)
CLVGPNNNAGNMLTF

SEQ ID NO: 652350 - protein, 15 aa, Homo sapiens
  CDR3 for beta chain variable domain of TCR clone 326175 (TRBV27, TRBJ2-1)
CASSNGGGSPNEQFF

SEQ ID NO: 652351 - protein, 19 aa, Homo sapiens
  CDR3 for alpha chain variable domain of TCR clone 326176 (TRAV1-1, TRAJ37)
CPLLLRCERSGSNTGKLIF

SEQ ID NO: 652352 - protein, 14 aa, Homo sapiens
  CDR3 for beta chain variable domain of TCR clone 326176 (TRBV29-1, TRBJ2-2)
CSALGGVGAGELFF

SEQ ID NO: 652353 - protein, 10 aa, Homo sapiens
  CDR3 for alpha chain variable domain of TCR clone 326177 (TRAV12-3, TRAJ49)
CAMNDDQFYF

SEQ ID NO: 652354 - protein, 16 aa, Homo sapiens
  CDR3 for beta chain variable domain of TCR clone 326177 (TRBV20-1, TRBJ1-2)
CSASMGQGVANYGYTF

SEQ ID NO: 652355 - protein, 13 aa, Homo sapiens
  CDR3 for alpha chain variable domain of TCR clone 326178 (TRAV30, TRAJ6)
CGVIEGGSYIPTF

SEQ ID NO: 652356 - protein, 13 aa, Homo sapiens
  CDR3 for beta chain variable domain of TCR clone 326178 (TRBV5-4, TRBJ2-5)
CASSPVSQETQYF

SEQ ID NO: 652357 - protein, 10 aa, Homo sapiens
  CDR3 for alpha chain variable domain of TCR clone 326179 (TRAV26-1, TRAJ22)
CIGGSRQLTF

SEQ ID NO: 652358 - protein, 17 aa, Homo sapiens
  CDR3 for beta chain variable domain of TCR clone 326179 (TRBV5-4, TRBJ1-1)
CASFPPKGRLQNTEAFF

SEQ ID NO: 652359 - protein, 12 aa, Homo sapiens
  CDR3 for alpha chain variable domain of TCR clone 326180 (TRAV20, TRAJ36)
CSVLTGANNLFF

SEQ ID NO: 652360 - protein, 16 aa, Homo sapiens
  CDR3 for beta chain variable domain of TCR clone 326180 (TRBV5-5, TRBJ1-6)
CASSYLSTGFNSPLHF

SEQ ID NO: 652361 - protein, 16 aa, Homo sapiens
  CDR3 for alpha chain variable domain of TCR clone 326181 (TRAV14/DV4, TRAJ32)
GLSNVLPLTPTNKLIF

SEQ ID NO: 652362 - protein, 17 aa, Homo sapiens
  CDR3 for beta chain variable domain of TCR clone 326181 (TRBV20-1, TRBJ2-1)
CSASSSGLAGSYNEQFF

SEQ ID NO: 652363 - protein, 12 aa, Homo sapiens
  CDR3 for alpha chain variable domain of TCR clone 326182 (TRAV36/DV7, TRAJ54)
CAVVRGAQKLVF

SEQ ID NO: 652364 - protein, 18 aa, Homo sapiens
  CDR3 for beta chain variable domain of TCR clone 326182 (TRBV20-1, TRBJ2-3)
CSASGLAGVPGTTDTQYF

SEQ ID NO: 652365 - protein, 14 aa, Homo sapiens
  CDR3 for alpha chain variable domain of TCR clone 326183 (TRAV12-2, TRAJ40)
CAVKIPSGTYKYIF

SEQ ID NO: 652366 - protein, 15 aa, Homo sapiens
  CDR3 for beta chain variable domain of TCR clone 326183 (TRBV11-3, TRBJ2-3)
CASLKDGREGDTQYS

SEQ ID NO: 652367 - protein, 13 aa, Homo sapiens
  CDR3 for alpha chain variable domain of TCR clone 326184 (TRAV2, TRAJ40)
CAVVTSGTYKYLF

SEQ ID NO: 652368 - protein, 14 aa, Homo sapiens
  CDR3 for beta chain variable domain of TCR clone 326184 (TRBV19, TRBJ2-3)
CASSAPRGTDTQYF

SEQ ID NO: 652369 - protein, 15 aa, Homo sapiens
  CDR3 for alpha chain variable domain of TCR clone 326185 (TRAV8-4, TRAJ40)
CAVSSITSGTYTYIF

SEQ ID NO: 652370 - protein, 13 aa, Homo sapiens
  CDR3 for beta chain variable domain of TCR clone 326185 (TRBV2, TRBJ2-1)
CATSRGTDNEQFF

SEQ ID NO: 652371 - protein, 11 aa, Homo sapiens
  CDR3 for alpha chain variable domain of TCR clone 326186 (TRAV2, TRAJ13)
CASGGYQKVTF

SEQ ID NO: 652372 - protein, 16 aa, Homo sapiens
  CDR3 for beta chain variable domain of TCR clone 326186 (TRBV4-3, TRBJ2-2)
CASSQDLSGGYGELFF

SEQ ID NO: 652373 - protein, 15 aa, Homo sapiens
  CDR3 for alpha chain variable domain of TCR clone 326187 (TRAV8-2, TRAJ16)
RVVSDGFSDGQKLPF

SEQ ID NO: 652374 - protein, 14 aa, Homo sapiens
  CDR3 for beta chain variable domain of TCR clone 326187 (TRBV7-3, TRBJ1-1)
CASSLGTGYTEAFF

SEQ ID NO: 652375 - protein, 11 aa, Homo sapiens
  CDR3 for alpha chain variable domain of TCR clone 326188 (TRAV3, TRAJ21)
CAVGNFNKFYF

SEQ ID NO: 652376 - protein, 14 aa, Homo sapiens
  CDR3 for beta chain variable domain of TCR clone 326188 (TRBV28, TRBJ2-1)
CASSLNGRNNEQFF

SEQ ID NO: 652377 - protein, 14 aa, Homo sapiens
  CDR3 for alpha chain variable domain of TCR clone 326189 (TRAV21, TRAJ35)
CAVMPIGFGIVLHC

SEQ ID NO: 652378 - protein, 12 aa, Homo sapiens
  CDR3 for beta chain variable domain of TCR clone 326189 (TRBV7-9, TRBJ2-7)
CASSIKREEQYF

SEQ ID NO: 652379 - protein, 15 aa, Homo sapiens
  CDR3 for alpha chain variable domain of TCR clone 326190 (TRAV35, TRAJ40)
CAGQLGTSGAYKYIF

SEQ ID NO: 652380 - protein, 16 aa, Homo sapiens
  CDR3 for beta chain variable domain of TCR clone 326190 (TRBV19, TRBJ2-7)
CASSLTGTSELGEQYF

SEQ ID NO: 652381 - protein, 13 aa, Homo sapiens
  CDR3 for alpha chain variable domain of TCR clone 326191 (TRAV13-1, TRAJ39)
CAASIWAGNMLTF

SEQ ID NO: 652382 - protein, 15 aa, Homo sapiens
  CDR3 for beta chain variable domain of TCR clone 326191 (TRBV20-1, TRBJ2-7)
CSARDPTEVGHEQYF

SEQ ID NO: 652383 - protein, 12 aa, Homo sapiens
  CDR3 for alpha chain variable domain of TCR clone 326192 (TRAV13-2, TRAJ23)
CAERHRGGKLIF

SEQ ID NO: 652384 - protein, 16 aa, Homo sapiens
  CDR3 for beta chain variable domain of TCR clone 326192 (TRBV7-9, TRBJ1-2)
CASSLGFSSGKDGYTF

SEQ ID NO: 652385 - protein, 14 aa, Homo sapiens
  CDR3 for alpha chain variable domain of TCR clone 326193 (TRAV12-2, TRAJ13)
CAVKKTGGYQKVTF

SEQ ID NO: 652386 - protein, 16 aa, Homo sapiens
  CDR3 for beta chain variable domain of TCR clone 326193 (TRBV12-5, TRBJ2-7)
CASGSQGAPTSSTSGW

SEQ ID NO: 652387 - protein, 16 aa, Homo sapiens
  CDR3 for alpha chain variable domain of TCR clone 326194 (TRAV30, TRAJ24)
CGTEIVDADSWGKFQF

SEQ ID NO: 652388 - protein, 15 aa, Homo sapiens
  CDR3 for beta chain variable domain of TCR clone 326194 (TRBV7-3, TRBJ2-2)
CASSETGQGTGGLFF

SEQ ID NO: 652389 - protein, 13 aa, Homo sapiens
  CDR3 for alpha chain variable domain of TCR clone 326195 (TRAV27, TRAJ45)
CRSSGGGADGLTF

SEQ ID NO: 652390 - protein, 20 aa, Homo sapiens
  CDR3 for beta chain variable domain of TCR clone 326195 (TRBV19, TRBJ2-1)
CASSISRTVTSTRLNNEQFF

SEQ ID NO: 652391 - protein, 16 aa, Homo sapiens
  CDR3 for alpha chain variable domain of TCR clone 326196 (TRAV3, TRAJ23)
CAVEPLIYNQGGKLIF

SEQ ID NO: 652392 - protein, 15 aa, Homo sapiens
  CDR3 for beta chain variable domain of TCR clone 326196 (TRBV19, TRBJ1-5)
CASSPEGRPNQTQHL

SEQ ID NO: 652393 - protein, 15 aa, Homo sapiens
  CDR3 for alpha chain variable domain of TCR clone 326197 (TRAV12-2, TRAJ43)
CAFDMRFGAGTRLTV

SEQ ID NO: 652394 - protein, 17 aa, Homo sapiens
  CDR3 for beta chain variable domain of TCR clone 326197 (TRBV13, TRBJ2-3)
CASSLSRVAGGMNTQYF

SEQ ID NO: 652395 - protein, 13 aa, Homo sapiens
  CDR3 for alpha chain variable domain of TCR clone 326198 (TRAV21, TRAJ20)
SAVGLRVDYKLSF

SEQ ID NO: 652396 - protein, 13 aa, Homo sapiens
  CDR3 for beta chain variable domain of TCR clone 326198 (TRBV6-1, TRBJ1-1)
CASSRQGNTEAFF

SEQ ID NO: 652397 - protein, 17 aa, Homo sapiens
  CDR3 for alpha chain variable domain of TCR clone 326199 (TRAV12-3, TRAJ49)
CAMNDQFYFGTGTSLTV

SEQ ID NO: 652398 - protein, 13 aa, Homo sapiens
  CDR3 for beta chain variable domain of TCR clone 326199 (TRBV12-4, TRBJ1-1)
CASSPGIGFEAFF

SEQ ID NO: 652399 - protein, 16 aa, Homo sapiens
  CDR3 for alpha chain variable domain of TCR clone 326200 (TRAV3, TRAJ3)
CAVRDRAKSSASKIIF

SEQ ID NO: 652400 - protein, 13 aa, Homo sapiens
  CDR3 for beta chain variable domain of TCR clone 326200 (TRBV10-3, TRBJ2-7)
CASKLAVNCEQYF

SEQ ID NO: 652401 - protein, 14 aa, Homo sapiens
  CDR3 for alpha chain variable domain of TCR clone 326201 (TRAV13-1, TRAJ35)
CAASKGGFGKVLHC

SEQ ID NO: 652402 - protein, 15 aa, Homo sapiens
  CDR3 for beta chain variable domain of TCR clone 326201 (TRBV7-3, TRBJ2-1)
CASSLGQGPFGEQFF

SEQ ID NO: 652403 - protein, 12 aa, Homo sapiens
  CDR3 for alpha chain variable domain of TCR clone 326202 (TRAV21, TRAJ39)
CAADNAGNMLTF

SEQ ID NO: 652404 - protein, 12 aa, Homo sapiens
  CDR3 for beta chain variable domain of TCR clone 326202 (TRBV5-4, TRBJ2-7)
CASSWAGQGEYF

SEQ ID NO: 652405 - protein, 12 aa, Homo sapiens
  CDR3 for alpha chain variable domain of TCR clone 326203 (TRAV12-3, TRAJ17)
CAMTLTGNKITF

SEQ ID NO: 652406 - protein, 11 aa, Homo sapiens
  CDR3 for beta chain variable domain of TCR clone 326203 (TRBV11-2, TRBJ2-2)
CASSLPGELFF

SEQ ID NO: 652407 - protein, 11 aa, Homo sapiens
  CDR3 for alpha chain variable domain of TCR clone 326204 (TRAV2, TRAJ33)
CAVESNYQLIW

SEQ ID NO: 652408 - protein, 14 aa, Homo sapiens
  CDR3 for beta chain variable domain of TCR clone 326204 (TRBV12-4, TRBJ1-1)
CASSSARGYTEAFF

SEQ ID NO: 652409 - protein, 14 aa, Homo sapiens
  CDR3 for alpha chain variable domain of TCR clone 326205 (TRAV8-4, TRAJ8)
CAVSDGTGFQKLVF

SEQ ID NO: 652410 - protein, 14 aa, Homo sapiens
  CDR3 for beta chain variable domain of TCR clone 326205 (TRBV19, TRBJ2-7)
CASNFRDTFTGMYF

SEQ ID NO: 652411 - protein, 12 aa, Homo sapiens
  CDR3 for alpha chain variable domain of TCR clone 326206 (TRAV12-3, TRAJ20)
CAMVRGDYKLSF

SEQ ID NO: 652412 - protein, 17 aa, Homo sapiens
  CDR3 for beta chain variable domain of TCR clone 326206 (TRBV7-3, TRBJ2-3)
CASSRGLAGEVPDTQYF

SEQ ID NO: 652413 - protein, 14 aa, Homo sapiens
  CDR3 for alpha chain variable domain of TCR clone 326207 (TRAV26-1, TRAJ45)
CIEVTGGGADGLTF

SEQ ID NO: 652414 - protein, 13 aa, Homo sapiens
  CDR3 for beta chain variable domain of TCR clone 326207 (TRBV7-9, TRBJ2-5)
CASLPSGRETQYF

SEQ ID NO: 652415 - protein, 12 aa, Homo sapiens
  CDR3 for alpha chain variable domain of TCR clone 326208 (TRAV35, TRAJ39)
LAPNIAGNMLTF

SEQ ID NO: 652416 - protein, 16 aa, Homo sapiens
  CDR3 for beta chain variable domain of TCR clone 326208 (TRBV2, TRBJ2-3)
CASSTSVEGVTDTQYF

SEQ ID NO: 652417 - protein, 12 aa, Homo sapiens
  CDR3 for alpha chain variable domain of TCR clone 326209 (TRAV17, TRAJ30)
CATDARDDKIIF

SEQ ID NO: 652418 - protein, 13 aa, Homo sapiens
  CDR3 for beta chain variable domain of TCR clone 326209 (TRBV7-2, TRBJ2-2)
CASSSRPTGELFF

SEQ ID NO: 652419 - protein, 15 aa, Homo sapiens
  CDR3 for alpha chain variable domain of TCR clone 326210 (TRAV21, TRAJ53)
CATLNSGGSNYKLTF

SEQ ID NO: 652420 - protein, 15 aa, Homo sapiens
  CDR3 for beta chain variable domain of TCR clone 326210 (TRBV7-2, TRBJ2-1)
CASTHGTGIYNEQFF

SEQ ID NO: 652421 - protein, 12 aa, Homo sapiens
  CDR3 for alpha chain variable domain of TCR clone 326211 (TRAV24, TRAJ17)
CASKAASNKLTF

SEQ ID NO: 652422 - protein, 20 aa, Homo sapiens
  CDR3 for beta chain variable domain of TCR clone 326211 (TRBV7-8, TRBJ2-2)
CASSHLFPGPTIHITGELFF

SEQ ID NO: 652423 - protein, 14 aa, Homo sapiens
  CDR3 for alpha chain variable domain of TCR clone 326212 (TRAV12-2, TRAJ5)
CAVNRSRGRRALTF

SEQ ID NO: 652424 - protein, 12 aa, Homo sapiens
  CDR3 for beta chain variable domain of TCR clone 326212 (TRBV19, TRBJ1-5)
CAGSIAQQTQHF

SEQ ID NO: 652425 - protein, 14 aa, Homo sapiens
  CDR3 for alpha chain variable domain of TCR clone 326213 (TRAV12-1, TRAJ6)
CVVNGLGGSYIPTF

SEQ ID NO: 652426 - protein, 14 aa, Homo sapiens
  CDR3 for beta chain variable domain of TCR clone 326213 (TRBV19, TRBJ2-1)
CASPTFVLSGEQLF

SEQ ID NO: 652427 - protein, 14 aa, Homo sapiens
  CDR3 for alpha chain variable domain of TCR clone 326214 (TRAV1-2, TRAJ16)
CAVNRFSDGQTLLF

SEQ ID NO: 652428 - protein, 14 aa, Homo sapiens
  CDR3 for beta chain variable domain of TCR clone 326214 (TRBV20-1, TRBJ2-1)
CSAQIGGSANEQFF

SEQ ID NO: 652429 - protein, 20 aa, Homo sapiens
  CDR3 for alpha chain variable domain of TCR clone 326215 (TRAV2, TRAJ29)
CAAGNSGKHTSCLWKGHKTF

SEQ ID NO: 652430 - protein, 15 aa, Homo sapiens
  CDR3 for beta chain variable domain of TCR clone 326215 (TRBV6-3, TRBJ2-7)
CASSSPGTVFYEQYF

SEQ ID NO: 652431 - protein, 13 aa, Homo sapiens
  CDR3 for alpha chain variable domain of TCR clone 326216 (TRAV3, TRAJ41)
CAVSSNSGYALNF

SEQ ID NO: 652432 - protein, 13 aa, Homo sapiens
  CDR3 for beta chain variable domain of TCR clone 326216 (TRBV20-1, TRBJ2-2)
CSAVSGGAGELFF

SEQ ID NO: 652433 - protein, 14 aa, Homo sapiens
  CDR3 for alpha chain variable domain of TCR clone 326217 (TRAV1-2, TRAJ16)
CAVNRFSDGQKLLF

SEQ ID NO: 652434 - protein, 12 aa, Homo sapiens
  CDR3 for beta chain variable domain of TCR clone 326217 (TRBV7-9, TRBJ1-2)
CASSPRGNGYTF

SEQ ID NO: 652435 - protein, 15 aa, Homo sapiens
  CDR3 for alpha chain variable domain of TCR clone 326218 (TRAV12-1, TRAJ37)
CVVNIMGGNTCKLIF

SEQ ID NO: 652436 - protein, 14 aa, Homo sapiens
  CDR3 for beta chain variable domain of TCR clone 326218 (TRBV12-4, TRBJ1-1)
CASSLGTGGTEAFF

SEQ ID NO: 652437 - protein, 15 aa, Homo sapiens
  CDR3 for alpha chain variable domain of TCR clone 326219 (TRAV2, TRAJ24)
GAVEVLTDSWGKFQF

SEQ ID NO: 652438 - protein, 14 aa, Homo sapiens
  CDR3 for beta chain variable domain of TCR clone 326219 (TRBV19, TRBJ2-1)
CASSMGSGRRSSSS

SEQ ID NO: 652439 - protein, 13 aa, Homo sapiens
  CDR3 for alpha chain variable domain of TCR clone 326220 (TRAV27, TRAJ45)
CMSSGGGADGLTF

SEQ ID NO: 652440 - protein, 13 aa, Homo sapiens
  CDR3 for beta chain variable domain of TCR clone 326220 (TRBV7-2, TRBJ2-4)
CASSREHANIQYF

SEQ ID NO: 652441 - protein, 14 aa, Homo sapiens
  CDR3 for alpha chain variable domain of TCR clone 326221 (TRAV20, TRAJ56)
CAVQFGGANSKLTF

SEQ ID NO: 652442 - protein, 14 aa, Homo sapiens
  CDR3 for beta chain variable domain of TCR clone 326221 (TRBV12-4, TRBJ1-1)
CASSLGTGGTEAFF

SEQ ID NO: 652443 - protein, 11 aa, Homo sapiens
  CDR3 for alpha chain variable domain of TCR clone 326222 (TRAV12-1, TRAJ30)
CVVNGQDKIIY

SEQ ID NO: 652444 - protein, 14 aa, Homo sapiens
  CDR3 for beta chain variable domain of TCR clone 326222 (TRBV7-2, TRBJ1-2)
CASSQTGSTYGYTF

SEQ ID NO: 652445 - protein, 12 aa, Homo sapiens
  CDR3 for alpha chain variable domain of TCR clone 326223 (TRAV23/DV6, TRAJ37)
CAASMNTGKLIF

SEQ ID NO: 652446 - protein, 12 aa, Homo sapiens
  CDR3 for beta chain variable domain of TCR clone 326223 (TRBV7-8, TRBJ2-7)
CASSLGDREQYF

SEQ ID NO: 652447 - protein, 11 aa, Homo sapiens
  CDR3 for alpha chain variable domain of TCR clone 326224 (TRAV2, TRAJ21)
CAVFNFNKFYF

SEQ ID NO: 652448 - protein, 16 aa, Homo sapiens
  CDR3 for beta chain variable domain of TCR clone 326224 (TRBV5-1, TRBJ2-3)
CASSLTSGTSGGTQYF

SEQ ID NO: 652449 - protein, 14 aa, Homo sapiens
  CDR3 for alpha chain variable domain of TCR clone 326225 (TRAV8-4, TRAJ9)
CAGRINTGGFKTIF

SEQ ID NO: 652450 - protein, 12 aa, Homo sapiens
  CDR3 for beta chain variable domain of TCR clone 326225 (TRBV6-5, TRBJ2-2)
CASRQITGELFF

SEQ ID NO: 652451 - protein, 14 aa, Homo sapiens
  CDR3 for alpha chain variable domain of TCR clone 326226 (TRAV12-2, TRAJ13)
CAVKKTGGYQKVTF

SEQ ID NO: 652452 - protein, 20 aa, Homo sapiens
  CDR3 for beta chain variable domain of TCR clone 326226 (TRBV7-8, TRBJ2-2)
CASSHLFPGPTIHITGELVF

SEQ ID NO: 652453 - protein, 16 aa, Homo sapiens
  CDR3 for alpha chain variable domain of TCR clone 326227 (TRAV25, TRAJ52)
CAGPRAGGTSYGKMTF

SEQ ID NO: 652454 - protein, 15 aa, Homo sapiens
  CDR3 for beta chain variable domain of TCR clone 326227 (TRBV10-3, TRBJ2-2)
CAIYTGGTGTGELFF

SEQ ID NO: 652455 - protein, 14 aa, Homo sapiens
  CDR3 for alpha chain variable domain of TCR clone 326228 (TRAV1-2, TRAJ29)
CAVRELTSATPLVF

SEQ ID NO: 652456 - protein, 14 aa, Homo sapiens
  CDR3 for beta chain variable domain of TCR clone 326228 (TRBV28, TRBJ2-7)
CASTTDRDGFVQYF

SEQ ID NO: 652457 - protein, 12 aa, Homo sapiens
  CDR3 for alpha chain variable domain of TCR clone 326229 (TRAV13-1, TRAJ49)
CAAYSTGNQFYF

SEQ ID NO: 652458 - protein, 13 aa, Homo sapiens
  CDR3 for beta chain variable domain of TCR clone 326229 (TRBV6-6, TRBJ2-7)
CASSPKHLAEQYF

SEQ ID NO: 652459 - protein, 10 aa, Homo sapiens
  CDR3 for alpha chain variable domain of TCR clone 326230 (TRAV36/DV7, TRAJ49)
CALTGNQFYF

SEQ ID NO: 652460 - protein, 14 aa, Homo sapiens
  CDR3 for beta chain variable domain of TCR clone 326230 (TRBV4-2, TRBJ2-5)
CASSRDRGRETQYF

SEQ ID NO: 652461 - protein, 13 aa, Homo sapiens
  CDR3 for alpha chain variable domain of TCR clone 326231 (TRAV2, TRAJ29)
CAVYSSGNTPLVF

SEQ ID NO: 652462 - protein, 14 aa, Homo sapiens
  CDR3 for beta chain variable domain of TCR clone 326231 (TRBV7-9, TRBJ1-1)
CASSLGGLKTDAFF

SEQ ID NO: 652463 - protein, 16 aa, Homo sapiens
  CDR3 for alpha chain variable domain of TCR clone 326232 (TRAV3, TRAJ23)
CAVRDSSYNQGGKLIF

SEQ ID NO: 652464 - protein, 14 aa, Homo sapiens
  CDR3 for beta chain variable domain of TCR clone 326232 (TRBV4-1, TRBJ2-2)
CASSQAVNTGELFF

SEQ ID NO: 652465 - protein, 13 aa, Homo sapiens
  CDR3 for alpha chain variable domain of TCR clone 326233 (TRAV8-6, TRAJ21)
CAVSPSSLNKFYC

SEQ ID NO: 652466 - protein, 14 aa, Homo sapiens
  CDR3 for beta chain variable domain of TCR clone 326233 (TRBV7-9, TRBJ2-5)
CASSLDTAQETQYF

SEQ ID NO: 652467 - protein, 14 aa, Homo sapiens
  CDR3 for alpha chain variable domain of TCR clone 326234 (TRAV1-2, TRAJ16)
WAVNRFSDGQKLLF

SEQ ID NO: 652468 - protein, 14 aa, Homo sapiens
  CDR3 for beta chain variable domain of TCR clone 326234 (TRBV7-9, TRBJ2-3)
CASSLEDGTDTQYF

SEQ ID NO: 652469 - protein, 14 aa, Homo sapiens
  CDR3 for alpha chain variable domain of TCR clone 326235 (TRAV16, TRAJ33)
CALSAMDSNYQLIW

SEQ ID NO: 652470 - protein, 16 aa, Homo sapiens
  CDR3 for beta chain variable domain of TCR clone 326235 (TRBV25-1, TRBJ2-7)
CASSGLTGGGIYEQYF

SEQ ID NO: 652471 - protein, 12 aa, Homo sapiens
  CDR3 for alpha chain variable domain of TCR clone 326236 (TRAV16, TRAJ10)
CSRTGGGNKLTS

SEQ ID NO: 652472 - protein, 13 aa, Homo sapiens
  CDR3 for beta chain variable domain of TCR clone 326236 (TRBV12-4, TRBJ2-7)
CASSLSGVYEQYF

SEQ ID NO: 652473 - protein, 22 aa, Homo sapiens
  CDR3 for alpha chain variable domain of TCR clone 326237 (TRAV27, TRAJ41)
CAVPTQIPDIQNPDPAVYQLID

SEQ ID NO: 652474 - protein, 16 aa, Homo sapiens
  CDR3 for beta chain variable domain of TCR clone 326237 (TRBV5-1, TRBJ2-3)
CASSLGLAVYTDTQYF

SEQ ID NO: 652475 - protein, 18 aa, Homo sapiens
  CDR3 for alpha chain variable domain of TCR clone 326238 (TRAV21, TRAJ52)
FAVRPSPAGGTSYGKLTF

SEQ ID NO: 652476 - protein, 15 aa, Homo sapiens
  CDR3 for beta chain variable domain of TCR clone 326238 (TRBV20-1, TRBJ2-7)
CSARDRVSGMDEQYF

SEQ ID NO: 652477 - protein, 15 aa, Homo sapiens
  CDR3 for alpha chain variable domain of TCR clone 326239 (TRAV16, TRAJ57)
CALSGGQGGSEKLVF

SEQ ID NO: 652478 - protein, 15 aa, Homo sapiens
  CDR3 for beta chain variable domain of TCR clone 326239 (TRBV27, TRBJ2-5)
CASSLIPSGGETQYF

SEQ ID NO: 652479 - protein, 13 aa, Homo sapiens
  CDR3 for alpha chain variable domain of TCR clone 326240 (TRAV27, TRAJ48)
CAETNFGNEKLTF

SEQ ID NO: 652480 - protein, 15 aa, Homo sapiens
  CDR3 for beta chain variable domain of TCR clone 326240 (TRBV7-3, TRBJ2-1)
CASSPTGGGEVEQFF

SEQ ID NO: 652481 - protein, 18 aa, Homo sapiens
  CDR3 for alpha chain variable domain of TCR clone 326241 (TRAV21, TRAJ52)
CAVRPSPAGGTSYGKLTF

SEQ ID NO: 652482 - protein, 15 aa, Homo sapiens
  CDR3 for beta chain variable domain of TCR clone 326241 (TRBV3-1, TRBJ1-5)
CASSPGGLGNQPQHF

SEQ ID NO: 652483 - protein, 13 aa, Homo sapiens
  CDR3 for alpha chain variable domain of TCR clone 326242 (TRAV8-2, TRAJ47)
CVVSEREGKKLVF

SEQ ID NO: 652484 - protein, 16 aa, Homo sapiens
  CDR3 for beta chain variable domain of TCR clone 326242 (TRBV5-1, TRBJ1-1)
CASSKTGTEVGTEAFF

SEQ ID NO: 652485 - protein, 13 aa, Homo sapiens
  CDR3 for alpha chain variable domain of TCR clone 326243 (TRAV20, TRAJ31)
CAVQAWNNARLMF

SEQ ID NO: 652486 - protein, 16 aa, Homo sapiens
  CDR3 for beta chain variable domain of TCR clone 326243 (TRBV6-6, TRBJ2-1)
CASSWGGQGPCNEQFF

SEQ ID NO: 652487 - protein, 11 aa, Homo sapiens
  CDR3 for alpha chain variable domain of TCR clone 326244 (TRAV2, TRAJ33)
CAVESNYQLIW

SEQ ID NO: 652488 - protein, 13 aa, Homo sapiens
  CDR3 for beta chain variable domain of TCR clone 326244 (TRBV27, TRBJ1-4)
CSSSLMGDEKLFF

SEQ ID NO: 652489 - protein, 10 aa, Homo sapiens
  CDR3 for alpha chain variable domain of TCR clone 326245 (TRAV5, TRAJ34)
CAEDTDKLIF

SEQ ID NO: 652490 - protein, 14 aa, Homo sapiens
  CDR3 for beta chain variable domain of TCR clone 326245 (TRBV6-1, TRBJ1-3)
CASVQGGGGNTMYF

SEQ ID NO: 652491 - protein, 12 aa, Homo sapiens
  CDR3 for alpha chain variable domain of TCR clone 326246 (TRAV16, TRAJ10)
CSRTGGGNKITF

SEQ ID NO: 652492 - protein, 13 aa, Homo sapiens
  CDR3 for beta chain variable domain of TCR clone 326246 (TRBV24-1, TRBJ2-2)
CATSDWSTGELFF

SEQ ID NO: 652493 - protein, 16 aa, Homo sapiens
  CDR3 for alpha chain variable domain of TCR clone 326247 (TRAV13-1, TRAJ37)
CAASSLGSSNTGKLIF

SEQ ID NO: 652494 - protein, 12 aa, Homo sapiens
  CDR3 for beta chain variable domain of TCR clone 326247 (TRBV6-1, TRBJ2-5)
YASSEGRETQYF

SEQ ID NO: 652495 - protein, 18 aa, Homo sapiens
  CDR3 for alpha chain variable domain of TCR clone 326248 (TRAV1-2, TRAJ36)
CAVRVRRMGQTGANNLFF

SEQ ID NO: 652496 - protein, 16 aa, Homo sapiens
  CDR3 for beta chain variable domain of TCR clone 326248 (TRBV2, TRBJ1-4)
CASNLLQGATNEKLFF

SEQ ID NO: 652497 - protein, 15 aa, Homo sapiens
  CDR3 for alpha chain variable domain of TCR clone 326249 (TRAV13-1, TRAJ39)
CAASPLNNAGNILTF

SEQ ID NO: 652498 - protein, 15 aa, Homo sapiens
  CDR3 for beta chain variable domain of TCR clone 326249 (TRBV7-6, TRBJ2-1)
CASSSLAGEGNEQFF

SEQ ID NO: 652499 - protein, 14 aa, Homo sapiens
  CDR3 for alpha chain variable domain of TCR clone 326250 (TRAV8-6, TRAJ17)
CAVSVKAAGNKLTF

SEQ ID NO: 652500 - protein, 14 aa, Homo sapiens
  CDR3 for beta chain variable domain of TCR clone 326250 (TRBV7-2, TRBJ2-7)
CASRSQGAAYEQYF

SEQ ID NO: 652501 - protein, 14 aa, Homo sapiens
  CDR3 for alpha chain variable domain of TCR clone 326251 (TRAV8-3, TRAJ4)
CAVGAAVGYNKLMF

SEQ ID NO: 652502 - protein, 15 aa, Homo sapiens
  CDR3 for beta chain variable domain of TCR clone 326251 (TRBV5-1, TRBJ2-1)
CASSPPRAPYNEQFF

SEQ ID NO: 652503 - protein, 11 aa, Homo sapiens
  CDR3 for alpha chain variable domain of TCR clone 326252 (TRAV1-2, TRAJ20)
CAVANDYKLSF

SEQ ID NO: 652504 - protein, 14 aa, Homo sapiens
  CDR3 for beta chain variable domain of TCR clone 326252 (TRBV19, TRBJ2-2)
CATTGHANTGELFF

SEQ ID NO: 652505 - protein, 14 aa, Homo sapiens
  CDR3 for alpha chain variable domain of TCR clone 326253 (TRAV23/DV6, TRAJ27)
CAASRDTNAGKSTF

SEQ ID NO: 652506 - protein, 15 aa, Homo sapiens
  CDR3 for beta chain variable domain of TCR clone 326253 (TRBV12-4, TRBJ2-5)
CASSPPTGLQETQYF

SEQ ID NO: 652507 - protein, 16 aa, Homo sapiens
  CDR3 for alpha chain variable domain of TCR clone 326254 (TRAV12-1, TRAJ4)
CLVNMGPVGGYNKLIF

SEQ ID NO: 652508 - protein, 17 aa, Homo sapiens
  CDR3 for beta chain variable domain of TCR clone 326254 (TRBV4-3, TRBJ2-1)
CASSQFSSGRASGEQFF

SEQ ID NO: 652509 - protein, 14 aa, Homo sapiens
  CDR3 for alpha chain variable domain of TCR clone 326255 (TRAV1-2, TRAJ16)
CAVNRFSDGQKLLF

SEQ ID NO: 652510 - protein, 15 aa, Homo sapiens
  CDR3 for beta chain variable domain of TCR clone 326255 (TRBV27, TRBJ2-3)
CASSSLAGVRDTQYF

SEQ ID NO: 652511 - protein, 12 aa, Homo sapiens
  CDR3 for alpha chain variable domain of TCR clone 326256 (TRAV13-1, TRAJ21)
CAAKEGFNKFYF

SEQ ID NO: 652512 - protein, 15 aa, Homo sapiens
  CDR3 for beta chain variable domain of TCR clone 326256 (TRBV7-9, TRBJ1-6)
CASSSPGRGNSPLHV

SEQ ID NO: 652513 - protein, 14 aa, Homo sapiens
  CDR3 for alpha chain variable domain of TCR clone 326257 (TRAV2, TRAJ9)
CAVEDRSGGFKTIF

SEQ ID NO: 652514 - protein, 15 aa, Homo sapiens
  CDR3 for beta chain variable domain of TCR clone 326257 (TRBV10-3, TRBJ2-3)
CAISLTNGGTDTQYF

SEQ ID NO: 652515 - protein, 14 aa, Homo sapiens
  CDR3 for alpha chain variable domain of TCR clone 326258 (TRAV2, TRAJ9)
CAVDPNTGGCKTIF

SEQ ID NO: 652516 - protein, 13 aa, Homo sapiens
  CDR3 for beta chain variable domain of TCR clone 326258 (TRBV20-1, TRBJ2-1)
CSASTGTSNEQFF

SEQ ID NO: 652517 - protein, 14 aa, Homo sapiens
  CDR3 for alpha chain variable domain of TCR clone 326259 (TRAV2, TRAJ9)
CAVEDRSGGFKTIF

SEQ ID NO: 652518 - protein, 12 aa, Homo sapiens
  CDR3 for beta chain variable domain of TCR clone 326259 (TRBV7-9, TRBJ2-7)
CASSVEGYEQYF

SEQ ID NO: 652519 - protein, 12 aa, Homo sapiens
  CDR3 for alpha chain variable domain of TCR clone 326260 (TRAV12-3, TRAJ17)
CAMTLTGNKLTF

SEQ ID NO: 652520 - protein, 15 aa, Homo sapiens
  CDR3 for beta chain variable domain of TCR clone 326260 (TRBV20-1, TRBJ2-7)
CIARDRVSRMDEQYF

SEQ ID NO: 652521 - protein, 14 aa, Homo sapiens
  CDR3 for alpha chain variable domain of TCR clone 326261 (TRAV17, TRAJ34)
CATDSLEGTDKLIF

SEQ ID NO: 652522 - protein, 15 aa, Homo sapiens
  CDR3 for beta chain variable domain of TCR clone 326261 (TRBV7-8, TRBJ1-1)
CASSLGDSRNTEAFF

SEQ ID NO: 652523 - protein, 12 aa, Homo sapiens
  CDR3 for alpha chain variable domain of TCR clone 326262 (TRAV12-3, TRAJ17)
CAMTLTGNKLTF

SEQ ID NO: 652524 - protein, 14 aa, Homo sapiens
  CDR3 for beta chain variable domain of TCR clone 326262 (TRBV4-2, TRBJ2-1)
CASSRSGGGNEQFF

SEQ ID NO: 652525 - protein, 12 aa, Homo sapiens
  CDR3 for alpha chain variable domain of TCR clone 326263 (TRAV21, TRAJ13)
PGPSGGYQKVTF

SEQ ID NO: 652526 - protein, 15 aa, Homo sapiens
  CDR3 for beta chain variable domain of TCR clone 326263 (TRBV2, TRBJ2-1)
CASSEEREGDNEQFF

SEQ ID NO: 652527 - protein, 14 aa, Homo sapiens
  CDR3 for alpha chain variable domain of TCR clone 326264 (TRAV23/DV6, TRAJ24)
CAASLSDSWGKLQF

SEQ ID NO: 652528 - protein, 16 aa, Homo sapiens
  CDR3 for beta chain variable domain of TCR clone 326264 (TRBV7-9, TRBJ2-6)
CASSLKGPLRANVLTV

SEQ ID NO: 652529 - protein, 14 aa, Homo sapiens
  CDR3 for alpha chain variable domain of TCR clone 326265 (TRAV20, TRAJ56)
CAVQFGGANSKLTF

SEQ ID NO: 652530 - protein, 15 aa, Homo sapiens
  CDR3 for beta chain variable domain of TCR clone 326265 (TRBV5-4, TRBJ2-2)
CASSRRGGGTGELFF

SEQ ID NO: 652531 - protein, 11 aa, Homo sapiens
  CDR3 for alpha chain variable domain of TCR clone 326266 (TRAV3, TRAJ17)
PRGAAGNKLTF

SEQ ID NO: 652532 - protein, 12 aa, Homo sapiens
  CDR3 for beta chain variable domain of TCR clone 326266 (TRBV18, TRBJ2-1)
CASSSDEDEQFF

SEQ ID NO: 652533 - protein, 15 aa, Homo sapiens
  CDR3 for alpha chain variable domain of TCR clone 326267 (TRAV4, TRAJ39)
CLVGPNNNAGKMLTF

SEQ ID NO: 652534 - protein, 16 aa, Homo sapiens
  CDR3 for beta chain variable domain of TCR clone 326267 (TRBV13, TRBJ2-2)
CASRPRTGEHTGELFF

SEQ ID NO: 652535 - protein, 16 aa, Homo sapiens
  CDR3 for alpha chain variable domain of TCR clone 326268 (TRAV14/DV4, TRAJ21)
CAMREGPENNFNKFYF

SEQ ID NO: 652536 - protein, 16 aa, Homo sapiens
  CDR3 for beta chain variable domain of TCR clone 326268 (TRBV7-2, TRBJ1-2)
CASSPTSGTSLGGYTF

SEQ ID NO: 652537 - protein, 12 aa, Homo sapiens
  CDR3 for alpha chain variable domain of TCR clone 326269 (TRAV16, TRAJ10)
CSRTGGGNKLTF

SEQ ID NO: 652538 - protein, 15 aa, Homo sapiens
  CDR3 for beta chain variable domain of TCR clone 326269 (TRBV7-3, TRBJ2-2)
CQQLKAGTLSGELFF

SEQ ID NO: 652539 - protein, 13 aa, Homo sapiens
  CDR3 for alpha chain variable domain of TCR clone 326270 (TRAV13-1, TRAJ11)
CAASIRGYRTLTF

SEQ ID NO: 652540 - protein, 17 aa, Homo sapiens
  CDR3 for beta chain variable domain of TCR clone 326270 (TRBV4-3, TRBJ1-2)
CASSSRLQAGGSVGYTF

SEQ ID NO: 652541 - protein, 12 aa, Homo sapiens
  CDR3 for alpha chain variable domain of TCR clone 326271 (TRAV22, TRAJ22)
CAPGGSARQLTF

SEQ ID NO: 652542 - protein, 21 aa, Homo sapiens
  CDR3 for beta chain variable domain of TCR clone 326271 (TRBV15, TRBJ1-6)
AWGTQPCTCVPPRGLNSPLHF

SEQ ID NO: 652543 - protein, 14 aa, Homo sapiens
  CDR3 for alpha chain variable domain of TCR clone 326272 (TRAV3, TRAJ32)
CCEFFGGATNKLIF

SEQ ID NO: 652544 - protein, 13 aa, Homo sapiens
  CDR3 for beta chain variable domain of TCR clone 326272 (TRBV20-1, TRBJ2-7)
CSARPSTNYEQYF

SEQ ID NO: 652545 - protein, 15 aa, Homo sapiens
  CDR3 for alpha chain variable domain of TCR clone 326273 (TRAV20, TRAJ10)
CAVQAGTGGGNKLTF

SEQ ID NO: 652546 - protein, 13 aa, Homo sapiens
  CDR3 for beta chain variable domain of TCR clone 326273 (TRBV7-9, TRBJ2-3)
CASSPGSTDTQYF

SEQ ID NO: 652547 - protein, 13 aa, Homo sapiens
  CDR3 for alpha chain variable domain of TCR clone 326274 (TRAV17, TRAJ34)
CATDLYNTDKLIF

SEQ ID NO: 652548 - protein, 15 aa, Homo sapiens
  CDR3 for beta chain variable domain of TCR clone 326274 (TRBV20-1, TRBJ2-3)
CSATATSGFTDTQYF

SEQ ID NO: 652549 - protein, 14 aa, Homo sapiens
  CDR3 for alpha chain variable domain of TCR clone 326275 (TRAV21, TRAJ37)
CAVKGSSNTGKLIF

SEQ ID NO: 652550 - protein, 14 aa, Homo sapiens
  CDR3 for beta chain variable domain of TCR clone 326275 (TRBV7-2, TRBJ2-1)
CASSRGGARNGQFF

SEQ ID NO: 652551 - protein, 15 aa, Homo sapiens
  CDR3 for alpha chain variable domain of TCR clone 326276 (TRAV26-1, TRAJ37)
CIVENGSGNTGKLIF

SEQ ID NO: 652552 - protein, 11 aa, Homo sapiens
  CDR3 for beta chain variable domain of TCR clone 326276 (TRBV6-3, TRBJ2-3)
CATGQADTQYF

SEQ ID NO: 652553 - protein, 16 aa, Homo sapiens
  CDR3 for alpha chain variable domain of TCR clone 326277 (TRAV14/DV4, TRAJ12)
CAMREVLMDSSYKLSF

SEQ ID NO: 652554 - protein, 14 aa, Homo sapiens
  CDR3 for beta chain variable domain of TCR clone 326277 (TRBV7-2, TRBJ2-5)
CASSFTQGQETQYF

SEQ ID NO: 652555 - protein, 23 aa, Homo sapiens
  CDR3 for alpha chain variable domain of TCR clone 326278 (TRAV26-1, TRAJ38)
CIADNAGNNHIQNPDPAVYQLRD

SEQ ID NO: 652556 - protein, 15 aa, Homo sapiens
  CDR3 for beta chain variable domain of TCR clone 326278 (TRBV27, TRBJ2-1)
CASSNGGGSPNEQFF

SEQ ID NO: 652557 - protein, 14 aa, Homo sapiens
  CDR3 for alpha chain variable domain of TCR clone 326279 (TRAV8-4, TRAJ9)
CAVRINAGGFKTIF

SEQ ID NO: 652558 - protein, 15 aa, Homo sapiens
  CDR3 for beta chain variable domain of TCR clone 326279 (TRBV10-2, TRBJ2-6)
CASSEQGTGANVLTF

SEQ ID NO: 652559 - protein, 14 aa, Homo sapiens
  CDR3 for alpha chain variable domain of TCR clone 326280 (TRAV12-2, TRAJ10)
CAVMITGGGNKLTF

SEQ ID NO: 652560 - protein, 12 aa, Homo sapiens
  CDR3 for beta chain variable domain of TCR clone 326280 (TRBV5-1, TRBJ2-1)
CASIGGYNEQFF

SEQ ID NO: 652561 - protein, 18 aa, Homo sapiens
  CDR3 for alpha chain variable domain of TCR clone 326281 (TRAV21, TRAJ52)
CAVRPSPAGGTSYGKLTF

SEQ ID NO: 652562 - protein, 15 aa, Homo sapiens
  CDR3 for beta chain variable domain of TCR clone 326281 (TRBV20-1, TRBJ2-7)
CSARDRVTGMDEQYF

SEQ ID NO: 652563 - protein, 14 aa, Homo sapiens
  CDR3 for alpha chain variable domain of TCR clone 326282 (TRAV12-1, TRAJ34)
CGEPASYNTDKLIF

SEQ ID NO: 652564 - protein, 11 aa, Homo sapiens
  CDR3 for beta chain variable domain of TCR clone 326282 (TRBV23-1, TRBJ2-7)
SSSGTGLEQYF

SEQ ID NO: 652565 - protein, 14 aa, Homo sapiens
  CDR3 for alpha chain variable domain of TCR clone 326283 (TRAV12-3, TRAJ11)
CAMATNSGYSTLTF

SEQ ID NO: 652566 - protein, 17 aa, Homo sapiens
  CDR3 for beta chain variable domain of TCR clone 326283 (TRBV28, TRBJ2-5)
CASSTPEGDALQETQYF

SEQ ID NO: 652567 - protein, 15 aa, Homo sapiens
  CDR3 for alpha chain variable domain of TCR clone 326284 (TRAV17, TRAJ56)
CATEPFTGANSKLTF

SEQ ID NO: 652568 - protein, 15 aa, Homo sapiens
  CDR3 for beta chain variable domain of TCR clone 326284 (TRBV28, TRBJ1-5)
CASSGTGGYVQPQHF

SEQ ID NO: 652569 - protein, 14 aa, Homo sapiens
  CDR3 for alpha chain variable domain of TCR clone 326285 (TRAV13-2, TRAJ15)
RAENPNQAGTARIF

SEQ ID NO: 652570 - protein, 16 aa, Homo sapiens
  CDR3 for beta chain variable domain of TCR clone 326285 (TRBV12-4, TRBJ1-2)
CASSPTATGKTRGYTF

SEQ ID NO: 652571 - protein, 14 aa, Homo sapiens
  CDR3 for alpha chain variable domain of TCR clone 326286 (TRAV14/DV4, TRAJ49)
CAFNRYLTGTQFYF

SEQ ID NO: 652572 - protein, 15 aa, Homo sapiens
  CDR3 for beta chain variable domain of TCR clone 326286 (TRBV5-1, TRBJ1-1)
CASSSTTGTNTEAFF

SEQ ID NO: 652573 - protein, 17 aa, Homo sapiens
  CDR3 for alpha chain variable domain of TCR clone 326287 (TRAV3, TRAJ38)
RAVRDCLNAGNNRKLIW

SEQ ID NO: 652574 - protein, 14 aa, Homo sapiens
  CDR3 for beta chain variable domain of TCR clone 326287 (TRBV5-5, TRBJ1-5)
CASSGQGVDQPQHF

SEQ ID NO: 652575 - protein, 14 aa, Homo sapiens
  CDR3 for alpha chain variable domain of TCR clone 326288 (TRAV1-2, TRAJ6)
CAVSLPGGSYIPTF

SEQ ID NO: 652576 - protein, 15 aa, Homo sapiens
  CDR3 for beta chain variable domain of TCR clone 326288 (TRBV28, TRBJ2-7)
CASSPGGSGFYEQYF

SEQ ID NO: 652577 - protein, 13 aa, Homo sapiens
  CDR3 for alpha chain variable domain of TCR clone 326289 (TRAV30, TRAJ29)
CCTEDSGNTPLVF

SEQ ID NO: 652578 - protein, 15 aa, Homo sapiens
  CDR3 for beta chain variable domain of TCR clone 326289 (TRBV6-1, TRBJ2-3)
CASSERGGITDTQYF

SEQ ID NO: 652579 - protein, 13 aa, Homo sapiens
  CDR3 for alpha chain variable domain of TCR clone 326290 (TRAV38-1, TRAJ52)
CAFRGTSYVKLTF

SEQ ID NO: 652580 - protein, 15 aa, Homo sapiens
  CDR3 for beta chain variable domain of TCR clone 326290 (TRBV7-8, TRBJ2-5)
CASSDAAGSQETQYF

SEQ ID NO: 652581 - protein, 14 aa, Homo sapiens
  CDR3 for alpha chain variable domain of TCR clone 326291 (TRAV12-2, TRAJ21)
CAVNKANNFNKFYF

SEQ ID NO: 652582 - protein, 14 aa, Homo sapiens
  CDR3 for beta chain variable domain of TCR clone 326291 (TRBV19, TRBJ2-1)
CASPTSVLSGEQFF

SEQ ID NO: 652583 - protein, 14 aa, Homo sapiens
  CDR3 for alpha chain variable domain of TCR clone 326292 (TRAV12-1, TRAJ9)
CVVTGYTGGFKTMF

SEQ ID NO: 652584 - protein, 13 aa, Homo sapiens
  CDR3 for beta chain variable domain of TCR clone 326292 (TRBV20-1, TRBJ1-1)
CSARAGGNTEAFF

SEQ ID NO: 652585 - protein, 15 aa, Homo sapiens
  CDR3 for alpha chain variable domain of TCR clone 326293 (TRAV12-2, TRAJ53)
CAVNGGGGGNYKLTF

SEQ ID NO: 652586 - protein, 13 aa, Homo sapiens
  CDR3 for beta chain variable domain of TCR clone 326293 (TRBV3-1, TRBJ1-1)
CASSPGVITEALF

SEQ ID NO: 652587 - protein, 10 aa, Homo sapiens
  CDR3 for alpha chain variable domain of TCR clone 326294 (TRAV39, TRAJ49)
CAVAGNQFYF

SEQ ID NO: 652588 - protein, 14 aa, Homo sapiens
  CDR3 for beta chain variable domain of TCR clone 326294 (TRBV7-2, TRBJ2-7)
CAGSPKTSFYEQYF

SEQ ID NO: 652589 - protein, 14 aa, Homo sapiens
  CDR3 for alpha chain variable domain of TCR clone 326295 (TRAV23/DV6, TRAJ22)
CAASVRGSARQLTF

SEQ ID NO: 652590 - protein, 17 aa, Homo sapiens
  CDR3 for beta chain variable domain of TCR clone 326295 (TRBV7-3, TRBJ2-3)
CASSLMKRMRGADTQYF

SEQ ID NO: 652591 - protein, 14 aa, Homo sapiens
  CDR3 for alpha chain variable domain of TCR clone 326296 (TRAV13-1, TRAJ35)
CAASKGRFGNVLHC

SEQ ID NO: 652592 - protein, 13 aa, Homo sapiens
  CDR3 for beta chain variable domain of TCR clone 326296 (TRBV7-3, TRBJ1-1)
CASSQDWGAEAFF

SEQ ID NO: 652593 - protein, 17 aa, Homo sapiens
  CDR3 for alpha chain variable domain of TCR clone 326297 (TRAV3, TRAJ42)
CAVRDRDYGGSQGNLIF

SEQ ID NO: 652594 - protein, 15 aa, Homo sapiens
  CDR3 for beta chain variable domain of TCR clone 326297 (TRBV6-6, TRBJ2-7)
CASSYSYGGSYEQYS

SEQ ID NO: 652595 - protein, 15 aa, Homo sapiens
  CDR3 for alpha chain variable domain of TCR clone 326298 (TRAV16, TRAJ50)
CALSGWETSYDKVIL

SEQ ID NO: 652596 - protein, 14 aa, Homo sapiens
  CDR3 for beta chain variable domain of TCR clone 326298 (TRBV18, TRBJ2-3)
CASSETSASDTQYF

SEQ ID NO: 652597 - protein, 14 aa, Homo sapiens
  CDR3 for alpha chain variable domain of TCR clone 326299 (TRAV8-3, TRAJ4)
CAVGAAGGYNKLIF

SEQ ID NO: 652598 - protein, 16 aa, Homo sapiens
  CDR3 for beta chain variable domain of TCR clone 326299 (TRBV7-2, TRBJ1-2)
CASSRQGGGANYGYAF

SEQ ID NO: 652599 - protein, 13 aa, Homo sapiens
  CDR3 for alpha chain variable domain of TCR clone 326300 (TRAV4, TRAJ33)
CLVGDMNNYQLMW

SEQ ID NO: 652600 - protein, 14 aa, Homo sapiens
  CDR3 for beta chain variable domain of TCR clone 326300 (TRBV7-9, TRBJ1-1)
CASSLGGANTEAFF

SEQ ID NO: 652601 - protein, 14 aa, Homo sapiens
  CDR3 for alpha chain variable domain of TCR clone 326301 (TRAV17, TRAJ34)
CATDSLEGTDKLIF

SEQ ID NO: 652602 - protein, 17 aa, Homo sapiens
  CDR3 for beta chain variable domain of TCR clone 326301 (TRBV2, TRBJ1-6)
CASSLRPGGLMTSPLHF

SEQ ID NO: 652603 - protein, 14 aa, Homo sapiens
  CDR3 for alpha chain variable domain of TCR clone 326302 (TRAV29/DV5, TRAJ49)
CAASAQNTGNQFYF

SEQ ID NO: 652604 - protein, 14 aa, Homo sapiens
  CDR3 for beta chain variable domain of TCR clone 326302 (TRBV19, TRBJ2-1)
CASPTFVLSGEQFF

SEQ ID NO: 652605 - protein, 13 aa, Homo sapiens
  CDR3 for alpha chain variable domain of TCR clone 326303 (TRAV13-2, TRAJ48)
CAKMDFGDEKLTF

SEQ ID NO: 652606 - protein, 15 aa, Homo sapiens
  CDR3 for beta chain variable domain of TCR clone 326303 (TRBV7-9, TRBJ1-6)
CASSSPGRGNSPLHF

SEQ ID NO: 652607 - protein, 14 aa, Homo sapiens
  CDR3 for alpha chain variable domain of TCR clone 326304 (TRAV17, TRAJ22)
CATVLSGSPRQLTF

SEQ ID NO: 652608 - protein, 13 aa, Homo sapiens
  CDR3 for beta chain variable domain of TCR clone 326304 (TRBV15, TRBJ1-6)
CATSGGLNSPLHF

SEQ ID NO: 652609 - protein, 18 aa, Homo sapiens
  CDR3 for alpha chain variable domain of TCR clone 326305 (TRAV12-3, TRAJ52)
CAMSRTNAGGTSYGKLTF

SEQ ID NO: 652610 - protein, 19 aa, Homo sapiens
  CDR3 for beta chain variable domain of TCR clone 326305 (TRBV25-1, TRBJ2-2)
CAILVYRVDRGRKTGELFF

SEQ ID NO: 652611 - protein, 16 aa, Homo sapiens
  CDR3 for alpha chain variable domain of TCR clone 326306 (TRAV30, TRAJ24)
CGTEIVDADSRGKFQF

SEQ ID NO: 652612 - protein, 15 aa, Homo sapiens
  CDR3 for beta chain variable domain of TCR clone 326306 (TRBV4-1, TRBJ2-7)
CASSQNTGRLYEQYF

SEQ ID NO: 652613 - protein, 14 aa, Homo sapiens
  CDR3 for alpha chain variable domain of TCR clone 326307 (TRAV35, TRAJ33)
CAGSSQDSNYQLIW

SEQ ID NO: 652614 - protein, 15 aa, Homo sapiens
  CDR3 for beta chain variable domain of TCR clone 326307 (TRBV29-1, TRBJ2-1)
CSVPTGLALYNEQFF

SEQ ID NO: 652615 - protein, 11 aa, Homo sapiens
  CDR3 for alpha chain variable domain of TCR clone 326308 (TRAV12-1, TRAJ21)
CVVNNFNKFYF

SEQ ID NO: 652616 - protein, 13 aa, Homo sapiens
  CDR3 for beta chain variable domain of TCR clone 326308 (TRBV24-1, TRBJ2-2)
CATSDWSTGELFF

SEQ ID NO: 652617 - protein, 11 aa, Homo sapiens
  CDR3 for alpha chain variable domain of TCR clone 326309 (TRAV1-1, TRAJ23)
CAVRQGGKLIF

SEQ ID NO: 652618 - protein, 13 aa, Homo sapiens
  CDR3 for beta chain variable domain of TCR clone 326309 (TRBV7-2, TRBJ2-7)
CASSSPSGSEQYF

SEQ ID NO: 652619 - protein, 16 aa, Homo sapiens
  CDR3 for alpha chain variable domain of TCR clone 326310 (TRAV3, TRAJ27)
CAVRDPQGTNAGKSTF

SEQ ID NO: 652620 - protein, 16 aa, Homo sapiens
  CDR3 for beta chain variable domain of TCR clone 326310 (TRBV13, TRBJ2-2)
CASSPRTGEHTGELFF

SEQ ID NO: 652621 - protein, 14 aa, Homo sapiens
  CDR3 for alpha chain variable domain of TCR clone 326311 (TRAV1-2, TRAJ16)
CAVNLFSDGQKLPF

SEQ ID NO: 652622 - protein, 14 aa, Homo sapiens
  CDR3 for beta chain variable domain of TCR clone 326311 (TRBV19, TRBJ2-7)
CASSVDSESYEQYF

SEQ ID NO: 652623 - protein, 14 aa, Homo sapiens
  CDR3 for alpha chain variable domain of TCR clone 326312 (TRAV13-1, TRAJ44)
CAAKATGTASKLTF

SEQ ID NO: 652624 - protein, 12 aa, Homo sapiens
  CDR3 for beta chain variable domain of TCR clone 326312 (TRBV7-8, TRBJ2-7)
SASSLGDREQYF

SEQ ID NO: 652625 - protein, 11 aa, Homo sapiens
  CDR3 for alpha chain variable domain of TCR clone 326313 (TRAV2, TRAJ20)
CAVAYDYKPSF

SEQ ID NO: 652626 - protein, 14 aa, Homo sapiens
  CDR3 for beta chain variable domain of TCR clone 326313 (TRBV27, TRBJ2-2)
CASRPGVNTGELFF

SEQ ID NO: 652627 - protein, 11 aa, Homo sapiens
  CDR3 for alpha chain variable domain of TCR clone 326314 (TRAV8-4, TRAJ20)
CAVTNVLTTTS

SEQ ID NO: 652628 - protein, 14 aa, Homo sapiens
  CDR3 for beta chain variable domain of TCR clone 326314 (TRBV7-6, TRBJ2-3)
CASSLGTVTDTQYF

SEQ ID NO: 652629 - protein, 15 aa, Homo sapiens
  CDR3 for alpha chain variable domain of TCR clone 326315 (TRAV12-2, TRAJ53)
CAVNGGGGSNDKLTF

SEQ ID NO: 652630 - protein, 15 aa, Homo sapiens
  CDR3 for beta chain variable domain of TCR clone 326315 (TRBV25-1, TRBJ1-4)
CASSPGDSTNERLFF

SEQ ID NO: 652631 - protein, 11 aa, Homo sapiens
  CDR3 for alpha chain variable domain of TCR clone 326316 (TRAV12-1, TRAJ30)
CVVNGQDKTIF

SEQ ID NO: 652632 - protein, 16 aa, Homo sapiens
  CDR3 for beta chain variable domain of TCR clone 326316 (TRBV24-1, TRBJ2-3)
CATSDAISGITDTQYF

SEQ ID NO: 652633 - protein, 15 aa, Homo sapiens
  CDR3 for alpha chain variable domain of TCR clone 326317 (TRAV38-1, TRAJ37)
CAFIFGSGNKGKPIF

SEQ ID NO: 652634 - protein, 12 aa, Homo sapiens
  CDR3 for beta chain variable domain of TCR clone 326317 (TRBV7-9, TRBJ2-7)
CASSLEGYEQYF

SEQ ID NO: 652635 - protein, 12 aa, Homo sapiens
  CDR3 for alpha chain variable domain of TCR clone 326318 (TRAV17, TRAJ53)
CATEGSNYKLTF

SEQ ID NO: 652636 - protein, 19 aa, Homo sapiens
  CDR3 for beta chain variable domain of TCR clone 326318 (TRBV5-1, TRBJ2-3)
CASSLWTSGGITAPDTQYF

SEQ ID NO: 652637 - protein, 18 aa, Homo sapiens
  CDR3 for alpha chain variable domain of TCR clone 326319 (TRAV3, TRAJ32)
CAVRDIRGYGGATNKLIF

SEQ ID NO: 652638 - protein, 15 aa, Homo sapiens
  CDR3 for beta chain variable domain of TCR clone 326319 (TRBV12-4, TRBJ2-2)
CASSLGVRHPGELFF

SEQ ID NO: 652639 - protein, 14 aa, Homo sapiens
  CDR3 for alpha chain variable domain of TCR clone 326320 (TRAV12-2, TRAJ44)
CAVNPAGTASKLTC

SEQ ID NO: 652640 - protein, 13 aa, Homo sapiens
  CDR3 for beta chain variable domain of TCR clone 326320 (TRBV20-1, TRBJ1-6)
CSAPSGVGSPLHF

SEQ ID NO: 652641 - protein, 14 aa, Homo sapiens
  CDR3 for alpha chain variable domain of TCR clone 326321 (TRAV8-4, TRAJ9)
CAVSEVNGGFKTIF

SEQ ID NO: 652642 - protein, 14 aa, Homo sapiens
  CDR3 for beta chain variable domain of TCR clone 326321 (TRBV5-1, TRBJ2-7)
CASSRGESLYEQYF

SEQ ID NO: 652643 - protein, 17 aa, Homo sapiens
  CDR3 for alpha chain variable domain of TCR clone 326322 (TRAV8-6, TRAJ58)
CAVSSWVGETSGSRLPF

SEQ ID NO: 652644 - protein, 15 aa, Homo sapiens
  CDR3 for beta chain variable domain of TCR clone 326322 (TRBV6-5, TRBJ2-1)
CASSYDAGAGNEQFF

SEQ ID NO: 652645 - protein, 14 aa, Homo sapiens
  CDR3 for alpha chain variable domain of TCR clone 326323 (TRAV12-2, TRAJ13)
CAVKKTGGYQKVTL

SEQ ID NO: 652646 - protein, 14 aa, Homo sapiens
  CDR3 for beta chain variable domain of TCR clone 326323 (TRBV25-1, TRBJ1-1)
CASTHLGGNTEAFF

SEQ ID NO: 652647 - protein, 16 aa, Homo sapiens
  CDR3 for alpha chain variable domain of TCR clone 326324 (TRAV3, TRAJ10)
CAVRDMRAGGGNKLTF

SEQ ID NO: 652648 - protein, 17 aa, Homo sapiens
  CDR3 for beta chain variable domain of TCR clone 326324 (TRBV4-2, TRBJ1-1)
CASTQCGGGSGNTEAFF

SEQ ID NO: 652649 - protein, 13 aa, Homo sapiens
  CDR3 for alpha chain variable domain of TCR clone 326325 (TRAV8-6, TRAJ16)
CAVSSPDGQKLLF

SEQ ID NO: 652650 - protein, 16 aa, Homo sapiens
  CDR3 for beta chain variable domain of TCR clone 326325 (TRBV12-5, TRBJ2-5)
CASGPRTSGNQETQYF

SEQ ID NO: 652651 - protein, 12 aa, Homo sapiens
  CDR3 for alpha chain variable domain of TCR clone 326326 (TRAV13-2, TRAJ23)
CAERHRGGKLIF

SEQ ID NO: 652652 - protein, 13 aa, Homo sapiens
  CDR3 for beta chain variable domain of TCR clone 326326 (TRBV7-2, TRBJ2-2)
CASSLAVTGELFF

SEQ ID NO: 652653 - protein, 14 aa, Homo sapiens
  CDR3 for alpha chain variable domain of TCR clone 326327 (TRAV8-4, TRAJ52)
CAVTTGTSYGKLTF

SEQ ID NO: 652654 - protein, 18 aa, Homo sapiens
  CDR3 for beta chain variable domain of TCR clone 326327 (TRBV18, TRBJ1-3)
CASSPRGGAGPSGNTIYF

SEQ ID NO: 652655 - protein, 16 aa, Homo sapiens
  CDR3 for alpha chain variable domain of TCR clone 326328 (TRAV8-3, TRAJ13)
CAVGAYPSGGYQQVTF

SEQ ID NO: 652656 - protein, 15 aa, Homo sapiens
  CDR3 for beta chain variable domain of TCR clone 326328 (TRBV19, TRBJ1-5)
CASSIVWADNQTQHF

SEQ ID NO: 652657 - protein, 16 aa, Homo sapiens
  CDR3 for alpha chain variable domain of TCR clone 326329 (TRAV16, TRAJ52)
CALSAAGGTSFGKLTF

SEQ ID NO: 652658 - protein, 12 aa, Homo sapiens
  CDR3 for beta chain variable domain of TCR clone 326329 (TRBV12-4, TRBJ1-3)
CASSFSGNTIYF

SEQ ID NO: 652659 - protein, 13 aa, Homo sapiens
  CDR3 for alpha chain variable domain of TCR clone 326330 (TRAV9-2, TRAJ58)
CSASGTSGSRLTF

SEQ ID NO: 652660 - protein, 14 aa, Homo sapiens
  CDR3 for beta chain variable domain of TCR clone 326330 (TRBV7-9, TRBJ2-1)
CASSPRDSLYEQFF

SEQ ID NO: 652661 - protein, 13 aa, Homo sapiens
  CDR3 for alpha chain variable domain of TCR clone 326331 (TRAV2, TRAJ29)
CADQNSGNTPLVF

SEQ ID NO: 652662 - protein, 13 aa, Homo sapiens
  CDR3 for beta chain variable domain of TCR clone 326331 (TRBV28, TRBJ1-2)
CASSPGNRNGYTF

SEQ ID NO: 652663 - protein, 12 aa, Homo sapiens
  CDR3 for alpha chain variable domain of TCR clone 326332 (TRAV10, TRAJ6)
CVVSEGSYIPTF

SEQ ID NO: 652664 - protein, 12 aa, Homo sapiens
  CDR3 for beta chain variable domain of TCR clone 326332 (TRBV7-9, TRBJ2-7)
CAISLEGYEQYF

SEQ ID NO: 652665 - protein, 15 aa, Homo sapiens
  CDR3 for alpha chain variable domain of TCR clone 326333 (TRAV16, TRAJ16)
CALQGGGSCGQKLLF

SEQ ID NO: 652666 - protein, 15 aa, Homo sapiens
  CDR3 for beta chain variable domain of TCR clone 326333 (TRBV20-1, TRBJ2-7)
CSARDRVSGMDEQYF

SEQ ID NO: 652667 - protein, 15 aa, Homo sapiens
  CDR3 for alpha chain variable domain of TCR clone 326334 (TRAV8-3, TRAJ27)
CAVGPSKTNAGKSTF

SEQ ID NO: 652668 - protein, 15 aa, Homo sapiens
  CDR3 for beta chain variable domain of TCR clone 326334 (TRBV7-2, TRBJ2-7)
CASSSGLAGGNEQYF

SEQ ID NO: 652669 - protein, 15 aa, Homo sapiens
  CDR3 for alpha chain variable domain of TCR clone 326335 (TRAV21, TRAJ53)
CATLNSGGSNYKLTF

SEQ ID NO: 652670 - protein, 15 aa, Homo sapiens
  CDR3 for beta chain variable domain of TCR clone 326335 (TRBV7-6, TRBJ2-1)
CASSSLAGEGNEQFF

SEQ ID NO: 652671 - protein, 12 aa, Homo sapiens
  CDR3 for alpha chain variable domain of TCR clone 326336 (TRAV13-1, TRAJ15)
CAASQAGTALIF

SEQ ID NO: 652672 - protein, 15 aa, Homo sapiens
  CDR3 for beta chain variable domain of TCR clone 326336 (TRBV5-1, TRBJ2-1)
CASSPPRAPYNEQFF

SEQ ID NO: 652673 - protein, 13 aa, Homo sapiens
  CDR3 for alpha chain variable domain of TCR clone 326337 (TRAV21, TRAJ20)
CAVGLRVDYKLSF

SEQ ID NO: 652674 - protein, 14 aa, Homo sapiens
  CDR3 for beta chain variable domain of TCR clone 326337 (TRBV11-2, TRBJ2-7)
CASSLGAGAYEQYF

SEQ ID NO: 652675 - protein, 15 aa, Homo sapiens
  CDR3 for alpha chain variable domain of TCR clone 326338 (TRAV38-2/DV8, TRAJ48)
CAYRSPESGNEKLTF

SEQ ID NO: 652676 - protein, 13 aa, Homo sapiens
  CDR3 for beta chain variable domain of TCR clone 326338 (TRBV4-2, TRBJ1-2)
CASSLSASGGYAF

SEQ ID NO: 652677 - protein, 14 aa, Homo sapiens
  CDR3 for alpha chain variable domain of TCR clone 326339 (TRAV12-2, TRAJ6)
CASKWGGGSYIPTY

SEQ ID NO: 652678 - protein, 13 aa, Homo sapiens
  CDR3 for beta chain variable domain of TCR clone 326339 (TRBV2, TRBJ1-1)
CASSEGGNTEAFF

SEQ ID NO: 652679 - protein, 15 aa, Homo sapiens
  CDR3 for alpha chain variable domain of TCR clone 326340 (TRAV27, TRAJ38)
CAARGNAGNNRKLIW

SEQ ID NO: 652680 - protein, 13 aa, Homo sapiens
  CDR3 for beta chain variable domain of TCR clone 326340 (TRBV28, TRBJ2-5)
CAGVSRGEETQYF

SEQ ID NO: 652681 - protein, 14 aa, Homo sapiens
  CDR3 for alpha chain variable domain of TCR clone 326341 (TRAV26-1, TRAJ34)
CIVRVAYNTDKRIF

SEQ ID NO: 652682 - protein, 13 aa, Homo sapiens
  CDR3 for beta chain variable domain of TCR clone 326341 (TRBV4-2, TRBJ1-1)
CASSQAGNTEAFF

SEQ ID NO: 652683 - protein, 13 aa, Homo sapiens
  CDR3 for alpha chain variable domain of TCR clone 326342 (TRAV21, TRAJ20)
CAVGLRVDYKLSF

SEQ ID NO: 652684 - protein, 13 aa, Homo sapiens
  CDR3 for beta chain variable domain of TCR clone 326342 (TRBV5-1, TRBJ1-1)
CASSVGSDNEAFF

SEQ ID NO: 652685 - protein, 16 aa, Homo sapiens
  CDR3 for alpha chain variable domain of TCR clone 326343 (TRAV23/DV6, TRAJ9)
CAASIGGNTGGFKTTF

SEQ ID NO: 652686 - protein, 17 aa, Homo sapiens
  CDR3 for beta chain variable domain of TCR clone 326343 (TRBV13, TRBJ2-3)
CASSLSRVAGGRNTQYF

SEQ ID NO: 652687 - protein, 14 aa, Homo sapiens
  CDR3 for alpha chain variable domain of TCR clone 326344 (TRAV12-1, TRAJ12)
CVVTRIDSSYKLIF

SEQ ID NO: 652688 - protein, 15 aa, Homo sapiens
  CDR3 for beta chain variable domain of TCR clone 326344 (TRBV7-3, TRBJ2-2)
CASSETGQGTGELFF

SEQ ID NO: 652689 - protein, 17 aa, Homo sapiens
  CDR3 for alpha chain variable domain of TCR clone 326345 (TRAV17, TRAJ7)
CATLGRLAFGKGNQVVD

SEQ ID NO: 652690 - protein, 13 aa, Homo sapiens
  CDR3 for beta chain variable domain of TCR clone 326345 (TRBV12-4, TRBJ2-7)
CASSLERVREQYF

SEQ ID NO: 652691 - protein, 14 aa, Homo sapiens
  CDR3 for alpha chain variable domain of TCR clone 326346 (TRAV1-2, TRAJ16)
CAVNRFSDGQKMLF

SEQ ID NO: 652692 - protein, 13 aa, Homo sapiens
  CDR3 for beta chain variable domain of TCR clone 326346 (TRBV19, TRBJ2-7)
CASSIDRTYEQYF

SEQ ID NO: 652693 - protein, 13 aa, Homo sapiens
  CDR3 for alpha chain variable domain of TCR clone 326347 (TRAV35, TRAJ42)
CAGFPGSQGNLIF

SEQ ID NO: 652694 - protein, 13 aa, Homo sapiens
  CDR3 for beta chain variable domain of TCR clone 326347 (TRBV5-1, TRBJ1-2)
CASSFQGNYGYTF

SEQ ID NO: 652695 - protein, 14 aa, Homo sapiens
  CDR3 for alpha chain variable domain of TCR clone 326348 (TRAV1-2, TRAJ8)
CAVREDTGFRKLVF

SEQ ID NO: 652696 - protein, 15 aa, Homo sapiens
  CDR3 for beta chain variable domain of TCR clone 326348 (TRBV6-1, TRBJ2-7)
CASSESMGDFYEQYF

SEQ ID NO: 652697 - protein, 14 aa, Homo sapiens
  CDR3 for alpha chain variable domain of TCR clone 326349 (TRAV13-2, TRAJ6)
CAERGSGGSYIPTF

SEQ ID NO: 652698 - protein, 16 aa, Homo sapiens
  CDR3 for beta chain variable domain of TCR clone 326349 (TRBV19, TRBJ2-1)
CASSKAGPSSYNERFF

SEQ ID NO: 652699 - protein, 12 aa, Homo sapiens
  CDR3 for alpha chain variable domain of TCR clone 326350 (TRAV13-1, TRAJ21)
CAAKEGFNKFYF

SEQ ID NO: 652700 - protein, 18 aa, Homo sapiens
  CDR3 for beta chain variable domain of TCR clone 326350 (TRBV20-1, TRBJ2-6)
CSAETTPTHGSGANVLNF

SEQ ID NO: 652701 - protein, 16 aa, Homo sapiens
  CDR3 for alpha chain variable domain of TCR clone 326351 (TRAV1-1, TRAJ29)
CAVRSTRNSGNTPLVF

SEQ ID NO: 652702 - protein, 15 aa, Homo sapiens
  CDR3 for beta chain variable domain of TCR clone 326351 (TRBV11-2, TRBJ1-6)
CASTLRGTGNSPLHF

SEQ ID NO: 652703 - protein, 17 aa, Homo sapiens
  CDR3 for alpha chain variable domain of TCR clone 326352 (TRAV3, TRAJ38)
CAGRDCLNAGNNRKLIW

SEQ ID NO: 652704 - protein, 15 aa, Homo sapiens
  CDR3 for beta chain variable domain of TCR clone 326352 (TRBV27, TRBJ2-1)
CASSNGGGSSNEQFF

SEQ ID NO: 652705 - protein, 11 aa, Homo sapiens
  CDR3 for alpha chain variable domain of TCR clone 326353 (TRAV3, TRAJ21)
CAVGNFNKFYF

SEQ ID NO: 652706 - protein, 16 aa, Homo sapiens
  CDR3 for beta chain variable domain of TCR clone 326353 (TRBV28, TRBJ1-5)
CASSLTGQGWNQPQHF

SEQ ID NO: 652707 - protein, 12 aa, Homo sapiens
  CDR3 for alpha chain variable domain of TCR clone 326354 (TRAV3, TRAJ27)
CAVKDKAGKSTF

SEQ ID NO: 652708 - protein, 14 aa, Homo sapiens
  CDR3 for beta chain variable domain of TCR clone 326354 (TRBV5-1, TRBJ1-2)
CASSVDSTNYGYTF

SEQ ID NO: 652709 - protein, 15 aa, Homo sapiens
  CDR3 for alpha chain variable domain of TCR clone 326355 (TRAV12-3, TRAJ13)
CAMSALSGGYQKVTF

SEQ ID NO: 652710 - protein, 18 aa, Homo sapiens
  CDR3 for beta chain variable domain of TCR clone 326355 (TRBV3-1, TRBJ2-7)
CASSQEGGGRSWHYEQYF

SEQ ID NO: 652711 - protein, 15 aa, Homo sapiens
  CDR3 for alpha chain variable domain of TCR clone 326356 (TRAV26-1, TRAJ29)
CIVRVAGSGNTPLVF

SEQ ID NO: 652712 - protein, 15 aa, Homo sapiens
  CDR3 for beta chain variable domain of TCR clone 326356 (TRBV20-1, TRBJ2-7)
CSARDRVSGMDEQYF

SEQ ID NO: 652713 - protein, 14 aa, Homo sapiens
  CDR3 for alpha chain variable domain of TCR clone 326357 (TRAV12-2, TRAJ13)
CAVKKTGGYQKVAF

SEQ ID NO: 652714 - protein, 16 aa, Homo sapiens
  CDR3 for beta chain variable domain of TCR clone 326357 (TRBV2, TRBJ2-1)
CASRSPAGGKYNEQFF

SEQ ID NO: 652715 - protein, 14 aa, Homo sapiens
  CDR3 for alpha chain variable domain of TCR clone 326358 (TRAV26-1, TRAJ45)
CIEVTGGGADGLTF

SEQ ID NO: 652716 - protein, 15 aa, Homo sapiens
  CDR3 for beta chain variable domain of TCR clone 326358 (TRBV7-2, TRBJ2-7)
CASSLSSGRTYEQYF

SEQ ID NO: 652717 - protein, 15 aa, Homo sapiens
  CDR3 for alpha chain variable domain of TCR clone 326359 (TRAV13-1, TRAJ32)
CAASIYGGATNKLIF

SEQ ID NO: 652718 - protein, 12 aa, Homo sapiens
  CDR3 for beta chain variable domain of TCR clone 326359 (TRBV7-6, TRBJ2-3)
CARSTGTDTQYF

SEQ ID NO: 652719 - protein, 13 aa, Homo sapiens
  CDR3 for alpha chain variable domain of TCR clone 326360 (TRAV21, TRAJ57)
CAVTQGGSEKLVF

SEQ ID NO: 652720 - protein, 18 aa, Homo sapiens
  CDR3 for beta chain variable domain of TCR clone 326360 (TRBV29-1, TRBJ2-7)
CSVEDAETVRPTSSTSGR

SEQ ID NO: 652721 - protein, 12 aa, Homo sapiens
  CDR3 for alpha chain variable domain of TCR clone 326361 (TRAV8-3, TRAJ26)
CAGDNYGQNFVF

SEQ ID NO: 652722 - protein, 16 aa, Homo sapiens
  CDR3 for beta chain variable domain of TCR clone 326361 (TRBV2, TRBJ2-1)
CASSVGGSLSYNEQFF

SEQ ID NO: 652723 - protein, 14 aa, Homo sapiens
  CDR3 for alpha chain variable domain of TCR clone 326362 (TRAV36/DV7, TRAJ44)
CCGANTGTASKLTF

SEQ ID NO: 652724 - protein, 16 aa, Homo sapiens
  CDR3 for beta chain variable domain of TCR clone 326362 (TRBV7-9, TRBJ1-2)
CASSLGFSAGEDGYTF

SEQ ID NO: 652725 - protein, 11 aa, Homo sapiens
  CDR3 for alpha chain variable domain of TCR clone 326363 (TRAV12-2, TRAJ23)
CARGRGGKLIF

SEQ ID NO: 652726 - protein, 15 aa, Homo sapiens
  CDR3 for beta chain variable domain of TCR clone 326363 (TRBV7-2, TRBJ1-2)
CASSLVSGGDYGYTF

SEQ ID NO: 652727 - protein, 18 aa, Homo sapiens
  CDR3 for alpha chain variable domain of TCR clone 326364 (TRAV21, TRAJ52)
SAVRPSPAGGTSYGKLTF

SEQ ID NO: 652728 - protein, 15 aa, Homo sapiens
  CDR3 for beta chain variable domain of TCR clone 326364 (TRBV7-9, TRBJ2-7)
CASSSSGLAVYEQYF

SEQ ID NO: 652729 - protein, 16 aa, Homo sapiens
  CDR3 for alpha chain variable domain of TCR clone 326365 (TRAV1-2, TRAJ10)
CAVRDQGGGVGNKLTF

SEQ ID NO: 652730 - protein, 14 aa, Homo sapiens
  CDR3 for beta chain variable domain of TCR clone 326365 (TRBV15, TRBJ2-7)
CATSPDRGLYEQYF

SEQ ID NO: 652731 - protein, 11 aa, Homo sapiens
  CDR3 for alpha chain variable domain of TCR clone 326366 (TRAV27, TRAJ20)
CAGLNDYKLSF

SEQ ID NO: 652732 - protein, 15 aa, Homo sapiens
  CDR3 for beta chain variable domain of TCR clone 326366 (TRBV27, TRBJ2-1)
CASSNGGGSSNEQFF

SEQ ID NO: 652733 - protein, 18 aa, Homo sapiens
  CDR3 for alpha chain variable domain of TCR clone 326367 (TRAV21, TRAJ52)
CAVRPSPAGCTSYGKLTF

SEQ ID NO: 652734 - protein, 15 aa, Homo sapiens
  CDR3 for beta chain variable domain of TCR clone 326367 (TRBV28, TRBJ2-1)
CASSIIAGGRSEQFF

SEQ ID NO: 652735 - protein, 16 aa, Homo sapiens
  CDR3 for alpha chain variable domain of TCR clone 326368 (TRAV3, TRAJ37)
CAVRVRGSGNTGQLIF

SEQ ID NO: 652736 - protein, 13 aa, Homo sapiens
  CDR3 for beta chain variable domain of TCR clone 326368 (TRBV14, TRBJ2-1)
CASSQDRRNEQFF

SEQ ID NO: 652737 - protein, 13 aa, Homo sapiens
  CDR3 for alpha chain variable domain of TCR clone 326369 (TRAV36/DV7, TRAJ38)
CVANAGNNRKLIW

SEQ ID NO: 652738 - protein, 14 aa, Homo sapiens
  CDR3 for beta chain variable domain of TCR clone 326369 (TRBV7-2, TRBJ2-7)
CASSLRCEVNEQYF

SEQ ID NO: 652739 - protein, 17 aa, Homo sapiens
  CDR3 for alpha chain variable domain of TCR clone 326370 (TRAV8-6, TRAJ58)
CAVSSWVGETSGSRLTF

SEQ ID NO: 652740 - protein, 15 aa, Homo sapiens
  CDR3 for beta chain variable domain of TCR clone 326370 (TRBV7-6, TRBJ1-5)
CASSQSSGINQPQHF

SEQ ID NO: 652741 - protein, 14 aa, Homo sapiens
  CDR3 for alpha chain variable domain of TCR clone 326371 (TRAV12-3, TRAJ10)
SHLPLTGGGNKLTF

SEQ ID NO: 652742 - protein, 12 aa, Homo sapiens
  CDR3 for beta chain variable domain of TCR clone 326371 (TRBV10-3, TRBJ2-1)
CAIHTGHNEQFF

SEQ ID NO: 652743 - protein, 14 aa, Homo sapiens
  CDR3 for alpha chain variable domain of TCR clone 326372 (TRAV12-2, TRAJ6)
CASKWGGGSYIPTF

SEQ ID NO: 652744 - protein, 15 aa, Homo sapiens
  CDR3 for beta chain variable domain of TCR clone 326372 (TRBV7-9, TRBJ1-4)
CASSRTGGFNEKLFF

SEQ ID NO: 652745 - protein, 14 aa, Homo sapiens
  CDR3 for alpha chain variable domain of TCR clone 326373 (TRAV17, TRAJ11)
CATDARSGYSTLTF

SEQ ID NO: 652746 - protein, 16 aa, Homo sapiens
  CDR3 for beta chain variable domain of TCR clone 326373 (TRBV14, TRBJ1-5)
CDSSLSRVHSNQPQHF

SEQ ID NO: 652747 - protein, 12 aa, Homo sapiens
  CDR3 for alpha chain variable domain of TCR clone 326374 (TRAV1-2, TRAJ29)
CAVPSGNTPLVF

SEQ ID NO: 652748 - protein, 16 aa, Homo sapiens
  CDR3 for beta chain variable domain of TCR clone 326374 (TRBV4-1, TRBJ2-7)
CASSLTAGQATYEQYF

SEQ ID NO: 652749 - protein, 12 aa, Homo sapiens
  CDR3 for alpha chain variable domain of TCR clone 326375 (TRAV21, TRAJ13)
PGPSGCYQKVTF

SEQ ID NO: 652750 - protein, 15 aa, Homo sapiens
  CDR3 for beta chain variable domain of TCR clone 326375 (TRBV27, TRBJ2-5)
CASSLYPRGGETQYF

SEQ ID NO: 652751 - protein, 14 aa, Homo sapiens
  CDR3 for alpha chain variable domain of TCR clone 326376 (TRAV4, TRAJ6)
CLVGEAGGSYIPTF

SEQ ID NO: 652752 - protein, 19 aa, Homo sapiens
  CDR3 for beta chain variable domain of TCR clone 326376 (TRBV25-1, TRBJ2-2)
CAVLVYRVDRGRKTGELFF

SEQ ID NO: 652753 - protein, 15 aa, Homo sapiens
  CDR3 for alpha chain variable domain of TCR clone 326377 (TRAV8-4, TRAJ3)
CAVTGENLVQQCFQD

SEQ ID NO: 652754 - protein, 16 aa, Homo sapiens
  CDR3 for beta chain variable domain of TCR clone 326377 (TRBV4-2, TRBJ1-1)
CASSQAGFGMNTEAFI

SEQ ID NO: 652755 - protein, 15 aa, Homo sapiens
  CDR3 for alpha chain variable domain of TCR clone 326378 (TRAV26-1, TRAJ22)
CIVRVSFWFCKATDL

SEQ ID NO: 652756 - protein, 16 aa, Homo sapiens
  CDR3 for beta chain variable domain of TCR clone 326378 (TRBV7-7, TRBJ2-1)
CASSLASGTSYNEQFF

SEQ ID NO: 652757 - protein, 13 aa, Homo sapiens
  CDR3 for alpha chain variable domain of TCR clone 326379 (TRAV12-2, TRAJ47)
CAVFMVYGNKLVF

SEQ ID NO: 652758 - protein, 14 aa, Homo sapiens
  CDR3 for beta chain variable domain of TCR clone 326379 (TRBV4-1, TRBJ1-5)
CASSQGPTNQPQHF

SEQ ID NO: 652759 - protein, 12 aa, Homo sapiens
  CDR3 for alpha chain variable domain of TCR clone 326380 (TRAV16, TRAJ10)
CSRTGGGNKLTF

SEQ ID NO: 652760 - protein, 13 aa, Homo sapiens
  CDR3 for beta chain variable domain of TCR clone 326380 (TRBV15, TRBJ2-7)
CANSTTGHYEQYF

SEQ ID NO: 652761 - protein, 10 aa, Homo sapiens
  CDR3 for alpha chain variable domain of TCR clone 326381 (TRAV12-2, TRAJ16)
CAVRGQKLLF

SEQ ID NO: 652762 - protein, 15 aa, Homo sapiens
  CDR3 for beta chain variable domain of TCR clone 326381 (TRBV7-9, TRBJ2-2)
CASGPLDTFPGELFF

SEQ ID NO: 652763 - protein, 15 aa, Homo sapiens
  CDR3 for alpha chain variable domain of TCR clone 326382 (TRAV8-4, TRAJ11)
CAVSRAVSGYSTLTF

SEQ ID NO: 652764 - protein, 13 aa, Homo sapiens
  CDR3 for beta chain variable domain of TCR clone 326382 (TRBV10-3, TRBJ2-7)
CASKLAVNYEQYF

SEQ ID NO: 652765 - protein, 12 aa, Homo sapiens
  CDR3 for alpha chain variable domain of TCR clone 326383 (TRAV12-3, TRAJ17)
CAMTLTGNKLTF

SEQ ID NO: 652766 - protein, 15 aa, Homo sapiens
  CDR3 for beta chain variable domain of TCR clone 326383 (TRBV20-1, TRBJ2-7)
CGARDRASGMDEQYF

SEQ ID NO: 652767 - protein, 11 aa, Homo sapiens
  CDR3 for alpha chain variable domain of TCR clone 326384 (TRAV16, TRAJ23)
CALGGGGKLIF

SEQ ID NO: 652768 - protein, 13 aa, Homo sapiens
  CDR3 for beta chain variable domain of TCR clone 326384 (TRBV19, TRBJ1-2)
CASSVPGQDGYTF

SEQ ID NO: 652769 - protein, 14 aa, Homo sapiens
  CDR3 for alpha chain variable domain of TCR clone 326385 (TRAV3, TRAJ32)
CCVRRAGATNKLIF

SEQ ID NO: 652770 - protein, 12 aa, Homo sapiens
  CDR3 for beta chain variable domain of TCR clone 326385 (TRBV6-1, TRBJ2-7)
CASSDYSYEQYF

SEQ ID NO: 652771 - protein, 17 aa, Homo sapiens
  CDR3 for alpha chain variable domain of TCR clone 326386 (TRAV26-1, TRAJ37)
CIVRVITVSSNTGKLIF

SEQ ID NO: 652772 - protein, 13 aa, Homo sapiens
  CDR3 for beta chain variable domain of TCR clone 326386 (TRBV2, TRBJ1-1)
CASSEGGNTEAFF

SEQ ID NO: 652773 - protein, 12 aa, Homo sapiens
  CDR3 for alpha chain variable domain of TCR clone 326387 (TRAV21, TRAJ31)
CAVWRNNARLMF

SEQ ID NO: 652774 - protein, 16 aa, Homo sapiens
  CDR3 for beta chain variable domain of TCR clone 326387 (TRBV27, TRBJ2-5)
CASSYGPGGQKETQYF

SEQ ID NO: 652775 - protein, 14 aa, Homo sapiens
  CDR3 for alpha chain variable domain of TCR clone 326388 (TRAV12-2, TRAJ17)
CAVLFKAAGNKLTL

SEQ ID NO: 652776 - protein, 15 aa, Homo sapiens
  CDR3 for beta chain variable domain of TCR clone 326388 (TRBV4-3, TRBJ1-1)
CASSQELGRGTEAFF

SEQ ID NO: 652777 - protein, 21 aa, Homo sapiens
  CDR3 for alpha chain variable domain of TCR clone 326389 (TRAV25, TRAJ47)
TATQTTDVGTYFWEYGNKLVF

SEQ ID NO: 652778 - protein, 16 aa, Homo sapiens
  CDR3 for beta chain variable domain of TCR clone 326389 (TRBV6-6, TRBJ2-1)
CASSWGVQGPYNEQFF

SEQ ID NO: 652779 - protein, 16 aa, Homo sapiens
  CDR3 for alpha chain variable domain of TCR clone 326390 (TRAV12-2, TRAJ28)
CAVIRGSGAGSYQLTL

SEQ ID NO: 652780 - protein, 13 aa, Homo sapiens
  CDR3 for beta chain variable domain of TCR clone 326390 (TRBV7-9, TRBJ2-3)
CASSPGSTDTQYF

SEQ ID NO: 652781 - protein, 13 aa, Homo sapiens
  CDR3 for alpha chain variable domain of TCR clone 326391 (TRAV13-1, TRAJ10)
CAALEGGGNKLTF

SEQ ID NO: 652782 - protein, 17 aa, Homo sapiens
  CDR3 for beta chain variable domain of TCR clone 326391 (TRBV7-9, TRBJ2-5)
CASSPGLAGGGRETQYF

SEQ ID NO: 652783 - protein, 23 aa, Homo sapiens
  CDR3 for alpha chain variable domain of TCR clone 326392 (TRAV4, TRAJ26)
IPADRKSSTLSLPRVYYGQNFVL

SEQ ID NO: 652784 - protein, 13 aa, Homo sapiens
  CDR3 for beta chain variable domain of TCR clone 326392 (TRBV7-2, TRBJ1-1)
CASSRKMNTEAFF

SEQ ID NO: 652785 - protein, 20 aa, Homo sapiens
  CDR3 for alpha chain variable domain of TCR clone 326393 (TRAV4, TRAJ29)
CCVLLPRGCVPFSGNTPLVF

SEQ ID NO: 652786 - protein, 17 aa, Homo sapiens
  CDR3 for beta chain variable domain of TCR clone 326393 (TRBV13, TRBJ2-3)
CASSLSRVAGGRNTQYF

SEQ ID NO: 652787 - protein, 15 aa, Homo sapiens
  CDR3 for alpha chain variable domain of TCR clone 326394 (TRAV21, TRAJ53)
CATLNSGGSNYKLTF

SEQ ID NO: 652788 - protein, 16 aa, Homo sapiens
  CDR3 for beta chain variable domain of TCR clone 326394 (TRBV12-4, TRBJ1-5)
CASSRPVGGTNQPQHF

SEQ ID NO: 652789 - protein, 16 aa, Homo sapiens
  CDR3 for alpha chain variable domain of TCR clone 326395 (TRAV20, TRAJ22)
CAVQASSSGSARQLTF

SEQ ID NO: 652790 - protein, 16 aa, Homo sapiens
  CDR3 for beta chain variable domain of TCR clone 326395 (TRBV7-3, TRBJ2-2)
CASSLKRGALSGELFF

SEQ ID NO: 652791 - protein, 14 aa, Homo sapiens
  CDR3 for alpha chain variable domain of TCR clone 326396 (TRAV12-3, TRAJ10)
SHLPLTGGGNKLTF

SEQ ID NO: 652792 - protein, 14 aa, Homo sapiens
  CDR3 for beta chain variable domain of TCR clone 326396 (TRBV7-2, TRBJ2-2)
CASSLNSNTGEMFF

SEQ ID NO: 652793 - protein, 15 aa, Homo sapiens
  CDR3 for alpha chain variable domain of TCR clone 326397 (TRAV27, TRAJ38)
CAARRNAGNNRKLIW

SEQ ID NO: 652794 - protein, 14 aa, Homo sapiens
  CDR3 for beta chain variable domain of TCR clone 326397 (TRBV7-3, TRBJ2-1)
CASSLAGGTNEQFF

SEQ ID NO: 652795 - protein, 16 aa, Homo sapiens
  CDR3 for alpha chain variable domain of TCR clone 326398 (TRAV13-1, TRAJ22)
CAAKGGRSGSARQLTF

SEQ ID NO: 652796 - protein, 15 aa, Homo sapiens
  CDR3 for beta chain variable domain of TCR clone 326398 (TRBV9, TRBJ1-6)
CASSVAGTGDSPLHC

SEQ ID NO: 652797 - protein, 16 aa, Homo sapiens
  CDR3 for alpha chain variable domain of TCR clone 326399 (TRAV16, TRAJ4)
CALGRMFSGGYNKLIF

SEQ ID NO: 652798 - protein, 18 aa, Homo sapiens
  CDR3 for beta chain variable domain of TCR clone 326399 (TRBV24-1, TRBJ2-3)
CATSDPGTGATDTSILAQ

SEQ ID NO: 652799 - protein, 12 aa, Homo sapiens
  CDR3 for alpha chain variable domain of TCR clone 326400 (TRAV26-2, TRAJ43)
CILAYNNNDMRF

SEQ ID NO: 652800 - protein, 14 aa, Homo sapiens
  CDR3 for beta chain variable domain of TCR clone 326400 (TRBV11-2, TRBJ1-2)
CASSLGTANYGYTF

SEQ ID NO: 652801 - protein, 15 aa, Homo sapiens
  CDR3 for alpha chain variable domain of TCR clone 326401 (TRAV26-2, TRAJ13)
CILRDLSGGYQKVTF

SEQ ID NO: 652802 - protein, 12 aa, Homo sapiens
  CDR3 for beta chain variable domain of TCR clone 326401 (TRBV2, TRBJ2-7)
CASSDPDYEQYF

SEQ ID NO: 652803 - protein, 14 aa, Homo sapiens
  CDR3 for alpha chain variable domain of TCR clone 326402 (TRAV12-2, TRAJ13)
CAVKKTGGYQKVTF

SEQ ID NO: 652804 - protein, 16 aa, Homo sapiens
  CDR3 for beta chain variable domain of TCR clone 326402 (TRBV7-6, TRBJ2-3)
CASSPLAGGSTDTQYF

SEQ ID NO: 652805 - protein, 16 aa, Homo sapiens
  CDR3 for alpha chain variable domain of TCR clone 326403 (TRAV16, TRAJ4)
CALSRMFSGGYNKLIF

SEQ ID NO: 652806 - protein, 16 aa, Homo sapiens
  CDR3 for beta chain variable domain of TCR clone 326403 (TRBV12-4, TRBJ1-5)
CASSRPVAGSNQPQHF

SEQ ID NO: 652807 - protein, 11 aa, Homo sapiens
  CDR3 for alpha chain variable domain of TCR clone 326404 (TRAV12-3, TRAJ43)
CAMSVSNDMRF

SEQ ID NO: 652808 - protein, 15 aa, Homo sapiens
  CDR3 for beta chain variable domain of TCR clone 326404 (TRBV5-1, TRBJ2-1)
CASSPPRASYNEQFF

SEQ ID NO: 652809 - protein, 14 aa, Homo sapiens
  CDR3 for alpha chain variable domain of TCR clone 326405 (TRAV12-3, TRAJ15)
CAMIPPQAGTALIF

SEQ ID NO: 652810 - protein, 12 aa, Homo sapiens
  CDR3 for beta chain variable domain of TCR clone 326405 (TRBV7-9, TRBJ2-7)
CASSIKREEQYF

SEQ ID NO: 652811 - protein, 16 aa, Homo sapiens
  CDR3 for alpha chain variable domain of TCR clone 326406 (TRAV1-1, TRAJ29)
CAVRSTRNSGNTPLVF

SEQ ID NO: 652812 - protein, 14 aa, Homo sapiens
  CDR3 for beta chain variable domain of TCR clone 326406 (TRBV7-2, TRBJ2-7)
FASSPKTSFYEQYF

SEQ ID NO: 652813 - protein, 10 aa, Homo sapiens
  CDR3 for alpha chain variable domain of TCR clone 326407 (TRAV8-4, TRAJ43)
CAVSADDMRF

SEQ ID NO: 652814 - protein, 15 aa, Homo sapiens
  CDR3 for beta chain variable domain of TCR clone 326407 (TRBV5-1, TRBJ2-3)
CASSVTSGSTNTQYF

SEQ ID NO: 652815 - protein, 16 aa, Homo sapiens
  CDR3 for alpha chain variable domain of TCR clone 326408 (TRAV21, TRAJ45)
CAVSWGSGGGADGVTF

SEQ ID NO: 652816 - protein, 14 aa, Homo sapiens
  CDR3 for beta chain variable domain of TCR clone 326408 (TRBV4-2, TRBJ1-2)
CASSPGGSNYGYTF

SEQ ID NO: 652817 - protein, 17 aa, Homo sapiens
  CDR3 for alpha chain variable domain of TCR clone 326409 (TRAV3, TRAJ42)
CAVRDSDYGGSQGNLIF

SEQ ID NO: 652818 - protein, 15 aa, Homo sapiens
  CDR3 for beta chain variable domain of TCR clone 326409 (TRBV2, TRBJ2-7)
CASSEGLARSYEQYF

SEQ ID NO: 652819 - protein, 15 aa, Homo sapiens
  CDR3 for alpha chain variable domain of TCR clone 326410 (TRAV17, TRAJ52)
CATEAGGTSYGKQTF

SEQ ID NO: 652820 - protein, 14 aa, Homo sapiens
  CDR3 for beta chain variable domain of TCR clone 326410 (TRBV28, TRBJ1-5)
CASSLGVLVKPQHF

SEQ ID NO: 652821 - protein, 15 aa, Homo sapiens
  CDR3 for alpha chain variable domain of TCR clone 326411 (TRAV21, TRAJ22)
CAVRLFFWFCKATDL

SEQ ID NO: 652822 - protein, 14 aa, Homo sapiens
  CDR3 for beta chain variable domain of TCR clone 326411 (TRBV19, TRBJ1-5)
CASSAPDSFLSQHF

SEQ ID NO: 652823 - protein, 15 aa, Homo sapiens
  CDR3 for alpha chain variable domain of TCR clone 326412 (TRAV9-2, TRAJ9)
CALSLTNTGGFKTIF

SEQ ID NO: 652824 - protein, 16 aa, Homo sapiens
  CDR3 for beta chain variable domain of TCR clone 326412 (TRBV27, TRBJ2-2)
CASSFRGLVRTGELFF

SEQ ID NO: 652825 - protein, 15 aa, Homo sapiens
  CDR3 for alpha chain variable domain of TCR clone 326413 (TRAV30, TRAJ13)
CGTQGVTGGYQKVTF

SEQ ID NO: 652826 - protein, 12 aa, Homo sapiens
  CDR3 for beta chain variable domain of TCR clone 326413 (TRBV11-2, TRBJ2-2)
CASSLGGGELFF

SEQ ID NO: 652827 - protein, 11 aa, Homo sapiens
  CDR3 for alpha chain variable domain of TCR clone 326414 (TRAV21, TRAJ48)
CAVDGNENLTF

SEQ ID NO: 652828 - protein, 16 aa, Homo sapiens
  CDR3 for beta chain variable domain of TCR clone 326414 (TRBV12-4, TRBJ1-5)
CASSSGPRGSKQPQHF

SEQ ID NO: 652829 - protein, 11 aa, Homo sapiens
  CDR3 for alpha chain variable domain of TCR clone 326415 (TRAV12-2, TRAJ33)
CAVGSKYQLIW

SEQ ID NO: 652830 - protein, 14 aa, Homo sapiens
  CDR3 for beta chain variable domain of TCR clone 326415 (TRBV6-1, TRBJ2-2)
CASVEHIESGELFF

SEQ ID NO: 652831 - protein, 13 aa, Homo sapiens
  CDR3 for alpha chain variable domain of TCR clone 326416 (TRAV13-2, TRAJ48)
CAEMDFGNEKLTF

SEQ ID NO: 652832 - protein, 15 aa, Homo sapiens
  CDR3 for beta chain variable domain of TCR clone 326416 (TRBV11-2, TRBJ2-1)
CASSRNRGLMYEQFF

SEQ ID NO: 652833 - protein, 13 aa, Homo sapiens
  CDR3 for alpha chain variable domain of TCR clone 326417 (TRAV27, TRAJ41)
CAGEGNSGYALNF

SEQ ID NO: 652834 - protein, 13 aa, Homo sapiens
  CDR3 for beta chain variable domain of TCR clone 326417 (TRBV11-2, TRBJ2-5)
CASSSTGEETQYF

SEQ ID NO: 652835 - protein, 13 aa, Homo sapiens
  CDR3 for alpha chain variable domain of TCR clone 326418 (TRAV8-3, TRAJ15)
CWGRHQAGTALIF

SEQ ID NO: 652836 - protein, 13 aa, Homo sapiens
  CDR3 for beta chain variable domain of TCR clone 326418 (TRBV9, TRBJ2-7)
CASSASDSYEQYF

SEQ ID NO: 652837 - protein, 14 aa, Homo sapiens
  CDR3 for alpha chain variable domain of TCR clone 326419 (TRAV23/DV6, TRAJ58)
CAGMRENSGSRLTF

SEQ ID NO: 652838 - protein, 13 aa, Homo sapiens
  CDR3 for beta chain variable domain of TCR clone 326419 (TRBV28, TRBJ2-7)
CASRSSGVYEQYF

SEQ ID NO: 652839 - protein, 12 aa, Homo sapiens
  CDR3 for alpha chain variable domain of TCR clone 326420 (TRAV23/DV6, TRAJ30)
CAASKGDDKIIF

SEQ ID NO: 652840 - protein, 13 aa, Homo sapiens
  CDR3 for beta chain variable domain of TCR clone 326420 (TRBV9, TRBJ2-1)
CASSVGQGGEQFF

SEQ ID NO: 652841 - protein, 13 aa, Homo sapiens
  CDR3 for alpha chain variable domain of TCR clone 326421 (TRAV26-2, TRAJ43)
CILRAVNNNDVRF

SEQ ID NO: 652842 - protein, 14 aa, Homo sapiens
  CDR3 for beta chain variable domain of TCR clone 326421 (TRBV4-2, TRBJ2-1)
CASGLDRAYNEQFF

SEQ ID NO: 652843 - protein, 13 aa, Homo sapiens
  CDR3 for alpha chain variable domain of TCR clone 326422 (TRAV39, TRAJ49)
CAVDRNTGNQFYF

SEQ ID NO: 652844 - protein, 14 aa, Homo sapiens
  CDR3 for beta chain variable domain of TCR clone 326422 (TRBV4-1, TRBJ1-1)
CASSRSGRSFEAFF

SEQ ID NO: 652845 - protein, 16 aa, Homo sapiens
  CDR3 for alpha chain variable domain of TCR clone 326423 (TRAV12-3, TRAJ53)
FAMSPGSGGSNYKLTF

SEQ ID NO: 652846 - protein, 11 aa, Homo sapiens
  CDR3 for beta chain variable domain of TCR clone 326423 (TRBV29-1, TRBJ2-5)
CSEDRRGTQYF

SEQ ID NO: 652847 - protein, 15 aa, Homo sapiens
  CDR3 for alpha chain variable domain of TCR clone 326424 (TRAV26-1, TRAJ29)
CIVRVEGSGNTPLVF

SEQ ID NO: 652848 - protein, 14 aa, Homo sapiens
  CDR3 for beta chain variable domain of TCR clone 326424 (TRBV7-8, TRBJ2-3)
CASSLGAGTDTQYF

SEQ ID NO: 652849 - protein, 12 aa, Homo sapiens
  CDR3 for alpha chain variable domain of TCR clone 326425 (TRAV1-1, TRAJ39)
CAVPVVGNILTF

SEQ ID NO: 652850 - protein, 15 aa, Homo sapiens
  CDR3 for beta chain variable domain of TCR clone 326425 (TRBV27, TRBJ2-1)
CASSNGGGSSNEQFF

SEQ ID NO: 652851 - protein, 16 aa, Homo sapiens
  CDR3 for alpha chain variable domain of TCR clone 326426 (TRAV12-1, TRAJ53)
CVVTSVAGGSNYKLTF

SEQ ID NO: 652852 - protein, 13 aa, Homo sapiens
  CDR3 for beta chain variable domain of TCR clone 326426 (TRBV7-7, TRBJ2-5)
CASSRSGQETQYF

SEQ ID NO: 652853 - protein, 17 aa, Homo sapiens
  CDR3 for alpha chain variable domain of TCR clone 326427 (TRAV3, TRAJ12)
CAVRDGGRMDRSYKLIF

SEQ ID NO: 652854 - protein, 12 aa, Homo sapiens
  CDR3 for beta chain variable domain of TCR clone 326427 (TRBV11-2, TRBJ2-2)
CASSLGGGELFF

SEQ ID NO: 652855 - protein, 14 aa, Homo sapiens
  CDR3 for alpha chain variable domain of TCR clone 326428 (TRAV8-3, TRAJ13)
CAVGAQEGYKKVTF

SEQ ID NO: 652856 - protein, 15 aa, Homo sapiens
  CDR3 for beta chain variable domain of TCR clone 326428 (TRBV3-1, TRBJ1-1)
CASKMRATMNNEAFF

SEQ ID NO: 652857 - protein, 13 aa, Homo sapiens
  CDR3 for alpha chain variable domain of TCR clone 326429 (TRAV29/DV5, TRAJ31)
CSASRNNNARLMF

SEQ ID NO: 652858 - protein, 13 aa, Homo sapiens
  CDR3 for beta chain variable domain of TCR clone 326429 (TRBV19, TRBJ1-2)
CASSVPGQDGYTF

SEQ ID NO: 652859 - protein, 16 aa, Homo sapiens
  CDR3 for alpha chain variable domain of TCR clone 326430 (TRAV16, TRAJ4)
CALSRMFSGGYNKLIF

SEQ ID NO: 652860 - protein, 14 aa, Homo sapiens
  CDR3 for beta chain variable domain of TCR clone 326430 (TRBV4-1, TRBJ2-2)
CASSQAVITGELFF

SEQ ID NO: 652861 - protein, 16 aa, Homo sapiens
  CDR3 for alpha chain variable domain of TCR clone 326431 (TRAV35, TRAJ42)
GRMERYYGGSQGNLIF

SEQ ID NO: 652862 - protein, 15 aa, Homo sapiens
  CDR3 for beta chain variable domain of TCR clone 326431 (TRBV6-1, TRBJ2-7)
CASSDWDKPNYGQYF

SEQ ID NO: 652863 - protein, 14 aa, Homo sapiens
  CDR3 for alpha chain variable domain of TCR clone 326432 (TRAV1-1, TRAJ34)
CAVSPSYNTDKPIF

SEQ ID NO: 652864 - protein, 16 aa, Homo sapiens
  CDR3 for beta chain variable domain of TCR clone 326432 (TRBV19, TRBJ2-1)
CASSSKGTRSYNEQFF

SEQ ID NO: 652865 - protein, 15 aa, Homo sapiens
  CDR3 for alpha chain variable domain of TCR clone 326433 (TRAV17, TRAJ13)
CATDAGSGGYQKVTF

SEQ ID NO: 652866 - protein, 20 aa, Homo sapiens
  CDR3 for beta chain variable domain of TCR clone 326433 (TRBV7-8, TRBJ2-2)
CASSYLFPGPTIHITGELFF

SEQ ID NO: 652867 - protein, 19 aa, Homo sapiens
  CDR3 for alpha chain variable domain of TCR clone 326434 (TRAV27, TRAJ53)
ASTSVQSRNSGGSNYKLRF

SEQ ID NO: 652868 - protein, 14 aa, Homo sapiens
  CDR3 for beta chain variable domain of TCR clone 326434 (TRBV11-1, TRBJ2-7)
CASTFAVPSYEQYF

SEQ ID NO: 652869 - protein, 15 aa, Homo sapiens
  CDR3 for alpha chain variable domain of TCR clone 326435 (TRAV3, TRAJ7)
CAVRDKDNGNNRLAF

SEQ ID NO: 652870 - protein, 15 aa, Homo sapiens
  CDR3 for beta chain variable domain of TCR clone 326435 (TRBV7-2, TRBJ1-4)
CASSLLGQSNEKLFF

SEQ ID NO: 652871 - protein, 18 aa, Homo sapiens
  CDR3 for alpha chain variable domain of TCR clone 326436 (TRAV21, TRAJ52)
CAVRPSPAGGTSYGKLTF

SEQ ID NO: 652872 - protein, 13 aa, Homo sapiens
  CDR3 for beta chain variable domain of TCR clone 326436 (TRBV2, TRBJ2-7)
CASSGGIAYEQYF

SEQ ID NO: 652873 - protein, 14 aa, Homo sapiens
  CDR3 for alpha chain variable domain of TCR clone 326437 (TRAV12-2, TRAJ40)
CAVKIPSGTYKYIF

SEQ ID NO: 652874 - protein, 16 aa, Homo sapiens
  CDR3 for beta chain variable domain of TCR clone 326437 (TRBV20-1, TRBJ1-1)
CSAQTRIGALKRSLDE

SEQ ID NO: 652875 - protein, 15 aa, Homo sapiens
  CDR3 for alpha chain variable domain of TCR clone 326438 (TRAV17, TRAJ17)
CATDASIIRRQQDNF

SEQ ID NO: 652876 - protein, 12 aa, Homo sapiens
  CDR3 for beta chain variable domain of TCR clone 326438 (TRBV5-4, TRBJ2-5)
CASSSIRETQYF

SEQ ID NO: 652877 - protein, 16 aa, Homo sapiens
  CDR3 for alpha chain variable domain of TCR clone 326439 (TRAV12-3, TRAJ53)
FAMSPGSGGSNYKLTF

SEQ ID NO: 652878 - protein, 18 aa, Homo sapiens
  CDR3 for beta chain variable domain of TCR clone 326439 (TRBV7-9, TRBJ2-7)
CASSLTTSGSRTWYEQYF

SEQ ID NO: 652879 - protein, 13 aa, Homo sapiens
  CDR3 for alpha chain variable domain of TCR clone 326440 (TRAV36/DV7, TRAJ7)
CARTRYGNNRLAF

SEQ ID NO: 652880 - protein, 14 aa, Homo sapiens
  CDR3 for beta chain variable domain of TCR clone 326440 (TRBV19, TRBJ2-1)
CASPTFVLSGEQFF

SEQ ID NO: 652881 - protein, 15 aa, Homo sapiens
  CDR3 for alpha chain variable domain of TCR clone 326441 (TRAV2, TRAJ9)
CALAALNTGGFKTIF

SEQ ID NO: 652882 - protein, 15 aa, Homo sapiens
  CDR3 for beta chain variable domain of TCR clone 326441 (TRBV5-1, TRBJ2-1)
CASSPPRAPYNEQFF

SEQ ID NO: 652883 - protein, 13 aa, Homo sapiens
  CDR3 for alpha chain variable domain of TCR clone 326442 (TRAV13-1, TRAJ39)
CAASLWAGNMLTF

SEQ ID NO: 652884 - protein, 15 aa, Homo sapiens
  CDR3 for beta chain variable domain of TCR clone 326442 (TRBV7-9, TRBJ1-1)
CASSLLEQGGTEAFF

SEQ ID NO: 652885 - protein, 15 aa, Homo sapiens
  CDR3 for alpha chain variable domain of TCR clone 326443 (TRAV17, TRAJ35)
CATAFVIGFGNVLHC

SEQ ID NO: 652886 - protein, 14 aa, Homo sapiens
  CDR3 for beta chain variable domain of TCR clone 326443 (TRBV7-9, TRBJ2-7)
CQQLRLAEAYEQYF

SEQ ID NO: 652887 - protein, 10 aa, Homo sapiens
  CDR3 for alpha chain variable domain of TCR clone 326444 (TRAV16, TRAJ22)
SAMYLRQLTF

SEQ ID NO: 652888 - protein, 15 aa, Homo sapiens
  CDR3 for beta chain variable domain of TCR clone 326444 (TRBV12-4, TRBJ1-6)
CASSSPGRGNSPLHF

SEQ ID NO: 652889 - protein, 11 aa, Homo sapiens
  CDR3 for alpha chain variable domain of TCR clone 326445 (TRAV3, TRAJ21)
CAVGNFNKFYF

SEQ ID NO: 652890 - protein, 13 aa, Homo sapiens
  CDR3 for beta chain variable domain of TCR clone 326445 (TRBV7-8, TRBJ2-3)
CASSLRGPDTQYF

SEQ ID NO: 652891 - protein, 15 aa, Homo sapiens
  CDR3 for alpha chain variable domain of TCR clone 326446 (TRAV25, TRAJ52)
CAGRPRGTSYGKLTF

SEQ ID NO: 652892 - protein, 17 aa, Homo sapiens
  CDR3 for beta chain variable domain of TCR clone 326446 (TRBV7-8, TRBJ2-6)
CASSAGTGGAAANVLTF

SEQ ID NO: 652893 - protein, 14 aa, Homo sapiens
  CDR3 for alpha chain variable domain of TCR clone 326447 (TRAV12-3, TRAJ10)
SHLPLTGGGNKLTF

SEQ ID NO: 652894 - protein, 15 aa, Homo sapiens
  CDR3 for beta chain variable domain of TCR clone 326447 (TRBV25-1, TRBJ2-4)
CASSETESAKNIQCF

SEQ ID NO: 652895 - protein, 15 aa, Homo sapiens
  CDR3 for alpha chain variable domain of TCR clone 326448 (TRAV8-3, TRAJ45)
CTSSYSGGGADGLTF

SEQ ID NO: 652896 - protein, 18 aa, Homo sapiens
  CDR3 for beta chain variable domain of TCR clone 326448 (TRBV18, TRBJ1-3)
CASSPRGGAGPSGNTIYF

SEQ ID NO: 652897 - protein, 12 aa, Homo sapiens
  CDR3 for alpha chain variable domain of TCR clone 326449 (TRAV21, TRAJ39)
CAADNAGNMLTF

SEQ ID NO: 652898 - protein, 15 aa, Homo sapiens
  CDR3 for beta chain variable domain of TCR clone 326449 (TRBV19, TRBJ2-7)
CASSIGGGLVNEQYF

SEQ ID NO: 652899 - protein, 15 aa, Homo sapiens
  CDR3 for alpha chain variable domain of TCR clone 326450 (TRAV12-2, TRAJ53)
CAVNGGGGSNYKLPF

SEQ ID NO: 652900 - protein, 16 aa, Homo sapiens
  CDR3 for beta chain variable domain of TCR clone 326450 (TRBV7-3, TRBJ2-3)
CASSLSGYRPEDTQYF

SEQ ID NO: 652901 - protein, 11 aa, Homo sapiens
  CDR3 for alpha chain variable domain of TCR clone 326451 (TRAV21, TRAJ11)
CAVNGYSTLTF

SEQ ID NO: 652902 - protein, 13 aa, Homo sapiens
  CDR3 for beta chain variable domain of TCR clone 326451 (TRBV19, TRBJ1-1)
CASSIGSEASLDK

SEQ ID NO: 652903 - protein, 14 aa, Homo sapiens
  CDR3 for alpha chain variable domain of TCR clone 326452 (TRAV12-1, TRAJ30)
CVVNIGGRDDKIIF

SEQ ID NO: 652904 - protein, 11 aa, Homo sapiens
  CDR3 for beta chain variable domain of TCR clone 326452 (TRBV29-1, TRBJ2-5)
CSEDRTGTQYF

SEQ ID NO: 652905 - protein, 14 aa, Homo sapiens
  CDR3 for alpha chain variable domain of TCR clone 326453 (TRAV26-1, TRAJ45)
CIEVTGGGADGLTS

SEQ ID NO: 652906 - protein, 13 aa, Homo sapiens
  CDR3 for beta chain variable domain of TCR clone 326453 (TRBV7-6, TRBJ1-2)
CASSLVADYGHTF

SEQ ID NO: 652907 - protein, 11 aa, Homo sapiens
  CDR3 for alpha chain variable domain of TCR clone 326454 (TRAV12-1, TRAJ34)
CVVNKGRELIF

SEQ ID NO: 652908 - protein, 16 aa, Homo sapiens
  CDR3 for beta chain variable domain of TCR clone 326454 (TRBV5-4, TRBJ2-3)
CASQQPGAGEADTQYF

SEQ ID NO: 652909 - protein, 13 aa, Homo sapiens
  CDR3 for alpha chain variable domain of TCR clone 326455 (TRAV13-1, TRAJ20)
CAVRVSNDYKLSF

SEQ ID NO: 652910 - protein, 12 aa, Homo sapiens
  CDR3 for beta chain variable domain of TCR clone 326455 (TRBV20-1, TRBJ2-1)
CSARLGTDEQFF

SEQ ID NO: 652911 - protein, 13 aa, Homo sapiens
  CDR3 for alpha chain variable domain of TCR clone 326456 (TRAV1-2, TRAJ12)
CAVYMDSSYKLIF

SEQ ID NO: 652912 - protein, 14 aa, Homo sapiens
  CDR3 for beta chain variable domain of TCR clone 326456 (TRBV19, TRBJ2-1)
CASSSGRDYNEQFF

SEQ ID NO: 652913 - protein, 16 aa, Homo sapiens
  CDR3 for alpha chain variable domain of TCR clone 326457 (TRAV23/DV6, TRAJ57)
CAPSSTLSQGGSEKLF

SEQ ID NO: 652914 - protein, 14 aa, Homo sapiens
  CDR3 for beta chain variable domain of TCR clone 326457 (TRBV25-1, TRBJ1-1)
CASTHLGGNTEAFF

SEQ ID NO: 652915 - protein, 12 aa, Homo sapiens
  CDR3 for alpha chain variable domain of TCR clone 326458 (TRAV38-2/DV8, TRAJ48)
CALLSGDEKLTF

SEQ ID NO: 652916 - protein, 15 aa, Homo sapiens
  CDR3 for beta chain variable domain of TCR clone 326458 (TRBV7-2, TRBJ2-3)
CASSSTGLETDTQYF

SEQ ID NO: 652917 - protein, 14 aa, Homo sapiens
  CDR3 for alpha chain variable domain of TCR clone 326459 (TRAV27, TRAJ49)
CAGRPEGTGNQFYF

SEQ ID NO: 652918 - protein, 12 aa, Homo sapiens
  CDR3 for beta chain variable domain of TCR clone 326459 (TRBV7-9, TRBJ2-7)
CASSIKREEQYF

SEQ ID NO: 652919 - protein, 14 aa, Homo sapiens
  CDR3 for alpha chain variable domain of TCR clone 326460 (TRAV3, TRAJ30)
CAVRDPYRDDKIIF

SEQ ID NO: 652920 - protein, 12 aa, Homo sapiens
  CDR3 for beta chain variable domain of TCR clone 326460 (TRBV7-8, TRBJ2-7)
CASSLGDREQYF

SEQ ID NO: 652921 - protein, 15 aa, Homo sapiens
  CDR3 for alpha chain variable domain of TCR clone 326461 (TRAV17, TRAJ22)
CATVAPSSSARQLTF

SEQ ID NO: 652922 - protein, 16 aa, Homo sapiens
  CDR3 for beta chain variable domain of TCR clone 326461 (TRBV10-3, TRBJ2-7)
CAISADFADRPYEQYF

SEQ ID NO: 652923 - protein, 13 aa, Homo sapiens
  CDR3 for alpha chain variable domain of TCR clone 326462 (TRAV21, TRAJ15)
CAVANKAGTARTF

SEQ ID NO: 652924 - protein, 14 aa, Homo sapiens
  CDR3 for beta chain variable domain of TCR clone 326462 (TRBV27, TRBJ2-2)
CASSLGAATGELFF

SEQ ID NO: 652925 - protein, 14 aa, Homo sapiens
  CDR3 for alpha chain variable domain of TCR clone 326463 (TRAV12-2, TRAJ4)
CAEDLSGGYNKLIF

SEQ ID NO: 652926 - protein, 16 aa, Homo sapiens
  CDR3 for beta chain variable domain of TCR clone 326463 (TRBV6-1, TRBJ2-5)
CASSLRTGGVGETQYF

SEQ ID NO: 652927 - protein, 14 aa, Homo sapiens
  CDR3 for alpha chain variable domain of TCR clone 326464 (TRAV25, TRAJ35)
CARRMEGFGNVLHC

SEQ ID NO: 652928 - protein, 15 aa, Homo sapiens
  CDR3 for beta chain variable domain of TCR clone 326464 (TRBV7-2, TRBJ2-2)
CASSRSGTATGELFF

SEQ ID NO: 652929 - protein, 12 aa, Homo sapiens
  CDR3 for alpha chain variable domain of TCR clone 326465 (TRAV21, TRAJ24)
CAVMDSWGKLQL

SEQ ID NO: 652930 - protein, 16 aa, Homo sapiens
  CDR3 for beta chain variable domain of TCR clone 326465 (TRBV13, TRBJ2-2)
CASSEVFGANTGELFF

SEQ ID NO: 652931 - protein, 13 aa, Homo sapiens
  CDR3 for alpha chain variable domain of TCR clone 326466 (TRAV12-3, TRAJ9)
CAMSGGGGFKTIF

SEQ ID NO: 652932 - protein, 15 aa, Homo sapiens
  CDR3 for beta chain variable domain of TCR clone 326466 (TRBV20-1, TRBJ2-1)
CSARVGGVGVREQFF

SEQ ID NO: 652933 - protein, 18 aa, Homo sapiens
  CDR3 for alpha chain variable domain of TCR clone 326467 (TRAV12-3, TRAJ52)
CAMSVGGAGGTSYGQLTF

SEQ ID NO: 652934 - protein, 19 aa, Homo sapiens
  CDR3 for beta chain variable domain of TCR clone 326467 (TRBV6-3, TRBJ1-2)
CASSYSKGRTGPPNYGYAF

SEQ ID NO: 652935 - protein, 10 aa, Homo sapiens
  CDR3 for alpha chain variable domain of TCR clone 326468 (TRAV1-2, TRAJ31)
WVSEDARFMF

SEQ ID NO: 652936 - protein, 14 aa, Homo sapiens
  CDR3 for beta chain variable domain of TCR clone 326468 (TRBV19, TRBJ2-1)
CASPTFVLSGEQFF

SEQ ID NO: 652937 - protein, 22 aa, Homo sapiens
  CDR3 for alpha chain variable domain of TCR clone 326469 (TRAV27, TRAJ38)
CAALRNAGNNHIQNPDPAVYQL

SEQ ID NO: 652938 - protein, 12 aa, Homo sapiens
  CDR3 for beta chain variable domain of TCR clone 326469 (TRBV11-2, TRBJ2-2)
CASSLGGGELFF

SEQ ID NO: 652939 - protein, 11 aa, Homo sapiens
  CDR3 for alpha chain variable domain of TCR clone 326470 (TRAV17, TRAJ31)
CATSNNARLMF

SEQ ID NO: 652940 - protein, 19 aa, Homo sapiens
  CDR3 for beta chain variable domain of TCR clone 326470 (TRBV2, TRBJ2-7)
CASSDDETSGRANDYEQYF

SEQ ID NO: 652941 - protein, 14 aa, Homo sapiens
  CDR3 for alpha chain variable domain of TCR clone 326471 (TRAV12-2, TRAJ6)
CAVIASVGSYIPTF

SEQ ID NO: 652942 - protein, 16 aa, Homo sapiens
  CDR3 for beta chain variable domain of TCR clone 326471 (TRBV7-2, TRBJ2-3)
CASSLAGAGSGDTQYF

SEQ ID NO: 652943 - protein, 14 aa, Homo sapiens
  CDR3 for alpha chain variable domain of TCR clone 326472 (TRAV1-2, TRAJ16)
CAVNRFSDGQTLLF

SEQ ID NO: 652944 - protein, 16 aa, Homo sapiens
  CDR3 for beta chain variable domain of TCR clone 326472 (TRBV5-1, TRBJ2-5)
CASSLRRTSGQETQYF

SEQ ID NO: 652945 - protein, 17 aa, Homo sapiens
  CDR3 for alpha chain variable domain of TCR clone 326473 (TRAV3, TRAJ6)
CAVRDGPRAGGSYIPTF

SEQ ID NO: 652946 - protein, 16 aa, Homo sapiens
  CDR3 for beta chain variable domain of TCR clone 326473 (TRBV7-3, TRBJ2-1)
CASSLSSGGGAKEQFF

SEQ ID NO: 652947 - protein, 13 aa, Homo sapiens
  CDR3 for alpha chain variable domain of TCR clone 326474 (TRAV26-1, TRAJ33)
CIVRVEGNYQLIW

SEQ ID NO: 652948 - protein, 16 aa, Homo sapiens
  CDR3 for beta chain variable domain of TCR clone 326474 (TRBV15, TRBJ2-7)
CATSRDRGRRIGEQYF

SEQ ID NO: 652949 - protein, 18 aa, Homo sapiens
  CDR3 for alpha chain variable domain of TCR clone 326475 (TRAV1-2, TRAJ18)
CAVRDMGDRGSTLGRLYF

SEQ ID NO: 652950 - protein, 13 aa, Homo sapiens
  CDR3 for beta chain variable domain of TCR clone 326475 (TRBV29-1, TRBJ2-7)
CSVGPSGGYEQYF

SEQ ID NO: 652951 - protein, 11 aa, Homo sapiens
  CDR3 for alpha chain variable domain of TCR clone 326476 (TRAV2, TRAJ13)
CASGGYQKVAF

SEQ ID NO: 652952 - protein, 15 aa, Homo sapiens
  CDR3 for beta chain variable domain of TCR clone 326476 (TRBV20-1, TRBJ2-7)
CSARDRVSGMDEQYF

SEQ ID NO: 652953 - protein, 15 aa, Homo sapiens
  CDR3 for alpha chain variable domain of TCR clone 326477 (TRAV8-1, TRAJ8)
CAVNAMNTGFQKLVF

SEQ ID NO: 652954 - protein, 16 aa, Homo sapiens
  CDR3 for beta chain variable domain of TCR clone 326477 (TRBV11-2, TRBJ1-2)
CASSLDRGGNNYGYTF

SEQ ID NO: 652955 - protein, 15 aa, Homo sapiens
  CDR3 for alpha chain variable domain of TCR clone 326478 (TRAV12-3, TRAJ6)
CAMSAASGGSYIPKF

SEQ ID NO: 652956 - protein, 13 aa, Homo sapiens
  CDR3 for beta chain variable domain of TCR clone 326478 (TRBV20-1, TRBJ1-2)
CSASTERIYGYTF

SEQ ID NO: 652957 - protein, 11 aa, Homo sapiens
  CDR3 for alpha chain variable domain of TCR clone 326479 (TRAV1-1, TRAJ20)
CAVFNDYKLSF

SEQ ID NO: 652958 - protein, 14 aa, Homo sapiens
  CDR3 for beta chain variable domain of TCR clone 326479 (TRBV4-1, TRBJ2-2)
CASSQAVNTGELFF

SEQ ID NO: 652959 - protein, 14 aa, Homo sapiens
  CDR3 for alpha chain variable domain of TCR clone 326480 (TRAV8-4, TRAJ8)
CAVSEGTGFQKLVF

SEQ ID NO: 652960 - protein, 12 aa, Homo sapiens
  CDR3 for beta chain variable domain of TCR clone 326480 (TRBV7-8, TRBJ2-7)
CASSLGDREQYF

SEQ ID NO: 652961 - protein, 19 aa, Homo sapiens
  CDR3 for alpha chain variable domain of TCR clone 326481 (TRAV13-1, TRAJ52)
CAASPYQNAGGTSFGKLTF

SEQ ID NO: 652962 - protein, 14 aa, Homo sapiens
  CDR3 for beta chain variable domain of TCR clone 326481 (TRBV19, TRBJ2-7)
CASTVQGRPYEQYF

SEQ ID NO: 652963 - protein, 17 aa, Homo sapiens
  CDR3 for alpha chain variable domain of TCR clone 326482 (TRAV3, TRAJ6)
CAVRDGPRAGGSYLPTF

SEQ ID NO: 652964 - protein, 14 aa, Homo sapiens
  CDR3 for beta chain variable domain of TCR clone 326482 (TRBV27, TRBJ2-2)
CASRPGVNTGELFF

SEQ ID NO: 652965 - protein, 15 aa, Homo sapiens
  CDR3 for alpha chain variable domain of TCR clone 326483 (TRAV17, TRAJ4)
CATGTWSGGYNKLIC

SEQ ID NO: 652966 - protein, 13 aa, Homo sapiens
  CDR3 for beta chain variable domain of TCR clone 326483 (TRBV6-6, TRBJ2-7)
CASSPKHLAEQYF

SEQ ID NO: 652967 - protein, 11 aa, Homo sapiens
  CDR3 for alpha chain variable domain of TCR clone 326484 (TRAV21, TRAJ11)
CAVNGYSTLTF

SEQ ID NO: 652968 - protein, 11 aa, Homo sapiens
  CDR3 for beta chain variable domain of TCR clone 326484 (TRBV19, TRBJ1-1)
CASSIGGGAFF

SEQ ID NO: 652969 - protein, 14 aa, Homo sapiens
  CDR3 for alpha chain variable domain of TCR clone 326485 (TRAV17, TRAJ34)
CATDSLEGTDKLIF

SEQ ID NO: 652970 - protein, 17 aa, Homo sapiens
  CDR3 for beta chain variable domain of TCR clone 326485 (TRBV18, TRBJ1-5)
CASSPTMGQGTNQPQHF

SEQ ID NO: 652971 - protein, 13 aa, Homo sapiens
  CDR3 for alpha chain variable domain of TCR clone 326486 (TRAV20, TRAJ21)
CAVEGYNFNKFYF

SEQ ID NO: 652972 - protein, 15 aa, Homo sapiens
  CDR3 for beta chain variable domain of TCR clone 326486 (TRBV9, TRBJ1-6)
CASSVAGTGDSPLHF

SEQ ID NO: 652973 - protein, 14 aa, Homo sapiens
  CDR3 for alpha chain variable domain of TCR clone 326487 (TRAV4, TRAJ30)
CLVGDMNRDDKIIF

SEQ ID NO: 652974 - protein, 14 aa, Homo sapiens
  CDR3 for beta chain variable domain of TCR clone 326487 (TRBV19, TRBJ2-7)
CASSIQEGSYEQYF

SEQ ID NO: 652975 - protein, 15 aa, Homo sapiens
  CDR3 for alpha chain variable domain of TCR clone 326488 (TRAV1-2, TRAJ15)
FAVYVMGSAVTALIF

SEQ ID NO: 652976 - protein, 13 aa, Homo sapiens
  CDR3 for beta chain variable domain of TCR clone 326488 (TRBV20-1, TRBJ1-1)
CSAFDRENTEAFF

SEQ ID NO: 652977 - protein, 12 aa, Homo sapiens
  CDR3 for alpha chain variable domain of TCR clone 326489 (TRAV12-3, TRAJ17)
GAMTLTGNKLTF

SEQ ID NO: 652978 - protein, 15 aa, Homo sapiens
  CDR3 for beta chain variable domain of TCR clone 326489 (TRBV20-1, TRBJ2-7)
CSARDRVSGMVEQYF

SEQ ID NO: 652979 - protein, 13 aa, Homo sapiens
  CDR3 for alpha chain variable domain of TCR clone 326490 (TRAV2, TRAJ12)
CAVGADSSYKLIF

SEQ ID NO: 652980 - protein, 13 aa, Homo sapiens
  CDR3 for beta chain variable domain of TCR clone 326490 (TRBV20-1, TRBJ2-1)
CSARSSPMDEQFF

SEQ ID NO: 652981 - protein, 19 aa, Homo sapiens
  CDR3 for alpha chain variable domain of TCR clone 326491 (TRAV1-2, TRAJ32)
CLLPLCCELYGGATNKLIF

SEQ ID NO: 652982 - protein, 15 aa, Homo sapiens
  CDR3 for beta chain variable domain of TCR clone 326491 (TRBV7-2, TRBJ2-1)
CASSFQADEYNEQFF

SEQ ID NO: 652983 - protein, 16 aa, Homo sapiens
  CDR3 for alpha chain variable domain of TCR clone 326492 (TRAV16, TRAJ4)
CALSRMFSGGYNKLIF

SEQ ID NO: 652984 - protein, 17 aa, Homo sapiens
  CDR3 for beta chain variable domain of TCR clone 326492 (TRBV4-1, TRBJ1-4)
CASSQEGPRGVEEKLFF

SEQ ID NO: 652985 - protein, 14 aa, Homo sapiens
  CDR3 for alpha chain variable domain of TCR clone 326493 (TRAV12-2, TRAJ13)
CAVKKTGGYQNVTF

SEQ ID NO: 652986 - protein, 15 aa, Homo sapiens
  CDR3 for beta chain variable domain of TCR clone 326493 (TRBV27, TRBJ2-1)
CASSNGGGSSNKQFF

SEQ ID NO: 652987 - protein, 11 aa, Homo sapiens
  CDR3 for alpha chain variable domain of TCR clone 326494 (TRAV1-2, TRAJ20)
CAVANDYKLSF

SEQ ID NO: 652988 - protein, 14 aa, Homo sapiens
  CDR3 for beta chain variable domain of TCR clone 326494 (TRBV7-2, TRBJ1-2)
CASSSQGAHYGYTF

SEQ ID NO: 652989 - protein, 13 aa, Homo sapiens
  CDR3 for alpha chain variable domain of TCR clone 326495 (TRAV13-1, TRAJ11)
CAASKEGYSTLTF

SEQ ID NO: 652990 - protein, 21 aa, Homo sapiens
  CDR3 for beta chain variable domain of TCR clone 326495 (TRBV23-1, TRBJ2-5)
CASTAPGQGPGGDPVLRARHA

SEQ ID NO: 652991 - protein, 14 aa, Homo sapiens
  CDR3 for alpha chain variable domain of TCR clone 326496 (TRAV27, TRAJ48)
CAGAPGFGNEKLTF

SEQ ID NO: 652992 - protein, 16 aa, Homo sapiens
  CDR3 for beta chain variable domain of TCR clone 326496 (TRBV11-1, TRBJ1-1)
CATNPRDRAFNTEAFF

SEQ ID NO: 652993 - protein, 11 aa, Homo sapiens
  CDR3 for alpha chain variable domain of TCR clone 326497 (TRAV30, TRAJ23)
CGTEIAGKLIF

SEQ ID NO: 652994 - protein, 16 aa, Homo sapiens
  CDR3 for beta chain variable domain of TCR clone 326497 (TRBV7-2, TRBJ2-7)
CASTSQAASGGYEQYS

SEQ ID NO: 652995 - protein, 14 aa, Homo sapiens
  CDR3 for alpha chain variable domain of TCR clone 326498 (TRAV21, TRAJ45)
CAVVSGGGADGLTF

SEQ ID NO: 652996 - protein, 14 aa, Homo sapiens
  CDR3 for beta chain variable domain of TCR clone 326498 (TRBV20-1, TRBJ2-3)
CSSLGLEGADTQYF

SEQ ID NO: 652997 - protein, 18 aa, Homo sapiens
  CDR3 for alpha chain variable domain of TCR clone 326499 (TRAV21, TRAJ52)
CAVRPSPAGGTSYGKLTF

SEQ ID NO: 652998 - protein, 12 aa, Homo sapiens
  CDR3 for beta chain variable domain of TCR clone 326499 (TRBV11-2, TRBJ2-7)
CASSLPTYEQYF

SEQ ID NO: 652999 - protein, 14 aa, Homo sapiens
  CDR3 for alpha chain variable domain of TCR clone 326500 (TRAV2, TRAJ37)
YAVDFTSNTGKLIF

SEQ ID NO: 653000 - protein, 15 aa, Homo sapiens
  CDR3 for beta chain variable domain of TCR clone 326500 (TRBV20-1, TRBJ1-1)
CSASQGVTGNTEAFF

SEQ ID NO: 653001 - protein, 10 aa, Homo sapiens
  CDR3 for alpha chain variable domain of TCR clone 326501 (TRAV8-6, TRAJ34)
CAVNTDKLIF

SEQ ID NO: 653002 - protein, 14 aa, Homo sapiens
  CDR3 for beta chain variable domain of TCR clone 326501 (TRBV12-4, TRBJ2-7)
CASSLTGRAYEQYF

SEQ ID NO: 653003 - protein, 13 aa, Homo sapiens
  CDR3 for alpha chain variable domain of TCR clone 326502 (TRAV30, TRAJ6)
CGFIEGGSYIPTF

SEQ ID NO: 653004 - protein, 14 aa, Homo sapiens
  CDR3 for beta chain variable domain of TCR clone 326502 (TRBV7-9, TRBJ1-1)
CASTPLQSYTEAFF

SEQ ID NO: 653005 - protein, 16 aa, Homo sapiens
  CDR3 for alpha chain variable domain of TCR clone 326503 (TRAV8-3, TRAJ44)
CAVGTLMTGTASKPTF

SEQ ID NO: 653006 - protein, 15 aa, Homo sapiens
  CDR3 for beta chain variable domain of TCR clone 326503 (TRBV10-2, TRBJ2-6)
CASSEQGTGANVLTF

SEQ ID NO: 653007 - protein, 14 aa, Homo sapiens
  CDR3 for alpha chain variable domain of TCR clone 326504 (TRAV9-2, TRAJ39)
CALYIYNAGNMLTF

SEQ ID NO: 653008 - protein, 14 aa, Homo sapiens
  CDR3 for beta chain variable domain of TCR clone 326504 (TRBV6-1, TRBJ1-3)
CASVQGGGGNTIYF

SEQ ID NO: 653009 - protein, 14 aa, Homo sapiens
  CDR3 for alpha chain variable domain of TCR clone 326505 (TRAV8-3, TRAJ16)
CAVDRFSDGQKLLF

SEQ ID NO: 653010 - protein, 15 aa, Homo sapiens
  CDR3 for beta chain variable domain of TCR clone 326505 (TRBV29-1, TRBJ2-1)
CSVEAPRGSPNEQFF

SEQ ID NO: 653011 - protein, 13 aa, Homo sapiens
  CDR3 for alpha chain variable domain of TCR clone 326506 (TRAV29/DV5, TRAJ31)
CAASRNNNARLMF

SEQ ID NO: 653012 - protein, 18 aa, Homo sapiens
  CDR3 for beta chain variable domain of TCR clone 326506 (TRBV14, TRBJ2-1)
CASSLALTSGRSYNEQFF

SEQ ID NO: 653013 - protein, 14 aa, Homo sapiens
  CDR3 for alpha chain variable domain of TCR clone 326507 (TRAV12-2, TRAJ5)
CAVKGDTGRRALTF

SEQ ID NO: 653014 - protein, 16 aa, Homo sapiens
  CDR3 for beta chain variable domain of TCR clone 326507 (TRBV4-1, TRBJ2-3)
CASSQSTSGAEDTQYF

SEQ ID NO: 653015 - protein, 11 aa, Homo sapiens
  CDR3 for alpha chain variable domain of TCR clone 326508 (TRAV16, TRAJ31)
CALFNNARLMF

SEQ ID NO: 653016 - protein, 15 aa, Homo sapiens
  CDR3 for beta chain variable domain of TCR clone 326508 (TRBV18, TRBJ1-1)
CASSPRQGENTEDFF

SEQ ID NO: 653017 - protein, 14 aa, Homo sapiens
  CDR3 for alpha chain variable domain of TCR clone 326509 (TRAV1-2, TRAJ8)
CAVRGDTGFQKLVF

SEQ ID NO: 653018 - protein, 14 aa, Homo sapiens
  CDR3 for beta chain variable domain of TCR clone 326509 (TRBV7-9, TRBJ1-1)
CASTPLQSYTEAFF

SEQ ID NO: 653019 - protein, 12 aa, Homo sapiens
  CDR3 for alpha chain variable domain of TCR clone 326510 (TRAV35, TRAJ49)
CAGWNTGNQFYF

SEQ ID NO: 653020 - protein, 14 aa, Homo sapiens
  CDR3 for beta chain variable domain of TCR clone 326510 (TRBV25-1, TRBJ1-2)
CASSEAGTAYGYTF

SEQ ID NO: 653021 - protein, 18 aa, Homo sapiens
  CDR3 for alpha chain variable domain of TCR clone 326511 (TRAV1-1, TRAJ42)
CAVSPSAFYGGSQGNLIF

SEQ ID NO: 653022 - protein, 16 aa, Homo sapiens
  CDR3 for beta chain variable domain of TCR clone 326511 (TRBV4-2, TRBJ2-7)
CASSQEGLANSYEQYF

SEQ ID NO: 653023 - protein, 15 aa, Homo sapiens
  CDR3 for alpha chain variable domain of TCR clone 326512 (TRAV21, TRAJ37)
CAVRPTLSNTGKLIF

SEQ ID NO: 653024 - protein, 16 aa, Homo sapiens
  CDR3 for beta chain variable domain of TCR clone 326512 (TRBV19, TRBJ2-2)
CASRSPGTGATGELFF

SEQ ID NO: 653025 - protein, 12 aa, Homo sapiens
  CDR3 for alpha chain variable domain of TCR clone 326513 (TRAV27, TRAJ13)
CAGVRGYQKVTF

SEQ ID NO: 653026 - protein, 15 aa, Homo sapiens
  CDR3 for beta chain variable domain of TCR clone 326513 (TRBV28, TRBJ2-1)
CASSIIAGGRSEQFF

SEQ ID NO: 653027 - protein, 15 aa, Homo sapiens
  CDR3 for alpha chain variable domain of TCR clone 326514 (TRAV8-3, TRAJ27)
CAVGPSKPNAGKSTF

SEQ ID NO: 653028 - protein, 15 aa, Homo sapiens
  CDR3 for beta chain variable domain of TCR clone 326514 (TRBV27, TRBJ2-1)
CASSNGGGSSNEQFF

SEQ ID NO: 653029 - protein, 15 aa, Homo sapiens
  CDR3 for alpha chain variable domain of TCR clone 326515 (TRAV3, TRAJ3)
CCERPRYSSASKLIF

SEQ ID NO: 653030 - protein, 16 aa, Homo sapiens
  CDR3 for beta chain variable domain of TCR clone 326515 (TRBV19, TRBJ1-5)
CASSIDRGGPRQPQHF

SEQ ID NO: 653031 - protein, 15 aa, Homo sapiens
  CDR3 for alpha chain variable domain of TCR clone 326516 (TRAV26-1, TRAJ23)
SIVRVAGYQGGKLIF

SEQ ID NO: 653032 - protein, 18 aa, Homo sapiens
  CDR3 for beta chain variable domain of TCR clone 326516 (TRBV28, TRBJ2-1)
CASSSTSGRANSYNEQFF

SEQ ID NO: 653033 - protein, 13 aa, Homo sapiens
  CDR3 for alpha chain variable domain of TCR clone 326517 (TRAV21, TRAJ27)
CAARPGNAGKSTF

SEQ ID NO: 653034 - protein, 15 aa, Homo sapiens
  CDR3 for beta chain variable domain of TCR clone 326517 (TRBV20-1, TRBJ2-7)
CSARERVSGMDEQYF

SEQ ID NO: 653035 - protein, 15 aa, Homo sapiens
  CDR3 for alpha chain variable domain of TCR clone 326518 (TRAV8-1, TRAJ42)
CAVRRYGGSQGNRIF

SEQ ID NO: 653036 - protein, 21 aa, Homo sapiens
  CDR3 for beta chain variable domain of TCR clone 326518 (TRBV5-1, TRBJ1-6)
CASSPRGGADSTGGVRSPLHF

SEQ ID NO: 653037 - protein, 19 aa, Homo sapiens
  CDR3 for alpha chain variable domain of TCR clone 326519 (TRAV25, TRAJ20)
TATQTTDVGILPHDYKLSF

SEQ ID NO: 653038 - protein, 14 aa, Homo sapiens
  CDR3 for beta chain variable domain of TCR clone 326519 (TRBV18, TRBJ2-5)
CASSPGVSQETQYF

SEQ ID NO: 653039 - protein, 14 aa, Homo sapiens
  CDR3 for alpha chain variable domain of TCR clone 326520 (TRAV12-3, TRAJ57)
CAMSAWGGSEKLVF

SEQ ID NO: 653040 - protein, 15 aa, Homo sapiens
  CDR3 for beta chain variable domain of TCR clone 326520 (TRBV19, TRBJ2-7)
CASSPAGSGEALRYF

SEQ ID NO: 653041 - protein, 15 aa, Homo sapiens
  CDR3 for alpha chain variable domain of TCR clone 326521 (TRAV8-4, TRAJ29)
CAVSEDFRGNTPLVF

SEQ ID NO: 653042 - protein, 14 aa, Homo sapiens
  CDR3 for beta chain variable domain of TCR clone 326521 (TRBV7-2, TRBJ2-7)
CASSPKTSFYEQYF

SEQ ID NO: 653043 - protein, 12 aa, Homo sapiens
  CDR3 for alpha chain variable domain of TCR clone 326522 (TRAV21, TRAJ31)
CAVSPARGRLMF

SEQ ID NO: 653044 - protein, 17 aa, Homo sapiens
  CDR3 for beta chain variable domain of TCR clone 326522 (TRBV18, TRBJ1-5)
CASSPTMGQGTNQPQHF

SEQ ID NO: 653045 - protein, 11 aa, Homo sapiens
  CDR3 for alpha chain variable domain of TCR clone 326523 (TRAV1-1, TRAJ16)
CAAGDGQKLLF

SEQ ID NO: 653046 - protein, 15 aa, Homo sapiens
  CDR3 for beta chain variable domain of TCR clone 326523 (TRBV28, TRBJ1-2)
CASIPQGSDDYGYTF

SEQ ID NO: 653047 - protein, 15 aa, Homo sapiens
  CDR3 for alpha chain variable domain of TCR clone 326524 (TRAV2, TRAJ9)
CAVEDRGTGGFKTIF

SEQ ID NO: 653048 - protein, 16 aa, Homo sapiens
  CDR3 for beta chain variable domain of TCR clone 326524 (TRBV12-4, TRBJ2-3)
CASSIPSGGGTDTQYF

SEQ ID NO: 653049 - protein, 12 aa, Homo sapiens
  CDR3 for alpha chain variable domain of TCR clone 326525 (TRAV12-1, TRAJ40)
CVFYSGTYKYIS

SEQ ID NO: 653050 - protein, 18 aa, Homo sapiens
  CDR3 for beta chain variable domain of TCR clone 326525 (TRBV12-4, TRBJ2-2)
CAGSLVAGTRGWTGELFF

SEQ ID NO: 653051 - protein, 21 aa, Homo sapiens
  CDR3 for alpha chain variable domain of TCR clone 326526 (TRAV8-4, TRAJ47)
HLTKPSAHMSDAAERGNKRVF

SEQ ID NO: 653052 - protein, 14 aa, Homo sapiens
  CDR3 for beta chain variable domain of TCR clone 326526 (TRBV7-9, TRBJ2-1)
CASSPRDSLYEQFF

SEQ ID NO: 653053 - protein, 13 aa, Homo sapiens
  CDR3 for alpha chain variable domain of TCR clone 326527 (TRAV27, TRAJ17)
CAGAATAGNKLTF

SEQ ID NO: 653054 - protein, 15 aa, Homo sapiens
  CDR3 for beta chain variable domain of TCR clone 326527 (TRBV5-1, TRBJ2-3)
CDSRNQAGSTDTQYF

SEQ ID NO: 653055 - protein, 17 aa, Homo sapiens
  CDR3 for alpha chain variable domain of TCR clone 326528 (TRAV3, TRAJ6)
CAVRDGPRAGGSYIPTF

SEQ ID NO: 653056 - protein, 15 aa, Homo sapiens
  CDR3 for beta chain variable domain of TCR clone 326528 (TRBV5-7, TRBJ1-5)
CASSSTPGSNQPQHF

SEQ ID NO: 653057 - protein, 15 aa, Homo sapiens
  CDR3 for alpha chain variable domain of TCR clone 326529 (TRAV36/DV7, TRAJ21)
CALKFYFGSGTKLNV

SEQ ID NO: 653058 - protein, 13 aa, Homo sapiens
  CDR3 for beta chain variable domain of TCR clone 326529 (TRBV11-3, TRBJ2-5)
CASSAGLQETQYF

SEQ ID NO: 653059 - protein, 15 aa, Homo sapiens
  CDR3 for alpha chain variable domain of TCR clone 326530 (TRAV8-3, TRAJ6)
CAVGGEEATYLHLEE

SEQ ID NO: 653060 - protein, 17 aa, Homo sapiens
  CDR3 for beta chain variable domain of TCR clone 326530 (TRBV7-2, TRBJ2-3)
CASSLAGGLAGTAGQYF

SEQ ID NO: 653061 - protein, 15 aa, Homo sapiens
  CDR3 for alpha chain variable domain of TCR clone 326531 (TRAV4, TRAJ39)
CLVGPNDNAGNMLTF

SEQ ID NO: 653062 - protein, 15 aa, Homo sapiens
  CDR3 for beta chain variable domain of TCR clone 326531 (TRBV5-1, TRBJ2-1)
CASSPPRAPYNEQFF

SEQ ID NO: 653063 - protein, 13 aa, Homo sapiens
  CDR3 for alpha chain variable domain of TCR clone 326532 (TRAV25, TRAJ10)
CAGRTGGGNKLTF

SEQ ID NO: 653064 - protein, 15 aa, Homo sapiens
  CDR3 for beta chain variable domain of TCR clone 326532 (TRBV5-1, TRBJ2-1)
CASSLVANSYNEQFF

SEQ ID NO: 653065 - protein, 14 aa, Homo sapiens
  CDR3 for alpha chain variable domain of TCR clone 326533 (TRAV8-3, TRAJ35)
CAVGARGFGNVLHC

SEQ ID NO: 653066 - protein, 16 aa, Homo sapiens
  CDR3 for beta chain variable domain of TCR clone 326533 (TRBV7-9, TRBJ2-3)
CASSPWREVGTDTQYF

SEQ ID NO: 653067 - protein, 16 aa, Homo sapiens
  CDR3 for alpha chain variable domain of TCR clone 326534 (TRAV23/DV6, TRAJ9)
CAASIGGNTGGFKTIF

SEQ ID NO: 653068 - protein, 12 aa, Homo sapiens
  CDR3 for beta chain variable domain of TCR clone 326534 (TRBV12-5, TRBJ2-5)
CASGQGVETQYF

SEQ ID NO: 653069 - protein, 14 aa, Homo sapiens
  CDR3 for alpha chain variable domain of TCR clone 326535 (TRAV29/DV5, TRAJ57)
CAARSQGGSEKLVF

SEQ ID NO: 653070 - protein, 17 aa, Homo sapiens
  CDR3 for beta chain variable domain of TCR clone 326535 (TRBV28, TRBJ2-4)
CTSVPRVPTLLMGIQYF

SEQ ID NO: 653071 - protein, 17 aa, Homo sapiens
  CDR3 for alpha chain variable domain of TCR clone 326536 (TRAV4, TRAJ18)
CLVGERSVGSTLGRIYF

SEQ ID NO: 653072 - protein, 14 aa, Homo sapiens
  CDR3 for beta chain variable domain of TCR clone 326536 (TRBV6-5, TRBJ1-2)
CASSYDGTGGGYTF

SEQ ID NO: 653073 - protein, 13 aa, Homo sapiens
  CDR3 for alpha chain variable domain of TCR clone 326537 (TRAV30, TRAJ16)
CGTFGGDGQKLLF

SEQ ID NO: 653074 - protein, 11 aa, Homo sapiens
  CDR3 for beta chain variable domain of TCR clone 326537 (TRBV7-9, TRBJ2-3)
CASSLTDTQYF

SEQ ID NO: 653075 - protein, 15 aa, Homo sapiens
  CDR3 for alpha chain variable domain of TCR clone 326538 (TRAV12-2, TRAJ23)
CAVNIGRNQGGKLIF

SEQ ID NO: 653076 - protein, 13 aa, Homo sapiens
  CDR3 for beta chain variable domain of TCR clone 326538 (TRBV12-4, TRBJ2-7)
CASSPTETYEQYF

SEQ ID NO: 653077 - protein, 16 aa, Homo sapiens
  CDR3 for alpha chain variable domain of TCR clone 326539 (TRAV3, TRAJ37)
CAVRGKGSGNTGKLIF

SEQ ID NO: 653078 - protein, 12 aa, Homo sapiens
  CDR3 for beta chain variable domain of TCR clone 326539 (TRBV19, TRBJ1-5)
CASSIAQQPQHF

SEQ ID NO: 653079 - protein, 13 aa, Homo sapiens
  CDR3 for alpha chain variable domain of TCR clone 326540 (TRAV26-1, TRAJ29)
CIVRRSGNTPLVF

SEQ ID NO: 653080 - protein, 17 aa, Homo sapiens
  CDR3 for beta chain variable domain of TCR clone 326540 (TRBV3-1, TRBJ2-5)
CASSQGLAGMYQETQYF

SEQ ID NO: 653081 - protein, 12 aa, Homo sapiens
  CDR3 for alpha chain variable domain of TCR clone 326541 (TRAV12-3, TRAJ17)
CAKTLTGNKLTF

SEQ ID NO: 653082 - protein, 18 aa, Homo sapiens
  CDR3 for beta chain variable domain of TCR clone 326541 (TRBV4-3, TRBJ1-6)
CASSQDTPASSYNSPLHF

SEQ ID NO: 653083 - protein, 14 aa, Homo sapiens
  CDR3 for alpha chain variable domain of TCR clone 326542 (TRAV12-3, TRAJ10)
SHLPLPGGGNKLTF

SEQ ID NO: 653084 - protein, 17 aa, Homo sapiens
  CDR3 for beta chain variable domain of TCR clone 326542 (TRBV7-8, TRBJ2-6)
CASSAGTGGAGANVLTF

SEQ ID NO: 653085 - protein, 16 aa, Homo sapiens
  CDR3 for alpha chain variable domain of TCR clone 326543 (TRAV23/DV6, TRAJ34)
CAASGALSYNTDKLIF

SEQ ID NO: 653086 - protein, 14 aa, Homo sapiens
  CDR3 for beta chain variable domain of TCR clone 326543 (TRBV12-4, TRBJ1-1)
CASGLGTGGTEAFF

SEQ ID NO: 653087 - protein, 14 aa, Homo sapiens
  CDR3 for alpha chain variable domain of TCR clone 326544 (TRAV12-1, TRAJ15)
CLPPANQAGTALIF

SEQ ID NO: 653088 - protein, 13 aa, Homo sapiens
  CDR3 for beta chain variable domain of TCR clone 326544 (TRBV7-2, TRBJ2-4)
CASSREHANIQHF

SEQ ID NO: 653089 - protein, 12 aa, Homo sapiens
  CDR3 for alpha chain variable domain of TCR clone 326545 (TRAV13-2, TRAJ48)
VQMDFGNEKLTF

SEQ ID NO: 653090 - protein, 13 aa, Homo sapiens
  CDR3 for beta chain variable domain of TCR clone 326545 (TRBV13, TRBJ2-5)
CASSPEVGETQYF

SEQ ID NO: 653091 - protein, 13 aa, Homo sapiens
  CDR3 for alpha chain variable domain of TCR clone 326546 (TRAV2, TRAJ21)
CAVFNFNKFTLDL

SEQ ID NO: 653092 - protein, 14 aa, Homo sapiens
  CDR3 for beta chain variable domain of TCR clone 326546 (TRBV15, TRBJ2-3)
CATRSGTSTDTQYF

SEQ ID NO: 653093 - protein, 12 aa, Homo sapiens
  CDR3 for alpha chain variable domain of TCR clone 326547 (TRAV23/DV6, TRAJ31)
CAARRIGSRLMS

SEQ ID NO: 653094 - protein, 13 aa, Homo sapiens
  CDR3 for beta chain variable domain of TCR clone 326547 (TRBV28, TRBJ2-7)
CASKAGGVYEQYF

SEQ ID NO: 653095 - protein, 14 aa, Homo sapiens
  CDR3 for alpha chain variable domain of TCR clone 326548 (TRAV2, TRAJ37)
CAVEDLGNTGKLIF

SEQ ID NO: 653096 - protein, 14 aa, Homo sapiens
  CDR3 for beta chain variable domain of TCR clone 326548 (TRBV25-1, TRBJ1-1)
CASTHLGGNTEAFF

SEQ ID NO: 653097 - protein, 14 aa, Homo sapiens
  CDR3 for alpha chain variable domain of TCR clone 326549 (TRAV13-2, TRAJ43)
CAEIPTYNNNDMLF

SEQ ID NO: 653098 - protein, 14 aa, Homo sapiens
  CDR3 for beta chain variable domain of TCR clone 326549 (TRBV7-8, TRBJ2-5)
CASSATGGQETQYF

SEQ ID NO: 653099 - protein, 18 aa, Homo sapiens
  CDR3 for alpha chain variable domain of TCR clone 326550 (TRAV21, TRAJ52)
CAVRPSPAGGTSYGKLTF

SEQ ID NO: 653100 - protein, 17 aa, Homo sapiens
  CDR3 for beta chain variable domain of TCR clone 326550 (TRBV7-2, TRBJ2-1)
CASSLGQAGGPSGEQFF

SEQ ID NO: 653101 - protein, 14 aa, Homo sapiens
  CDR3 for alpha chain variable domain of TCR clone 326551 (TRAV13-1, TRAJ35)
CAASKGGFGNVLHC

SEQ ID NO: 653102 - protein, 13 aa, Homo sapiens
  CDR3 for beta chain variable domain of TCR clone 326551 (TRBV7-3, TRBJ1-1)
CASSQDWGAEAYF

SEQ ID NO: 653103 - protein, 15 aa, Homo sapiens
  CDR3 for alpha chain variable domain of TCR clone 326552 (TRAV26-1, TRAJ29)
CIVRVEGSGNTPLVF

SEQ ID NO: 653104 - protein, 12 aa, Homo sapiens
  CDR3 for beta chain variable domain of TCR clone 326552 (TRBV12-4, TRBJ2-1)
CASSPGRNEQFF

SEQ ID NO: 653105 - protein, 15 aa, Homo sapiens
  CDR3 for alpha chain variable domain of TCR clone 326553 (TRAV21, TRAJ24)
CAARSSTDSWGKLQF

SEQ ID NO: 653106 - protein, 14 aa, Homo sapiens
  CDR3 for beta chain variable domain of TCR clone 326553 (TRBV11-2, TRBJ2-5)
YASSRTGGIETQYF

SEQ ID NO: 653107 - protein, 14 aa, Homo sapiens
  CDR3 for alpha chain variable domain of TCR clone 326554 (TRAV8-3, TRAJ4)
CAVGASGGYNKLIL

SEQ ID NO: 653108 - protein, 16 aa, Homo sapiens
  CDR3 for beta chain variable domain of TCR clone 326554 (TRBV4-3, TRBJ2-2)
CASSHLQVSGTGELFF

SEQ ID NO: 653109 - protein, 18 aa, Homo sapiens
  CDR3 for alpha chain variable domain of TCR clone 326555 (TRAV13-1, TRAJ52)
CAASKRSAGGTSYGKLTF

SEQ ID NO: 653110 - protein, 17 aa, Homo sapiens
  CDR3 for beta chain variable domain of TCR clone 326555 (TRBV20-1, TRBJ2-1)
CSASSSGLAGSYNEQFF

SEQ ID NO: 653111 - protein, 14 aa, Homo sapiens
  CDR3 for alpha chain variable domain of TCR clone 326556 (TRAV4, TRAJ26)
CLVGPHNYGQNFVF

SEQ ID NO: 653112 - protein, 13 aa, Homo sapiens
  CDR3 for beta chain variable domain of TCR clone 326556 (TRBV7-7, TRBJ1-1)
CASSLGANTEAFF

SEQ ID NO: 653113 - protein, 12 aa, Homo sapiens
  CDR3 for alpha chain variable domain of TCR clone 326557 (TRAV27, TRAJ13)
CAGVRGYQKVTF

SEQ ID NO: 653114 - protein, 16 aa, Homo sapiens
  CDR3 for beta chain variable domain of TCR clone 326557 (TRBV28, TRBJ2-1)
CASSSSYSGASMSSSS

SEQ ID NO: 653115 - protein, 13 aa, Homo sapiens
  CDR3 for alpha chain variable domain of TCR clone 326558 (TRAV3, TRAJ21)
CAVREPDFNKFYF

SEQ ID NO: 653116 - protein, 12 aa, Homo sapiens
  CDR3 for beta chain variable domain of TCR clone 326558 (TRBV11-2, TRBJ2-2)
CASSRGGGELFF

SEQ ID NO: 653117 - protein, 15 aa, Homo sapiens
  CDR3 for alpha chain variable domain of TCR clone 326559 (TRAV17, TRAJ37)
CAKDGGSSNTGKLIF

SEQ ID NO: 653118 - protein, 15 aa, Homo sapiens
  CDR3 for beta chain variable domain of TCR clone 326559 (TRBV28, TRBJ2-5)
CASSSGRTIQETQYF

SEQ ID NO: 653119 - protein, 14 aa, Homo sapiens
  CDR3 for alpha chain variable domain of TCR clone 326560 (TRAV3, TRAJ36)
CAVRDGTGASNLFF

SEQ ID NO: 653120 - protein, 16 aa, Homo sapiens
  CDR3 for beta chain variable domain of TCR clone 326560 (TRBV20-1, TRBJ2-6)
CSAREGPGVGANVLTF

SEQ ID NO: 653121 - protein, 14 aa, Homo sapiens
  CDR3 for alpha chain variable domain of TCR clone 326561 (TRAV23/DV6, TRAJ17)
CAARGRAAGNNLTF

SEQ ID NO: 653122 - protein, 12 aa, Homo sapiens
  CDR3 for beta chain variable domain of TCR clone 326561 (TRBV7-9, TRBJ2-3)
CASSFITDTQYF

SEQ ID NO: 653123 - protein, 14 aa, Homo sapiens
  CDR3 for alpha chain variable domain of TCR clone 326562 (TRAV8-3, TRAJ4)
CAVGAAGGYNTLIF

SEQ ID NO: 653124 - protein, 15 aa, Homo sapiens
  CDR3 for beta chain variable domain of TCR clone 326562 (TRBV20-1, TRBJ2-5)
CSAPPRTGFGETQYF

SEQ ID NO: 653125 - protein, 16 aa, Homo sapiens
  CDR3 for alpha chain variable domain of TCR clone 326563 (TRAV3, TRAJ10)
CAVRDMRAGGGNKLTF

SEQ ID NO: 653126 - protein, 18 aa, Homo sapiens
  CDR3 for beta chain variable domain of TCR clone 326563 (TRBV12-4, TRBJ2-2)
CASSLVAGTRGRTGELFF

SEQ ID NO: 653127 - protein, 15 aa, Homo sapiens
  CDR3 for alpha chain variable domain of TCR clone 326564 (TRAV13-2, TRAJ45)
CAEDNSGGGADGLTF

SEQ ID NO: 653128 - protein, 12 aa, Homo sapiens
  CDR3 for beta chain variable domain of TCR clone 326564 (TRBV11-2, TRBJ2-1)
CASSPGNNEQFF

SEQ ID NO: 653129 - protein, 13 aa, Homo sapiens
  CDR3 for alpha chain variable domain of TCR clone 326565 (TRAV27, TRAJ41)
CAGEGNSGYALNF

SEQ ID NO: 653130 - protein, 14 aa, Homo sapiens
  CDR3 for beta chain variable domain of TCR clone 326565 (TRBV18, TRBJ2-3)
CASSRDRGTDTQYF

SEQ ID NO: 653131 - protein, 13 aa, Homo sapiens
  CDR3 for alpha chain variable domain of TCR clone 326566 (TRAV21, TRAJ45)
CAVMGGGADGLTF

SEQ ID NO: 653132 - protein, 20 aa, Homo sapiens
  CDR3 for beta chain variable domain of TCR clone 326566 (TRBV7-8, TRBJ2-1)
CASSLAHRLAGVRSYNEQFF

SEQ ID NO: 653133 - protein, 14 aa, Homo sapiens
  CDR3 for alpha chain variable domain of TCR clone 326567 (TRAV1-2, TRAJ8)
CAVREDTGFQKHVF

SEQ ID NO: 653134 - protein, 15 aa, Homo sapiens
  CDR3 for beta chain variable domain of TCR clone 326567 (TRBV7-3, TRBJ2-1)
CASSPTGGGEVEQFF

SEQ ID NO: 653135 - protein, 14 aa, Homo sapiens
  CDR3 for alpha chain variable domain of TCR clone 326568 (TRAV13-1, TRAJ35)
CAASKGGFGNVLHC

SEQ ID NO: 653136 - protein, 13 aa, Homo sapiens
  CDR3 for beta chain variable domain of TCR clone 326568 (TRBV7-2, TRBJ1-1)
CASNLKGAKVAFF

SEQ ID NO: 653137 - protein, 13 aa, Homo sapiens
  CDR3 for alpha chain variable domain of TCR clone 326569 (TRAV2, TRAJ21)
CAVDDNNFNKSYF

SEQ ID NO: 653138 - protein, 14 aa, Homo sapiens
  CDR3 for beta chain variable domain of TCR clone 326569 (TRBV6-1, TRBJ2-7)
CASSERVNPYEQYF

SEQ ID NO: 653139 - protein, 18 aa, Homo sapiens
  CDR3 for alpha chain variable domain of TCR clone 326570 (TRAV13-1, TRAJ52)
CAASKRSAGGTSYGKLTF

SEQ ID NO: 653140 - protein, 13 aa, Homo sapiens
  CDR3 for beta chain variable domain of TCR clone 326570 (TRBV12-4, TRBJ1-2)
CVGSLRQGKGYTF

SEQ ID NO: 653141 - protein, 17 aa, Homo sapiens
  CDR3 for alpha chain variable domain of TCR clone 326571 (TRAV4, TRAJ18)
CLVGERSVGSTLGRLYF

SEQ ID NO: 653142 - protein, 16 aa, Homo sapiens
  CDR3 for beta chain variable domain of TCR clone 326571 (TRBV5-1, TRBJ2-1)
CASSIRSGGSYNEQFF

SEQ ID NO: 653143 - protein, 15 aa, Homo sapiens
  CDR3 for alpha chain variable domain of TCR clone 326572 (TRAV8-4, TRAJ8)
CAVSDLNTGFQKLVL

SEQ ID NO: 653144 - protein, 16 aa, Homo sapiens
  CDR3 for beta chain variable domain of TCR clone 326572 (TRBV7-2, TRBJ2-2)
CASSLKRGTLSGELFF

SEQ ID NO: 653145 - protein, 14 aa, Homo sapiens
  CDR3 for alpha chain variable domain of TCR clone 326573 (TRAV12-3, TRAJ42)
CAMNYGGSQGNLIF

SEQ ID NO: 653146 - protein, 15 aa, Homo sapiens
  CDR3 for beta chain variable domain of TCR clone 326573 (TRBV28, TRBJ2-1)
CASSIIAGGRSEQFF

SEQ ID NO: 653147 - protein, 15 aa, Homo sapiens
  CDR3 for alpha chain variable domain of TCR clone 326574 (TRAV21, TRAJ40)
CAVRPQTSGTYKYIF

SEQ ID NO: 653148 - protein, 13 aa, Homo sapiens
  CDR3 for beta chain variable domain of TCR clone 326574 (TRBV7-2, TRBJ2-2)
CASGSVRAGELFF

SEQ ID NO: 653149 - protein, 18 aa, Homo sapiens
  CDR3 for alpha chain variable domain of TCR clone 326575 (TRAV29/DV5, TRAJ52)
CAAGFRGAGGTSYGKLAF

SEQ ID NO: 653150 - protein, 15 aa, Homo sapiens
  CDR3 for beta chain variable domain of TCR clone 326575 (TRBV9, TRBJ1-6)
CASSVAGTGDSPLHF

SEQ ID NO: 653151 - protein, 13 aa, Homo sapiens
  CDR3 for alpha chain variable domain of TCR clone 326576 (TRAV17, TRAJ26)
CATVDNYGQNFVF

SEQ ID NO: 653152 - protein, 14 aa, Homo sapiens
  CDR3 for beta chain variable domain of TCR clone 326576 (TRBV7-2, TRBJ1-1)
CAGSFLTGTTEAFF

SEQ ID NO: 653153 - protein, 14 aa, Homo sapiens
  CDR3 for alpha chain variable domain of TCR clone 326577 (TRAV20, TRAJ22)
CAVALGGSARQLTF

SEQ ID NO: 653154 - protein, 17 aa, Homo sapiens
  CDR3 for beta chain variable domain of TCR clone 326577 (TRBV13, TRBJ2-3)
CASSLSRVAGGRNTQYV

SEQ ID NO: 653155 - protein, 11 aa, Homo sapiens
  CDR3 for alpha chain variable domain of TCR clone 326578 (TRAV1-1, TRAJ23)
CAVRQGGKLIF

SEQ ID NO: 653156 - protein, 13 aa, Homo sapiens
  CDR3 for beta chain variable domain of TCR clone 326578 (TRBV13, TRBJ2-5)
CASSPEVGETQYF

SEQ ID NO: 653157 - protein, 14 aa, Homo sapiens
  CDR3 for alpha chain variable domain of TCR clone 326579 (TRAV8-3, TRAJ7)
CAAVELYGNNSLAF

SEQ ID NO: 653158 - protein, 13 aa, Homo sapiens
  CDR3 for beta chain variable domain of TCR clone 326579 (TRBV10-3, TRBJ2-7)
CASKLAVNYEQYF

SEQ ID NO: 653159 - protein, 12 aa, Homo sapiens
  CDR3 for alpha chain variable domain of TCR clone 326580 (TRAV12-2, TRAJ31)
CAVNTPDARLMF

SEQ ID NO: 653160 - protein, 16 aa, Homo sapiens
  CDR3 for beta chain variable domain of TCR clone 326580 (TRBV12-4, TRBJ1-5)
CASSRPVGGSNQPQHF

SEQ ID NO: 653161 - protein, 12 aa, Homo sapiens
  CDR3 for alpha chain variable domain of TCR clone 326581 (TRAV16, TRAJ5)
CALGAGSRALTF

SEQ ID NO: 653162 - protein, 13 aa, Homo sapiens
  CDR3 for beta chain variable domain of TCR clone 326581 (TRBV9, TRBJ2-3)
CASSVGGTDTQYF

SEQ ID NO: 653163 - protein, 16 aa, Homo sapiens
  CDR3 for alpha chain variable domain of TCR clone 326582 (TRAV16, TRAJ4)
CALSRMFSGGYNKLIF

SEQ ID NO: 653164 - protein, 15 aa, Homo sapiens
  CDR3 for beta chain variable domain of TCR clone 326582 (TRBV5-1, TRBJ2-7)
CASSLYPDGGYEQYF

SEQ ID NO: 653165 - protein, 14 aa, Homo sapiens
  CDR3 for alpha chain variable domain of TCR clone 326583 (TRAV1-2, TRAJ8)
CAVREDTGFQKLVF

SEQ ID NO: 653166 - protein, 14 aa, Homo sapiens
  CDR3 for beta chain variable domain of TCR clone 326583 (TRBV7-2, TRBJ2-7)
CASRSQGAACEQYF

SEQ ID NO: 653167 - protein, 16 aa, Homo sapiens
  CDR3 for alpha chain variable domain of TCR clone 326584 (TRAV30, TRAJ24)
CGTEIVDSDSWGKFQF

SEQ ID NO: 653168 - protein, 14 aa, Homo sapiens
  CDR3 for beta chain variable domain of TCR clone 326584 (TRBV5-5, TRBJ1-2)
CASSLDPYNYGYTF

SEQ ID NO: 653169 - protein, 14 aa, Homo sapiens
  CDR3 for alpha chain variable domain of TCR clone 326585 (TRAV26-1, TRAJ44)
CIVSNTGTASKLAF

SEQ ID NO: 653170 - protein, 11 aa, Homo sapiens
  CDR3 for beta chain variable domain of TCR clone 326585 (TRBV19, TRBJ2-7)
CASSILGEQYF

SEQ ID NO: 653171 - protein, 13 aa, Homo sapiens
  CDR3 for alpha chain variable domain of TCR clone 326586 (TRAV12-2, TRAJ10)
CAVPTGGGNKLTF

SEQ ID NO: 653172 - protein, 15 aa, Homo sapiens
  CDR3 for beta chain variable domain of TCR clone 326586 (TRBV20-1, TRBJ2-1)
CSARGIGGTYNEQFF

SEQ ID NO: 653173 - protein, 14 aa, Homo sapiens
  CDR3 for alpha chain variable domain of TCR clone 326587 (TRAV2, TRAJ9)
CAVEDRSGGFKTIF

SEQ ID NO: 653174 - protein, 12 aa, Homo sapiens
  CDR3 for beta chain variable domain of TCR clone 326587 (TRBV7-9, TRBJ2-7)
CASSLDGYEQYF

SEQ ID NO: 653175 - protein, 14 aa, Homo sapiens
  CDR3 for alpha chain variable domain of TCR clone 326588 (TRAV1-2, TRAJ8)
CAVREDTGFQKLVF

SEQ ID NO: 653176 - protein, 15 aa, Homo sapiens
  CDR3 for beta chain variable domain of TCR clone 326588 (TRBV5-1, TRBJ2-1)
CASSPTRAPYNEQFF

SEQ ID NO: 653177 - protein, 16 aa, Homo sapiens
  CDR3 for alpha chain variable domain of TCR clone 326589 (TRAV13-2, TRAJ37)
CAETPFGSGNTGKLIF

SEQ ID NO: 653178 - protein, 15 aa, Homo sapiens
  CDR3 for beta chain variable domain of TCR clone 326589 (TRBV11-3, TRBJ2-3)
CASLKDGREGDTQYF

SEQ ID NO: 653179 - protein, 16 aa, Homo sapiens
  CDR3 for alpha chain variable domain of TCR clone 326590 (TRAV3, TRAJ37)
CAVRGKGSGNTGKLIF

SEQ ID NO: 653180 - protein, 17 aa, Homo sapiens
  CDR3 for beta chain variable domain of TCR clone 326590 (TRBV4-1, TRBJ2-5)
CASSQDLTGGPIETQYF

SEQ ID NO: 653181 - protein, 15 aa, Homo sapiens
  CDR3 for alpha chain variable domain of TCR clone 326591 (TRAV17, TRAJ53)
CATDDSGGSNYKLTF

SEQ ID NO: 653182 - protein, 15 aa, Homo sapiens
  CDR3 for beta chain variable domain of TCR clone 326591 (TRBV18, TRBJ2-1)
CASSPPSASYNEQFF

SEQ ID NO: 653183 - protein, 14 aa, Homo sapiens
  CDR3 for alpha chain variable domain of TCR clone 326592 (TRAV13-1, TRAJ3)
CAASKSSSASKIIF

SEQ ID NO: 653184 - protein, 15 aa, Homo sapiens
  CDR3 for beta chain variable domain of TCR clone 326592 (TRBV5-7, TRBJ2-1)
CASSRRLAGDNEQFF

SEQ ID NO: 653185 - protein, 18 aa, Homo sapiens
  CDR3 for alpha chain variable domain of TCR clone 326593 (TRAV13-1, TRAJ52)
CAAKNPNAGCTSYGKLTF

SEQ ID NO: 653186 - protein, 18 aa, Homo sapiens
  CDR3 for beta chain variable domain of TCR clone 326593 (TRBV4-1, TRBJ1-4)
CASSPRTGGAWTNEKLFF

SEQ ID NO: 653187 - protein, 15 aa, Homo sapiens
  CDR3 for alpha chain variable domain of TCR clone 326594 (TRAV17, TRAJ4)
CATGTWSGGYNKLIF

SEQ ID NO: 653188 - protein, 15 aa, Homo sapiens
  CDR3 for beta chain variable domain of TCR clone 326594 (TRBV7-2, TRBJ2-7)
CASSWGQGAIYEQYF

SEQ ID NO: 653189 - protein, 15 aa, Homo sapiens
  CDR3 for alpha chain variable domain of TCR clone 326595 (TRAV3, TRAJ27)
CAVRDPLTNAGKSTF

SEQ ID NO: 653190 - protein, 15 aa, Homo sapiens
  CDR3 for beta chain variable domain of TCR clone 326595 (TRBV28, TRBJ2-1)
CASSIIAGGRSDQFF

SEQ ID NO: 653191 - protein, 10 aa, Homo sapiens
  CDR3 for alpha chain variable domain of TCR clone 326596 (TRAV12-3, TRAJ18)
CAMSAEAQPW

SEQ ID NO: 653192 - protein, 14 aa, Homo sapiens
  CDR3 for beta chain variable domain of TCR clone 326596 (TRBV11-2, TRBJ1-5)
CASSLDRGRQPQHF

SEQ ID NO: 653193 - protein, 16 aa, Homo sapiens
  CDR3 for alpha chain variable domain of TCR clone 326597 (TRAV3, TRAJ10)
CAVRDMRAGGGNKLTF

SEQ ID NO: 653194 - protein, 13 aa, Homo sapiens
  CDR3 for beta chain variable domain of TCR clone 326597 (TRBV19, TRBJ2-7)
CASSTTGNYEQYF

SEQ ID NO: 653195 - protein, 13 aa, Homo sapiens
  CDR3 for alpha chain variable domain of TCR clone 326598 (TRAV2, TRAJ15)
CAVAPQAGTALIF

SEQ ID NO: 653196 - protein, 17 aa, Homo sapiens
  CDR3 for beta chain variable domain of TCR clone 326598 (TRBV5-1, TRBJ2-5)
CASSPVALGQNQETQYF

SEQ ID NO: 653197 - protein, 14 aa, Homo sapiens
  CDR3 for alpha chain variable domain of TCR clone 326599 (TRAV30, TRAJ12)
CGTAWMDSSYKLIF

SEQ ID NO: 653198 - protein, 13 aa, Homo sapiens
  CDR3 for beta chain variable domain of TCR clone 326599 (TRBV12-4, TRBJ2-5)
CASRLAVQETQYF

SEQ ID NO: 653199 - protein, 13 aa, Homo sapiens
  CDR3 for alpha chain variable domain of TCR clone 326600 (TRAV21, TRAJ15)
CAVRNQAGTALIF

SEQ ID NO: 653200 - protein, 16 aa, Homo sapiens
  CDR3 for beta chain variable domain of TCR clone 326600 (TRBV4-3, TRBJ1-6)
CASSQDPGVYNSPLHF

SEQ ID NO: 653201 - protein, 15 aa, Homo sapiens
  CDR3 for alpha chain variable domain of TCR clone 326601 (TRAV12-3, TRAJ6)
CAMSATSGGSYIPTF

SEQ ID NO: 653202 - protein, 11 aa, Homo sapiens
  CDR3 for beta chain variable domain of TCR clone 326601 (TRBV20-1, TRBJ1-5)
CSAQWDQPQHF

SEQ ID NO: 653203 - protein, 18 aa, Homo sapiens
  CDR3 for alpha chain variable domain of TCR clone 326602 (TRAV17, TRAJ45)
CATSLDLYSGGGADGLTF

SEQ ID NO: 653204 - protein, 15 aa, Homo sapiens
  CDR3 for beta chain variable domain of TCR clone 326602 (TRBV11-2, TRBJ2-1)
CASSKNRGLIYKQFF

SEQ ID NO: 653205 - protein, 14 aa, Homo sapiens
  CDR3 for alpha chain variable domain of TCR clone 326603 (TRAV26-1, TRAJ38)
CIADNAGNNRKLIW

SEQ ID NO: 653206 - protein, 13 aa, Homo sapiens
  CDR3 for beta chain variable domain of TCR clone 326603 (TRBV11-2, TRBJ2-1)
CASSLDLVNEQFF

SEQ ID NO: 653207 - protein, 12 aa, Homo sapiens
  CDR3 for alpha chain variable domain of TCR clone 326604 (TRAV17, TRAJ20)
CATALNDYKLSF

SEQ ID NO: 653208 - protein, 12 aa, Homo sapiens
  CDR3 for beta chain variable domain of TCR clone 326604 (TRBV10-3, TRBJ2-7)
RAHGADSGEQYF

SEQ ID NO: 653209 - protein, 13 aa, Homo sapiens
  CDR3 for alpha chain variable domain of TCR clone 326605 (TRAV9-2, TRAJ49)
CALIQIGGNQFYF

SEQ ID NO: 653210 - protein, 15 aa, Homo sapiens
  CDR3 for beta chain variable domain of TCR clone 326605 (TRBV13, TRBJ1-5)
CASSFGQGGVQPQHF

SEQ ID NO: 653211 - protein, 14 aa, Homo sapiens
  CDR3 for alpha chain variable domain of TCR clone 326606 (TRAV8-2, TRAJ4)
CVVNPSGVYNKLIF

SEQ ID NO: 653212 - protein, 15 aa, Homo sapiens
  CDR3 for beta chain variable domain of TCR clone 326606 (TRBV4-1, TRBJ1-4)
CASSDTGGTNEKLFF

SEQ ID NO: 653213 - protein, 13 aa, Homo sapiens
  CDR3 for alpha chain variable domain of TCR clone 326607 (TRAV4, TRAJ22)
RLGGSVSARQLTF

SEQ ID NO: 653214 - protein, 15 aa, Homo sapiens
  CDR3 for beta chain variable domain of TCR clone 326607 (TRBV7-9, TRBJ1-6)
CASSSPGRGNSPLHF

SEQ ID NO: 653215 - protein, 14 aa, Homo sapiens
  CDR3 for alpha chain variable domain of TCR clone 326608 (TRAV3, TRAJ7)
CAVREEEREQQTRF

SEQ ID NO: 653216 - protein, 15 aa, Homo sapiens
  CDR3 for beta chain variable domain of TCR clone 326608 (TRBV11-2, TRBJ2-2)
CASSSDRVNAGELFF

SEQ ID NO: 653217 - protein, 16 aa, Homo sapiens
  CDR3 for alpha chain variable domain of TCR clone 326609 (TRAV8-4, TRAJ5)
CAVSPLTDTGRRALTF

SEQ ID NO: 653218 - protein, 14 aa, Homo sapiens
  CDR3 for beta chain variable domain of TCR clone 326609 (TRBV19, TRBJ1-6)
CASSTDGWNPPLHF

SEQ ID NO: 653219 - protein, 14 aa, Homo sapiens
  CDR3 for alpha chain variable domain of TCR clone 326610 (TRAV12-3, TRAJ56)
CAMSVTGANSKLTF

SEQ ID NO: 653220 - protein, 18 aa, Homo sapiens
  CDR3 for beta chain variable domain of TCR clone 326610 (TRBV12-4, TRBJ2-2)
CASSLVAGTRGRTGELFF

SEQ ID NO: 653221 - protein, 13 aa, Homo sapiens
  CDR3 for alpha chain variable domain of TCR clone 326611 (TRAV2, TRAJ15)
CAVDAQAGTALIF

SEQ ID NO: 653222 - protein, 15 aa, Homo sapiens
  CDR3 for beta chain variable domain of TCR clone 326611 (TRBV6-1, TRBJ2-1)
CASSELRGQYNEQFF

SEQ ID NO: 653223 - protein, 17 aa, Homo sapiens
  CDR3 for alpha chain variable domain of TCR clone 326612 (TRAV20, TRAJ28)
CAVQGGYPGAGSYQLTF

SEQ ID NO: 653224 - protein, 15 aa, Homo sapiens
  CDR3 for beta chain variable domain of TCR clone 326612 (TRBV7-2, TRBJ2-7)
CASSLSSGRTYEQYF

SEQ ID NO: 653225 - protein, 13 aa, Homo sapiens
  CDR3 for alpha chain variable domain of TCR clone 326613 (TRAV1-1, TRAJ30)
CAVRCDRDDKIIF

SEQ ID NO: 653226 - protein, 15 aa, Homo sapiens
  CDR3 for beta chain variable domain of TCR clone 326613 (TRBV4-1, TRBJ1-4)
CASSDTGGTNEKLFF

SEQ ID NO: 653227 - protein, 12 aa, Homo sapiens
  CDR3 for alpha chain variable domain of TCR clone 326614 (TRAV17, TRAJ20)
CATYSNDYKLSF

SEQ ID NO: 653228 - protein, 11 aa, Homo sapiens
  CDR3 for beta chain variable domain of TCR clone 326614 (TRBV4-1, TRBJ2-2)
CASGHTGELFF

SEQ ID NO: 653229 - protein, 16 aa, Homo sapiens
  CDR3 for alpha chain variable domain of TCR clone 326615 (TRAV30, TRAJ24)
CGTEIVDAASWGKFQF

SEQ ID NO: 653230 - protein, 13 aa, Homo sapiens
  CDR3 for beta chain variable domain of TCR clone 326615 (TRBV7-2, TRBJ2-2)
CASSLAVTGELFF

SEQ ID NO: 653231 - protein, 15 aa, Homo sapiens
  CDR3 for alpha chain variable domain of TCR clone 326616 (TRAV8-3, TRAJ45)
CASSYYGGGADGLTF

SEQ ID NO: 653232 - protein, 13 aa, Homo sapiens
  CDR3 for beta chain variable domain of TCR clone 326616 (TRBV10-3, TRBJ2-7)
CASKLAVNYEQYF

SEQ ID NO: 653233 - protein, 11 aa, Homo sapiens
  CDR3 for alpha chain variable domain of TCR clone 326617 (TRAV16, TRAJ57)
CSRGGSEKLVF

SEQ ID NO: 653234 - protein, 12 aa, Homo sapiens
  CDR3 for beta chain variable domain of TCR clone 326617 (TRBV28, TRBJ2-7)
CASSGRPYEQYF

SEQ ID NO: 653235 - protein, 11 aa, Homo sapiens
  CDR3 for alpha chain variable domain of TCR clone 326618 (TRAV1-2, TRAJ20)
CAVANDYKLSF

SEQ ID NO: 653236 - protein, 17 aa, Homo sapiens
  CDR3 for beta chain variable domain of TCR clone 326618 (TRBV4-1, TRBJ2-3)
CASSQVLQGGGTDTQYF

SEQ ID NO: 653237 - protein, 14 aa, Homo sapiens
  CDR3 for alpha chain variable domain of TCR clone 326619 (TRAV12-1, TRAJ6)
CVVKRSGGSYIPTF

SEQ ID NO: 653238 - protein, 16 aa, Homo sapiens
  CDR3 for beta chain variable domain of TCR clone 326619 (TRBV27, TRBJ2-5)
CASSYGPGGQKETQYF

SEQ ID NO: 653239 - protein, 10 aa, Homo sapiens
  CDR3 for alpha chain variable domain of TCR clone 326620 (TRAV30, TRAJ48)
CGFGNEKLTF

SEQ ID NO: 653240 - protein, 14 aa, Homo sapiens
  CDR3 for beta chain variable domain of TCR clone 326620 (TRBV7-6, TRBJ2-3)
CASSVAGGTDTQYF

SEQ ID NO: 653241 - protein, 14 aa, Homo sapiens
  CDR3 for alpha chain variable domain of TCR clone 326621 (TRAV1-2, TRAJ16)
CAVKRFSDGQKLLF

SEQ ID NO: 653242 - protein, 16 aa, Homo sapiens
  CDR3 for beta chain variable domain of TCR clone 326621 (TRBV11-2, TRBJ1-1)
CASSLRQGGEHSKAFF

SEQ ID NO: 653243 - protein, 14 aa, Homo sapiens
  CDR3 for alpha chain variable domain of TCR clone 326622 (TRAV21, TRAJ58)
CAVRKGTSGSRLTF

SEQ ID NO: 653244 - protein, 13 aa, Homo sapiens
  CDR3 for beta chain variable domain of TCR clone 326622 (TRBV7-6, TRBJ1-2)
CASSLVADYGYTF

SEQ ID NO: 653245 - protein, 14 aa, Homo sapiens
  CDR3 for alpha chain variable domain of TCR clone 326623 (TRAV35, TRAJ33)
CAGSSQDSNYQLIW

SEQ ID NO: 653246 - protein, 15 aa, Homo sapiens
  CDR3 for beta chain variable domain of TCR clone 326623 (TRBV28, TRBJ2-5)
CASSFRQGALETQYF

SEQ ID NO: 653247 - protein, 12 aa, Homo sapiens
  CDR3 for alpha chain variable domain of TCR clone 326624 (TRAV8-2, TRAJ5)
CVVSDIGRAVTF

SEQ ID NO: 653248 - protein, 14 aa, Homo sapiens
  CDR3 for beta chain variable domain of TCR clone 326624 (TRBV19, TRBJ2-7)
CASNFRDTFTGMYF

SEQ ID NO: 653249 - protein, 12 aa, Homo sapiens
  CDR3 for alpha chain variable domain of TCR clone 326625 (TRAV3, TRAJ31)
CAVRDGNARLMF

SEQ ID NO: 653250 - protein, 18 aa, Homo sapiens
  CDR3 for beta chain variable domain of TCR clone 326625 (TRBV7-2, TRBJ2-3)
CASSLKREGSVITDTQYF

SEQ ID NO: 653251 - protein, 13 aa, Homo sapiens
  CDR3 for alpha chain variable domain of TCR clone 326626 (TRAV12-3, TRAJ13)
FAMSSGGYQKVTF

SEQ ID NO: 653252 - protein, 16 aa, Homo sapiens
  CDR3 for beta chain variable domain of TCR clone 326626 (TRBV4-1, TRBJ2-7)
CASSRGDILNSYEQYF

SEQ ID NO: 653253 - protein, 15 aa, Homo sapiens
  CDR3 for alpha chain variable domain of TCR clone 326627 (TRAV27, TRAJ38)
CAGRFNAGNNRKLIW

SEQ ID NO: 653254 - protein, 13 aa, Homo sapiens
  CDR3 for beta chain variable domain of TCR clone 326627 (TRBV20-1, TRBJ1-1)
CSARVGGDTEAFF

SEQ ID NO: 653255 - protein, 15 aa, Homo sapiens
  CDR3 for alpha chain variable domain of TCR clone 326628 (TRAV1-2, TRAJ16)
CAVRARFSDGQKLLF

SEQ ID NO: 653256 - protein, 19 aa, Homo sapiens
  CDR3 for beta chain variable domain of TCR clone 326628 (TRBV11-3, TRBJ2-3)
CASGFGTSGGTRGGGTQYF

SEQ ID NO: 653257 - protein, 17 aa, Homo sapiens
  CDR3 for alpha chain variable domain of TCR clone 326629 (TRAV12-2, TRAJ52)
CAVNPYAGGTSYGKLTF

SEQ ID NO: 653258 - protein, 14 aa, Homo sapiens
  CDR3 for beta chain variable domain of TCR clone 326629 (TRBV4-2, TRBJ2-1)
CASGLDRAYNEQFF

SEQ ID NO: 653259 - protein, 12 aa, Homo sapiens
  CDR3 for alpha chain variable domain of TCR clone 326630 (TRAV8-3, TRAJ20)
CAVGANDYKLSF

SEQ ID NO: 653260 - protein, 12 aa, Homo sapiens
  CDR3 for beta chain variable domain of TCR clone 326630 (TRBV20-1, TRBJ2-1)
CSAQYTYNEQFF

SEQ ID NO: 653261 - protein, 20 aa, Homo sapiens
  CDR3 for alpha chain variable domain of TCR clone 326631 (TRAV26-1, TRAJ37)
CCVLLHRQINGSSNTGTLIF

SEQ ID NO: 653262 - protein, 13 aa, Homo sapiens
  CDR3 for beta chain variable domain of TCR clone 326631 (TRBV20-1, TRBJ2-7)
CSARTSGNYEQYF

SEQ ID NO: 653263 - protein, 13 aa, Homo sapiens
  CDR3 for alpha chain variable domain of TCR clone 326632 (TRAV8-3, TRAJ36)
CAVGATGANNLFL

SEQ ID NO: 653264 - protein, 15 aa, Homo sapiens
  CDR3 for beta chain variable domain of TCR clone 326632 (TRBV7-2, TRBJ1-2)
CASSSRAGWNYGYTF

SEQ ID NO: 653265 - protein, 14 aa, Homo sapiens
  CDR3 for alpha chain variable domain of TCR clone 326633 (TRAV3, TRAJ15)
CAVTLNQAGNALIF

SEQ ID NO: 653266 - protein, 17 aa, Homo sapiens
  CDR3 for beta chain variable domain of TCR clone 326633 (TRBV7-8, TRBJ2-7)
CASSFTSGRPPSYEQYF

SEQ ID NO: 653267 - protein, 15 aa, Homo sapiens
  CDR3 for alpha chain variable domain of TCR clone 326634 (TRAV12-3, TRAJ6)
CARSATTGGSYIHTF

SEQ ID NO: 653268 - protein, 16 aa, Homo sapiens
  CDR3 for beta chain variable domain of TCR clone 326634 (TRBV20-1, TRBJ1-2)
CSASMGQGVANSGYTF

SEQ ID NO: 653269 - protein, 15 aa, Homo sapiens
  CDR3 for alpha chain variable domain of TCR clone 326635 (TRAV26-1, TRAJ29)
CIVRVEGSGDTPLVV

SEQ ID NO: 653270 - protein, 14 aa, Homo sapiens
  CDR3 for beta chain variable domain of TCR clone 326635 (TRBV25-1, TRBJ1-1)
CASTHLGGNTEAFF

SEQ ID NO: 653271 - protein, 14 aa, Homo sapiens
  CDR3 for alpha chain variable domain of TCR clone 326636 (TRAV12-2, TRAJ6)
CASKWGGGSYIPTF

SEQ ID NO: 653272 - protein, 13 aa, Homo sapiens
  CDR3 for beta chain variable domain of TCR clone 326636 (TRBV2, TRBJ1-1)
CGSSEGGNTEAFF

SEQ ID NO: 653273 - protein, 16 aa, Homo sapiens
  CDR3 for alpha chain variable domain of TCR clone 326637 (TRAV12-1, TRAJ42)
CVVTPYYGGSRGNLIF

SEQ ID NO: 653274 - protein, 15 aa, Homo sapiens
  CDR3 for beta chain variable domain of TCR clone 326637 (TRBV4-3, TRBJ2-7)
CASSQGGRGIYEQYF

SEQ ID NO: 653275 - protein, 12 aa, Homo sapiens
  CDR3 for alpha chain variable domain of TCR clone 326638 (TRAV12-3, TRAJ43)
CAISSNNNDMRF

SEQ ID NO: 653276 - protein, 15 aa, Homo sapiens
  CDR3 for beta chain variable domain of TCR clone 326638 (TRBV7-9, TRBJ1-6)
CASSSPGRGNSPLHF

SEQ ID NO: 653277 - protein, 13 aa, Homo sapiens
  CDR3 for alpha chain variable domain of TCR clone 326639 (TRAV27, TRAJ6)
CAGGTRGRYIPTF

SEQ ID NO: 653278 - protein, 13 aa, Homo sapiens
  CDR3 for beta chain variable domain of TCR clone 326639 (TRBV4-1, TRBJ2-5)
CASSLTRGETQYF

SEQ ID NO: 653279 - protein, 11 aa, Homo sapiens
  CDR3 for alpha chain variable domain of TCR clone 326640 (TRAV3, TRAJ31)
CAVRDGNATHV

SEQ ID NO: 653280 - protein, 18 aa, Homo sapiens
  CDR3 for beta chain variable domain of TCR clone 326640 (TRBV7-2, TRBJ2-3)
CASSLKREGSGITDTQYF

SEQ ID NO: 653281 - protein, 17 aa, Homo sapiens
  CDR3 for alpha chain variable domain of TCR clone 326641 (TRAV13-1, TRAJ52)
CSKKPQCCGTSYGKLTF

SEQ ID NO: 653282 - protein, 18 aa, Homo sapiens
  CDR3 for beta chain variable domain of TCR clone 326641 (TRBV12-4, TRBJ2-4)
CASSRTGAVDVAKNMQYF

SEQ ID NO: 653283 - protein, 10 aa, Homo sapiens
  CDR3 for alpha chain variable domain of TCR clone 326642 (TRAV12-1, TRAJ41)
CVVPELKFRV

SEQ ID NO: 653284 - protein, 17 aa, Homo sapiens
  CDR3 for beta chain variable domain of TCR clone 326642 (TRBV7-8, TRBJ2-6)
CASSAGTGGAGANVLTF

SEQ ID NO: 653285 - protein, 12 aa, Homo sapiens
  CDR3 for alpha chain variable domain of TCR clone 326643 (TRAV26-1, TRAJ43)
CIVRGNNNDMRF

SEQ ID NO: 653286 - protein, 13 aa, Homo sapiens
  CDR3 for beta chain variable domain of TCR clone 326643 (TRBV20-1, TRBJ2-3)
CSAIYPGADKQYF

SEQ ID NO: 653287 - protein, 13 aa, Homo sapiens
  CDR3 for alpha chain variable domain of TCR clone 326644 (TRAV12-3, TRAJ13)
CAMGTGGYQKVTF

SEQ ID NO: 653288 - protein, 14 aa, Homo sapiens
  CDR3 for beta chain variable domain of TCR clone 326644 (TRBV7-6, TRBJ2-3)
CASSLGTVTDTQYF

SEQ ID NO: 653289 - protein, 11 aa, Homo sapiens
  CDR3 for alpha chain variable domain of TCR clone 326645 (TRAV23/DV6, TRAJ58)
CAARLLRGETS

SEQ ID NO: 653290 - protein, 12 aa, Homo sapiens
  CDR3 for beta chain variable domain of TCR clone 326645 (TRBV29-1, TRBJ2-3)
CSVTGGADTQYF

SEQ ID NO: 653291 - protein, 15 aa, Homo sapiens
  CDR3 for alpha chain variable domain of TCR clone 326646 (TRAV8-6, TRAJ26)
CAVSDQSPGGQNFVF

SEQ ID NO: 653292 - protein, 13 aa, Homo sapiens
  CDR3 for beta chain variable domain of TCR clone 326646 (TRBV27, TRBJ2-7)
CASCLRHRYEQYF

SEQ ID NO: 653293 - protein, 12 aa, Homo sapiens
  CDR3 for alpha chain variable domain of TCR clone 326647 (TRAV2, TRAJ10)
CASTGGGNKLTF

SEQ ID NO: 653294 - protein, 14 aa, Homo sapiens
  CDR3 for beta chain variable domain of TCR clone 326647 (TRBV6-6, TRBJ2-3)
CASRLQREADKQYF

SEQ ID NO: 653295 - protein, 12 aa, Homo sapiens
  CDR3 for alpha chain variable domain of TCR clone 326648 (TRAV29/DV5, TRAJ34)
CAARHNTDKLIF

SEQ ID NO: 653296 - protein, 15 aa, Homo sapiens
  CDR3 for beta chain variable domain of TCR clone 326648 (TRBV19, TRBJ2-7)
CASSPAGSGEALRYL

SEQ ID NO: 653297 - protein, 10 aa, Homo sapiens
  CDR3 for alpha chain variable domain of TCR clone 326649 (TRAV26-1, TRAJ22)
CIVSLNFFWF

SEQ ID NO: 653298 - protein, 16 aa, Homo sapiens
  CDR3 for beta chain variable domain of TCR clone 326649 (TRBV5-1, TRBJ2-3)
CASSLTSGTSGGTQYF

SEQ ID NO: 653299 - protein, 15 aa, Homo sapiens
  CDR3 for alpha chain variable domain of TCR clone 326650 (TRAV8-4, TRAJ37)
CAVTYGSSNTGKLNF

SEQ ID NO: 653300 - protein, 13 aa, Homo sapiens
  CDR3 for beta chain variable domain of TCR clone 326650 (TRBV12-4, TRBJ2-5)
CASSLGGSRTQYF

SEQ ID NO: 653301 - protein, 12 aa, Homo sapiens
  CDR3 for alpha chain variable domain of TCR clone 326651 (TRAV12-3, TRAJ20)
RAMVRGDYKLSF

SEQ ID NO: 653302 - protein, 12 aa, Homo sapiens
  CDR3 for beta chain variable domain of TCR clone 326651 (TRBV29-1, TRBJ1-1)
CSESDGNTEAFF

SEQ ID NO: 653303 - protein, 13 aa, Homo sapiens
  CDR3 for alpha chain variable domain of TCR clone 326652 (TRAV30, TRAJ48)
CGTFLKRNEKLTF

SEQ ID NO: 653304 - protein, 17 aa, Homo sapiens
  CDR3 for beta chain variable domain of TCR clone 326652 (TRBV7-3, TRBJ2-3)
CASSLMKRMRGADTQYF

SEQ ID NO: 653305 - protein, 14 aa, Homo sapiens
  CDR3 for alpha chain variable domain of TCR clone 326653 (TRAV4, TRAJ17)
CLVGPRAAGNKLTF

SEQ ID NO: 653306 - protein, 13 aa, Homo sapiens
  CDR3 for beta chain variable domain of TCR clone 326653 (TRBV7-3, TRBJ1-1)
CASSQDWGAEAFF

SEQ ID NO: 653307 - protein, 13 aa, Homo sapiens
  CDR3 for alpha chain variable domain of TCR clone 326654 (TRAV8-3, TRAJ28)
CAAGAVGSYQLTF

SEQ ID NO: 653308 - protein, 14 aa, Homo sapiens
  CDR3 for beta chain variable domain of TCR clone 326654 (TRBV7-2, TRBJ2-7)
CASRSQGAAYEQYV

SEQ ID NO: 653309 - protein, 13 aa, Homo sapiens
  CDR3 for alpha chain variable domain of TCR clone 326655 (TRAV24, TRAJ42)
CAFSTGSQGNLIF

SEQ ID NO: 653310 - protein, 16 aa, Homo sapiens
  CDR3 for beta chain variable domain of TCR clone 326655 (TRBV19, TRBJ2-1)
CASSKAGPSSYNEQFF

SEQ ID NO: 653311 - protein, 14 aa, Homo sapiens
  CDR3 for alpha chain variable domain of TCR clone 326656 (TRAV1-2, TRAJ8)
CAVREVTGFQKLVF

SEQ ID NO: 653312 - protein, 15 aa, Homo sapiens
  CDR3 for beta chain variable domain of TCR clone 326656 (TRBV6-3, TRBJ2-7)
CSSSSPGTVFYEQYF

SEQ ID NO: 653313 - protein, 13 aa, Homo sapiens
  CDR3 for alpha chain variable domain of TCR clone 326657 (TRAV38-2/DV8, TRAJ34)
CAYRNYNTDKLIF

SEQ ID NO: 653314 - protein, 15 aa, Homo sapiens
  CDR3 for beta chain variable domain of TCR clone 326657 (TRBV20-1, TRBJ2-5)
CSAEGTGGLQETQSF

SEQ ID NO: 653315 - protein, 11 aa, Homo sapiens
  CDR3 for alpha chain variable domain of TCR clone 326658 (TRAV23/DV6, TRAJ48)
CAPRRGEKLTF

SEQ ID NO: 653316 - protein, 13 aa, Homo sapiens
  CDR3 for beta chain variable domain of TCR clone 326658 (TRBV12-4, TRBJ2-5)
CASSPGTEETQYF

SEQ ID NO: 653317 - protein, 14 aa, Homo sapiens
  CDR3 for alpha chain variable domain of TCR clone 326659 (TRAV12-2, TRAJ13)
CAVKKTGGYQKVTF

SEQ ID NO: 653318 - protein, 15 aa, Homo sapiens
  CDR3 for beta chain variable domain of TCR clone 326659 (TRBV20-1, TRBJ1-1)
CSARSAATSNTEAFF

SEQ ID NO: 653319 - protein, 13 aa, Homo sapiens
  CDR3 for alpha chain variable domain of TCR clone 326660 (TRAV20, TRAJ37)
CAGCSSNTGKLIF

SEQ ID NO: 653320 - protein, 15 aa, Homo sapiens
  CDR3 for beta chain variable domain of TCR clone 326660 (TRBV7-6, TRBJ2-2)
CASRRTSGNTGELFF

SEQ ID NO: 653321 - protein, 13 aa, Homo sapiens
  CDR3 for alpha chain variable domain of TCR clone 326661 (TRAV12-2, TRAJ50)
SAVIVTSYDKVIF

SEQ ID NO: 653322 - protein, 14 aa, Homo sapiens
  CDR3 for beta chain variable domain of TCR clone 326661 (TRBV9, TRBJ2-1)
CASSVDPRGKEQFF

SEQ ID NO: 653323 - protein, 13 aa, Homo sapiens
  CDR3 for alpha chain variable domain of TCR clone 326662 (TRAV5, TRAJ30)
CAEIANRDDMIIF

SEQ ID NO: 653324 - protein, 14 aa, Homo sapiens
  CDR3 for beta chain variable domain of TCR clone 326662 (TRBV4-1, TRBJ2-2)
CASSQAVNTGELFF

SEQ ID NO: 653325 - protein, 13 aa, Homo sapiens
  CDR3 for alpha chain variable domain of TCR clone 326663 (TRAV21, TRAJ32)
CAPGGGATNKLIF

SEQ ID NO: 653326 - protein, 14 aa, Homo sapiens
  CDR3 for beta chain variable domain of TCR clone 326663 (TRBV7-2, TRBJ2-7)
CASSPKTSFYEQYF

SEQ ID NO: 653327 - protein, 13 aa, Homo sapiens
  CDR3 for alpha chain variable domain of TCR clone 326664 (TRAV13-2, TRAJ48)
CAEMDFGNEKLTF

SEQ ID NO: 653328 - protein, 13 aa, Homo sapiens
  CDR3 for beta chain variable domain of TCR clone 326664 (TRBV7-9, TRBJ1-2)
CARSLKQNYGYSF

SEQ ID NO: 653329 - protein, 18 aa, Homo sapiens
  CDR3 for alpha chain variable domain of TCR clone 326665 (TRAV26-2, TRAJ54)
CILRDVEVGIQGAQKLVF

SEQ ID NO: 653330 - protein, 17 aa, Homo sapiens
  CDR3 for beta chain variable domain of TCR clone 326665 (TRBV20-1, TRBJ1-5)
CSASLSPGQGGSQAQHF

SEQ ID NO: 653331 - protein, 22 aa, Homo sapiens
  CDR3 for alpha chain variable domain of TCR clone 326666 (TRAV36/DV7, TRAJ38)
CVANAGNNHIQNPDPAVYQLRD

SEQ ID NO: 653332 - protein, 14 aa, Homo sapiens
  CDR3 for beta chain variable domain of TCR clone 326666 (TRBV7-2, TRBJ2-7)
CASSLRWDVNEQYF

SEQ ID NO: 653333 - protein, 16 aa, Homo sapiens
  CDR3 for alpha chain variable domain of TCR clone 326667 (TRAV38-1, TRAJ56)
CAFMKRQTGANSKLTF

SEQ ID NO: 653334 - protein, 16 aa, Homo sapiens
  CDR3 for beta chain variable domain of TCR clone 326667 (TRBV11-3, TRBJ2-5)
CASSSVVAGSTETQYF

SEQ ID NO: 653335 - protein, 14 aa, Homo sapiens
  CDR3 for alpha chain variable domain of TCR clone 326668 (TRAV1-2, TRAJ6)
CAVSLSGGSYIPTF

SEQ ID NO: 653336 - protein, 15 aa, Homo sapiens
  CDR3 for beta chain variable domain of TCR clone 326668 (TRBV4-1, TRBJ2-7)
CASSQQGQGFDEQYF

SEQ ID NO: 653337 - protein, 16 aa, Homo sapiens
  CDR3 for alpha chain variable domain of TCR clone 326669 (TRAV8-4, TRAJ9)
CAVTFNTGGFKNYLWS

SEQ ID NO: 653338 - protein, 15 aa, Homo sapiens
  CDR3 for beta chain variable domain of TCR clone 326669 (TRBV7-9, TRBJ2-2)
CASSPETGAGGELYF

SEQ ID NO: 653339 - protein, 15 aa, Homo sapiens
  CDR3 for alpha chain variable domain of TCR clone 326670 (TRAV2, TRAJ11)
CAVGGRNSRYSTLTF

SEQ ID NO: 653340 - protein, 14 aa, Homo sapiens
  CDR3 for beta chain variable domain of TCR clone 326670 (TRBV4-1, TRBJ2-2)
CASSQAVNTGELFF

SEQ ID NO: 653341 - protein, 14 aa, Homo sapiens
  CDR3 for alpha chain variable domain of TCR clone 326671 (TRAV12-2, TRAJ13)
CAVKKTGGYQKVTF

SEQ ID NO: 653342 - protein, 14 aa, Homo sapiens
  CDR3 for beta chain variable domain of TCR clone 326671 (TRBV2, TRBJ2-3)
CASRLAGLKDTQYF

SEQ ID NO: 653343 - protein, 13 aa, Homo sapiens
  CDR3 for alpha chain variable domain of TCR clone 326672 (TRAV17, TRAJ9)
CATDYTGGFKTIF

SEQ ID NO: 653344 - protein, 14 aa, Homo sapiens
  CDR3 for beta chain variable domain of TCR clone 326672 (TRBV19, TRBJ2-1)
CASGKSTQYNEQFF

SEQ ID NO: 653345 - protein, 12 aa, Homo sapiens
  CDR3 for alpha chain variable domain of TCR clone 326673 (TRAV21, TRAJ20)
CAVRRNDYKLSF

SEQ ID NO: 653346 - protein, 16 aa, Homo sapiens
  CDR3 for beta chain variable domain of TCR clone 326673 (TRBV7-3, TRBJ2-1)
CASSLVSGSSNSEQFF

SEQ ID NO: 653347 - protein, 14 aa, Homo sapiens
  CDR3 for alpha chain variable domain of TCR clone 326674 (TRAV16, TRAJ33)
CALSAMDRNYQLIW

SEQ ID NO: 653348 - protein, 17 aa, Homo sapiens
  CDR3 for beta chain variable domain of TCR clone 326674 (TRBV25-1, TRBJ2-7)
CASSDARVVFSSYEQYF

SEQ ID NO: 653349 - protein, 10 aa, Homo sapiens
  CDR3 for alpha chain variable domain of TCR clone 326675 (TRAV23/DV6, TRAJ57)
CAASSTLSQG

SEQ ID NO: 653350 - protein, 14 aa, Homo sapiens
  CDR3 for beta chain variable domain of TCR clone 326675 (TRBV13, TRBJ2-5)
CASSLGQGKETQYV

SEQ ID NO: 653351 - protein, 19 aa, Homo sapiens
  CDR3 for alpha chain variable domain of TCR clone 326676 (TRAV8-3, TRAJ34)
LSTSVLWVWGLRNTDKLLF

SEQ ID NO: 653352 - protein, 13 aa, Homo sapiens
  CDR3 for beta chain variable domain of TCR clone 326676 (TRBV12-4, TRBJ2-7)
CASSLSGVYEQYF

SEQ ID NO: 653353 - protein, 14 aa, Homo sapiens
  CDR3 for alpha chain variable domain of TCR clone 326677 (TRAV27, TRAJ49)
CAGRPEGTGNQFYF

SEQ ID NO: 653354 - protein, 12 aa, Homo sapiens
  CDR3 for beta chain variable domain of TCR clone 326677 (TRBV28, TRBJ2-3)
CASSLYRDTQYF

SEQ ID NO: 653355 - protein, 14 aa, Homo sapiens
  CDR3 for alpha chain variable domain of TCR clone 326678 (TRAV1-2, TRAJ16)
CAVNRFSDGQKLLF

SEQ ID NO: 653356 - protein, 14 aa, Homo sapiens
  CDR3 for beta chain variable domain of TCR clone 326678 (TRBV19, TRBJ2-7)
CASSGDSESYEQYF

SEQ ID NO: 653357 - protein, 16 aa, Homo sapiens
  CDR3 for alpha chain variable domain of TCR clone 326679 (TRAV3, TRAJ37)
CAVRGKGSGNTGKLIF

SEQ ID NO: 653358 - protein, 13 aa, Homo sapiens
  CDR3 for beta chain variable domain of TCR clone 326679 (TRBV15, TRBJ2-1)
CVPPAEVDTARFF

SEQ ID NO: 653359 - protein, 14 aa, Homo sapiens
  CDR3 for alpha chain variable domain of TCR clone 326680 (TRAV29/DV5, TRAJ45)
CAASFRGGADGLTF

SEQ ID NO: 653360 - protein, 14 aa, Homo sapiens
  CDR3 for beta chain variable domain of TCR clone 326680 (TRBV28, TRBJ2-5)
CASSLYRGTETQYF

SEQ ID NO: 653361 - protein, 12 aa, Homo sapiens
  CDR3 for alpha chain variable domain of TCR clone 326681 (TRAV21, TRAJ11)
CAATSGYSTLTF

SEQ ID NO: 653362 - protein, 14 aa, Homo sapiens
  CDR3 for beta chain variable domain of TCR clone 326681 (TRBV27, TRBJ2-3)
CASRKGGRTDTQYF

SEQ ID NO: 653363 - protein, 12 aa, Homo sapiens
  CDR3 for alpha chain variable domain of TCR clone 326682 (TRAV12-3, TRAJ17)
CAMTLTGNKLTF

SEQ ID NO: 653364 - protein, 15 aa, Homo sapiens
  CDR3 for beta chain variable domain of TCR clone 326682 (TRBV4-1, TRBJ1-4)
CGSSDTGGTNEKLFF

SEQ ID NO: 653365 - protein, 14 aa, Homo sapiens
  CDR3 for alpha chain variable domain of TCR clone 326683 (TRAV3, TRAJ34)
CAVRAPGNTGKLIF

SEQ ID NO: 653366 - protein, 14 aa, Homo sapiens
  CDR3 for beta chain variable domain of TCR clone 326683 (TRBV5-4, TRBJ1-1)
CASSLDSRRDEAFF

SEQ ID NO: 653367 - protein, 12 aa, Homo sapiens
  CDR3 for alpha chain variable domain of TCR clone 326684 (TRAV4, TRAJ6)
CLAPGGSYIPTF

SEQ ID NO: 653368 - protein, 13 aa, Homo sapiens
  CDR3 for beta chain variable domain of TCR clone 326684 (TRBV7-3, TRBJ1-1)
CASSQDWGAEAFF

SEQ ID NO: 653369 - protein, 13 aa, Homo sapiens
  CDR3 for alpha chain variable domain of TCR clone 326685 (TRAV2, TRAJ40)
CAVVTSGTYKYIF

SEQ ID NO: 653370 - protein, 15 aa, Homo sapiens
  CDR3 for beta chain variable domain of TCR clone 326685 (TRBV5-1, TRBJ1-2)
CASSSYGEFDYGYTF

SEQ ID NO: 653371 - protein, 20 aa, Homo sapiens
  CDR3 for alpha chain variable domain of TCR clone 326686 (TRAV12-3, TRAJ41)
SLFIRDSQPSDSATPEALNF

SEQ ID NO: 653372 - protein, 19 aa, Homo sapiens
  CDR3 for beta chain variable domain of TCR clone 326686 (TRBV25-1, TRBJ2-2)
CAILVYRVDRGRKTGELFF

SEQ ID NO: 653373 - protein, 14 aa, Homo sapiens
  CDR3 for alpha chain variable domain of TCR clone 326687 (TRAV1-2, TRAJ8)
CAVREDTGFQKLVF

SEQ ID NO: 653374 - protein, 13 aa, Homo sapiens
  CDR3 for beta chain variable domain of TCR clone 326687 (TRBV2, TRBJ2-7)
CASSVVEAYEQYF

SEQ ID NO: 653375 - protein, 10 aa, Homo sapiens
  CDR3 for alpha chain variable domain of TCR clone 326688 (TRAV30, TRAJ32)
CGTEKDMVVL

SEQ ID NO: 653376 - protein, 13 aa, Homo sapiens
  CDR3 for beta chain variable domain of TCR clone 326688 (TRBV10-3, TRBJ2-7)
CASKLAVSYEQYF

SEQ ID NO: 653377 - protein, 11 aa, Homo sapiens
  CDR3 for alpha chain variable domain of TCR clone 326689 (TRAV21, TRAJ34)
CAHYNTDKLIF

SEQ ID NO: 653378 - protein, 11 aa, Homo sapiens
  CDR3 for beta chain variable domain of TCR clone 326689 (TRBV19, TRBJ1-1)
CASSIGSEAFF

SEQ ID NO: 653379 - protein, 16 aa, Homo sapiens
  CDR3 for alpha chain variable domain of TCR clone 326690 (TRAV8-2, TRAJ45)
CVVSEGTGGGADGLTF

SEQ ID NO: 653380 - protein, 15 aa, Homo sapiens
  CDR3 for beta chain variable domain of TCR clone 326690 (TRBV3-1, TRBJ2-1)
CASSQQPSGGNEQFF

SEQ ID NO: 653381 - protein, 15 aa, Homo sapiens
  CDR3 for alpha chain variable domain of TCR clone 326691 (TRAV3, TRAJ45)
CAVRTPWGGADGLTF

SEQ ID NO: 653382 - protein, 19 aa, Homo sapiens
  CDR3 for beta chain variable domain of TCR clone 326691 (TRBV25-1, TRBJ2-2)
CAILVYRVDRGRKTGELFF

SEQ ID NO: 653383 - protein, 14 aa, Homo sapiens
  CDR3 for alpha chain variable domain of TCR clone 326692 (TRAV1-1, TRAJ33)
CAVRPEDSNSQLIW

SEQ ID NO: 653384 - protein, 15 aa, Homo sapiens
  CDR3 for beta chain variable domain of TCR clone 326692 (TRBV20-1, TRBJ2-1)
CSARSPGRPGNEHFF

SEQ ID NO: 653385 - protein, 14 aa, Homo sapiens
  CDR3 for alpha chain variable domain of TCR clone 326693 (TRAV20, TRAJ42)
CAVQAGGSQGKLIS

SEQ ID NO: 653386 - protein, 14 aa, Homo sapiens
  CDR3 for beta chain variable domain of TCR clone 326693 (TRBV28, TRBJ1-2)
CASRIQGANYGYTF

SEQ ID NO: 653387 - protein, 11 aa, Homo sapiens
  CDR3 for alpha chain variable domain of TCR clone 326694 (TRAV17, TRAJ49)
CATNTGNQFYF

SEQ ID NO: 653388 - protein, 17 aa, Homo sapiens
  CDR3 for beta chain variable domain of TCR clone 326694 (TRBV7-3, TRBJ2-3)
CASSLMKRMRGADTQYF

SEQ ID NO: 653389 - protein, 18 aa, Homo sapiens
  CDR3 for alpha chain variable domain of TCR clone 326695 (TRAV21, TRAJ52)
CAVRPSPAGGTSYGKLTS

SEQ ID NO: 653390 - protein, 13 aa, Homo sapiens
  CDR3 for beta chain variable domain of TCR clone 326695 (TRBV29-1, TRBJ2-2)
CSVYREDTGELFF

SEQ ID NO: 653391 - protein, 15 aa, Homo sapiens
  CDR3 for alpha chain variable domain of TCR clone 326696 (TRAV8-4, TRAJ53)
CAVSDGGGSNYTLTF

SEQ ID NO: 653392 - protein, 17 aa, Homo sapiens
  CDR3 for beta chain variable domain of TCR clone 326696 (TRBV7-8, TRBJ2-6)
CASSAGTGGAGANVLTF

SEQ ID NO: 653393 - protein, 16 aa, Homo sapiens
  CDR3 for alpha chain variable domain of TCR clone 326697 (TRAV21, TRAJ37)
CAVRTAGPSNTGKLIF

SEQ ID NO: 653394 - protein, 14 aa, Homo sapiens
  CDR3 for beta chain variable domain of TCR clone 326697 (TRBV6-1, TRBJ1-3)
CASVQGGGGNTIYF

SEQ ID NO: 653395 - protein, 15 aa, Homo sapiens
  CDR3 for alpha chain variable domain of TCR clone 326698 (TRAV8-4, TRAJ48)
CAVSAAYFGKEKLTF

SEQ ID NO: 653396 - protein, 12 aa, Homo sapiens
  CDR3 for beta chain variable domain of TCR clone 326698 (TRBV3-1, TRBJ2-5)
CASSQRGETQYF

SEQ ID NO: 653397 - protein, 15 aa, Homo sapiens
  CDR3 for alpha chain variable domain of TCR clone 326699 (TRAV26-1, TRAJ44)
CITRVPFGTASKLTF

SEQ ID NO: 653398 - protein, 15 aa, Homo sapiens
  CDR3 for beta chain variable domain of TCR clone 326699 (TRBV20-1, TRBJ1-1)
CSASRGVTGNTEAFF

SEQ ID NO: 653399 - protein, 15 aa, Homo sapiens
  CDR3 for alpha chain variable domain of TCR clone 326700 (TRAV1-2, TRAJ16)
CAVRARFSDGQKLLF

SEQ ID NO: 653400 - protein, 13 aa, Homo sapiens
  CDR3 for beta chain variable domain of TCR clone 326700 (TRBV11-3, TRBJ2-3)
LAGAPAGGGTQYF

SEQ ID NO: 653401 - protein, 11 aa, Homo sapiens
  CDR3 for alpha chain variable domain of TCR clone 326701 (TRAV2, TRAJ13)
CASGGYQKVTF

SEQ ID NO: 653402 - protein, 18 aa, Homo sapiens
  CDR3 for beta chain variable domain of TCR clone 326701 (TRBV7-2, TRBJ2-5)
CASSLSGGGDPVLRARHA

SEQ ID NO: 653403 - protein, 17 aa, Homo sapiens
  CDR3 for alpha chain variable domain of TCR clone 326702 (TRAV6, TRAJ42)
CALRFLRGGGSQGNLIF

SEQ ID NO: 653404 - protein, 15 aa, Homo sapiens
  CDR3 for beta chain variable domain of TCR clone 326702 (TRBV6-3, TRBJ2-7)
CASSSPGTVFYEQYF

SEQ ID NO: 653405 - protein, 14 aa, Homo sapiens
  CDR3 for alpha chain variable domain of TCR clone 326703 (TRAV22, TRAJ29)
CAVTRNSGNTPLVF

SEQ ID NO: 653406 - protein, 15 aa, Homo sapiens
  CDR3 for beta chain variable domain of TCR clone 326703 (TRBV11-2, TRBJ1-2)
CASSLEGVQRNGYTF

SEQ ID NO: 653407 - protein, 17 aa, Homo sapiens
  CDR3 for alpha chain variable domain of TCR clone 326704 (TRAV3, TRAJ6)
CAVRDGPRAGGSYIPKL

SEQ ID NO: 653408 - protein, 13 aa, Homo sapiens
  CDR3 for beta chain variable domain of TCR clone 326704 (TRBV20-1, TRBJ1-6)
CSAPLGVGSPLHF

SEQ ID NO: 653409 - protein, 14 aa, Homo sapiens
  CDR3 for alpha chain variable domain of TCR clone 326705 (TRAV23/DV6, TRAJ44)
CAAARGGTASKLTF

SEQ ID NO: 653410 - protein, 17 aa, Homo sapiens
  CDR3 for beta chain variable domain of TCR clone 326705 (TRBV19, TRBJ2-7)
CASSISFYDSYPYEQYF

SEQ ID NO: 653411 - protein, 19 aa, Homo sapiens
  CDR3 for alpha chain variable domain of TCR clone 326706 (TRAV1-2, TRAJ26)
CLLPLCCERPDNYGQNFVF

SEQ ID NO: 653412 - protein, 16 aa, Homo sapiens
  CDR3 for beta chain variable domain of TCR clone 326706 (TRBV7-8, TRBJ2-4)
CASSAERTLAKNIQYF

SEQ ID NO: 653413 - protein, 14 aa, Homo sapiens
  CDR3 for alpha chain variable domain of TCR clone 326707 (TRAV8-4, TRAJ13)
CAVTLSGGYQKVTF

SEQ ID NO: 653414 - protein, 15 aa, Homo sapiens
  CDR3 for beta chain variable domain of TCR clone 326707 (TRBV6-3, TRBJ2-7)
CASSSPGTVFYEQYF

SEQ ID NO: 653415 - protein, 12 aa, Homo sapiens
  CDR3 for alpha chain variable domain of TCR clone 326708 (TRAV3, TRAJ39)
CAVIEWSNMLTF

SEQ ID NO: 653416 - protein, 16 aa, Homo sapiens
  CDR3 for beta chain variable domain of TCR clone 326708 (TRBV2, TRBJ1-5)
CASSELHKSGFQPQHF

SEQ ID NO: 653417 - protein, 11 aa, Homo sapiens
  CDR3 for alpha chain variable domain of TCR clone 326709 (TRAV1-2, TRAJ20)
CAVSNDYKLSF

SEQ ID NO: 653418 - protein, 15 aa, Homo sapiens
  CDR3 for beta chain variable domain of TCR clone 326709 (TRBV7-9, TRBJ1-6)
CASSSPGRGNSPLHF

SEQ ID NO: 653419 - protein, 13 aa, Homo sapiens
  CDR3 for alpha chain variable domain of TCR clone 326710 (TRAV21, TRAJ27)
CAARPGNEGKSTF

SEQ ID NO: 653420 - protein, 13 aa, Homo sapiens
  CDR3 for beta chain variable domain of TCR clone 326710 (TRBV13, TRBJ2-1)
CASILGGRGEQFF

SEQ ID NO: 653421 - protein, 13 aa, Homo sapiens
  CDR3 for alpha chain variable domain of TCR clone 326711 (TRAV12-3, TRAJ40)
CAMSARGTYKYIF

SEQ ID NO: 653422 - protein, 16 aa, Homo sapiens
  CDR3 for beta chain variable domain of TCR clone 326711 (TRBV20-1, TRBJ2-3)
CSVEAGLAGGQDTQYF

SEQ ID NO: 653423 - protein, 14 aa, Homo sapiens
  CDR3 for alpha chain variable domain of TCR clone 326712 (TRAV8-3, TRAJ44)
CAVGNTGPASKLTF

SEQ ID NO: 653424 - protein, 15 aa, Homo sapiens
  CDR3 for beta chain variable domain of TCR clone 326712 (TRBV28, TRBJ2-7)
CASSFRGQGRYEQYF

SEQ ID NO: 653425 - protein, 15 aa, Homo sapiens
  CDR3 for alpha chain variable domain of TCR clone 326713 (TRAV3, TRAJ22)
CAVRDRGGSARQLTF

SEQ ID NO: 653426 - protein, 15 aa, Homo sapiens
  CDR3 for beta chain variable domain of TCR clone 326713 (TRBV7-9, TRBJ2-1)
CASSLGWGRANEQFF

SEQ ID NO: 653427 - protein, 12 aa, Homo sapiens
  CDR3 for alpha chain variable domain of TCR clone 326714 (TRAV8-1, TRAJ40)
CAAVSGTYKYIF

SEQ ID NO: 653428 - protein, 14 aa, Homo sapiens
  CDR3 for beta chain variable domain of TCR clone 326714 (TRBV19, TRBJ2-7)
CASSTSQLAYEQYF

SEQ ID NO: 653429 - protein, 13 aa, Homo sapiens
  CDR3 for alpha chain variable domain of TCR clone 326715 (TRAV12-3, TRAJ5)
CAMRPTGRRALTF

SEQ ID NO: 653430 - protein, 13 aa, Homo sapiens
  CDR3 for beta chain variable domain of TCR clone 326715 (TRBV2, TRBJ2-7)
CASNVVEAYEQYF

SEQ ID NO: 653431 - protein, 14 aa, Homo sapiens
  CDR3 for alpha chain variable domain of TCR clone 326716 (TRAV26-1, TRAJ39)
CIVRGSRAGNMLTF

SEQ ID NO: 653432 - protein, 11 aa, Homo sapiens
  CDR3 for beta chain variable domain of TCR clone 326716 (TRBV7-9, TRBJ2-5)
CASSLGETQYF

SEQ ID NO: 653433 - protein, 14 aa, Homo sapiens
  CDR3 for alpha chain variable domain of TCR clone 326717 (TRAV12-2, TRAJ17)
CAVLFKAAGNKLTF

SEQ ID NO: 653434 - protein, 14 aa, Homo sapiens
  CDR3 for beta chain variable domain of TCR clone 326717 (TRBV29-1, TRBJ2-1)
CSVGAVAGGNEQLF

SEQ ID NO: 653435 - protein, 13 aa, Homo sapiens
  CDR3 for alpha chain variable domain of TCR clone 326718 (TRAV1-2, TRAJ33)
CAVSEDSNYQLIW

SEQ ID NO: 653436 - protein, 16 aa, Homo sapiens
  CDR3 for beta chain variable domain of TCR clone 326718 (TRBV4-2, TRBJ2-7)
CASSQDGVGRGYEQYF

SEQ ID NO: 653437 - protein, 15 aa, Homo sapiens
  CDR3 for alpha chain variable domain of TCR clone 326719 (TRAV12-1, TRAJ45)
CVVLSGGGGADGLTF

SEQ ID NO: 653438 - protein, 14 aa, Homo sapiens
  CDR3 for beta chain variable domain of TCR clone 326719 (TRBV19, TRBJ2-5)
CASSMTGQQETQYF

SEQ ID NO: 653439 - protein, 13 aa, Homo sapiens
  CDR3 for alpha chain variable domain of TCR clone 326720 (TRAV20, TRAJ37)
CAGCSSNTGKLIF

SEQ ID NO: 653440 - protein, 15 aa, Homo sapiens
  CDR3 for beta chain variable domain of TCR clone 326720 (TRBV2, TRBJ2-3)
CASSERSGHTDTQYF

SEQ ID NO: 653441 - protein, 14 aa, Homo sapiens
  CDR3 for alpha chain variable domain of TCR clone 326721 (TRAV8-4, TRAJ13)
CAVTLSGGYQKVTF

SEQ ID NO: 653442 - protein, 14 aa, Homo sapiens
  CDR3 for beta chain variable domain of TCR clone 326721 (TRBV19, TRBJ1-5)
CASRAPDSFLSQHF

SEQ ID NO: 653443 - protein, 16 aa, Homo sapiens
  CDR3 for alpha chain variable domain of TCR clone 326722 (TRAV12-3, TRAJ53)
CAMSPGSGGSNYKLTF

SEQ ID NO: 653444 - protein, 16 aa, Homo sapiens
  CDR3 for beta chain variable domain of TCR clone 326722 (TRBV6-5, TRBJ2-6)
FPSSYPLSSGANVLTF

SEQ ID NO: 653445 - protein, 13 aa, Homo sapiens
  CDR3 for alpha chain variable domain of TCR clone 326723 (TRAV27, TRAJ41)
CAGEGNSGYALNF

SEQ ID NO: 653446 - protein, 12 aa, Homo sapiens
  CDR3 for beta chain variable domain of TCR clone 326723 (TRBV7-2, TRBJ2-5)
CASSQYQETQYF

SEQ ID NO: 653447 - protein, 14 aa, Homo sapiens
  CDR3 for alpha chain variable domain of TCR clone 326724 (TRAV20, TRAJ56)
CAVQFGGANSKLTF

SEQ ID NO: 653448 - protein, 17 aa, Homo sapiens
  CDR3 for beta chain variable domain of TCR clone 326724 (TRBV7-9, TRBJ2-1)
CASSLVASYPSYDEQFF

SEQ ID NO: 653449 - protein, 14 aa, Homo sapiens
  CDR3 for alpha chain variable domain of TCR clone 326725 (TRAV1-2, TRAJ8)
CAVREDTAFQKLVF

SEQ ID NO: 653450 - protein, 17 aa, Homo sapiens
  CDR3 for beta chain variable domain of TCR clone 326725 (TRBV11-2, TRBJ2-1)
CASSLYPPGVEYNEQFF

SEQ ID NO: 653451 - protein, 11 aa, Homo sapiens
  CDR3 for alpha chain variable domain of TCR clone 326726 (TRAV2, TRAJ13)
CASGGYQKVTF

SEQ ID NO: 653452 - protein, 14 aa, Homo sapiens
  CDR3 for beta chain variable domain of TCR clone 326726 (TRBV19, TRBJ2-1)
CASEVTGARNEQFF

SEQ ID NO: 653453 - protein, 14 aa, Homo sapiens
  CDR3 for alpha chain variable domain of TCR clone 326727 (TRAV12-1, TRAJ6)
CVVKRSGGSYIPTF

SEQ ID NO: 653454 - protein, 15 aa, Homo sapiens
  CDR3 for beta chain variable domain of TCR clone 326727 (TRBV7-9, TRBJ2-7)
CASSLALAEAYEQYF

SEQ ID NO: 653455 - protein, 14 aa, Homo sapiens
  CDR3 for alpha chain variable domain of TCR clone 326728 (TRAV29/DV5, TRAJ36)
CAARRKTGATNLFF

SEQ ID NO: 653456 - protein, 15 aa, Homo sapiens
  CDR3 for beta chain variable domain of TCR clone 326728 (TRBV7-8, TRBJ1-2)
CASSPDRGREYGYTC

SEQ ID NO: 653457 - protein, 13 aa, Homo sapiens
  CDR3 for alpha chain variable domain of TCR clone 326729 (TRAV9-2, TRAJ49)
CAMIQIGGNQFYF

SEQ ID NO: 653458 - protein, 15 aa, Homo sapiens
  CDR3 for beta chain variable domain of TCR clone 326729 (TRBV9, TRBJ1-6)
CASSVAGTGDSPLHF

SEQ ID NO: 653459 - protein, 13 aa, Homo sapiens
  CDR3 for alpha chain variable domain of TCR clone 326730 (TRAV21, TRAJ27)
CAARPGNAGKSTF

SEQ ID NO: 653460 - protein, 13 aa, Homo sapiens
  CDR3 for beta chain variable domain of TCR clone 326730 (TRBV18, TRBJ2-7)
CASPSGGGYEQYF

SEQ ID NO: 653461 - protein, 16 aa, Homo sapiens
  CDR3 for alpha chain variable domain of TCR clone 326731 (TRAV3, TRAJ37)
CAVRGKGSGNTGTLIF

SEQ ID NO: 653462 - protein, 15 aa, Homo sapiens
  CDR3 for beta chain variable domain of TCR clone 326731 (TRBV7-9, TRBJ2-2)
CASGPLDTFPGELFF

SEQ ID NO: 653463 - protein, 12 aa, Homo sapiens
  CDR3 for alpha chain variable domain of TCR clone 326732 (TRAV21, TRAJ49)
YAVNDGGNQFYF

SEQ ID NO: 653464 - protein, 13 aa, Homo sapiens
  CDR3 for beta chain variable domain of TCR clone 326732 (TRBV2, TRBJ1-1)
CASSVLMNTEAFF

SEQ ID NO: 653465 - protein, 14 aa, Homo sapiens
  CDR3 for alpha chain variable domain of TCR clone 326733 (TRAV13-1, TRAJ35)
CAACKGGFGNVLHF

SEQ ID NO: 653466 - protein, 13 aa, Homo sapiens
  CDR3 for beta chain variable domain of TCR clone 326733 (TRBV7-3, TRBJ1-1)
CASSQDWGAEAFF

SEQ ID NO: 653467 - protein, 16 aa, Homo sapiens
  CDR3 for alpha chain variable domain of TCR clone 326734 (TRAV26-1, TRAJ37)
CIVRGVGSGNTGKLIF

SEQ ID NO: 653468 - protein, 17 aa, Homo sapiens
  CDR3 for beta chain variable domain of TCR clone 326734 (TRBV4-1, TRBJ2-7)
CASSRDPLGVRGGEQYF

SEQ ID NO: 653469 - protein, 14 aa, Homo sapiens
  CDR3 for alpha chain variable domain of TCR clone 326735 (TRAV1-2, TRAJ16)
CAVNRFSDGQKLLF

SEQ ID NO: 653470 - protein, 14 aa, Homo sapiens
  CDR3 for beta chain variable domain of TCR clone 326735 (TRBV11-3, TRBJ2-1)
CASSATTSGCIQFF

SEQ ID NO: 653471 - protein, 13 aa, Homo sapiens
  CDR3 for alpha chain variable domain of TCR clone 326736 (TRAV21, TRAJ27)
CAARPGNAGKSTF

SEQ ID NO: 653472 - protein, 11 aa, Homo sapiens
  CDR3 for beta chain variable domain of TCR clone 326736 (TRBV7-9, TRBJ2-3)
CASSPTDTQYF

SEQ ID NO: 653473 - protein, 11 aa, Homo sapiens
  CDR3 for alpha chain variable domain of TCR clone 326737 (TRAV12-3, TRAJ27)
CAMANAGKSTF

SEQ ID NO: 653474 - protein, 18 aa, Homo sapiens
  CDR3 for beta chain variable domain of TCR clone 326737 (TRBV7-9, TRBJ2-7)
CASSLTTSGSRTWYEQYF

SEQ ID NO: 653475 - protein, 11 aa, Homo sapiens
  CDR3 for alpha chain variable domain of TCR clone 326738 (TRAV12-2, TRAJ54)
CAVEGAQKLVF

SEQ ID NO: 653476 - protein, 17 aa, Homo sapiens
  CDR3 for beta chain variable domain of TCR clone 326738 (TRBV18, TRBJ1-3)
CASSPYPTGPSGNTICF

SEQ ID NO: 653477 - protein, 12 aa, Homo sapiens
  CDR3 for alpha chain variable domain of TCR clone 326739 (TRAV2, TRAJ9)
CAVGAGGFETIL

SEQ ID NO: 653478 - protein, 16 aa, Homo sapiens
  CDR3 for beta chain variable domain of TCR clone 326739 (TRBV13, TRBJ2-2)
CASSPRTGEHTGELFF

SEQ ID NO: 653479 - protein, 17 aa, Homo sapiens
  CDR3 for alpha chain variable domain of TCR clone 326740 (TRAV13-1, TRAJ52)
CAASSGAGGTSYGKLTF

SEQ ID NO: 653480 - protein, 14 aa, Homo sapiens
  CDR3 for beta chain variable domain of TCR clone 326740 (TRBV19, TRBJ2-1)
SASPTFVLSGEQFF

SEQ ID NO: 653481 - protein, 13 aa, Homo sapiens
  CDR3 for alpha chain variable domain of TCR clone 326741 (TRAV12-2, TRAJ20)
CAVYPSNDYKLSF

SEQ ID NO: 653482 - protein, 17 aa, Homo sapiens
  CDR3 for beta chain variable domain of TCR clone 326741 (TRBV13, TRBJ2-3)
CASSLSRVAGGRNTQYF

SEQ ID NO: 653483 - protein, 13 aa, Homo sapiens
  CDR3 for alpha chain variable domain of TCR clone 326742 (TRAV2, TRAJ5)
CAVIDTGRRALTF

SEQ ID NO: 653484 - protein, 13 aa, Homo sapiens
  CDR3 for beta chain variable domain of TCR clone 326742 (TRBV7-2, TRBJ2-7)
CASSSPSGSEQYF

SEQ ID NO: 653485 - protein, 12 aa, Homo sapiens
  CDR3 for alpha chain variable domain of TCR clone 326743 (TRAV13-2, TRAJ8)
CAPWLGFQKLVF

SEQ ID NO: 653486 - protein, 14 aa, Homo sapiens
  CDR3 for beta chain variable domain of TCR clone 326743 (TRBV7-8, TRBJ2-7)
CASSPGLADYEQYF

SEQ ID NO: 653487 - protein, 13 aa, Homo sapiens
  CDR3 for alpha chain variable domain of TCR clone 326744 (TRAV13-1, TRAJ23)
CAASGRGGGKLIF

SEQ ID NO: 653488 - protein, 13 aa, Homo sapiens
  CDR3 for beta chain variable domain of TCR clone 326744 (TRBV2, TRBJ1-5)
CASSQGGSQPQHF

SEQ ID NO: 653489 - protein, 13 aa, Homo sapiens
  CDR3 for alpha chain variable domain of TCR clone 326745 (TRAV16, TRAJ10)
CAPARDEETNSPL

SEQ ID NO: 653490 - protein, 19 aa, Homo sapiens
  CDR3 for beta chain variable domain of TCR clone 326745 (TRBV28, TRBJ2-1)
CASSFSIRGSGRTRYEQFF

SEQ ID NO: 653491 - protein, 14 aa, Homo sapiens
  CDR3 for alpha chain variable domain of TCR clone 326746 (TRAV8-1, TRAJ39)
CAVNASNAGNMLTF

SEQ ID NO: 653492 - protein, 15 aa, Homo sapiens
  CDR3 for beta chain variable domain of TCR clone 326746 (TRBV7-9, TRBJ1-4)
CASSRTGGFNEKLFF

SEQ ID NO: 653493 - protein, 13 aa, Homo sapiens
  CDR3 for alpha chain variable domain of TCR clone 326747 (TRAV3, TRAJ20)
CAVRDTPRYKLSF

SEQ ID NO: 653494 - protein, 15 aa, Homo sapiens
  CDR3 for beta chain variable domain of TCR clone 326747 (TRBV19, TRBJ1-2)
CASSVGQVLNYGYTF

SEQ ID NO: 653495 - protein, 11 aa, Homo sapiens
  CDR3 for alpha chain variable domain of TCR clone 326748 (TRAV21, TRAJ48)
CAVDGNEKLTF

SEQ ID NO: 653496 - protein, 14 aa, Homo sapiens
  CDR3 for beta chain variable domain of TCR clone 326748 (TRBV5-4, TRBJ2-1)
CASSLDQGLNEQFF

SEQ ID NO: 653497 - protein, 11 aa, Homo sapiens
  CDR3 for alpha chain variable domain of TCR clone 326749 (TRAV23/DV6, TRAJ58)
CAARLLRGETS

SEQ ID NO: 653498 - protein, 16 aa, Homo sapiens
  CDR3 for beta chain variable domain of TCR clone 326749 (TRBV5-1, TRBJ1-1)
CASSSGGNSLNTEAFF

SEQ ID NO: 653499 - protein, 15 aa, Homo sapiens
  CDR3 for alpha chain variable domain of TCR clone 326750 (TRAV12-2, TRAJ53)
CAVNGGGGSNHKLTF

SEQ ID NO: 653500 - protein, 17 aa, Homo sapiens
  CDR3 for beta chain variable domain of TCR clone 326750 (TRBV7-3, TRBJ2-3)
RASSLMKRMRGADTQYF

SEQ ID NO: 653501 - protein, 12 aa, Homo sapiens
  CDR3 for alpha chain variable domain of TCR clone 326751 (TRAV13-1, TRAJ21)
CAAKEGFNKFYF

SEQ ID NO: 653502 - protein, 20 aa, Homo sapiens
  CDR3 for beta chain variable domain of TCR clone 326751 (TRBV7-8, TRBJ2-2)
CASSHLFPGTTIHIAGELFF

SEQ ID NO: 653503 - protein, 16 aa, Homo sapiens
  CDR3 for alpha chain variable domain of TCR clone 326752 (TRAV16, TRAJ4)
CALSRMFSGGYNKLIF

SEQ ID NO: 653504 - protein, 15 aa, Homo sapiens
  CDR3 for beta chain variable domain of TCR clone 326752 (TRBV10-3, TRBJ2-1)
CAISDVQDRAYEQFF

SEQ ID NO: 653505 - protein, 13 aa, Homo sapiens
  CDR3 for alpha chain variable domain of TCR clone 326753 (TRAV8-6, TRAJ49)
CAVITNTGNQFYF

SEQ ID NO: 653506 - protein, 13 aa, Homo sapiens
  CDR3 for beta chain variable domain of TCR clone 326753 (TRBV7-3, TRBJ2-2)
CASSLNVLGELFL

SEQ ID NO: 653507 - protein, 18 aa, Homo sapiens
  CDR3 for alpha chain variable domain of TCR clone 326754 (TRAV13-1, TRAJ52)
CAAKNPNAGGTSYGKLTF

SEQ ID NO: 653508 - protein, 13 aa, Homo sapiens
  CDR3 for beta chain variable domain of TCR clone 326754 (TRBV29-1, TRBJ2-1)
CSVDGGASDEQFF

SEQ ID NO: 653509 - protein, 17 aa, Homo sapiens
  CDR3 for alpha chain variable domain of TCR clone 326755 (TRAV4, TRAJ18)
CLVGERSVGSTLGGRYF

SEQ ID NO: 653510 - protein, 16 aa, Homo sapiens
  CDR3 for beta chain variable domain of TCR clone 326755 (TRBV15, TRBJ1-4)
CATSRDSPPGREKLFF

SEQ ID NO: 653511 - protein, 14 aa, Homo sapiens
  CDR3 for alpha chain variable domain of TCR clone 326756 (TRAV13-1, TRAJ52)
CAALDGTSYGKLTF

SEQ ID NO: 653512 - protein, 13 aa, Homo sapiens
  CDR3 for beta chain variable domain of TCR clone 326756 (TRBV7-7, TRBJ1-1)
CASSLGANTEAFF

SEQ ID NO: 653513 - protein, 15 aa, Homo sapiens
  CDR3 for alpha chain variable domain of TCR clone 326757 (TRAV12-3, TRAJ6)
CAMSATTGGSYIPTF

SEQ ID NO: 653514 - protein, 16 aa, Homo sapiens
  CDR3 for beta chain variable domain of TCR clone 326757 (TRBV7-9, TRBJ1-2)
CASSPGGGAINYGYTF

SEQ ID NO: 653515 - protein, 14 aa, Homo sapiens
  CDR3 for alpha chain variable domain of TCR clone 326758 (TRAV16, TRAJ26)
CALSSANYGQNFFF

SEQ ID NO: 653516 - protein, 12 aa, Homo sapiens
  CDR3 for beta chain variable domain of TCR clone 326758 (TRBV6-5, TRBJ2-2)
CASRTGTGELFF

SEQ ID NO: 653517 - protein, 14 aa, Homo sapiens
  CDR3 for alpha chain variable domain of TCR clone 326759 (TRAV26-1, TRAJ38)
CIADNAGNNHIQNP

SEQ ID NO: 653518 - protein, 17 aa, Homo sapiens
  CDR3 for beta chain variable domain of TCR clone 326759 (TRBV11-2, TRBJ2-6)
CASSQRDIFSGANVLTF

SEQ ID NO: 653519 - protein, 15 aa, Homo sapiens
  CDR3 for alpha chain variable domain of TCR clone 326760 (TRAV38-1, TRAJ37)
CAFIFGSGNTGKLIF

SEQ ID NO: 653520 - protein, 15 aa, Homo sapiens
  CDR3 for beta chain variable domain of TCR clone 326760 (TRBV5-1, TRBJ2-3)
CASSVTSGSTDTQYF

SEQ ID NO: 653521 - protein, 14 aa, Homo sapiens
  CDR3 for alpha chain variable domain of TCR clone 326761 (TRAV8-3, TRAJ4)
CAVGAAGGYNTRIF

SEQ ID NO: 653522 - protein, 15 aa, Homo sapiens
  CDR3 for beta chain variable domain of TCR clone 326761 (TRBV6-5, TRBJ2-1)
CASSYDAGAGNEQFF

SEQ ID NO: 653523 - protein, 15 aa, Homo sapiens
  CDR3 for alpha chain variable domain of TCR clone 326762 (TRAV3, TRAJ11)
CAVRDRGSGYSTLTF

SEQ ID NO: 653524 - protein, 13 aa, Homo sapiens
  CDR3 for beta chain variable domain of TCR clone 326762 (TRBV7-9, TRBJ1-2)
CASSLKQNYDYTF

SEQ ID NO: 653525 - protein, 15 aa, Homo sapiens
  CDR3 for alpha chain variable domain of TCR clone 326763 (TRAV3, TRAJ20)
CAVSDIKLSDYKPSF

SEQ ID NO: 653526 - protein, 15 aa, Homo sapiens
  CDR3 for beta chain variable domain of TCR clone 326763 (TRBV7-9, TRBJ1-6)
CASSSPGRGNSPLHF

SEQ ID NO: 653527 - protein, 14 aa, Homo sapiens
  CDR3 for alpha chain variable domain of TCR clone 326764 (TRAV6, TRAJ39)
CALPNHNAGNMLTF

SEQ ID NO: 653528 - protein, 17 aa, Homo sapiens
  CDR3 for beta chain variable domain of TCR clone 326764 (TRBV18, TRBJ2-3)
CASSSRGPASSTDTQYF

SEQ ID NO: 653529 - protein, 13 aa, Homo sapiens
  CDR3 for alpha chain variable domain of TCR clone 326765 (TRAV36/DV7, TRAJ33)
CAADMDSNYQLIW

SEQ ID NO: 653530 - protein, 16 aa, Homo sapiens
  CDR3 for beta chain variable domain of TCR clone 326765 (TRBV15, TRBJ2-3)
CATRLSGGRAPDTQYF

SEQ ID NO: 653531 - protein, 13 aa, Homo sapiens
  CDR3 for alpha chain variable domain of TCR clone 326766 (TRAV20, TRAJ34)
CAVSSYNTYKLIF

SEQ ID NO: 653532 - protein, 13 aa, Homo sapiens
  CDR3 for beta chain variable domain of TCR clone 326766 (TRBV7-9, TRBJ1-2)
CASSLKQNYGYTF

SEQ ID NO: 653533 - protein, 16 aa, Homo sapiens
  CDR3 for alpha chain variable domain of TCR clone 326767 (TRAV3, TRAJ37)
CAVREKGSGNTGKLIF

SEQ ID NO: 653534 - protein, 15 aa, Homo sapiens
  CDR3 for beta chain variable domain of TCR clone 326767 (TRBV20-1, TRBJ2-1)
CSARGGTRYYNEQFF

SEQ ID NO: 653535 - protein, 16 aa, Homo sapiens
  CDR3 for alpha chain variable domain of TCR clone 326768 (TRAV12-3, TRAJ53)
CAISPGSGGSNYKLTF

SEQ ID NO: 653536 - protein, 13 aa, Homo sapiens
  CDR3 for beta chain variable domain of TCR clone 326768 (TRBV7-3, TRBJ1-1)
CASSQDWGAEAFF

SEQ ID NO: 653537 - protein, 12 aa, Homo sapiens
  CDR3 for alpha chain variable domain of TCR clone 326769 (TRAV3, TRAJ20)
CAVRDGDYKLSF

SEQ ID NO: 653538 - protein, 16 aa, Homo sapiens
  CDR3 for beta chain variable domain of TCR clone 326769 (TRBV27, TRBJ2-2)
CASSFRGPVRTGELFF

SEQ ID NO: 653539 - protein, 14 aa, Homo sapiens
  CDR3 for alpha chain variable domain of TCR clone 326770 (TRAV26-1, TRAJ38)
CIADNAGNNRKLIW

SEQ ID NO: 653540 - protein, 17 aa, Homo sapiens
  CDR3 for beta chain variable domain of TCR clone 326770 (TRBV5-1, TRBJ2-1)
CASSTGTSGYSYNEQFF

SEQ ID NO: 653541 - protein, 14 aa, Homo sapiens
  CDR3 for alpha chain variable domain of TCR clone 326771 (TRAV1-2, TRAJ16)
CAVNRFSDGQKLLF

SEQ ID NO: 653542 - protein, 17 aa, Homo sapiens
  CDR3 for beta chain variable domain of TCR clone 326771 (TRBV6-1, TRBJ2-3)
CASSEALRLISTDTQYF

SEQ ID NO: 653543 - protein, 13 aa, Homo sapiens
  CDR3 for alpha chain variable domain of TCR clone 326772 (TRAV17, TRAJ11)
CATRSSGYSTLTF

SEQ ID NO: 653544 - protein, 15 aa, Homo sapiens
  CDR3 for beta chain variable domain of TCR clone 326772 (TRBV5-5, TRBJ2-2)
CASSRQASGAGELFF

SEQ ID NO: 653545 - protein, 14 aa, Homo sapiens
  CDR3 for alpha chain variable domain of TCR clone 326773 (TRAV9-2, TRAJ6)
CALSDPGGRYKPTF

SEQ ID NO: 653546 - protein, 16 aa, Homo sapiens
  CDR3 for beta chain variable domain of TCR clone 326773 (TRBV19, TRBJ2-2)
CASRSPGTGATGELFF

SEQ ID NO: 653547 - protein, 13 aa, Homo sapiens
  CDR3 for alpha chain variable domain of TCR clone 326774 (TRAV27, TRAJ8)
CAGGPTGFPTLVF

SEQ ID NO: 653548 - protein, 15 aa, Homo sapiens
  CDR3 for beta chain variable domain of TCR clone 326774 (TRBV6-1, TRBJ2-7)
CASSESMGDFYEQYF

SEQ ID NO: 653549 - protein, 17 aa, Homo sapiens
  CDR3 for alpha chain variable domain of TCR clone 326775 (TRAV3, TRAJ38)
CAVRDCLNAGNNRKLIW

SEQ ID NO: 653550 - protein, 16 aa, Homo sapiens
  CDR3 for beta chain variable domain of TCR clone 326775 (TRBV27, TRBJ2-2)
CASSCRGLVRTGELFF

SEQ ID NO: 653551 - protein, 14 aa, Homo sapiens
  CDR3 for alpha chain variable domain of TCR clone 326776 (TRAV12-3, TRAJ42)
CAMNYGGSQENLIF

SEQ ID NO: 653552 - protein, 15 aa, Homo sapiens
  CDR3 for beta chain variable domain of TCR clone 326776 (TRBV5-7, TRBJ1-5)
CASSYGKLWDQPQHF

SEQ ID NO: 653553 - protein, 11 aa, Homo sapiens
  CDR3 for alpha chain variable domain of TCR clone 326777 (TRAV1-1, TRAJ23)
CAVRRGGKLIF

SEQ ID NO: 653554 - protein, 13 aa, Homo sapiens
  CDR3 for beta chain variable domain of TCR clone 326777 (TRBV7-3, TRBJ1-1)
CASSQDWGAEAFF

SEQ ID NO: 653555 - protein, 12 aa, Homo sapiens
  CDR3 for alpha chain variable domain of TCR clone 326778 (TRAV36/DV7, TRAJ40)
CAVGTGTYKYIF

SEQ ID NO: 653556 - protein, 15 aa, Homo sapiens
  CDR3 for beta chain variable domain of TCR clone 326778 (TRBV7-7, TRBJ1-5)
CIAVPAALEKISQHF

SEQ ID NO: 653557 - protein, 14 aa, Homo sapiens
  CDR3 for alpha chain variable domain of TCR clone 326779 (TRAV12-2, TRAJ40)
CAVKIPSGTYKYIF

SEQ ID NO: 653558 - protein, 14 aa, Homo sapiens
  CDR3 for beta chain variable domain of TCR clone 326779 (TRBV20-1, TRBJ1-1)
CSAQTRFGGTEAFF

SEQ ID NO: 653559 - protein, 15 aa, Homo sapiens
  CDR3 for alpha chain variable domain of TCR clone 326780 (TRAV12-1, TRAJ44)
CVVFVNTGTASKLTF

SEQ ID NO: 653560 - protein, 15 aa, Homo sapiens
  CDR3 for beta chain variable domain of TCR clone 326780 (TRBV7-2, TRBJ2-7)
CASSLLGTGSYEQYF

SEQ ID NO: 653561 - protein, 14 aa, Homo sapiens
  CDR3 for alpha chain variable domain of TCR clone 326781 (TRAV1-2, TRAJ16)
CAVNRFSDGQKLLF

SEQ ID NO: 653562 - protein, 16 aa, Homo sapiens
  CDR3 for beta chain variable domain of TCR clone 326781 (TRBV28, TRBJ2-7)
CASSLFFEIGGPEQYF

SEQ ID NO: 653563 - protein, 13 aa, Homo sapiens
  CDR3 for alpha chain variable domain of TCR clone 326782 (TRAV21, TRAJ27)
CAARPGNAGKSSF

SEQ ID NO: 653564 - protein, 14 aa, Homo sapiens
  CDR3 for beta chain variable domain of TCR clone 326782 (TRBV7-6, TRBJ2-3)
CASSLGTATDTQYF

SEQ ID NO: 653565 - protein, 16 aa, Homo sapiens
  CDR3 for alpha chain variable domain of TCR clone 326783 (TRAV12-3, TRAJ53)
CAMSPGSGGSNYKMAF

SEQ ID NO: 653566 - protein, 11 aa, Homo sapiens
  CDR3 for beta chain variable domain of TCR clone 326783 (TRBV29-1, TRBJ2-5)
CSEDRTGTQYF

SEQ ID NO: 653567 - protein, 12 aa, Homo sapiens
  CDR3 for alpha chain variable domain of TCR clone 326784 (TRAV17, TRAJ12)
CATLRSSYKLIF

SEQ ID NO: 653568 - protein, 12 aa, Homo sapiens
  CDR3 for beta chain variable domain of TCR clone 326784 (TRBV19, TRBJ1-1)
CASMNRYTEAFF

SEQ ID NO: 653569 - protein, 14 aa, Homo sapiens
  CDR3 for alpha chain variable domain of TCR clone 326785 (TRAV2, TRAJ9)
CAVEDRSGGFKTIF

SEQ ID NO: 653570 - protein, 14 aa, Homo sapiens
  CDR3 for beta chain variable domain of TCR clone 326785 (TRBV28, TRBJ2-7)
CAITFYGRAHEQYF

SEQ ID NO: 653571 - protein, 14 aa, Homo sapiens
  CDR3 for alpha chain variable domain of TCR clone 326786 (TRAV17, TRAJ34)
CATDSLEGSYKLIF

SEQ ID NO: 653572 - protein, 13 aa, Homo sapiens
  CDR3 for beta chain variable domain of TCR clone 326786 (TRBV11-2, TRBJ2-7)
CASSGTRPYEQYF

SEQ ID NO: 653573 - protein, 13 aa, Homo sapiens
  CDR3 for alpha chain variable domain of TCR clone 326787 (TRAV2, TRAJ40)
CAVVISGTYKYIF

SEQ ID NO: 653574 - protein, 14 aa, Homo sapiens
  CDR3 for beta chain variable domain of TCR clone 326787 (TRBV19, TRBJ2-1)
CASPTFVLSSEQFF

SEQ ID NO: 653575 - protein, 13 aa, Homo sapiens
  CDR3 for alpha chain variable domain of TCR clone 326788 (TRAV20, TRAJ34)
CAVSSYNTDKLIF

SEQ ID NO: 653576 - protein, 15 aa, Homo sapiens
  CDR3 for beta chain variable domain of TCR clone 326788 (TRBV20-1, TRBJ1-2)
CSAAWEGARIYGYTF

SEQ ID NO: 653577 - protein, 13 aa, Homo sapiens
  CDR3 for alpha chain variable domain of TCR clone 326789 (TRAV13-1, TRAJ9)
CAASGTGGFKTIF

SEQ ID NO: 653578 - protein, 15 aa, Homo sapiens
  CDR3 for beta chain variable domain of TCR clone 326789 (TRBV27, TRBJ2-1)
CASSNGGGSSNEQFF

SEQ ID NO: 653579 - protein, 15 aa, Homo sapiens
  CDR3 for alpha chain variable domain of TCR clone 326790 (TRAV8-3, TRAJ11)
CAVGLLNSGYSTLTF

SEQ ID NO: 653580 - protein, 12 aa, Homo sapiens
  CDR3 for beta chain variable domain of TCR clone 326790 (TRBV20-1, TRBJ2-1)
CSAQYTYNEQFF

SEQ ID NO: 653581 - protein, 16 aa, Homo sapiens
  CDR3 for alpha chain variable domain of TCR clone 326791 (TRAV12-3, TRAJ53)
CAMSPGSGGSNYKLTF

SEQ ID NO: 653582 - protein, 16 aa, Homo sapiens
  CDR3 for beta chain variable domain of TCR clone 326791 (TRBV2, TRBJ2-1)
CASSVGGSLSYNEQFF

SEQ ID NO: 653583 - protein, 17 aa, Homo sapiens
  CDR3 for alpha chain variable domain of TCR clone 326792 (TRAV3, TRAJ12)
CCERRDGTMDSSYKLIF

SEQ ID NO: 653584 - protein, 15 aa, Homo sapiens
  CDR3 for beta chain variable domain of TCR clone 326792 (TRBV5-5, TRBJ1-5)
CASSLKGGGEQPHHF

SEQ ID NO: 653585 - protein, 10 aa, Homo sapiens
  CDR3 for alpha chain variable domain of TCR clone 326793 (TRAV8-4, TRAJ45)
CAVSQDVLRR

SEQ ID NO: 653586 - protein, 14 aa, Homo sapiens
  CDR3 for beta chain variable domain of TCR clone 326793 (TRBV27, TRBJ2-2)
CASSLGAATGELFF

SEQ ID NO: 653587 - protein, 11 aa, Homo sapiens
  CDR3 for alpha chain variable domain of TCR clone 326794 (TRAV12-1, TRAJ26)
CEVAYGKNFVF

SEQ ID NO: 653588 - protein, 15 aa, Homo sapiens
  CDR3 for beta chain variable domain of TCR clone 326794 (TRBV12-4, TRBJ2-5)
CASSGTGQAQETQYF

SEQ ID NO: 653589 - protein, 15 aa, Homo sapiens
  CDR3 for alpha chain variable domain of TCR clone 326795 (TRAV3, TRAJ32)
CAVSSYVGATNKLIF

SEQ ID NO: 653590 - protein, 13 aa, Homo sapiens
  CDR3 for beta chain variable domain of TCR clone 326795 (TRBV20-1, TRBJ2-7)
SAVLGSTNYEQYF

SEQ ID NO: 653591 - protein, 15 aa, Homo sapiens
  CDR3 for alpha chain variable domain of TCR clone 326796 (TRAV26-1, TRAJ48)
CIVRVGDFGNEKLTF

SEQ ID NO: 653592 - protein, 16 aa, Homo sapiens
  CDR3 for beta chain variable domain of TCR clone 326796 (TRBV4-1, TRBJ2-3)
CASSQRVGGLTDTQYF

SEQ ID NO: 653593 - protein, 12 aa, Homo sapiens
  CDR3 for alpha chain variable domain of TCR clone 326797 (TRAV12-3, TRAJ17)
CAMTLTGNKLTF

SEQ ID NO: 653594 - protein, 15 aa, Homo sapiens
  CDR3 for beta chain variable domain of TCR clone 326797 (TRBV4-1, TRBJ2-7)
CASSQGRGGDLEQYF

SEQ ID NO: 653595 - protein, 13 aa, Homo sapiens
  CDR3 for alpha chain variable domain of TCR clone 326798 (TRAV27, TRAJ43)
CAGAGNNNNDTRF

SEQ ID NO: 653596 - protein, 15 aa, Homo sapiens
  CDR3 for beta chain variable domain of TCR clone 326798 (TRBV20-1, TRBJ2-7)
CSARDRVSGMDEQYF

SEQ ID NO: 653597 - protein, 14 aa, Homo sapiens
  CDR3 for alpha chain variable domain of TCR clone 326799 (TRAV21, TRAJ23)
CAIMIYNQGGKLIF

SEQ ID NO: 653598 - protein, 18 aa, Homo sapiens
  CDR3 for beta chain variable domain of TCR clone 326799 (TRBV20-1, TRBJ2-6)
CSAETTPTHGSGANVLAF

SEQ ID NO: 653599 - protein, 15 aa, Homo sapiens
  CDR3 for alpha chain variable domain of TCR clone 326800 (TRAV13-1, TRAJ17)
CAASIERAAGNKLTF

SEQ ID NO: 653600 - protein, 14 aa, Homo sapiens
  CDR3 for beta chain variable domain of TCR clone 326800 (TRBV4-1, TRBJ1-6)
CASSPGSDSSPLHL

SEQ ID NO: 653601 - protein, 10 aa, Homo sapiens
  CDR3 for alpha chain variable domain of TCR clone 326801 (TRAV1-2, TRAJ20)
CALNDYKLRF

SEQ ID NO: 653602 - protein, 16 aa, Homo sapiens
  CDR3 for beta chain variable domain of TCR clone 326801 (TRBV20-1, TRBJ1-1)
CSARALTQGMNTEAVF

SEQ ID NO: 653603 - protein, 13 aa, Homo sapiens
  CDR3 for alpha chain variable domain of TCR clone 326802 (TRAV8-3, TRAJ6)
CAARRGGSYIPTF

SEQ ID NO: 653604 - protein, 15 aa, Homo sapiens
  CDR3 for beta chain variable domain of TCR clone 326802 (TRBV4-1, TRBJ2-3)
CASSNLAGGRDTQYF

SEQ ID NO: 653605 - protein, 14 aa, Homo sapiens
  CDR3 for alpha chain variable domain of TCR clone 326803 (TRAV4, TRAJ17)
CLVGDMAAGNKLTF

SEQ ID NO: 653606 - protein, 13 aa, Homo sapiens
  CDR3 for beta chain variable domain of TCR clone 326803 (TRBV28, TRBJ2-2)
CASIRESTRELFF

SEQ ID NO: 653607 - protein, 13 aa, Homo sapiens
  CDR3 for alpha chain variable domain of TCR clone 326804 (TRAV39, TRAJ58)
CAGEETSGSRLTF

SEQ ID NO: 653608 - protein, 13 aa, Homo sapiens
  CDR3 for beta chain variable domain of TCR clone 326804 (TRBV15, TRBJ2-7)
CATSTTGDYEQYF

SEQ ID NO: 653609 - protein, 16 aa, Homo sapiens
  CDR3 for alpha chain variable domain of TCR clone 326805 (TRAV3, TRAJ37)
CAVRGKGSGNTGKLIF

SEQ ID NO: 653610 - protein, 13 aa, Homo sapiens
  CDR3 for beta chain variable domain of TCR clone 326805 (TRBV19, TRBJ1-5)
CASSMRGYQPQHF

SEQ ID NO: 653611 - protein, 12 aa, Homo sapiens
  CDR3 for alpha chain variable domain of TCR clone 326806 (TRAV12-3, TRAJ17)
CAMTPTGNKLTF

SEQ ID NO: 653612 - protein, 15 aa, Homo sapiens
  CDR3 for beta chain variable domain of TCR clone 326806 (TRBV20-1, TRBJ2-7)
FSARDRVSGMDEQYF

SEQ ID NO: 653613 - protein, 17 aa, Homo sapiens
  CDR3 for alpha chain variable domain of TCR clone 326807 (TRAV17, TRAJ28)
CATDPRRGGGGRYQLTF

SEQ ID NO: 653614 - protein, 16 aa, Homo sapiens
  CDR3 for beta chain variable domain of TCR clone 326807 (TRBV25-1, TRBJ1-1)
CASSGDRDRGRIEAFF

SEQ ID NO: 653615 - protein, 15 aa, Homo sapiens
  CDR3 for alpha chain variable domain of TCR clone 326808 (TRAV27, TRAJ38)
CAARLNAGNNRNLIW

SEQ ID NO: 653616 - protein, 13 aa, Homo sapiens
  CDR3 for beta chain variable domain of TCR clone 326808 (TRBV12-5, TRBJ2-3)
CASGDRQSDTQYF

SEQ ID NO: 653617 - protein, 12 aa, Homo sapiens
  CDR3 for alpha chain variable domain of TCR clone 326809 (TRAV13-2, TRAJ23)
CADRHRGGKLIF

SEQ ID NO: 653618 - protein, 15 aa, Homo sapiens
  CDR3 for beta chain variable domain of TCR clone 326809 (TRBV7-9, TRBJ1-6)
CASSSPGRGNSPLHF

SEQ ID NO: 653619 - protein, 14 aa, Homo sapiens
  CDR3 for alpha chain variable domain of TCR clone 326810 (TRAV12-2, TRAJ40)
CAVKITSGTYKYIF

SEQ ID NO: 653620 - protein, 12 aa, Homo sapiens
  CDR3 for beta chain variable domain of TCR clone 326810 (TRBV11-2, TRBJ2-1)
CASSPGNNEQFF

SEQ ID NO: 653621 - protein, 11 aa, Homo sapiens
  CDR3 for alpha chain variable domain of TCR clone 326811 (TRAV13-2, TRAJ36)
FAETGANNLFF

SEQ ID NO: 653622 - protein, 13 aa, Homo sapiens
  CDR3 for beta chain variable domain of TCR clone 326811 (TRBV7-9, TRBJ2-4)
CATEGLAGNIQYF

SEQ ID NO: 653623 - protein, 13 aa, Homo sapiens
  CDR3 for alpha chain variable domain of TCR clone 326812 (TRAV12-1, TRAJ21)
CVVIGDNFNKFYF

SEQ ID NO: 653624 - protein, 14 aa, Homo sapiens
  CDR3 for beta chain variable domain of TCR clone 326812 (TRBV7-3, TRBJ2-2)
CASSLDPLTGELFF

SEQ ID NO: 653625 - protein, 12 aa, Homo sapiens
  CDR3 for alpha chain variable domain of TCR clone 326813 (TRAV23/DV6, TRAJ30)
CAASKGDDKIIF

SEQ ID NO: 653626 - protein, 18 aa, Homo sapiens
  CDR3 for beta chain variable domain of TCR clone 326813 (TRBV10-3, TRBJ2-3)
CAISESRVGPMRGDKQYF

SEQ ID NO: 653627 - protein, 15 aa, Homo sapiens
  CDR3 for alpha chain variable domain of TCR clone 326814 (TRAV3, TRAJ22)
CAVRDRGGSARQLTF

SEQ ID NO: 653628 - protein, 13 aa, Homo sapiens
  CDR3 for beta chain variable domain of TCR clone 326814 (TRBV13, TRBJ2-1)
CASTPGSYNEQFF

SEQ ID NO: 653629 - protein, 14 aa, Homo sapiens
  CDR3 for alpha chain variable domain of TCR clone 326815 (TRAV3, TRAJ7)
CAVREEEREQQTRF

SEQ ID NO: 653630 - protein, 14 aa, Homo sapiens
  CDR3 for beta chain variable domain of TCR clone 326815 (TRBV7-8, TRBJ1-5)
CASSLGAFNQPQHF

SEQ ID NO: 653631 - protein, 16 aa, Homo sapiens
  CDR3 for alpha chain variable domain of TCR clone 326816 (TRAV3, TRAJ4)
CAVRSSPSGGYHKLIF

SEQ ID NO: 653632 - protein, 12 aa, Homo sapiens
  CDR3 for beta chain variable domain of TCR clone 326816 (TRBV7-9, TRBJ2-7)
CASSQGVYEQYF

SEQ ID NO: 653633 - protein, 16 aa, Homo sapiens
  CDR3 for alpha chain variable domain of TCR clone 326817 (TRAV16, TRAJ42)
CARQMNYGGSQGSLIF

SEQ ID NO: 653634 - protein, 14 aa, Homo sapiens
  CDR3 for beta chain variable domain of TCR clone 326817 (TRBV14, TRBJ2-3)
CQQPDDRDTDTQYF

SEQ ID NO: 653635 - protein, 16 aa, Homo sapiens
  CDR3 for alpha chain variable domain of TCR clone 326818 (TRAV23/DV6, TRAJ58)
CSKITKGGNQCSRLTF

SEQ ID NO: 653636 - protein, 14 aa, Homo sapiens
  CDR3 for beta chain variable domain of TCR clone 326818 (TRBV2, TRBJ2-7)
CASSLTSGGYEQYF

SEQ ID NO: 653637 - protein, 18 aa, Homo sapiens
  CDR3 for alpha chain variable domain of TCR clone 326819 (TRAV21, TRAJ52)
FAVMPSPAGGTSYGKLIF

SEQ ID NO: 653638 - protein, 16 aa, Homo sapiens
  CDR3 for beta chain variable domain of TCR clone 326819 (TRBV7-3, TRBJ2-1)
CASSLEGYRSYNEQFF

SEQ ID NO: 653639 - protein, 15 aa, Homo sapiens
  CDR3 for alpha chain variable domain of TCR clone 326820 (TRAV38-2/DV8, TRAJ57)
CASARAQGGSEKLVF

SEQ ID NO: 653640 - protein, 14 aa, Homo sapiens
  CDR3 for beta chain variable domain of TCR clone 326820 (TRBV7-8, TRBJ2-3)
CASSSEAGTDTQYF

SEQ ID NO: 653641 - protein, 10 aa, Homo sapiens
  CDR3 for alpha chain variable domain of TCR clone 326821 (TRAV12-2, TRAJ50)
CAVDRYENLL

SEQ ID NO: 653642 - protein, 12 aa, Homo sapiens
  CDR3 for beta chain variable domain of TCR clone 326821 (TRBV12-4, TRBJ1-5)
CASSLGRQPQHF

SEQ ID NO: 653643 - protein, 14 aa, Homo sapiens
  CDR3 for alpha chain variable domain of TCR clone 326822 (TRAV12-2, TRAJ13)
CAVKKTGGYQQVTF

SEQ ID NO: 653644 - protein, 15 aa, Homo sapiens
  CDR3 for beta chain variable domain of TCR clone 326822 (TRBV5-1, TRBJ2-5)
CASSLGLAEQETQYF

SEQ ID NO: 653645 - protein, 14 aa, Homo sapiens
  CDR3 for alpha chain variable domain of TCR clone 326823 (TRAV3, TRAJ16)
CCERLKSDGQKLLF

SEQ ID NO: 653646 - protein, 15 aa, Homo sapiens
  CDR3 for beta chain variable domain of TCR clone 326823 (TRBV28, TRBJ2-7)
CASSPGVRGFYEQYF

SEQ ID NO: 653647 - protein, 14 aa, Homo sapiens
  CDR3 for alpha chain variable domain of TCR clone 326824 (TRAV12-3, TRAJ10)
SHLPLTGGGNKLTF

SEQ ID NO: 653648 - protein, 16 aa, Homo sapiens
  CDR3 for beta chain variable domain of TCR clone 326824 (TRBV7-3, TRBJ2-2)
CASSVKRGTLSGELFF

SEQ ID NO: 653649 - protein, 13 aa, Homo sapiens
  CDR3 for alpha chain variable domain of TCR clone 326825 (TRAV30, TRAJ39)
CGTEKNAGNMLTF

SEQ ID NO: 653650 - protein, 12 aa, Homo sapiens
  CDR3 for beta chain variable domain of TCR clone 326825 (TRBV12-4, TRBJ2-5)
CASSSAQETQYC

SEQ ID NO: 653651 - protein, 17 aa, Homo sapiens
  CDR3 for alpha chain variable domain of TCR clone 326826 (TRAV3, TRAJ6)
CAVRDGPRAGGSYIPTF

SEQ ID NO: 653652 - protein, 16 aa, Homo sapiens
  CDR3 for beta chain variable domain of TCR clone 326826 (TRBV11-2, TRBJ2-1)
CASSPRLAGVYNEQFF

SEQ ID NO: 653653 - protein, 18 aa, Homo sapiens
  CDR3 for alpha chain variable domain of TCR clone 326827 (TRAV13-1, TRAJ52)
CAASKRSAGGTSYGKLTF

SEQ ID NO: 653654 - protein, 15 aa, Homo sapiens
  CDR3 for beta chain variable domain of TCR clone 326827 (TRBV7-2, TRBJ2-1)
CASSSGLAGGNEQFF

SEQ ID NO: 653655 - protein, 14 aa, Homo sapiens
  CDR3 for alpha chain variable domain of TCR clone 326828 (TRAV1-2, TRAJ16)
CAINRFSDGQKLLF

SEQ ID NO: 653656 - protein, 13 aa, Homo sapiens
  CDR3 for beta chain variable domain of TCR clone 326828 (TRBV27, TRBJ2-1)
CASRTLGVGEQFF

SEQ ID NO: 653657 - protein, 16 aa, Homo sapiens
  CDR3 for alpha chain variable domain of TCR clone 326829 (TRAV1-2, TRAJ10)
CAVRGVLTGGGNKLTF

SEQ ID NO: 653658 - protein, 12 aa, Homo sapiens
  CDR3 for beta chain variable domain of TCR clone 326829 (TRBV11-2, TRBJ2-5)
CASSPPAETQYF

SEQ ID NO: 653659 - protein, 16 aa, Homo sapiens
  CDR3 for alpha chain variable domain of TCR clone 326830 (TRAV26-2, TRAJ48)
CILRPPFNFGHEKLTF

SEQ ID NO: 653660 - protein, 15 aa, Homo sapiens
  CDR3 for beta chain variable domain of TCR clone 326830 (TRBV20-1, TRBJ2-3)
CSARVEGTYTDTQYF

SEQ ID NO: 653661 - protein, 13 aa, Homo sapiens
  CDR3 for alpha chain variable domain of TCR clone 326831 (TRAV2, TRAJ40)
CAVVTSGTYKYIF

SEQ ID NO: 653662 - protein, 16 aa, Homo sapiens
  CDR3 for beta chain variable domain of TCR clone 326831 (TRBV19, TRBJ2-2)
CASRPPGTGATGELFF

SEQ ID NO: 653663 - protein, 17 aa, Homo sapiens
  CDR3 for alpha chain variable domain of TCR clone 326832 (TRAV4, TRAJ18)
CLVGERSVGSTLGRLYF

SEQ ID NO: 653664 - protein, 14 aa, Homo sapiens
  CDR3 for beta chain variable domain of TCR clone 326832 (TRBV7-2, TRBJ2-7)
CASSPKTSSYEQYF

SEQ ID NO: 653665 - protein, 13 aa, Homo sapiens
  CDR3 for alpha chain variable domain of TCR clone 326833 (TRAV26-2, TRAJ43)
CILRAVNNNEMRF

SEQ ID NO: 653666 - protein, 11 aa, Homo sapiens
  CDR3 for beta chain variable domain of TCR clone 326833 (TRBV29-1, TRBJ2-5)
CSEDRTGTQYF

SEQ ID NO: 653667 - protein, 12 aa, Homo sapiens
  CDR3 for alpha chain variable domain of TCR clone 326834 (TRAV12-1, TRAJ40)
CVFYSRTYKYIF

SEQ ID NO: 653668 - protein, 14 aa, Homo sapiens
  CDR3 for beta chain variable domain of TCR clone 326834 (TRBV6-1, TRBJ2-7)
CASSGGSYLYEQYF

SEQ ID NO: 653669 - protein, 14 aa, Homo sapiens
  CDR3 for alpha chain variable domain of TCR clone 326835 (TRAV17, TRAJ57)
CATDPQGGSEKLVF

SEQ ID NO: 653670 - protein, 15 aa, Homo sapiens
  CDR3 for beta chain variable domain of TCR clone 326835 (TRBV7-9, TRBJ1-6)
CASSSPGRGNSTLHF

SEQ ID NO: 653671 - protein, 15 aa, Homo sapiens
  CDR3 for alpha chain variable domain of TCR clone 326836 (TRAV26-1, TRAJ40)
CIVRATTSGTYKYIF

SEQ ID NO: 653672 - protein, 12 aa, Homo sapiens
  CDR3 for beta chain variable domain of TCR clone 326836 (TRBV7-9, TRBJ1-4)
CASSTDREKLFF

SEQ ID NO: 653673 - protein, 17 aa, Homo sapiens
  CDR3 for alpha chain variable domain of TCR clone 326837 (TRAV1-2, TRAJ8)
CAVRDTDENTGFQKLVF

SEQ ID NO: 653674 - protein, 16 aa, Homo sapiens
  CDR3 for beta chain variable domain of TCR clone 326837 (TRBV7-9, TRBJ2-2)
CASSGFGGANTGELFF

SEQ ID NO: 653675 - protein, 15 aa, Homo sapiens
  CDR3 for alpha chain variable domain of TCR clone 326838 (TRAV3, TRAJ24)
CAVRDKMTAGGNCSV

SEQ ID NO: 653676 - protein, 14 aa, Homo sapiens
  CDR3 for beta chain variable domain of TCR clone 326838 (TRBV7-2, TRBJ2-3)
RASSQTGSSYTQYF

SEQ ID NO: 653677 - protein, 15 aa, Homo sapiens
  CDR3 for alpha chain variable domain of TCR clone 326839 (TRAV3, TRAJ22)
CAVRDRGGSARQLPF

SEQ ID NO: 653678 - protein, 16 aa, Homo sapiens
  CDR3 for beta chain variable domain of TCR clone 326839 (TRBV5-4, TRBJ2-3)
CASQQPGAGGADTQYF

SEQ ID NO: 653679 - protein, 13 aa, Homo sapiens
  CDR3 for alpha chain variable domain of TCR clone 326840 (TRAV17, TRAJ9)
CATDGTGGFKTIF

SEQ ID NO: 653680 - protein, 13 aa, Homo sapiens
  CDR3 for beta chain variable domain of TCR clone 326840 (TRBV29-1, TRBJ1-1)
CSVGDSRNTEAFF

SEQ ID NO: 653681 - protein, 13 aa, Homo sapiens
  CDR3 for alpha chain variable domain of TCR clone 326841 (TRAV12-1, TRAJ3)
CVSGYSSASKIIF

SEQ ID NO: 653682 - protein, 14 aa, Homo sapiens
  CDR3 for beta chain variable domain of TCR clone 326841 (TRBV6-6, TRBJ1-3)
CASSRQGSGNTIYF

SEQ ID NO: 653683 - protein, 16 aa, Homo sapiens
  CDR3 for alpha chain variable domain of TCR clone 326842 (TRAV1-2, TRAJ10)
CAVRGVLTGGGNKLTF

SEQ ID NO: 653684 - protein, 14 aa, Homo sapiens
  CDR3 for beta chain variable domain of TCR clone 326842 (TRBV12-4, TRBJ2-5)
CASSLWQKQETQYF

SEQ ID NO: 653685 - protein, 10 aa, Homo sapiens
  CDR3 for alpha chain variable domain of TCR clone 326843 (TRAV1-2, TRAJ31)
CVLEDARLMF

SEQ ID NO: 653686 - protein, 14 aa, Homo sapiens
  CDR3 for beta chain variable domain of TCR clone 326843 (TRBV19, TRBJ2-1)
CASPTFVLSGEQFF

SEQ ID NO: 653687 - protein, 15 aa, Homo sapiens
  CDR3 for alpha chain variable domain of TCR clone 326844 (TRAV12-1, TRAJ10)
CGADILTGGGNKLNF

SEQ ID NO: 653688 - protein, 16 aa, Homo sapiens
  CDR3 for beta chain variable domain of TCR clone 326844 (TRBV20-1, TRBJ2-1)
CSARSTSESSYNEQFF

SEQ ID NO: 653689 - protein, 15 aa, Homo sapiens
  CDR3 for alpha chain variable domain of TCR clone 326845 (TRAV8-3, TRAJ45)
CASSYSVGGADGLTF

SEQ ID NO: 653690 - protein, 15 aa, Homo sapiens
  CDR3 for beta chain variable domain of TCR clone 326845 (TRBV18, TRBJ1-1)
RASSPRQGENTEAFF

SEQ ID NO: 653691 - protein, 13 aa, Homo sapiens
  CDR3 for alpha chain variable domain of TCR clone 326846 (TRAV17, TRAJ9)
CATAYTGGFKTIF

SEQ ID NO: 653692 - protein, 15 aa, Homo sapiens
  CDR3 for beta chain variable domain of TCR clone 326846 (TRBV7-2, TRBJ2-3)
CASSLAGAFIDTQYF

SEQ ID NO: 653693 - protein, 15 aa, Homo sapiens
  CDR3 for alpha chain variable domain of TCR clone 326847 (TRAV26-1, TRAJ42)
FIVRGTGGSQGNLIF

SEQ ID NO: 653694 - protein, 14 aa, Homo sapiens
  CDR3 for beta chain variable domain of TCR clone 326847 (TRBV19, TRBJ2-2)
CATTGHANTGELFF

SEQ ID NO: 653695 - protein, 12 aa, Homo sapiens
  CDR3 for alpha chain variable domain of TCR clone 326848 (TRAV16, TRAJ9)
CALSSGGFKTIL

SEQ ID NO: 653696 - protein, 14 aa, Homo sapiens
  CDR3 for beta chain variable domain of TCR clone 326848 (TRBV7-9, TRBJ2-1)
CASSLAGPYKEQFF

SEQ ID NO: 653697 - protein, 14 aa, Homo sapiens
  CDR3 for alpha chain variable domain of TCR clone 326849 (TRAV17, TRAJ22)
CATRPSGSARQLTF

SEQ ID NO: 653698 - protein, 15 aa, Homo sapiens
  CDR3 for beta chain variable domain of TCR clone 326849 (TRBV4-1, TRBJ2-5)
CASSKWDLYQETQYF

SEQ ID NO: 653699 - protein, 16 aa, Homo sapiens
  CDR3 for alpha chain variable domain of TCR clone 326850 (TRAV1-2, TRAJ10)
CAVRGVLTGGGNKLTF

SEQ ID NO: 653700 - protein, 13 aa, Homo sapiens
  CDR3 for beta chain variable domain of TCR clone 326850 (TRBV27, TRBJ1-4)
CASSLMGDEKLFF

SEQ ID NO: 653701 - protein, 12 aa, Homo sapiens
  CDR3 for alpha chain variable domain of TCR clone 326851 (TRAV21, TRAJ13)
PAPSGGYQKVTF

SEQ ID NO: 653702 - protein, 14 aa, Homo sapiens
  CDR3 for beta chain variable domain of TCR clone 326851 (TRBV19, TRBJ2-1)
CASPTFVLSGEQFF

SEQ ID NO: 653703 - protein, 14 aa, Homo sapiens
  CDR3 for alpha chain variable domain of TCR clone 326852 (TRAV29/DV5, TRAJ36)
CAARRKTGANNLFF

SEQ ID NO: 653704 - protein, 13 aa, Homo sapiens
  CDR3 for beta chain variable domain of TCR clone 326852 (TRBV10-2, TRBJ2-7)
CASGASGGYEQYF

SEQ ID NO: 653705 - protein, 16 aa, Homo sapiens
  CDR3 for alpha chain variable domain of TCR clone 326853 (TRAV26-1, TRAJ31)
CIVRPPVLNNNARLMF

SEQ ID NO: 653706 - protein, 11 aa, Homo sapiens
  CDR3 for beta chain variable domain of TCR clone 326853 (TRBV7-8, TRBJ2-7)
RASSLSLEQYF

SEQ ID NO: 653707 - protein, 15 aa, Homo sapiens
  CDR3 for alpha chain variable domain of TCR clone 326854 (TRAV2, TRAJ15)
CAVEDRGQAGTALIF

SEQ ID NO: 653708 - protein, 18 aa, Homo sapiens
  CDR3 for beta chain variable domain of TCR clone 326854 (TRBV6-6, TRBJ1-3)
CASSYSKWDSISGNTIYF

SEQ ID NO: 653709 - protein, 14 aa, Homo sapiens
  CDR3 for alpha chain variable domain of TCR clone 326855 (TRAV20, TRAJ32)
CCGRYGGATNKLIF

SEQ ID NO: 653710 - protein, 14 aa, Homo sapiens
  CDR3 for beta chain variable domain of TCR clone 326855 (TRBV19, TRBJ1-3)
CASNRGNSGNTIYF

SEQ ID NO: 653711 - protein, 15 aa, Homo sapiens
  CDR3 for alpha chain variable domain of TCR clone 326856 (TRAV13-1, TRAJ52)
SYYNAGGTSYGKPTF

SEQ ID NO: 653712 - protein, 11 aa, Homo sapiens
  CDR3 for beta chain variable domain of TCR clone 326856 (TRBV12-4, TRBJ2-2)
CASSSAGELFF

SEQ ID NO: 653713 - protein, 14 aa, Homo sapiens
  CDR3 for alpha chain variable domain of TCR clone 326857 (TRAV1-2, TRAJ8)
CAVREVAGFQKLVF

SEQ ID NO: 653714 - protein, 15 aa, Homo sapiens
  CDR3 for beta chain variable domain of TCR clone 326857 (TRBV6-3, TRBJ2-7)
CASSSPGTVFYEQYF

SEQ ID NO: 653715 - protein, 14 aa, Homo sapiens
  CDR3 for alpha chain variable domain of TCR clone 326858 (TRAV13-1, TRAJ35)
FAASKGGFGNVLHC

SEQ ID NO: 653716 - protein, 14 aa, Homo sapiens
  CDR3 for beta chain variable domain of TCR clone 326858 (TRBV4-1, TRBJ2-2)
CASSQAVNTGELFL

SEQ ID NO: 653717 - protein, 16 aa, Homo sapiens
  CDR3 for alpha chain variable domain of TCR clone 326859 (TRAV12-1, TRAJ22)
CVVNLFLDRSARQLTF

SEQ ID NO: 653718 - protein, 15 aa, Homo sapiens
  CDR3 for beta chain variable domain of TCR clone 326859 (TRBV18, TRBJ2-3)
CASSPLAGETDTQYF

SEQ ID NO: 653719 - protein, 14 aa, Homo sapiens
  CDR3 for alpha chain variable domain of TCR clone 326860 (TRAV8-4, TRAJ13)
CAVTLSGGYQKVTF

SEQ ID NO: 653720 - protein, 14 aa, Homo sapiens
  CDR3 for beta chain variable domain of TCR clone 326860 (TRBV19, TRBJ2-7)
CASSMGQGAIEQYF

SEQ ID NO: 653721 - protein, 12 aa, Homo sapiens
  CDR3 for alpha chain variable domain of TCR clone 326861 (TRAV20, TRAJ33)
CAVRGSSYQLIG

SEQ ID NO: 653722 - protein, 15 aa, Homo sapiens
  CDR3 for beta chain variable domain of TCR clone 326861 (TRBV11-3, TRBJ2-3)
CASLKDGREGDTQYF

SEQ ID NO: 653723 - protein, 14 aa, Homo sapiens
  CDR3 for alpha chain variable domain of TCR clone 326862 (TRAV8-4, TRAJ38)
CAVSYAGNNRTLIW

SEQ ID NO: 653724 - protein, 15 aa, Homo sapiens
  CDR3 for beta chain variable domain of TCR clone 326862 (TRBV12-4, TRBJ2-1)
CASSLLATGNNEQFF

SEQ ID NO: 653725 - protein, 14 aa, Homo sapiens
  CDR3 for alpha chain variable domain of TCR clone 326863 (TRAV2, TRAJ37)
CAVDFTSNTGKLIF

SEQ ID NO: 653726 - protein, 13 aa, Homo sapiens
  CDR3 for beta chain variable domain of TCR clone 326863 (TRBV7-9, TRBJ2-5)
CASLPSGRETQYF

SEQ ID NO: 653727 - protein, 16 aa, Homo sapiens
  CDR3 for alpha chain variable domain of TCR clone 326864 (TRAV3, TRAJ10)
CAVRDMRAGGGNKLTF

SEQ ID NO: 653728 - protein, 17 aa, Homo sapiens
  CDR3 for beta chain variable domain of TCR clone 326864 (TRBV5-1, TRBJ1-1)
CASRPIRTGGVNTEAFF

SEQ ID NO: 653729 - protein, 14 aa, Homo sapiens
  CDR3 for alpha chain variable domain of TCR clone 326865 (TRAV2, TRAJ37)
CAVDFTSNTGKLIF

SEQ ID NO: 653730 - protein, 12 aa, Homo sapiens
  CDR3 for beta chain variable domain of TCR clone 326865 (TRBV20-1, TRBJ1-1)
QCSTWGGTEAFL

SEQ ID NO: 653731 - protein, 12 aa, Homo sapiens
  CDR3 for alpha chain variable domain of TCR clone 326866 (TRAV21, TRAJ27)
CAANTNAGKSTF

SEQ ID NO: 653732 - protein, 14 aa, Homo sapiens
  CDR3 for beta chain variable domain of TCR clone 326866 (TRBV4-1, TRBJ2-2)
CASSQAVNTGELFF

SEQ ID NO: 653733 - protein, 14 aa, Homo sapiens
  CDR3 for alpha chain variable domain of TCR clone 326867 (TRAV16, TRAJ42)
CALLAGGCQGNLIF

SEQ ID NO: 653734 - protein, 13 aa, Homo sapiens
  CDR3 for beta chain variable domain of TCR clone 326867 (TRBV7-9, TRBJ1-2)
CASSLKQNYGYTF

SEQ ID NO: 653735 - protein, 12 aa, Homo sapiens
  CDR3 for alpha chain variable domain of TCR clone 326868 (TRAV35, TRAJ43)
CASAYNNNDMRF

SEQ ID NO: 653736 - protein, 14 aa, Homo sapiens
  CDR3 for beta chain variable domain of TCR clone 326868 (TRBV2, TRBJ2-2)
CASSWQGATGELFF

SEQ ID NO: 653737 - protein, 23 aa, Homo sapiens
  CDR3 for alpha chain variable domain of TCR clone 326869 (TRAV26-1, TRAJ38)
CIADNAGNNHIQNPDPAVYHLID

SEQ ID NO: 653738 - protein, 12 aa, Homo sapiens
  CDR3 for beta chain variable domain of TCR clone 326869 (TRBV11-2, TRBJ2-2)
CASSLGGGELFF

SEQ ID NO: 653739 - protein, 13 aa, Homo sapiens
  CDR3 for alpha chain variable domain of TCR clone 326870 (TRAV8-3, TRAJ48)
CAVVPFGNEKLTF

SEQ ID NO: 653740 - protein, 14 aa, Homo sapiens
  CDR3 for beta chain variable domain of TCR clone 326870 (TRBV12-5, TRBJ2-5)
CASGSRTHQETQYC

SEQ ID NO: 653741 - protein, 17 aa, Homo sapiens
  CDR3 for alpha chain variable domain of TCR clone 326871 (TRAV14/DV4, TRAJ28)
CAMREVSSGAGSYQLTF

SEQ ID NO: 653742 - protein, 15 aa, Homo sapiens
  CDR3 for beta chain variable domain of TCR clone 326871 (TRBV11-2, TRBJ1-6)
CASTLRETGNPPLHF

SEQ ID NO: 653743 - protein, 14 aa, Homo sapiens
  CDR3 for alpha chain variable domain of TCR clone 326872 (TRAV16, TRAJ33)
CALSAMDSNYQLIW

SEQ ID NO: 653744 - protein, 15 aa, Homo sapiens
  CDR3 for beta chain variable domain of TCR clone 326872 (TRBV20-1, TRBJ1-1)
CSASRGVTGNTEAFF

SEQ ID NO: 653745 - protein, 11 aa, Homo sapiens
  CDR3 for alpha chain variable domain of TCR clone 326873 (TRAV1-1, TRAJ5)
CAVRVRRALTF

SEQ ID NO: 653746 - protein, 16 aa, Homo sapiens
  CDR3 for beta chain variable domain of TCR clone 326873 (TRBV9, TRBJ2-1)
CASSVGGGGNYNEQFF

SEQ ID NO: 653747 - protein, 12 aa, Homo sapiens
  CDR3 for alpha chain variable domain of TCR clone 326874 (TRAV23/DV6, TRAJ30)
CAASKGDDKSIF

SEQ ID NO: 653748 - protein, 17 aa, Homo sapiens
  CDR3 for beta chain variable domain of TCR clone 326874 (TRBV13, TRBJ2-3)
CASSLSRVAGGRNTQYF

SEQ ID NO: 653749 - protein, 14 aa, Homo sapiens
  CDR3 for alpha chain variable domain of TCR clone 326875 (TRAV8-6, TRAJ36)
CAVSGKTGANNLLF

SEQ ID NO: 653750 - protein, 15 aa, Homo sapiens
  CDR3 for beta chain variable domain of TCR clone 326875 (TRBV6-6, TRBJ2-7)
CASSYSYGGSYEQYF

SEQ ID NO: 653751 - protein, 11 aa, Homo sapiens
  CDR3 for alpha chain variable domain of TCR clone 326876 (TRAV35, TRAJ30)
CAGPGDDKSIV

SEQ ID NO: 653752 - protein, 14 aa, Homo sapiens
  CDR3 for beta chain variable domain of TCR clone 326876 (TRBV7-6, TRBJ1-6)
CASSQAGGGSPLHF

SEQ ID NO: 653753 - protein, 17 aa, Homo sapiens
  CDR3 for alpha chain variable domain of TCR clone 326877 (TRAV3, TRAJ6)
CAVRDGTRAGGSYIPTF

SEQ ID NO: 653754 - protein, 14 aa, Homo sapiens
  CDR3 for beta chain variable domain of TCR clone 326877 (TRBV7-2, TRBJ2-7)
CASSPKTSVYEQYF

SEQ ID NO: 653755 - protein, 14 aa, Homo sapiens
  CDR3 for alpha chain variable domain of TCR clone 326878 (TRAV13-1, TRAJ44)
CVAKATGTASKLTF

SEQ ID NO: 653756 - protein, 16 aa, Homo sapiens
  CDR3 for beta chain variable domain of TCR clone 326878 (TRBV15, TRBJ1-2)
CATSRGPRTGGGGYTF

SEQ ID NO: 653757 - protein, 13 aa, Homo sapiens
  CDR3 for alpha chain variable domain of TCR clone 326879 (TRAV13-1, TRAJ6)
RARGTGGSYIPTF

SEQ ID NO: 653758 - protein, 17 aa, Homo sapiens
  CDR3 for beta chain variable domain of TCR clone 326879 (TRBV7-8, TRBJ2-1)
CASSPPTGTLAYNEQFF

SEQ ID NO: 653759 - protein, 16 aa, Homo sapiens
  CDR3 for alpha chain variable domain of TCR clone 326880 (TRAV8-3, TRAJ8)
RSVPRDGNTGFQKLVF

SEQ ID NO: 653760 - protein, 14 aa, Homo sapiens
  CDR3 for beta chain variable domain of TCR clone 326880 (TRBV28, TRBJ1-1)
CASSESGRGTEAFF

SEQ ID NO: 653761 - protein, 12 aa, Homo sapiens
  CDR3 for alpha chain variable domain of TCR clone 326881 (TRAV13-1, TRAJ53)
AASGGSNYKLTF

SEQ ID NO: 653762 - protein, 15 aa, Homo sapiens
  CDR3 for beta chain variable domain of TCR clone 326881 (TRBV9, TRBJ2-1)
CASSLAGSSYNEQFF

SEQ ID NO: 653763 - protein, 14 aa, Homo sapiens
  CDR3 for alpha chain variable domain of TCR clone 326882 (TRAV29/DV5, TRAJ36)
CAARRKTGANNLLG

SEQ ID NO: 653764 - protein, 17 aa, Homo sapiens
  CDR3 for beta chain variable domain of TCR clone 326882 (TRBV13, TRBJ2-3)
CASSLSRVAGGRNTQYF

SEQ ID NO: 653765 - protein, 14 aa, Homo sapiens
  CDR3 for alpha chain variable domain of TCR clone 326883 (TRAV1-2, TRAJ8)
CAVREDTGFQKLVF

SEQ ID NO: 653766 - protein, 18 aa, Homo sapiens
  CDR3 for beta chain variable domain of TCR clone 326883 (TRBV20-1, TRBJ2-6)
CSAETTPTHGSGANVLTY

SEQ ID NO: 653767 - protein, 17 aa, Homo sapiens
  CDR3 for alpha chain variable domain of TCR clone 326884 (TRAV3, TRAJ42)
CAVRDRDYAGSQGNLIF

SEQ ID NO: 653768 - protein, 18 aa, Homo sapiens
  CDR3 for beta chain variable domain of TCR clone 326884 (TRBV20-1, TRBJ2-3)
CSASGLAGGPGTTDTQYF

SEQ ID NO: 653769 - protein, 13 aa, Homo sapiens
  CDR3 for alpha chain variable domain of TCR clone 326885 (TRAV12-1, TRAJ7)
GVVNMRGNNRLAF

SEQ ID NO: 653770 - protein, 14 aa, Homo sapiens
  CDR3 for beta chain variable domain of TCR clone 326885 (TRBV28, TRBJ2-1)
CASSLLQGTNEQFF

SEQ ID NO: 653771 - protein, 17 aa, Homo sapiens
  CDR3 for alpha chain variable domain of TCR clone 326886 (TRAV26-1, TRAJ53)
CIVRVDDSGGRNYKLTF

SEQ ID NO: 653772 - protein, 15 aa, Homo sapiens
  CDR3 for beta chain variable domain of TCR clone 326886 (TRBV7-9, TRBJ1-4)
CASSRTGGFNEKLFF

SEQ ID NO: 653773 - protein, 14 aa, Homo sapiens
  CDR3 for alpha chain variable domain of TCR clone 326887 (TRAV23/DV6, TRAJ13)
CAASETGGDQKVTF

SEQ ID NO: 653774 - protein, 13 aa, Homo sapiens
  CDR3 for beta chain variable domain of TCR clone 326887 (TRBV29-1, TRBJ2-1)
CSVEGGRVNEQFF

SEQ ID NO: 653775 - protein, 15 aa, Homo sapiens
  CDR3 for alpha chain variable domain of TCR clone 326888 (TRAV4, TRAJ10)
CLVGDGSGGGNKLTF

SEQ ID NO: 653776 - protein, 15 aa, Homo sapiens
  CDR3 for beta chain variable domain of TCR clone 326888 (TRBV27, TRBJ2-3)
CASSSLVGVIDTQYF

SEQ ID NO: 653777 - protein, 14 aa, Homo sapiens
  CDR3 for alpha chain variable domain of TCR clone 326889 (TRAV20, TRAJ22)
CAVQVSGSARQLTF

SEQ ID NO: 653778 - protein, 17 aa, Homo sapiens
  CDR3 for beta chain variable domain of TCR clone 326889 (TRBV19, TRBJ2-6)
CASSTGQVFSGANVLTF

SEQ ID NO: 653779 - protein, 14 aa, Homo sapiens
  CDR3 for alpha chain variable domain of TCR clone 326890 (TRAV26-1, TRAJ34)
CIARVAYNTDKLIF

SEQ ID NO: 653780 - protein, 15 aa, Homo sapiens
  CDR3 for beta chain variable domain of TCR clone 326890 (TRBV9, TRBJ1-6)
CASSVAGTGDSPLHF

SEQ ID NO: 653781 - protein, 12 aa, Homo sapiens
  CDR3 for alpha chain variable domain of TCR clone 326891 (TRAV8-3, TRAJ27)
CAVGAEAGKSTF

SEQ ID NO: 653782 - protein, 16 aa, Homo sapiens
  CDR3 for beta chain variable domain of TCR clone 326891 (TRBV2, TRBJ2-1)
CASSLASGTSYNEQFF

SEQ ID NO: 653783 - protein, 13 aa, Homo sapiens
  CDR3 for alpha chain variable domain of TCR clone 326892 (TRAV3, TRAJ21)
CAVREPDFNKFYF

SEQ ID NO: 653784 - protein, 14 aa, Homo sapiens
  CDR3 for beta chain variable domain of TCR clone 326892 (TRBV19, TRBJ2-2)
CASSTGQGAGELFF

SEQ ID NO: 653785 - protein, 14 aa, Homo sapiens
  CDR3 for alpha chain variable domain of TCR clone 326893 (TRAV38-1, TRAJ40)
CALRPTSGTYKYIF

SEQ ID NO: 653786 - protein, 14 aa, Homo sapiens
  CDR3 for beta chain variable domain of TCR clone 326893 (TRBV9, TRBJ2-5)
CASSVDGAGETQYF

SEQ ID NO: 653787 - protein, 15 aa, Homo sapiens
  CDR3 for alpha chain variable domain of TCR clone 326894 (TRAV4, TRAJ36)
CLVGDRQTGANNLFF

SEQ ID NO: 653788 - protein, 15 aa, Homo sapiens
  CDR3 for beta chain variable domain of TCR clone 326894 (TRBV18, TRBJ1-2)
CASSPGNGLGYGYTF

SEQ ID NO: 653789 - protein, 13 aa, Homo sapiens
  CDR3 for alpha chain variable domain of TCR clone 326895 (TRAV17, TRAJ13)
CATDSGGYQKVTF

SEQ ID NO: 653790 - protein, 17 aa, Homo sapiens
  CDR3 for beta chain variable domain of TCR clone 326895 (TRBV20-1, TRBJ2-1)
CSASASGLAGSYNEQFF

SEQ ID NO: 653791 - protein, 14 aa, Homo sapiens
  CDR3 for alpha chain variable domain of TCR clone 326896 (TRAV12-2, TRAJ17)
CAVNIKAAGNKLTF

SEQ ID NO: 653792 - protein, 16 aa, Homo sapiens
  CDR3 for beta chain variable domain of TCR clone 326896 (TRBV11-3, TRBJ2-5)
CASSSVVAGSTETQYF

SEQ ID NO: 653793 - protein, 18 aa, Homo sapiens
  CDR3 for alpha chain variable domain of TCR clone 326897 (TRAV14/DV4, TRAJ15)
CAMREFPPTGQAGTALIF

SEQ ID NO: 653794 - protein, 17 aa, Homo sapiens
  CDR3 for beta chain variable domain of TCR clone 326897 (TRBV11-2, TRBJ2-1)
CASSLYPPGVEYNEQFF

SEQ ID NO: 653795 - protein, 14 aa, Homo sapiens
  CDR3 for alpha chain variable domain of TCR clone 326898 (TRAV8-4, TRAJ38)
CAVSYAGNNRKLIW

SEQ ID NO: 653796 - protein, 15 aa, Homo sapiens
  CDR3 for beta chain variable domain of TCR clone 326898 (TRBV12-4, TRBJ2-1)
CSSSLLATGNNEQFF

SEQ ID NO: 653797 - protein, 13 aa, Homo sapiens
  CDR3 for alpha chain variable domain of TCR clone 326899 (TRAV27, TRAJ41)
GAGEGNSGYALNF

SEQ ID NO: 653798 - protein, 14 aa, Homo sapiens
  CDR3 for beta chain variable domain of TCR clone 326899 (TRBV7-2, TRBJ1-1)
CASSFLTGTTEAFF

SEQ ID NO: 653799 - protein, 22 aa, Homo sapiens
  CDR3 for alpha chain variable domain of TCR clone 326900 (TRAV27, TRAJ38)
CAARRNAGNNHIQNPDPAVYQL

SEQ ID NO: 653800 - protein, 13 aa, Homo sapiens
  CDR3 for beta chain variable domain of TCR clone 326900 (TRBV12-5, TRBJ2-3)
CASGDQQSDTQYF

SEQ ID NO: 653801 - protein, 15 aa, Homo sapiens
  CDR3 for alpha chain variable domain of TCR clone 326901 (TRAV1-2, TRAJ30)
CAVKPHGNRDDKIIF

SEQ ID NO: 653802 - protein, 16 aa, Homo sapiens
  CDR3 for beta chain variable domain of TCR clone 326901 (TRBV24-1, TRBJ2-3)
CATSDRRQDLTDTQYF

SEQ ID NO: 653803 - protein, 11 aa, Homo sapiens
  CDR3 for alpha chain variable domain of TCR clone 326902 (TRAV8-3, TRAJ15)
CAVGPGTALIF

SEQ ID NO: 653804 - protein, 15 aa, Homo sapiens
  CDR3 for beta chain variable domain of TCR clone 326902 (TRBV7-9, TRBJ2-7)
CASSLDLQGPYEQYF

SEQ ID NO: 653805 - protein, 12 aa, Homo sapiens
  CDR3 for alpha chain variable domain of TCR clone 326903 (TRAV12-3, TRAJ17)
CAMTLTGNKLTF

SEQ ID NO: 653806 - protein, 12 aa, Homo sapiens
  CDR3 for beta chain variable domain of TCR clone 326903 (TRBV2, TRBJ2-1)
CAYGPTGNEQFF

SEQ ID NO: 653807 - protein, 14 aa, Homo sapiens
  CDR3 for alpha chain variable domain of TCR clone 326904 (TRAV17, TRAJ40)
CATVRFTGTYKYIF

SEQ ID NO: 653808 - protein, 15 aa, Homo sapiens
  CDR3 for beta chain variable domain of TCR clone 326904 (TRBV7-9, TRBJ1-4)
CASSARTGGNEKLFF

SEQ ID NO: 653809 - protein, 10 aa, Homo sapiens
  CDR3 for alpha chain variable domain of TCR clone 326905 (TRAV13-1, TRAJ21)
CAASLNKFYF

SEQ ID NO: 653810 - protein, 13 aa, Homo sapiens
  CDR3 for beta chain variable domain of TCR clone 326905 (TRBV7-9, TRBJ2-7)
CASSFYGSYEQYF

SEQ ID NO: 653811 - protein, 13 aa, Homo sapiens
  CDR3 for alpha chain variable domain of TCR clone 326906 (TRAV21, TRAJ27)
CAARPGNAGKSTL

SEQ ID NO: 653812 - protein, 14 aa, Homo sapiens
  CDR3 for beta chain variable domain of TCR clone 326906 (TRBV7-6, TRBJ2-3)
CASSLGKVTDTQYF

SEQ ID NO: 653813 - protein, 15 aa, Homo sapiens
  CDR3 for alpha chain variable domain of TCR clone 326907 (TRAV8-3, TRAJ32)
DAAEYFCGATNKLIF

SEQ ID NO: 653814 - protein, 16 aa, Homo sapiens
  CDR3 for beta chain variable domain of TCR clone 326907 (TRBV7-2, TRBJ1-3)
CASSSGRVLSGNTIYF

SEQ ID NO: 653815 - protein, 14 aa, Homo sapiens
  CDR3 for alpha chain variable domain of TCR clone 326908 (TRAV12-2, TRAJ48)
CAVNAFFGNAKLTF

SEQ ID NO: 653816 - protein, 13 aa, Homo sapiens
  CDR3 for beta chain variable domain of TCR clone 326908 (TRBV28, TRBJ2-7)
CAGAQQGLDEQYF

SEQ ID NO: 653817 - protein, 15 aa, Homo sapiens
  CDR3 for alpha chain variable domain of TCR clone 326909 (TRAV3, TRAJ3)
CAVRDRDSRASKIIF

SEQ ID NO: 653818 - protein, 18 aa, Homo sapiens
  CDR3 for beta chain variable domain of TCR clone 326909 (TRBV25-1, TRBJ1-2)
CASSGLQNGQGFIFGYTF

SEQ ID NO: 653819 - protein, 17 aa, Homo sapiens
  CDR3 for alpha chain variable domain of TCR clone 326910 (TRAV12-3, TRAJ26)
CAMSGGRGDNYGQNFVF

SEQ ID NO: 653820 - protein, 12 aa, Homo sapiens
  CDR3 for beta chain variable domain of TCR clone 326910 (TRBV19, TRBJ1-1)
CASSTTGIEAFF

SEQ ID NO: 653821 - protein, 12 aa, Homo sapiens
  CDR3 for alpha chain variable domain of TCR clone 326911 (TRAV12-3, TRAJ20)
CAMVRGDYKLSF

SEQ ID NO: 653822 - protein, 15 aa, Homo sapiens
  CDR3 for beta chain variable domain of TCR clone 326911 (TRBV28, TRBJ2-1)
CASSIIAGGRSEQFF

SEQ ID NO: 653823 - protein, 16 aa, Homo sapiens
  CDR3 for alpha chain variable domain of TCR clone 326912 (TRAV14/DV4, TRAJ15)
CAMREGSFQAGTALIF

SEQ ID NO: 653824 - protein, 18 aa, Homo sapiens
  CDR3 for beta chain variable domain of TCR clone 326912 (TRBV12-4, TRBJ2-4)
CASSRTGAVDVAKNMQYF

SEQ ID NO: 653825 - protein, 11 aa, Homo sapiens
  CDR3 for alpha chain variable domain of TCR clone 326913 (TRAV20, TRAJ23)
CACNQGAKLIF

SEQ ID NO: 653826 - protein, 16 aa, Homo sapiens
  CDR3 for beta chain variable domain of TCR clone 326913 (TRBV7-8, TRBJ2-5)
CASSFGGQPAQETQYF

SEQ ID NO: 653827 - protein, 15 aa, Homo sapiens
  CDR3 for alpha chain variable domain of TCR clone 326914 (TRAV1-2, TRAJ9)
CAVRDDGTGGFKTIF

SEQ ID NO: 653828 - protein, 17 aa, Homo sapiens
  CDR3 for beta chain variable domain of TCR clone 326914 (TRBV20-1, TRBJ2-1)
CSVSSSGLAGSYNEQFF

SEQ ID NO: 653829 - protein, 13 aa, Homo sapiens
  CDR3 for alpha chain variable domain of TCR clone 326915 (TRAV38-1, TRAJ43)
CAIRRGNNNDMRF

SEQ ID NO: 653830 - protein, 15 aa, Homo sapiens
  CDR3 for beta chain variable domain of TCR clone 326915 (TRBV27, TRBJ2-1)
CASSNGGGSSNEQFF

SEQ ID NO: 653831 - protein, 11 aa, Homo sapiens
  CDR3 for alpha chain variable domain of TCR clone 326916 (TRAV12-3, TRAJ43)
RAMSVSNDMRF

SEQ ID NO: 653832 - protein, 11 aa, Homo sapiens
  CDR3 for beta chain variable domain of TCR clone 326916 (TRBV29-1, TRBJ2-5)
CSEDRTGTQYF

SEQ ID NO: 653833 - protein, 10 aa, Homo sapiens
  CDR3 for alpha chain variable domain of TCR clone 326917 (TRAV36/DV7, TRAJ31)
CAVGEARLMF

SEQ ID NO: 653834 - protein, 15 aa, Homo sapiens
  CDR3 for beta chain variable domain of TCR clone 326917 (TRBV7-2, TRBJ2-3)
CASSSTGLETDTQYF

SEQ ID NO: 653835 - protein, 18 aa, Homo sapiens
  CDR3 for alpha chain variable domain of TCR clone 326918 (TRAV13-1, TRAJ52)
CAAKNPNAGCTSYGKLTF

SEQ ID NO: 653836 - protein, 16 aa, Homo sapiens
  CDR3 for beta chain variable domain of TCR clone 326918 (TRBV12-4, TRBJ1-5)
CASSRPVGGSNQPQHF

SEQ ID NO: 653837 - protein, 11 aa, Homo sapiens
  CDR3 for alpha chain variable domain of TCR clone 326919 (TRAV21, TRAJ39)
LLVNAGNMLTF

SEQ ID NO: 653838 - protein, 17 aa, Homo sapiens
  CDR3 for beta chain variable domain of TCR clone 326919 (TRBV7-8, TRBJ2-6)
CASSAGTGGAGANVLSF

SEQ ID NO: 653839 - protein, 14 aa, Homo sapiens
  CDR3 for alpha chain variable domain of TCR clone 326920 (TRAV1-2, TRAJ16)
CAVNRFSDGQKLLF

SEQ ID NO: 653840 - protein, 15 aa, Homo sapiens
  CDR3 for beta chain variable domain of TCR clone 326920 (TRBV2, TRBJ1-5)
CASAPPGGSNQPQHF

SEQ ID NO: 653841 - protein, 17 aa, Homo sapiens
  CDR3 for alpha chain variable domain of TCR clone 326921 (TRAV4, TRAJ18)
CLVGEGSVGSTLGRLYF

SEQ ID NO: 653842 - protein, 16 aa, Homo sapiens
  CDR3 for beta chain variable domain of TCR clone 326921 (TRBV15, TRBJ1-4)
CATSRDSPPGREKLFF

SEQ ID NO: 653843 - protein, 13 aa, Homo sapiens
  CDR3 for alpha chain variable domain of TCR clone 326922 (TRAV13-2, TRAJ8)
CAFMNTCFQKLVF

SEQ ID NO: 653844 - protein, 17 aa, Homo sapiens
  CDR3 for beta chain variable domain of TCR clone 326922 (TRBV28, TRBJ2-1)
CASSSARQALTYNEQFF

SEQ ID NO: 653845 - protein, 13 aa, Homo sapiens
  CDR3 for alpha chain variable domain of TCR clone 326923 (TRAV13-2, TRAJ48)
CAEMDFGNEKLTF

SEQ ID NO: 653846 - protein, 13 aa, Homo sapiens
  CDR3 for beta chain variable domain of TCR clone 326923 (TRBV12-4, TRBJ1-2)
CASSSGLTVISTF

SEQ ID NO: 653847 - protein, 23 aa, Homo sapiens
  CDR3 for alpha chain variable domain of TCR clone 326924 (TRAV26-1, TRAJ38)
CIVRPLNAGNNHIQNPDPPVYQL

SEQ ID NO: 653848 - protein, 13 aa, Homo sapiens
  CDR3 for beta chain variable domain of TCR clone 326924 (TRBV18, TRBJ1-1)
CASSPNGDTEAFF

SEQ ID NO: 653849 - protein, 12 aa, Homo sapiens
  CDR3 for alpha chain variable domain of TCR clone 326925 (TRAV13-1, TRAJ21)
CAAKVGFNKFYF

SEQ ID NO: 653850 - protein, 13 aa, Homo sapiens
  CDR3 for beta chain variable domain of TCR clone 326925 (TRBV19, TRBJ2-7)
CASSPRQSYEQYF

SEQ ID NO: 653851 - protein, 11 aa, Homo sapiens
  CDR3 for alpha chain variable domain of TCR clone 326926 (TRAV16, TRAJ29)
WAPSGNTPLVF

SEQ ID NO: 653852 - protein, 17 aa, Homo sapiens
  CDR3 for beta chain variable domain of TCR clone 326926 (TRBV7-3, TRBJ2-3)
CASSLMKRMRGADTQYF

SEQ ID NO: 653853 - protein, 14 aa, Homo sapiens
  CDR3 for alpha chain variable domain of TCR clone 326927 (TRAV1-1, TRAJ27)
CAVIYNTNAGKSTF

SEQ ID NO: 653854 - protein, 14 aa, Homo sapiens
  CDR3 for beta chain variable domain of TCR clone 326927 (TRBV19, TRBJ2-7)
CASSMGQGAIEQYF

SEQ ID NO: 653855 - protein, 14 aa, Homo sapiens
  CDR3 for alpha chain variable domain of TCR clone 326928 (TRAV4, TRAJ23)
CLVGSYNQGGKLIF

SEQ ID NO: 653856 - protein, 18 aa, Homo sapiens
  CDR3 for beta chain variable domain of TCR clone 326928 (TRBV6-5, TRBJ2-6)
CASRTPGQGKTVANVLTF

SEQ ID NO: 653857 - protein, 10 aa, Homo sapiens
  CDR3 for alpha chain variable domain of TCR clone 326929 (TRAV12-2, TRAJ41)
CAVTWYALNF

SEQ ID NO: 653858 - protein, 15 aa, Homo sapiens
  CDR3 for beta chain variable domain of TCR clone 326929 (TRBV4-2, TRBJ2-1)
CASSQDVGLAGEQFF

SEQ ID NO: 653859 - protein, 15 aa, Homo sapiens
  CDR3 for alpha chain variable domain of TCR clone 326930 (TRAV20, TRAJ52)
CAVQAGGTSYGKLTF

SEQ ID NO: 653860 - protein, 16 aa, Homo sapiens
  CDR3 for beta chain variable domain of TCR clone 326930 (TRBV4-2, TRBJ1-1)
CASSQAGFGMNTEAFF

SEQ ID NO: 653861 - protein, 18 aa, Homo sapiens
  CDR3 for alpha chain variable domain of TCR clone 326931 (TRAV13-1, TRAJ52)
CAAKNPNAGGTSYGKLTF

SEQ ID NO: 653862 - protein, 16 aa, Homo sapiens
  CDR3 for beta chain variable domain of TCR clone 326931 (TRBV19, TRBJ2-3)
CASSPGAASRTDTQYF

SEQ ID NO: 653863 - protein, 16 aa, Homo sapiens
  CDR3 for alpha chain variable domain of TCR clone 326932 (TRAV8-1, TRAJ39)
CAVNVPSYNAGNMLTF

SEQ ID NO: 653864 - protein, 14 aa, Homo sapiens
  CDR3 for beta chain variable domain of TCR clone 326932 (TRBV19, TRBJ2-1)
CASPTFVLSGEQFF

SEQ ID NO: 653865 - protein, 15 aa, Homo sapiens
  CDR3 for alpha chain variable domain of TCR clone 326933 (TRAV8-2, TRAJ40)
CVVLGTTSGTYKYIF

SEQ ID NO: 653866 - protein, 16 aa, Homo sapiens
  CDR3 for beta chain variable domain of TCR clone 326933 (TRBV7-3, TRBJ2-1)
CASSLEGYRSYNEQFY

SEQ ID NO: 653867 - protein, 18 aa, Homo sapiens
  CDR3 for alpha chain variable domain of TCR clone 326934 (TRAV12-2, )
CAVEDIQNPDPAVYQLRD

SEQ ID NO: 653868 - protein, 16 aa, Homo sapiens
  CDR3 for beta chain variable domain of TCR clone 326934 (TRBV6-1, TRBJ1-2)
CASSGAWQGRSDGYTF

SEQ ID NO: 653869 - protein, 11 aa, Homo sapiens
  CDR3 for alpha chain variable domain of TCR clone 326935 (TRAV3, TRAJ17)
PRGAAGNKLTF

SEQ ID NO: 653870 - protein, 12 aa, Homo sapiens
  CDR3 for beta chain variable domain of TCR clone 326935 (TRBV11-2, TRBJ2-2)
YASSLGGGELFF

SEQ ID NO: 653871 - protein, 15 aa, Homo sapiens
  CDR3 for alpha chain variable domain of TCR clone 326936 (TRAV1-2, TRAJ16)
CAVRARFSDGQKLLF

SEQ ID NO: 653872 - protein, 19 aa, Homo sapiens
  CDR3 for beta chain variable domain of TCR clone 326936 (TRBV11-3, TRBJ2-3)
CASGFVTSGGPRGGGTQYF

SEQ ID NO: 653873 - protein, 12 aa, Homo sapiens
  CDR3 for alpha chain variable domain of TCR clone 326937 (TRAV26-1, TRAJ13)
CICSRGYQKVTF

SEQ ID NO: 653874 - protein, 14 aa, Homo sapiens
  CDR3 for beta chain variable domain of TCR clone 326937 (TRBV7-2, TRBJ2-7)
CASSPKTSFYEQYF

SEQ ID NO: 653875 - protein, 15 aa, Homo sapiens
  CDR3 for alpha chain variable domain of TCR clone 326938 (TRAV4, TRAJ39)
CLVGPNNSAGNMLTF

SEQ ID NO: 653876 - protein, 13 aa, Homo sapiens
  CDR3 for beta chain variable domain of TCR clone 326938 (TRBV7-2, TRBJ2-7)
CASSSPSGSEQYF

SEQ ID NO: 653877 - protein, 16 aa, Homo sapiens
  CDR3 for alpha chain variable domain of TCR clone 326939 (TRAV3, TRAJ18)
CAVRDGRGPTLGRIYF

SEQ ID NO: 653878 - protein, 17 aa, Homo sapiens
  CDR3 for beta chain variable domain of TCR clone 326939 (TRBV5-1, TRBJ2-3)
CASSKIGLADRTDTQYF

SEQ ID NO: 653879 - protein, 18 aa, Homo sapiens
  CDR3 for alpha chain variable domain of TCR clone 326940 (TRAV13-1, TRAJ52)
CAADFPNAGGTSYGKLTF

SEQ ID NO: 653880 - protein, 14 aa, Homo sapiens
  CDR3 for beta chain variable domain of TCR clone 326940 (TRBV18, TRBJ2-5)
CASSPGVSQETQYF

SEQ ID NO: 653881 - protein, 14 aa, Homo sapiens
  CDR3 for alpha chain variable domain of TCR clone 326941 (TRAV12-2, TRAJ13)
CAVKKTGGCQKVTF

SEQ ID NO: 653882 - protein, 15 aa, Homo sapiens
  CDR3 for beta chain variable domain of TCR clone 326941 (TRBV27, TRBJ2-1)
CASSNGGGSSNGQFF

SEQ ID NO: 653883 - protein, 14 aa, Homo sapiens
  CDR3 for alpha chain variable domain of TCR clone 326942 (TRAV8-1, TRAJ27)
CAVNVGTNAGKSTF

SEQ ID NO: 653884 - protein, 16 aa, Homo sapiens
  CDR3 for beta chain variable domain of TCR clone 326942 (TRBV5-1, TRBJ2-7)
CASSFTTGTALVEQYF

SEQ ID NO: 653885 - protein, 11 aa, Homo sapiens
  CDR3 for alpha chain variable domain of TCR clone 326943 (TRAV17, TRAJ43)
CATPRSNDMRF

SEQ ID NO: 653886 - protein, 13 aa, Homo sapiens
  CDR3 for beta chain variable domain of TCR clone 326943 (TRBV7-6, TRBJ1-2)
CASSLVADYGYTF

SEQ ID NO: 653887 - protein, 16 aa, Homo sapiens
  CDR3 for alpha chain variable domain of TCR clone 326944 (TRAV12-3, TRAJ53)
CAMSPGSGGSNYKLTL

SEQ ID NO: 653888 - protein, 17 aa, Homo sapiens
  CDR3 for beta chain variable domain of TCR clone 326944 (TRBV20-1, TRBJ2-2)
CSASGSGQGGLTGELFF

SEQ ID NO: 653889 - protein, 11 aa, Homo sapiens
  CDR3 for alpha chain variable domain of TCR clone 326945 (TRAV17, TRAJ36)
CATTGANNLFF

SEQ ID NO: 653890 - protein, 13 aa, Homo sapiens
  CDR3 for beta chain variable domain of TCR clone 326945 (TRBV12-4, TRBJ2-7)
CASSPTETYEQYF

SEQ ID NO: 653891 - protein, 14 aa, Homo sapiens
  CDR3 for alpha chain variable domain of TCR clone 326946 (TRAV26-1, TRAJ34)
CIVRVAYNTDKLIF

SEQ ID NO: 653892 - protein, 13 aa, Homo sapiens
  CDR3 for beta chain variable domain of TCR clone 326946 (TRBV12-4, TRBJ1-5)
CASSPDRAQPQHF

SEQ ID NO: 653893 - protein, 12 aa, Homo sapiens
  CDR3 for alpha chain variable domain of TCR clone 326947 (TRAV21, TRAJ33)
CAKMDSNYQLIW

SEQ ID NO: 653894 - protein, 14 aa, Homo sapiens
  CDR3 for beta chain variable domain of TCR clone 326947 (TRBV7-3, TRBJ1-1)
CASSLKGGNTVAFF

SEQ ID NO: 653895 - protein, 15 aa, Homo sapiens
  CDR3 for alpha chain variable domain of TCR clone 326948 (TRAV3, TRAJ11)
CAVRDRGSGYSTLTF

SEQ ID NO: 653896 - protein, 13 aa, Homo sapiens
  CDR3 for beta chain variable domain of TCR clone 326948 (TRBV12-4, TRBJ1-2)
CASSLRQGKGYTF

SEQ ID NO: 653897 - protein, 15 aa, Homo sapiens
  CDR3 for alpha chain variable domain of TCR clone 326949 (TRAV26-1, TRAJ29)
CIVIVEGSGNTPLVL

SEQ ID NO: 653898 - protein, 14 aa, Homo sapiens
  CDR3 for beta chain variable domain of TCR clone 326949 (TRBV25-1, TRBJ1-1)
CASTHLGGNTEAFF

SEQ ID NO: 653899 - protein, 13 aa, Homo sapiens
  CDR3 for alpha chain variable domain of TCR clone 326950 (TRAV13-2, TRAJ22)
CRDPSGSARQLTF

SEQ ID NO: 653900 - protein, 20 aa, Homo sapiens
  CDR3 for beta chain variable domain of TCR clone 326950 (TRBV7-8, TRBJ2-2)
CARSHLFPGPTIHITGELFF

SEQ ID NO: 653901 - protein, 11 aa, Homo sapiens
  CDR3 for alpha chain variable domain of TCR clone 326951 (TRAV1-2, TRAJ31)
CAVNNNARLMF

SEQ ID NO: 653902 - protein, 15 aa, Homo sapiens
  CDR3 for beta chain variable domain of TCR clone 326951 (TRBV28, TRBJ2-1)
CYSSIIAGGRSEQFF

SEQ ID NO: 653903 - protein, 15 aa, Homo sapiens
  CDR3 for alpha chain variable domain of TCR clone 326952 (TRAV25, TRAJ41)
CAGPWNSNSGYALNF

SEQ ID NO: 653904 - protein, 13 aa, Homo sapiens
  CDR3 for beta chain variable domain of TCR clone 326952 (TRBV15, TRBJ1-1)
CATSRGVQARAFF

SEQ ID NO: 653905 - protein, 13 aa, Homo sapiens
  CDR3 for alpha chain variable domain of TCR clone 326953 (TRAV12-2, TRAJ39)
CAVNNNAGNMLTF

SEQ ID NO: 653906 - protein, 13 aa, Homo sapiens
  CDR3 for beta chain variable domain of TCR clone 326953 (TRBV2, TRBJ1-5)
CATAGPGSQPQHF

SEQ ID NO: 653907 - protein, 14 aa, Homo sapiens
  CDR3 for alpha chain variable domain of TCR clone 326954 (TRAV1-2, TRAJ16)
CAVNRFSGGQELLF

SEQ ID NO: 653908 - protein, 16 aa, Homo sapiens
  CDR3 for beta chain variable domain of TCR clone 326954 (TRBV7-3, TRBJ2-2)
CASSLKRGTLSGELFF

SEQ ID NO: 653909 - protein, 14 aa, Homo sapiens
  CDR3 for alpha chain variable domain of TCR clone 326955 (TRAV3, TRAJ7)
CAVREEERERQTRF

SEQ ID NO: 653910 - protein, 15 aa, Homo sapiens
  CDR3 for beta chain variable domain of TCR clone 326955 (TRBV20-1, TRBJ1-5)
CSAFKNGLRNQPQHF

SEQ ID NO: 653911 - protein, 13 aa, Homo sapiens
  CDR3 for alpha chain variable domain of TCR clone 326956 (TRAV21, TRAJ27)
CAAHPGNAGKSTF

SEQ ID NO: 653912 - protein, 15 aa, Homo sapiens
  CDR3 for beta chain variable domain of TCR clone 326956 (TRBV6-3, TRBJ2-7)
CASSSPGTVFYEQYF

SEQ ID NO: 653913 - protein, 15 aa, Homo sapiens
  CDR3 for alpha chain variable domain of TCR clone 326957 (TRAV3, TRAJ17)
CAVSPKEAAGNKLTF

SEQ ID NO: 653914 - protein, 17 aa, Homo sapiens
  CDR3 for beta chain variable domain of TCR clone 326957 (TRBV11-2, TRBJ2-1)
CASSLYPPGVEYNEQFF

SEQ ID NO: 653915 - protein, 10 aa, Homo sapiens
  CDR3 for alpha chain variable domain of TCR clone 326958 (TRAV23/DV6, TRAJ31)
CARGGARLTF

SEQ ID NO: 653916 - protein, 14 aa, Homo sapiens
  CDR3 for beta chain variable domain of TCR clone 326958 (TRBV7-8, TRBJ1-2)
CASSTDSLSYGYTF

SEQ ID NO: 653917 - protein, 17 aa, Homo sapiens
  CDR3 for alpha chain variable domain of TCR clone 326959 (TRAV17, TRAJ9)
CFLLLCYGHYWRLKTIF

SEQ ID NO: 653918 - protein, 16 aa, Homo sapiens
  CDR3 for beta chain variable domain of TCR clone 326959 (TRBV15, TRBJ2-1)
CATSRNLAGGYNEQFF

SEQ ID NO: 653919 - protein, 11 aa, Homo sapiens
  CDR3 for alpha chain variable domain of TCR clone 326960 (TRAV12-2, TRAJ3)
CAVKRASKIIF

SEQ ID NO: 653920 - protein, 15 aa, Homo sapiens
  CDR3 for beta chain variable domain of TCR clone 326960 (TRBV6-3, TRBJ2-2)
CASSFLATLTGELFF

SEQ ID NO: 653921 - protein, 15 aa, Homo sapiens
  CDR3 for alpha chain variable domain of TCR clone 326961 (TRAV12-3, TRAJ6)
CAMSATTGGSYIPTF

SEQ ID NO: 653922 - protein, 15 aa, Homo sapiens
  CDR3 for beta chain variable domain of TCR clone 326961 (TRBV28, TRBJ2-5)
CASSPPWSYQETQFF

SEQ ID NO: 653923 - protein, 14 aa, Homo sapiens
  CDR3 for alpha chain variable domain of TCR clone 326962 (TRAV1-1, TRAJ23)
CAVSIYNQGGKLIF

SEQ ID NO: 653924 - protein, 15 aa, Homo sapiens
  CDR3 for beta chain variable domain of TCR clone 326962 (TRBV19, TRBJ2-1)
CASSSPGVPLDEQFF

SEQ ID NO: 653925 - protein, 17 aa, Homo sapiens
  CDR3 for alpha chain variable domain of TCR clone 326963 (TRAV3, TRAJ6)
CAVRDGPRAGGSYIPTF

SEQ ID NO: 653926 - protein, 19 aa, Homo sapiens
  CDR3 for beta chain variable domain of TCR clone 326963 (TRBV5-1, TRBJ2-3)
CASSLWLAGGITTTDTQYF

SEQ ID NO: 653927 - protein, 15 aa, Homo sapiens
  CDR3 for alpha chain variable domain of TCR clone 326964 (TRAV2, TRAJ24)
CAVVRLKNSWGKLQF

SEQ ID NO: 653928 - protein, 15 aa, Homo sapiens
  CDR3 for beta chain variable domain of TCR clone 326964 (TRBV10-3, TRBJ2-1)
CAIRNGTSGHNEQFF

SEQ ID NO: 653929 - protein, 13 aa, Homo sapiens
  CDR3 for alpha chain variable domain of TCR clone 326965 (TRAV27, TRAJ3)
ASLRGSSATKIIF

SEQ ID NO: 653930 - protein, 15 aa, Homo sapiens
  CDR3 for beta chain variable domain of TCR clone 326965 (TRBV28, TRBJ1-3)
CASSMGWASGNTIYF

SEQ ID NO: 653931 - protein, 15 aa, Homo sapiens
  CDR3 for alpha chain variable domain of TCR clone 326966 (TRAV8-2, TRAJ13)
CVERDLSGGYQKVTF

SEQ ID NO: 653932 - protein, 16 aa, Homo sapiens
  CDR3 for beta chain variable domain of TCR clone 326966 (TRBV27, TRBJ2-2)
CASSFRGLVRTGELFF

SEQ ID NO: 653933 - protein, 15 aa, Homo sapiens
  CDR3 for alpha chain variable domain of TCR clone 326967 (TRAV25, TRAJ52)
CAGRPGGTSYGKLTF

SEQ ID NO: 653934 - protein, 14 aa, Homo sapiens
  CDR3 for beta chain variable domain of TCR clone 326967 (TRBV7-8, TRBJ2-5)
CASRPLAGRETQYF

SEQ ID NO: 653935 - protein, 15 aa, Homo sapiens
  CDR3 for alpha chain variable domain of TCR clone 326968 (TRAV23/DV6, TRAJ12)
CAAIDLWSMNSSYNF

SEQ ID NO: 653936 - protein, 12 aa, Homo sapiens
  CDR3 for beta chain variable domain of TCR clone 326968 (TRBV10-3, TRBJ2-2)
CAIRENTGELFF

SEQ ID NO: 653937 - protein, 15 aa, Homo sapiens
  CDR3 for alpha chain variable domain of TCR clone 326969 (TRAV35, TRAJ40)
CAGQLWDSGTYKYVF

SEQ ID NO: 653938 - protein, 12 aa, Homo sapiens
  CDR3 for beta chain variable domain of TCR clone 326969 (TRBV7-8, TRBJ2-7)
CASSLAGYEQYF

SEQ ID NO: 653939 - protein, 14 aa, Homo sapiens
  CDR3 for alpha chain variable domain of TCR clone 326970 (TRAV9-2, TRAJ39)
CALYIYNAGNMLTF

SEQ ID NO: 653940 - protein, 16 aa, Homo sapiens
  CDR3 for beta chain variable domain of TCR clone 326970 (TRBV18, TRBJ2-1)
CASSPRLAGGGDEQFF

SEQ ID NO: 653941 - protein, 12 aa, Homo sapiens
  CDR3 for alpha chain variable domain of TCR clone 326971 (TRAV1-1, TRAJ8)
CAGGTGFQKLVF

SEQ ID NO: 653942 - protein, 15 aa, Homo sapiens
  CDR3 for beta chain variable domain of TCR clone 326971 (TRBV20-1, TRBJ2-6)
CSAYGQVSGANVLTF

SEQ ID NO: 653943 - protein, 12 aa, Homo sapiens
  CDR3 for alpha chain variable domain of TCR clone 326972 (TRAV12-2, TRAJ52)
IGGGTSYGKLTF

SEQ ID NO: 653944 - protein, 13 aa, Homo sapiens
  CDR3 for beta chain variable domain of TCR clone 326972 (TRBV12-4, TRBJ1-1)
CACSPGTGFEAFF

SEQ ID NO: 653945 - protein, 13 aa, Homo sapiens
  CDR3 for alpha chain variable domain of TCR clone 326973 (TRAV2, TRAJ40)
CAVVTSGAFKYIF

SEQ ID NO: 653946 - protein, 14 aa, Homo sapiens
  CDR3 for beta chain variable domain of TCR clone 326973 (TRBV19, TRBJ2-1)
CASPTFVLSGEQFF

SEQ ID NO: 653947 - protein, 13 aa, Homo sapiens
  CDR3 for alpha chain variable domain of TCR clone 326974 (TRAV12-2, TRAJ10)
CAVPTGGGNKLTF

SEQ ID NO: 653948 - protein, 11 aa, Homo sapiens
  CDR3 for beta chain variable domain of TCR clone 326974 (TRBV6-1, TRBJ2-1)
CASISTNEQFF

SEQ ID NO: 653949 - protein, 13 aa, Homo sapiens
  CDR3 for alpha chain variable domain of TCR clone 326975 (TRAV13-1, TRAJ49)
WAAMFYTGNQFYF

SEQ ID NO: 653950 - protein, 15 aa, Homo sapiens
  CDR3 for beta chain variable domain of TCR clone 326975 (TRBV12-4, TRBJ1-5)
CASTRGSGFGQPQHF

SEQ ID NO: 653951 - protein, 12 aa, Homo sapiens
  CDR3 for alpha chain variable domain of TCR clone 326976 (TRAV36/DV7, TRAJ50)
CAVEPENLLRQG

SEQ ID NO: 653952 - protein, 15 aa, Homo sapiens
  CDR3 for beta chain variable domain of TCR clone 326976 (TRBV7-3, TRBJ2-2)
CQQLKARTLSGELFF

SEQ ID NO: 653953 - protein, 13 aa, Homo sapiens
  CDR3 for alpha chain variable domain of TCR clone 326977 (TRAV17, TRAJ9)
CATDYTGGFKTIF

SEQ ID NO: 653954 - protein, 14 aa, Homo sapiens
  CDR3 for beta chain variable domain of TCR clone 326977 (TRBV27, TRBJ1-1)
CASSPQGKRAEAFF

SEQ ID NO: 653955 - protein, 14 aa, Homo sapiens
  CDR3 for alpha chain variable domain of TCR clone 326978 (TRAV4, TRAJ6)
CLVGEAGGSYIPTF

SEQ ID NO: 653956 - protein, 13 aa, Homo sapiens
  CDR3 for beta chain variable domain of TCR clone 326978 (TRBV7-3, TRBJ1-1)
CASSQDWGAEAYF

SEQ ID NO: 653957 - protein, 17 aa, Homo sapiens
  CDR3 for alpha chain variable domain of TCR clone 326979 (TRAV3, TRAJ6)
CAVRDGPRAGGSYIPTF

SEQ ID NO: 653958 - protein, 14 aa, Homo sapiens
  CDR3 for beta chain variable domain of TCR clone 326979 (TRBV20-1, TRBJ2-7)
CSAWTALSSYEQYF

SEQ ID NO: 653959 - protein, 16 aa, Homo sapiens
  CDR3 for alpha chain variable domain of TCR clone 326980 (TRAV30, TRAJ24)
CGTEIVDADSWGKFQF

SEQ ID NO: 653960 - protein, 18 aa, Homo sapiens
  CDR3 for beta chain variable domain of TCR clone 326980 (TRBV6-6, TRBJ2-5)
CASSYSWLQGALRETQYF

SEQ ID NO: 653961 - protein, 11 aa, Homo sapiens
  CDR3 for alpha chain variable domain of TCR clone 326981 (TRAV17, TRAJ43)
CATPRSNDMRF

SEQ ID NO: 653962 - protein, 15 aa, Homo sapiens
  CDR3 for beta chain variable domain of TCR clone 326981 (TRBV11-2, TRBJ2-1)
CASSVGTSGLNEHFF

SEQ ID NO: 653963 - protein, 15 aa, Homo sapiens
  CDR3 for alpha chain variable domain of TCR clone 326982 (TRAV1-1, TRAJ20)
CAVRDNVANDYKLSI

SEQ ID NO: 653964 - protein, 13 aa, Homo sapiens
  CDR3 for beta chain variable domain of TCR clone 326982 (TRBV4-1, TRBJ2-2)
CASSQENTGELFF

SEQ ID NO: 653965 - protein, 13 aa, Homo sapiens
  CDR3 for alpha chain variable domain of TCR clone 326983 (TRAV8-3, TRAJ43)
CAVVPYNNNDMRF

SEQ ID NO: 653966 - protein, 16 aa, Homo sapiens
  CDR3 for beta chain variable domain of TCR clone 326983 (TRBV7-2, TRBJ2-5)
CASSPSPTGGEETQYF

SEQ ID NO: 653967 - protein, 16 aa, Homo sapiens
  CDR3 for alpha chain variable domain of TCR clone 326984 (TRAV12-3, TRAJ53)
CAMSPGSGGSNYKLTF

SEQ ID NO: 653968 - protein, 19 aa, Homo sapiens
  CDR3 for beta chain variable domain of TCR clone 326984 (TRBV19, TRBJ2-5)
CASSIGQVTDFFLGETQYF

SEQ ID NO: 653969 - protein, 13 aa, Homo sapiens
  CDR3 for alpha chain variable domain of TCR clone 326985 (TRAV12-3, TRAJ33)
CSMSVNSNYQLIW

SEQ ID NO: 653970 - protein, 14 aa, Homo sapiens
  CDR3 for beta chain variable domain of TCR clone 326985 (TRBV12-5, TRBJ2-5)
CASGSRTHQETQYF

SEQ ID NO: 653971 - protein, 12 aa, Homo sapiens
  CDR3 for alpha chain variable domain of TCR clone 326986 (TRAV21, TRAJ33)
CAKMDSNYHLIW

SEQ ID NO: 653972 - protein, 18 aa, Homo sapiens
  CDR3 for beta chain variable domain of TCR clone 326986 (TRBV4-1, TRBJ1-1)
CASSQDSSGGGFWTEAFF

SEQ ID NO: 653973 - protein, 14 aa, Homo sapiens
  CDR3 for alpha chain variable domain of TCR clone 326987 (TRAV23/DV6, TRAJ53)
CAARSGGSNYKLTF

SEQ ID NO: 653974 - protein, 16 aa, Homo sapiens
  CDR3 for beta chain variable domain of TCR clone 326987 (TRBV5-1, TRBJ2-3)
CASSLALVVVSDTQYF

SEQ ID NO: 653975 - protein, 18 aa, Homo sapiens
  CDR3 for alpha chain variable domain of TCR clone 326988 (TRAV13-1, TRAJ52)
CAASKRSAGGTSYGKLTF

SEQ ID NO: 653976 - protein, 12 aa, Homo sapiens
  CDR3 for beta chain variable domain of TCR clone 326988 (TRBV19, TRBJ1-4)
CASKDWPGGLFF

SEQ ID NO: 653977 - protein, 16 aa, Homo sapiens
  CDR3 for alpha chain variable domain of TCR clone 326989 (TRAV8-3, TRAJ44)
CAVGASITGTASKLTF

SEQ ID NO: 653978 - protein, 23 aa, Homo sapiens
  CDR3 for beta chain variable domain of TCR clone 326989 (TRBV19, TRBJ1-1)
TVTSAQKNPTAFYLWAGGAMIFF

SEQ ID NO: 653979 - protein, 17 aa, Homo sapiens
  CDR3 for alpha chain variable domain of TCR clone 326990 (TRAV3, TRAJ6)
CAVRDGPRAGGSYKPTF

SEQ ID NO: 653980 - protein, 14 aa, Homo sapiens
  CDR3 for beta chain variable domain of TCR clone 326990 (TRBV7-2, TRBJ2-7)
CASSPKTSFYERYF

SEQ ID NO: 653981 - protein, 20 aa, Homo sapiens
  CDR3 for alpha chain variable domain of TCR clone 326991 (TRAV25, TRAJ21)
TATQTTDVGTYPLSFNKFYF

SEQ ID NO: 653982 - protein, 16 aa, Homo sapiens
  CDR3 for beta chain variable domain of TCR clone 326991 (TRBV5-1, TRBJ2-1)
CASSLTSGGAYNEQFF

SEQ ID NO: 653983 - protein, 14 aa, Homo sapiens
  CDR3 for alpha chain variable domain of TCR clone 326992 (TRAV16, TRAJ17)
CALSEGAAGNKLTL

SEQ ID NO: 653984 - protein, 14 aa, Homo sapiens
  CDR3 for beta chain variable domain of TCR clone 326992 (TRBV28, TRBJ2-2)
CASRIRSGTGELFF

SEQ ID NO: 653985 - protein, 15 aa, Homo sapiens
  CDR3 for alpha chain variable domain of TCR clone 326993 (TRAV25, TRAJ53)
CSATGGGGSNYKLTF

SEQ ID NO: 653986 - protein, 19 aa, Homo sapiens
  CDR3 for beta chain variable domain of TCR clone 326993 (TRBV7-2, TRBJ2-3)
CASSFLSRNWGGGTDTQYF

SEQ ID NO: 653987 - protein, 14 aa, Homo sapiens
  CDR3 for alpha chain variable domain of TCR clone 326994 (TRAV20, TRAJ20)
CAVRRGDNDYKLSV

SEQ ID NO: 653988 - protein, 13 aa, Homo sapiens
  CDR3 for beta chain variable domain of TCR clone 326994 (TRBV19, TRBJ2-5)
CASSETAPETQYF

SEQ ID NO: 653989 - protein, 14 aa, Homo sapiens
  CDR3 for alpha chain variable domain of TCR clone 326995 (TRAV12-2, TRAJ13)
CAVKKTGGYQKVTF

SEQ ID NO: 653990 - protein, 19 aa, Homo sapiens
  CDR3 for beta chain variable domain of TCR clone 326995 (TRBV25-1, TRBJ2-2)
CAILVCRVDRGSKTGELFF

SEQ ID NO: 653991 - protein, 13 aa, Homo sapiens
  CDR3 for alpha chain variable domain of TCR clone 326996 (TRAV13-2, TRAJ13)
CAERPGGYQKVTF

SEQ ID NO: 653992 - protein, 13 aa, Homo sapiens
  CDR3 for beta chain variable domain of TCR clone 326996 (TRBV7-9, TRBJ2-7)
CASSFWSSYEQYF

SEQ ID NO: 653993 - protein, 12 aa, Homo sapiens
  CDR3 for alpha chain variable domain of TCR clone 326997 (TRAV8-3, TRAJ40)
YAVTSGTYKYIF

SEQ ID NO: 653994 - protein, 14 aa, Homo sapiens
  CDR3 for beta chain variable domain of TCR clone 326997 (TRBV12-4, TRBJ2-3)
CASSGQGSTDTQYF

SEQ ID NO: 653995 - protein, 13 aa, Homo sapiens
  CDR3 for alpha chain variable domain of TCR clone 326998 (TRAV16, TRAJ29)
CALSRRGNTPLGF

SEQ ID NO: 653996 - protein, 15 aa, Homo sapiens
  CDR3 for beta chain variable domain of TCR clone 326998 (TRBV4-1, TRBJ2-3)
CASSRGQGIPDTQYF

SEQ ID NO: 653997 - protein, 13 aa, Homo sapiens
  CDR3 for alpha chain variable domain of TCR clone 326999 (TRAV21, TRAJ27)
CAARPGNAGKSTF

SEQ ID NO: 653998 - protein, 15 aa, Homo sapiens
  CDR3 for beta chain variable domain of TCR clone 326999 (TRBV7-3, TRBJ2-2)
CASSETGQGTGELFF

SEQ ID NO: 653999 - protein, 11 aa, Homo sapiens
  CDR3 for alpha chain variable domain of TCR clone 327000 (TRAV23/DV6, TRAJ48)
CAPRWGEKLTF

SEQ ID NO: 654000 - protein, 16 aa, Homo sapiens
  CDR3 for beta chain variable domain of TCR clone 327000 (TRBV19, TRBJ2-2)
CASSFPGQGLAGELFF

SEQ ID NO: 654001 - protein, 14 aa, Homo sapiens
  CDR3 for alpha chain variable domain of TCR clone 327001 (TRAV34, TRAJ44)
CGADGTGTASKLTF

SEQ ID NO: 654002 - protein, 16 aa, Homo sapiens
  CDR3 for beta chain variable domain of TCR clone 327001 (TRBV4-3, TRBJ2-3)
CASSLGLAGEGDTQYF

SEQ ID NO: 654003 - protein, 15 aa, Homo sapiens
  CDR3 for alpha chain variable domain of TCR clone 327002 (TRAV36/DV7, TRAJ53)
WEGENSGGSNYKLTF

SEQ ID NO: 654004 - protein, 15 aa, Homo sapiens
  CDR3 for beta chain variable domain of TCR clone 327002 (TRBV12-5, TRBJ2-2)
CASGRLGGNTGELFF

SEQ ID NO: 654005 - protein, 15 aa, Homo sapiens
  CDR3 for alpha chain variable domain of TCR clone 327003 (TRAV16, TRAJ10)
CALEGLTGGGNKLTF

SEQ ID NO: 654006 - protein, 16 aa, Homo sapiens
  CDR3 for beta chain variable domain of TCR clone 327003 (TRBV5-7, TRBJ1-1)
CASSLVSPRGNTEAFF

SEQ ID NO: 654007 - protein, 14 aa, Homo sapiens
  CDR3 for alpha chain variable domain of TCR clone 327004 (TRAV23/DV6, TRAJ22)
CAASRSGSARQLTF

SEQ ID NO: 654008 - protein, 15 aa, Homo sapiens
  CDR3 for beta chain variable domain of TCR clone 327004 (TRBV5-1, TRBJ2-1)
CASSPPRAPYNEQFF

SEQ ID NO: 654009 - protein, 14 aa, Homo sapiens
  CDR3 for alpha chain variable domain of TCR clone 327005 (TRAV20, TRAJ32)
CCGLYGGATNKLIF

SEQ ID NO: 654010 - protein, 16 aa, Homo sapiens
  CDR3 for beta chain variable domain of TCR clone 327005 (TRBV19, TRBJ2-2)
CASRSPGTGATGELFF

SEQ ID NO: 654011 - protein, 14 aa, Homo sapiens
  CDR3 for alpha chain variable domain of TCR clone 327006 (TRAV2, TRAJ37)
CAVDFTSNTGTLIF

SEQ ID NO: 654012 - protein, 16 aa, Homo sapiens
  CDR3 for beta chain variable domain of TCR clone 327006 (TRBV7-9, TRBJ1-2)
CASSLGFSSGEDGYTF

SEQ ID NO: 654013 - protein, 12 aa, Homo sapiens
  CDR3 for alpha chain variable domain of TCR clone 327007 (TRAV17, TRAJ5)
CAILTGRRALTF

SEQ ID NO: 654014 - protein, 15 aa, Homo sapiens
  CDR3 for beta chain variable domain of TCR clone 327007 (TRBV7-9, TRBJ1-5)
CASSQGHQPNQPQHF

SEQ ID NO: 654015 - protein, 12 aa, Homo sapiens
  CDR3 for alpha chain variable domain of TCR clone 327008 (TRAV30, TRAJ43)
CGTEERGNDMRF

SEQ ID NO: 654016 - protein, 17 aa, Homo sapiens
  CDR3 for beta chain variable domain of TCR clone 327008 (TRBV3-1, TRBJ2-2)
CASSQCRDKVDTGELFF

SEQ ID NO: 654017 - protein, 15 aa, Homo sapiens
  CDR3 for alpha chain variable domain of TCR clone 327009 (TRAV26-2, TRAJ52)
CILRAGGTSYGKLTF

SEQ ID NO: 654018 - protein, 15 aa, Homo sapiens
  CDR3 for beta chain variable domain of TCR clone 327009 (TRBV13, TRBJ2-5)
CASSLRPGRGETQYF

SEQ ID NO: 654019 - protein, 12 aa, Homo sapiens
  CDR3 for alpha chain variable domain of TCR clone 327010 (TRAV8-3, TRAJ26)
CAGDNYVQNFVF

SEQ ID NO: 654020 - protein, 15 aa, Homo sapiens
  CDR3 for beta chain variable domain of TCR clone 327010 (TRBV7-9, TRBJ1-5)
CASSQGHQPNQPQHF

SEQ ID NO: 654021 - protein, 12 aa, Homo sapiens
  CDR3 for alpha chain variable domain of TCR clone 327011 (TRAV12-3, TRAJ4)
CAMTGAGTRLAV

SEQ ID NO: 654022 - protein, 14 aa, Homo sapiens
  CDR3 for beta chain variable domain of TCR clone 327011 (TRBV10-3, TRBJ1-1)
RAISDTDRGVEAFF

SEQ ID NO: 654023 - protein, 17 aa, Homo sapiens
  CDR3 for alpha chain variable domain of TCR clone 327012 (TRAV3, TRAJ6)
CAVRDGPRAGGSYITTF

SEQ ID NO: 654024 - protein, 20 aa, Homo sapiens
  CDR3 for beta chain variable domain of TCR clone 327012 (TRBV28, TRBJ2-1)
CASTPIGRSPGLAGGNERFF

SEQ ID NO: 654025 - protein, 17 aa, Homo sapiens
  CDR3 for alpha chain variable domain of TCR clone 327013 (TRAV8-4, TRAJ45)
CAVSEGGSGGGADGLTF

SEQ ID NO: 654026 - protein, 15 aa, Homo sapiens
  CDR3 for beta chain variable domain of TCR clone 327013 (TRBV9, TRBJ1-6)
CASSVAGTGDSPLHF

SEQ ID NO: 654027 - protein, 16 aa, Homo sapiens
  CDR3 for alpha chain variable domain of TCR clone 327014 (TRAV38-2/DV8, TRAJ45)
CAYTTTSGGGADGLTF

SEQ ID NO: 654028 - protein, 16 aa, Homo sapiens
  CDR3 for beta chain variable domain of TCR clone 327014 (TRBV19, TRBJ2-2)
CASRSPGTGATGELFF

SEQ ID NO: 654029 - protein, 13 aa, Homo sapiens
  CDR3 for alpha chain variable domain of TCR clone 327015 (TRAV38-2/DV8, TRAJ34)
CAYRTWNTDKLIF

SEQ ID NO: 654030 - protein, 13 aa, Homo sapiens
  CDR3 for beta chain variable domain of TCR clone 327015 (TRBV12-4, TRBJ1-4)
CASAMGHNEKLFF

SEQ ID NO: 654031 - protein, 17 aa, Homo sapiens
  CDR3 for alpha chain variable domain of TCR clone 327016 (TRAV3, TRAJ6)
CAVRDGPRAGGSYIPTF

SEQ ID NO: 654032 - protein, 13 aa, Homo sapiens
  CDR3 for beta chain variable domain of TCR clone 327016 (TRBV12-4, TRBJ1-1)
CASSLGGTTEAFF

SEQ ID NO: 654033 - protein, 13 aa, Homo sapiens
  CDR3 for alpha chain variable domain of TCR clone 327017 (TRAV8-3, TRAJ21)
CAVGAYNFNKFYF

SEQ ID NO: 654034 - protein, 14 aa, Homo sapiens
  CDR3 for beta chain variable domain of TCR clone 327017 (TRBV20-1, TRBJ2-1)
CSPNDEASYNEQFF

SEQ ID NO: 654035 - protein, 16 aa, Homo sapiens
  CDR3 for alpha chain variable domain of TCR clone 327018 (TRAV13-1, TRAJ18)
CAAGRMRGSTLGRLCF

SEQ ID NO: 654036 - protein, 16 aa, Homo sapiens
  CDR3 for beta chain variable domain of TCR clone 327018 (TRBV11-3, TRBJ1-1)
CASSSRGRTGYTEAFF

SEQ ID NO: 654037 - protein, 15 aa, Homo sapiens
  CDR3 for alpha chain variable domain of TCR clone 327019 (TRAV35, TRAJ38)
CAGFSNAGNNRKLIW

SEQ ID NO: 654038 - protein, 18 aa, Homo sapiens
  CDR3 for beta chain variable domain of TCR clone 327019 (TRBV3-1, TRBJ1-2)
CASSQDVIGWNRDYGYTF

SEQ ID NO: 654039 - protein, 15 aa, Homo sapiens
  CDR3 for alpha chain variable domain of TCR clone 327020 (TRAV4, TRAJ39)
CLVGPNNNAGNMLTF

SEQ ID NO: 654040 - protein, 14 aa, Homo sapiens
  CDR3 for beta chain variable domain of TCR clone 327020 (TRBV7-6, TRBJ2-7)
CASSFRQGADEQYF

SEQ ID NO: 654041 - protein, 15 aa, Homo sapiens
  CDR3 for alpha chain variable domain of TCR clone 327021 (TRAV21, TRAJ13)
CAVRPTSGGYQKVTF

SEQ ID NO: 654042 - protein, 18 aa, Homo sapiens
  CDR3 for beta chain variable domain of TCR clone 327021 (TRBV11-3, TRBJ2-1)
CASSSYPGGRDSCNEQFF

SEQ ID NO: 654043 - protein, 16 aa, Homo sapiens
  CDR3 for alpha chain variable domain of TCR clone 327022 (TRAV3, TRAJ10)
CAVRDMRAGGGNKLTF

SEQ ID NO: 654044 - protein, 16 aa, Homo sapiens
  CDR3 for beta chain variable domain of TCR clone 327022 (TRBV20-1, TRBJ1-4)
CSAPGQGLLTNEELFF

SEQ ID NO: 654045 - protein, 15 aa, Homo sapiens
  CDR3 for alpha chain variable domain of TCR clone 327023 (TRAV26-1, TRAJ15)
CIVRAANQAGTALIF

SEQ ID NO: 654046 - protein, 15 aa, Homo sapiens
  CDR3 for beta chain variable domain of TCR clone 327023 (TRBV20-1, TRBJ1-1)
CSARSAATLNTEAFF

SEQ ID NO: 654047 - protein, 14 aa, Homo sapiens
  CDR3 for alpha chain variable domain of TCR clone 327024 (TRAV12-2, TRAJ41)
CAVNRANSGYALNF

SEQ ID NO: 654048 - protein, 13 aa, Homo sapiens
  CDR3 for beta chain variable domain of TCR clone 327024 (TRBV7-9, TRBJ1-2)
CASSLKQNYGDTF

SEQ ID NO: 654049 - protein, 15 aa, Homo sapiens
  CDR3 for alpha chain variable domain of TCR clone 327025 (TRAV14/DV4, TRAJ12)
CAMREERDSSYKLIF

SEQ ID NO: 654050 - protein, 16 aa, Homo sapiens
  CDR3 for beta chain variable domain of TCR clone 327025 (TRBV11-2, TRBJ1-2)
YASSLDRGGNNYGYTF

SEQ ID NO: 654051 - protein, 14 aa, Homo sapiens
  CDR3 for alpha chain variable domain of TCR clone 327026 (TRAV27, TRAJ23)
CAGLSYNQGGKIIF

SEQ ID NO: 654052 - protein, 15 aa, Homo sapiens
  CDR3 for beta chain variable domain of TCR clone 327026 (TRBV20-1, TRBJ2-7)
CSARDRVSGMDEQYF

SEQ ID NO: 654053 - protein, 13 aa, Homo sapiens
  CDR3 for alpha chain variable domain of TCR clone 327027 (TRAV20, TRAJ7)
CAVLQGGNNRLAF

SEQ ID NO: 654054 - protein, 14 aa, Homo sapiens
  CDR3 for beta chain variable domain of TCR clone 327027 (TRBV19, TRBJ2-1)
CASPTFVLSGEQFF

SEQ ID NO: 654055 - protein, 12 aa, Homo sapiens
  CDR3 for alpha chain variable domain of TCR clone 327028 (TRAV2, TRAJ9)
CAVGAGGFKTIF

SEQ ID NO: 654056 - protein, 16 aa, Homo sapiens
  CDR3 for beta chain variable domain of TCR clone 327028 (TRBV12-4, TRBJ1-5)
CASSRPVGGSNQPQHF

SEQ ID NO: 654057 - protein, 16 aa, Homo sapiens
  CDR3 for alpha chain variable domain of TCR clone 327029 (TRAV12-3, TRAJ53)
CAMSPGSGGSNYKLTF

SEQ ID NO: 654058 - protein, 16 aa, Homo sapiens
  CDR3 for beta chain variable domain of TCR clone 327029 (TRBV11-2, TRBJ1-1)
CASSLRQGGKHSKAFF

SEQ ID NO: 654059 - protein, 17 aa, Homo sapiens
  CDR3 for alpha chain variable domain of TCR clone 327030 (TRAV3, TRAJ38)
CAVRDCLNAGNNRKLIW

SEQ ID NO: 654060 - protein, 15 aa, Homo sapiens
  CDR3 for beta chain variable domain of TCR clone 327030 (TRBV5-1, TRBJ1-4)
FAPAAWKDGNEKLFF

SEQ ID NO: 654061 - protein, 12 aa, Homo sapiens
  CDR3 for alpha chain variable domain of TCR clone 327031 (TRAV35, TRAJ49)
CAGWNTGNQFYF

SEQ ID NO: 654062 - protein, 16 aa, Homo sapiens
  CDR3 for beta chain variable domain of TCR clone 327031 (TRBV5-1, TRBJ2-2)
CASSLRDTTNTGELFF

SEQ ID NO: 654063 - protein, 14 aa, Homo sapiens
  CDR3 for alpha chain variable domain of TCR clone 327032 (TRAV26-2, TRAJ32)
CCVGYGGATNNLIF

SEQ ID NO: 654064 - protein, 14 aa, Homo sapiens
  CDR3 for beta chain variable domain of TCR clone 327032 (TRBV4-2, TRBJ2-1)
CASGLDRAYNEQFF

SEQ ID NO: 654065 - protein, 13 aa, Homo sapiens
  CDR3 for alpha chain variable domain of TCR clone 327033 (TRAV1-1, TRAJ31)
CASYLNNNSRLMF

SEQ ID NO: 654066 - protein, 13 aa, Homo sapiens
  CDR3 for beta chain variable domain of TCR clone 327033 (TRBV15, TRBJ1-6)
CATSGGLNSPLHF

SEQ ID NO: 654067 - protein, 16 aa, Homo sapiens
  CDR3 for alpha chain variable domain of TCR clone 327034 (TRAV21, TRAJ45)
CAVTMYSVGGADGLTF

SEQ ID NO: 654068 - protein, 16 aa, Homo sapiens
  CDR3 for beta chain variable domain of TCR clone 327034 (TRBV24-1, TRBJ2-3)
CATSDAISGITDTQYF

SEQ ID NO: 654069 - protein, 14 aa, Homo sapiens
  CDR3 for alpha chain variable domain of TCR clone 327035 (TRAV17, TRAJ56)
CATDYTGANSMLTF

SEQ ID NO: 654070 - protein, 14 aa, Homo sapiens
  CDR3 for beta chain variable domain of TCR clone 327035 (TRBV18, TRBJ2-1)
CASSPVRGDNEQFF

SEQ ID NO: 654071 - protein, 18 aa, Homo sapiens
  CDR3 for alpha chain variable domain of TCR clone 327036 (TRAV26-1, TRAJ23)
CIVRVGLDVWNQGGKLIF

SEQ ID NO: 654072 - protein, 16 aa, Homo sapiens
  CDR3 for beta chain variable domain of TCR clone 327036 (TRBV12-4, TRBJ2-5)
CASSCFVRGRQETQYF

SEQ ID NO: 654073 - protein, 16 aa, Homo sapiens
  CDR3 for alpha chain variable domain of TCR clone 327037 (TRAV30, TRAJ49)
SAAQRVGPNTGNQFYF

SEQ ID NO: 654074 - protein, 14 aa, Homo sapiens
  CDR3 for beta chain variable domain of TCR clone 327037 (TRBV7-3, TRBJ2-1)
CASSLTGGANEQFF

SEQ ID NO: 654075 - protein, 16 aa, Homo sapiens
  CDR3 for alpha chain variable domain of TCR clone 327038 (TRAV30, TRAJ24)
CGTEIVDADSWGKFQC

SEQ ID NO: 654076 - protein, 17 aa, Homo sapiens
  CDR3 for beta chain variable domain of TCR clone 327038 (TRBV13, TRBJ2-3)
CASSLSRVAGGRNTQYF

SEQ ID NO: 654077 - protein, 13 aa, Homo sapiens
  CDR3 for alpha chain variable domain of TCR clone 327039 (TRAV12-1, TRAJ34)
CVETGYNTDKLIF

SEQ ID NO: 654078 - protein, 13 aa, Homo sapiens
  CDR3 for beta chain variable domain of TCR clone 327039 (TRBV28, TRBJ2-7)
CASKAGGVYEQYF

SEQ ID NO: 654079 - protein, 14 aa, Homo sapiens
  CDR3 for alpha chain variable domain of TCR clone 327040 (TRAV12-1, TRAJ45)
CVVNVGGGADGLTF

SEQ ID NO: 654080 - protein, 14 aa, Homo sapiens
  CDR3 for beta chain variable domain of TCR clone 327040 (TRBV29-1, TRBJ2-3)
CSVEPGTRTDMQYF

SEQ ID NO: 654081 - protein, 13 aa, Homo sapiens
  CDR3 for alpha chain variable domain of TCR clone 327041 (TRAV8-3, TRAJ43)
CAVGPDNNDDMRF

SEQ ID NO: 654082 - protein, 13 aa, Homo sapiens
  CDR3 for beta chain variable domain of TCR clone 327041 (TRBV29-1, TRBJ2-1)
CSVEGGRVNEQFF

SEQ ID NO: 654083 - protein, 12 aa, Homo sapiens
  CDR3 for alpha chain variable domain of TCR clone 327042 (TRAV17, TRAJ4)
CATDGGYNKLIF

SEQ ID NO: 654084 - protein, 15 aa, Homo sapiens
  CDR3 for beta chain variable domain of TCR clone 327042 (TRBV11-2, TRBJ2-1)
CASSLTSGGYNEQFF

SEQ ID NO: 654085 - protein, 11 aa, Homo sapiens
  CDR3 for alpha chain variable domain of TCR clone 327043 (TRAV12-3, TRAJ43)
CAMSVSNDMRF

SEQ ID NO: 654086 - protein, 14 aa, Homo sapiens
  CDR3 for beta chain variable domain of TCR clone 327043 (TRBV12-4, TRBJ1-1)
CASSLGAGGTEAFF

SEQ ID NO: 654087 - protein, 14 aa, Homo sapiens
  CDR3 for alpha chain variable domain of TCR clone 327044 (TRAV12-2, TRAJ17)
CAVLFKAAGNKLTF

SEQ ID NO: 654088 - protein, 14 aa, Homo sapiens
  CDR3 for beta chain variable domain of TCR clone 327044 (TRBV19, TRBJ2-1)
CASEVTGARNEQFF

SEQ ID NO: 654089 - protein, 16 aa, Homo sapiens
  CDR3 for alpha chain variable domain of TCR clone 327045 (TRAV16, TRAJ52)
CALSAAGGTSYGTLTF

SEQ ID NO: 654090 - protein, 16 aa, Homo sapiens
  CDR3 for beta chain variable domain of TCR clone 327045 (TRBV12-4, TRBJ1-5)
CASSRPVGGSNQPQHF

SEQ ID NO: 654091 - protein, 15 aa, Homo sapiens
  CDR3 for alpha chain variable domain of TCR clone 327046 (TRAV3, TRAJ22)
CAVRDRGGSAGQLTF

SEQ ID NO: 654092 - protein, 14 aa, Homo sapiens
  CDR3 for beta chain variable domain of TCR clone 327046 (TRBV4-1, TRBJ2-2)
CASSQAVNTGELFF

SEQ ID NO: 654093 - protein, 14 aa, Homo sapiens
  CDR3 for alpha chain variable domain of TCR clone 327047 (TRAV1-2, TRAJ8)
CALREDTGFQKLVF

SEQ ID NO: 654094 - protein, 16 aa, Homo sapiens
  CDR3 for beta chain variable domain of TCR clone 327047 (TRBV12-4, TRBJ1-5)
CASSRPVGGSNQPQHF

SEQ ID NO: 654095 - protein, 12 aa, Homo sapiens
  CDR3 for alpha chain variable domain of TCR clone 327048 (TRAV12-1, TRAJ40)
CVVYSGTYKHIF

SEQ ID NO: 654096 - protein, 14 aa, Homo sapiens
  CDR3 for beta chain variable domain of TCR clone 327048 (TRBV20-1, TRBJ2-3)
CSARGGTSTDTQYF

SEQ ID NO: 654097 - protein, 13 aa, Homo sapiens
  CDR3 for alpha chain variable domain of TCR clone 327049 (TRAV21, TRAJ27)
CAARPGNAGKSTF

SEQ ID NO: 654098 - protein, 18 aa, Homo sapiens
  CDR3 for beta chain variable domain of TCR clone 327049 (TRBV19, TRBJ1-1)
CASSIDGGDYTGNTEAFF

SEQ ID NO: 654099 - protein, 14 aa, Homo sapiens
  CDR3 for alpha chain variable domain of TCR clone 327050 (TRAV21, TRAJ21)
CAVKGFGNFNKFYF

SEQ ID NO: 654100 - protein, 19 aa, Homo sapiens
  CDR3 for beta chain variable domain of TCR clone 327050 (TRBV25-1, TRBJ2-2)
CAILVYRVDRGRKTGELFF

SEQ ID NO: 654101 - protein, 11 aa, Homo sapiens
  CDR3 for alpha chain variable domain of TCR clone 327051 (TRAV23/DV6, TRAJ58)
CAARLLRGETS

SEQ ID NO: 654102 - protein, 14 aa, Homo sapiens
  CDR3 for beta chain variable domain of TCR clone 327051 (TRBV27, TRBJ2-2)
CASRPGVNTGELFF

SEQ ID NO: 654103 - protein, 14 aa, Homo sapiens
  CDR3 for alpha chain variable domain of TCR clone 327052 (TRAV12-3, TRAJ15)
CAMIPPQAGTARIF

SEQ ID NO: 654104 - protein, 12 aa, Homo sapiens
  CDR3 for beta chain variable domain of TCR clone 327052 (TRBV11-2, TRBJ2-2)
CASSFGGGELFF

SEQ ID NO: 654105 - protein, 16 aa, Homo sapiens
  CDR3 for alpha chain variable domain of TCR clone 327053 (TRAV12-2, TRAJ40)
CAVIRGGTSGTYKYIF

SEQ ID NO: 654106 - protein, 16 aa, Homo sapiens
  CDR3 for beta chain variable domain of TCR clone 327053 (TRBV7-9, TRBJ2-1)
CASSDVAGGSYNEQFV

SEQ ID NO: 654107 - protein, 11 aa, Homo sapiens
  CDR3 for alpha chain variable domain of TCR clone 327054 (TRAV3, TRAJ21)
CAVVNFNKLYF

SEQ ID NO: 654108 - protein, 16 aa, Homo sapiens
  CDR3 for beta chain variable domain of TCR clone 327054 (TRBV19, TRBJ2-1)
CASSKAGPSSYNEQFF

SEQ ID NO: 654109 - protein, 12 aa, Homo sapiens
  CDR3 for alpha chain variable domain of TCR clone 327055 (TRAV2, TRAJ31)
CAVEDNNARLMF

SEQ ID NO: 654110 - protein, 15 aa, Homo sapiens
  CDR3 for beta chain variable domain of TCR clone 327055 (TRBV2, TRBJ2-7)
CASSEGLARSYEQYF

SEQ ID NO: 654111 - protein, 15 aa, Homo sapiens
  CDR3 for alpha chain variable domain of TCR clone 327056 (TRAV12-2, TRAJ53)
CAVNGGGGSNNKLTF

SEQ ID NO: 654112 - protein, 14 aa, Homo sapiens
  CDR3 for beta chain variable domain of TCR clone 327056 (TRBV6-1, TRBJ1-3)
CASVQGGGGNTIYF

SEQ ID NO: 654113 - protein, 19 aa, Homo sapiens
  CDR3 for alpha chain variable domain of TCR clone 327057 (TRAV2, TRAJ20)
ILQVREADAAVYRDCKLSF

SEQ ID NO: 654114 - protein, 13 aa, Homo sapiens
  CDR3 for beta chain variable domain of TCR clone 327057 (TRBV7-9, TRBJ2-5)
CASTPVGQETQYF

SEQ ID NO: 654115 - protein, 13 aa, Homo sapiens
  CDR3 for alpha chain variable domain of TCR clone 327058 (TRAV20, TRAJ20)
CAVRDFNDYKLCF

SEQ ID NO: 654116 - protein, 12 aa, Homo sapiens
  CDR3 for beta chain variable domain of TCR clone 327058 (TRBV9, TRBJ2-1)
CASSITYNEQFF

SEQ ID NO: 654117 - protein, 14 aa, Homo sapiens
  CDR3 for alpha chain variable domain of TCR clone 327059 (TRAV9-2, TRAJ39)
CALYIYNASNMLTF

SEQ ID NO: 654118 - protein, 14 aa, Homo sapiens
  CDR3 for beta chain variable domain of TCR clone 327059 (TRBV5-8, TRBJ2-3)
CASSLGQGTDTQYF

SEQ ID NO: 654119 - protein, 13 aa, Homo sapiens
  CDR3 for alpha chain variable domain of TCR clone 327060 (TRAV2, TRAJ29)
CAVYSSGNTPLVF

SEQ ID NO: 654120 - protein, 14 aa, Homo sapiens
  CDR3 for beta chain variable domain of TCR clone 327060 (TRBV19, TRBJ2-1)
CASPTFVLSGEQFF

SEQ ID NO: 654121 - protein, 11 aa, Homo sapiens
  CDR3 for alpha chain variable domain of TCR clone 327061 (TRAV26-1, TRAJ37)
CIVSVGRKLIF

SEQ ID NO: 654122 - protein, 16 aa, Homo sapiens
  CDR3 for beta chain variable domain of TCR clone 327061 (TRBV7-3, TRBJ2-6)
CASSLTLAGGANVLTF

SEQ ID NO: 654123 - protein, 16 aa, Homo sapiens
  CDR3 for alpha chain variable domain of TCR clone 327062 (TRAV21, TRAJ37)
CAVRPRGSSNTGKLIF

SEQ ID NO: 654124 - protein, 16 aa, Homo sapiens
  CDR3 for beta chain variable domain of TCR clone 327062 (TRBV2, TRBJ2-1)
CASSVGGSLSYNEQVF

SEQ ID NO: 654125 - protein, 11 aa, Homo sapiens
  CDR3 for alpha chain variable domain of TCR clone 327063 (TRAV1-1, TRAJ3)
CAVRSASKIIF

SEQ ID NO: 654126 - protein, 17 aa, Homo sapiens
  CDR3 for beta chain variable domain of TCR clone 327063 (TRBV13, TRBJ2-3)
CASSLSRVAGGRNTQYF

SEQ ID NO: 654127 - protein, 14 aa, Homo sapiens
  CDR3 for alpha chain variable domain of TCR clone 327064 (TRAV17, TRAJ4)
CATAPLGGYNKLIS

SEQ ID NO: 654128 - protein, 13 aa, Homo sapiens
  CDR3 for beta chain variable domain of TCR clone 327064 (TRBV12-4, TRBJ1-3)
CASSLASGNTIYF

SEQ ID NO: 654129 - protein, 12 aa, Homo sapiens
  CDR3 for alpha chain variable domain of TCR clone 327065 (TRAV25, TRAJ20)
CAGSSNDYKLSF

SEQ ID NO: 654130 - protein, 19 aa, Homo sapiens
  CDR3 for beta chain variable domain of TCR clone 327065 (TRBV25-1, TRBJ2-2)
CAILVYRVDRGRKTGELFF

SEQ ID NO: 654131 - protein, 11 aa, Homo sapiens
  CDR3 for alpha chain variable domain of TCR clone 327066 (TRAV12-2, TRAJ6)
CAVNVSRKLNT

SEQ ID NO: 654132 - protein, 12 aa, Homo sapiens
  CDR3 for beta chain variable domain of TCR clone 327066 (TRBV29-1, TRBJ2-3)
CSVTGGADTQYF

SEQ ID NO: 654133 - protein, 17 aa, Homo sapiens
  CDR3 for alpha chain variable domain of TCR clone 327067 (TRAV9-2, TRAJ52)
CALRGNAVGTSYGKLTF

SEQ ID NO: 654134 - protein, 20 aa, Homo sapiens
  CDR3 for beta chain variable domain of TCR clone 327067 (TRBV5-1, TRBJ2-2)
CASSYSLPGLAVQNTGELFF

SEQ ID NO: 654135 - protein, 15 aa, Homo sapiens
  CDR3 for alpha chain variable domain of TCR clone 327068 (TRAV12-2, TRAJ32)
CAVNHYGGATNKLIF

SEQ ID NO: 654136 - protein, 15 aa, Homo sapiens
  CDR3 for beta chain variable domain of TCR clone 327068 (TRBV5-1, TRBJ2-1)
CASSPPRAPYNEQFF

SEQ ID NO: 654137 - protein, 12 aa, Homo sapiens
  CDR3 for alpha chain variable domain of TCR clone 327069 (TRAV12-3, TRAJ17)
CAMTLTGNKLTF

SEQ ID NO: 654138 - protein, 15 aa, Homo sapiens
  CDR3 for beta chain variable domain of TCR clone 327069 (TRBV11-3, TRBJ2-7)
CASSPGPASAYEQYF

SEQ ID NO: 654139 - protein, 14 aa, Homo sapiens
  CDR3 for alpha chain variable domain of TCR clone 327070 (TRAV8-3, TRAJ17)
CDVGAQTAGNKLTF

SEQ ID NO: 654140 - protein, 11 aa, Homo sapiens
  CDR3 for beta chain variable domain of TCR clone 327070 (TRBV29-1, TRBJ1-4)
CSVSSGEKLFF

SEQ ID NO: 654141 - protein, 13 aa, Homo sapiens
  CDR3 for alpha chain variable domain of TCR clone 327071 (TRAV2, TRAJ21)
CAVEDLNFNKFYF

SEQ ID NO: 654142 - protein, 15 aa, Homo sapiens
  CDR3 for beta chain variable domain of TCR clone 327071 (TRBV28, TRBJ2-5)
CASSPGQRSIETQYF

SEQ ID NO: 654143 - protein, 15 aa, Homo sapiens
  CDR3 for alpha chain variable domain of TCR clone 327072 (TRAV8-3, TRAJ45)
CASSYSGGGADVLSF

SEQ ID NO: 654144 - protein, 13 aa, Homo sapiens
  CDR3 for beta chain variable domain of TCR clone 327072 (TRBV10-3, TRBJ2-7)
CASKLAVSYEQYF

SEQ ID NO: 654145 - protein, 12 aa, Homo sapiens
  CDR3 for alpha chain variable domain of TCR clone 327073 (TRAV12-1, TRAJ49)
CVVNKPGNQFSF

SEQ ID NO: 654146 - protein, 14 aa, Homo sapiens
  CDR3 for beta chain variable domain of TCR clone 327073 (TRBV25-1, TRBJ1-1)
CASTHLGGNTEAFF

SEQ ID NO: 654147 - protein, 13 aa, Homo sapiens
  CDR3 for alpha chain variable domain of TCR clone 327074 (TRAV21, TRAJ27)
RAARPGTAGKSTF

SEQ ID NO: 654148 - protein, 14 aa, Homo sapiens
  CDR3 for beta chain variable domain of TCR clone 327074 (TRBV7-6, TRBJ2-3)
CASSLGTVTDTQYF

SEQ ID NO: 654149 - protein, 14 aa, Homo sapiens
  CDR3 for alpha chain variable domain of TCR clone 327075 (TRAV1-2, TRAJ8)
CAVREDTGFQKLVS

SEQ ID NO: 654150 - protein, 15 aa, Homo sapiens
  CDR3 for beta chain variable domain of TCR clone 327075 (TRBV27, TRBJ2-1)
CASSNGGGSSNEQFF

SEQ ID NO: 654151 - protein, 15 aa, Homo sapiens
  CDR3 for alpha chain variable domain of TCR clone 327076 (TRAV4, TRAJ39)
CLVGPNNNAGNMLTF

SEQ ID NO: 654152 - protein, 16 aa, Homo sapiens
  CDR3 for beta chain variable domain of TCR clone 327076 (TRBV19, TRBJ2-1)
CASSKAGPSSYNEQFF

SEQ ID NO: 654153 - protein, 14 aa, Homo sapiens
  CDR3 for alpha chain variable domain of TCR clone 327077 (TRAV12-2, TRAJ40)
CAVKIPSGTSKYIF

SEQ ID NO: 654154 - protein, 15 aa, Homo sapiens
  CDR3 for beta chain variable domain of TCR clone 327077 (TRBV20-1, TRBJ1-4)
RSARREWGVNEKLFF

SEQ ID NO: 654155 - protein, 15 aa, Homo sapiens
  CDR3 for alpha chain variable domain of TCR clone 327078 (TRAV21, TRAJ53)
CATLNSGGSNYKLTF

SEQ ID NO: 654156 - protein, 15 aa, Homo sapiens
  CDR3 for beta chain variable domain of TCR clone 327078 (TRBV4-1, TRBJ2-7)
CASSQNTGRLYEQYF

SEQ ID NO: 654157 - protein, 14 aa, Homo sapiens
  CDR3 for alpha chain variable domain of TCR clone 327079 (TRAV25, TRAJ23)
CAGKGDNQGGKLIF

SEQ ID NO: 654158 - protein, 12 aa, Homo sapiens
  CDR3 for beta chain variable domain of TCR clone 327079 (TRBV7-9, TRBJ1-1)
CASSLVRGEAFF

SEQ ID NO: 654159 - protein, 14 aa, Homo sapiens
  CDR3 for alpha chain variable domain of TCR clone 327080 (TRAV13-1, TRAJ44)
CAAKATGTASKLTF

SEQ ID NO: 654160 - protein, 17 aa, Homo sapiens
  CDR3 for beta chain variable domain of TCR clone 327080 (TRBV7-3, TRBJ2-3)
CAISLMKRMRGADTQYF

SEQ ID NO: 654161 - protein, 10 aa, Homo sapiens
  CDR3 for alpha chain variable domain of TCR clone 327081 (TRAV23/DV6, TRAJ31)
CARGGARLMF

SEQ ID NO: 654162 - protein, 13 aa, Homo sapiens
  CDR3 for beta chain variable domain of TCR clone 327081 (TRBV19, TRBJ1-2)
CASSVPGQDGYTF

SEQ ID NO: 654163 - protein, 13 aa, Homo sapiens
  CDR3 for alpha chain variable domain of TCR clone 327082 (TRAV35, TRAJ49)
CAGRLSTGNQFYF

SEQ ID NO: 654164 - protein, 16 aa, Homo sapiens
  CDR3 for beta chain variable domain of TCR clone 327082 (TRBV12-4, TRBJ1-5)
CAISRPVGGSNQPQHF

SEQ ID NO: 654165 - protein, 12 aa, Homo sapiens
  CDR3 for alpha chain variable domain of TCR clone 327083 (TRAV13-1, TRAJ43)
CAAGRFNNDMRF

SEQ ID NO: 654166 - protein, 11 aa, Homo sapiens
  CDR3 for beta chain variable domain of TCR clone 327083 (TRBV29-1, TRBJ2-5)
CSEDRTGTQDF

SEQ ID NO: 654167 - protein, 17 aa, Homo sapiens
  CDR3 for alpha chain variable domain of TCR clone 327084 (TRAV26-1, TRAJ53)
CIVRADDSGGSNYKLTF

SEQ ID NO: 654168 - protein, 17 aa, Homo sapiens
  CDR3 for beta chain variable domain of TCR clone 327084 (TRBV20-1, TRBJ2-7)
CSASVQPRTSTSSTSGR

SEQ ID NO: 654169 - protein, 13 aa, Homo sapiens
  CDR3 for alpha chain variable domain of TCR clone 327085 (TRAV38-2/DV8, TRAJ34)
CAYRYYNTDKLIF

SEQ ID NO: 654170 - protein, 15 aa, Homo sapiens
  CDR3 for beta chain variable domain of TCR clone 327085 (TRBV20-1, TRBJ2-5)
CSAEGTGGLQETQYF

SEQ ID NO: 654171 - protein, 12 aa, Homo sapiens
  CDR3 for alpha chain variable domain of TCR clone 327086 (TRAV21, TRAJ33)
CAKMDSNYQLIC

SEQ ID NO: 654172 - protein, 14 aa, Homo sapiens
  CDR3 for beta chain variable domain of TCR clone 327086 (TRBV2, TRBJ2-7)
CASSLTSGGYEQYC

SEQ ID NO: 654173 - protein, 16 aa, Homo sapiens
  CDR3 for alpha chain variable domain of TCR clone 327087 (TRAV12-3, TRAJ53)
CAMSPGSGGRNYKLTF

SEQ ID NO: 654174 - protein, 12 aa, Homo sapiens
  CDR3 for beta chain variable domain of TCR clone 327087 (TRBV11-3, TRBJ1-4)
CASSSGSPGLFF

SEQ ID NO: 654175 - protein, 13 aa, Homo sapiens
  CDR3 for alpha chain variable domain of TCR clone 327088 (TRAV35, TRAJ22)
CAGLSGSAMQLTF

SEQ ID NO: 654176 - protein, 16 aa, Homo sapiens
  CDR3 for beta chain variable domain of TCR clone 327088 (TRBV7-9, TRBJ2-1)
CASSLILTGQGNEQFF

SEQ ID NO: 654177 - protein, 13 aa, Homo sapiens
  CDR3 for alpha chain variable domain of TCR clone 327089 (TRAV3, TRAJ43)
CAVRDTRGGDMRF

SEQ ID NO: 654178 - protein, 15 aa, Homo sapiens
  CDR3 for beta chain variable domain of TCR clone 327089 (TRBV6-5, TRBJ1-5)
CASSYSRSSNQPQHF

SEQ ID NO: 654179 - protein, 15 aa, Homo sapiens
  CDR3 for alpha chain variable domain of TCR clone 327090 (TRAV13-1, TRAJ10)
CAATILTGGGNKLTF

SEQ ID NO: 654180 - protein, 11 aa, Homo sapiens
  CDR3 for beta chain variable domain of TCR clone 327090 (TRBV24-1, TRBJ1-2)
CATSDGIGDTF

SEQ ID NO: 654181 - protein, 14 aa, Homo sapiens
  CDR3 for alpha chain variable domain of TCR clone 327091 (TRAV13-1, TRAJ9)
CAASALPGGFKTIF

SEQ ID NO: 654182 - protein, 16 aa, Homo sapiens
  CDR3 for beta chain variable domain of TCR clone 327091 (TRBV12-4, TRBJ1-5)
CASSRPVGGSNQPQHF

SEQ ID NO: 654183 - protein, 14 aa, Homo sapiens
  CDR3 for alpha chain variable domain of TCR clone 327092 (TRAV12-3, TRAJ10)
SHLPLTGGGSKLTF

SEQ ID NO: 654184 - protein, 15 aa, Homo sapiens
  CDR3 for beta chain variable domain of TCR clone 327092 (TRBV9, TRBJ1-6)
CASSVAGTGDSPLHF

SEQ ID NO: 654185 - protein, 16 aa, Homo sapiens
  CDR3 for alpha chain variable domain of TCR clone 327093 (TRAV21, TRAJ52)
CAVTNAGGTSYGKLTF

SEQ ID NO: 654186 - protein, 15 aa, Homo sapiens
  CDR3 for beta chain variable domain of TCR clone 327093 (TRBV4-1, TRBJ2-3)
CASRSTRAGTDTQYF

SEQ ID NO: 654187 - protein, 13 aa, Homo sapiens
  CDR3 for alpha chain variable domain of TCR clone 327094 (TRAV20, TRAJ40)
CALPFSGTYKYIF

SEQ ID NO: 654188 - protein, 13 aa, Homo sapiens
  CDR3 for beta chain variable domain of TCR clone 327094 (TRBV15, TRBJ2-5)
CATSQIGEETQYF

SEQ ID NO: 654189 - protein, 14 aa, Homo sapiens
  CDR3 for alpha chain variable domain of TCR clone 327095 (TRAV12-1, TRAJ23)
CVVIVYNQGGKLIF

SEQ ID NO: 654190 - protein, 13 aa, Homo sapiens
  CDR3 for beta chain variable domain of TCR clone 327095 (TRBV11-3, TRBJ2-5)
CASSFSSQGTQYF

SEQ ID NO: 654191 - protein, 13 aa, Homo sapiens
  CDR3 for alpha chain variable domain of TCR clone 327096 (TRAV8-3, TRAJ28)
CAVGAVGSYQLTF

SEQ ID NO: 654192 - protein, 14 aa, Homo sapiens
  CDR3 for beta chain variable domain of TCR clone 327096 (TRBV7-2, TRBJ2-7)
CASRSQRAAYEHYF

SEQ ID NO: 654193 - protein, 13 aa, Homo sapiens
  CDR3 for alpha chain variable domain of TCR clone 327097 (TRAV1-2, TRAJ9)
CAALNTGGFKTIF

SEQ ID NO: 654194 - protein, 16 aa, Homo sapiens
  CDR3 for beta chain variable domain of TCR clone 327097 (TRBV11-2, TRBJ2-1)
CASSPRLAGVNNEQFF

SEQ ID NO: 654195 - protein, 12 aa, Homo sapiens
  CDR3 for alpha chain variable domain of TCR clone 327098 (TRAV3, TRAJ43)
CAVRDPNNDMRF

SEQ ID NO: 654196 - protein, 16 aa, Homo sapiens
  CDR3 for beta chain variable domain of TCR clone 327098 (TRBV12-4, TRBJ2-5)
CASSFFVRGRQETQYF

SEQ ID NO: 654197 - protein, 15 aa, Homo sapiens
  CDR3 for alpha chain variable domain of TCR clone 327099 (TRAV12-1, TRAJ44)
CVVFVNTGTASKLTF

SEQ ID NO: 654198 - protein, 17 aa, Homo sapiens
  CDR3 for beta chain variable domain of TCR clone 327099 (TRBV7-8, TRBJ2-6)
CSSSGGTGGAGANVLTF

SEQ ID NO: 654199 - protein, 13 aa, Homo sapiens
  CDR3 for alpha chain variable domain of TCR clone 327100 (TRAV36/DV7, TRAJ49)
CAGDSNTGNQFYF

SEQ ID NO: 654200 - protein, 16 aa, Homo sapiens
  CDR3 for beta chain variable domain of TCR clone 327100 (TRBV5-1, TRBJ1-1)
CASSKTGTEVGTEDFF

SEQ ID NO: 654201 - protein, 14 aa, Homo sapiens
  CDR3 for alpha chain variable domain of TCR clone 327101 (TRAV17, TRAJ22)
CATSPYGSARQLTF

SEQ ID NO: 654202 - protein, 15 aa, Homo sapiens
  CDR3 for beta chain variable domain of TCR clone 327101 (TRBV18, TRBJ2-7)
CASSPSPGDRVEQYF

SEQ ID NO: 654203 - protein, 16 aa, Homo sapiens
  CDR3 for alpha chain variable domain of TCR clone 327102 (TRAV30, TRAJ24)
CGTEIVDADSWGKFEF

SEQ ID NO: 654204 - protein, 14 aa, Homo sapiens
  CDR3 for beta chain variable domain of TCR clone 327102 (TRBV12-5, TRBJ2-5)
CASGSRTHQGTQYF

SEQ ID NO: 654205 - protein, 12 aa, Homo sapiens
  CDR3 for alpha chain variable domain of TCR clone 327103 (TRAV20, TRAJ37)
CALPSNTGKLIL

SEQ ID NO: 654206 - protein, 16 aa, Homo sapiens
  CDR3 for beta chain variable domain of TCR clone 327103 (TRBV28, TRBJ1-2)
CASSHGQGVYKDGYTF

SEQ ID NO: 654207 - protein, 17 aa, Homo sapiens
  CDR3 for alpha chain variable domain of TCR clone 327104 (TRAV16, TRAJ58)
CITVLSNGATSGSRLTF

SEQ ID NO: 654208 - protein, 13 aa, Homo sapiens
  CDR3 for beta chain variable domain of TCR clone 327104 (TRBV20-1, TRBJ2-2)
CSASAAGTGELFF

SEQ ID NO: 654209 - protein, 13 aa, Homo sapiens
  CDR3 for alpha chain variable domain of TCR clone 327105 (TRAV12-2, TRAJ37)
CAGGSGNTGKLIF

SEQ ID NO: 654210 - protein, 13 aa, Homo sapiens
  CDR3 for beta chain variable domain of TCR clone 327105 (TRBV19, TRBJ1-2)
CASSVPGQDGYTF

SEQ ID NO: 654211 - protein, 17 aa, Homo sapiens
  CDR3 for alpha chain variable domain of TCR clone 327106 (TRAV3, TRAJ6)
CAVRDGPRAGGSYIPTF

SEQ ID NO: 654212 - protein, 14 aa, Homo sapiens
  CDR3 for beta chain variable domain of TCR clone 327106 (TRBV7-2, TRBJ2-7)
FASSPKTSLYEQYF

SEQ ID NO: 654213 - protein, 12 aa, Homo sapiens
  CDR3 for alpha chain variable domain of TCR clone 327107 (TRAV12-3, TRAJ54)
CGADRGAQKLVV

SEQ ID NO: 654214 - protein, 15 aa, Homo sapiens
  CDR3 for beta chain variable domain of TCR clone 327107 (TRBV27, TRBJ2-1)
CASSLAGGPFNEQFF

SEQ ID NO: 654215 - protein, 18 aa, Homo sapiens
  CDR3 for alpha chain variable domain of TCR clone 327108 (TRAV21, TRAJ52)
CVVRPSPAGGTSYGKLTF

SEQ ID NO: 654216 - protein, 13 aa, Homo sapiens
  CDR3 for beta chain variable domain of TCR clone 327108 (TRBV20-1, TRBJ1-1)
CSAPLGGGTEAFF

SEQ ID NO: 654217 - protein, 14 aa, Homo sapiens
  CDR3 for alpha chain variable domain of TCR clone 327109 (TRAV12-2, TRAJ13)
CAVKKTGGYQKVTF

SEQ ID NO: 654218 - protein, 14 aa, Homo sapiens
  CDR3 for beta chain variable domain of TCR clone 327109 (TRBV25-1, TRBJ2-2)
CASSELGLPGELFF

SEQ ID NO: 654219 - protein, 16 aa, Homo sapiens
  CDR3 for alpha chain variable domain of TCR clone 327110 (TRAV30, TRAJ24)
CGTDIVDADSWGKFQF

SEQ ID NO: 654220 - protein, 15 aa, Homo sapiens
  CDR3 for beta chain variable domain of TCR clone 327110 (TRBV7-9, TRBJ1-4)
CASSARTGGNEKLFF

SEQ ID NO: 654221 - protein, 17 aa, Homo sapiens
  CDR3 for alpha chain variable domain of TCR clone 327111 (TRAV26-1, TRAJ37)
CIVRVITVSSNTGKLIF

SEQ ID NO: 654222 - protein, 14 aa, Homo sapiens
  CDR3 for beta chain variable domain of TCR clone 327111 (TRBV7-8, TRBJ1-2)
CASSPDSLSYGYAF

SEQ ID NO: 654223 - protein, 14 aa, Homo sapiens
  CDR3 for alpha chain variable domain of TCR clone 327112 (TRAV1-2, TRAJ8)
CAAREDTGFQKLVF

SEQ ID NO: 654224 - protein, 12 aa, Homo sapiens
  CDR3 for beta chain variable domain of TCR clone 327112 (TRBV11-2, TRBJ2-1)
CASSPGNNEQFS

SEQ ID NO: 654225 - protein, 15 aa, Homo sapiens
  CDR3 for alpha chain variable domain of TCR clone 327113 (TRAV8-4, TRAJ7)
CAVSGGNYGNNRLAF

SEQ ID NO: 654226 - protein, 11 aa, Homo sapiens
  CDR3 for beta chain variable domain of TCR clone 327113 (TRBV20-1, TRBJ2-1)
RSLSSGSEQFF

SEQ ID NO: 654227 - protein, 12 aa, Homo sapiens
  CDR3 for alpha chain variable domain of TCR clone 327114 (TRAV13-2, TRAJ23)
CAERHRGGKLIF

SEQ ID NO: 654228 - protein, 12 aa, Homo sapiens
  CDR3 for beta chain variable domain of TCR clone 327114 (TRBV18, TRBJ1-4)
CASSPSREKLFF

SEQ ID NO: 654229 - protein, 13 aa, Homo sapiens
  CDR3 for alpha chain variable domain of TCR clone 327115 (TRAV17, TRAJ54)
CATDLWGAQKLVF

SEQ ID NO: 654230 - protein, 12 aa, Homo sapiens
  CDR3 for beta chain variable domain of TCR clone 327115 (TRBV7-2, TRBJ2-1)
CASTLRQNEQFF

SEQ ID NO: 654231 - protein, 14 aa, Homo sapiens
  CDR3 for alpha chain variable domain of TCR clone 327116 (TRAV38-1, TRAJ29)
CSFIPPSGNTPLVL

SEQ ID NO: 654232 - protein, 14 aa, Homo sapiens
  CDR3 for beta chain variable domain of TCR clone 327116 (TRBV18, TRBJ2-7)
CASSPRGGAYEQYF

SEQ ID NO: 654233 - protein, 12 aa, Homo sapiens
  CDR3 for alpha chain variable domain of TCR clone 327117 (TRAV1-2, TRAJ29)
FAVRNLNTPLVF

SEQ ID NO: 654234 - protein, 18 aa, Homo sapiens
  CDR3 for beta chain variable domain of TCR clone 327117 (TRBV15, TRBJ2-1)
CVPPPGCSGGPTTNEQFF

SEQ ID NO: 654235 - protein, 14 aa, Homo sapiens
  CDR3 for alpha chain variable domain of TCR clone 327118 (TRAV3, TRAJ21)
CAVESQANFNKFYF

SEQ ID NO: 654236 - protein, 12 aa, Homo sapiens
  CDR3 for beta chain variable domain of TCR clone 327118 (TRBV7-8, TRBJ2-7)
CASSLGDREQYF

SEQ ID NO: 654237 - protein, 16 aa, Homo sapiens
  CDR3 for alpha chain variable domain of TCR clone 327119 (TRAV3, TRAJ10)
CAVRDMRAGGGNKLTS

SEQ ID NO: 654238 - protein, 16 aa, Homo sapiens
  CDR3 for beta chain variable domain of TCR clone 327119 (TRBV20-1, TRBJ1-4)
CSAPGQGLLTNEKLFF

SEQ ID NO: 654239 - protein, 17 aa, Homo sapiens
  CDR3 for alpha chain variable domain of TCR clone 327120 (TRAV8-1, TRAJ43)
CAVTNDMRFGAGTRLTV

SEQ ID NO: 654240 - protein, 17 aa, Homo sapiens
  CDR3 for beta chain variable domain of TCR clone 327120 (TRBV5-4, TRBJ2-1)
CGSSSAGGRGPYNEQFF

SEQ ID NO: 654241 - protein, 13 aa, Homo sapiens
  CDR3 for alpha chain variable domain of TCR clone 327121 (TRAV3, TRAJ29)
CAVRDIIGTPLVF

SEQ ID NO: 654242 - protein, 17 aa, Homo sapiens
  CDR3 for beta chain variable domain of TCR clone 327121 (TRBV7-2, TRBJ2-3)
CASSLAGGLAGTAGQYF

SEQ ID NO: 654243 - protein, 15 aa, Homo sapiens
  CDR3 for alpha chain variable domain of TCR clone 327122 (TRAV13-1, TRAJ17)
CAASIERAAGNKLTF

SEQ ID NO: 654244 - protein, 12 aa, Homo sapiens
  CDR3 for beta chain variable domain of TCR clone 327122 (TRBV5-6, TRBJ1-1)
CSSSLGRGKAFF

SEQ ID NO: 654245 - protein, 18 aa, Homo sapiens
  CDR3 for alpha chain variable domain of TCR clone 327123 (TRAV21, TRAJ52)
CGVRPSPAGGTSYGKLTF

SEQ ID NO: 654246 - protein, 15 aa, Homo sapiens
  CDR3 for beta chain variable domain of TCR clone 327123 (TRBV12-4, TRBJ2-5)
CASSPPTGLQETQYF

SEQ ID NO: 654247 - protein, 15 aa, Homo sapiens
  CDR3 for alpha chain variable domain of TCR clone 327124 (TRAV3, TRAJ22)
CAVRDRGGSARPLTF

SEQ ID NO: 654248 - protein, 14 aa, Homo sapiens
  CDR3 for beta chain variable domain of TCR clone 327124 (TRBV20-1, TRBJ1-1)
CSAQTRIGGTEAFF

SEQ ID NO: 654249 - protein, 18 aa, Homo sapiens
  CDR3 for alpha chain variable domain of TCR clone 327125 (TRAV21, TRAJ52)
CAVRPSPAGGTSYGKLTF

SEQ ID NO: 654250 - protein, 14 aa, Homo sapiens
  CDR3 for beta chain variable domain of TCR clone 327125 (TRBV7-8, TRBJ2-3)
CASSFPDGQDTQYF

SEQ ID NO: 654251 - protein, 15 aa, Homo sapiens
  CDR3 for alpha chain variable domain of TCR clone 327126 (TRAV3, TRAJ22)
CAVRDRGGSARQLTF

SEQ ID NO: 654252 - protein, 14 aa, Homo sapiens
  CDR3 for beta chain variable domain of TCR clone 327126 (TRBV5-4, TRBJ2-3)
CQPAAGGGADTQYF

SEQ ID NO: 654253 - protein, 15 aa, Homo sapiens
  CDR3 for alpha chain variable domain of TCR clone 327127 (TRAV2, TRAJ15)
CAVEDRGQAGTALIF

SEQ ID NO: 654254 - protein, 13 aa, Homo sapiens
  CDR3 for beta chain variable domain of TCR clone 327127 (TRBV12-4, TRBJ2-5)
CGSSLGGSRTQYF

SEQ ID NO: 654255 - protein, 10 aa, Homo sapiens
  CDR3 for alpha chain variable domain of TCR clone 327128 (TRAV19, TRAJ53)
CALSGGIRIG

SEQ ID NO: 654256 - protein, 14 aa, Homo sapiens
  CDR3 for beta chain variable domain of TCR clone 327128 (TRBV12-5, TRBJ2-5)
CASGSRTHQETQYF

SEQ ID NO: 654257 - protein, 17 aa, Homo sapiens
  CDR3 for alpha chain variable domain of TCR clone 327129 (TRAV3, TRAJ38)
CAVRDCLNAGNNRKLIW

SEQ ID NO: 654258 - protein, 13 aa, Homo sapiens
  CDR3 for beta chain variable domain of TCR clone 327129 (TRBV20-1, TRBJ2-5)
CSAREAFQETQYF

SEQ ID NO: 654259 - protein, 16 aa, Homo sapiens
  CDR3 for alpha chain variable domain of TCR clone 327130 (TRAV21, TRAJ52)
CAATNAGGISYGKLTF

SEQ ID NO: 654260 - protein, 11 aa, Homo sapiens
  CDR3 for beta chain variable domain of TCR clone 327130 (TRBV2, TRBJ1-1)
CASREGTEAFF

SEQ ID NO: 654261 - protein, 10 aa, Homo sapiens
  CDR3 for alpha chain variable domain of TCR clone 327131 (TRAV1-2, TRAJ20)
CALNDYKLSF

SEQ ID NO: 654262 - protein, 16 aa, Homo sapiens
  CDR3 for beta chain variable domain of TCR clone 327131 (TRBV19, TRBJ1-1)
CASRFGGPVTGTEAFF

SEQ ID NO: 654263 - protein, 15 aa, Homo sapiens
  CDR3 for alpha chain variable domain of TCR clone 327132 (TRAV35, TRAJ40)
CAGQLGTSGTYKYIF

SEQ ID NO: 654264 - protein, 15 aa, Homo sapiens
  CDR3 for beta chain variable domain of TCR clone 327132 (TRBV4-2, TRBJ2-3)
CASSKQQIRTDTQYF

SEQ ID NO: 654265 - protein, 18 aa, Homo sapiens
  CDR3 for alpha chain variable domain of TCR clone 327133 (TRAV13-1, TRAJ52)
CAAKNPNAGGTSYGKLTF

SEQ ID NO: 654266 - protein, 18 aa, Homo sapiens
  CDR3 for beta chain variable domain of TCR clone 327133 (TRBV4-1, TRBJ1-4)
CASSPRTGGAWTNEKPFF

SEQ ID NO: 654267 - protein, 12 aa, Homo sapiens
  CDR3 for alpha chain variable domain of TCR clone 327134 (TRAV26-1, TRAJ17)
CIVSSAGNKLTF

SEQ ID NO: 654268 - protein, 15 aa, Homo sapiens
  CDR3 for beta chain variable domain of TCR clone 327134 (TRBV7-6, TRBJ1-2)
CASSSGGRGGYGYTF

SEQ ID NO: 654269 - protein, 16 aa, Homo sapiens
  CDR3 for alpha chain variable domain of TCR clone 327135 (TRAV1-2, TRAJ16)
CAVNRFQMARSCSLQG

SEQ ID NO: 654270 - protein, 16 aa, Homo sapiens
  CDR3 for beta chain variable domain of TCR clone 327135 (TRBV7-3, TRBJ2-2)
CASSLKRGTLSGELFF

SEQ ID NO: 654271 - protein, 15 aa, Homo sapiens
  CDR3 for alpha chain variable domain of TCR clone 327136 (TRAV14/DV4, TRAJ9)
CAMREGSDGGFKTIF

SEQ ID NO: 654272 - protein, 15 aa, Homo sapiens
  CDR3 for beta chain variable domain of TCR clone 327136 (TRBV28, TRBJ2-5)
CASSPPWSYQETQYF

SEQ ID NO: 654273 - protein, 14 aa, Homo sapiens
  CDR3 for alpha chain variable domain of TCR clone 327137 (TRAV1-2, TRAJ8)
CAVKEDTGFQKLVF

SEQ ID NO: 654274 - protein, 17 aa, Homo sapiens
  CDR3 for beta chain variable domain of TCR clone 327137 (TRBV11-3, TRBJ2-3)
CASSPGSSGGRTDTQYF

SEQ ID NO: 654275 - protein, 18 aa, Homo sapiens
  CDR3 for alpha chain variable domain of TCR clone 327138 (TRAV21, TRAJ52)
CAVRPSPAGGTSYGKLTF

SEQ ID NO: 654276 - protein, 16 aa, Homo sapiens
  CDR3 for beta chain variable domain of TCR clone 327138 (TRBV5-1, TRBJ1-6)
CASSLARGTEGTPLHF

SEQ ID NO: 654277 - protein, 13 aa, Homo sapiens
  CDR3 for alpha chain variable domain of TCR clone 327139 (TRAV38-1, TRAJ57)
CSLVQGGSEKLVF

SEQ ID NO: 654278 - protein, 17 aa, Homo sapiens
  CDR3 for beta chain variable domain of TCR clone 327139 (TRBV29-1, TRBJ2-3)
GSVDSPPRGARTDTQYF

SEQ ID NO: 654279 - protein, 12 aa, Homo sapiens
  CDR3 for alpha chain variable domain of TCR clone 327140 (TRAV13-1, TRAJ21)
CEAKEGVNKFYF

SEQ ID NO: 654280 - protein, 20 aa, Homo sapiens
  CDR3 for beta chain variable domain of TCR clone 327140 (TRBV7-8, TRBJ2-2)
CASSHLFPGPTIHITGELFF

SEQ ID NO: 654281 - protein, 11 aa, Homo sapiens
  CDR3 for alpha chain variable domain of TCR clone 327141 (TRAV12-3, TRAJ27)
CAMANAGKSAF

SEQ ID NO: 654282 - protein, 12 aa, Homo sapiens
  CDR3 for beta chain variable domain of TCR clone 327141 (TRBV12-4, TRBJ2-7)
CASSLGGYEQYF

SEQ ID NO: 654283 - protein, 14 aa, Homo sapiens
  CDR3 for alpha chain variable domain of TCR clone 327142 (TRAV12-2, TRAJ40)
CAVKIPSGTYKYIF

SEQ ID NO: 654284 - protein, 17 aa, Homo sapiens
  CDR3 for beta chain variable domain of TCR clone 327142 (TRBV7-3, TRBJ2-3)
RASSLMKRMRGADTQYF

SEQ ID NO: 654285 - protein, 14 aa, Homo sapiens
  CDR3 for alpha chain variable domain of TCR clone 327143 (TRAV8-1, TRAJ39)
CTVNASNAGNMLTF

SEQ ID NO: 654286 - protein, 13 aa, Homo sapiens
  CDR3 for beta chain variable domain of TCR clone 327143 (TRBV12-4, TRBJ2-5)
CASSPGTEETQYF

SEQ ID NO: 654287 - protein, 14 aa, Homo sapiens
  CDR3 for alpha chain variable domain of TCR clone 327144 (TRAV12-2, TRAJ24)
CAVTPADSWGKLQF

SEQ ID NO: 654288 - protein, 13 aa, Homo sapiens
  CDR3 for beta chain variable domain of TCR clone 327144 (TRBV6-4, TRBJ1-5)
CASSADRNQPQHF

SEQ ID NO: 654289 - protein, 14 aa, Homo sapiens
  CDR3 for alpha chain variable domain of TCR clone 327145 (TRAV12-3, TRAJ42)
CAMNYGGSQGNLIS

SEQ ID NO: 654290 - protein, 15 aa, Homo sapiens
  CDR3 for beta chain variable domain of TCR clone 327145 (TRBV5-6, TRBJ1-5)
CASSYGKLWDQPQHF

SEQ ID NO: 654291 - protein, 10 aa, Homo sapiens
  CDR3 for alpha chain variable domain of TCR clone 327146 (TRAV3, TRAJ30)
CAVREIEIIF

SEQ ID NO: 654292 - protein, 16 aa, Homo sapiens
  CDR3 for beta chain variable domain of TCR clone 327146 (TRBV19, TRBJ2-1)
CASSKAGPSSYNEQFF

SEQ ID NO: 654293 - protein, 14 aa, Homo sapiens
  CDR3 for alpha chain variable domain of TCR clone 327147 (TRAV13-1, TRAJ35)
CAASKGGFGNVLHC

SEQ ID NO: 654294 - protein, 16 aa, Homo sapiens
  CDR3 for beta chain variable domain of TCR clone 327147 (TRBV7-9, TRBJ2-1)
CASSGVAGGSYNEQFF

SEQ ID NO: 654295 - protein, 13 aa, Homo sapiens
  CDR3 for alpha chain variable domain of TCR clone 327148 (TRAV12-1, TRAJ26)
CVVRRNYGQNFVF

SEQ ID NO: 654296 - protein, 15 aa, Homo sapiens
  CDR3 for beta chain variable domain of TCR clone 327148 (TRBV7-9, TRBJ1-6)
CASSSPGRGNSPLHF

SEQ ID NO: 654297 - protein, 13 aa, Homo sapiens
  CDR3 for alpha chain variable domain of TCR clone 327149 (TRAV14/DV4, TRAJ4)
CAMKAGGYNKLFF

SEQ ID NO: 654298 - protein, 15 aa, Homo sapiens
  CDR3 for beta chain variable domain of TCR clone 327149 (TRBV11-3, TRBJ1-1)
CASSLGGPGDTEAFF

SEQ ID NO: 654299 - protein, 11 aa, Homo sapiens
  CDR3 for alpha chain variable domain of TCR clone 327150 (TRAV13-2, TRAJ44)
CAENMSYKLTF

SEQ ID NO: 654300 - protein, 17 aa, Homo sapiens
  CDR3 for beta chain variable domain of TCR clone 327150 (TRBV7-3, TRBJ2-3)
RASSLMKRMRGADTQYF

SEQ ID NO: 654301 - protein, 13 aa, Homo sapiens
  CDR3 for alpha chain variable domain of TCR clone 327151 (TRAV3, TRAJ20)
CAVRSLNDYKLSF

SEQ ID NO: 654302 - protein, 13 aa, Homo sapiens
  CDR3 for beta chain variable domain of TCR clone 327151 (TRBV12-4, TRBJ1-2)
CASSSGLTVISTF

SEQ ID NO: 654303 - protein, 14 aa, Homo sapiens
  CDR3 for alpha chain variable domain of TCR clone 327152 (TRAV13-1, TRAJ44)
CAAKAPGTASKLTF

SEQ ID NO: 654304 - protein, 12 aa, Homo sapiens
  CDR3 for beta chain variable domain of TCR clone 327152 (TRBV7-8, TRBJ2-7)
CASSLGDREQYF

SEQ ID NO: 654305 - protein, 14 aa, Homo sapiens
  CDR3 for alpha chain variable domain of TCR clone 327153 (TRAV1-2, TRAJ29)
CAVRTDSGNTPLVF

SEQ ID NO: 654306 - protein, 14 aa, Homo sapiens
  CDR3 for beta chain variable domain of TCR clone 327153 (TRBV7-2, TRBJ2-7)
CASSPKASFYEQYF

SEQ ID NO: 654307 - protein, 14 aa, Homo sapiens
  CDR3 for alpha chain variable domain of TCR clone 327154 (TRAV8-1, TRAJ5)
CAVSMDTGRRALTS

SEQ ID NO: 654308 - protein, 15 aa, Homo sapiens
  CDR3 for beta chain variable domain of TCR clone 327154 (TRBV19, TRBJ2-4)
CASRGPRRGENIQYF

SEQ ID NO: 654309 - protein, 14 aa, Homo sapiens
  CDR3 for alpha chain variable domain of TCR clone 327155 (TRAV1-2, TRAJ16)
CAVNRFSDGQKLLF

SEQ ID NO: 654310 - protein, 13 aa, Homo sapiens
  CDR3 for beta chain variable domain of TCR clone 327155 (TRBV4-1, TRBJ2-1)
CASSQAGGVEQFF

SEQ ID NO: 654311 - protein, 11 aa, Homo sapiens
  CDR3 for alpha chain variable domain of TCR clone 327156 (TRAV2, TRAJ13)
CAPGGYQKVTF

SEQ ID NO: 654312 - protein, 14 aa, Homo sapiens
  CDR3 for beta chain variable domain of TCR clone 327156 (TRBV7-3, TRBJ2-1)
CASSLAGGTNEQFF

SEQ ID NO: 654313 - protein, 12 aa, Homo sapiens
  CDR3 for alpha chain variable domain of TCR clone 327157 (TRAV12-3, TRAJ17)
CAMTLTGNKLTF

SEQ ID NO: 654314 - protein, 15 aa, Homo sapiens
  CDR3 for beta chain variable domain of TCR clone 327157 (TRBV7-3, TRBJ2-1)
CASSLDGNSYNEQFF

SEQ ID NO: 654315 - protein, 12 aa, Homo sapiens
  CDR3 for alpha chain variable domain of TCR clone 327158 (TRAV12-2, TRAJ8)
CALNTGFQKLVF

SEQ ID NO: 654316 - protein, 15 aa, Homo sapiens
  CDR3 for beta chain variable domain of TCR clone 327158 (TRBV7-8, TRBJ1-5)
CASSLERRGLEPQHF

SEQ ID NO: 654317 - protein, 12 aa, Homo sapiens
  CDR3 for alpha chain variable domain of TCR clone 327159 (TRAV12-1, TRAJ40)
CVVYSGTYKYIF

SEQ ID NO: 654318 - protein, 14 aa, Homo sapiens
  CDR3 for beta chain variable domain of TCR clone 327159 (TRBV7-9, TRBJ2-5)
CGSSLDTAQETQYF

SEQ ID NO: 654319 - protein, 15 aa, Homo sapiens
  CDR3 for alpha chain variable domain of TCR clone 327160 (TRAV29/DV5, TRAJ30)
CTSVQQANRDDKIIF

SEQ ID NO: 654320 - protein, 13 aa, Homo sapiens
  CDR3 for beta chain variable domain of TCR clone 327160 (TRBV12-5, TRBJ2-3)
CASQNRGTDTQYF

SEQ ID NO: 654321 - protein, 14 aa, Homo sapiens
  CDR3 for alpha chain variable domain of TCR clone 327161 (TRAV1-2, TRAJ8)
CAVREDTGFQKLVF

SEQ ID NO: 654322 - protein, 12 aa, Homo sapiens
  CDR3 for beta chain variable domain of TCR clone 327161 (TRBV19, TRBJ2-7)
CASTDGGYEQYF

SEQ ID NO: 654323 - protein, 16 aa, Homo sapiens
  CDR3 for alpha chain variable domain of TCR clone 327162 (TRAV13-1, TRAJ10)
CAASSHFTGGGNKLTF

SEQ ID NO: 654324 - protein, 14 aa, Homo sapiens
  CDR3 for beta chain variable domain of TCR clone 327162 (TRBV7-9, TRBJ2-3)
CASSLEDGTDTQYF

SEQ ID NO: 654325 - protein, 10 aa, Homo sapiens
  CDR3 for alpha chain variable domain of TCR clone 327163 (TRAV27, TRAJ58)
SETSGSRLTF

SEQ ID NO: 654326 - protein, 15 aa, Homo sapiens
  CDR3 for beta chain variable domain of TCR clone 327163 (TRBV20-1, TRBJ2-7)
CSARDRVSGMDEQYF

SEQ ID NO: 654327 - protein, 15 aa, Homo sapiens
  CDR3 for alpha chain variable domain of TCR clone 327164 (TRAV27, TRAJ38)
CAARRNAGNNRKVIW

SEQ ID NO: 654328 - protein, 15 aa, Homo sapiens
  CDR3 for beta chain variable domain of TCR clone 327164 (TRBV2, TRBJ2-1)
CASSELAGSYNEQFF

SEQ ID NO: 654329 - protein, 12 aa, Homo sapiens
  CDR3 for alpha chain variable domain of TCR clone 327165 (TRAV21, TRAJ11)
CAATSGYSNLTS

SEQ ID NO: 654330 - protein, 14 aa, Homo sapiens
  CDR3 for beta chain variable domain of TCR clone 327165 (TRBV20-1, TRBJ2-7)
CSAPELAGVGEQYF

SEQ ID NO: 654331 - protein, 11 aa, Homo sapiens
  CDR3 for alpha chain variable domain of TCR clone 327166 (TRAV16, TRAJ33)
CALHSNYQLIW

SEQ ID NO: 654332 - protein, 15 aa, Homo sapiens
  CDR3 for beta chain variable domain of TCR clone 327166 (TRBV4-1, TRBJ2-7)
CASSKQGQGFDEQYF

SEQ ID NO: 654333 - protein, 14 aa, Homo sapiens
  CDR3 for alpha chain variable domain of TCR clone 327167 (TRAV13-1, TRAJ35)
CSASKGGFGNVLHC

SEQ ID NO: 654334 - protein, 13 aa, Homo sapiens
  CDR3 for beta chain variable domain of TCR clone 327167 (TRBV7-3, TRBJ1-1)
CASSQDLGAEAFF

SEQ ID NO: 654335 - protein, 13 aa, Homo sapiens
  CDR3 for alpha chain variable domain of TCR clone 327168 (TRAV16, TRAJ58)
CALSIPSGSRLTF

SEQ ID NO: 654336 - protein, 15 aa, Homo sapiens
  CDR3 for beta chain variable domain of TCR clone 327168 (TRBV20-1, TRBJ1-1)
CSASRGVTGNTEAFF

SEQ ID NO: 654337 - protein, 13 aa, Homo sapiens
  CDR3 for alpha chain variable domain of TCR clone 327169 (TRAV29/DV5, TRAJ29)
CAASAAGNTPLVF

SEQ ID NO: 654338 - protein, 17 aa, Homo sapiens
  CDR3 for beta chain variable domain of TCR clone 327169 (TRBV25-1, TRBJ2-1)
CASSAYGQGRGVYEQFF

SEQ ID NO: 654339 - protein, 14 aa, Homo sapiens
  CDR3 for alpha chain variable domain of TCR clone 327170 (TRAV3, TRAJ21)
CAVRAAYNFNKFYF

SEQ ID NO: 654340 - protein, 17 aa, Homo sapiens
  CDR3 for beta chain variable domain of TCR clone 327170 (TRBV20-1, TRBJ1-6)
CSARGGYTFSYNSPLHF

SEQ ID NO: 654341 - protein, 13 aa, Homo sapiens
  CDR3 for alpha chain variable domain of TCR clone 327171 (TRAV12-2, TRAJ26)
CAVNDNYGQNFVF

SEQ ID NO: 654342 - protein, 14 aa, Homo sapiens
  CDR3 for beta chain variable domain of TCR clone 327171 (TRBV4-1, TRBJ2-2)
CASSQAVNTGELFF

SEQ ID NO: 654343 - protein, 14 aa, Homo sapiens
  CDR3 for alpha chain variable domain of TCR clone 327172 (TRAV1-2, TRAJ8)
CAVREDTGFQKLVF

SEQ ID NO: 654344 - protein, 16 aa, Homo sapiens
  CDR3 for beta chain variable domain of TCR clone 327172 (TRBV7-9, TRBJ2-1)
CASSDVARGSYNEQFF

SEQ ID NO: 654345 - protein, 14 aa, Homo sapiens
  CDR3 for alpha chain variable domain of TCR clone 327173 (TRAV1-2, TRAJ16)
CAVNRFSDGQKLFF

SEQ ID NO: 654346 - protein, 12 aa, Homo sapiens
  CDR3 for beta chain variable domain of TCR clone 327173 (TRBV24-1, TRBJ1-1)
CATLYPDTEAFF

SEQ ID NO: 654347 - protein, 10 aa, Homo sapiens
  CDR3 for alpha chain variable domain of TCR clone 327174 (TRAV27, TRAJ43)
CAGANNDTRF

SEQ ID NO: 654348 - protein, 17 aa, Homo sapiens
  CDR3 for beta chain variable domain of TCR clone 327174 (TRBV18, TRBJ2-1)
CASSPRVAGGSYNEQFF

SEQ ID NO: 654349 - protein, 15 aa, Homo sapiens
  CDR3 for alpha chain variable domain of TCR clone 327175 (TRAV2, TRAJ16)
CAVEFGMARSCSLQG

SEQ ID NO: 654350 - protein, 14 aa, Homo sapiens
  CDR3 for beta chain variable domain of TCR clone 327175 (TRBV6-3, TRBJ2-5)
CASSYSLREKTQYF

SEQ ID NO: 654351 - protein, 13 aa, Homo sapiens
  CDR3 for alpha chain variable domain of TCR clone 327176 (TRAV2, TRAJ15)
CAVASQAGTALVF

SEQ ID NO: 654352 - protein, 15 aa, Homo sapiens
  CDR3 for beta chain variable domain of TCR clone 327176 (TRBV27, TRBJ2-7)
CASSTAGTGSYEQYF

SEQ ID NO: 654353 - protein, 14 aa, Homo sapiens
  CDR3 for alpha chain variable domain of TCR clone 327177 (TRAV35, TRAJ22)
CAGLRPGSARQLTS

SEQ ID NO: 654354 - protein, 13 aa, Homo sapiens
  CDR3 for beta chain variable domain of TCR clone 327177 (TRBV7-3, TRBJ1-1)
CASSQDWGAEAFF

SEQ ID NO: 654355 - protein, 14 aa, Homo sapiens
  CDR3 for alpha chain variable domain of TCR clone 327178 (TRAV12-1, TRAJ30)
CVVNIGGRDDKIIF

SEQ ID NO: 654356 - protein, 12 aa, Homo sapiens
  CDR3 for beta chain variable domain of TCR clone 327178 (TRBV5-1, TRBJ1-2)
CASSQDTYGYAF

SEQ ID NO: 654357 - protein, 18 aa, Homo sapiens
  CDR3 for alpha chain variable domain of TCR clone 327179 (TRAV9-2, TRAJ52)
CALSRHNAGGTSYGKLTS

SEQ ID NO: 654358 - protein, 13 aa, Homo sapiens
  CDR3 for beta chain variable domain of TCR clone 327179 (TRBV7-9, TRBJ1-2)
CASSLKQNYGYTF

SEQ ID NO: 654359 - protein, 14 aa, Homo sapiens
  CDR3 for alpha chain variable domain of TCR clone 327180 (TRAV2, TRAJ9)
CAVEDRSGVFKTIF

SEQ ID NO: 654360 - protein, 16 aa, Homo sapiens
  CDR3 for beta chain variable domain of TCR clone 327180 (TRBV20-1, TRBJ1-4)
CSAPGQGLLTNEKLFF

SEQ ID NO: 654361 - protein, 21 aa, Homo sapiens
  CDR3 for alpha chain variable domain of TCR clone 327181 (TRAV21, TRAJ27)
CAARPGNAGKSTFEDGNTLTV

SEQ ID NO: 654362 - protein, 14 aa, Homo sapiens
  CDR3 for beta chain variable domain of TCR clone 327181 (TRBV7-6, TRBJ2-3)
CASSLGTVTDTQYF

SEQ ID NO: 654363 - protein, 13 aa, Homo sapiens
  CDR3 for alpha chain variable domain of TCR clone 327182 (TRAV36/DV7, TRAJ49)
CAVEANTGNQFDF

SEQ ID NO: 654364 - protein, 14 aa, Homo sapiens
  CDR3 for beta chain variable domain of TCR clone 327182 (TRBV20-1, TRBJ2-5)
CSASSGRAAETQYF

SEQ ID NO: 654365 - protein, 16 aa, Homo sapiens
  CDR3 for alpha chain variable domain of TCR clone 327183 (TRAV35, TRAJ28)
CAGQKYSGAGSYQRTF

SEQ ID NO: 654366 - protein, 16 aa, Homo sapiens
  CDR3 for beta chain variable domain of TCR clone 327183 (TRBV7-3, TRBJ2-2)
CASSLKRGTLSGELFF

SEQ ID NO: 654367 - protein, 14 aa, Homo sapiens
  CDR3 for alpha chain variable domain of TCR clone 327184 (TRAV13-2, TRAJ29)
CAENIEPGNTPLIF

SEQ ID NO: 654368 - protein, 14 aa, Homo sapiens
  CDR3 for beta chain variable domain of TCR clone 327184 (TRBV19, TRBJ2-2)
CATTGHANTGELFF

SEQ ID NO: 654369 - protein, 13 aa, Homo sapiens
  CDR3 for alpha chain variable domain of TCR clone 327185 (TRAV12-3, TRAJ9)
CAMRNTGVFKTIF

SEQ ID NO: 654370 - protein, 14 aa, Homo sapiens
  CDR3 for beta chain variable domain of TCR clone 327185 (TRBV11-2, TRBJ2-7)
CASSSTGEGYEQYF

SEQ ID NO: 654371 - protein, 14 aa, Homo sapiens
  CDR3 for alpha chain variable domain of TCR clone 327186 (TRAV3, TRAJ36)
CSVRDGTGTNNLFF

SEQ ID NO: 654372 - protein, 16 aa, Homo sapiens
  CDR3 for beta chain variable domain of TCR clone 327186 (TRBV7-3, TRBJ2-5)
CASIQPGGSVQETQYF

SEQ ID NO: 654373 - protein, 14 aa, Homo sapiens
  CDR3 for alpha chain variable domain of TCR clone 327187 (TRAV12-2, TRAJ13)
CAVKKTGGYQKVTF

SEQ ID NO: 654374 - protein, 14 aa, Homo sapiens
  CDR3 for beta chain variable domain of TCR clone 327187 (TRBV19, TRBJ2-1)
CDSPTFVLSGEQFF

SEQ ID NO: 654375 - protein, 14 aa, Homo sapiens
  CDR3 for alpha chain variable domain of TCR clone 327188 (TRAV12-3, TRAJ56)
CAMSVTGANSKLTF

SEQ ID NO: 654376 - protein, 15 aa, Homo sapiens
  CDR3 for beta chain variable domain of TCR clone 327188 (TRBV24-1, TRBJ2-2)
TSVPPVIGTPGSCFF

SEQ ID NO: 654377 - protein, 14 aa, Homo sapiens
  CDR3 for alpha chain variable domain of TCR clone 327189 (TRAV2, TRAJ37)
WAVDFTSNTGKLIF

SEQ ID NO: 654378 - protein, 15 aa, Homo sapiens
  CDR3 for beta chain variable domain of TCR clone 327189 (TRBV20-1, TRBJ1-1)
CSASRGVTGNTEAFF

SEQ ID NO: 654379 - protein, 15 aa, Homo sapiens
  CDR3 for alpha chain variable domain of TCR clone 327190 (TRAV4, TRAJ26)
CLVGDMNKYGQNFVF

SEQ ID NO: 654380 - protein, 16 aa, Homo sapiens
  CDR3 for beta chain variable domain of TCR clone 327190 (TRBV12-5, TRBJ2-5)
CASGPRTSGNQETQYF

SEQ ID NO: 654381 - protein, 13 aa, Homo sapiens
  CDR3 for alpha chain variable domain of TCR clone 327191 (TRAV8-3, TRAJ37)
CAVGSGNTGKLIF

SEQ ID NO: 654382 - protein, 16 aa, Homo sapiens
  CDR3 for beta chain variable domain of TCR clone 327191 (TRBV29-1, TRBJ2-7)
CSVEVVGTSGSYEQYF

SEQ ID NO: 654383 - protein, 19 aa, Homo sapiens
  CDR3 for alpha chain variable domain of TCR clone 327192 (TRAV2, TRAJ20)
ILQVREADAAGYRDCKLSF

SEQ ID NO: 654384 - protein, 14 aa, Homo sapiens
  CDR3 for beta chain variable domain of TCR clone 327192 (TRBV12-5, TRBJ2-5)
CASGSRTHQETQYF

SEQ ID NO: 654385 - protein, 12 aa, Homo sapiens
  CDR3 for alpha chain variable domain of TCR clone 327193 (TRAV1-1, TRAJ39)
CAVPVVGNMLTF

SEQ ID NO: 654386 - protein, 14 aa, Homo sapiens
  CDR3 for beta chain variable domain of TCR clone 327193 (TRBV28, TRBJ1-2)
CASRIQGANYGYTF

SEQ ID NO: 654387 - protein, 16 aa, Homo sapiens
  CDR3 for alpha chain variable domain of TCR clone 327194 (TRAV12-2, TRAJ32)
CAVNMNYGGATNKLIF

SEQ ID NO: 654388 - protein, 17 aa, Homo sapiens
  CDR3 for beta chain variable domain of TCR clone 327194 (TRBV28, TRBJ2-5)
CASSTPEGDALQETQYF

SEQ ID NO: 654389 - protein, 15 aa, Homo sapiens
  CDR3 for alpha chain variable domain of TCR clone 327195 (TRAV3, TRAJ5)
CAVRDRKTGRRALTF

SEQ ID NO: 654390 - protein, 15 aa, Homo sapiens
  CDR3 for beta chain variable domain of TCR clone 327195 (TRBV7-8, TRBJ2-1)
CASSLADCLYNEQFF

SEQ ID NO: 654391 - protein, 15 aa, Homo sapiens
  CDR3 for alpha chain variable domain of TCR clone 327196 (TRAV12-3, TRAJ17)
CAMSPSLAAGNKLTF

SEQ ID NO: 654392 - protein, 14 aa, Homo sapiens
  CDR3 for beta chain variable domain of TCR clone 327196 (TRBV7-8, TRBJ2-3)
CASSSRDSTDTQYF

SEQ ID NO: 654393 - protein, 13 aa, Homo sapiens
  CDR3 for alpha chain variable domain of TCR clone 327197 (TRAV17, TRAJ21)
CATDGGNFNKFYF

SEQ ID NO: 654394 - protein, 14 aa, Homo sapiens
  CDR3 for beta chain variable domain of TCR clone 327197 (TRBV2, TRBJ2-7)
CASSLTSGGYEQYF

SEQ ID NO: 654395 - protein, 14 aa, Homo sapiens
  CDR3 for alpha chain variable domain of TCR clone 327198 (TRAV19, TRAJ16)
CALSEVSDGQKMLF

SEQ ID NO: 654396 - protein, 15 aa, Homo sapiens
  CDR3 for beta chain variable domain of TCR clone 327198 (TRBV20-1, TRBJ1-5)
CSASAWDRVNQPQHF

SEQ ID NO: 654397 - protein, 18 aa, Homo sapiens
  CDR3 for alpha chain variable domain of TCR clone 327199 (TRAV13-1, TRAJ52)
CAASKRSAGGTRHGKLTF

SEQ ID NO: 654398 - protein, 13 aa, Homo sapiens
  CDR3 for beta chain variable domain of TCR clone 327199 (TRBV12-4, TRBJ1-2)
CASSLRQGKGDTF

SEQ ID NO: 654399 - protein, 17 aa, Homo sapiens
  CDR3 for alpha chain variable domain of TCR clone 327200 (TRAV3, TRAJ42)
CAVRDRDYGGRQGNLIF

SEQ ID NO: 654400 - protein, 16 aa, Homo sapiens
  CDR3 for beta chain variable domain of TCR clone 327200 (TRBV9, TRBJ2-1)
CASSVGGGGNYNEQFF

SEQ ID NO: 654401 - protein, 17 aa, Homo sapiens
  CDR3 for alpha chain variable domain of TCR clone 327201 (TRAV1-2, TRAJ8)
CAVRDPDENTGFHKLVF

SEQ ID NO: 654402 - protein, 16 aa, Homo sapiens
  CDR3 for beta chain variable domain of TCR clone 327201 (TRBV7-9, TRBJ2-2)
CASSGFGGANTGELFF

SEQ ID NO: 654403 - protein, 14 aa, Homo sapiens
  CDR3 for alpha chain variable domain of TCR clone 327202 (TRAV8-3, TRAJ13)
CAVGAQEGYQKVTF

SEQ ID NO: 654404 - protein, 15 aa, Homo sapiens
  CDR3 for beta chain variable domain of TCR clone 327202 (TRBV3-1, TRBJ1-1)
CASKMRTTMNTEAFF

SEQ ID NO: 654405 - protein, 13 aa, Homo sapiens
  CDR3 for alpha chain variable domain of TCR clone 327203 (TRAV23/DV6, TRAJ12)
CAPRVDSSYKLIF

SEQ ID NO: 654406 - protein, 15 aa, Homo sapiens
  CDR3 for beta chain variable domain of TCR clone 327203 (TRBV12-5, TRBJ2-2)
CASGRLGGNTGELFF

SEQ ID NO: 654407 - protein, 14 aa, Homo sapiens
  CDR3 for alpha chain variable domain of TCR clone 327204 (TRAV13-1, TRAJ35)
CAASKGGFGNVLHC

SEQ ID NO: 654408 - protein, 13 aa, Homo sapiens
  CDR3 for beta chain variable domain of TCR clone 327204 (TRBV9, TRBJ2-1)
CASSPSGGNEQFF

SEQ ID NO: 654409 - protein, 15 aa, Homo sapiens
  CDR3 for alpha chain variable domain of TCR clone 327205 (TRAV3, TRAJ4)
CAVRDGTGGYNKLIF

SEQ ID NO: 654410 - protein, 15 aa, Homo sapiens
  CDR3 for beta chain variable domain of TCR clone 327205 (TRBV28, TRBJ2-5)
CASSSGRVIQETQYF

SEQ ID NO: 654411 - protein, 13 aa, Homo sapiens
  CDR3 for alpha chain variable domain of TCR clone 327206 (TRAV21, TRAJ27)
CAARPGNAGKSTF

SEQ ID NO: 654412 - protein, 14 aa, Homo sapiens
  CDR3 for beta chain variable domain of TCR clone 327206 (TRBV7-6, TRBJ2-1)
CASSLGGGQMGSSS

SEQ ID NO: 654413 - protein, 14 aa, Homo sapiens
  CDR3 for alpha chain variable domain of TCR clone 327207 (TRAV13-2, TRAJ22)
CAAGTLGSARQLTF

SEQ ID NO: 654414 - protein, 16 aa, Homo sapiens
  CDR3 for beta chain variable domain of TCR clone 327207 (TRBV19, TRBJ2-1)
CASSSKGTRSYNEQFF

SEQ ID NO: 654415 - protein, 14 aa, Homo sapiens
  CDR3 for alpha chain variable domain of TCR clone 327208 (TRAV17, TRAJ53)
CATDAGGSNYKLTF

SEQ ID NO: 654416 - protein, 16 aa, Homo sapiens
  CDR3 for beta chain variable domain of TCR clone 327208 (TRBV4-1, TRBJ1-1)
CASSQDAGIGNTEAFF

SEQ ID NO: 654417 - protein, 13 aa, Homo sapiens
  CDR3 for alpha chain variable domain of TCR clone 327209 (TRAV13-1, TRAJ29)
CAASIGLNTPLIF

SEQ ID NO: 654418 - protein, 14 aa, Homo sapiens
  CDR3 for beta chain variable domain of TCR clone 327209 (TRBV20-1, TRBJ2-5)
CSASDSGSGETQYF

SEQ ID NO: 654419 - protein, 16 aa, Homo sapiens
  CDR3 for alpha chain variable domain of TCR clone 327210 (TRAV3, TRAJ10)
CAVRDMRAGGGNKLTV

SEQ ID NO: 654420 - protein, 14 aa, Homo sapiens
  CDR3 for beta chain variable domain of TCR clone 327210 (TRBV19, TRBJ2-1)
CASPTFVLSGEQFF

SEQ ID NO: 654421 - protein, 16 aa, Homo sapiens
  CDR3 for alpha chain variable domain of TCR clone 327211 (TRAV3, TRAJ6)
CALRDGMGRRKLHTYI

SEQ ID NO: 654422 - protein, 15 aa, Homo sapiens
  CDR3 for beta chain variable domain of TCR clone 327211 (TRBV9, TRBJ2-1)
CASSLAGSSYNEQFF

SEQ ID NO: 654423 - protein, 18 aa, Homo sapiens
  CDR3 for alpha chain variable domain of TCR clone 327212 (TRAV26-2, TRAJ45)
CILRLWGYSGGGADGLTF

SEQ ID NO: 654424 - protein, 13 aa, Homo sapiens
  CDR3 for beta chain variable domain of TCR clone 327212 (TRBV18, TRBJ1-1)
CASSGGRNTEAFF

SEQ ID NO: 654425 - protein, 15 aa, Homo sapiens
  CDR3 for alpha chain variable domain of TCR clone 327213 (TRAV8-4, TRAJ10)
CAVSDGPGGGNKLTF

SEQ ID NO: 654426 - protein, 13 aa, Homo sapiens
  CDR3 for beta chain variable domain of TCR clone 327213 (TRBV28, TRBJ1-3)
CASSLLGSGTIYF

SEQ ID NO: 654427 - protein, 14 aa, Homo sapiens
  CDR3 for alpha chain variable domain of TCR clone 327214 (TRAV8-3, TRAJ4)
CSVGAAGGYNKLIF

SEQ ID NO: 654428 - protein, 14 aa, Homo sapiens
  CDR3 for beta chain variable domain of TCR clone 327214 (TRBV11-2, TRBJ1-2)
CASSLYRGNYGYTF

SEQ ID NO: 654429 - protein, 10 aa, Homo sapiens
  CDR3 for alpha chain variable domain of TCR clone 327215 (TRAV30, TRAJ16)
CGTGGQKLLF

SEQ ID NO: 654430 - protein, 14 aa, Homo sapiens
  CDR3 for beta chain variable domain of TCR clone 327215 (TRBV4-1, TRBJ2-2)
CASIQAVNTGELFF

SEQ ID NO: 654431 - protein, 14 aa, Homo sapiens
  CDR3 for alpha chain variable domain of TCR clone 327216 (TRAV12-2, TRAJ40)
CAVKIPAGTYKYIF

SEQ ID NO: 654432 - protein, 17 aa, Homo sapiens
  CDR3 for beta chain variable domain of TCR clone 327216 (TRBV11-2, TRBJ2-1)
CASSLYPPGVEYNEQFF

SEQ ID NO: 654433 - protein, 13 aa, Homo sapiens
  CDR3 for alpha chain variable domain of TCR clone 327217 (TRAV29/DV5, TRAJ31)
CAASRNNNARPLF

SEQ ID NO: 654434 - protein, 12 aa, Homo sapiens
  CDR3 for beta chain variable domain of TCR clone 327217 (TRBV14, TRBJ2-5)
CASSQLKETQYF

SEQ ID NO: 654435 - protein, 12 aa, Homo sapiens
  CDR3 for alpha chain variable domain of TCR clone 327218 (TRAV17, TRAJ4)
CPTDGGYNKLIF

SEQ ID NO: 654436 - protein, 13 aa, Homo sapiens
  CDR3 for beta chain variable domain of TCR clone 327218 (TRBV29-1, TRBJ2-2)
CSTTGVNTVELFF

SEQ ID NO: 654437 - protein, 13 aa, Homo sapiens
  CDR3 for alpha chain variable domain of TCR clone 327219 (TRAV12-3, TRAJ7)
CAMSASGNNRLAF

SEQ ID NO: 654438 - protein, 13 aa, Homo sapiens
  CDR3 for beta chain variable domain of TCR clone 327219 (TRBV2, TRBJ1-1)
CASRWTVNTEAFF

SEQ ID NO: 654439 - protein, 16 aa, Homo sapiens
  CDR3 for alpha chain variable domain of TCR clone 327220 (TRAV8-6, TRAJ37)
CSVSGLGSSNTGKLIF

SEQ ID NO: 654440 - protein, 15 aa, Homo sapiens
  CDR3 for beta chain variable domain of TCR clone 327220 (TRBV20-1, TRBJ1-5)
CSARSGPSMNQPQHF

SEQ ID NO: 654441 - protein, 16 aa, Homo sapiens
  CDR3 for alpha chain variable domain of TCR clone 327221 (TRAV1-1, TRAJ29)
CAVRSTRNSGNTPLVF

SEQ ID NO: 654442 - protein, 16 aa, Homo sapiens
  CDR3 for beta chain variable domain of TCR clone 327221 (TRBV27, TRBJ1-1)
RASSSRGRTGYTEAFF

SEQ ID NO: 654443 - protein, 16 aa, Homo sapiens
  CDR3 for alpha chain variable domain of TCR clone 327222 (TRAV30, TRAJ24)
CGTEIVDADSRGKFQF

SEQ ID NO: 654444 - protein, 20 aa, Homo sapiens
  CDR3 for beta chain variable domain of TCR clone 327222 (TRBV7-8, TRBJ2-2)
CASSHLFPGPTIHITGELFF

SEQ ID NO: 654445 - protein, 12 aa, Homo sapiens
  CDR3 for alpha chain variable domain of TCR clone 327223 (TRAV23/DV6, TRAJ24)
FAANDGWGKLQF

SEQ ID NO: 654446 - protein, 16 aa, Homo sapiens
  CDR3 for beta chain variable domain of TCR clone 327223 (TRBV12-4, TRBJ2-5)
CASSLSTSGGKETQYF

SEQ ID NO: 654447 - protein, 15 aa, Homo sapiens
  CDR3 for alpha chain variable domain of TCR clone 327224 (TRAV12-3, TRAJ6)
CAMSAASGGSYIPTF

SEQ ID NO: 654448 - protein, 17 aa, Homo sapiens
  CDR3 for beta chain variable domain of TCR clone 327224 (TRBV7-3, TRBJ2-3)
CASSLMKRMRGADTQYF

SEQ ID NO: 654449 - protein, 14 aa, Homo sapiens
  CDR3 for alpha chain variable domain of TCR clone 327225 (TRAV8-4, TRAJ9)
CAVRINTGGFKTIF

SEQ ID NO: 654450 - protein, 15 aa, Homo sapiens
  CDR3 for beta chain variable domain of TCR clone 327225 (TRBV20-1, TRBJ2-7)
CSAGDRVSGMDEQYF

SEQ ID NO: 654451 - protein, 14 aa, Homo sapiens
  CDR3 for alpha chain variable domain of TCR clone 327226 (TRAV14/DV4, TRAJ26)
CAMREGTYGQNFVF

SEQ ID NO: 654452 - protein, 15 aa, Homo sapiens
  CDR3 for beta chain variable domain of TCR clone 327226 (TRBV20-1, TRBJ1-1)
CSASRGVTGNTEAFF

SEQ ID NO: 654453 - protein, 13 aa, Homo sapiens
  CDR3 for alpha chain variable domain of TCR clone 327227 (TRAV1-2, TRAJ9)
CAALNTGGFKTIF

SEQ ID NO: 654454 - protein, 16 aa, Homo sapiens
  CDR3 for beta chain variable domain of TCR clone 327227 (TRBV19, TRBJ1-2)
CASSIGLFRDAYGYTF

SEQ ID NO: 654455 - protein, 13 aa, Homo sapiens
  CDR3 for alpha chain variable domain of TCR clone 327228 (TRAV12-2, TRAJ37)
CAVSSGNTGKLIF

SEQ ID NO: 654456 - protein, 17 aa, Homo sapiens
  CDR3 for beta chain variable domain of TCR clone 327228 (TRBV5-1, TRBJ2-5)
CASSLRGLAANQETQYF

SEQ ID NO: 654457 - protein, 13 aa, Homo sapiens
  CDR3 for alpha chain variable domain of TCR clone 327229 (TRAV12-1, TRAJ36)
CVVNRGGANNLFF

SEQ ID NO: 654458 - protein, 15 aa, Homo sapiens
  CDR3 for beta chain variable domain of TCR clone 327229 (TRBV11-2, TRBJ2-1)
CASSLGTSGLNEQFF

SEQ ID NO: 654459 - protein, 14 aa, Homo sapiens
  CDR3 for alpha chain variable domain of TCR clone 327230 (TRAV8-3, TRAJ22)
CSVKPPGSARQLTF

SEQ ID NO: 654460 - protein, 14 aa, Homo sapiens
  CDR3 for beta chain variable domain of TCR clone 327230 (TRBV12-4, TRBJ2-2)
CASSLSQDTGELFF

SEQ ID NO: 654461 - protein, 16 aa, Homo sapiens
  CDR3 for alpha chain variable domain of TCR clone 327231 (TRAV26-1, TRAJ53)
CIVRVAMGGSNYKLTV

SEQ ID NO: 654462 - protein, 12 aa, Homo sapiens
  CDR3 for beta chain variable domain of TCR clone 327231 (TRBV7-9, TRBJ1-5)
CASSPQGQPQHF

SEQ ID NO: 654463 - protein, 14 aa, Homo sapiens
  CDR3 for alpha chain variable domain of TCR clone 327232 (TRAV26-2, TRAJ32)
CILFRGGATNNLIF

SEQ ID NO: 654464 - protein, 15 aa, Homo sapiens
  CDR3 for beta chain variable domain of TCR clone 327232 (TRBV2, TRBJ2-2)
CASSGFGAGTGELFF

SEQ ID NO: 654465 - protein, 10 aa, Homo sapiens
  CDR3 for alpha chain variable domain of TCR clone 327233 (TRAV12-3, )
CAMIPDRFLS

SEQ ID NO: 654466 - protein, 12 aa, Homo sapiens
  CDR3 for beta chain variable domain of TCR clone 327233 (TRBV7-9, TRBJ1-4)
CASSTDREKLFF

SEQ ID NO: 654467 - protein, 14 aa, Homo sapiens
  CDR3 for alpha chain variable domain of TCR clone 327234 (TRAV12-2, TRAJ9)
CAVNMEGGGFKTLF

SEQ ID NO: 654468 - protein, 14 aa, Homo sapiens
  CDR3 for beta chain variable domain of TCR clone 327234 (TRBV2, TRBJ2-5)
CASSEVLAQETQYF

SEQ ID NO: 654469 - protein, 16 aa, Homo sapiens
  CDR3 for alpha chain variable domain of TCR clone 327235 (TRAV3, TRAJ21)
CAVRDIERGNFNKFYF

SEQ ID NO: 654470 - protein, 13 aa, Homo sapiens
  CDR3 for beta chain variable domain of TCR clone 327235 (TRBV4-2, TRBJ1-1)
CASSQSGNTEAFF

SEQ ID NO: 654471 - protein, 11 aa, Homo sapiens
  CDR3 for alpha chain variable domain of TCR clone 327236 (TRAV1-1, TRAJ20)
CAVFNDYKLSF

SEQ ID NO: 654472 - protein, 14 aa, Homo sapiens
  CDR3 for beta chain variable domain of TCR clone 327236 (TRBV19, TRBJ2-1)
CARSKDRGQDEQFF

SEQ ID NO: 654473 - protein, 12 aa, Homo sapiens
  CDR3 for alpha chain variable domain of TCR clone 327237 (TRAV12-3, TRAJ17)
CAMTLAGNKLTF

SEQ ID NO: 654474 - protein, 15 aa, Homo sapiens
  CDR3 for beta chain variable domain of TCR clone 327237 (TRBV7-9, TRBJ1-5)
CASSQGHQPNQPQHF

SEQ ID NO: 654475 - protein, 14 aa, Homo sapiens
  CDR3 for alpha chain variable domain of TCR clone 327238 (TRAV1-2, TRAJ16)
CAVNRFSDGTKLLF

SEQ ID NO: 654476 - protein, 18 aa, Homo sapiens
  CDR3 for beta chain variable domain of TCR clone 327238 (TRBV20-1, TRBJ2-3)
CSASGLAGGPGTTDTQYF

SEQ ID NO: 654477 - protein, 14 aa, Homo sapiens
  CDR3 for alpha chain variable domain of TCR clone 327239 (TRAV12-2, TRAJ13)
CAVKKTGGYQKVTF

SEQ ID NO: 654478 - protein, 11 aa, Homo sapiens
  CDR3 for beta chain variable domain of TCR clone 327239 (TRBV29-1, TRBJ2-5)
CSEDRTGSQYF

SEQ ID NO: 654479 - protein, 15 aa, Homo sapiens
  CDR3 for alpha chain variable domain of TCR clone 327240 (TRAV21, TRAJ53)
CATLNSGSSNYKLTF

SEQ ID NO: 654480 - protein, 16 aa, Homo sapiens
  CDR3 for beta chain variable domain of TCR clone 327240 (TRBV24-1, TRBJ2-3)
CATSDPGTGATDAQYF

SEQ ID NO: 654481 - protein, 13 aa, Homo sapiens
  CDR3 for alpha chain variable domain of TCR clone 327241 (TRAV8-3, TRAJ28)
CAVGAVGSYQLTF

SEQ ID NO: 654482 - protein, 13 aa, Homo sapiens
  CDR3 for beta chain variable domain of TCR clone 327241 (TRBV5-4, TRBJ2-5)
CASSPVSQETQYF

SEQ ID NO: 654483 - protein, 14 aa, Homo sapiens
  CDR3 for alpha chain variable domain of TCR clone 327242 (TRAV16, TRAJ39)
CALSKNNAGNMLTF

SEQ ID NO: 654484 - protein, 17 aa, Homo sapiens
  CDR3 for beta chain variable domain of TCR clone 327242 (TRBV23-1, TRBJ1-2)
CASSNTWGGLLWLHLRF

SEQ ID NO: 654485 - protein, 12 aa, Homo sapiens
  CDR3 for alpha chain variable domain of TCR clone 327243 (TRAV12-1, TRAJ29)
CVADSGNTHLVF

SEQ ID NO: 654486 - protein, 12 aa, Homo sapiens
  CDR3 for beta chain variable domain of TCR clone 327243 (TRBV2, TRBJ2-7)
CASKRGSYEQYF

SEQ ID NO: 654487 - protein, 14 aa, Homo sapiens
  CDR3 for alpha chain variable domain of TCR clone 327244 (TRAV13-1, TRAJ13)
CAARRVGGYQKVTF

SEQ ID NO: 654488 - protein, 16 aa, Homo sapiens
  CDR3 for beta chain variable domain of TCR clone 327244 (TRBV15, TRBJ1-5)
CHQQGPPGTRNQPQHF

SEQ ID NO: 654489 - protein, 15 aa, Homo sapiens
  CDR3 for alpha chain variable domain of TCR clone 327245 (TRAV8-3, TRAJ20)
CAVEAKGSNDYKLSF

SEQ ID NO: 654490 - protein, 13 aa, Homo sapiens
  CDR3 for beta chain variable domain of TCR clone 327245 (TRBV19, TRBJ2-5)
CASSETAPETQYF

SEQ ID NO: 654491 - protein, 14 aa, Homo sapiens
  CDR3 for alpha chain variable domain of TCR clone 327246 (TRAV25, TRAJ45)
CARESGGGADGLTF

SEQ ID NO: 654492 - protein, 12 aa, Homo sapiens
  CDR3 for beta chain variable domain of TCR clone 327246 (TRBV7-9, TRBJ2-7)
CASGFDSYEQYF

SEQ ID NO: 654493 - protein, 13 aa, Homo sapiens
  CDR3 for alpha chain variable domain of TCR clone 327247 (TRAV13-1, TRAJ43)
CAASKNNNNDMRC

SEQ ID NO: 654494 - protein, 14 aa, Homo sapiens
  CDR3 for beta chain variable domain of TCR clone 327247 (TRBV14, TRBJ2-1)
CASSQVQGRGEQFF

SEQ ID NO: 654495 - protein, 10 aa, Homo sapiens
  CDR3 for alpha chain variable domain of TCR clone 327248 (TRAV38-2/DV8, TRAJ21)
CAYRSNKFYF

SEQ ID NO: 654496 - protein, 12 aa, Homo sapiens
  CDR3 for beta chain variable domain of TCR clone 327248 (TRBV11-3, TRBJ2-3)
CASSLWEDMQYF

SEQ ID NO: 654497 - protein, 14 aa, Homo sapiens
  CDR3 for alpha chain variable domain of TCR clone 327249 (TRAV29/DV5, TRAJ49)
RAASAQNTGNQFYF

SEQ ID NO: 654498 - protein, 12 aa, Homo sapiens
  CDR3 for beta chain variable domain of TCR clone 327249 (TRBV11-2, TRBJ2-2)
CASSLGGGELFF

SEQ ID NO: 654499 - protein, 12 aa, Homo sapiens
  CDR3 for alpha chain variable domain of TCR clone 327250 (TRAV27, TRAJ9)
CAGECGGFKTIF

SEQ ID NO: 654500 - protein, 18 aa, Homo sapiens
  CDR3 for beta chain variable domain of TCR clone 327250 (TRBV10-2, TRBJ2-2)
CISAPAVHRQADAGELFF

SEQ ID NO: 654501 - protein, 13 aa, Homo sapiens
  CDR3 for alpha chain variable domain of TCR clone 327251 (TRAV12-1, TRAJ34)
CVVLPYNTDKLIF

SEQ ID NO: 654502 - protein, 15 aa, Homo sapiens
  CDR3 for beta chain variable domain of TCR clone 327251 (TRBV7-9, TRBJ1-5)
CASSQGHQPNQPQHF

SEQ ID NO: 654503 - protein, 16 aa, Homo sapiens
  CDR3 for alpha chain variable domain of TCR clone 327252 (TRAV3, TRAJ18)
CAVRDGRGSTLGRLYF

SEQ ID NO: 654504 - protein, 15 aa, Homo sapiens
  CDR3 for beta chain variable domain of TCR clone 327252 (TRBV7-9, TRBJ1-6)
CASSSPGRGNSPLHS

SEQ ID NO: 654505 - protein, 16 aa, Homo sapiens
  CDR3 for alpha chain variable domain of TCR clone 327253 (TRAV12-2, TRAJ48)
CAVNPTSHSGNEKLTF

SEQ ID NO: 654506 - protein, 12 aa, Homo sapiens
  CDR3 for beta chain variable domain of TCR clone 327253 (TRBV9, TRBJ2-3)
CASSLRAGTQYF

SEQ ID NO: 654507 - protein, 12 aa, Homo sapiens
  CDR3 for alpha chain variable domain of TCR clone 327254 (TRAV29/DV5, TRAJ54)
CATSRGAQKLVF

SEQ ID NO: 654508 - protein, 20 aa, Homo sapiens
  CDR3 for beta chain variable domain of TCR clone 327254 (TRBV7-8, TRBJ2-2)
CASSHLFPGPTIHITGELFF

SEQ ID NO: 654509 - protein, 12 aa, Homo sapiens
  CDR3 for alpha chain variable domain of TCR clone 327255 (TRAV16, TRAJ10)
CSRTGGGNKLTL

SEQ ID NO: 654510 - protein, 14 aa, Homo sapiens
  CDR3 for beta chain variable domain of TCR clone 327255 (TRBV6-1, TRBJ1-3)
CASVQGGGWKHHIF

SEQ ID NO: 654511 - protein, 12 aa, Homo sapiens
  CDR3 for alpha chain variable domain of TCR clone 327256 (TRAV13-2, TRAJ8)
CAPWLGFQKLVF

SEQ ID NO: 654512 - protein, 16 aa, Homo sapiens
  CDR3 for beta chain variable domain of TCR clone 327256 (TRBV11-2, TRBJ1-1)
CASSLRQGGEHSKAFF

SEQ ID NO: 654513 - protein, 16 aa, Homo sapiens
  CDR3 for alpha chain variable domain of TCR clone 327257 (TRAV3, TRAJ18)
CAVRDGRGSTLGRLSF

SEQ ID NO: 654514 - protein, 17 aa, Homo sapiens
  CDR3 for beta chain variable domain of TCR clone 327257 (TRBV5-1, TRBJ2-3)
CASSKIGLVDRTDTQYF

SEQ ID NO: 654515 - protein, 17 aa, Homo sapiens
  CDR3 for alpha chain variable domain of TCR clone 327258 (TRAV3, TRAJ12)
CAVRNGGRMDSSYKLIF

SEQ ID NO: 654516 - protein, 16 aa, Homo sapiens
  CDR3 for beta chain variable domain of TCR clone 327258 (TRBV12-5, TRBJ2-5)
CASGPRTSGNQETQYF

SEQ ID NO: 654517 - protein, 15 aa, Homo sapiens
  CDR3 for alpha chain variable domain of TCR clone 327259 (TRAV12-1, TRAJ40)
CVVNRDTSGTYKYIF

SEQ ID NO: 654518 - protein, 14 aa, Homo sapiens
  CDR3 for beta chain variable domain of TCR clone 327259 (TRBV19, TRBJ1-5)
CASRAPDSFLSQHF

SEQ ID NO: 654519 - protein, 13 aa, Homo sapiens
  CDR3 for alpha chain variable domain of TCR clone 327260 (TRAV3, TRAJ27)
CAVRPLGAGKSTF

SEQ ID NO: 654520 - protein, 15 aa, Homo sapiens
  CDR3 for beta chain variable domain of TCR clone 327260 (TRBV7-2, TRBJ2-7)
CASSLKGALTYEQYF

SEQ ID NO: 654521 - protein, 14 aa, Homo sapiens
  CDR3 for alpha chain variable domain of TCR clone 327261 (TRAV12-3, TRAJ33)
CAMSVPGSNYQLIW

SEQ ID NO: 654522 - protein, 13 aa, Homo sapiens
  CDR3 for beta chain variable domain of TCR clone 327261 (TRBV19, TRBJ1-2)
CASSQGQVYGYTF

SEQ ID NO: 654523 - protein, 12 aa, Homo sapiens
  CDR3 for alpha chain variable domain of TCR clone 327262 (TRAV8-1, TRAJ6)
CASLGGSYIPTF

SEQ ID NO: 654524 - protein, 12 aa, Homo sapiens
  CDR3 for beta chain variable domain of TCR clone 327262 (TRBV19, TRBJ1-1)
CASMNRYTEAFF

SEQ ID NO: 654525 - protein, 13 aa, Homo sapiens
  CDR3 for alpha chain variable domain of TCR clone 327263 (TRAV12-3, TRAJ47)
CAMKKEYGNKLVF

SEQ ID NO: 654526 - protein, 17 aa, Homo sapiens
  CDR3 for beta chain variable domain of TCR clone 327263 (TRBV11-2, TRBJ2-1)
CASSLCPPGVEYNEQFF

SEQ ID NO: 654527 - protein, 15 aa, Homo sapiens
  CDR3 for alpha chain variable domain of TCR clone 327264 (TRAV20, TRAJ6)
CAVRLQSGGSYIPTF

SEQ ID NO: 654528 - protein, 14 aa, Homo sapiens
  CDR3 for beta chain variable domain of TCR clone 327264 (TRBV12-3, TRBJ2-7)
CASSASGGWYEQYF

SEQ ID NO: 654529 - protein, 13 aa, Homo sapiens
  CDR3 for alpha chain variable domain of TCR clone 327265 (TRAV30, TRAJ6)
CGFIEGGSNIPTF

SEQ ID NO: 654530 - protein, 13 aa, Homo sapiens
  CDR3 for beta chain variable domain of TCR clone 327265 (TRBV5-4, TRBJ2-5)
CASSPVSQETQYF

SEQ ID NO: 654531 - protein, 16 aa, Homo sapiens
  CDR3 for alpha chain variable domain of TCR clone 327266 (TRAV3, TRAJ37)
CAVRGKGSGNTGKLIL

SEQ ID NO: 654532 - protein, 20 aa, Homo sapiens
  CDR3 for beta chain variable domain of TCR clone 327266 (TRBV7-8, TRBJ2-2)
CASSRLFPGPTIHITGELFF

SEQ ID NO: 654533 - protein, 15 aa, Homo sapiens
  CDR3 for alpha chain variable domain of TCR clone 327267 (TRAV3, TRAJ32)
RAVSSYGGATDKLIF

SEQ ID NO: 654534 - protein, 13 aa, Homo sapiens
  CDR3 for beta chain variable domain of TCR clone 327267 (TRBV20-1, TRBJ2-7)
CSARPSTNYEQYF

SEQ ID NO: 654535 - protein, 11 aa, Homo sapiens
  CDR3 for alpha chain variable domain of TCR clone 327268 (TRAV27, TRAJ45)
CAGAQAEVLTD

SEQ ID NO: 654536 - protein, 17 aa, Homo sapiens
  CDR3 for beta chain variable domain of TCR clone 327268 (TRBV10-3, TRBJ2-4)
CTSVPSVNKGSKNIQYF

SEQ ID NO: 654537 - protein, 18 aa, Homo sapiens
  CDR3 for alpha chain variable domain of TCR clone 327269 (TRAV21, TRAJ53)
CAVKGGENSGGSNDKLTF

SEQ ID NO: 654538 - protein, 13 aa, Homo sapiens
  CDR3 for beta chain variable domain of TCR clone 327269 (TRBV12-4, TRBJ1-1)
CASSPGTGFEAFF

SEQ ID NO: 654539 - protein, 14 aa, Homo sapiens
  CDR3 for alpha chain variable domain of TCR clone 327270 (TRAV16, TRAJ33)
CALSAMDSNNQLIW

SEQ ID NO: 654540 - protein, 12 aa, Homo sapiens
  CDR3 for beta chain variable domain of TCR clone 327270 (TRBV5-1, TRBJ1-2)
CASSQDTYGYTF

SEQ ID NO: 654541 - protein, 17 aa, Homo sapiens
  CDR3 for alpha chain variable domain of TCR clone 327271 (TRAV27, TRAJ42)
CAERVIYYGGSQGNLIF

SEQ ID NO: 654542 - protein, 15 aa, Homo sapiens
  CDR3 for beta chain variable domain of TCR clone 327271 (TRBV13, TRBJ1-2)
CASSLGRQPGYGYTF

SEQ ID NO: 654543 - protein, 14 aa, Homo sapiens
  CDR3 for alpha chain variable domain of TCR clone 327272 (TRAV8-3, TRAJ13)
CAVGAQEGYQNVTF

SEQ ID NO: 654544 - protein, 15 aa, Homo sapiens
  CDR3 for beta chain variable domain of TCR clone 327272 (TRBV3-1, TRBJ1-1)
CASKMRATMNTEAFF

SEQ ID NO: 654545 - protein, 15 aa, Homo sapiens
  CDR3 for alpha chain variable domain of TCR clone 327273 (TRAV8-6, TRAJ10)
CAVSDQAGGGNKLTF

SEQ ID NO: 654546 - protein, 19 aa, Homo sapiens
  CDR3 for beta chain variable domain of TCR clone 327273 (TRBV11-2, TRBJ2-3)
CASSAPRAGGNPSTDTQYF

SEQ ID NO: 654547 - protein, 15 aa, Homo sapiens
  CDR3 for alpha chain variable domain of TCR clone 327274 (TRAV3, TRAJ32)
CDLSSYGGATNKLIF

SEQ ID NO: 654548 - protein, 13 aa, Homo sapiens
  CDR3 for beta chain variable domain of TCR clone 327274 (TRBV20-1, TRBJ2-7)
CSARPSTNYEQYF

SEQ ID NO: 654549 - protein, 18 aa, Homo sapiens
  CDR3 for alpha chain variable domain of TCR clone 327275 (TRAV12-2, )
CAVEDIQNPDPAVYQLRD

SEQ ID NO: 654550 - protein, 14 aa, Homo sapiens
  CDR3 for beta chain variable domain of TCR clone 327275 (TRBV12-4, TRBJ1-3)
CASSLRGTGNTIYF

SEQ ID NO: 654551 - protein, 14 aa, Homo sapiens
  CDR3 for alpha chain variable domain of TCR clone 327276 (TRAV12-2, TRAJ13)
CAAKKTGGYQKVTF

SEQ ID NO: 654552 - protein, 14 aa, Homo sapiens
  CDR3 for beta chain variable domain of TCR clone 327276 (TRBV10-3, TRBJ2-1)
CAISSDLAYNEQFF

SEQ ID NO: 654553 - protein, 13 aa, Homo sapiens
  CDR3 for alpha chain variable domain of TCR clone 327277 (TRAV8-3, TRAJ43)
CAVVPYNNNDMPF

SEQ ID NO: 654554 - protein, 17 aa, Homo sapiens
  CDR3 for beta chain variable domain of TCR clone 327277 (TRBV7-7, TRBJ1-1)
CASIGDRPNLGVTEAFF

SEQ ID NO: 654555 - protein, 11 aa, Homo sapiens
  CDR3 for alpha chain variable domain of TCR clone 327278 (TRAV12-3, TRAJ16)
CAIRDGQKLLF

SEQ ID NO: 654556 - protein, 14 aa, Homo sapiens
  CDR3 for beta chain variable domain of TCR clone 327278 (TRBV7-2, TRBJ2-7)
CASSPKTSFYEQYF

SEQ ID NO: 654557 - protein, 13 aa, Homo sapiens
  CDR3 for alpha chain variable domain of TCR clone 327279 (TRAV36/DV7, TRAJ21)
CAVEAYNFNKFYF

SEQ ID NO: 654558 - protein, 14 aa, Homo sapiens
  CDR3 for beta chain variable domain of TCR clone 327279 (TRBV11-2, TRBJ2-5)
CASRPLAGRETQYF

SEQ ID NO: 654559 - protein, 16 aa, Homo sapiens
  CDR3 for alpha chain variable domain of TCR clone 327280 (TRAV12-2, TRAJ32)
CAVNLGQGGATNKLIF

SEQ ID NO: 654560 - protein, 15 aa, Homo sapiens
  CDR3 for beta chain variable domain of TCR clone 327280 (TRBV20-1, TRBJ2-7)
CSARGPLAGGREQYL

SEQ ID NO: 654561 - protein, 18 aa, Homo sapiens
  CDR3 for alpha chain variable domain of TCR clone 327281 (TRAV12-3, TRAJ52)
CAMSVGGAGGTSYGKLTF

SEQ ID NO: 654562 - protein, 16 aa, Homo sapiens
  CDR3 for beta chain variable domain of TCR clone 327281 (TRBV7-8, TRBJ2-3)
CASSLIGGPSTDTQYF

SEQ ID NO: 654563 - protein, 16 aa, Homo sapiens
  CDR3 for alpha chain variable domain of TCR clone 327282 (TRAV27, TRAJ53)
CAAPEGSGGSNYKLTF

SEQ ID NO: 654564 - protein, 18 aa, Homo sapiens
  CDR3 for beta chain variable domain of TCR clone 327282 (TRBV11-2, TRBJ2-3)
CASSLGGASRGAPNTQYF

SEQ ID NO: 654565 - protein, 14 aa, Homo sapiens
  CDR3 for alpha chain variable domain of TCR clone 327283 (TRAV8-3, TRAJ4)
CAVGASGGYNKLIF

SEQ ID NO: 654566 - protein, 18 aa, Homo sapiens
  CDR3 for beta chain variable domain of TCR clone 327283 (TRBV27, TRBJ2-3)
CASSKGTSGRTSTDTQYF

SEQ ID NO: 654567 - protein, 13 aa, Homo sapiens
  CDR3 for alpha chain variable domain of TCR clone 327284 (TRAV1-2, TRAJ9)
CAVLNTGGFKTIF

SEQ ID NO: 654568 - protein, 13 aa, Homo sapiens
  CDR3 for beta chain variable domain of TCR clone 327284 (TRBV7-9, TRBJ1-2)
CASSLKQNYGYTF

SEQ ID NO: 654569 - protein, 13 aa, Homo sapiens
  CDR3 for alpha chain variable domain of TCR clone 327285 (TRAV21, TRAJ20)
CAVGLSVDYKLSF

SEQ ID NO: 654570 - protein, 16 aa, Homo sapiens
  CDR3 for beta chain variable domain of TCR clone 327285 (TRBV20-1, TRBJ1-4)
CSAPGQGLLTNEKLFF

SEQ ID NO: 654571 - protein, 11 aa, Homo sapiens
  CDR3 for alpha chain variable domain of TCR clone 327286 (TRAV4, TRAJ31)
CLVGLNARLMF

SEQ ID NO: 654572 - protein, 16 aa, Homo sapiens
  CDR3 for beta chain variable domain of TCR clone 327286 (TRBV15, TRBJ2-6)
CATSVNGGFLANVLIF

SEQ ID NO: 654573 - protein, 12 aa, Homo sapiens
  CDR3 for alpha chain variable domain of TCR clone 327287 (TRAV13-1, TRAJ21)
GAAKEGFNKFYF

SEQ ID NO: 654574 - protein, 14 aa, Homo sapiens
  CDR3 for beta chain variable domain of TCR clone 327287 (TRBV18, TRBJ2-7)
CASSPRGGAYEQYF

SEQ ID NO: 654575 - protein, 18 aa, Homo sapiens
  CDR3 for alpha chain variable domain of TCR clone 327288 (TRAV26-2, TRAJ45)
CILRVDKYSGGGAEGLTF

SEQ ID NO: 654576 - protein, 14 aa, Homo sapiens
  CDR3 for beta chain variable domain of TCR clone 327288 (TRBV7-2, TRBJ2-7)
CASRSQGAAYEQYF

SEQ ID NO: 654577 - protein, 16 aa, Homo sapiens
  CDR3 for alpha chain variable domain of TCR clone 327289 (TRAV30, TRAJ24)
CGTEIVDADSWGKFQF

SEQ ID NO: 654578 - protein, 16 aa, Homo sapiens
  CDR3 for beta chain variable domain of TCR clone 327289 (TRBV9, TRBJ2-2)
CASSPTSGGGTGELFF

SEQ ID NO: 654579 - protein, 15 aa, Homo sapiens
  CDR3 for alpha chain variable domain of TCR clone 327290 (TRAV3, TRAJ13)
CAVRVYSGGYQRVTF

SEQ ID NO: 654580 - protein, 15 aa, Homo sapiens
  CDR3 for beta chain variable domain of TCR clone 327290 (TRBV5-7, TRBJ1-2)
CASSLGVAANYGYTF

SEQ ID NO: 654581 - protein, 13 aa, Homo sapiens
  CDR3 for alpha chain variable domain of TCR clone 327291 (TRAV21, TRAJ27)
CAARPGNAGKSTF

SEQ ID NO: 654582 - protein, 14 aa, Homo sapiens
  CDR3 for beta chain variable domain of TCR clone 327291 (TRBV11-2, TRBJ2-7)
CASSLGAGSYEQYF

SEQ ID NO: 654583 - protein, 16 aa, Homo sapiens
  CDR3 for alpha chain variable domain of TCR clone 327292 (TRAV21, TRAJ52)
CAVTNAGGTSYGKLTF

SEQ ID NO: 654584 - protein, 16 aa, Homo sapiens
  CDR3 for beta chain variable domain of TCR clone 327292 (TRBV2, TRBJ2-1)
CAISVGGSLSYNEQFF

SEQ ID NO: 654585 - protein, 23 aa, Homo sapiens
  CDR3 for alpha chain variable domain of TCR clone 327293 (TRAV1-1, TRAJ11)
LLQELQMKNSASYFCAGYSTLTF

SEQ ID NO: 654586 - protein, 15 aa, Homo sapiens
  CDR3 for beta chain variable domain of TCR clone 327293 (TRBV6-5, TRBJ2-1)
CASRGDFDSYNEQFF

SEQ ID NO: 654587 - protein, 14 aa, Homo sapiens
  CDR3 for alpha chain variable domain of TCR clone 327294 (TRAV12-2, TRAJ17)
CAALFKAAGNKLTF

SEQ ID NO: 654588 - protein, 13 aa, Homo sapiens
  CDR3 for beta chain variable domain of TCR clone 327294 (TRBV10-3, TRBJ2-7)
CASKLAVNYEQYF

SEQ ID NO: 654589 - protein, 10 aa, Homo sapiens
  CDR3 for alpha chain variable domain of TCR clone 327295 (TRAV12-3, TRAJ34)
FAMSADKLIF

SEQ ID NO: 654590 - protein, 15 aa, Homo sapiens
  CDR3 for beta chain variable domain of TCR clone 327295 (TRBV27, TRBJ2-1)
CSSSNGGGSSNEQFF

SEQ ID NO: 654591 - protein, 12 aa, Homo sapiens
  CDR3 for alpha chain variable domain of TCR clone 327296 (TRAV21, TRAJ49)
CAVNDGGDQFYF

SEQ ID NO: 654592 - protein, 14 aa, Homo sapiens
  CDR3 for beta chain variable domain of TCR clone 327296 (TRBV12-5, TRBJ2-5)
CASGSRTHQETQYF

SEQ ID NO: 654593 - protein, 14 aa, Homo sapiens
  CDR3 for alpha chain variable domain of TCR clone 327297 (TRAV17, TRAJ35)
CATDRLGFGNVLHC

SEQ ID NO: 654594 - protein, 14 aa, Homo sapiens
  CDR3 for beta chain variable domain of TCR clone 327297 (TRBV7-8, TRBJ2-3)
CASSLEAGTDTQYF

SEQ ID NO: 654595 - protein, 13 aa, Homo sapiens
  CDR3 for alpha chain variable domain of TCR clone 327298 (TRAV2, TRAJ15)
CAVASQAGTALIF

SEQ ID NO: 654596 - protein, 13 aa, Homo sapiens
  CDR3 for beta chain variable domain of TCR clone 327298 (TRBV20-1, TRBJ1-1)
CSARLGQGTEAFF

SEQ ID NO: 654597 - protein, 13 aa, Homo sapiens
  CDR3 for alpha chain variable domain of TCR clone 327299 (TRAV8-1, TRAJ30)
CAVIMNRDDKIIF

SEQ ID NO: 654598 - protein, 14 aa, Homo sapiens
  CDR3 for beta chain variable domain of TCR clone 327299 (TRBV7-2, TRBJ1-1)
CASSFLTGTTEAFF

SEQ ID NO: 654599 - protein, 14 aa, Homo sapiens
  CDR3 for alpha chain variable domain of TCR clone 327300 (TRAV12-3, TRAJ10)
CHLPLTGGGNKLTF

SEQ ID NO: 654600 - protein, 14 aa, Homo sapiens
  CDR3 for beta chain variable domain of TCR clone 327300 (TRBV6-1, TRBJ1-3)
CASVQGGGGNTIYF

SEQ ID NO: 654601 - protein, 13 aa, Homo sapiens
  CDR3 for alpha chain variable domain of TCR clone 327301 (TRAV39, TRAJ58)
CAGEETSCSRLTF

SEQ ID NO: 654602 - protein, 15 aa, Homo sapiens
  CDR3 for beta chain variable domain of TCR clone 327301 (TRBV20-1, TRBJ2-7)
CSARDRVSGMDEQYF

SEQ ID NO: 654603 - protein, 16 aa, Homo sapiens
  CDR3 for alpha chain variable domain of TCR clone 327302 (TRAV30, TRAJ24)
CGPGIVDADSWGKFQF

SEQ ID NO: 654604 - protein, 14 aa, Homo sapiens
  CDR3 for beta chain variable domain of TCR clone 327302 (TRBV12-5, TRBJ2-5)
CASDSRTHQETQYF

SEQ ID NO: 654605 - protein, 14 aa, Homo sapiens
  CDR3 for alpha chain variable domain of TCR clone 327303 (TRAV38-1, TRAJ45)
CAYYSGGGADGLTF

SEQ ID NO: 654606 - protein, 14 aa, Homo sapiens
  CDR3 for beta chain variable domain of TCR clone 327303 (TRBV25-1, TRBJ1-1)
CASTHLGGNTGAFF

SEQ ID NO: 654607 - protein, 15 aa, Homo sapiens
  CDR3 for alpha chain variable domain of TCR clone 327304 (TRAV12-1, TRAJ9)
CVVSFGDTGGFKTIF

SEQ ID NO: 654608 - protein, 15 aa, Homo sapiens
  CDR3 for beta chain variable domain of TCR clone 327304 (TRBV20-1, TRBJ1-1)
CSASRGVTGNTEAFF

SEQ ID NO: 654609 - protein, 15 aa, Homo sapiens
  CDR3 for alpha chain variable domain of TCR clone 327305 (TRAV40, TRAJ45)
CLLGGLGGGADGLTF

SEQ ID NO: 654610 - protein, 13 aa, Homo sapiens
  CDR3 for beta chain variable domain of TCR clone 327305 (TRBV7-9, TRBJ1-2)
CASSLKQNYGYTF

SEQ ID NO: 654611 - protein, 14 aa, Homo sapiens
  CDR3 for alpha chain variable domain of TCR clone 327306 (TRAV1-1, TRAJ27)
CAVIYNTNAGESTF

SEQ ID NO: 654612 - protein, 14 aa, Homo sapiens
  CDR3 for beta chain variable domain of TCR clone 327306 (TRBV25-1, TRBJ1-1)
CASTHLGGNTEAFF

SEQ ID NO: 654613 - protein, 15 aa, Homo sapiens
  CDR3 for alpha chain variable domain of TCR clone 327307 (TRAV20, TRAJ53)
CAVQARGGSNYKLTF

SEQ ID NO: 654614 - protein, 12 aa, Homo sapiens
  CDR3 for beta chain variable domain of TCR clone 327307 (TRBV7-2, TRBJ2-1)
CASSPQDIEQFF

SEQ ID NO: 654615 - protein, 13 aa, Homo sapiens
  CDR3 for alpha chain variable domain of TCR clone 327308 (TRAV30, TRAJ34)
CGTVGYNTDKLIF

SEQ ID NO: 654616 - protein, 16 aa, Homo sapiens
  CDR3 for beta chain variable domain of TCR clone 327308 (TRBV7-9, TRBJ1-2)
RASSLGFSSGEDGYTF

SEQ ID NO: 654617 - protein, 14 aa, Homo sapiens
  CDR3 for alpha chain variable domain of TCR clone 327309 (TRAV25, TRAJ21)
CADYTTSTNFTLDL

SEQ ID NO: 654618 - protein, 14 aa, Homo sapiens
  CDR3 for beta chain variable domain of TCR clone 327309 (TRBV7-6, TRBJ2-3)
CASSLGTVTDTQYF

SEQ ID NO: 654619 - protein, 14 aa, Homo sapiens
  CDR3 for alpha chain variable domain of TCR clone 327310 (TRAV8-3, TRAJ4)
CAVGASGGYNKLIF

SEQ ID NO: 654620 - protein, 16 aa, Homo sapiens
  CDR3 for beta chain variable domain of TCR clone 327310 (TRBV12-4, TRBJ1-5)
CASSRPVGGSNQSQHF

SEQ ID NO: 654621 - protein, 14 aa, Homo sapiens
  CDR3 for alpha chain variable domain of TCR clone 327311 (TRAV12-3, TRAJ29)
CAMSSYSGNTPLVF

SEQ ID NO: 654622 - protein, 15 aa, Homo sapiens
  CDR3 for beta chain variable domain of TCR clone 327311 (TRBV5-1, TRBJ2-3)
CASSPGGARTDAQYF

SEQ ID NO: 654623 - protein, 17 aa, Homo sapiens
  CDR3 for alpha chain variable domain of TCR clone 327312 (TRAV27, TRAJ42)
CAERVIYYGGSQGNLIF

SEQ ID NO: 654624 - protein, 15 aa, Homo sapiens
  CDR3 for beta chain variable domain of TCR clone 327312 (TRBV5-1, TRBJ2-1)
CASSLEGLAANEQFF

SEQ ID NO: 654625 - protein, 13 aa, Homo sapiens
  CDR3 for alpha chain variable domain of TCR clone 327313 (TRAV8-3, TRAJ39)
CAVGANNAGDMLT

SEQ ID NO: 654626 - protein, 16 aa, Homo sapiens
  CDR3 for beta chain variable domain of TCR clone 327313 (TRBV6-1, TRBJ2-5)
CASSETLDRGAETQYF

SEQ ID NO: 654627 - protein, 13 aa, Homo sapiens
  CDR3 for alpha chain variable domain of TCR clone 327314 (TRAV12-2, TRAJ20)
CAVYPSNDYKLRF

SEQ ID NO: 654628 - protein, 15 aa, Homo sapiens
  CDR3 for beta chain variable domain of TCR clone 327314 (TRBV6-1, TRBJ2-5)
CASSEGWGIQETQYF

SEQ ID NO: 654629 - protein, 13 aa, Homo sapiens
  CDR3 for alpha chain variable domain of TCR clone 327315 (TRAV2, TRAJ40)
CAVVTSGTYKYIF

SEQ ID NO: 654630 - protein, 14 aa, Homo sapiens
  CDR3 for beta chain variable domain of TCR clone 327315 (TRBV11-2, TRBJ2-7)
CASSSGAGAYEQYF

SEQ ID NO: 654631 - protein, 14 aa, Homo sapiens
  CDR3 for alpha chain variable domain of TCR clone 327316 (TRAV30, TRAJ26)
CGTEIVSYGQNFVF

SEQ ID NO: 654632 - protein, 13 aa, Homo sapiens
  CDR3 for beta chain variable domain of TCR clone 327316 (TRBV19, TRBJ1-3)
CASRLSHGNTIYF

SEQ ID NO: 654633 - protein, 16 aa, Homo sapiens
  CDR3 for alpha chain variable domain of TCR clone 327317 (TRAV3, TRAJ18)
CAVRDGRGSTLGRLYF

SEQ ID NO: 654634 - protein, 15 aa, Homo sapiens
  CDR3 for beta chain variable domain of TCR clone 327317 (TRBV7-9, TRBJ1-6)
SASSPPGRGNSPLHF

SEQ ID NO: 654635 - protein, 13 aa, Homo sapiens
  CDR3 for alpha chain variable domain of TCR clone 327318 (TRAV27, TRAJ41)
CAGEGNSGYALNF

SEQ ID NO: 654636 - protein, 15 aa, Homo sapiens
  CDR3 for beta chain variable domain of TCR clone 327318 (TRBV19, TRBJ2-1)
CASSTGTSSYNEQFF

SEQ ID NO: 654637 - protein, 14 aa, Homo sapiens
  CDR3 for alpha chain variable domain of TCR clone 327319 (TRAV17, TRAJ6)
CATDASGGSYIPTF

SEQ ID NO: 654638 - protein, 12 aa, Homo sapiens
  CDR3 for beta chain variable domain of TCR clone 327319 (TRBV4-3, TRBJ2-7)
IGWQVTPYEQYF

SEQ ID NO: 654639 - protein, 18 aa, Homo sapiens
  CDR3 for alpha chain variable domain of TCR clone 327320 (TRAV13-1, TRAJ52)
CAAKNPNAGGTSNGKLTF

SEQ ID NO: 654640 - protein, 17 aa, Homo sapiens
  CDR3 for beta chain variable domain of TCR clone 327320 (TRBV10-3, TRBJ2-6)
CAISESTAPSGANVLTF

SEQ ID NO: 654641 - protein, 17 aa, Homo sapiens
  CDR3 for alpha chain variable domain of TCR clone 327321 (TRAV16, TRAJ42)
YALSPKLYGGSQGNLIF

SEQ ID NO: 654642 - protein, 13 aa, Homo sapiens
  CDR3 for beta chain variable domain of TCR clone 327321 (TRBV19, TRBJ1-5)
CASSTRRDQPQHF

SEQ ID NO: 654643 - protein, 16 aa, Homo sapiens
  CDR3 for alpha chain variable domain of TCR clone 327322 (TRAV13-1, TRAJ48)
CSKYRESNFANEKLTF

SEQ ID NO: 654644 - protein, 17 aa, Homo sapiens
  CDR3 for beta chain variable domain of TCR clone 327322 (TRBV28, TRBJ2-1)
CASSSARQALTYNEQFF

SEQ ID NO: 654645 - protein, 16 aa, Homo sapiens
  CDR3 for alpha chain variable domain of TCR clone 327323 (TRAV13-1, TRAJ45)
CPARGSRKGGADGLTF

SEQ ID NO: 654646 - protein, 13 aa, Homo sapiens
  CDR3 for beta chain variable domain of TCR clone 327323 (TRBV12-4, TRBJ2-5)
CASRKRGKETQYF

SEQ ID NO: 654647 - protein, 12 aa, Homo sapiens
  CDR3 for alpha chain variable domain of TCR clone 327324 (TRAV12-3, TRAJ17)
CAMTLTGNKLTF

SEQ ID NO: 654648 - protein, 12 aa, Homo sapiens
  CDR3 for beta chain variable domain of TCR clone 327324 (TRBV24-1, TRBJ2-3)
CATSDSTDTQYF

SEQ ID NO: 654649 - protein, 15 aa, Homo sapiens
  CDR3 for alpha chain variable domain of TCR clone 327325 (TRAV29/DV5, TRAJ53)
CAASASGGSNYKLTF

SEQ ID NO: 654650 - protein, 14 aa, Homo sapiens
  CDR3 for beta chain variable domain of TCR clone 327325 (TRBV7-9, TRBJ2-5)
CASSLVGGEETQYF

SEQ ID NO: 654651 - protein, 14 aa, Homo sapiens
  CDR3 for alpha chain variable domain of TCR clone 327326 (TRAV9-2, TRAJ39)
CALYIYNARNMLTF

SEQ ID NO: 654652 - protein, 13 aa, Homo sapiens
  CDR3 for beta chain variable domain of TCR clone 327326 (TRBV20-1, TRBJ1-1)
CSAGTVGNTEAFF

SEQ ID NO: 654653 - protein, 11 aa, Homo sapiens
  CDR3 for alpha chain variable domain of TCR clone 327327 (TRAV21, TRAJ11)
CAVNGYSTLTF

SEQ ID NO: 654654 - protein, 16 aa, Homo sapiens
  CDR3 for beta chain variable domain of TCR clone 327327 (TRBV19, TRBJ2-1)
CASSKAGPSSYMSSSS

SEQ ID NO: 654655 - protein, 21 aa, Homo sapiens
  CDR3 for alpha chain variable domain of TCR clone 327328 (TRAV1-1, TRAJ30)
CLLLLRCERVGGENRDDKIIF

SEQ ID NO: 654656 - protein, 15 aa, Homo sapiens
  CDR3 for beta chain variable domain of TCR clone 327328 (TRBV7-3, TRBJ2-1)
CASSLSSGSFDEHFF

SEQ ID NO: 654657 - protein, 16 aa, Homo sapiens
  CDR3 for alpha chain variable domain of TCR clone 327329 (TRAV16, TRAJ4)
CALSRMFSGGYNKLIF

SEQ ID NO: 654658 - protein, 14 aa, Homo sapiens
  CDR3 for beta chain variable domain of TCR clone 327329 (TRBV11-1, TRBJ2-7)
CASSFRQGSYEQYF

SEQ ID NO: 654659 - protein, 15 aa, Homo sapiens
  CDR3 for alpha chain variable domain of TCR clone 327330 (TRAV26-1, TRAJ28)
FIVRVAGAGSYQLTF

SEQ ID NO: 654660 - protein, 19 aa, Homo sapiens
  CDR3 for beta chain variable domain of TCR clone 327330 (TRBV7-3, TRBJ2-7)
CASSLTGVAGGWPSYEQYF

SEQ ID NO: 654661 - protein, 14 aa, Homo sapiens
  CDR3 for alpha chain variable domain of TCR clone 327331 (TRAV26-1, TRAJ40)
CIVRVSRGTYKYIF

SEQ ID NO: 654662 - protein, 14 aa, Homo sapiens
  CDR3 for beta chain variable domain of TCR clone 327331 (TRBV7-3, TRBJ2-7)
CASSLKADSYEQYF

SEQ ID NO: 654663 - protein, 12 aa, Homo sapiens
  CDR3 for alpha chain variable domain of TCR clone 327332 (TRAV3, TRAJ20)
CAVGDPDYKLSF

SEQ ID NO: 654664 - protein, 15 aa, Homo sapiens
  CDR3 for beta chain variable domain of TCR clone 327332 (TRBV2, TRBJ2-2)
CASSRETVGTGELFF

SEQ ID NO: 654665 - protein, 11 aa, Homo sapiens
  CDR3 for alpha chain variable domain of TCR clone 327333 (TRAV2, TRAJ33)
CAVESNYQLIW

SEQ ID NO: 654666 - protein, 13 aa, Homo sapiens
  CDR3 for beta chain variable domain of TCR clone 327333 (TRBV27, TRBJ2-7)
CASSLRHRYEQYF

SEQ ID NO: 654667 - protein, 12 aa, Homo sapiens
  CDR3 for alpha chain variable domain of TCR clone 327334 (TRAV30, TRAJ20)
CGTESNDYKLSF

SEQ ID NO: 654668 - protein, 15 aa, Homo sapiens
  CDR3 for beta chain variable domain of TCR clone 327334 (TRBV27, TRBJ2-1)
CASSNGGGSSNEQFF

SEQ ID NO: 654669 - protein, 13 aa, Homo sapiens
  CDR3 for alpha chain variable domain of TCR clone 327335 (TRAV16, TRAJ34)
CITVLSHTDKLIF

SEQ ID NO: 654670 - protein, 15 aa, Homo sapiens
  CDR3 for beta chain variable domain of TCR clone 327335 (TRBV25-1, TRBJ1-4)
CASSKRIATNEKLFF

SEQ ID NO: 654671 - protein, 12 aa, Homo sapiens
  CDR3 for alpha chain variable domain of TCR clone 327336 (TRAV13-1, TRAJ43)
CAAGRFNNDMRF

SEQ ID NO: 654672 - protein, 14 aa, Homo sapiens
  CDR3 for beta chain variable domain of TCR clone 327336 (TRBV7-2, TRBJ2-7)
CASRSQGAAYEQYF

SEQ ID NO: 654673 - protein, 15 aa, Homo sapiens
  CDR3 for alpha chain variable domain of TCR clone 327337 (TRAV3, TRAJ32)
CAVSSYVGATSKLIF

SEQ ID NO: 654674 - protein, 11 aa, Homo sapiens
  CDR3 for beta chain variable domain of TCR clone 327337 (TRBV29-1, TRBJ2-5)
CSEDRTGTQYF

SEQ ID NO: 654675 - protein, 18 aa, Homo sapiens
  CDR3 for alpha chain variable domain of TCR clone 327338 (TRAV26-2, TRAJ54)
CILRDVEVGIQGAQKLVI

SEQ ID NO: 654676 - protein, 17 aa, Homo sapiens
  CDR3 for beta chain variable domain of TCR clone 327338 (TRBV20-1, TRBJ1-5)
CSASLSPGQGGNQPQHF

SEQ ID NO: 654677 - protein, 15 aa, Homo sapiens
  CDR3 for alpha chain variable domain of TCR clone 327339 (TRAV3, TRAJ20)
CAVRDIKLSHYKLSF

SEQ ID NO: 654678 - protein, 15 aa, Homo sapiens
  CDR3 for beta chain variable domain of TCR clone 327339 (TRBV7-9, TRBJ1-6)
CASSSPGRGNSPLHF

SEQ ID NO: 654679 - protein, 18 aa, Homo sapiens
  CDR3 for alpha chain variable domain of TCR clone 327340 (TRAV13-1, TRAJ52)
CAASKRRAGGTSYGKLTF

SEQ ID NO: 654680 - protein, 13 aa, Homo sapiens
  CDR3 for beta chain variable domain of TCR clone 327340 (TRBV12-4, TRBJ1-2)
CASSLRQGKGYTV

SEQ ID NO: 654681 - protein, 13 aa, Homo sapiens
  CDR3 for alpha chain variable domain of TCR clone 327341 (TRAV12-2, TRAJ3)
CAAPYSSASKIIF

SEQ ID NO: 654682 - protein, 18 aa, Homo sapiens
  CDR3 for beta chain variable domain of TCR clone 327341 (TRBV4-1, TRBJ1-5)
CASSQGPPGAGGNQPQHF

SEQ ID NO: 654683 - protein, 15 aa, Homo sapiens
  CDR3 for alpha chain variable domain of TCR clone 327342 (TRAV26-1, TRAJ48)
CIVRVGDFGNEKLTF

SEQ ID NO: 654684 - protein, 16 aa, Homo sapiens
  CDR3 for beta chain variable domain of TCR clone 327342 (TRBV4-1, TRBJ2-3)
CASSQRAGGLTDTQYC

SEQ ID NO: 654685 - protein, 15 aa, Homo sapiens
  CDR3 for alpha chain variable domain of TCR clone 327343 (TRAV21, TRAJ24)
CAARCSTDSWGKLQF

SEQ ID NO: 654686 - protein, 13 aa, Homo sapiens
  CDR3 for beta chain variable domain of TCR clone 327343 (TRBV11-2, TRBJ2-5)
CASSSTGEETQYF

SEQ ID NO: 654687 - protein, 11 aa, Homo sapiens
  CDR3 for alpha chain variable domain of TCR clone 327344 (TRAV1-1, TRAJ23)
CAVRQGGKLIF

SEQ ID NO: 654688 - protein, 20 aa, Homo sapiens
  CDR3 for beta chain variable domain of TCR clone 327344 (TRBV7-8, TRBJ2-2)
CASSHLFPGPTVHITGELFV

SEQ ID NO: 654689 - protein, 17 aa, Homo sapiens
  CDR3 for alpha chain variable domain of TCR clone 327345 (TRAV27, TRAJ18)
CAGLHRGRGSTLWRLYF

SEQ ID NO: 654690 - protein, 14 aa, Homo sapiens
  CDR3 for beta chain variable domain of TCR clone 327345 (TRBV20-1, TRBJ1-5)
CSARGRGSNQPQHF

SEQ ID NO: 654691 - protein, 12 aa, Homo sapiens
  CDR3 for alpha chain variable domain of TCR clone 327346 (TRAV8-3, TRAJ41)
CAVALSGYALHF

SEQ ID NO: 654692 - protein, 18 aa, Homo sapiens
  CDR3 for beta chain variable domain of TCR clone 327346 (TRBV20-1, TRBJ2-6)
CSAETTPTHGSGANVLTF

SEQ ID NO: 654693 - protein, 14 aa, Homo sapiens
  CDR3 for alpha chain variable domain of TCR clone 327347 (TRAV3, TRAJ27)
CAVSDDTNAGKSTF

SEQ ID NO: 654694 - protein, 15 aa, Homo sapiens
  CDR3 for beta chain variable domain of TCR clone 327347 (TRBV7-7, TRBJ2-2)
CATSKLAKNTGELFF

SEQ ID NO: 654695 - protein, 14 aa, Homo sapiens
  CDR3 for alpha chain variable domain of TCR clone 327348 (TRAV12-3, TRAJ47)
CAMSVREYGNKLVI

SEQ ID NO: 654696 - protein, 15 aa, Homo sapiens
  CDR3 for beta chain variable domain of TCR clone 327348 (TRBV20-1, TRBJ2-2)
CSARDTRLNTGELFF

SEQ ID NO: 654697 - protein, 11 aa, Homo sapiens
  CDR3 for alpha chain variable domain of TCR clone 327349 (TRAV26-1, TRAJ27)
RIDPNAGKSTL

SEQ ID NO: 654698 - protein, 18 aa, Homo sapiens
  CDR3 for beta chain variable domain of TCR clone 327349 (TRBV7-9, TRBJ2-6)
CASSFPGAGISGANVLTF

SEQ ID NO: 654699 - protein, 14 aa, Homo sapiens
  CDR3 for alpha chain variable domain of TCR clone 327350 (TRAV12-3, TRAJ9)
CAMSVETGGFKTIF

SEQ ID NO: 654700 - protein, 14 aa, Homo sapiens
  CDR3 for beta chain variable domain of TCR clone 327350 (TRBV7-8, TRBJ2-3)
CASSFKSSTDTQYF

SEQ ID NO: 654701 - protein, 16 aa, Homo sapiens
  CDR3 for alpha chain variable domain of TCR clone 327351 (TRAV30, TRAJ24)
CGTEIVDADSWGKFQF

SEQ ID NO: 654702 - protein, 14 aa, Homo sapiens
  CDR3 for beta chain variable domain of TCR clone 327351 (TRBV12-5, TRBJ2-5)
CASGSRKQQETQYF

SEQ ID NO: 654703 - protein, 10 aa, Homo sapiens
  CDR3 for alpha chain variable domain of TCR clone 327352 (TRAV1-2, TRAJ20)
CACNDYKLSF

SEQ ID NO: 654704 - protein, 14 aa, Homo sapiens
  CDR3 for beta chain variable domain of TCR clone 327352 (TRBV7-2, TRBJ1-1)
CASSFLTGTTEAFF

SEQ ID NO: 654705 - protein, 15 aa, Homo sapiens
  CDR3 for alpha chain variable domain of TCR clone 327353 (TRAV3, TRAJ3)
CAVRDRRSIAPKIIF

SEQ ID NO: 654706 - protein, 13 aa, Homo sapiens
  CDR3 for beta chain variable domain of TCR clone 327353 (TRBV9, TRBJ2-5)
CASSPAGLGTQYF

SEQ ID NO: 654707 - protein, 13 aa, Homo sapiens
  CDR3 for alpha chain variable domain of TCR clone 327354 (TRAV23/DV6, TRAJ22)
CAASKGSARQLTF

SEQ ID NO: 654708 - protein, 16 aa, Homo sapiens
  CDR3 for beta chain variable domain of TCR clone 327354 (TRBV20-1, TRBJ1-2)
CSASMGQGVANYGYTF

SEQ ID NO: 654709 - protein, 13 aa, Homo sapiens
  CDR3 for alpha chain variable domain of TCR clone 327355 (TRAV23/DV6, TRAJ16)
CAASISDGQKLLF

SEQ ID NO: 654710 - protein, 15 aa, Homo sapiens
  CDR3 for beta chain variable domain of TCR clone 327355 (TRBV20-1, TRBJ1-5)
CSARVGRVVSQPQHF

SEQ ID NO: 654711 - protein, 15 aa, Homo sapiens
  CDR3 for alpha chain variable domain of TCR clone 327356 (TRAV12-3, TRAJ6)
CAMSATPGGSYIPTF

SEQ ID NO: 654712 - protein, 11 aa, Homo sapiens
  CDR3 for beta chain variable domain of TCR clone 327356 (TRBV6-4, TRBJ2-1)
CASSDSYAQFF

SEQ ID NO: 654713 - protein, 14 aa, Homo sapiens
  CDR3 for alpha chain variable domain of TCR clone 327357 (TRAV8-3, TRAJ17)
RAVGSRTAGNKLTF

SEQ ID NO: 654714 - protein, 11 aa, Homo sapiens
  CDR3 for beta chain variable domain of TCR clone 327357 (TRBV29-1, TRBJ1-4)
CSVSSGEKLFF

SEQ ID NO: 654715 - protein, 16 aa, Homo sapiens
  CDR3 for alpha chain variable domain of TCR clone 327358 (TRAV30, TRAJ24)
CGTEIVDADSWGKFQF

SEQ ID NO: 654716 - protein, 11 aa, Homo sapiens
  CDR3 for beta chain variable domain of TCR clone 327358 (TRBV20-1, TRBJ2-3)
CSGTSSTTQYF

SEQ ID NO: 654717 - protein, 12 aa, Homo sapiens
  CDR3 for alpha chain variable domain of TCR clone 327359 (TRAV1-2, TRAJ33)
CAALDSNYQLIW

SEQ ID NO: 654718 - protein, 12 aa, Homo sapiens
  CDR3 for beta chain variable domain of TCR clone 327359 (TRBV11-2, TRBJ2-2)
CASSLPTGELFF

SEQ ID NO: 654719 - protein, 10 aa, Homo sapiens
  CDR3 for alpha chain variable domain of TCR clone 327360 (TRAV12-1, TRAJ23)
CVVSGGTLIF

SEQ ID NO: 654720 - protein, 15 aa, Homo sapiens
  CDR3 for beta chain variable domain of TCR clone 327360 (TRBV6-5, TRBJ2-1)
CASSSTSSVYNEQFF

SEQ ID NO: 654721 - protein, 14 aa, Homo sapiens
  CDR3 for alpha chain variable domain of TCR clone 327361 (TRAV1-1, TRAJ35)
CAVRSIGFGNVLHC

SEQ ID NO: 654722 - protein, 14 aa, Homo sapiens
  CDR3 for beta chain variable domain of TCR clone 327361 (TRBV5-7, TRBJ2-7)
CASSGGPSSYEQYF

SEQ ID NO: 654723 - protein, 11 aa, Homo sapiens
  CDR3 for alpha chain variable domain of TCR clone 327362 (TRAV3, TRAJ13)
CAVTSYQKVTF

SEQ ID NO: 654724 - protein, 12 aa, Homo sapiens
  CDR3 for beta chain variable domain of TCR clone 327362 (TRBV7-9, TRBJ1-4)
CASSTDREKLFF

SEQ ID NO: 654725 - protein, 14 aa, Homo sapiens
  CDR3 for alpha chain variable domain of TCR clone 327363 (TRAV1-2, TRAJ8)
CAVREDTGFQKLVF

SEQ ID NO: 654726 - protein, 14 aa, Homo sapiens
  CDR3 for beta chain variable domain of TCR clone 327363 (TRBV5-4, TRBJ1-1)
CATSLDSRRDEAFF

SEQ ID NO: 654727 - protein, 16 aa, Homo sapiens
  CDR3 for alpha chain variable domain of TCR clone 327364 (TRAV12-3, TRAJ44)
CAMSEGNTGTASKLTF

SEQ ID NO: 654728 - protein, 14 aa, Homo sapiens
  CDR3 for beta chain variable domain of TCR clone 327364 (TRBV5-5, TRBJ1-2)
CASSLDPYNYGYTF

SEQ ID NO: 654729 - protein, 13 aa, Homo sapiens
  CDR3 for alpha chain variable domain of TCR clone 327365 (TRAV1-1, TRAJ15)
CAVVDQAGTALIF

SEQ ID NO: 654730 - protein, 14 aa, Homo sapiens
  CDR3 for beta chain variable domain of TCR clone 327365 (TRBV5-4, TRBJ1-6)
CASSLWSDNSHLHF

SEQ ID NO: 654731 - protein, 15 aa, Homo sapiens
  CDR3 for alpha chain variable domain of TCR clone 327366 (TRAV12-2, TRAJ53)
CAVNGGGGSNYKLTF

SEQ ID NO: 654732 - protein, 22 aa, Homo sapiens
  CDR3 for beta chain variable domain of TCR clone 327366 (TRBV7-8, TRBJ2-7)
RRTPPCISVPAPLGGGPNEQYF

SEQ ID NO: 654733 - protein, 11 aa, Homo sapiens
  CDR3 for alpha chain variable domain of TCR clone 327367 (TRAV13-1, TRAJ26)
VQDNYGQNFVF

SEQ ID NO: 654734 - protein, 13 aa, Homo sapiens
  CDR3 for beta chain variable domain of TCR clone 327367 (TRBV7-9, TRBJ2-7)
CASSAGLQYEQYF

SEQ ID NO: 654735 - protein, 19 aa, Homo sapiens
  CDR3 for alpha chain variable domain of TCR clone 327368 (TRAV26-1, TRAJ42)
CVLFRRQTYYGGSQGNLIF

SEQ ID NO: 654736 - protein, 16 aa, Homo sapiens
  CDR3 for beta chain variable domain of TCR clone 327368 (TRBV7-3, TRBJ2-2)
CASSLKRGTLSGELFF

SEQ ID NO: 654737 - protein, 16 aa, Homo sapiens
  CDR3 for alpha chain variable domain of TCR clone 327369 (TRAV14/DV4, TRAJ45)
CAMREGERGGADGLTC

SEQ ID NO: 654738 - protein, 15 aa, Homo sapiens
  CDR3 for beta chain variable domain of TCR clone 327369 (TRBV5-1, TRBJ1-1)
CASSSTTGTNTEAFF

SEQ ID NO: 654739 - protein, 15 aa, Homo sapiens
  CDR3 for alpha chain variable domain of TCR clone 327370 (TRAV2, TRAJ9)
CAVAALNTGGFKTIF

SEQ ID NO: 654740 - protein, 15 aa, Homo sapiens
  CDR3 for beta chain variable domain of TCR clone 327370 (TRBV6-5, TRBJ2-3)
CASSYSGSSTDTQYF

SEQ ID NO: 654741 - protein, 14 aa, Homo sapiens
  CDR3 for alpha chain variable domain of TCR clone 327371 (TRAV1-2, TRAJ16)
CAVNRFSDGQKLLF

SEQ ID NO: 654742 - protein, 17 aa, Homo sapiens
  CDR3 for beta chain variable domain of TCR clone 327371 (TRBV27, TRBJ2-6)
CASSLTGFASGANVLTF

SEQ ID NO: 654743 - protein, 13 aa, Homo sapiens
  CDR3 for alpha chain variable domain of TCR clone 327372 (TRAV39, TRAJ33)
CAANPDSNYQLIW

SEQ ID NO: 654744 - protein, 14 aa, Homo sapiens
  CDR3 for beta chain variable domain of TCR clone 327372 (TRBV12-5, TRBJ2-5)
CASGSRTHQETQYF

SEQ ID NO: 654745 - protein, 14 aa, Homo sapiens
  CDR3 for alpha chain variable domain of TCR clone 327373 (TRAV29/DV5, TRAJ45)
CAASFRGGADGLTF

SEQ ID NO: 654746 - protein, 10 aa, Homo sapiens
  CDR3 for beta chain variable domain of TCR clone 327373 (TRBV11-2, TRBJ2-2)
CQQLTRELFF

SEQ ID NO: 654747 - protein, 14 aa, Homo sapiens
  CDR3 for alpha chain variable domain of TCR clone 327374 (TRAV12-3, TRAJ42)
CAMNYGGSQGNLIF

SEQ ID NO: 654748 - protein, 15 aa, Homo sapiens
  CDR3 for beta chain variable domain of TCR clone 327374 (TRBV20-1, TRBJ2-7)
CSARDRVSGMEEQYF

SEQ ID NO: 654749 - protein, 13 aa, Homo sapiens
  CDR3 for alpha chain variable domain of TCR clone 327375 (TRAV26-1, TRAJ54)
CIVRVKGAQKLVF

SEQ ID NO: 654750 - protein, 15 aa, Homo sapiens
  CDR3 for beta chain variable domain of TCR clone 327375 (TRBV20-1, TRBJ2-1)
CSAKPGGGPYNEQFF

SEQ ID NO: 654751 - protein, 14 aa, Homo sapiens
  CDR3 for alpha chain variable domain of TCR clone 327376 (TRAV12-1, TRAJ37)
CEVTGSSNTGKLIF

SEQ ID NO: 654752 - protein, 22 aa, Homo sapiens
  CDR3 for beta chain variable domain of TCR clone 327376 (TRBV23-1, TRBJ2-5)
CASSPWARPPHSRDPVLRARHA

SEQ ID NO: 654753 - protein, 17 aa, Homo sapiens
  CDR3 for alpha chain variable domain of TCR clone 327377 (TRAV3, TRAJ6)
CAVRDGPRAGGSYIPTF

SEQ ID NO: 654754 - protein, 20 aa, Homo sapiens
  CDR3 for beta chain variable domain of TCR clone 327377 (TRBV28, TRBJ2-7)
CASTPIGRSPGLAGGNEQFF

SEQ ID NO: 654755 - protein, 16 aa, Homo sapiens
  CDR3 for alpha chain variable domain of TCR clone 327378 (TRAV3, TRAJ21)
CAVRDIERGNFNKFYF

SEQ ID NO: 654756 - protein, 12 aa, Homo sapiens
  CDR3 for beta chain variable domain of TCR clone 327378 (TRBV5-4, TRBJ2-7)
YASSWAGQGENF

SEQ ID NO: 654757 - protein, 12 aa, Homo sapiens
  CDR3 for alpha chain variable domain of TCR clone 327379 (TRAV23/DV6, TRAJ49)
CAASNYGNQFYF

SEQ ID NO: 654758 - protein, 14 aa, Homo sapiens
  CDR3 for beta chain variable domain of TCR clone 327379 (TRBV18, TRBJ1-2)
CASSPSRTGNGYTF

SEQ ID NO: 654759 - protein, 14 aa, Homo sapiens
  CDR3 for alpha chain variable domain of TCR clone 327380 (TRAV12-2, TRAJ40)
CAVKIPSGTYKYIF

SEQ ID NO: 654760 - protein, 14 aa, Homo sapiens
  CDR3 for beta chain variable domain of TCR clone 327380 (TRBV7-2, TRBJ2-7)
CASSGLAGRGEQYF

SEQ ID NO: 654761 - protein, 20 aa, Homo sapiens
  CDR3 for alpha chain variable domain of TCR clone 327381 (TRAV12-3, TRAJ52)
CAMTQSYQNAGGTSYGKLTF

SEQ ID NO: 654762 - protein, 14 aa, Homo sapiens
  CDR3 for beta chain variable domain of TCR clone 327381 (TRBV25-1, TRBJ1-1)
CASTNLGGNTEAFF

SEQ ID NO: 654763 - protein, 15 aa, Homo sapiens
  CDR3 for alpha chain variable domain of TCR clone 327382 (TRAV26-1, TRAJ44)
CIARVPFGPASKLTF

SEQ ID NO: 654764 - protein, 15 aa, Homo sapiens
  CDR3 for beta chain variable domain of TCR clone 327382 (TRBV20-1, TRBJ1-1)
CSASRGVTGNTEAFF

SEQ ID NO: 654765 - protein, 17 aa, Homo sapiens
  CDR3 for alpha chain variable domain of TCR clone 327383 (TRAV13-1, TRAJ52)
CAAGRNAGGTSYGKLTF

SEQ ID NO: 654766 - protein, 13 aa, Homo sapiens
  CDR3 for beta chain variable domain of TCR clone 327383 (TRBV7-2, TRBJ1-1)
CASTLKGAKVAFF

SEQ ID NO: 654767 - protein, 14 aa, Homo sapiens
  CDR3 for alpha chain variable domain of TCR clone 327384 (TRAV12-2, TRAJ17)
CAVLFKAASNKLTF

SEQ ID NO: 654768 - protein, 17 aa, Homo sapiens
  CDR3 for beta chain variable domain of TCR clone 327384 (TRBV11-2, TRBJ2-1)
CASSVYPPGVEYNEQFF

SEQ ID NO: 654769 - protein, 15 aa, Homo sapiens
  CDR3 for alpha chain variable domain of TCR clone 327385 (TRAV25, TRAJ52)
CAGRPGGTSYGKLTF

SEQ ID NO: 654770 - protein, 12 aa, Homo sapiens
  CDR3 for beta chain variable domain of TCR clone 327385 (TRBV7-8, TRBJ2-7)
CASSVGDREQYF

SEQ ID NO: 654771 - protein, 12 aa, Homo sapiens
  CDR3 for alpha chain variable domain of TCR clone 327386 (TRAV8-3, TRAJ41)
CAVVLSGYALNF

SEQ ID NO: 654772 - protein, 18 aa, Homo sapiens
  CDR3 for beta chain variable domain of TCR clone 327386 (TRBV20-1, TRBJ2-6)
CSAETTPTHGSGANVLTF

SEQ ID NO: 654773 - protein, 14 aa, Homo sapiens
  CDR3 for alpha chain variable domain of TCR clone 327387 (TRAV27, TRAJ42)
CAGGDGGSQGNLSF

SEQ ID NO: 654774 - protein, 14 aa, Homo sapiens
  CDR3 for beta chain variable domain of TCR clone 327387 (TRBV19, TRBJ1-2)
CASSRQGSSIGYTF

SEQ ID NO: 654775 - protein, 14 aa, Homo sapiens
  CDR3 for alpha chain variable domain of TCR clone 327388 (TRAV8-4, TRAJ47)
CAVSIMENGNKLVF

SEQ ID NO: 654776 - protein, 16 aa, Homo sapiens
  CDR3 for beta chain variable domain of TCR clone 327388 (TRBV14, TRBJ1-2)
CASSQGPTTANYGYTF

SEQ ID NO: 654777 - protein, 13 aa, Homo sapiens
  CDR3 for alpha chain variable domain of TCR clone 327389 (TRAV35, TRAJ42)
CAGFPGSQGNLIF

SEQ ID NO: 654778 - protein, 14 aa, Homo sapiens
  CDR3 for beta chain variable domain of TCR clone 327389 (TRBV5-4, TRBJ1-1)
CASSLDSRRDEAFF

SEQ ID NO: 654779 - protein, 15 aa, Homo sapiens
  CDR3 for alpha chain variable domain of TCR clone 327390 (TRAV29/DV5, TRAJ24)
CAASGATDSWGKFQF

SEQ ID NO: 654780 - protein, 20 aa, Homo sapiens
  CDR3 for beta chain variable domain of TCR clone 327390 (TRBV11-2, TRBJ2-2)
LRARPCISVPAASLPGSGFF

SEQ ID NO: 654781 - protein, 15 aa, Homo sapiens
  CDR3 for alpha chain variable domain of TCR clone 327391 (TRAV12-1, TRAJ45)
CVVLSGGGGADGLTF

SEQ ID NO: 654782 - protein, 14 aa, Homo sapiens
  CDR3 for beta chain variable domain of TCR clone 327391 (TRBV18, TRBJ2-7)
CASSPRGGAYEQYF

SEQ ID NO: 654783 - protein, 14 aa, Homo sapiens
  CDR3 for alpha chain variable domain of TCR clone 327392 (TRAV12-1, TRAJ17)
CVVNYKAAGNKLTF

SEQ ID NO: 654784 - protein, 16 aa, Homo sapiens
  CDR3 for beta chain variable domain of TCR clone 327392 (TRBV28, TRBJ2-7)
CASSLFFETGGPEQYF

SEQ ID NO: 654785 - protein, 14 aa, Homo sapiens
  CDR3 for alpha chain variable domain of TCR clone 327393 (TRAV13-1, TRAJ35)
CAASKGGFGNVLHC

SEQ ID NO: 654786 - protein, 13 aa, Homo sapiens
  CDR3 for beta chain variable domain of TCR clone 327393 (TRBV7-3, TRBJ1-1)
CASSQDWAAEAFF

SEQ ID NO: 654787 - protein, 14 aa, Homo sapiens
  CDR3 for alpha chain variable domain of TCR clone 327394 (TRAV8-3, TRAJ4)
CAVGAAGGYNKLIF

SEQ ID NO: 654788 - protein, 12 aa, Homo sapiens
  CDR3 for beta chain variable domain of TCR clone 327394 (TRBV11-2, TRBJ2-3)
GASRGAPNTQYF

SEQ ID NO: 654789 - protein, 19 aa, Homo sapiens
  CDR3 for alpha chain variable domain of TCR clone 327395 (TRAV21, TRAJ40)
SLVPQPPTSVISGTYTYIF

SEQ ID NO: 654790 - protein, 16 aa, Homo sapiens
  CDR3 for beta chain variable domain of TCR clone 327395 (TRBV28, TRBJ2-3)
CASSFFRDPRLGTQYF

SEQ ID NO: 654791 - protein, 15 aa, Homo sapiens
  CDR3 for alpha chain variable domain of TCR clone 327396 (TRAV13-1, TRAJ48)
CAASTPVGGNEKLTF

SEQ ID NO: 654792 - protein, 15 aa, Homo sapiens
  CDR3 for beta chain variable domain of TCR clone 327396 (TRBV28, TRBJ2-1)
CASSIIAGGRSEQFF

SEQ ID NO: 654793 - protein, 17 aa, Homo sapiens
  CDR3 for alpha chain variable domain of TCR clone 327397 (TRAV3, TRAJ6)
CAVRDGLRAGGSYIPTF

SEQ ID NO: 654794 - protein, 14 aa, Homo sapiens
  CDR3 for beta chain variable domain of TCR clone 327397 (TRBV24-1, TRBJ1-2)
CATSLGPMVGRTMA

SEQ ID NO: 654795 - protein, 15 aa, Homo sapiens
  CDR3 for alpha chain variable domain of TCR clone 327398 (TRAV23/DV6, TRAJ23)
CAASERGNQGGKLIF

SEQ ID NO: 654796 - protein, 14 aa, Homo sapiens
  CDR3 for beta chain variable domain of TCR clone 327398 (TRBV6-1, TRBJ1-3)
CASVQGGGGNTIYF

SEQ ID NO: 654797 - protein, 13 aa, Homo sapiens
  CDR3 for alpha chain variable domain of TCR clone 327399 (TRAV12-3, TRAJ9)
CAMRNTGGFKTIF

SEQ ID NO: 654798 - protein, 15 aa, Homo sapiens
  CDR3 for beta chain variable domain of TCR clone 327399 (TRBV20-1, TRBJ2-7)
CSARDRVSGMDEQYL

SEQ ID NO: 654799 - protein, 11 aa, Homo sapiens
  CDR3 for alpha chain variable domain of TCR clone 327400 (TRAV21, TRAJ11)
CAVNGYSTLTF

SEQ ID NO: 654800 - protein, 11 aa, Homo sapiens
  CDR3 for beta chain variable domain of TCR clone 327400 (TRBV19, TRBJ1-1)
CASSIESEAVF

SEQ ID NO: 654801 - protein, 12 aa, Homo sapiens
  CDR3 for alpha chain variable domain of TCR clone 327401 (TRAV13-2, TRAJ23)
CAERHRGGKLIF

SEQ ID NO: 654802 - protein, 14 aa, Homo sapiens
  CDR3 for beta chain variable domain of TCR clone 327401 (TRBV11-2, TRBJ2-3)
CASSRLARTDTQYF

SEQ ID NO: 654803 - protein, 13 aa, Homo sapiens
  CDR3 for alpha chain variable domain of TCR clone 327402 (TRAV4, TRAJ34)
FLVGDYNTDKLIF

SEQ ID NO: 654804 - protein, 23 aa, Homo sapiens
  CDR3 for beta chain variable domain of TCR clone 327402 (TRBV4-2, TRBJ2-3)
CASRQDPPRASSISGGRGDTQYF

SEQ ID NO: 654805 - protein, 14 aa, Homo sapiens
  CDR3 for alpha chain variable domain of TCR clone 327403 (TRAV2, TRAJ9)
CAVEDRCGGFKTIF

SEQ ID NO: 654806 - protein, 16 aa, Homo sapiens
  CDR3 for beta chain variable domain of TCR clone 327403 (TRBV15, TRBJ2-7)
CATSRDGGIPSYEQYF

SEQ ID NO: 654807 - protein, 12 aa, Homo sapiens
  CDR3 for alpha chain variable domain of TCR clone 327404 (TRAV2, TRAJ29)
CAVDSGNTPLVF

SEQ ID NO: 654808 - protein, 13 aa, Homo sapiens
  CDR3 for beta chain variable domain of TCR clone 327404 (TRBV19, TRBJ1-2)
CASSVPGQDGYTF

SEQ ID NO: 654809 - protein, 12 aa, Homo sapiens
  CDR3 for alpha chain variable domain of TCR clone 327405 (TRAV13-2, TRAJ23)
CAERHRGGKLIL

SEQ ID NO: 654810 - protein, 15 aa, Homo sapiens
  CDR3 for beta chain variable domain of TCR clone 327405 (TRBV20-1, TRBJ2-7)
CSARDRVSGMDEQYF

SEQ ID NO: 654811 - protein, 11 aa, Homo sapiens
  CDR3 for alpha chain variable domain of TCR clone 327406 (TRAV1-1, TRAJ5)
CAVRVRRALTF

SEQ ID NO: 654812 - protein, 15 aa, Homo sapiens
  CDR3 for beta chain variable domain of TCR clone 327406 (TRBV7-9, TRBJ1-5)
CASSQGHQPNQPQHF

SEQ ID NO: 654813 - protein, 14 aa, Homo sapiens
  CDR3 for alpha chain variable domain of TCR clone 327407 (TRAV1-2, TRAJ16)
CAVNRVSDGQKLLF

SEQ ID NO: 654814 - protein, 15 aa, Homo sapiens
  CDR3 for beta chain variable domain of TCR clone 327407 (TRBV4-1, TRBJ2-5)
CASSQWDLYQETQYF

SEQ ID NO: 654815 - protein, 13 aa, Homo sapiens
  CDR3 for alpha chain variable domain of TCR clone 327408 (TRAV30, TRAJ24)
CGTVTDSWGKLQF

SEQ ID NO: 654816 - protein, 15 aa, Homo sapiens
  CDR3 for beta chain variable domain of TCR clone 327408 (TRBV5-7, TRBJ1-5)
CASSYGKLWDQPQHF

SEQ ID NO: 654817 - protein, 14 aa, Homo sapiens
  CDR3 for alpha chain variable domain of TCR clone 327409 (TRAV13-1, TRAJ10)
CAAKEPGGGNKLTF

SEQ ID NO: 654818 - protein, 16 aa, Homo sapiens
  CDR3 for beta chain variable domain of TCR clone 327409 (TRBV6-6, TRBJ2-7)
CASSDSGAGYEQYSGR

SEQ ID NO: 654819 - protein, 14 aa, Homo sapiens
  CDR3 for alpha chain variable domain of TCR clone 327410 (TRAV10, TRAJ32)
CGEPRGGATNKLIL

SEQ ID NO: 654820 - protein, 14 aa, Homo sapiens
  CDR3 for beta chain variable domain of TCR clone 327410 (TRBV5-4, TRBJ2-2)
CASRLDGGTGELFF

SEQ ID NO: 654821 - protein, 14 aa, Homo sapiens
  CDR3 for alpha chain variable domain of TCR clone 327411 (TRAV26-1, TRAJ21)
CIVRPPYNFNKFYF

SEQ ID NO: 654822 - protein, 14 aa, Homo sapiens
  CDR3 for beta chain variable domain of TCR clone 327411 (TRBV11-3, TRBJ2-1)
CASSATASGSVQFF

SEQ ID NO: 654823 - protein, 10 aa, Homo sapiens
  CDR3 for alpha chain variable domain of TCR clone 327412 (TRAV12-1, TRAJ37)
CVGWAGKLIF

SEQ ID NO: 654824 - protein, 15 aa, Homo sapiens
  CDR3 for beta chain variable domain of TCR clone 327412 (TRBV5-1, TRBJ2-1)
CASSPPRAPYNEQFF

SEQ ID NO: 654825 - protein, 15 aa, Homo sapiens
  CDR3 for alpha chain variable domain of TCR clone 327413 (TRAV26-1, TRAJ39)
CIVRGARNAGNMLTF

SEQ ID NO: 654826 - protein, 16 aa, Homo sapiens
  CDR3 for beta chain variable domain of TCR clone 327413 (TRBV5-1, TRBJ2-1)
CASSLTLAGGRNEQFF

SEQ ID NO: 654827 - protein, 14 aa, Homo sapiens
  CDR3 for alpha chain variable domain of TCR clone 327414 (TRAV8-6, TRAJ20)
CAVSDRRVRDKLSF

SEQ ID NO: 654828 - protein, 15 aa, Homo sapiens
  CDR3 for beta chain variable domain of TCR clone 327414 (TRBV20-1, TRBJ2-1)
CSARGIGGTYNEQFF

SEQ ID NO: 654829 - protein, 16 aa, Homo sapiens
  CDR3 for alpha chain variable domain of TCR clone 327415 (TRAV12-3, TRAJ53)
CAMSPGSGGSNHKLTF

SEQ ID NO: 654830 - protein, 11 aa, Homo sapiens
  CDR3 for beta chain variable domain of TCR clone 327415 (TRBV29-1, TRBJ2-5)
CSEDRAGTQYF

SEQ ID NO: 654831 - protein, 16 aa, Homo sapiens
  CDR3 for alpha chain variable domain of TCR clone 327416 (TRAV14/DV4, TRAJ17)
CALREAGRAAGNKLTF

SEQ ID NO: 654832 - protein, 17 aa, Homo sapiens
  CDR3 for beta chain variable domain of TCR clone 327416 (TRBV7-8, TRBJ2-6)
CASSAGTGGAGANVLTF

SEQ ID NO: 654833 - protein, 14 aa, Homo sapiens
  CDR3 for alpha chain variable domain of TCR clone 327417 (TRAV13-1, TRAJ52)
CAALDGTSYGKLTF

SEQ ID NO: 654834 - protein, 14 aa, Homo sapiens
  CDR3 for beta chain variable domain of TCR clone 327417 (TRBV19, TRBJ2-1)
CASPTFVLGGEQFF

SEQ ID NO: 654835 - protein, 15 aa, Homo sapiens
  CDR3 for alpha chain variable domain of TCR clone 327418 (TRAV17, TRAJ56)
CATEPFTGANSKLTF

SEQ ID NO: 654836 - protein, 14 aa, Homo sapiens
  CDR3 for beta chain variable domain of TCR clone 327418 (TRBV19, TRBJ2-1)
CASPTFVLSGEPFF

SEQ ID NO: 654837 - protein, 17 aa, Homo sapiens
  CDR3 for alpha chain variable domain of TCR clone 327419 (TRAV3, TRAJ6)
RAVRDGPRAGGRYIPTF

SEQ ID NO: 654838 - protein, 20 aa, Homo sapiens
  CDR3 for beta chain variable domain of TCR clone 327419 (TRBV28, TRBJ2-1)
CASTPIGRSPGLAGGNEQFF

SEQ ID NO: 654839 - protein, 17 aa, Homo sapiens
  CDR3 for alpha chain variable domain of TCR clone 327420 (TRAV3, TRAJ38)
CSVRDCLNAGNNRKLIW

SEQ ID NO: 654840 - protein, 14 aa, Homo sapiens
  CDR3 for beta chain variable domain of TCR clone 327420 (TRBV5-5, TRBJ1-5)
CASSGQGVDQPQHF

SEQ ID NO: 654841 - protein, 10 aa, Homo sapiens
  CDR3 for alpha chain variable domain of TCR clone 327421 (TRAV1-2, TRAJ18)
CAVRGEAQPW

SEQ ID NO: 654842 - protein, 19 aa, Homo sapiens
  CDR3 for beta chain variable domain of TCR clone 327421 (TRBV6-3, TRBJ1-2)
CAISYSKGRTGPPNYGYTF

SEQ ID NO: 654843 - protein, 10 aa, Homo sapiens
  CDR3 for alpha chain variable domain of TCR clone 327422 (TRAV23/DV6, TRAJ57)
CAASSTLSQG

SEQ ID NO: 654844 - protein, 16 aa, Homo sapiens
  CDR3 for beta chain variable domain of TCR clone 327422 (TRBV13, TRBJ2-3)
CQQPLQGSGGRNTQYF

SEQ ID NO: 654845 - protein, 16 aa, Homo sapiens
  CDR3 for alpha chain variable domain of TCR clone 327423 (TRAV12-3, TRAJ53)
CAMSPGSGGSNYKLKF

SEQ ID NO: 654846 - protein, 13 aa, Homo sapiens
  CDR3 for beta chain variable domain of TCR clone 327423 (TRBV10-3, TRBJ2-7)
CASKLAVNYEQYF

SEQ ID NO: 654847 - protein, 11 aa, Homo sapiens
  CDR3 for alpha chain variable domain of TCR clone 327424 (TRAV13-1, TRAJ24)
CAASVWGKLQF

SEQ ID NO: 654848 - protein, 15 aa, Homo sapiens
  CDR3 for beta chain variable domain of TCR clone 327424 (TRBV11-2, TRBJ2-2)
CASSLDTGNTGELFF

SEQ ID NO: 654849 - protein, 11 aa, Homo sapiens
  CDR3 for alpha chain variable domain of TCR clone 327425 (TRAV2, TRAJ13)
CASGGYQKVTF

SEQ ID NO: 654850 - protein, 16 aa, Homo sapiens
  CDR3 for beta chain variable domain of TCR clone 327425 (TRBV5-1, TRBJ2-2)
CASSSRTGGRTGELFF

SEQ ID NO: 654851 - protein, 15 aa, Homo sapiens
  CDR3 for alpha chain variable domain of TCR clone 327426 (TRAV26-2, TRAJ45)
CILRDRVDQEEVLTD

SEQ ID NO: 654852 - protein, 15 aa, Homo sapiens
  CDR3 for beta chain variable domain of TCR clone 327426 (TRBV27, TRBJ1-5)
CASTFNRGSNQPQHF

SEQ ID NO: 654853 - protein, 13 aa, Homo sapiens
  CDR3 for alpha chain variable domain of TCR clone 327427 (TRAV16, TRAJ29)
FALSRRGNAPLVF

SEQ ID NO: 654854 - protein, 15 aa, Homo sapiens
  CDR3 for beta chain variable domain of TCR clone 327427 (TRBV4-1, TRBJ2-3)
CASSRGQGIPDTQYF

SEQ ID NO: 654855 - protein, 16 aa, Homo sapiens
  CDR3 for alpha chain variable domain of TCR clone 327428 (TRAV8-3, TRAJ13)
CAVGAYPSGVYQKVTF

SEQ ID NO: 654856 - protein, 17 aa, Homo sapiens
  CDR3 for beta chain variable domain of TCR clone 327428 (TRBV19, TRBJ1-5)
CASSIVWADNQPSILVM

SEQ ID NO: 654857 - protein, 12 aa, Homo sapiens
  CDR3 for alpha chain variable domain of TCR clone 327429 (TRAV21, TRAJ23)
CAVMLQGGKLIF

SEQ ID NO: 654858 - protein, 14 aa, Homo sapiens
  CDR3 for beta chain variable domain of TCR clone 327429 (TRBV7-9, TRBJ1-4)
CAITEGEANETLFF

SEQ ID NO: 654859 - protein, 16 aa, Homo sapiens
  CDR3 for alpha chain variable domain of TCR clone 327430 (TRAV16, TRAJ4)
CALSRMFSGGYNKLIF

SEQ ID NO: 654860 - protein, 16 aa, Homo sapiens
  CDR3 for beta chain variable domain of TCR clone 327430 (TRBV5-1, TRBJ2-3)
CASSLGLAVYTDTQYF

SEQ ID NO: 654861 - protein, 10 aa, Homo sapiens
  CDR3 for alpha chain variable domain of TCR clone 327431 (TRAV12-2, TRAJ43)
CAVKVLSMRF

SEQ ID NO: 654862 - protein, 14 aa, Homo sapiens
  CDR3 for beta chain variable domain of TCR clone 327431 (TRBV11-2, TRBJ2-7)
CASSLGNSLYEQCF

SEQ ID NO: 654863 - protein, 12 aa, Homo sapiens
  CDR3 for alpha chain variable domain of TCR clone 327432 (TRAV21, TRAJ30)
CAALNRDDKIIF

SEQ ID NO: 654864 - protein, 13 aa, Homo sapiens
  CDR3 for beta chain variable domain of TCR clone 327432 (TRBV7-2, TRBJ1-4)
CASSLAGLEKLFF

SEQ ID NO: 654865 - protein, 16 aa, Homo sapiens
  CDR3 for alpha chain variable domain of TCR clone 327433 (TRAV3, TRAJ37)
CAVRGRGSGNTGKLTF

SEQ ID NO: 654866 - protein, 15 aa, Homo sapiens
  CDR3 for beta chain variable domain of TCR clone 327433 (TRBV7-3, TRBJ2-2)
CASSETGQGTGELFF

SEQ ID NO: 654867 - protein, 17 aa, Homo sapiens
  CDR3 for alpha chain variable domain of TCR clone 327434 (TRAV17, TRAJ52)
CATERPPGGTSYGKLTF

SEQ ID NO: 654868 - protein, 13 aa, Homo sapiens
  CDR3 for beta chain variable domain of TCR clone 327434 (TRBV7-9, TRBJ1-2)
CASSLKQNYGYTF

SEQ ID NO: 654869 - protein, 13 aa, Homo sapiens
  CDR3 for alpha chain variable domain of TCR clone 327435 (TRAV35, TRAJ21)
CAGQLSNFNKFCF

SEQ ID NO: 654870 - protein, 16 aa, Homo sapiens
  CDR3 for beta chain variable domain of TCR clone 327435 (TRBV12-5, TRBJ2-5)
CASGPRTSGNQETQYF

SEQ ID NO: 654871 - protein, 12 aa, Homo sapiens
  CDR3 for alpha chain variable domain of TCR clone 327436 (TRAV16, TRAJ56)
CAPTGANSKLTF

SEQ ID NO: 654872 - protein, 17 aa, Homo sapiens
  CDR3 for beta chain variable domain of TCR clone 327436 (TRBV27, TRBJ2-6)
CARSLTGFASGANVLTF

SEQ ID NO: 654873 - protein, 14 aa, Homo sapiens
  CDR3 for alpha chain variable domain of TCR clone 327437 (TRAV16, TRAJ8)
CALLLNTGFQKLVS

SEQ ID NO: 654874 - protein, 15 aa, Homo sapiens
  CDR3 for beta chain variable domain of TCR clone 327437 (TRBV7-7, TRBJ2-2)
CATSKLAKNTGELFF

SEQ ID NO: 654875 - protein, 14 aa, Homo sapiens
  CDR3 for alpha chain variable domain of TCR clone 327438 (TRAV12-3, TRAJ10)
SHLPPTGGGNKLTF

SEQ ID NO: 654876 - protein, 14 aa, Homo sapiens
  CDR3 for beta chain variable domain of TCR clone 327438 (TRBV7-9, TRBJ2-5)
CASSLDTAQETQYF

SEQ ID NO: 654877 - protein, 15 aa, Homo sapiens
  CDR3 for alpha chain variable domain of TCR clone 327439 (TRAV8-3, TRAJ27)
CAVGPSKTNVGKSTF

SEQ ID NO: 654878 - protein, 15 aa, Homo sapiens
  CDR3 for beta chain variable domain of TCR clone 327439 (TRBV7-2, TRBJ2-1)
CASSSGLAGGDEQFF

SEQ ID NO: 654879 - protein, 12 aa, Homo sapiens
  CDR3 for alpha chain variable domain of TCR clone 327440 (TRAV3, TRAJ20)
CAVRDPDYKLSF

SEQ ID NO: 654880 - protein, 14 aa, Homo sapiens
  CDR3 for beta chain variable domain of TCR clone 327440 (TRBV4-2, TRBJ2-1)
CASCLDRAYNEQFF

SEQ ID NO: 654881 - protein, 13 aa, Homo sapiens
  CDR3 for alpha chain variable domain of TCR clone 327441 (TRAV9-2, TRAJ53)
CALSGGSKYKLTF

SEQ ID NO: 654882 - protein, 15 aa, Homo sapiens
  CDR3 for beta chain variable domain of TCR clone 327441 (TRBV7-2, TRBJ2-1)
CASSSGLAGGNEQFF

SEQ ID NO: 654883 - protein, 15 aa, Homo sapiens
  CDR3 for alpha chain variable domain of TCR clone 327442 (TRAV26-1, TRAJ44)
CIVRIGTGTASKLTF

SEQ ID NO: 654884 - protein, 16 aa, Homo sapiens
  CDR3 for beta chain variable domain of TCR clone 327442 (TRBV2, TRBJ2-3)
CASSTSVEGVTDTQYF

SEQ ID NO: 654885 - protein, 14 aa, Homo sapiens
  CDR3 for alpha chain variable domain of TCR clone 327443 (TRAV12-2, TRAJ13)
CAVQKTGGYQEVTF

SEQ ID NO: 654886 - protein, 15 aa, Homo sapiens
  CDR3 for beta chain variable domain of TCR clone 327443 (TRBV27, TRBJ2-1)
CASSNGGGSSNEQFF

SEQ ID NO: 654887 - protein, 16 aa, Homo sapiens
  CDR3 for alpha chain variable domain of TCR clone 327444 (TRAV3, TRAJ10)
CAVRDMRAGGGNKLTF

SEQ ID NO: 654888 - protein, 15 aa, Homo sapiens
  CDR3 for beta chain variable domain of TCR clone 327444 (TRBV6-3, TRBJ2-7)
CGSSSPGTVFYEQYF

SEQ ID NO: 654889 - protein, 13 aa, Homo sapiens
  CDR3 for alpha chain variable domain of TCR clone 327445 (TRAV21, TRAJ20)
CAAGLRVDYKLSF

SEQ ID NO: 654890 - protein, 13 aa, Homo sapiens
  CDR3 for beta chain variable domain of TCR clone 327445 (TRBV6-1, TRBJ1-1)
CASSRQGNTGAFF

SEQ ID NO: 654891 - protein, 13 aa, Homo sapiens
  CDR3 for alpha chain variable domain of TCR clone 327446 (TRAV12-2, TRAJ12)
CAVNWDSSYKFIF

SEQ ID NO: 654892 - protein, 15 aa, Homo sapiens
  CDR3 for beta chain variable domain of TCR clone 327446 (TRBV10-3, TRBJ2-1)
CATNGGPGQGDEQFF

SEQ ID NO: 654893 - protein, 15 aa, Homo sapiens
  CDR3 for alpha chain variable domain of TCR clone 327447 (TRAV30, TRAJ32)
CGTEILGGATNKLIF

SEQ ID NO: 654894 - protein, 13 aa, Homo sapiens
  CDR3 for beta chain variable domain of TCR clone 327447 (TRBV6-3, TRBJ2-7)
CASSFGGGYEQYF

SEQ ID NO: 654895 - protein, 13 aa, Homo sapiens
  CDR3 for alpha chain variable domain of TCR clone 327448 (TRAV2, TRAJ40)
CAVVTLGTYKYIF

SEQ ID NO: 654896 - protein, 16 aa, Homo sapiens
  CDR3 for beta chain variable domain of TCR clone 327448 (TRBV7-9, TRBJ1-3)
CASSLGAGSSGNTIYF

SEQ ID NO: 654897 - protein, 14 aa, Homo sapiens
  CDR3 for alpha chain variable domain of TCR clone 327449 (TRAV12-3, TRAJ10)
SHLPLTGGGNKLTF

SEQ ID NO: 654898 - protein, 14 aa, Homo sapiens
  CDR3 for beta chain variable domain of TCR clone 327449 (TRBV25-1, TRBJ1-1)
CASTHLGVNTEAFF

SEQ ID NO: 654899 - protein, 15 aa, Homo sapiens
  CDR3 for alpha chain variable domain of TCR clone 327450 (TRAV17, TRAJ56)
CATDANTGANSKLPF

SEQ ID NO: 654900 - protein, 12 aa, Homo sapiens
  CDR3 for beta chain variable domain of TCR clone 327450 (TRBV7-8, TRBJ2-7)
CASSPGDREQYF

SEQ ID NO: 654901 - protein, 13 aa, Homo sapiens
  CDR3 for alpha chain variable domain of TCR clone 327451 (TRAV13-2, TRAJ10)
CAENTGGGNKLTF

SEQ ID NO: 654902 - protein, 13 aa, Homo sapiens
  CDR3 for beta chain variable domain of TCR clone 327451 (TRBV12-4, TRBJ2-7)
CASSLERVREQYF

SEQ ID NO: 654903 - protein, 13 aa, Homo sapiens
  CDR3 for alpha chain variable domain of TCR clone 327452 (TRAV20, TRAJ9)
CAVTDTGGFKTIF

SEQ ID NO: 654904 - protein, 15 aa, Homo sapiens
  CDR3 for beta chain variable domain of TCR clone 327452 (TRBV27, TRBJ2-7)
CASSKAGRGGYEQYF

SEQ ID NO: 654905 - protein, 16 aa, Homo sapiens
  CDR3 for alpha chain variable domain of TCR clone 327453 (TRAV26-1, TRAJ23)
CTVIVHPYNQGGKLIF

SEQ ID NO: 654906 - protein, 15 aa, Homo sapiens
  CDR3 for beta chain variable domain of TCR clone 327453 (TRBV5-7, TRBJ2-7)
CASSPYFEGSYEQYF

SEQ ID NO: 654907 - protein, 14 aa, Homo sapiens
  CDR3 for alpha chain variable domain of TCR clone 327454 (TRAV1-1, TRAJ30)
CAVRSLNRDDKIIF

SEQ ID NO: 654908 - protein, 13 aa, Homo sapiens
  CDR3 for beta chain variable domain of TCR clone 327454 (TRBV7-7, TRBJ1-1)
CASSLGANTEAFF

SEQ ID NO: 654909 - protein, 11 aa, Homo sapiens
  CDR3 for alpha chain variable domain of TCR clone 327455 (TRAV12-1, TRAJ30)
CVVNGQDKIIL

SEQ ID NO: 654910 - protein, 16 aa, Homo sapiens
  CDR3 for beta chain variable domain of TCR clone 327455 (TRBV24-1, TRBJ2-3)
CATSDAISGITDTQYF

SEQ ID NO: 654911 - protein, 14 aa, Homo sapiens
  CDR3 for alpha chain variable domain of TCR clone 327456 (TRAV26-1, TRAJ39)
CIVRGSRAGNMLTF

SEQ ID NO: 654912 - protein, 15 aa, Homo sapiens
  CDR3 for beta chain variable domain of TCR clone 327456 (TRBV6-1, TRBJ1-5)
CASSELREGNQPQHF

SEQ ID NO: 654913 - protein, 14 aa, Homo sapiens
  CDR3 for alpha chain variable domain of TCR clone 327457 (TRAV13-1, TRAJ44)
CAARATGTASKLTF

SEQ ID NO: 654914 - protein, 12 aa, Homo sapiens
  CDR3 for beta chain variable domain of TCR clone 327457 (TRBV11-2, TRBJ2-2)
CASSLGGGELFF

SEQ ID NO: 654915 - protein, 14 aa, Homo sapiens
  CDR3 for alpha chain variable domain of TCR clone 327458 (TRAV17, TRAJ39)
CATDHVRAGNMLTF

SEQ ID NO: 654916 - protein, 15 aa, Homo sapiens
  CDR3 for beta chain variable domain of TCR clone 327458 (TRBV13, TRBJ1-5)
CASSFGQGGVQPQHF

SEQ ID NO: 654917 - protein, 14 aa, Homo sapiens
  CDR3 for alpha chain variable domain of TCR clone 327459 (TRAV1-2, TRAJ16)
CAVNRFSDGQKLLF

SEQ ID NO: 654918 - protein, 13 aa, Homo sapiens
  CDR3 for beta chain variable domain of TCR clone 327459 (TRBV20-1, TRBJ2-1)
CRAHGSSYNEQFF

SEQ ID NO: 654919 - protein, 13 aa, Homo sapiens
  CDR3 for alpha chain variable domain of TCR clone 327460 (TRAV12-2, TRAJ47)
CAVFMEYGNKLVF

SEQ ID NO: 654920 - protein, 14 aa, Homo sapiens
  CDR3 for beta chain variable domain of TCR clone 327460 (TRBV4-1, TRBJ1-5)
CARSQGPTNQPQHF

SEQ ID NO: 654921 - protein, 17 aa, Homo sapiens
  CDR3 for alpha chain variable domain of TCR clone 327461 (TRAV3, TRAJ38)
CAVRDCLNAGNNRKPIL

SEQ ID NO: 654922 - protein, 14 aa, Homo sapiens
  CDR3 for beta chain variable domain of TCR clone 327461 (TRBV12-5, TRBJ2-5)
CASGSRTHQETQYF

SEQ ID NO: 654923 - protein, 16 aa, Homo sapiens
  CDR3 for alpha chain variable domain of TCR clone 327462 (TRAV16, TRAJ4)
CSLSRMFSGGYNKLIF

SEQ ID NO: 654924 - protein, 14 aa, Homo sapiens
  CDR3 for beta chain variable domain of TCR clone 327462 (TRBV4-1, TRBJ2-2)
CASSQAVNTGELSF

SEQ ID NO: 654925 - protein, 15 aa, Homo sapiens
  CDR3 for alpha chain variable domain of TCR clone 327463 (TRAV4, TRAJ39)
CLVGPNNNAGNMLTF

SEQ ID NO: 654926 - protein, 12 aa, Homo sapiens
  CDR3 for beta chain variable domain of TCR clone 327463 (TRBV19, TRBJ2-7)
CASTDRGYEQYF

SEQ ID NO: 654927 - protein, 16 aa, Homo sapiens
  CDR3 for alpha chain variable domain of TCR clone 327464 (TRAV29/DV5, TRAJ36)
CAASAHYQSGANNLFL

SEQ ID NO: 654928 - protein, 16 aa, Homo sapiens
  CDR3 for beta chain variable domain of TCR clone 327464 (TRBV4-2, TRBJ2-3)
CASSQELAGDTDTQYF

SEQ ID NO: 654929 - protein, 11 aa, Homo sapiens
  CDR3 for alpha chain variable domain of TCR clone 327465 (TRAV12-3, TRAJ43)
CTISVSNDMRF

SEQ ID NO: 654930 - protein, 14 aa, Homo sapiens
  CDR3 for beta chain variable domain of TCR clone 327465 (TRBV7-2, TRBJ1-2)
CASSQTGSTYGYTF

SEQ ID NO: 654931 - protein, 14 aa, Homo sapiens
  CDR3 for alpha chain variable domain of TCR clone 327466 (TRAV12-2, TRAJ40)
GAVKIPSGTYKYIF

SEQ ID NO: 654932 - protein, 12 aa, Homo sapiens
  CDR3 for beta chain variable domain of TCR clone 327466 (TRBV11-2, TRBJ2-1)
CASSPGNNEQFF

SEQ ID NO: 654933 - protein, 15 aa, Homo sapiens
  CDR3 for alpha chain variable domain of TCR clone 327467 (TRAV8-3, TRAJ27)
CAVGPSKTNADKSTF

SEQ ID NO: 654934 - protein, 12 aa, Homo sapiens
  CDR3 for beta chain variable domain of TCR clone 327467 (TRBV11-2, TRBJ2-2)
CASSLGGGELFF

SEQ ID NO: 654935 - protein, 16 aa, Homo sapiens
  CDR3 for alpha chain variable domain of TCR clone 327468 (TRAV21, TRAJ45)
CAVSWGSGGGADGLSF

SEQ ID NO: 654936 - protein, 14 aa, Homo sapiens
  CDR3 for beta chain variable domain of TCR clone 327468 (TRBV4-2, TRBJ1-2)
CASTPGGSNYGYTF

SEQ ID NO: 654937 - protein, 11 aa, Homo sapiens
  CDR3 for alpha chain variable domain of TCR clone 327469 (TRAV12-3, TRAJ27)
CAMANAGKSTF

SEQ ID NO: 654938 - protein, 13 aa, Homo sapiens
  CDR3 for beta chain variable domain of TCR clone 327469 (TRBV20-1, TRBJ1-1)
CSARVGGNTEVFF

SEQ ID NO: 654939 - protein, 15 aa, Homo sapiens
  CDR3 for alpha chain variable domain of TCR clone 327470 (TRAV8-2, TRAJ15)
CVVTMGSQAGTALIF

SEQ ID NO: 654940 - protein, 18 aa, Homo sapiens
  CDR3 for beta chain variable domain of TCR clone 327470 (TRBV7-2, TRBJ2-3)
CASSVKREGSGITDTQYF

SEQ ID NO: 654941 - protein, 14 aa, Homo sapiens
  CDR3 for alpha chain variable domain of TCR clone 327471 (TRAV1-2, TRAJ16)
CAVNRFSDGQKLLF

SEQ ID NO: 654942 - protein, 16 aa, Homo sapiens
  CDR3 for beta chain variable domain of TCR clone 327471 (TRBV7-3, TRBJ2-3)
CASSVSGYRPEDTQYF

SEQ ID NO: 654943 - protein, 14 aa, Homo sapiens
  CDR3 for alpha chain variable domain of TCR clone 327472 (TRAV12-3, TRAJ10)
SHPPLTGGGNKLTF

SEQ ID NO: 654944 - protein, 16 aa, Homo sapiens
  CDR3 for beta chain variable domain of TCR clone 327472 (TRBV4-1, TRBJ1-4)
CASSQDLRRGGEKLFF

SEQ ID NO: 654945 - protein, 23 aa, Homo sapiens
  CDR3 for alpha chain variable domain of TCR clone 327473 (TRAV12-2, TRAJ36)
SLLIRDSQPSDSATLERANNLFF

SEQ ID NO: 654946 - protein, 14 aa, Homo sapiens
  CDR3 for beta chain variable domain of TCR clone 327473 (TRBV7-8, TRBJ2-3)
CASSSRDSTDTQYF

SEQ ID NO: 654947 - protein, 15 aa, Homo sapiens
  CDR3 for alpha chain variable domain of TCR clone 327474 (TRAV17, TRAJ57)
CATGPSQGGSEKLVF

SEQ ID NO: 654948 - protein, 15 aa, Homo sapiens
  CDR3 for beta chain variable domain of TCR clone 327474 (TRBV7-9, TRBJ1-6)
CASSSPGRGNSPLHF

SEQ ID NO: 654949 - protein, 12 aa, Homo sapiens
  CDR3 for alpha chain variable domain of TCR clone 327475 (TRAV13-1, TRAJ21)
CAAKEGFNTFYF

SEQ ID NO: 654950 - protein, 13 aa, Homo sapiens
  CDR3 for beta chain variable domain of TCR clone 327475 (TRBV19, TRBJ2-7)
CASSPRQSYEQYF

SEQ ID NO: 654951 - protein, 14 aa, Homo sapiens
  CDR3 for alpha chain variable domain of TCR clone 327476 (TRAV3, TRAJ21)
CAVESQANFNKFYS

SEQ ID NO: 654952 - protein, 18 aa, Homo sapiens
  CDR3 for beta chain variable domain of TCR clone 327476 (TRBV7-9, TRBJ2-1)
CASSLAVSGTSGRNEQFF

SEQ ID NO: 654953 - protein, 12 aa, Homo sapiens
  CDR3 for alpha chain variable domain of TCR clone 327477 (TRAV27, TRAJ36)
WAGMTGANNLFF

SEQ ID NO: 654954 - protein, 14 aa, Homo sapiens
  CDR3 for beta chain variable domain of TCR clone 327477 (TRBV12-4, TRBJ2-3)
CASSLVPSTDTQYF

SEQ ID NO: 654955 - protein, 16 aa, Homo sapiens
  CDR3 for alpha chain variable domain of TCR clone 327478 (TRAV12-1, TRAJ43)
CVVNPHRFGAGTRLTV

SEQ ID NO: 654956 - protein, 15 aa, Homo sapiens
  CDR3 for beta chain variable domain of TCR clone 327478 (TRBV7-2, TRBJ1-2)
CASSLVSGGGYGYTF

SEQ ID NO: 654957 - protein, 19 aa, Homo sapiens
  CDR3 for alpha chain variable domain of TCR clone 327479 (TRAV13-1, TRAJ52)
CAASLYQNAGGTSYGKLTF

SEQ ID NO: 654958 - protein, 13 aa, Homo sapiens
  CDR3 for beta chain variable domain of TCR clone 327479 (TRBV12-4, TRBJ1-1)
CASSPGTGFEAFF

SEQ ID NO: 654959 - protein, 14 aa, Homo sapiens
  CDR3 for alpha chain variable domain of TCR clone 327480 (TRAV1-2, TRAJ8)
CAVREDKGFQKLVF

SEQ ID NO: 654960 - protein, 15 aa, Homo sapiens
  CDR3 for beta chain variable domain of TCR clone 327480 (TRBV6-3, TRBJ2-7)
CDSSSPGTVFYEQYF

SEQ ID NO: 654961 - protein, 11 aa, Homo sapiens
  CDR3 for alpha chain variable domain of TCR clone 327481 (TRAV23/DV6, TRAJ49)
CAARAGNQFYF

SEQ ID NO: 654962 - protein, 14 aa, Homo sapiens
  CDR3 for beta chain variable domain of TCR clone 327481 (TRBV7-2, TRBJ2-7)
CASSPKTSFYEQYF

SEQ ID NO: 654963 - protein, 23 aa, Homo sapiens
  CDR3 for alpha chain variable domain of TCR clone 327482 (TRAV30, TRAJ43)
GLPAQLLRNLLLWHRGRGNDMRF

SEQ ID NO: 654964 - protein, 15 aa, Homo sapiens
  CDR3 for beta chain variable domain of TCR clone 327482 (TRBV27, TRBJ2-1)
CASSNGGGSSNEQFF

SEQ ID NO: 654965 - protein, 16 aa, Homo sapiens
  CDR3 for alpha chain variable domain of TCR clone 327483 (TRAV4, TRAJ9)
CLVGDPNRPGGFKTIF

SEQ ID NO: 654966 - protein, 16 aa, Homo sapiens
  CDR3 for beta chain variable domain of TCR clone 327483 (TRBV28, TRBJ1-4)
CASSPPYTGRSEKLFF

SEQ ID NO: 654967 - protein, 13 aa, Homo sapiens
  CDR3 for alpha chain variable domain of TCR clone 327484 (TRAV2, TRAJ40)
CAVVTSGTYKYIF

SEQ ID NO: 654968 - protein, 13 aa, Homo sapiens
  CDR3 for beta chain variable domain of TCR clone 327484 (TRBV19, TRBJ1-6)
CASSATGLSPLHF

SEQ ID NO: 654969 - protein, 15 aa, Homo sapiens
  CDR3 for alpha chain variable domain of TCR clone 327485 (TRAV29/DV5, TRAJ24)
CAASGAIDSWGKFQF

SEQ ID NO: 654970 - protein, 14 aa, Homo sapiens
  CDR3 for beta chain variable domain of TCR clone 327485 (TRBV12-5, TRBJ2-5)
CASGSRTHQETQYF

SEQ ID NO: 654971 - protein, 12 aa, Homo sapiens
  CDR3 for alpha chain variable domain of TCR clone 327486 (TRAV35, TRAJ30)
CAGLNSDDKIIF

SEQ ID NO: 654972 - protein, 15 aa, Homo sapiens
  CDR3 for beta chain variable domain of TCR clone 327486 (TRBV18, TRBJ2-3)
CASSPLAGETDTQYF

SEQ ID NO: 654973 - protein, 12 aa, Homo sapiens
  CDR3 for alpha chain variable domain of TCR clone 327487 (TRAV26-1, TRAJ36)
CIVRVRADNLFF

SEQ ID NO: 654974 - protein, 12 aa, Homo sapiens
  CDR3 for beta chain variable domain of TCR clone 327487 (TRBV12-4, TRBJ1-2)
CASSFIWLHLRF

SEQ ID NO: 654975 - protein, 15 aa, Homo sapiens
  CDR3 for alpha chain variable domain of TCR clone 327488 (TRAV21, TRAJ53)
CATLNSGGSHYKLTF

SEQ ID NO: 654976 - protein, 16 aa, Homo sapiens
  CDR3 for beta chain variable domain of TCR clone 327488 (TRBV12-4, TRBJ2-3)
CASSLRLAETTDTQYF

SEQ ID NO: 654977 - protein, 14 aa, Homo sapiens
  CDR3 for alpha chain variable domain of TCR clone 327489 (TRAV13-1, TRAJ40)
CAASMTSGTYKYIF

SEQ ID NO: 654978 - protein, 15 aa, Homo sapiens
  CDR3 for beta chain variable domain of TCR clone 327489 (TRBV7-3, TRBJ2-1)
CATSPTGGGEVEQFF

SEQ ID NO: 654979 - protein, 15 aa, Homo sapiens
  CDR3 for alpha chain variable domain of TCR clone 327490 (TRAV17, TRAJ57)
CATGPSQGGSANLVF

SEQ ID NO: 654980 - protein, 16 aa, Homo sapiens
  CDR3 for beta chain variable domain of TCR clone 327490 (TRBV12-4, TRBJ1-5)
CASSRPVGGSNQPQHF

SEQ ID NO: 654981 - protein, 12 aa, Homo sapiens
  CDR3 for alpha chain variable domain of TCR clone 327491 (TRAV12-3, TRAJ17)
CAMPLTGNKLTF

SEQ ID NO: 654982 - protein, 15 aa, Homo sapiens
  CDR3 for beta chain variable domain of TCR clone 327491 (TRBV20-1, TRBJ2-7)
CSARDRVAGMDEQYF

SEQ ID NO: 654983 - protein, 15 aa, Homo sapiens
  CDR3 for alpha chain variable domain of TCR clone 327492 (TRAV27, TRAJ17)
CRSTMIKAAGNKLTF

SEQ ID NO: 654984 - protein, 14 aa, Homo sapiens
  CDR3 for beta chain variable domain of TCR clone 327492 (TRBV4-2, TRBJ2-1)
CASGLDRAYNEQFF

SEQ ID NO: 654985 - protein, 18 aa, Homo sapiens
  CDR3 for alpha chain variable domain of TCR clone 327493 (TRAV26-1, TRAJ37)
CIVRVDMHGSSNTGKLIF

SEQ ID NO: 654986 - protein, 15 aa, Homo sapiens
  CDR3 for beta chain variable domain of TCR clone 327493 (TRBV20-1, TRBJ2-7)
CSASVLAAPLYEQYF

SEQ ID NO: 654987 - protein, 14 aa, Homo sapiens
  CDR3 for alpha chain variable domain of TCR clone 327494 (TRAV23/DV6, TRAJ37)
CAASTSSNTGKLIF

SEQ ID NO: 654988 - protein, 16 aa, Homo sapiens
  CDR3 for beta chain variable domain of TCR clone 327494 (TRBV20-1, TRBJ1-2)
CSASMGQGVANYGYTF

SEQ ID NO: 654989 - protein, 12 aa, Homo sapiens
  CDR3 for alpha chain variable domain of TCR clone 327495 (TRAV21, TRAJ27)
CAANTNAGKSTF

SEQ ID NO: 654990 - protein, 19 aa, Homo sapiens
  CDR3 for beta chain variable domain of TCR clone 327495 (TRBV25-1, TRBJ2-2)
CAILVYRVDRGRKTGELFF

SEQ ID NO: 654991 - protein, 16 aa, Homo sapiens
  CDR3 for alpha chain variable domain of TCR clone 327496 (TRAV27, TRAJ13)
CAGAKSDSGGYQKVTF

SEQ ID NO: 654992 - protein, 15 aa, Homo sapiens
  CDR3 for beta chain variable domain of TCR clone 327496 (TRBV29-1, TRBJ2-1)
CSVGRHALLYNEQFC

SEQ ID NO: 654993 - protein, 12 aa, Homo sapiens
  CDR3 for alpha chain variable domain of TCR clone 327497 (TRAV3, TRAJ20)
CAVRDPDYKLSF

SEQ ID NO: 654994 - protein, 14 aa, Homo sapiens
  CDR3 for beta chain variable domain of TCR clone 327497 (TRBV11-2, TRBJ1-5)
CASSLDRGRQPQHF

SEQ ID NO: 654995 - protein, 14 aa, Homo sapiens
  CDR3 for alpha chain variable domain of TCR clone 327498 (TRAV14/DV4, TRAJ42)
CPRGSLRSQGNPIF

SEQ ID NO: 654996 - protein, 16 aa, Homo sapiens
  CDR3 for beta chain variable domain of TCR clone 327498 (TRBV19, TRBJ2-1)
CASSKAGPSSYNEQFF

SEQ ID NO: 654997 - protein, 15 aa, Homo sapiens
  CDR3 for alpha chain variable domain of TCR clone 327499 (TRAV9-2, TRAJ49)
CALSPPDHTGNQFYF

SEQ ID NO: 654998 - protein, 13 aa, Homo sapiens
  CDR3 for beta chain variable domain of TCR clone 327499 (TRBV29-1, TRBJ2-5)
SSVGGTSAETQYF

SEQ ID NO: 654999 - protein, 14 aa, Homo sapiens
  CDR3 for alpha chain variable domain of TCR clone 327500 (TRAV8-3, TRAJ4)
CAVVAAGGYNKLIF

SEQ ID NO: 655000 - protein, 18 aa, Homo sapiens
  CDR3 for beta chain variable domain of TCR clone 327500 (TRBV6-5, TRBJ1-1)
CASSYSAPGGTGGTEAFF

SEQ ID NO: 655001 - protein, 15 aa, Homo sapiens
  CDR3 for alpha chain variable domain of TCR clone 327501 (TRAV16, TRAJ4)
CALEDPSGCYNKLIF

SEQ ID NO: 655002 - protein, 13 aa, Homo sapiens
  CDR3 for beta chain variable domain of TCR clone 327501 (TRBV7-3, TRBJ2-7)
CASSQAGGYEQYF

SEQ ID NO: 655003 - protein, 12 aa, Homo sapiens
  CDR3 for alpha chain variable domain of TCR clone 327502 (TRAV8-3, TRAJ20)
CAVGANDYKLSF

SEQ ID NO: 655004 - protein, 16 aa, Homo sapiens
  CDR3 for beta chain variable domain of TCR clone 327502 (TRBV19, TRBJ2-2)
CERRYKGKGATGELFF

SEQ ID NO: 655005 - protein, 15 aa, Homo sapiens
  CDR3 for alpha chain variable domain of TCR clone 327503 (TRAV26-1, TRAJ29)
CIVRVEGSGNAPLVF

SEQ ID NO: 655006 - protein, 14 aa, Homo sapiens
  CDR3 for beta chain variable domain of TCR clone 327503 (TRBV18, TRBJ2-5)
CASSHGVSQETQYF

SEQ ID NO: 655007 - protein, 14 aa, Homo sapiens
  CDR3 for alpha chain variable domain of TCR clone 327504 (TRAV1-2, TRAJ8)
CAVREDTGFQKLVF

SEQ ID NO: 655008 - protein, 13 aa, Homo sapiens
  CDR3 for beta chain variable domain of TCR clone 327504 (TRBV4-1, TRBJ1-1)
CASSLRGPTEAFF

SEQ ID NO: 655009 - protein, 20 aa, Homo sapiens
  CDR3 for alpha chain variable domain of TCR clone 327505 (TRAV8-3, TRAJ45)
LSTSVLWGSYSGGGADGLTF

SEQ ID NO: 655010 - protein, 15 aa, Homo sapiens
  CDR3 for beta chain variable domain of TCR clone 327505 (TRBV7-9, TRBJ1-6)
CASSSPGRGNSPLHF

SEQ ID NO: 655011 - protein, 12 aa, Homo sapiens
  CDR3 for alpha chain variable domain of TCR clone 327506 (TRAV1-1, TRAJ39)
CAVPVVGNMLTF

SEQ ID NO: 655012 - protein, 15 aa, Homo sapiens
  CDR3 for beta chain variable domain of TCR clone 327506 (TRBV19, TRBJ1-6)
CARSTQGAVGSPLHF

SEQ ID NO: 655013 - protein, 14 aa, Homo sapiens
  CDR3 for alpha chain variable domain of TCR clone 327507 (TRAV12-2, TRAJ33)
CAVKKARSNYQLIW

SEQ ID NO: 655014 - protein, 12 aa, Homo sapiens
  CDR3 for beta chain variable domain of TCR clone 327507 (TRBV24-1, TRBJ2-3)
CATSDSTDTQYF

SEQ ID NO: 655015 - protein, 11 aa, Homo sapiens
  CDR3 for alpha chain variable domain of TCR clone 327508 (TRAV23/DV6, TRAJ49)
CAVAPVTNSIL

SEQ ID NO: 655016 - protein, 13 aa, Homo sapiens
  CDR3 for beta chain variable domain of TCR clone 327508 (TRBV6-1, TRBJ1-1)
CASSRQGNTEAFF

SEQ ID NO: 655017 - protein, 19 aa, Homo sapiens
  CDR3 for alpha chain variable domain of TCR clone 327509 (TRAV1-2, TRAJ26)
CLLPLCCERPDNYGQNFVF

SEQ ID NO: 655018 - protein, 18 aa, Homo sapiens
  CDR3 for beta chain variable domain of TCR clone 327509 (TRBV28, TRBJ2-7)
CASSLYAGDNSGLNEQYF

SEQ ID NO: 655019 - protein, 16 aa, Homo sapiens
  CDR3 for alpha chain variable domain of TCR clone 327510 (TRAV30, TRAJ24)
CGTEIVDADSWGTFQF

SEQ ID NO: 655020 - protein, 14 aa, Homo sapiens
  CDR3 for beta chain variable domain of TCR clone 327510 (TRBV12-5, TRBJ2-5)
CASGSRTRQETQYF

SEQ ID NO: 655021 - protein, 10 aa, Homo sapiens
  CDR3 for alpha chain variable domain of TCR clone 327511 (TRAV23/DV6, TRAJ57)
CAASSTLSQG

SEQ ID NO: 655022 - protein, 14 aa, Homo sapiens
  CDR3 for beta chain variable domain of TCR clone 327511 (TRBV7-8, TRBJ2-5)
CASSATGGQETQYL

SEQ ID NO: 655023 - protein, 14 aa, Homo sapiens
  CDR3 for alpha chain variable domain of TCR clone 327512 (TRAV39, TRAJ58)
CAVDSETSGSRLTF

SEQ ID NO: 655024 - protein, 17 aa, Homo sapiens
  CDR3 for beta chain variable domain of TCR clone 327512 (TRBV20-1, TRBJ2-2)
CSASGSGQGGLTGELFF

SEQ ID NO: 655025 - protein, 17 aa, Homo sapiens
  CDR3 for alpha chain variable domain of TCR clone 327513 (TRAV3, TRAJ6)
CAVRDGPRAGGRYIPTF

SEQ ID NO: 655026 - protein, 16 aa, Homo sapiens
  CDR3 for beta chain variable domain of TCR clone 327513 (TRBV12-4, TRBJ1-5)
CASSRPVGGSNQPQHF

SEQ ID NO: 655027 - protein, 14 aa, Homo sapiens
  CDR3 for alpha chain variable domain of TCR clone 327514 (TRAV30, TRAJ33)
CGTVAPRSNYQLIW

SEQ ID NO: 655028 - protein, 17 aa, Homo sapiens
  CDR3 for beta chain variable domain of TCR clone 327514 (TRBV2, TRBJ2-7)
CASSQALTGWDSYEQYF

SEQ ID NO: 655029 - protein, 12 aa, Homo sapiens
  CDR3 for alpha chain variable domain of TCR clone 327515 (TRAV12-1, TRAJ16)
CVVFRDGQKLLF

SEQ ID NO: 655030 - protein, 16 aa, Homo sapiens
  CDR3 for beta chain variable domain of TCR clone 327515 (TRBV5-1, TRBJ2-3)
CASSLQGRVGADTQYF

SEQ ID NO: 655031 - protein, 13 aa, Homo sapiens
  CDR3 for alpha chain variable domain of TCR clone 327516 (TRAV1-1, TRAJ9)
CAAKNTGGFKTIF

SEQ ID NO: 655032 - protein, 14 aa, Homo sapiens
  CDR3 for beta chain variable domain of TCR clone 327516 (TRBV20-1, TRBJ2-7)
CSAQIGGSANEQFF

SEQ ID NO: 655033 - protein, 12 aa, Homo sapiens
  CDR3 for alpha chain variable domain of TCR clone 327517 (TRAV13-1, TRAJ49)
CAASPMGNQFYF

SEQ ID NO: 655034 - protein, 15 aa, Homo sapiens
  CDR3 for beta chain variable domain of TCR clone 327517 (TRBV19, TRBJ2-2)
CASSPRTGWTGELFF

SEQ ID NO: 655035 - protein, 13 aa, Homo sapiens
  CDR3 for alpha chain variable domain of TCR clone 327518 (TRAV13-1, TRAJ21)
CAASIYNFNKFYF

SEQ ID NO: 655036 - protein, 14 aa, Homo sapiens
  CDR3 for beta chain variable domain of TCR clone 327518 (TRBV20-1, TRBJ2-1)
CSAVDRGTYNEQFF

SEQ ID NO: 655037 - protein, 14 aa, Homo sapiens
  CDR3 for alpha chain variable domain of TCR clone 327519 (TRAV23/DV6, TRAJ57)
CAASNQRGSEKLVF

SEQ ID NO: 655038 - protein, 14 aa, Homo sapiens
  CDR3 for beta chain variable domain of TCR clone 327519 (TRBV11-1, TRBJ2-5)
CASSLEAYQETQYF

SEQ ID NO: 655039 - protein, 13 aa, Homo sapiens
  CDR3 for alpha chain variable domain of TCR clone 327520 (TRAV12-3, TRAJ33)
CAMSVNSNYQLIW

SEQ ID NO: 655040 - protein, 16 aa, Homo sapiens
  CDR3 for beta chain variable domain of TCR clone 327520 (TRBV15, TRBJ2-3)
CATSRSRQGGTDTQYF

SEQ ID NO: 655041 - protein, 14 aa, Homo sapiens
  CDR3 for alpha chain variable domain of TCR clone 327521 (TRAV29/DV5, TRAJ36)
CAARRKTGANNLFF

SEQ ID NO: 655042 - protein, 15 aa, Homo sapiens
  CDR3 for beta chain variable domain of TCR clone 327521 (TRBV7-9, TRBJ1-6)
CASSSPGRGNSPLLF

SEQ ID NO: 655043 - protein, 18 aa, Homo sapiens
  CDR3 for alpha chain variable domain of TCR clone 327522 (TRAV26-2, TRAJ54)
CILRDVEVGIQGAQKLVF

SEQ ID NO: 655044 - protein, 16 aa, Homo sapiens
  CDR3 for beta chain variable domain of TCR clone 327522 (TRBV28, TRBJ1-5)
CASSVTGQGWNQPQHF

SEQ ID NO: 655045 - protein, 14 aa, Homo sapiens
  CDR3 for alpha chain variable domain of TCR clone 327523 (TRAV14/DV4, TRAJ42)
CPRGSLRSQGNLIF

SEQ ID NO: 655046 - protein, 18 aa, Homo sapiens
  CDR3 for beta chain variable domain of TCR clone 327523 (TRBV20-1, TRBJ2-3)
CSASGLAGGPGATDTQYF

SEQ ID NO: 655047 - protein, 13 aa, Homo sapiens
  CDR3 for alpha chain variable domain of TCR clone 327524 (TRAV2, TRAJ29)
CAAGNSGNTPLVF

SEQ ID NO: 655048 - protein, 16 aa, Homo sapiens
  CDR3 for beta chain variable domain of TCR clone 327524 (TRBV7-9, TRBJ1-2)
CASSPGGGAINYDYTF

SEQ ID NO: 655049 - protein, 11 aa, Homo sapiens
  CDR3 for alpha chain variable domain of TCR clone 327525 (TRAV12-1, TRAJ37)
CVVNTPGKLIF

SEQ ID NO: 655050 - protein, 13 aa, Homo sapiens
  CDR3 for beta chain variable domain of TCR clone 327525 (TRBV12-4, TRBJ1-5)
CASSTDRAQPQHF

SEQ ID NO: 655051 - protein, 13 aa, Homo sapiens
  CDR3 for alpha chain variable domain of TCR clone 327526 (TRAV20, TRAJ37)
CAGCSSDTGKLIF

SEQ ID NO: 655052 - protein, 14 aa, Homo sapiens
  CDR3 for beta chain variable domain of TCR clone 327526 (TRBV20-1, TRBJ2-5)
CSARDGRAGETQYF

SEQ ID NO: 655053 - protein, 15 aa, Homo sapiens
  CDR3 for alpha chain variable domain of TCR clone 327527 (TRAV9-2, TRAJ30)
CAFRGQMNRDDKIIF

SEQ ID NO: 655054 - protein, 14 aa, Homo sapiens
  CDR3 for beta chain variable domain of TCR clone 327527 (TRBV19, TRBJ2-1)
CASPTFVLSGEQFF

SEQ ID NO: 655055 - protein, 13 aa, Homo sapiens
  CDR3 for alpha chain variable domain of TCR clone 327528 (TRAV13-1, TRAJ10)
CAALEGGGNKLIF

SEQ ID NO: 655056 - protein, 17 aa, Homo sapiens
  CDR3 for beta chain variable domain of TCR clone 327528 (TRBV7-3, TRBJ2-2)
CASSLSGTSGGTGELFF

SEQ ID NO: 655057 - protein, 12 aa, Homo sapiens
  CDR3 for alpha chain variable domain of TCR clone 327529 (TRAV8-3, TRAJ26)
CAGDNYGKNFVF

SEQ ID NO: 655058 - protein, 16 aa, Homo sapiens
  CDR3 for beta chain variable domain of TCR clone 327529 (TRBV20-1, TRBJ1-4)
CSAPGQGLLTNEKLFF

SEQ ID NO: 655059 - protein, 11 aa, Homo sapiens
  CDR3 for alpha chain variable domain of TCR clone 327530 (TRAV4, TRAJ20)
CLVGDKLTTTS

SEQ ID NO: 655060 - protein, 13 aa, Homo sapiens
  CDR3 for beta chain variable domain of TCR clone 327530 (TRBV27, TRBJ1-4)
CASSLMGDEKLFF

SEQ ID NO: 655061 - protein, 16 aa, Homo sapiens
  CDR3 for alpha chain variable domain of TCR clone 327531 (TRAV23/DV6, TRAJ9)
CAASIGGHTGGFNTIF

SEQ ID NO: 655062 - protein, 18 aa, Homo sapiens
  CDR3 for beta chain variable domain of TCR clone 327531 (TRBV7-9, TRBJ2-7)
CASSLTTSGSRTWYEQYF

SEQ ID NO: 655063 - protein, 15 aa, Homo sapiens
  CDR3 for alpha chain variable domain of TCR clone 327532 (TRAV13-2, TRAJ3)
CAENTAYGSASKIIF

SEQ ID NO: 655064 - protein, 16 aa, Homo sapiens
  CDR3 for beta chain variable domain of TCR clone 327532 (TRBV28, TRBJ2-7)
CASSPWVATGDLSQYF

SEQ ID NO: 655065 - protein, 12 aa, Homo sapiens
  CDR3 for alpha chain variable domain of TCR clone 327533 (TRAV27, TRAJ42)
CAGGGSQGNLIF

SEQ ID NO: 655066 - protein, 15 aa, Homo sapiens
  CDR3 for beta chain variable domain of TCR clone 327533 (TRBV27, TRBJ1-6)
CASSFDRGLGSPLHF

SEQ ID NO: 655067 - protein, 14 aa, Homo sapiens
  CDR3 for alpha chain variable domain of TCR clone 327534 (TRAV12-3, TRAJ58)
CAMSKETSGSRLTF

SEQ ID NO: 655068 - protein, 15 aa, Homo sapiens
  CDR3 for beta chain variable domain of TCR clone 327534 (TRBV4-1, TRBJ1-4)
CASSDTGGTNEKLFF

SEQ ID NO: 655069 - protein, 14 aa, Homo sapiens
  CDR3 for alpha chain variable domain of TCR clone 327535 (TRAV12-2, TRAJ44)
CAVNPAVTASKLTF

SEQ ID NO: 655070 - protein, 14 aa, Homo sapiens
  CDR3 for beta chain variable domain of TCR clone 327535 (TRBV6-1, TRBJ1-3)
CASVQGGGGNTIYF

SEQ ID NO: 655071 - protein, 14 aa, Homo sapiens
  CDR3 for alpha chain variable domain of TCR clone 327536 (TRAV12-1, TRAJ12)
CVVTGMDSSYKLIF

SEQ ID NO: 655072 - protein, 14 aa, Homo sapiens
  CDR3 for beta chain variable domain of TCR clone 327536 (TRBV18, TRBJ2-7)
CASSPRGGAYEQYF

SEQ ID NO: 655073 - protein, 13 aa, Homo sapiens
  CDR3 for alpha chain variable domain of TCR clone 327537 (TRAV21, TRAJ15)
CAVANQAGTALIF

SEQ ID NO: 655074 - protein, 13 aa, Homo sapiens
  CDR3 for beta chain variable domain of TCR clone 327537 (TRBV27, TRBJ2-2)
CQQLGAATGELFF

SEQ ID NO: 655075 - protein, 15 aa, Homo sapiens
  CDR3 for alpha chain variable domain of TCR clone 327538 (TRAV8-3, TRAJ45)
CASSYSGGGAAVLTF

SEQ ID NO: 655076 - protein, 13 aa, Homo sapiens
  CDR3 for beta chain variable domain of TCR clone 327538 (TRBV10-3, TRBJ2-7)
CASKLAVNYEQYF

SEQ ID NO: 655077 - protein, 12 aa, Homo sapiens
  CDR3 for alpha chain variable domain of TCR clone 327539 (TRAV20, TRAJ39)
CAVGNAGNMLTF

SEQ ID NO: 655078 - protein, 15 aa, Homo sapiens
  CDR3 for beta chain variable domain of TCR clone 327539 (TRBV5-1, TRBJ1-1)
CASSWTGRGNTEASF

SEQ ID NO: 655079 - protein, 16 aa, Homo sapiens
  CDR3 for alpha chain variable domain of TCR clone 327540 (TRAV26-1, TRAJ23)
CIFRVHPYNQGGKFIF

SEQ ID NO: 655080 - protein, 13 aa, Homo sapiens
  CDR3 for beta chain variable domain of TCR clone 327540 (TRBV20-1, TRBJ2-5)
CSARGDYQETQYF

SEQ ID NO: 655081 - protein, 18 aa, Homo sapiens
  CDR3 for alpha chain variable domain of TCR clone 327541 (TRAV21, TRAJ52)
CAVSPSPAGGTSYGKLTF

SEQ ID NO: 655082 - protein, 13 aa, Homo sapiens
  CDR3 for beta chain variable domain of TCR clone 327541 (TRBV20-1, TRBJ2-5)
CSAREAFQETQYF

SEQ ID NO: 655083 - protein, 10 aa, Homo sapiens
  CDR3 for alpha chain variable domain of TCR clone 327542 (TRAV25, TRAJ20)
CAVNDYKLSF

SEQ ID NO: 655084 - protein, 14 aa, Homo sapiens
  CDR3 for beta chain variable domain of TCR clone 327542 (TRBV19, TRBJ2-1)
CASPTFVLSGEQFF

SEQ ID NO: 655085 - protein, 16 aa, Homo sapiens
  CDR3 for alpha chain variable domain of TCR clone 327543 (TRAV26-1, TRAJ58)
IASSESGETSGSRLTF

SEQ ID NO: 655086 - protein, 17 aa, Homo sapiens
  CDR3 for beta chain variable domain of TCR clone 327543 (TRBV7-8, TRBJ2-6)
CASSAGTGGAGANVLTF

SEQ ID NO: 655087 - protein, 14 aa, Homo sapiens
  CDR3 for alpha chain variable domain of TCR clone 327544 (TRAV8-4, TRAJ9)
CAVRINTGGFKTIF

SEQ ID NO: 655088 - protein, 14 aa, Homo sapiens
  CDR3 for beta chain variable domain of TCR clone 327544 (TRBV19, TRBJ2-1)
CASPTFVLSGEHFF

SEQ ID NO: 655089 - protein, 14 aa, Homo sapiens
  CDR3 for alpha chain variable domain of TCR clone 327545 (TRAV4, TRAJ9)
CLVGSGTGGFKTLF

SEQ ID NO: 655090 - protein, 14 aa, Homo sapiens
  CDR3 for beta chain variable domain of TCR clone 327545 (TRBV7-9, TRBJ2-4)
CASSLAMGGNIQYF

SEQ ID NO: 655091 - protein, 14 aa, Homo sapiens
  CDR3 for alpha chain variable domain of TCR clone 327546 (TRAV1-2, TRAJ16)
CAVNRFSDGQKLLF

SEQ ID NO: 655092 - protein, 16 aa, Homo sapiens
  CDR3 for beta chain variable domain of TCR clone 327546 (TRBV4-2, TRBJ2-7)
CASSQEGLANSYKQYF

SEQ ID NO: 655093 - protein, 12 aa, Homo sapiens
  CDR3 for alpha chain variable domain of TCR clone 327547 (TRAV8-3, TRAJ20)
CAVGGGDYKLSF

SEQ ID NO: 655094 - protein, 14 aa, Homo sapiens
  CDR3 for beta chain variable domain of TCR clone 327547 (TRBV19, TRBJ1-3)
CASNRGNSGNTIYF

SEQ ID NO: 655095 - protein, 11 aa, Homo sapiens
  CDR3 for alpha chain variable domain of TCR clone 327548 (TRAV13-1, TRAJ30)
CAASRDDKIIF

SEQ ID NO: 655096 - protein, 15 aa, Homo sapiens
  CDR3 for beta chain variable domain of TCR clone 327548 (TRBV18, TRBJ1-1)
CASSPSSWVNTEASF

SEQ ID NO: 655097 - protein, 23 aa, Homo sapiens
  CDR3 for alpha chain variable domain of TCR clone 327549 (TRAV3, TRAJ32)
CAVRDELVLQTSSSLELAICLLS

SEQ ID NO: 655098 - protein, 12 aa, Homo sapiens
  CDR3 for beta chain variable domain of TCR clone 327549 (TRBV6-1, TRBJ2-7)
CASSDYSYEQYF

SEQ ID NO: 655099 - protein, 13 aa, Homo sapiens
  CDR3 for alpha chain variable domain of TCR clone 327550 (TRAV17, TRAJ5)
CALRGTGRRALTF

SEQ ID NO: 655100 - protein, 10 aa, Homo sapiens
  CDR3 for beta chain variable domain of TCR clone 327550 (TRBV2, TRBJ2-5)
CASSAATQYF

SEQ ID NO: 655101 - protein, 13 aa, Homo sapiens
  CDR3 for alpha chain variable domain of TCR clone 327551 (TRAV21, TRAJ15)
CAVANQAGTALIF

SEQ ID NO: 655102 - protein, 13 aa, Homo sapiens
  CDR3 for beta chain variable domain of TCR clone 327551 (TRBV7-9, TRBJ1-2)
CASSLKQNYGYTF

SEQ ID NO: 655103 - protein, 14 aa, Homo sapiens
  CDR3 for alpha chain variable domain of TCR clone 327552 (TRAV17, TRAJ4)
CATAPLGGYNKLIL

SEQ ID NO: 655104 - protein, 13 aa, Homo sapiens
  CDR3 for beta chain variable domain of TCR clone 327552 (TRBV12-4, TRBJ1-3)
CASSLASGNTIYF

SEQ ID NO: 655105 - protein, 13 aa, Homo sapiens
  CDR3 for alpha chain variable domain of TCR clone 327553 (TRAV2, TRAJ15)
CAVASQAGTSLIF

SEQ ID NO: 655106 - protein, 15 aa, Homo sapiens
  CDR3 for beta chain variable domain of TCR clone 327553 (TRBV20-1, TRBJ2-7)
CSARDRVSGMDEQYF

SEQ ID NO: 655107 - protein, 18 aa, Homo sapiens
  CDR3 for alpha chain variable domain of TCR clone 327554 (TRAV13-1, TRAJ52)
CAAKNPNAGGTSYGKLTF

SEQ ID NO: 655108 - protein, 13 aa, Homo sapiens
  CDR3 for beta chain variable domain of TCR clone 327554 (TRBV7-2, TRBJ2-3)
CASSFPGTDTQYF

SEQ ID NO: 655109 - protein, 14 aa, Homo sapiens
  CDR3 for alpha chain variable domain of TCR clone 327555 (TRAV3, TRAJ39)
CAVSADNAGNMLTF

SEQ ID NO: 655110 - protein, 19 aa, Homo sapiens
  CDR3 for beta chain variable domain of TCR clone 327555 (TRBV4-3, TRBJ2-7)
CASSQEFIGWQVTPYEQYS

SEQ ID NO: 655111 - protein, 14 aa, Homo sapiens
  CDR3 for alpha chain variable domain of TCR clone 327556 (TRAV8-6, TRAJ30)
CAVSEQNRDDKIIF

SEQ ID NO: 655112 - protein, 13 aa, Homo sapiens
  CDR3 for beta chain variable domain of TCR clone 327556 (TRBV20-1, TRBJ2-2)
CSASAAGTGELFF

SEQ ID NO: 655113 - protein, 15 aa, Homo sapiens
  CDR3 for alpha chain variable domain of TCR clone 327557 (TRAV23/DV6, TRAJ45)
CAASSAGGGADGLAF

SEQ ID NO: 655114 - protein, 14 aa, Homo sapiens
  CDR3 for beta chain variable domain of TCR clone 327557 (TRBV7-2, TRBJ1-1)
CASSFLTGTTEAFF

SEQ ID NO: 655115 - protein, 12 aa, Homo sapiens
  CDR3 for alpha chain variable domain of TCR clone 327558 (TRAV13-2, TRAJ8)
CAPWLGFQKLVF

SEQ ID NO: 655116 - protein, 15 aa, Homo sapiens
  CDR3 for beta chain variable domain of TCR clone 327558 (TRBV20-1, TRBJ2-7)
CSAESGTSGAYEQYF

SEQ ID NO: 655117 - protein, 14 aa, Homo sapiens
  CDR3 for alpha chain variable domain of TCR clone 327559 (TRAV35, TRAJ22)
CAGLRPGSARQQTF

SEQ ID NO: 655118 - protein, 13 aa, Homo sapiens
  CDR3 for beta chain variable domain of TCR clone 327559 (TRBV12-4, TRBJ2-2)
CASSWGEGGELFF

SEQ ID NO: 655119 - protein, 19 aa, Homo sapiens
  CDR3 for alpha chain variable domain of TCR clone 327560 (TRAV2, TRAJ20)
ILQVREADAAVYRDCKLSF

SEQ ID NO: 655120 - protein, 13 aa, Homo sapiens
  CDR3 for beta chain variable domain of TCR clone 327560 (TRBV5-4, TRBJ2-5)
CASSPVSQETQYF

SEQ ID NO: 655121 - protein, 15 aa, Homo sapiens
  CDR3 for alpha chain variable domain of TCR clone 327561 (TRAV3, TRAJ22)
CAVRDRGGSARQLTF

SEQ ID NO: 655122 - protein, 17 aa, Homo sapiens
  CDR3 for beta chain variable domain of TCR clone 327561 (TRBV28, TRBJ2-5)
WASSTPEGDALQETQYF

SEQ ID NO: 655123 - protein, 14 aa, Homo sapiens
  CDR3 for alpha chain variable domain of TCR clone 327562 (TRAV12-1, TRAJ30)
CVVNIGRRDDKIIF

SEQ ID NO: 655124 - protein, 13 aa, Homo sapiens
  CDR3 for beta chain variable domain of TCR clone 327562 (TRBV12-5, TRBJ2-1)
CASGLGRGNEQFF

SEQ ID NO: 655125 - protein, 12 aa, Homo sapiens
  CDR3 for alpha chain variable domain of TCR clone 327563 (TRAV2, TRAJ9)
CAVGAGGFKTIF

SEQ ID NO: 655126 - protein, 18 aa, Homo sapiens
  CDR3 for beta chain variable domain of TCR clone 327563 (TRBV19, TRBJ2-6)
CASSKNRGTHSGANVLTF

SEQ ID NO: 655127 - protein, 17 aa, Homo sapiens
  CDR3 for alpha chain variable domain of TCR clone 327564 (TRAV38-1, TRAJ45)
WAFMRSHSGGGADGLTF

SEQ ID NO: 655128 - protein, 15 aa, Homo sapiens
  CDR3 for beta chain variable domain of TCR clone 327564 (TRBV7-2, TRBJ2-3)
CASSLVVRGPDTQYF

SEQ ID NO: 655129 - protein, 14 aa, Homo sapiens
  CDR3 for alpha chain variable domain of TCR clone 327565 (TRAV12-2, TRAJ9)
CAVNMEGGGFKTIF

SEQ ID NO: 655130 - protein, 13 aa, Homo sapiens
  CDR3 for beta chain variable domain of TCR clone 327565 (TRBV10-3, TRBJ2-7)
CASKLAVNYEQYF

SEQ ID NO: 655131 - protein, 15 aa, Homo sapiens
  CDR3 for alpha chain variable domain of TCR clone 327566 (TRAV13-2, TRAJ40)
CAKNRSRQGTYKYIF

SEQ ID NO: 655132 - protein, 15 aa, Homo sapiens
  CDR3 for beta chain variable domain of TCR clone 327566 (TRBV19, TRBJ2-1)
CASSMGWNSNNEQFF

SEQ ID NO: 655133 - protein, 14 aa, Homo sapiens
  CDR3 for alpha chain variable domain of TCR clone 327567 (TRAV26-1, TRAJ38)
CIADNAGNNRKPIR

SEQ ID NO: 655134 - protein, 13 aa, Homo sapiens
  CDR3 for beta chain variable domain of TCR clone 327567 (TRBV12-4, TRBJ1-1)
CASSFGEDTEAFF

SEQ ID NO: 655135 - protein, 13 aa, Homo sapiens
  CDR3 for alpha chain variable domain of TCR clone 327568 (TRAV8-3, TRAJ36)
CAVGATGANNLFF

SEQ ID NO: 655136 - protein, 14 aa, Homo sapiens
  CDR3 for beta chain variable domain of TCR clone 327568 (TRBV19, TRBJ2-7)
CASSLRDRGYEQYF

SEQ ID NO: 655137 - protein, 14 aa, Homo sapiens
  CDR3 for alpha chain variable domain of TCR clone 327569 (TRAV12-1, TRAJ17)
CVVNFKAAGYKLTF

SEQ ID NO: 655138 - protein, 17 aa, Homo sapiens
  CDR3 for beta chain variable domain of TCR clone 327569 (TRBV20-1, TRBJ2-1)
CSASASGLAGSYNEQFF

SEQ ID NO: 655139 - protein, 14 aa, Homo sapiens
  CDR3 for alpha chain variable domain of TCR clone 327570 (TRAV3, TRAJ34)
CAVRAPRNTDKLIF

SEQ ID NO: 655140 - protein, 17 aa, Homo sapiens
  CDR3 for beta chain variable domain of TCR clone 327570 (TRBV20-1, TRBJ2-7)
CSAAPGLARGISYEQYF

SEQ ID NO: 655141 - protein, 13 aa, Homo sapiens
  CDR3 for alpha chain variable domain of TCR clone 327571 (TRAV1-1, TRAJ31)
CASCLNNNARLMF

SEQ ID NO: 655142 - protein, 13 aa, Homo sapiens
  CDR3 for beta chain variable domain of TCR clone 327571 (TRBV15, TRBJ1-6)
CATSGGLNSPLHF

SEQ ID NO: 655143 - protein, 12 aa, Homo sapiens
  CDR3 for alpha chain variable domain of TCR clone 327572 (TRAV23/DV6, TRAJ27)
CAASKSAGKSTF

SEQ ID NO: 655144 - protein, 15 aa, Homo sapiens
  CDR3 for beta chain variable domain of TCR clone 327572 (TRBV4-1, TRBJ1-4)
CASSDTGGTNEKLFF

SEQ ID NO: 655145 - protein, 14 aa, Homo sapiens
  CDR3 for alpha chain variable domain of TCR clone 327573 (TRAV12-1, TRAJ41)
CVVFNSNSGYALNF

SEQ ID NO: 655146 - protein, 14 aa, Homo sapiens
  CDR3 for beta chain variable domain of TCR clone 327573 (TRBV5-1, TRBJ2-7)
CASSRGESLYEQYF

SEQ ID NO: 655147 - protein, 12 aa, Homo sapiens
  CDR3 for alpha chain variable domain of TCR clone 327574 (TRAV12-3, TRAJ20)
CAMVRGDYKLSF

SEQ ID NO: 655148 - protein, 13 aa, Homo sapiens
  CDR3 for beta chain variable domain of TCR clone 327574 (TRBV7-2, TRBJ1-6)
CASSLKFDSPLHF

SEQ ID NO: 655149 - protein, 22 aa, Homo sapiens
  CDR3 for alpha chain variable domain of TCR clone 327575 (TRAV3, TRAJ38)
CAVRDCLNAGNNHIQNPDPAVY

SEQ ID NO: 655150 - protein, 16 aa, Homo sapiens
  CDR3 for beta chain variable domain of TCR clone 327575 (TRBV7-7, TRBJ2-1)
CASSLASGTSYNEQFF

SEQ ID NO: 655151 - protein, 15 aa, Homo sapiens
  CDR3 for alpha chain variable domain of TCR clone 327576 (TRAV1-2, TRAJ15)
CAVDVMGSAGTALIF

SEQ ID NO: 655152 - protein, 12 aa, Homo sapiens
  CDR3 for beta chain variable domain of TCR clone 327576 (TRBV11-2, TRBJ2-2)
CASSLPTGELFF

SEQ ID NO: 655153 - protein, 23 aa, Homo sapiens
  CDR3 for alpha chain variable domain of TCR clone 327577 (TRAV8-3, )
CAVVTTRIPDIQNPDPAAYQLRD

SEQ ID NO: 655154 - protein, 14 aa, Homo sapiens
  CDR3 for beta chain variable domain of TCR clone 327577 (TRBV11-2, TRBJ2-7)
CASSPSTTSYEQYF

SEQ ID NO: 655155 - protein, 13 aa, Homo sapiens
  CDR3 for alpha chain variable domain of TCR clone 327578 (TRAV26-1, TRAJ34)
CIVRGHNTDKLIF

SEQ ID NO: 655156 - protein, 17 aa, Homo sapiens
  CDR3 for beta chain variable domain of TCR clone 327578 (TRBV4-1, TRBJ2-7)
CASSQEWGPPTSSTSGR

SEQ ID NO: 655157 - protein, 16 aa, Homo sapiens
  CDR3 for alpha chain variable domain of TCR clone 327579 (TRAV17, TRAJ52)
CATSNAGGTSYGKLTF

SEQ ID NO: 655158 - protein, 11 aa, Homo sapiens
  CDR3 for beta chain variable domain of TCR clone 327579 (TRBV11-2, TRBJ1-1)
CASSINTEAFF

SEQ ID NO: 655159 - protein, 14 aa, Homo sapiens
  CDR3 for alpha chain variable domain of TCR clone 327580 (TRAV26-1, TRAJ38)
CIADNAGNNRTLIW

SEQ ID NO: 655160 - protein, 15 aa, Homo sapiens
  CDR3 for beta chain variable domain of TCR clone 327580 (TRBV20-1, TRBJ2-7)
CSARDRVSGMDEQYF

SEQ ID NO: 655161 - protein, 12 aa, Homo sapiens
  CDR3 for alpha chain variable domain of TCR clone 327581 (TRAV13-1, TRAJ49)
CAAPNTGHQFYF

SEQ ID NO: 655162 - protein, 17 aa, Homo sapiens
  CDR3 for beta chain variable domain of TCR clone 327581 (TRBV25-1, TRBJ2-7)
CASSDARVVFSSYEQYF

SEQ ID NO: 655163 - protein, 17 aa, Homo sapiens
  CDR3 for alpha chain variable domain of TCR clone 327582 (TRAV16, TRAJ58)
CITVLSNGETSGARLTF

SEQ ID NO: 655164 - protein, 13 aa, Homo sapiens
  CDR3 for beta chain variable domain of TCR clone 327582 (TRBV20-1, TRBJ2-2)
CSASAAGTGELFF

SEQ ID NO: 655165 - protein, 13 aa, Homo sapiens
  CDR3 for alpha chain variable domain of TCR clone 327583 (TRAV3, TRAJ21)
CAVREPDFNKFYF

SEQ ID NO: 655166 - protein, 15 aa, Homo sapiens
  CDR3 for beta chain variable domain of TCR clone 327583 (TRBV4-3, TRBJ2-7)
CASSRGGRGIYEQYF

SEQ ID NO: 655167 - protein, 12 aa, Homo sapiens
  CDR3 for alpha chain variable domain of TCR clone 327584 (TRAV12-3, TRAJ17)
CAMTLTGNNLTF

SEQ ID NO: 655168 - protein, 13 aa, Homo sapiens
  CDR3 for beta chain variable domain of TCR clone 327584 (TRBV14, TRBJ1-2)
CASSEDRRYGYTF

SEQ ID NO: 655169 - protein, 14 aa, Homo sapiens
  CDR3 for alpha chain variable domain of TCR clone 327585 (TRAV8-6, TRAJ37)
CAVRLSGNTGKLIF

SEQ ID NO: 655170 - protein, 14 aa, Homo sapiens
  CDR3 for beta chain variable domain of TCR clone 327585 (TRBV13, TRBJ2-5)
CARSLERVGETQYF

SEQ ID NO: 655171 - protein, 11 aa, Homo sapiens
  CDR3 for alpha chain variable domain of TCR clone 327586 (TRAV12-1, TRAJ26)
CVLAYGQNFVF

SEQ ID NO: 655172 - protein, 13 aa, Homo sapiens
  CDR3 for beta chain variable domain of TCR clone 327586 (TRBV7-2, TRBJ2-4)
CASSREHANIQYF

SEQ ID NO: 655173 - protein, 13 aa, Homo sapiens
  CDR3 for alpha chain variable domain of TCR clone 327587 (TRAV23/DV6, TRAJ21)
CSASREQLQQILL

SEQ ID NO: 655174 - protein, 16 aa, Homo sapiens
  CDR3 for beta chain variable domain of TCR clone 327587 (TRBV20-1, TRBJ2-3)
CSAVRDRGPIADTQYF

SEQ ID NO: 655175 - protein, 14 aa, Homo sapiens
  CDR3 for alpha chain variable domain of TCR clone 327588 (TRAV1-2, TRAJ16)
CAVNRFSDGQKLLF

SEQ ID NO: 655176 - protein, 12 aa, Homo sapiens
  CDR3 for beta chain variable domain of TCR clone 327588 (TRBV7-2, TRBJ2-3)
CASSLIGETQYF

SEQ ID NO: 655177 - protein, 13 aa, Homo sapiens
  CDR3 for alpha chain variable domain of TCR clone 327589 (TRAV2, TRAJ39)
TTVHNIAGNMLTF

SEQ ID NO: 655178 - protein, 16 aa, Homo sapiens
  CDR3 for beta chain variable domain of TCR clone 327589 (TRBV24-1, TRBJ2-3)
CATSGYRDRDTDTQYF

SEQ ID NO: 655179 - protein, 12 aa, Homo sapiens
  CDR3 for alpha chain variable domain of TCR clone 327590 (TRAV12-3, TRAJ17)
CAMTLTGNKLTF

SEQ ID NO: 655180 - protein, 16 aa, Homo sapiens
  CDR3 for beta chain variable domain of TCR clone 327590 (TRBV20-1, TRBJ2-1)
CSARDPLAGGGGEQFF

SEQ ID NO: 655181 - protein, 14 aa, Homo sapiens
  CDR3 for alpha chain variable domain of TCR clone 327591 (TRAV8-6, TRAJ36)
CAVSGKTGANNLFF

SEQ ID NO: 655182 - protein, 15 aa, Homo sapiens
  CDR3 for beta chain variable domain of TCR clone 327591 (TRBV6-6, TRBJ2-7)
CASSYSDGGSYEQYF

SEQ ID NO: 655183 - protein, 17 aa, Homo sapiens
  CDR3 for alpha chain variable domain of TCR clone 327592 (TRAV12-2, TRAJ52)
CAVNPYAGGTSYGKLTF

SEQ ID NO: 655184 - protein, 14 aa, Homo sapiens
  CDR3 for beta chain variable domain of TCR clone 327592 (TRBV19, TRBJ2-1)
CASPTFVVSGEQFF

SEQ ID NO: 655185 - protein, 14 aa, Homo sapiens
  CDR3 for alpha chain variable domain of TCR clone 327593 (TRAV35, TRAJ22)
CAGLRPGSARQLTF

SEQ ID NO: 655186 - protein, 14 aa, Homo sapiens
  CDR3 for beta chain variable domain of TCR clone 327593 (TRBV4-1, TRBJ2-7)
CASSTVAGGDEQYF

SEQ ID NO: 655187 - protein, 16 aa, Homo sapiens
  CDR3 for alpha chain variable domain of TCR clone 327594 (TRAV12-1, TRAJ48)
CVVNMVSNFGNEKLTF

SEQ ID NO: 655188 - protein, 16 aa, Homo sapiens
  CDR3 for beta chain variable domain of TCR clone 327594 (TRBV19, TRBJ2-3)
CASSFYTTGIGDTQYF

SEQ ID NO: 655189 - protein, 15 aa, Homo sapiens
  CDR3 for alpha chain variable domain of TCR clone 327595 (TRAV12-3, TRAJ6)
CAMSATTGGSYIPTF

SEQ ID NO: 655190 - protein, 18 aa, Homo sapiens
  CDR3 for beta chain variable domain of TCR clone 327595 (TRBV20-1, TRBJ2-3)
CSASGLAGGPGTTDRQYF

SEQ ID NO: 655191 - protein, 13 aa, Homo sapiens
  CDR3 for alpha chain variable domain of TCR clone 327596 (TRAV12-1, TRAJ39)
CVVNYTAGNMLTF

SEQ ID NO: 655192 - protein, 14 aa, Homo sapiens
  CDR3 for beta chain variable domain of TCR clone 327596 (TRBV27, TRBJ2-3)
CASSPLGTTDTQYF

SEQ ID NO: 655193 - protein, 13 aa, Homo sapiens
  CDR3 for alpha chain variable domain of TCR clone 327597 (TRAV13-2, TRAJ13)
CAERPGGYQKVTF

SEQ ID NO: 655194 - protein, 14 aa, Homo sapiens
  CDR3 for beta chain variable domain of TCR clone 327597 (TRBV12-4, TRBJ1-1)
CASSLGTGGTEAFF

SEQ ID NO: 655195 - protein, 10 aa, Homo sapiens
  CDR3 for alpha chain variable domain of TCR clone 327598 (TRAV1-2, TRAJ20)
CALNDYKLSF

SEQ ID NO: 655196 - protein, 14 aa, Homo sapiens
  CDR3 for beta chain variable domain of TCR clone 327598 (TRBV19, TRBJ1-5)
CASRAPDSLLSQHF

SEQ ID NO: 655197 - protein, 13 aa, Homo sapiens
  CDR3 for alpha chain variable domain of TCR clone 327599 (TRAV12-3, TRAJ53)
CAMRGGSNYKLTF

SEQ ID NO: 655198 - protein, 15 aa, Homo sapiens
  CDR3 for beta chain variable domain of TCR clone 327599 (TRBV2, TRBJ2-1)
CATQARIVMIGEQFF

SEQ ID NO: 655199 - protein, 16 aa, Homo sapiens
  CDR3 for alpha chain variable domain of TCR clone 327600 (TRAV35, TRAJ37)
CWAFLRGSSNTGKLIF

SEQ ID NO: 655200 - protein, 13 aa, Homo sapiens
  CDR3 for beta chain variable domain of TCR clone 327600 (TRBV2, TRBJ1-2)
CASSVRGNYGHTF

SEQ ID NO: 655201 - protein, 14 aa, Homo sapiens
  CDR3 for alpha chain variable domain of TCR clone 327601 (TRAV35, TRAJ43)
CAGAYNKMTCALEQ

SEQ ID NO: 655202 - protein, 14 aa, Homo sapiens
  CDR3 for beta chain variable domain of TCR clone 327601 (TRBV2, TRBJ2-2)
CASSWQGATGELFF

SEQ ID NO: 655203 - protein, 13 aa, Homo sapiens
  CDR3 for alpha chain variable domain of TCR clone 327602 (TRAV1-2, TRAJ9)
CAALNTGGFKTIF

SEQ ID NO: 655204 - protein, 14 aa, Homo sapiens
  CDR3 for beta chain variable domain of TCR clone 327602 (TRBV18, TRBJ2-5)
CASSPGVSQETQYF

SEQ ID NO: 655205 - protein, 13 aa, Homo sapiens
  CDR3 for alpha chain variable domain of TCR clone 327603 (TRAV20, TRAJ29)
CAVQGVGNTPLVF

SEQ ID NO: 655206 - protein, 15 aa, Homo sapiens
  CDR3 for beta chain variable domain of TCR clone 327603 (TRBV10-2, TRBJ2-5)
CASRGSGGPQETQYF

SEQ ID NO: 655207 - protein, 12 aa, Homo sapiens
  CDR3 for alpha chain variable domain of TCR clone 327604 (TRAV35, TRAJ30)
CAGFNRYDKIIF

SEQ ID NO: 655208 - protein, 15 aa, Homo sapiens
  CDR3 for beta chain variable domain of TCR clone 327604 (TRBV18, TRBJ2-3)
CASSPLAGETDTQYF

SEQ ID NO: 655209 - protein, 11 aa, Homo sapiens
  CDR3 for alpha chain variable domain of TCR clone 327605 (TRAV16, TRAJ29)
WAPSGNTPLVF

SEQ ID NO: 655210 - protein, 13 aa, Homo sapiens
  CDR3 for beta chain variable domain of TCR clone 327605 (TRBV7-3, TRBJ1-1)
CASSQDWGAEAFF

SEQ ID NO: 655211 - protein, 14 aa, Homo sapiens
  CDR3 for alpha chain variable domain of TCR clone 327606 (TRAV29/DV5, TRAJ36)
CAARLKTGENNLFF

SEQ ID NO: 655212 - protein, 14 aa, Homo sapiens
  CDR3 for beta chain variable domain of TCR clone 327606 (TRBV12-5, TRBJ2-5)
CASGSRTHHETQYF

SEQ ID NO: 655213 - protein, 13 aa, Homo sapiens
  CDR3 for alpha chain variable domain of TCR clone 327607 (TRAV1-1, TRAJ9)
CAAKNTGGFKTIF

SEQ ID NO: 655214 - protein, 15 aa, Homo sapiens
  CDR3 for beta chain variable domain of TCR clone 327607 (TRBV6-3, TRBJ1-6)
CASSYPDRANSPLHF

SEQ ID NO: 655215 - protein, 13 aa, Homo sapiens
  CDR3 for alpha chain variable domain of TCR clone 327608 (TRAV2, TRAJ40)
CAVVTSGTYKYTF

SEQ ID NO: 655216 - protein, 14 aa, Homo sapiens
  CDR3 for beta chain variable domain of TCR clone 327608 (TRBV19, TRBJ2-1)
CASPTFVLSGEQVF

SEQ ID NO: 655217 - protein, 14 aa, Homo sapiens
  CDR3 for alpha chain variable domain of TCR clone 327609 (TRAV26-1, TRAJ11)
CIVPLYSGYSTLTF

SEQ ID NO: 655218 - protein, 16 aa, Homo sapiens
  CDR3 for beta chain variable domain of TCR clone 327609 (TRBV7-3, TRBJ2-1)
CASSLEGYRSYNEQFF

SEQ ID NO: 655219 - protein, 17 aa, Homo sapiens
  CDR3 for alpha chain variable domain of TCR clone 327610 (TRAV36/DV7, TRAJ52)
GAVAQRAGGTSYGKLTF

SEQ ID NO: 655220 - protein, 14 aa, Homo sapiens
  CDR3 for beta chain variable domain of TCR clone 327610 (TRBV20-1, TRBJ1-1)
CSAQTRIGGTEAFF

SEQ ID NO: 655221 - protein, 12 aa, Homo sapiens
  CDR3 for alpha chain variable domain of TCR clone 327611 (TRAV8-3, TRAJ34)
WASGYNTDKLIF

SEQ ID NO: 655222 - protein, 16 aa, Homo sapiens
  CDR3 for beta chain variable domain of TCR clone 327611 (TRBV20-1, TRBJ2-5)
CSPGGTSGGYMETQYF

SEQ ID NO: 655223 - protein, 14 aa, Homo sapiens
  CDR3 for alpha chain variable domain of TCR clone 327612 (TRAV12-1, TRAJ12)
CVVTRMDSSYKLTF

SEQ ID NO: 655224 - protein, 13 aa, Homo sapiens
  CDR3 for beta chain variable domain of TCR clone 327612 (TRBV20-1, TRBJ1-1)
CSARGGGNTEAFF

SEQ ID NO: 655225 - protein, 18 aa, Homo sapiens
  CDR3 for alpha chain variable domain of TCR clone 327613 (TRAV21, TRAJ52)
CAVRPSPAGGTSYGKLTF

SEQ ID NO: 655226 - protein, 17 aa, Homo sapiens
  CDR3 for beta chain variable domain of TCR clone 327613 (TRBV20-1, TRBJ2-2)
CSASGSEQGGLTGELFF

SEQ ID NO: 655227 - protein, 10 aa, Homo sapiens
  CDR3 for alpha chain variable domain of TCR clone 327614 (TRAV23/DV6, TRAJ57)
CAASSTLSQG

SEQ ID NO: 655228 - protein, 15 aa, Homo sapiens
  CDR3 for beta chain variable domain of TCR clone 327614 (TRBV19, TRBJ2-4)
CASRGPRRGENIQYF

SEQ ID NO: 655229 - protein, 10 aa, Homo sapiens
  CDR3 for alpha chain variable domain of TCR clone 327615 (TRAV1-2, TRAJ23)
CAGKGGKLIF

SEQ ID NO: 655230 - protein, 16 aa, Homo sapiens
  CDR3 for beta chain variable domain of TCR clone 327615 (TRBV11-2, TRBJ1-1)
CASSLRQGGEHSKAFF

SEQ ID NO: 655231 - protein, 12 aa, Homo sapiens
  CDR3 for alpha chain variable domain of TCR clone 327616 (TRAV21, TRAJ6)
CAVKGGSYIPTF

SEQ ID NO: 655232 - protein, 15 aa, Homo sapiens
  CDR3 for beta chain variable domain of TCR clone 327616 (TRBV9, TRBJ1-6)
CASSVAGTGDSPLHF

SEQ ID NO: 655233 - protein, 16 aa, Homo sapiens
  CDR3 for alpha chain variable domain of TCR clone 327617 (TRAV21, TRAJ52)
CAVTNAGGTSYGKLTF

SEQ ID NO: 655234 - protein, 16 aa, Homo sapiens
  CDR3 for beta chain variable domain of TCR clone 327617 (TRBV28, TRBJ2-7)
CASSLFFETGGPEQYF

SEQ ID NO: 655235 - protein, 12 aa, Homo sapiens
  CDR3 for alpha chain variable domain of TCR clone 327618 (TRAV29/DV5, TRAJ41)
CAAISSGYALNF

SEQ ID NO: 655236 - protein, 15 aa, Homo sapiens
  CDR3 for beta chain variable domain of TCR clone 327618 (TRBV11-3, TRBJ2-7)
CASSPGPASSYEQYF

SEQ ID NO: 655237 - protein, 17 aa, Homo sapiens
  CDR3 for alpha chain variable domain of TCR clone 327619 (TRAV17, TRAJ52)
CATERPSGGTSYGKLTF

SEQ ID NO: 655238 - protein, 13 aa, Homo sapiens
  CDR3 for beta chain variable domain of TCR clone 327619 (TRBV7-9, TRBJ1-2)
CASSLKQNYGDTF

SEQ ID NO: 655239 - protein, 15 aa, Homo sapiens
  CDR3 for alpha chain variable domain of TCR clone 327620 (TRAV17, TRAJ57)
CATGPSHGGSEKLGF

SEQ ID NO: 655240 - protein, 16 aa, Homo sapiens
  CDR3 for beta chain variable domain of TCR clone 327620 (TRBV12-4, TRBJ1-5)
CASSRPVGGSNQPQHF

SEQ ID NO: 655241 - protein, 17 aa, Homo sapiens
  CDR3 for alpha chain variable domain of TCR clone 327621 (TRAV13-1, TRAJ52)
CAASSGAGGTSYGKLTF

SEQ ID NO: 655242 - protein, 15 aa, Homo sapiens
  CDR3 for beta chain variable domain of TCR clone 327621 (TRBV10-2, TRBJ2-6)
CASSEQGTGANVLTF

SEQ ID NO: 655243 - protein, 14 aa, Homo sapiens
  CDR3 for alpha chain variable domain of TCR clone 327622 (TRAV12-1, TRAJ30)
CVVNIRGRDDKIIF

SEQ ID NO: 655244 - protein, 13 aa, Homo sapiens
  CDR3 for beta chain variable domain of TCR clone 327622 (TRBV7-3, TRBJ2-7)
CASSSGANYEQYF

SEQ ID NO: 655245 - protein, 11 aa, Homo sapiens
  CDR3 for alpha chain variable domain of TCR clone 327623 (TRAV27, TRAJ47)
CAGAYGNKLVF

SEQ ID NO: 655246 - protein, 15 aa, Homo sapiens
  CDR3 for beta chain variable domain of TCR clone 327623 (TRBV20-1, TRBJ1-5)
CSAFKNGQRNQPQHF

SEQ ID NO: 655247 - protein, 14 aa, Homo sapiens
  CDR3 for alpha chain variable domain of TCR clone 327624 (TRAV21, TRAJ28)
CAVGSGAGSYQLTF

SEQ ID NO: 655248 - protein, 14 aa, Homo sapiens
  CDR3 for beta chain variable domain of TCR clone 327624 (TRBV18, TRBJ1-4)
CATSPGPNGEKLFF

SEQ ID NO: 655249 - protein, 14 aa, Homo sapiens
  CDR3 for alpha chain variable domain of TCR clone 327625 (TRAV17, TRAJ54)
CATDANQGAQKLVF

SEQ ID NO: 655250 - protein, 18 aa, Homo sapiens
  CDR3 for beta chain variable domain of TCR clone 327625 (TRBV11-2, TRBJ2-3)
CASSLGGASRGAPNTQYF

SEQ ID NO: 655251 - protein, 15 aa, Homo sapiens
  CDR3 for alpha chain variable domain of TCR clone 327626 (TRAV34, TRAJ38)
CGADFTPGNNRQLIW

SEQ ID NO: 655252 - protein, 14 aa, Homo sapiens
  CDR3 for beta chain variable domain of TCR clone 327626 (TRBV11-2, TRBJ2-3)
CASSLGGGANTQYF

SEQ ID NO: 655253 - protein, 13 aa, Homo sapiens
  CDR3 for alpha chain variable domain of TCR clone 327627 (TRAV12-1, TRAJ11)
CVVTRGGYSTLTF

SEQ ID NO: 655254 - protein, 13 aa, Homo sapiens
  CDR3 for beta chain variable domain of TCR clone 327627 (TRBV20-1, TRBJ1-2)
CSARDQGAYGYIF

SEQ ID NO: 655255 - protein, 11 aa, Homo sapiens
  CDR3 for alpha chain variable domain of TCR clone 327628 (TRAV27, TRAJ45)
SSGGGADGLTF

SEQ ID NO: 655256 - protein, 17 aa, Homo sapiens
  CDR3 for beta chain variable domain of TCR clone 327628 (TRBV11-2, TRBJ2-1)
CASSLYPPGVEYNEQFF

SEQ ID NO: 655257 - protein, 16 aa, Homo sapiens
  CDR3 for alpha chain variable domain of TCR clone 327629 (TRAV1-2, TRAJ10)
CAVRGVLTGGGNKLTF

SEQ ID NO: 655258 - protein, 12 aa, Homo sapiens
  CDR3 for beta chain variable domain of TCR clone 327629 (TRBV7-8, TRBJ2-7)
CASSLGDRAQYF

SEQ ID NO: 655259 - protein, 12 aa, Homo sapiens
  CDR3 for alpha chain variable domain of TCR clone 327630 (TRAV21, TRAJ33)
CAKMDSNYQLIW

SEQ ID NO: 655260 - protein, 13 aa, Homo sapiens
  CDR3 for beta chain variable domain of TCR clone 327630 (TRBV6-3, TRBJ1-6)
CASSPERISPLHF

SEQ ID NO: 655261 - protein, 12 aa, Homo sapiens
  CDR3 for alpha chain variable domain of TCR clone 327631 (TRAV1-1, TRAJ8)
CAGGTGFQKLVF

SEQ ID NO: 655262 - protein, 15 aa, Homo sapiens
  CDR3 for beta chain variable domain of TCR clone 327631 (TRBV7-9, TRBJ1-4)
CAGSRTGGLNEKLFF

SEQ ID NO: 655263 - protein, 12 aa, Homo sapiens
  CDR3 for alpha chain variable domain of TCR clone 327632 (TRAV1-1, TRAJ8)
CAGGTGFQKLVF

SEQ ID NO: 655264 - protein, 17 aa, Homo sapiens
  CDR3 for beta chain variable domain of TCR clone 327632 (TRBV20-1, TRBJ2-1)
CSASSSGLAGSYNEQFF

SEQ ID NO: 655265 - protein, 13 aa, Homo sapiens
  CDR3 for alpha chain variable domain of TCR clone 327633 (TRAV8-3, TRAJ28)
CAVGAVGSYQLTF

SEQ ID NO: 655266 - protein, 13 aa, Homo sapiens
  CDR3 for beta chain variable domain of TCR clone 327633 (TRBV19, TRBJ1-2)
CASSVHGQDGYTF

SEQ ID NO: 655267 - protein, 15 aa, Homo sapiens
  CDR3 for alpha chain variable domain of TCR clone 327634 (TRAV25, TRAJ53)
CPTSNSGGSNYKLKF

SEQ ID NO: 655268 - protein, 14 aa, Homo sapiens
  CDR3 for beta chain variable domain of TCR clone 327634 (TRBV7-2, TRBJ1-3)
CASSLGTAGNTIYF

SEQ ID NO: 655269 - protein, 11 aa, Homo sapiens
  CDR3 for alpha chain variable domain of TCR clone 327635 (TRAV1-2, TRAJ20)
CAVANDYKLSF

SEQ ID NO: 655270 - protein, 13 aa, Homo sapiens
  CDR3 for beta chain variable domain of TCR clone 327635 (TRBV7-3, TRBJ1-1)
CASSEDWGAEAFF

SEQ ID NO: 655271 - protein, 13 aa, Homo sapiens
  CDR3 for alpha chain variable domain of TCR clone 327636 (TRAV36/DV7, TRAJ7)
CAGTLYGNNRLAF

SEQ ID NO: 655272 - protein, 14 aa, Homo sapiens
  CDR3 for beta chain variable domain of TCR clone 327636 (TRBV19, TRBJ2-1)
CASPTFVLSGEQFF

SEQ ID NO: 655273 - protein, 12 aa, Homo sapiens
  CDR3 for alpha chain variable domain of TCR clone 327637 (TRAV13-1, TRAJ49)
CAASIWGDQFYF

SEQ ID NO: 655274 - protein, 14 aa, Homo sapiens
  CDR3 for beta chain variable domain of TCR clone 327637 (TRBV12-4, TRBJ1-1)
CASSLDGLNTEAFF

SEQ ID NO: 655275 - protein, 12 aa, Homo sapiens
  CDR3 for alpha chain variable domain of TCR clone 327638 (TRAV8-3, TRAJ26)
CAGDNYGQNFVF

SEQ ID NO: 655276 - protein, 16 aa, Homo sapiens
  CDR3 for beta chain variable domain of TCR clone 327638 (TRBV4-2, TRBJ2-5)
CASSQELVGSQETQYF

SEQ ID NO: 655277 - protein, 15 aa, Homo sapiens
  CDR3 for alpha chain variable domain of TCR clone 327639 (TRAV12-1, TRAJ45)
CVVLSGGGGADGLTF

SEQ ID NO: 655278 - protein, 13 aa, Homo sapiens
  CDR3 for beta chain variable domain of TCR clone 327639 (TRBV7-3, TRBJ1-1)
CASSEDWGAEAFF

SEQ ID NO: 655279 - protein, 14 aa, Homo sapiens
  CDR3 for alpha chain variable domain of TCR clone 327640 (TRAV26-1, TRAJ45)
CIEVTEGGADRLTF

SEQ ID NO: 655280 - protein, 13 aa, Homo sapiens
  CDR3 for beta chain variable domain of TCR clone 327640 (TRBV7-6, TRBJ1-2)
CASSLVADYGYTF

SEQ ID NO: 655281 - protein, 14 aa, Homo sapiens
  CDR3 for alpha chain variable domain of TCR clone 327641 (TRAV1-2, TRAJ16)
CAVNRFSDDQKLLF

SEQ ID NO: 655282 - protein, 17 aa, Homo sapiens
  CDR3 for beta chain variable domain of TCR clone 327641 (TRBV20-1, TRBJ2-2)
CSASGSGQGGLTGELFF

SEQ ID NO: 655283 - protein, 15 aa, Homo sapiens
  CDR3 for alpha chain variable domain of TCR clone 327642 (TRAV3, TRAJ15)
CAVRPANQAGTALIF

SEQ ID NO: 655284 - protein, 12 aa, Homo sapiens
  CDR3 for beta chain variable domain of TCR clone 327642 (TRBV28, TRBJ2-3)
CASSLYRDTQYF

SEQ ID NO: 655285 - protein, 12 aa, Homo sapiens
  CDR3 for alpha chain variable domain of TCR clone 327643 (TRAV26-1, TRAJ17)
CIVRSAGNKLTF

SEQ ID NO: 655286 - protein, 14 aa, Homo sapiens
  CDR3 for beta chain variable domain of TCR clone 327643 (TRBV27, TRBJ2-3)
CASSWAGTTDTQYV

SEQ ID NO: 655287 - protein, 12 aa, Homo sapiens
  CDR3 for alpha chain variable domain of TCR clone 327644 (TRAV12-3, TRAJ43)
CAISSNNNDMRF

SEQ ID NO: 655288 - protein, 15 aa, Homo sapiens
  CDR3 for beta chain variable domain of TCR clone 327644 (TRBV27, TRBJ1-4)
CASSPRHATNENLFF

SEQ ID NO: 655289 - protein, 15 aa, Homo sapiens
  CDR3 for alpha chain variable domain of TCR clone 327645 (TRAV12-1, TRAJ10)
CVGNKLTGGGNKLTF

SEQ ID NO: 655290 - protein, 17 aa, Homo sapiens
  CDR3 for beta chain variable domain of TCR clone 327645 (TRBV5-1, TRBJ1-6)
CASSPSLQGSDNSPLHF

SEQ ID NO: 655291 - protein, 14 aa, Homo sapiens
  CDR3 for alpha chain variable domain of TCR clone 327646 (TRAV12-1, TRAJ12)
CVVTRMDSIYKLIF

SEQ ID NO: 655292 - protein, 13 aa, Homo sapiens
  CDR3 for beta chain variable domain of TCR clone 327646 (TRBV20-1, TRBJ1-1)
CSARGGGNTEAVF

SEQ ID NO: 655293 - protein, 12 aa, Homo sapiens
  CDR3 for alpha chain variable domain of TCR clone 327647 (TRAV17, TRAJ57)
CATDGGSEKLVF

SEQ ID NO: 655294 - protein, 13 aa, Homo sapiens
  CDR3 for beta chain variable domain of TCR clone 327647 (TRBV7-9, TRBJ2-1)
CASSFAGAYEQFF

SEQ ID NO: 655295 - protein, 14 aa, Homo sapiens
  CDR3 for alpha chain variable domain of TCR clone 327648 (TRAV12-2, TRAJ36)
CAVNPPTGATNLFC

SEQ ID NO: 655296 - protein, 13 aa, Homo sapiens
  CDR3 for beta chain variable domain of TCR clone 327648 (TRBV20-1, TRBJ1-6)
CSAPTGLGSPLHF

SEQ ID NO: 655297 - protein, 13 aa, Homo sapiens
  CDR3 for alpha chain variable domain of TCR clone 327649 (TRAV12-3, TRAJ33)
CAMSVNSNYQLIW

SEQ ID NO: 655298 - protein, 13 aa, Homo sapiens
  CDR3 for beta chain variable domain of TCR clone 327649 (TRBV7-2, TRBJ2-2)
CASSLAVPGELFF

SEQ ID NO: 655299 - protein, 15 aa, Homo sapiens
  CDR3 for alpha chain variable domain of TCR clone 327650 (TRAV27, TRAJ38)
CAARRNAGNHRKLIW

SEQ ID NO: 655300 - protein, 11 aa, Homo sapiens
  CDR3 for beta chain variable domain of TCR clone 327650 (TRBV12-4, TRBJ2-2)
CASSSAGELFF

SEQ ID NO: 655301 - protein, 14 aa, Homo sapiens
  CDR3 for alpha chain variable domain of TCR clone 327651 (TRAV13-1, TRAJ21)
CAAKEGFNKFYFDL

SEQ ID NO: 655302 - protein, 14 aa, Homo sapiens
  CDR3 for beta chain variable domain of TCR clone 327651 (TRBV5-4, TRBJ1-1)
CASSLDSRRDEAFF

SEQ ID NO: 655303 - protein, 11 aa, Homo sapiens
  CDR3 for alpha chain variable domain of TCR clone 327652 (TRAV2, TRAJ33)
CAVESNYQLIW

SEQ ID NO: 655304 - protein, 14 aa, Homo sapiens
  CDR3 for beta chain variable domain of TCR clone 327652 (TRBV19, TRBJ2-1)
CARPTFVLSGEQFF

SEQ ID NO: 655305 - protein, 13 aa, Homo sapiens
  CDR3 for alpha chain variable domain of TCR clone 327653 (TRAV3, TRAJ27)
CAVRHLGAGKSTV

SEQ ID NO: 655306 - protein, 13 aa, Homo sapiens
  CDR3 for beta chain variable domain of TCR clone 327653 (TRBV7-9, TRBJ2-3)
CASSPGSTDTQYF

SEQ ID NO: 655307 - protein, 14 aa, Homo sapiens
  CDR3 for alpha chain variable domain of TCR clone 327654 (TRAV1-2, TRAJ8)
CAVREDTGFQKLLF

SEQ ID NO: 655308 - protein, 16 aa, Homo sapiens
  CDR3 for beta chain variable domain of TCR clone 327654 (TRBV7-6, TRBJ2-6)
CASSLPGLSGANVLTF

SEQ ID NO: 655309 - protein, 20 aa, Homo sapiens
  CDR3 for alpha chain variable domain of TCR clone 327655 (TRAV25, TRAJ21)
TATQTTDVGTYPLSFNKFYF

SEQ ID NO: 655310 - protein, 13 aa, Homo sapiens
  CDR3 for beta chain variable domain of TCR clone 327655 (TRBV25-1, TRBJ2-5)
CASSPGGVETQYF

SEQ ID NO: 655311 - protein, 13 aa, Homo sapiens
  CDR3 for alpha chain variable domain of TCR clone 327656 (TRAV17, TRAJ5)
CALRGTGRRALTF

SEQ ID NO: 655312 - protein, 15 aa, Homo sapiens
  CDR3 for beta chain variable domain of TCR clone 327656 (TRBV18, TRBJ2-7)
CASSPSSTGNYEQYF

SEQ ID NO: 655313 - protein, 15 aa, Homo sapiens
  CDR3 for alpha chain variable domain of TCR clone 327657 (TRAV4, TRAJ36)
CLVGDRQTGANNLFF

SEQ ID NO: 655314 - protein, 13 aa, Homo sapiens
  CDR3 for beta chain variable domain of TCR clone 327657 (TRBV12-4, TRBJ1-2)
CASSLRQGKGYTF

SEQ ID NO: 655315 - protein, 14 aa, Homo sapiens
  CDR3 for alpha chain variable domain of TCR clone 327658 (TRAV17, TRAJ22)
CATSPSGSARQLTF

SEQ ID NO: 655316 - protein, 15 aa, Homo sapiens
  CDR3 for beta chain variable domain of TCR clone 327658 (TRBV5-1, TRBJ2-3)
CASSVTSGSTDTQYF

SEQ ID NO: 655317 - protein, 14 aa, Homo sapiens
  CDR3 for alpha chain variable domain of TCR clone 327659 (TRAV12-1, TRAJ30)
CVVNIGGIDDKIIF

SEQ ID NO: 655318 - protein, 13 aa, Homo sapiens
  CDR3 for beta chain variable domain of TCR clone 327659 (TRBV12-5, TRBJ2-1)
CASGLGRGNEQFF

SEQ ID NO: 655319 - protein, 11 aa, Homo sapiens
  CDR3 for alpha chain variable domain of TCR clone 327660 (TRAV29/DV5, TRAJ37)
CATSNTGKLIF

SEQ ID NO: 655320 - protein, 15 aa, Homo sapiens
  CDR3 for beta chain variable domain of TCR clone 327660 (TRBV10-3, TRBJ2-3)
CAISLTSGGTDTQYF

SEQ ID NO: 655321 - protein, 14 aa, Homo sapiens
  CDR3 for alpha chain variable domain of TCR clone 327661 (TRAV8-3, TRAJ13)
CAVGARGGYQKVTF

SEQ ID NO: 655322 - protein, 16 aa, Homo sapiens
  CDR3 for beta chain variable domain of TCR clone 327661 (TRBV27, TRBJ2-7)
CASSLGSGTGPYEQYC

SEQ ID NO: 655323 - protein, 14 aa, Homo sapiens
  CDR3 for alpha chain variable domain of TCR clone 327662 (TRAV26-1, TRAJ45)
CIVRVVGGAAGLTF

SEQ ID NO: 655324 - protein, 16 aa, Homo sapiens
  CDR3 for beta chain variable domain of TCR clone 327662 (TRBV7-9, TRBJ1-1)
CASSLTQVRSNTEAFF

SEQ ID NO: 655325 - protein, 12 aa, Homo sapiens
  CDR3 for alpha chain variable domain of TCR clone 327663 (TRAV13-1, TRAJ36)
WRGGAGANNLFF

SEQ ID NO: 655326 - protein, 16 aa, Homo sapiens
  CDR3 for beta chain variable domain of TCR clone 327663 (TRBV7-9, TRBJ2-5)
CASRLEIGARKETQYF

SEQ ID NO: 655327 - protein, 14 aa, Homo sapiens
  CDR3 for alpha chain variable domain of TCR clone 327664 (TRAV1-2, TRAJ16)
CAVNRFSDGQKLLF

SEQ ID NO: 655328 - protein, 12 aa, Homo sapiens
  CDR3 for beta chain variable domain of TCR clone 327664 (TRBV24-1, TRBJ1-1)
CATPYPDTEAFF

SEQ ID NO: 655329 - protein, 14 aa, Homo sapiens
  CDR3 for alpha chain variable domain of TCR clone 327665 (TRAV12-2, TRAJ44)
CAVNPAGTASKLTF

SEQ ID NO: 655330 - protein, 16 aa, Homo sapiens
  CDR3 for beta chain variable domain of TCR clone 327665 (TRBV7-9, TRBJ2-1)
CASSDVAGGSYNEQFF

SEQ ID NO: 655331 - protein, 15 aa, Homo sapiens
  CDR3 for alpha chain variable domain of TCR clone 327666 (TRAV26-1, TRAJ22)
CIVRVTFWFFKATDL

SEQ ID NO: 655332 - protein, 13 aa, Homo sapiens
  CDR3 for beta chain variable domain of TCR clone 327666 (TRBV7-6, TRBJ2-7)
CASSLDHTHEQYF

SEQ ID NO: 655333 - protein, 16 aa, Homo sapiens
  CDR3 for alpha chain variable domain of TCR clone 327667 (TRAV20, TRAJ52)
CAVLPDGGTSYGKLTF

SEQ ID NO: 655334 - protein, 12 aa, Homo sapiens
  CDR3 for beta chain variable domain of TCR clone 327667 (TRBV19, TRBJ2-1)
CARSQISNEQFF

SEQ ID NO: 655335 - protein, 14 aa, Homo sapiens
  CDR3 for alpha chain variable domain of TCR clone 327668 (TRAV1-2, TRAJ8)
CAVREDTGFQKLVF

SEQ ID NO: 655336 - protein, 15 aa, Homo sapiens
  CDR3 for beta chain variable domain of TCR clone 327668 (TRBV11-2, TRBJ2-2)
FASSSDRVNAGELFF

SEQ ID NO: 655337 - protein, 14 aa, Homo sapiens
  CDR3 for alpha chain variable domain of TCR clone 327669 (TRAV4, TRAJ30)
CLVGDMNRDDKIIL

SEQ ID NO: 655338 - protein, 14 aa, Homo sapiens
  CDR3 for beta chain variable domain of TCR clone 327669 (TRBV19, TRBJ2-7)
CASSIQEWSYEQYF

SEQ ID NO: 655339 - protein, 13 aa, Homo sapiens
  CDR3 for alpha chain variable domain of TCR clone 327670 (TRAV35, TRAJ48)
CAGHEFGNEKLTF

SEQ ID NO: 655340 - protein, 14 aa, Homo sapiens
  CDR3 for beta chain variable domain of TCR clone 327670 (TRBV19, TRBJ2-1)
CASPTFVLSGEQFF

SEQ ID NO: 655341 - protein, 11 aa, Homo sapiens
  CDR3 for alpha chain variable domain of TCR clone 327671 (TRAV3, TRAJ17)
PRGAAGNKLTF

SEQ ID NO: 655342 - protein, 13 aa, Homo sapiens
  CDR3 for beta chain variable domain of TCR clone 327671 (TRBV10-3, TRBJ2-7)
CASKLAVNYEQYF

SEQ ID NO: 655343 - protein, 13 aa, Homo sapiens
  CDR3 for alpha chain variable domain of TCR clone 327672 (TRAV1-2, TRAJ9)
CAVLNTGGFKTIF

SEQ ID NO: 655344 - protein, 14 aa, Homo sapiens
  CDR3 for beta chain variable domain of TCR clone 327672 (TRBV20-1, TRBJ2-3)
CSASGGTSTDTQYF

SEQ ID NO: 655345 - protein, 13 aa, Homo sapiens
  CDR3 for alpha chain variable domain of TCR clone 327673 (TRAV13-1, TRAJ49)
CAAMLYTGSQFYF

SEQ ID NO: 655346 - protein, 13 aa, Homo sapiens
  CDR3 for beta chain variable domain of TCR clone 327673 (TRBV7-3, TRBJ1-1)
CASSQDWGAEAFF

SEQ ID NO: 655347 - protein, 12 aa, Homo sapiens
  CDR3 for alpha chain variable domain of TCR clone 327674 (TRAV12-3, TRAJ17)
CAMTLTGNKLTF

SEQ ID NO: 655348 - protein, 15 aa, Homo sapiens
  CDR3 for beta chain variable domain of TCR clone 327674 (TRBV20-1, TRBJ2-3)
CSARVEGTYTDTQYF

SEQ ID NO: 655349 - protein, 15 aa, Homo sapiens
  CDR3 for alpha chain variable domain of TCR clone 327675 (TRAV1-1, TRAJ20)
CAVRYNVANDYKLSF

SEQ ID NO: 655350 - protein, 13 aa, Homo sapiens
  CDR3 for beta chain variable domain of TCR clone 327675 (TRBV4-1, TRBJ2-2)
CASSQENTGELFF

SEQ ID NO: 655351 - protein, 10 aa, Homo sapiens
  CDR3 for alpha chain variable domain of TCR clone 327676 (TRAV17, TRAJ36)
CATVAGNLFF

SEQ ID NO: 655352 - protein, 14 aa, Homo sapiens
  CDR3 for beta chain variable domain of TCR clone 327676 (TRBV19, TRBJ2-7)
CASSMGQGAIEQYF

SEQ ID NO: 655353 - protein, 15 aa, Homo sapiens
  CDR3 for alpha chain variable domain of TCR clone 327677 (TRAV8-3, TRAJ41)
CAVGSNSNSGYALNF

SEQ ID NO: 655354 - protein, 10 aa, Homo sapiens
  CDR3 for beta chain variable domain of TCR clone 327677 (TRBV19, TRBJ1-1)
CASRQVEAFF

SEQ ID NO: 655355 - protein, 12 aa, Homo sapiens
  CDR3 for alpha chain variable domain of TCR clone 327678 (TRAV12-3, TRAJ17)
CAMTLTGNKLTF

SEQ ID NO: 655356 - protein, 19 aa, Homo sapiens
  CDR3 for beta chain variable domain of TCR clone 327678 (TRBV4-3, TRBJ2-7)
CISAPAAKQPSGTPYEQYF

SEQ ID NO: 655357 - protein, 12 aa, Homo sapiens
  CDR3 for alpha chain variable domain of TCR clone 327679 (TRAV25, TRAJ16)
CAGNRDGRKLLF

SEQ ID NO: 655358 - protein, 15 aa, Homo sapiens
  CDR3 for beta chain variable domain of TCR clone 327679 (TRBV5-1, TRBJ2-7)
CASSLYPDGGYEQYF

SEQ ID NO: 655359 - protein, 13 aa, Homo sapiens
  CDR3 for alpha chain variable domain of TCR clone 327680 (TRAV21, TRAJ27)
CAARPGNAGKSTF

SEQ ID NO: 655360 - protein, 12 aa, Homo sapiens
  CDR3 for beta chain variable domain of TCR clone 327680 (TRBV19, TRBJ1-5)
CASSIAQQPQHF

SEQ ID NO: 655361 - protein, 13 aa, Homo sapiens
  CDR3 for alpha chain variable domain of TCR clone 327681 (TRAV21, TRAJ27)
CAARPGNAGKSTF

SEQ ID NO: 655362 - protein, 14 aa, Homo sapiens
  CDR3 for beta chain variable domain of TCR clone 327681 (TRBV12-5, TRBJ2-5)
CAGGSRTHQETQYF

SEQ ID NO: 655363 - protein, 16 aa, Homo sapiens
  CDR3 for alpha chain variable domain of TCR clone 327682 (TRAV30, TRAJ24)
FGTEIVDADSWGKFQF

SEQ ID NO: 655364 - protein, 12 aa, Homo sapiens
  CDR3 for beta chain variable domain of TCR clone 327682 (TRBV7-8, TRBJ2-7)
CASSLGDREQYF

SEQ ID NO: 655365 - protein, 12 aa, Homo sapiens
  CDR3 for alpha chain variable domain of TCR clone 327683 (TRAV8-3, TRAJ20)
CAVGSNDYKLSF

SEQ ID NO: 655366 - protein, 15 aa, Homo sapiens
  CDR3 for beta chain variable domain of TCR clone 327683 (TRBV19, TRBJ2-2)
CQPISRDRGTGELFF

SEQ ID NO: 655367 - protein, 11 aa, Homo sapiens
  CDR3 for alpha chain variable domain of TCR clone 327684 (TRAV1-2, TRAJ20)
CAVANDYKLSF

SEQ ID NO: 655368 - protein, 13 aa, Homo sapiens
  CDR3 for beta chain variable domain of TCR clone 327684 (TRBV2, TRBJ2-3)
CASILAGGQGQYF

SEQ ID NO: 655369 - protein, 16 aa, Homo sapiens
  CDR3 for alpha chain variable domain of TCR clone 327685 (TRAV16, TRAJ4)
CALSRMFSGGYNKLIF

SEQ ID NO: 655370 - protein, 12 aa, Homo sapiens
  CDR3 for beta chain variable domain of TCR clone 327685 (TRBV29-1, TRBJ2-3)
CSVTGGADTQYV

SEQ ID NO: 655371 - protein, 13 aa, Homo sapiens
  CDR3 for alpha chain variable domain of TCR clone 327686 (TRAV21, TRAJ20)
CAVRVFADYKLSF

SEQ ID NO: 655372 - protein, 14 aa, Homo sapiens
  CDR3 for beta chain variable domain of TCR clone 327686 (TRBV2, TRBJ2-7)
CASSLASGGYEQYF

SEQ ID NO: 655373 - protein, 16 aa, Homo sapiens
  CDR3 for alpha chain variable domain of TCR clone 327687 (TRAV3, TRAJ27)
CAVRDPKGTNAGKSTF

SEQ ID NO: 655374 - protein, 17 aa, Homo sapiens
  CDR3 for beta chain variable domain of TCR clone 327687 (TRBV4-1, TRBJ2-7)
CASSQGRGLQTSYEQYF

SEQ ID NO: 655375 - protein, 14 aa, Homo sapiens
  CDR3 for alpha chain variable domain of TCR clone 327688 (TRAV23/DV6, TRAJ8)
CAASKATGFQKLVF

SEQ ID NO: 655376 - protein, 15 aa, Homo sapiens
  CDR3 for beta chain variable domain of TCR clone 327688 (TRBV28, TRBJ2-3)
CASSTDRQGANTQYF

SEQ ID NO: 655377 - protein, 14 aa, Homo sapiens
  CDR3 for alpha chain variable domain of TCR clone 327689 (TRAV1-2, TRAJ16)
CAVNRYSDGQKLLF

SEQ ID NO: 655378 - protein, 13 aa, Homo sapiens
  CDR3 for beta chain variable domain of TCR clone 327689 (TRBV4-1, TRBJ2-1)
CASSQAGGDEQFF

SEQ ID NO: 655379 - protein, 14 aa, Homo sapiens
  CDR3 for alpha chain variable domain of TCR clone 327690 (TRAV1-2, TRAJ16)
CAVNRFSDGQKLLF

SEQ ID NO: 655380 - protein, 11 aa, Homo sapiens
  CDR3 for beta chain variable domain of TCR clone 327690 (TRBV6-3, TRBJ2-3)
CAAGQADTQYF

SEQ ID NO: 655381 - protein, 12 aa, Homo sapiens
  CDR3 for alpha chain variable domain of TCR clone 327691 (TRAV3, TRAJ43)
CAVRDPNNDMCF

SEQ ID NO: 655382 - protein, 13 aa, Homo sapiens
  CDR3 for beta chain variable domain of TCR clone 327691 (TRBV19, TRBJ1-2)
CASSVPGQDGYTF

SEQ ID NO: 655383 - protein, 15 aa, Homo sapiens
  CDR3 for alpha chain variable domain of TCR clone 327692 (TRAV26-1, TRAJ23)
CIVRVLNNQGGKLIF

SEQ ID NO: 655384 - protein, 13 aa, Homo sapiens
  CDR3 for beta chain variable domain of TCR clone 327692 (TRBV11-2, TRBJ2-1)
CASSLDLVNEQFF

SEQ ID NO: 655385 - protein, 18 aa, Homo sapiens
  CDR3 for alpha chain variable domain of TCR clone 327693 (TRAV21, TRAJ52)
CAVRPSPAGGISYGKLTF

SEQ ID NO: 655386 - protein, 15 aa, Homo sapiens
  CDR3 for beta chain variable domain of TCR clone 327693 (TRBV18, TRBJ2-1)
CASSPPSASYNEQFF

SEQ ID NO: 655387 - protein, 15 aa, Homo sapiens
  CDR3 for alpha chain variable domain of TCR clone 327694 (TRAV27, TRAJ38)
CAARRNAGNSRKLIW

SEQ ID NO: 655388 - protein, 11 aa, Homo sapiens
  CDR3 for beta chain variable domain of TCR clone 327694 (TRBV12-4, TRBJ2-2)
CASSSAGELFF

SEQ ID NO: 655389 - protein, 14 aa, Homo sapiens
  CDR3 for alpha chain variable domain of TCR clone 327695 (TRAV12-1, TRAJ28)
CVAISGAGSYQLTF

SEQ ID NO: 655390 - protein, 15 aa, Homo sapiens
  CDR3 for beta chain variable domain of TCR clone 327695 (TRBV11-3, TRBJ2-3)
CASLKDGREGDTQYC

SEQ ID NO: 655391 - protein, 15 aa, Homo sapiens
  CDR3 for alpha chain variable domain of TCR clone 327696 (TRAV12-2, )
CAVEDIQNPDPAVYQ

SEQ ID NO: 655392 - protein, 17 aa, Homo sapiens
  CDR3 for beta chain variable domain of TCR clone 327696 (TRBV11-2, TRBJ2-1)
CASSLYPPGVEYNEQFF

SEQ ID NO: 655393 - protein, 14 aa, Homo sapiens
  CDR3 for alpha chain variable domain of TCR clone 327697 (TRAV13-2, TRAJ43)
CAEIPTYDNNDMRF

SEQ ID NO: 655394 - protein, 15 aa, Homo sapiens
  CDR3 for beta chain variable domain of TCR clone 327697 (TRBV7-9, TRBJ2-2)
CASGPLDAFPGELFF

SEQ ID NO: 655395 - protein, 13 aa, Homo sapiens
  CDR3 for alpha chain variable domain of TCR clone 327698 (TRAV4, TRAJ33)
CLVGGMNNYQLIW

SEQ ID NO: 655396 - protein, 14 aa, Homo sapiens
  CDR3 for beta chain variable domain of TCR clone 327698 (TRBV7-9, TRBJ1-1)
CASSLGGANTEAFF

SEQ ID NO: 655397 - protein, 13 aa, Homo sapiens
  CDR3 for alpha chain variable domain of TCR clone 327699 (TRAV39, TRAJ33)
CAVDRDSNDQLIW

SEQ ID NO: 655398 - protein, 16 aa, Homo sapiens
  CDR3 for beta chain variable domain of TCR clone 327699 (TRBV6-1, TRBJ2-3)
CASSEVIGQGTDTQYF

SEQ ID NO: 655399 - protein, 16 aa, Homo sapiens
  CDR3 for alpha chain variable domain of TCR clone 327700 (TRAV3, TRAJ37)
CAVRQHGSGDTGKLIV

SEQ ID NO: 655400 - protein, 16 aa, Homo sapiens
  CDR3 for beta chain variable domain of TCR clone 327700 (TRBV9, TRBJ1-2)
CASSVEEKVSPYGYTF

SEQ ID NO: 655401 - protein, 14 aa, Homo sapiens
  CDR3 for alpha chain variable domain of TCR clone 327701 (TRAV12-1, TRAJ9)
CVVTGYTGGFKTLF

SEQ ID NO: 655402 - protein, 13 aa, Homo sapiens
  CDR3 for beta chain variable domain of TCR clone 327701 (TRBV20-1, TRBJ1-1)
CSARAGGNTEAFF

SEQ ID NO: 655403 - protein, 13 aa, Homo sapiens
  CDR3 for alpha chain variable domain of TCR clone 327702 (TRAV16, TRAJ27)
CALRRTNAGKSTF

SEQ ID NO: 655404 - protein, 14 aa, Homo sapiens
  CDR3 for beta chain variable domain of TCR clone 327702 (TRBV18, TRBJ2-1)
CQLTTECLLNEQFF

SEQ ID NO: 655405 - protein, 15 aa, Homo sapiens
  CDR3 for alpha chain variable domain of TCR clone 327703 (TRAV17, TRAJ52)
CATEAGGTSYGKLTF

SEQ ID NO: 655406 - protein, 14 aa, Homo sapiens
  CDR3 for beta chain variable domain of TCR clone 327703 (TRBV28, TRBJ1-5)
CASNLGVLVKPQHF

SEQ ID NO: 655407 - protein, 14 aa, Homo sapiens
  CDR3 for alpha chain variable domain of TCR clone 327704 (TRAV12-1, TRAJ12)
CVVTRMDSRHKLIF

SEQ ID NO: 655408 - protein, 13 aa, Homo sapiens
  CDR3 for beta chain variable domain of TCR clone 327704 (TRBV20-1, TRBJ1-1)
CSARGGGNTEAFF

SEQ ID NO: 655409 - protein, 17 aa, Homo sapiens
  CDR3 for alpha chain variable domain of TCR clone 327705 (TRAV8-6, TRAJ58)
CAVGSWVGETSGSRLTF

SEQ ID NO: 655410 - protein, 15 aa, Homo sapiens
  CDR3 for beta chain variable domain of TCR clone 327705 (TRBV20-1, TRBJ2-7)
CSARDRVSGMDEQYF

SEQ ID NO: 655411 - protein, 10 aa, Homo sapiens
  CDR3 for alpha chain variable domain of TCR clone 327706 (TRAV23/DV6, TRAJ43)
CAAAVAALEQ

SEQ ID NO: 655412 - protein, 13 aa, Homo sapiens
  CDR3 for beta chain variable domain of TCR clone 327706 (TRBV12-4, TRBJ1-2)
CASSFRQGKGYTF

SEQ ID NO: 655413 - protein, 12 aa, Homo sapiens
  CDR3 for alpha chain variable domain of TCR clone 327707 (TRAV20, TRAJ34)
CAVKDNTDKLIF

SEQ ID NO: 655414 - protein, 14 aa, Homo sapiens
  CDR3 for beta chain variable domain of TCR clone 327707 (TRBV7-9, TRBJ2-7)
CASSRPGGLYEQYF

SEQ ID NO: 655415 - protein, 12 aa, Homo sapiens
  CDR3 for alpha chain variable domain of TCR clone 327708 (TRAV12-3, TRAJ17)
CAMTLTGNKLTF

SEQ ID NO: 655416 - protein, 19 aa, Homo sapiens
  CDR3 for beta chain variable domain of TCR clone 327708 (TRBV25-1, TRBJ2-2)
CAILAYRVDRGRKTGELFF

SEQ ID NO: 655417 - protein, 19 aa, Homo sapiens
  CDR3 for alpha chain variable domain of TCR clone 327709 (TRAV29/DV5, TRAJ49)
CSVLLCSKLTVDTGNQFYF

SEQ ID NO: 655418 - protein, 15 aa, Homo sapiens
  CDR3 for beta chain variable domain of TCR clone 327709 (TRBV27, TRBJ1-5)
CASSLGTGFDQPQHF

SEQ ID NO: 655419 - protein, 14 aa, Homo sapiens
  CDR3 for alpha chain variable domain of TCR clone 327710 (TRAV20, TRAJ56)
CAVQFGGANSKLTF

SEQ ID NO: 655420 - protein, 13 aa, Homo sapiens
  CDR3 for beta chain variable domain of TCR clone 327710 (TRBV20-1, TRBJ2-7)
CSAKRGRSYEQYF

SEQ ID NO: 655421 - protein, 14 aa, Homo sapiens
  CDR3 for alpha chain variable domain of TCR clone 327711 (TRAV12-3, TRAJ42)
CAMNYGGSQGNLIF

SEQ ID NO: 655422 - protein, 16 aa, Homo sapiens
  CDR3 for beta chain variable domain of TCR clone 327711 (TRBV19, TRBJ2-1)
CASSRAGPSSYNEQFF

SEQ ID NO: 655423 - protein, 11 aa, Homo sapiens
  CDR3 for alpha chain variable domain of TCR clone 327712 (TRAV12-1, TRAJ33)
CVGNMNYQLIW

SEQ ID NO: 655424 - protein, 11 aa, Homo sapiens
  CDR3 for beta chain variable domain of TCR clone 327712 (TRBV10-1, TRBJ2-3)
CASSDSDTQYF

SEQ ID NO: 655425 - protein, 15 aa, Homo sapiens
  CDR3 for alpha chain variable domain of TCR clone 327713 (TRAV21, TRAJ38)
CAVRQDAGNNRKLIW

SEQ ID NO: 655426 - protein, 14 aa, Homo sapiens
  CDR3 for beta chain variable domain of TCR clone 327713 (TRBV7-2, TRBJ2-7)
CASSPKTSFYEQYF

SEQ ID NO: 655427 - protein, 14 aa, Homo sapiens
  CDR3 for alpha chain variable domain of TCR clone 327714 (TRAV20, TRAJ10)
CAVRVEGGGNKLTF

SEQ ID NO: 655428 - protein, 13 aa, Homo sapiens
  CDR3 for beta chain variable domain of TCR clone 327714 (TRBV13, TRBJ2-2)
CASSPGLTWELFF

SEQ ID NO: 655429 - protein, 13 aa, Homo sapiens
  CDR3 for alpha chain variable domain of TCR clone 327715 (TRAV13-1, TRAJ21)
CAASIYNFNKFYF

SEQ ID NO: 655430 - protein, 17 aa, Homo sapiens
  CDR3 for beta chain variable domain of TCR clone 327715 (TRBV28, TRBJ2-5)
CASSTPEGDALQETQYF

SEQ ID NO: 655431 - protein, 13 aa, Homo sapiens
  CDR3 for alpha chain variable domain of TCR clone 327716 (TRAV17, TRAJ9)
CATFLTGGFKTIF

SEQ ID NO: 655432 - protein, 13 aa, Homo sapiens
  CDR3 for beta chain variable domain of TCR clone 327716 (TRBV4-2, TRBJ1-1)
CASSQAGNTEASF

SEQ ID NO: 655433 - protein, 12 aa, Homo sapiens
  CDR3 for alpha chain variable domain of TCR clone 327717 (TRAV13-1, TRAJ21)
CAAKEGFNKFYF

SEQ ID NO: 655434 - protein, 15 aa, Homo sapiens
  CDR3 for beta chain variable domain of TCR clone 327717 (TRBV7-2, TRBJ2-2)
CASSPTGANTGELFF

SEQ ID NO: 655435 - protein, 17 aa, Homo sapiens
  CDR3 for alpha chain variable domain of TCR clone 327718 (TRAV29/DV5, TRAJ45)
CAADGPFSGGGADGLTF

SEQ ID NO: 655436 - protein, 13 aa, Homo sapiens
  CDR3 for beta chain variable domain of TCR clone 327718 (TRBV4-1, TRBJ2-1)
CASSQAGGDEQFF

SEQ ID NO: 655437 - protein, 14 aa, Homo sapiens
  CDR3 for alpha chain variable domain of TCR clone 327719 (TRAV13-1, TRAJ10)
CAAKEPGGGNKLTL

SEQ ID NO: 655438 - protein, 14 aa, Homo sapiens
  CDR3 for beta chain variable domain of TCR clone 327719 (TRBV6-6, TRBJ2-7)
CASSDSGAGYEQYF

SEQ ID NO: 655439 - protein, 12 aa, Homo sapiens
  CDR3 for alpha chain variable domain of TCR clone 327720 (TRAV12-2, TRAJ31)
CAVNTPDTRLMF

SEQ ID NO: 655440 - protein, 15 aa, Homo sapiens
  CDR3 for beta chain variable domain of TCR clone 327720 (TRBV4-2, TRBJ1-1)
CASSQDQGLNTEAFF

SEQ ID NO: 655441 - protein, 14 aa, Homo sapiens
  CDR3 for alpha chain variable domain of TCR clone 327721 (TRAV12-2, TRAJ40)
CAVKIPSGTYKYIF

SEQ ID NO: 655442 - protein, 17 aa, Homo sapiens
  CDR3 for beta chain variable domain of TCR clone 327721 (TRBV7-8, TRBJ2-7)
CASSFTSGRPPSYEQYF

SEQ ID NO: 655443 - protein, 14 aa, Homo sapiens
  CDR3 for alpha chain variable domain of TCR clone 327722 (TRAV26-2, TRAJ38)
CILYNAGNKRKLIW

SEQ ID NO: 655444 - protein, 13 aa, Homo sapiens
  CDR3 for beta chain variable domain of TCR clone 327722 (TRBV10-3, TRBJ2-7)
CASKLAVNYEQYF

SEQ ID NO: 655445 - protein, 11 aa, Homo sapiens
  CDR3 for alpha chain variable domain of TCR clone 327723 (TRAV17, TRAJ9)
CATTGVFKTTF

SEQ ID NO: 655446 - protein, 14 aa, Homo sapiens
  CDR3 for beta chain variable domain of TCR clone 327723 (TRBV7-9, TRBJ2-2)
CASSGLADTGELFF

SEQ ID NO: 655447 - protein, 16 aa, Homo sapiens
  CDR3 for alpha chain variable domain of TCR clone 327724 (TRAV30, TRAJ24)
CCTEMVDADSWGKFQS

SEQ ID NO: 655448 - protein, 14 aa, Homo sapiens
  CDR3 for beta chain variable domain of TCR clone 327724 (TRBV12-5, TRBJ2-5)
CASGSRTHQETQYF

SEQ ID NO: 655449 - protein, 14 aa, Homo sapiens
  CDR3 for alpha chain variable domain of TCR clone 327725 (TRAV12-2, TRAJ17)
CAVLFKAAGNKLTF

SEQ ID NO: 655450 - protein, 14 aa, Homo sapiens
  CDR3 for beta chain variable domain of TCR clone 327725 (TRBV15, TRBJ1-2)
CATSRDFDRVGYIF

SEQ ID NO: 655451 - protein, 12 aa, Homo sapiens
  CDR3 for alpha chain variable domain of TCR clone 327726 (TRAV13-1, TRAJ17)
CAARTAGNKRTL

SEQ ID NO: 655452 - protein, 15 aa, Homo sapiens
  CDR3 for beta chain variable domain of TCR clone 327726 (TRBV7-6, TRBJ1-1)
CASSPQGGANTEAFF

SEQ ID NO: 655453 - protein, 11 aa, Homo sapiens
  CDR3 for alpha chain variable domain of TCR clone 327727 (TRAV2, TRAJ33)
CAVDSNYQLIW

SEQ ID NO: 655454 - protein, 16 aa, Homo sapiens
  CDR3 for beta chain variable domain of TCR clone 327727 (TRBV4-2, TRBJ1-1)
CASSQAGFGMNTEAFF

SEQ ID NO: 655455 - protein, 14 aa, Homo sapiens
  CDR3 for alpha chain variable domain of TCR clone 327728 (TRAV12-3, TRAJ10)
SHLPPTGGGNKLTF

SEQ ID NO: 655456 - protein, 13 aa, Homo sapiens
  CDR3 for beta chain variable domain of TCR clone 327728 (TRBV7-9, TRBJ2-3)
CASSPGSTDTQYF

SEQ ID NO: 655457 - protein, 12 aa, Homo sapiens
  CDR3 for alpha chain variable domain of TCR clone 327729 (TRAV1-1, TRAJ9)
CALNTGGFNTIF

SEQ ID NO: 655458 - protein, 13 aa, Homo sapiens
  CDR3 for beta chain variable domain of TCR clone 327729 (TRBV29-1, TRBJ2-5)
CSAGLAGEETQYF

SEQ ID NO: 655459 - protein, 16 aa, Homo sapiens
  CDR3 for alpha chain variable domain of TCR clone 327730 (TRAV12-3, TRAJ53)
CAMSPGSGGSNSKLTF

SEQ ID NO: 655460 - protein, 11 aa, Homo sapiens
  CDR3 for beta chain variable domain of TCR clone 327730 (TRBV29-1, TRBJ2-5)
CSEDRTGTQYV

SEQ ID NO: 655461 - protein, 15 aa, Homo sapiens
  CDR3 for alpha chain variable domain of TCR clone 327731 (TRAV4, TRAJ12)
CLVGDLMDSSYKLIF

SEQ ID NO: 655462 - protein, 15 aa, Homo sapiens
  CDR3 for beta chain variable domain of TCR clone 327731 (TRBV7-2, TRBJ1-6)
CASSSPGRGNSPLHF

SEQ ID NO: 655463 - protein, 15 aa, Homo sapiens
  CDR3 for alpha chain variable domain of TCR clone 327732 (TRAV3, TRAJ36)
GAVRASQTGANNLFF

SEQ ID NO: 655464 - protein, 13 aa, Homo sapiens
  CDR3 for beta chain variable domain of TCR clone 327732 (TRBV10-3, TRBJ1-2)
CAISERDSYGYTF

SEQ ID NO: 655465 - protein, 14 aa, Homo sapiens
  CDR3 for alpha chain variable domain of TCR clone 327733 (TRAV1-2, TRAJ16)
CAVNRFSDCQKLLF

SEQ ID NO: 655466 - protein, 17 aa, Homo sapiens
  CDR3 for beta chain variable domain of TCR clone 327733 (TRBV7-9, TRBJ2-1)
CASSLVASYPSYNEQFF

SEQ ID NO: 655467 - protein, 14 aa, Homo sapiens
  CDR3 for alpha chain variable domain of TCR clone 327734 (TRAV12-2, TRAJ40)
CAVKIPSGTYQYIF

SEQ ID NO: 655468 - protein, 14 aa, Homo sapiens
  CDR3 for beta chain variable domain of TCR clone 327734 (TRBV20-1, TRBJ1-1)
YSAQTRIGGTEAFF

SEQ ID NO: 655469 - protein, 15 aa, Homo sapiens
  CDR3 for alpha chain variable domain of TCR clone 327735 (TRAV35, TRAJ40)
CAGQLGTSGTYKYIF

SEQ ID NO: 655470 - protein, 14 aa, Homo sapiens
  CDR3 for beta chain variable domain of TCR clone 327735 (TRBV5-1, TRBJ2-7)
CASSRGEALYEQYF

SEQ ID NO: 655471 - protein, 14 aa, Homo sapiens
  CDR3 for alpha chain variable domain of TCR clone 327736 (TRAV13-1, TRAJ35)
CAASKGGFGNVLHC

SEQ ID NO: 655472 - protein, 13 aa, Homo sapiens
  CDR3 for beta chain variable domain of TCR clone 327736 (TRBV7-3, TRBJ1-1)
CACSQDWGAGAFF

SEQ ID NO: 655473 - protein, 18 aa, Homo sapiens
  CDR3 for alpha chain variable domain of TCR clone 327737 (TRAV29/DV5, TRAJ52)
CAAGFRVAGGTSYGKLTF

SEQ ID NO: 655474 - protein, 20 aa, Homo sapiens
  CDR3 for beta chain variable domain of TCR clone 327737 (TRBV7-8, TRBJ2-1)
CASSLAHRLAGVRSYNEQFF

SEQ ID NO: 655475 - protein, 23 aa, Homo sapiens
  CDR3 for alpha chain variable domain of TCR clone 327738 (TRAV4, TRAJ26)
IPADRKSSTLSLPRVYYGQNFVF

SEQ ID NO: 655476 - protein, 16 aa, Homo sapiens
  CDR3 for beta chain variable domain of TCR clone 327738 (TRBV7-2, TRBJ1-2)
CASSSNQDRRGHGDTF

SEQ ID NO: 655477 - protein, 15 aa, Homo sapiens
  CDR3 for alpha chain variable domain of TCR clone 327739 (TRAV26-2, TRAJ45)
CILRDRVDQEGVLTD

SEQ ID NO: 655478 - protein, 15 aa, Homo sapiens
  CDR3 for beta chain variable domain of TCR clone 327739 (TRBV7-6, TRBJ2-5)
CASSKPTGPQETQYF

SEQ ID NO: 655479 - protein, 14 aa, Homo sapiens
  CDR3 for alpha chain variable domain of TCR clone 327740 (TRAV21, TRAJ15)
CAVSHNQAGTALIF

SEQ ID NO: 655480 - protein, 11 aa, Homo sapiens
  CDR3 for beta chain variable domain of TCR clone 327740 (TRBV20-1, TRBJ2-7)
CSARTSYEQYF

SEQ ID NO: 655481 - protein, 16 aa, Homo sapiens
  CDR3 for alpha chain variable domain of TCR clone 327741 (TRAV30, TRAJ24)
CVTEIVDADSWGKFQF

SEQ ID NO: 655482 - protein, 13 aa, Homo sapiens
  CDR3 for beta chain variable domain of TCR clone 327741 (TRBV7-3, TRBJ1-1)
CASSQDWGAEAFF

SEQ ID NO: 655483 - protein, 17 aa, Homo sapiens
  CDR3 for alpha chain variable domain of TCR clone 327742 (TRAV3, TRAJ6)
CAVRDGPRAGGSYIPTF

SEQ ID NO: 655484 - protein, 14 aa, Homo sapiens
  CDR3 for beta chain variable domain of TCR clone 327742 (TRBV19, TRBJ2-1)
CASPTFVLSREQFF

SEQ ID NO: 655485 - protein, 11 aa, Homo sapiens
  CDR3 for alpha chain variable domain of TCR clone 327743 (TRAV1-2, TRAJ11)
CAVRGYSTLTF

SEQ ID NO: 655486 - protein, 20 aa, Homo sapiens
  CDR3 for beta chain variable domain of TCR clone 327743 (TRBV28, TRBJ2-1)
CASTPIGRSPGLAGGNEQFF

SEQ ID NO: 655487 - protein, 11 aa, Homo sapiens
  CDR3 for alpha chain variable domain of TCR clone 327744 (TRAV13-1, TRAJ8)
CAARGFQNLVF

SEQ ID NO: 655488 - protein, 16 aa, Homo sapiens
  CDR3 for beta chain variable domain of TCR clone 327744 (TRBV19, TRBJ1-5)
CASSTRGTRSNQPQHF

SEQ ID NO: 655489 - protein, 17 aa, Homo sapiens
  CDR3 for alpha chain variable domain of TCR clone 327745 (TRAV3, TRAJ12)
CAVRDGGRMDSSYKLIF

SEQ ID NO: 655490 - protein, 11 aa, Homo sapiens
  CDR3 for beta chain variable domain of TCR clone 327745 (TRBV29-1, TRBJ2-5)
CSEDRTGTQYF

SEQ ID NO: 655491 - protein, 11 aa, Homo sapiens
  CDR3 for alpha chain variable domain of TCR clone 327746 (TRAV12-1, TRAJ30)
CVVNGQDKINF

SEQ ID NO: 655492 - protein, 12 aa, Homo sapiens
  CDR3 for beta chain variable domain of TCR clone 327746 (TRBV27, TRBJ2-2)
CASKPFTGELFF

SEQ ID NO: 655493 - protein, 14 aa, Homo sapiens
  CDR3 for alpha chain variable domain of TCR clone 327747 (TRAV12-3, TRAJ10)
SRLPLTGGGNKLTF

SEQ ID NO: 655494 - protein, 15 aa, Homo sapiens
  CDR3 for beta chain variable domain of TCR clone 327747 (TRBV7-9, TRBJ1-5)
CASSQGHQPNQPQHF

SEQ ID NO: 655495 - protein, 12 aa, Homo sapiens
  CDR3 for alpha chain variable domain of TCR clone 327748 (TRAV16, TRAJ10)
CSRTGGGNKLTF

SEQ ID NO: 655496 - protein, 13 aa, Homo sapiens
  CDR3 for beta chain variable domain of TCR clone 327748 (TRBV7-3, TRBJ1-1)
CASSQDWGAAAFF

SEQ ID NO: 655497 - protein, 15 aa, Homo sapiens
  CDR3 for alpha chain variable domain of TCR clone 327749 (TRAV29/DV5, TRAJ29)
CAASERSSGNTHIVF

SEQ ID NO: 655498 - protein, 17 aa, Homo sapiens
  CDR3 for beta chain variable domain of TCR clone 327749 (TRBV4-1, TRBJ1-4)
CASSQEGPRGVEEKLFF

SEQ ID NO: 655499 - protein, 15 aa, Homo sapiens
  CDR3 for alpha chain variable domain of TCR clone 327750 (TRAV21, TRAJ32)
CAAAPYGGATNKLIF

SEQ ID NO: 655500 - protein, 17 aa, Homo sapiens
  CDR3 for beta chain variable domain of TCR clone 327750 (TRBV18, TRBJ2-3)
CASSPFGDCGFTDTQYF

SEQ ID NO: 655501 - protein, 14 aa, Homo sapiens
  CDR3 for alpha chain variable domain of TCR clone 327751 (TRAV1-2, TRAJ16)
CAVNRFSDGQKLLF

SEQ ID NO: 655502 - protein, 16 aa, Homo sapiens
  CDR3 for beta chain variable domain of TCR clone 327751 (TRBV12-5, TRBJ2-5)
CASGPRTSGYQETQYF

SEQ ID NO: 655503 - protein, 14 aa, Homo sapiens
  CDR3 for alpha chain variable domain of TCR clone 327752 (TRAV23/DV6, TRAJ40)
CAASLTSGTYKYIF

SEQ ID NO: 655504 - protein, 14 aa, Homo sapiens
  CDR3 for beta chain variable domain of TCR clone 327752 (TRBV7-2, TRBJ2-7)
CASRSQGAAYEQYF

SEQ ID NO: 655505 - protein, 12 aa, Homo sapiens
  CDR3 for alpha chain variable domain of TCR clone 327753 (TRAV17, TRAJ39)
CATGAAGNMLTF

SEQ ID NO: 655506 - protein, 14 aa, Homo sapiens
  CDR3 for beta chain variable domain of TCR clone 327753 (TRBV7-9, TRBJ1-2)
CASSRRGANYDYTF

SEQ ID NO: 655507 - protein, 17 aa, Homo sapiens
  CDR3 for alpha chain variable domain of TCR clone 327754 (TRAV26-1, TRAJ53)
CIVRVDDSGGSNYKLTF

SEQ ID NO: 655508 - protein, 13 aa, Homo sapiens
  CDR3 for beta chain variable domain of TCR clone 327754 (TRBV9, TRBJ2-1)
CASSPSGGNEQFF

SEQ ID NO: 655509 - protein, 13 aa, Homo sapiens
  CDR3 for alpha chain variable domain of TCR clone 327755 (TRAV29/DV5, TRAJ33)
CSASVASNYQLIW

SEQ ID NO: 655510 - protein, 15 aa, Homo sapiens
  CDR3 for beta chain variable domain of TCR clone 327755 (TRBV18, TRBJ1-1)
CASSDRGTGDTEAFF

SEQ ID NO: 655511 - protein, 16 aa, Homo sapiens
  CDR3 for alpha chain variable domain of TCR clone 327756 (TRAV27, TRAJ34)
CAGGGLGDYNTDKLIF

SEQ ID NO: 655512 - protein, 16 aa, Homo sapiens
  CDR3 for beta chain variable domain of TCR clone 327756 (TRBV13, TRBJ2-2)
CASSLGRGYGTGELFF

SEQ ID NO: 655513 - protein, 16 aa, Homo sapiens
  CDR3 for alpha chain variable domain of TCR clone 327757 (TRAV3, TRAJ37)
CAGRGKVSGNTGKLIF

SEQ ID NO: 655514 - protein, 13 aa, Homo sapiens
  CDR3 for beta chain variable domain of TCR clone 327757 (TRBV14, TRBJ2-7)
CASSQDRRYEQYF

SEQ ID NO: 655515 - protein, 12 aa, Homo sapiens
  CDR3 for alpha chain variable domain of TCR clone 327758 (TRAV26-1, TRAJ26)
CIVFIYGQNFVF

SEQ ID NO: 655516 - protein, 15 aa, Homo sapiens
  CDR3 for beta chain variable domain of TCR clone 327758 (TRBV28, TRBJ2-1)
CASSIIAGGRSEQFF

SEQ ID NO: 655517 - protein, 14 aa, Homo sapiens
  CDR3 for alpha chain variable domain of TCR clone 327759 (TRAV34, TRAJ44)
CGADGTGTASKLTL

SEQ ID NO: 655518 - protein, 17 aa, Homo sapiens
  CDR3 for beta chain variable domain of TCR clone 327759 (TRBV11-2, TRBJ2-1)
CASSLYPPGVEYNEQFF

SEQ ID NO: 655519 - protein, 11 aa, Homo sapiens
  CDR3 for alpha chain variable domain of TCR clone 327760 (TRAV16, TRAJ29)
WAPSGNTPLVF

SEQ ID NO: 655520 - protein, 12 aa, Homo sapiens
  CDR3 for beta chain variable domain of TCR clone 327760 (TRBV6-1, TRBJ2-7)
CASSDYSYEQYF

SEQ ID NO: 655521 - protein, 14 aa, Homo sapiens
  CDR3 for alpha chain variable domain of TCR clone 327761 (TRAV12-1, TRAJ17)
CVVNYKADGNKLTF

SEQ ID NO: 655522 - protein, 16 aa, Homo sapiens
  CDR3 for beta chain variable domain of TCR clone 327761 (TRBV12-4, TRBJ1-5)
CASSRPVGGSNQPQHF

SEQ ID NO: 655523 - protein, 14 aa, Homo sapiens
  CDR3 for alpha chain variable domain of TCR clone 327762 (TRAV1-2, TRAJ8)
CAGREDAGFQKLVF

SEQ ID NO: 655524 - protein, 15 aa, Homo sapiens
  CDR3 for beta chain variable domain of TCR clone 327762 (TRBV6-3, TRBJ2-7)
CASSSPGTVFYEQYF

SEQ ID NO: 655525 - protein, 12 aa, Homo sapiens
  CDR3 for alpha chain variable domain of TCR clone 327763 (TRAV12-3, TRAJ17)
CVMTLTGNKLTF

SEQ ID NO: 655526 - protein, 14 aa, Homo sapiens
  CDR3 for beta chain variable domain of TCR clone 327763 (TRBV7-6, TRBJ2-3)
CASSLGTVTDTQYF

SEQ ID NO: 655527 - protein, 10 aa, Homo sapiens
  CDR3 for alpha chain variable domain of TCR clone 327764 (TRAV23/DV6, TRAJ57)
CSASSTLSQG

SEQ ID NO: 655528 - protein, 13 aa, Homo sapiens
  CDR3 for beta chain variable domain of TCR clone 327764 (TRBV15, TRBJ1-6)
CATSGGLNSPLHF

SEQ ID NO: 655529 - protein, 16 aa, Homo sapiens
  CDR3 for alpha chain variable domain of TCR clone 327765 (TRAV21, TRAJ37)
CAVRTAGSSNTGKLIS

SEQ ID NO: 655530 - protein, 12 aa, Homo sapiens
  CDR3 for beta chain variable domain of TCR clone 327765 (TRBV11-2, TRBJ2-1)
CASSPGNNEQFF

SEQ ID NO: 655531 - protein, 14 aa, Homo sapiens
  CDR3 for alpha chain variable domain of TCR clone 327766 (TRAV26-1, TRAJ34)
CIVRESYNTDKLIF

SEQ ID NO: 655532 - protein, 14 aa, Homo sapiens
  CDR3 for beta chain variable domain of TCR clone 327766 (TRBV7-3, TRBJ1-1)
CASSLKGGNTEAFF

SEQ ID NO: 655533 - protein, 16 aa, Homo sapiens
  CDR3 for alpha chain variable domain of TCR clone 327767 (TRAV27, TRAJ13)
CAGAKSDSGGYQKVTF

SEQ ID NO: 655534 - protein, 13 aa, Homo sapiens
  CDR3 for beta chain variable domain of TCR clone 327767 (TRBV20-1, TRBJ1-1)
CSARGGGNTEASF

SEQ ID NO: 655535 - protein, 13 aa, Homo sapiens
  CDR3 for alpha chain variable domain of TCR clone 327768 (TRAV8-3, TRAJ48)
CAVVAFGNEKLTF

SEQ ID NO: 655536 - protein, 14 aa, Homo sapiens
  CDR3 for beta chain variable domain of TCR clone 327768 (TRBV18, TRBJ2-7)
CASSPRGGAYEQYF

SEQ ID NO: 655537 - protein, 14 aa, Homo sapiens
  CDR3 for alpha chain variable domain of TCR clone 327769 (TRAV1-2, TRAJ8)
CAVREDTGLQKLVF

SEQ ID NO: 655538 - protein, 15 aa, Homo sapiens
  CDR3 for beta chain variable domain of TCR clone 327769 (TRBV20-1, TRBJ2-7)
CSAREGRDSLYEQYF

SEQ ID NO: 655539 - protein, 13 aa, Homo sapiens
  CDR3 for alpha chain variable domain of TCR clone 327770 (TRAV12-2, TRAJ54)
CAVNRWGAQKLVF

SEQ ID NO: 655540 - protein, 18 aa, Homo sapiens
  CDR3 for beta chain variable domain of TCR clone 327770 (TRBV7-3, TRBJ2-5)
CASSLGGAAQGRWETQYF

SEQ ID NO: 655541 - protein, 13 aa, Homo sapiens
  CDR3 for alpha chain variable domain of TCR clone 327771 (TRAV35, TRAJ42)
CAGFPGSQGNLIF

SEQ ID NO: 655542 - protein, 13 aa, Homo sapiens
  CDR3 for beta chain variable domain of TCR clone 327771 (TRBV29-1, TRBJ2-1)
GSVEGGRVNERFF

SEQ ID NO: 655543 - protein, 14 aa, Homo sapiens
  CDR3 for alpha chain variable domain of TCR clone 327772 (TRAV12-2, TRAJ13)
CAVKKTGGYQKVTF

SEQ ID NO: 655544 - protein, 16 aa, Homo sapiens
  CDR3 for beta chain variable domain of TCR clone 327772 (TRBV28, TRBJ2-7)
CASSPWVATGDLSQYF

SEQ ID NO: 655545 - protein, 13 aa, Homo sapiens
  CDR3 for alpha chain variable domain of TCR clone 327773 (TRAV1-2, TRAJ24)
FAVTGDSWGKLQF

SEQ ID NO: 655546 - protein, 15 aa, Homo sapiens
  CDR3 for beta chain variable domain of TCR clone 327773 (TRBV7-2, TRBJ2-7)
CASSLGGAKSGEQYF

SEQ ID NO: 655547 - protein, 11 aa, Homo sapiens
  CDR3 for alpha chain variable domain of TCR clone 327774 (TRAV12-2, TRAJ39)
CAVNNMHTFGG

SEQ ID NO: 655548 - protein, 16 aa, Homo sapiens
  CDR3 for beta chain variable domain of TCR clone 327774 (TRBV5-3, TRBJ2-2)
CARSFGTGTNTGELFF

SEQ ID NO: 655549 - protein, 15 aa, Homo sapiens
  CDR3 for alpha chain variable domain of TCR clone 327775 (TRAV26-1, TRAJ23)
RIVRVAVYQGGKLIF

SEQ ID NO: 655550 - protein, 18 aa, Homo sapiens
  CDR3 for beta chain variable domain of TCR clone 327775 (TRBV28, TRBJ2-1)
CASSPTSGRANSYNEQFF

SEQ ID NO: 655551 - protein, 17 aa, Homo sapiens
  CDR3 for alpha chain variable domain of TCR clone 327776 (TRAV8-4, TRAJ11)
CAVSDRGENSGYSTLTF

SEQ ID NO: 655552 - protein, 14 aa, Homo sapiens
  CDR3 for beta chain variable domain of TCR clone 327776 (TRBV20-1, TRBJ2-1)
GSPNDEASYNEQFF

SEQ ID NO: 655553 - protein, 16 aa, Homo sapiens
  CDR3 for alpha chain variable domain of TCR clone 327777 (TRAV12-2, TRAJ40)
CAVIRGGTSGPYKYIF

SEQ ID NO: 655554 - protein, 14 aa, Homo sapiens
  CDR3 for beta chain variable domain of TCR clone 327777 (TRBV20-1, TRBJ2-5)
CSARDGRAGETQYF

SEQ ID NO: 655555 - protein, 13 aa, Homo sapiens
  CDR3 for alpha chain variable domain of TCR clone 327778 (TRAV8-3, TRAJ28)
CAVGAVGIYQPTF

SEQ ID NO: 655556 - protein, 14 aa, Homo sapiens
  CDR3 for beta chain variable domain of TCR clone 327778 (TRBV7-2, TRBJ2-7)
CASRSQGAAYEQYF

SEQ ID NO: 655557 - protein, 13 aa, Homo sapiens
  CDR3 for alpha chain variable domain of TCR clone 327779 (TRAV30, TRAJ16)
CGTFGGDGQKLLF

SEQ ID NO: 655558 - protein, 15 aa, Homo sapiens
  CDR3 for beta chain variable domain of TCR clone 327779 (TRBV5-1, TRBJ2-1)
CASTGSGRTYNEQFF

SEQ ID NO: 655559 - protein, 10 aa, Homo sapiens
  CDR3 for alpha chain variable domain of TCR clone 327780 (TRAV21, TRAJ31)
CGGNNARLMF

SEQ ID NO: 655560 - protein, 16 aa, Homo sapiens
  CDR3 for beta chain variable domain of TCR clone 327780 (TRBV27, TRBJ2-5)
CASSYGPGGQKETQYF

SEQ ID NO: 655561 - protein, 15 aa, Homo sapiens
  CDR3 for alpha chain variable domain of TCR clone 327781 (TRAV8-3, TRAJ45)
CASSYSGGGADGLTF

SEQ ID NO: 655562 - protein, 15 aa, Homo sapiens
  CDR3 for beta chain variable domain of TCR clone 327781 (TRBV7-2, TRBJ2-1)
CDSSLASGRVNEQFF

SEQ ID NO: 655563 - protein, 13 aa, Homo sapiens
  CDR3 for alpha chain variable domain of TCR clone 327782 (TRAV17, TRAJ5)
CALRGTDRRALTF

SEQ ID NO: 655564 - protein, 15 aa, Homo sapiens
  CDR3 for beta chain variable domain of TCR clone 327782 (TRBV6-1, TRBJ1-5)
CASSELREGNQPQHF

SEQ ID NO: 655565 - protein, 12 aa, Homo sapiens
  CDR3 for alpha chain variable domain of TCR clone 327783 (TRAV10, TRAJ43)
CVVVRVGNDMRF

SEQ ID NO: 655566 - protein, 15 aa, Homo sapiens
  CDR3 for beta chain variable domain of TCR clone 327783 (TRBV2, TRBJ2-7)
CASSEGLARSYEQYS

SEQ ID NO: 655567 - protein, 17 aa, Homo sapiens
  CDR3 for alpha chain variable domain of TCR clone 327784 (TRAV29/DV5, TRAJ45)
CAASLMYSGGGADGLTF

SEQ ID NO: 655568 - protein, 13 aa, Homo sapiens
  CDR3 for beta chain variable domain of TCR clone 327784 (TRBV12-4, TRBJ1-2)
CASSLRQGKGYTF

SEQ ID NO: 655569 - protein, 14 aa, Homo sapiens
  CDR3 for alpha chain variable domain of TCR clone 327785 (TRAV8-4, TRAJ39)
CAVSEGNAGNMLTF

SEQ ID NO: 655570 - protein, 14 aa, Homo sapiens
  CDR3 for beta chain variable domain of TCR clone 327785 (TRBV7-9, TRBJ1-6)
CASRPGTVNSLLHF

SEQ ID NO: 655571 - protein, 14 aa, Homo sapiens
  CDR3 for alpha chain variable domain of TCR clone 327786 (TRAV8-4, TRAJ45)
CASGGGGGADGLTF

SEQ ID NO: 655572 - protein, 15 aa, Homo sapiens
  CDR3 for beta chain variable domain of TCR clone 327786 (TRBV20-1, TRBJ2-7)
CSARDRVSGMDEQYF

SEQ ID NO: 655573 - protein, 12 aa, Homo sapiens
  CDR3 for alpha chain variable domain of TCR clone 327787 (TRAV8-3, TRAJ26)
CAGDNYVQNFVF

SEQ ID NO: 655574 - protein, 15 aa, Homo sapiens
  CDR3 for beta chain variable domain of TCR clone 327787 (TRBV20-1, TRBJ1-1)
CSAPLGGGTEASLDK

SEQ ID NO: 655575 - protein, 16 aa, Homo sapiens
  CDR3 for alpha chain variable domain of TCR clone 327788 (TRAV2, TRAJ20)
TTVLWSFRPNDYKLSF

SEQ ID NO: 655576 - protein, 12 aa, Homo sapiens
  CDR3 for beta chain variable domain of TCR clone 327788 (TRBV7-6, TRBJ2-3)
CASSTGTDTQYF

SEQ ID NO: 655577 - protein, 13 aa, Homo sapiens
  CDR3 for alpha chain variable domain of TCR clone 327789 (TRAV8-3, TRAJ21)
CAVGAYNFNKFYF

SEQ ID NO: 655578 - protein, 17 aa, Homo sapiens
  CDR3 for beta chain variable domain of TCR clone 327789 (TRBV13, TRBJ2-3)
CASSLSRVAGGRNTQYF

SEQ ID NO: 655579 - protein, 12 aa, Homo sapiens
  CDR3 for alpha chain variable domain of TCR clone 327790 (TRAV13-2, TRAJ23)
CAERPRGGKLIF

SEQ ID NO: 655580 - protein, 15 aa, Homo sapiens
  CDR3 for beta chain variable domain of TCR clone 327790 (TRBV6-3, TRBJ2-7)
CASSSPGTVFYEQYF

SEQ ID NO: 655581 - protein, 12 aa, Homo sapiens
  CDR3 for alpha chain variable domain of TCR clone 327791 (TRAV12-3, TRAJ17)
CAMTLTGNKLTF

SEQ ID NO: 655582 - protein, 15 aa, Homo sapiens
  CDR3 for beta chain variable domain of TCR clone 327791 (TRBV20-1, TRBJ2-7)
CSARDRVAGMDEHYF

SEQ ID NO: 655583 - protein, 12 aa, Homo sapiens
  CDR3 for alpha chain variable domain of TCR clone 327792 (TRAV26-1, TRAJ54)
SIGGWGAQKLVF

SEQ ID NO: 655584 - protein, 14 aa, Homo sapiens
  CDR3 for beta chain variable domain of TCR clone 327792 (TRBV11-2, TRBJ1-2)
CASSSGQAGDGYTF

SEQ ID NO: 655585 - protein, 14 aa, Homo sapiens
  CDR3 for alpha chain variable domain of TCR clone 327793 (TRAV12-1, TRAJ7)
CVVTPPHGNNRLAF

SEQ ID NO: 655586 - protein, 14 aa, Homo sapiens
  CDR3 for beta chain variable domain of TCR clone 327793 (TRBV28, TRBJ2-7)
CASSLRARGNEQYF

SEQ ID NO: 655587 - protein, 10 aa, Homo sapiens
  CDR3 for alpha chain variable domain of TCR clone 327794 (TRAV12-2, TRAJ20)
CAIYLYKLSF

SEQ ID NO: 655588 - protein, 14 aa, Homo sapiens
  CDR3 for beta chain variable domain of TCR clone 327794 (TRBV5-1, TRBJ2-2)
CASSLIEGAGELFF

SEQ ID NO: 655589 - protein, 13 aa, Homo sapiens
  CDR3 for alpha chain variable domain of TCR clone 327795 (TRAV20, TRAJ40)
CAVPFSGTYKYIF

SEQ ID NO: 655590 - protein, 17 aa, Homo sapiens
  CDR3 for beta chain variable domain of TCR clone 327795 (TRBV4-2, TRBJ1-1)
CASTQFGGGSGNTEAFF

SEQ ID NO: 655591 - protein, 12 aa, Homo sapiens
  CDR3 for alpha chain variable domain of TCR clone 327796 (TRAV8-2, TRAJ6)
CVVRKGSYIPTF

SEQ ID NO: 655592 - protein, 18 aa, Homo sapiens
  CDR3 for beta chain variable domain of TCR clone 327796 (TRBV4-1, TRBJ2-3)
CASSQGGASGGATDTQYF

SEQ ID NO: 655593 - protein, 13 aa, Homo sapiens
  CDR3 for alpha chain variable domain of TCR clone 327797 (TRAV12-1, TRAJ34)
CVVTGYNTDKLIF

SEQ ID NO: 655594 - protein, 13 aa, Homo sapiens
  CDR3 for beta chain variable domain of TCR clone 327797 (TRBV28, TRBJ2-7)
CASKAGGVYVQYF

SEQ ID NO: 655595 - protein, 16 aa, Homo sapiens
  CDR3 for alpha chain variable domain of TCR clone 327798 (TRAV8-3, TRAJ28)
CAVGATLGLGVTDSLS

SEQ ID NO: 655596 - protein, 14 aa, Homo sapiens
  CDR3 for beta chain variable domain of TCR clone 327798 (TRBV7-2, TRBJ2-1)
CASSLGVGYNEQFF

SEQ ID NO: 655597 - protein, 11 aa, Homo sapiens
  CDR3 for alpha chain variable domain of TCR clone 327799 (TRAV3, TRAJ21)
CAVGNFNKFYF

SEQ ID NO: 655598 - protein, 15 aa, Homo sapiens
  CDR3 for beta chain variable domain of TCR clone 327799 (TRBV18, TRBJ2-1)
CASLPDRGRDNEQFF

SEQ ID NO: 655599 - protein, 16 aa, Homo sapiens
  CDR3 for alpha chain variable domain of TCR clone 327800 (TRAV8-3, TRAJ44)
CAVGPLNTGTASKLTF

SEQ ID NO: 655600 - protein, 18 aa, Homo sapiens
  CDR3 for beta chain variable domain of TCR clone 327800 (TRBV3-1, TRBJ2-1)
CASSQDLPGRPRFDEQFF

SEQ ID NO: 655601 - protein, 13 aa, Homo sapiens
  CDR3 for alpha chain variable domain of TCR clone 327801 (TRAV12-1, TRAJ33)
CGDAPDSNYQLIW

SEQ ID NO: 655602 - protein, 15 aa, Homo sapiens
  CDR3 for beta chain variable domain of TCR clone 327801 (TRBV27, TRBJ2-1)
CASSNGGGSSHEQFF

SEQ ID NO: 655603 - protein, 13 aa, Homo sapiens
  CDR3 for alpha chain variable domain of TCR clone 327802 (TRAV1-1, TRAJ9)
CAAKNTGGFKTIF

SEQ ID NO: 655604 - protein, 16 aa, Homo sapiens
  CDR3 for beta chain variable domain of TCR clone 327802 (TRBV20-1, TRBJ1-2)
CSASMGQGVANYGYTF

SEQ ID NO: 655605 - protein, 13 aa, Homo sapiens
  CDR3 for alpha chain variable domain of TCR clone 327803 (TRAV3, TRAJ27)
CAGRPLGAGKSTF

SEQ ID NO: 655606 - protein, 13 aa, Homo sapiens
  CDR3 for beta chain variable domain of TCR clone 327803 (TRBV7-9, TRBJ2-3)
CASSPGSTDTQYC

SEQ ID NO: 655607 - protein, 16 aa, Homo sapiens
  CDR3 for alpha chain variable domain of TCR clone 327804 (TRAV12-2, TRAJ10)
CAVNRVLTGGGNKLTF

SEQ ID NO: 655608 - protein, 17 aa, Homo sapiens
  CDR3 for beta chain variable domain of TCR clone 327804 (TRBV7-9, TRBJ2-1)
CASSLVASYPSYNEQFF

SEQ ID NO: 655609 - protein, 17 aa, Homo sapiens
  CDR3 for alpha chain variable domain of TCR clone 327805 (TRAV8-1, TRAJ43)
CAVTNDMRFGAGTRLTV

SEQ ID NO: 655610 - protein, 20 aa, Homo sapiens
  CDR3 for beta chain variable domain of TCR clone 327805 (TRBV7-8, TRBJ2-2)
CASSHLFPGPTIHITGELFF

SEQ ID NO: 655611 - protein, 14 aa, Homo sapiens
  CDR3 for alpha chain variable domain of TCR clone 327806 (TRAV12-2, TRAJ53)
CAVKGGGSNDKLTF

SEQ ID NO: 655612 - protein, 15 aa, Homo sapiens
  CDR3 for beta chain variable domain of TCR clone 327806 (TRBV10-3, TRBJ2-3)
CAISLTSGGTDTQYF

SEQ ID NO: 655613 - protein, 16 aa, Homo sapiens
  CDR3 for alpha chain variable domain of TCR clone 327807 (TRAV1-2, TRAJ10)
CAVRGVLTGGGNKLTF

SEQ ID NO: 655614 - protein, 17 aa, Homo sapiens
  CDR3 for beta chain variable domain of TCR clone 327807 (TRBV15, TRBJ1-5)
CATSRAPPGTRNQAQHF

SEQ ID NO: 655615 - protein, 13 aa, Homo sapiens
  CDR3 for alpha chain variable domain of TCR clone 327808 (TRAV27, TRAJ49)
CSPRPYTGNQYYF

SEQ ID NO: 655616 - protein, 14 aa, Homo sapiens
  CDR3 for beta chain variable domain of TCR clone 327808 (TRBV4-2, TRBJ2-1)
CASGLDRAYNEQFF

SEQ ID NO: 655617 - protein, 20 aa, Homo sapiens
  CDR3 for alpha chain variable domain of TCR clone 327809 (TRAV26-2, TRAJ43)
CCVLLHPETRALYNNNDMRF

SEQ ID NO: 655618 - protein, 14 aa, Homo sapiens
  CDR3 for beta chain variable domain of TCR clone 327809 (TRBV7-2, TRBJ2-7)
CASSSISGFSEQYF

SEQ ID NO: 655619 - protein, 12 aa, Homo sapiens
  CDR3 for alpha chain variable domain of TCR clone 327810 (TRAV13-1, TRAJ21)
CAAKEGFNKFYF

SEQ ID NO: 655620 - protein, 14 aa, Homo sapiens
  CDR3 for beta chain variable domain of TCR clone 327810 (TRBV7-2, TRBJ2-5)
CASSFSGGGETQYF

SEQ ID NO: 655621 - protein, 13 aa, Homo sapiens
  CDR3 for alpha chain variable domain of TCR clone 327811 (TRAV12-1, TRAJ26)
CVVRRNYGQNFVF

SEQ ID NO: 655622 - protein, 15 aa, Homo sapiens
  CDR3 for beta chain variable domain of TCR clone 327811 (TRBV20-1, TRBJ2-5)
CSANPPGRGGETQYF

SEQ ID NO: 655623 - protein, 15 aa, Homo sapiens
  CDR3 for alpha chain variable domain of TCR clone 327812 (TRAV26-1, TRAJ29)
CIVRVEGSGNTPLVF

SEQ ID NO: 655624 - protein, 15 aa, Homo sapiens
  CDR3 for beta chain variable domain of TCR clone 327812 (TRBV7-9, TRBJ1-5)
CASSQGHQRKQPQHF

SEQ ID NO: 655625 - protein, 13 aa, Homo sapiens
  CDR3 for alpha chain variable domain of TCR clone 327813 (TRAV29/DV5, TRAJ28)
CAAHRTRSYQLTF

SEQ ID NO: 655626 - protein, 14 aa, Homo sapiens
  CDR3 for beta chain variable domain of TCR clone 327813 (TRBV7-8, TRBJ2-3)
CASSLEAGTDTQYF

SEQ ID NO: 655627 - protein, 13 aa, Homo sapiens
  CDR3 for alpha chain variable domain of TCR clone 327814 (TRAV4, TRAJ34)
CLVPPYNTDKLIF

SEQ ID NO: 655628 - protein, 16 aa, Homo sapiens
  CDR3 for beta chain variable domain of TCR clone 327814 (TRBV7-3, TRBJ2-2)
CASSLKRGTLSGELFF

SEQ ID NO: 655629 - protein, 16 aa, Homo sapiens
  CDR3 for alpha chain variable domain of TCR clone 327815 (TRAV38-2/DV8, TRAJ45)
CAYRGNSGGGADGLTF

SEQ ID NO: 655630 - protein, 22 aa, Homo sapiens
  CDR3 for beta chain variable domain of TCR clone 327815 (TRBV11-3, TRBJ2-5)
CASSLPGVRGGKRDPVLRARHA

SEQ ID NO: 655631 - protein, 12 aa, Homo sapiens
  CDR3 for alpha chain variable domain of TCR clone 327816 (TRAV3, TRAJ31)
CAVRDGNARLMF

SEQ ID NO: 655632 - protein, 18 aa, Homo sapiens
  CDR3 for beta chain variable domain of TCR clone 327816 (TRBV7-2, TRBJ2-3)
CASSLKREGSGITDTQYC

SEQ ID NO: 655633 - protein, 14 aa, Homo sapiens
  CDR3 for alpha chain variable domain of TCR clone 327817 (TRAV12-2, TRAJ13)
CAVPRSGGYQKVTF

SEQ ID NO: 655634 - protein, 13 aa, Homo sapiens
  CDR3 for beta chain variable domain of TCR clone 327817 (TRBV11-2, TRBJ1-6)
CASSLAGTSPLHF

SEQ ID NO: 655635 - protein, 12 aa, Homo sapiens
  CDR3 for alpha chain variable domain of TCR clone 327818 (TRAV8-1, TRAJ20)
CAVNGDDYELSF

SEQ ID NO: 655636 - protein, 14 aa, Homo sapiens
  CDR3 for beta chain variable domain of TCR clone 327818 (TRBV4-2, TRBJ1-4)
CASSQGATNEKLFF

SEQ ID NO: 655637 - protein, 10 aa, Homo sapiens
  CDR3 for alpha chain variable domain of TCR clone 327819 (TRAV30, TRAJ48)
CGIGNEKLTF

SEQ ID NO: 655638 - protein, 13 aa, Homo sapiens
  CDR3 for beta chain variable domain of TCR clone 327819 (TRBV10-3, TRBJ2-7)
CASKLAVNYEQYF

SEQ ID NO: 655639 - protein, 12 aa, Homo sapiens
  CDR3 for alpha chain variable domain of TCR clone 327820 (TRAV36/DV7, TRAJ37)
CACYGNTGKIIF

SEQ ID NO: 655640 - protein, 14 aa, Homo sapiens
  CDR3 for beta chain variable domain of TCR clone 327820 (TRBV6-3, TRBJ1-4)
CASSGQNLNEKLFF

SEQ ID NO: 655641 - protein, 17 aa, Homo sapiens
  CDR3 for alpha chain variable domain of TCR clone 327821 (TRAV4, TRAJ13)
CLVGVQGSSGGYQKVTF

SEQ ID NO: 655642 - protein, 18 aa, Homo sapiens
  CDR3 for beta chain variable domain of TCR clone 327821 (TRBV15, TRBJ2-3)
CATSRNGARSWDTDTQYF

SEQ ID NO: 655643 - protein, 17 aa, Homo sapiens
  CDR3 for alpha chain variable domain of TCR clone 327822 (TRAV3, TRAJ6)
CAVRDGPRAGGSYKPTF

SEQ ID NO: 655644 - protein, 17 aa, Homo sapiens
  CDR3 for beta chain variable domain of TCR clone 327822 (TRBV20-1, TRBJ2-1)
CSAPPRLAGTRYNEQFF

SEQ ID NO: 655645 - protein, 18 aa, Homo sapiens
  CDR3 for alpha chain variable domain of TCR clone 327823 (TRAV13-1, TRAJ52)
CAAKNPNAGGTSYGKLTF

SEQ ID NO: 655646 - protein, 15 aa, Homo sapiens
  CDR3 for beta chain variable domain of TCR clone 327823 (TRBV7-3, TRBJ2-1)
CASSLGQGPFGEQFF

SEQ ID NO: 655647 - protein, 12 aa, Homo sapiens
  CDR3 for alpha chain variable domain of TCR clone 327824 (TRAV35, TRAJ39)
LAPNNAVNMLTF

SEQ ID NO: 655648 - protein, 13 aa, Homo sapiens
  CDR3 for beta chain variable domain of TCR clone 327824 (TRBV2, TRBJ1-1)
CASSQDWGAEAFF

SEQ ID NO: 655649 - protein, 14 aa, Homo sapiens
  CDR3 for alpha chain variable domain of TCR clone 327825 (TRAV12-3, TRAJ10)
SHLPLTGGGNKLTF

SEQ ID NO: 655650 - protein, 13 aa, Homo sapiens
  CDR3 for beta chain variable domain of TCR clone 327825 (TRBV11-2, TRBJ2-5)
CASSRGPSETQYL

SEQ ID NO: 655651 - protein, 15 aa, Homo sapiens
  CDR3 for alpha chain variable domain of TCR clone 327826 (TRAV2, TRAJ13)
CATPSYSGGYQKVTF

SEQ ID NO: 655652 - protein, 15 aa, Homo sapiens
  CDR3 for beta chain variable domain of TCR clone 327826 (TRBV2, TRBJ2-1)
CASSELAGSYNEQFF

SEQ ID NO: 655653 - protein, 12 aa, Homo sapiens
  CDR3 for alpha chain variable domain of TCR clone 327827 (TRAV13-1, TRAJ15)
CAASQAGTALIC

SEQ ID NO: 655654 - protein, 18 aa, Homo sapiens
  CDR3 for beta chain variable domain of TCR clone 327827 (TRBV7-9, TRBJ2-3)
CASSLPINGQISTDTQYF

SEQ ID NO: 655655 - protein, 17 aa, Homo sapiens
  CDR3 for alpha chain variable domain of TCR clone 327828 (TRAV13-1, TRAJ52)
CSASSGAGGTSYGKLTF

SEQ ID NO: 655656 - protein, 15 aa, Homo sapiens
  CDR3 for beta chain variable domain of TCR clone 327828 (TRBV20-1, TRBJ2-7)
CSARDRVSGMDQQYF

SEQ ID NO: 655657 - protein, 15 aa, Homo sapiens
  CDR3 for alpha chain variable domain of TCR clone 327829 (TRAV13-1, TRAJ32)
CAASIYGGATNKLIF

SEQ ID NO: 655658 - protein, 15 aa, Homo sapiens
  CDR3 for beta chain variable domain of TCR clone 327829 (TRBV18, TRBJ2-1)
CASSPPSASYNEQFF

SEQ ID NO: 655659 - protein, 14 aa, Homo sapiens
  CDR3 for alpha chain variable domain of TCR clone 327830 (TRAV26-1, TRAJ39)
CIVSGSRAGNMLTF

SEQ ID NO: 655660 - protein, 15 aa, Homo sapiens
  CDR3 for beta chain variable domain of TCR clone 327830 (TRBV7-9, TRBJ1-5)
CASSQCHQPNQPQHF

SEQ ID NO: 655661 - protein, 14 aa, Homo sapiens
  CDR3 for alpha chain variable domain of TCR clone 327831 (TRAV1-2, TRAJ8)
CAVREDTGSQQLVF

SEQ ID NO: 655662 - protein, 15 aa, Homo sapiens
  CDR3 for beta chain variable domain of TCR clone 327831 (TRBV6-3, TRBJ2-7)
CASSSPGTVFYEQYF

SEQ ID NO: 655663 - protein, 15 aa, Homo sapiens
  CDR3 for alpha chain variable domain of TCR clone 327832 (TRAV23/DV6, TRAJ44)
CAASGGTGAASKLTF

SEQ ID NO: 655664 - protein, 16 aa, Homo sapiens
  CDR3 for beta chain variable domain of TCR clone 327832 (TRBV20-1, TRBJ2-3)
CSALAFDTGDPDTQYF

SEQ ID NO: 655665 - protein, 15 aa, Homo sapiens
  CDR3 for alpha chain variable domain of TCR clone 327833 (TRAV13-2, TRAJ45)
CAESDSGGGADGLTF

SEQ ID NO: 655666 - protein, 17 aa, Homo sapiens
  CDR3 for beta chain variable domain of TCR clone 327833 (TRBV25-1, TRBJ2-5)
CASSRRGGRGGQETQYF

SEQ ID NO: 655667 - protein, 14 aa, Homo sapiens
  CDR3 for alpha chain variable domain of TCR clone 327834 (TRAV2, TRAJ39)
CAVEGDNACNMLTF

SEQ ID NO: 655668 - protein, 14 aa, Homo sapiens
  CDR3 for beta chain variable domain of TCR clone 327834 (TRBV28, TRBJ2-7)
CASSLRARGNEQYF

SEQ ID NO: 655669 - protein, 12 aa, Homo sapiens
  CDR3 for alpha chain variable domain of TCR clone 327835 (TRAV13-1, TRAJ21)
CAAKEGFNKFYF

SEQ ID NO: 655670 - protein, 16 aa, Homo sapiens
  CDR3 for beta chain variable domain of TCR clone 327835 (TRBV20-1, TRBJ2-1)
CSASGSSSGMVNEQFF

SEQ ID NO: 655671 - protein, 13 aa, Homo sapiens
  CDR3 for alpha chain variable domain of TCR clone 327836 (TRAV12-3, TRAJ54)
CAMSVQGAQQLVF

SEQ ID NO: 655672 - protein, 13 aa, Homo sapiens
  CDR3 for beta chain variable domain of TCR clone 327836 (TRBV2, TRBJ1-6)
CADSGSYNSPLHF

SEQ ID NO: 655673 - protein, 14 aa, Homo sapiens
  CDR3 for alpha chain variable domain of TCR clone 327837 (TRAV8-3, TRAJ4)
CAVGAAGGYNKLIF

SEQ ID NO: 655674 - protein, 16 aa, Homo sapiens
  CDR3 for beta chain variable domain of TCR clone 327837 (TRBV15, TRBJ1-2)
CATSRGPRTGGGGYTF

SEQ ID NO: 655675 - protein, 13 aa, Homo sapiens
  CDR3 for alpha chain variable domain of TCR clone 327838 (TRAV29/DV5, TRAJ29)
CAASAAGNTPLVF

SEQ ID NO: 655676 - protein, 14 aa, Homo sapiens
  CDR3 for beta chain variable domain of TCR clone 327838 (TRBV7-2, TRBJ2-7)
CASSPKTSFYEQYF

SEQ ID NO: 655677 - protein, 14 aa, Homo sapiens
  CDR3 for alpha chain variable domain of TCR clone 327839 (TRAV8-3, TRAJ4)
CAVGGAGGYNKLIF

SEQ ID NO: 655678 - protein, 15 aa, Homo sapiens
  CDR3 for beta chain variable domain of TCR clone 327839 (TRBV6-5, TRBJ2-1)
CASSYDAGAGNEQFF

SEQ ID NO: 655679 - protein, 12 aa, Homo sapiens
  CDR3 for alpha chain variable domain of TCR clone 327840 (TRAV23/DV6, TRAJ3)
CAARAPQQCFQD

SEQ ID NO: 655680 - protein, 15 aa, Homo sapiens
  CDR3 for beta chain variable domain of TCR clone 327840 (TRBV6-3, TRBJ2-7)
CASSSPGTVFYEQYF

SEQ ID NO: 655681 - protein, 17 aa, Homo sapiens
  CDR3 for alpha chain variable domain of TCR clone 327841 (TRAV38-2/DV8, TRAJ28)
CAFLTLYSGAGSYQLTF

SEQ ID NO: 655682 - protein, 14 aa, Homo sapiens
  CDR3 for beta chain variable domain of TCR clone 327841 (TRBV7-2, TRBJ2-5)
CASSLSGGGETKYF

SEQ ID NO: 655683 - protein, 13 aa, Homo sapiens
  CDR3 for alpha chain variable domain of TCR clone 327842 (TRAV13-1, TRAJ39)
CAASIWAGNMLTF

SEQ ID NO: 655684 - protein, 13 aa, Homo sapiens
  CDR3 for beta chain variable domain of TCR clone 327842 (TRBV11-2, TRBJ1-3)
CTSSLEPVNTIYF

SEQ ID NO: 655685 - protein, 15 aa, Homo sapiens
  CDR3 for alpha chain variable domain of TCR clone 327843 (TRAV3, TRAJ16)
CAVRDGFSDGQKLLF

SEQ ID NO: 655686 - protein, 12 aa, Homo sapiens
  CDR3 for beta chain variable domain of TCR clone 327843 (TRBV7-8, TRBJ2-7)
CASSLGDREQYF

SEQ ID NO: 655687 - protein, 16 aa, Homo sapiens
  CDR3 for alpha chain variable domain of TCR clone 327844 (TRAV3, TRAJ37)
CAVRGKGSGNTGKLIF

SEQ ID NO: 655688 - protein, 13 aa, Homo sapiens
  CDR3 for beta chain variable domain of TCR clone 327844 (TRBV7-2, TRBJ2-2)
CARSSVRAGELFF

SEQ ID NO: 655689 - protein, 15 aa, Homo sapiens
  CDR3 for alpha chain variable domain of TCR clone 327845 (TRAV26-1, TRAJ37)
CIVRLGSGNTGKLIF

SEQ ID NO: 655690 - protein, 13 aa, Homo sapiens
  CDR3 for beta chain variable domain of TCR clone 327845 (TRBV6-6, TRBJ2-7)
CASSYSGSYEQYF

SEQ ID NO: 655691 - protein, 13 aa, Homo sapiens
  CDR3 for alpha chain variable domain of TCR clone 327846 (TRAV2, TRAJ40)
CAVVTSGTYKYIF

SEQ ID NO: 655692 - protein, 14 aa, Homo sapiens
  CDR3 for beta chain variable domain of TCR clone 327846 (TRBV19, TRBJ2-1)
CASLAFVLSGEQFF

SEQ ID NO: 655693 - protein, 17 aa, Homo sapiens
  CDR3 for alpha chain variable domain of TCR clone 327847 (TRAV21, TRAJ52)
CALGVNAGGTSYGKLTF

SEQ ID NO: 655694 - protein, 13 aa, Homo sapiens
  CDR3 for beta chain variable domain of TCR clone 327847 (TRBV5-1, TRBJ1-2)
CASSFQGNYGYTF

SEQ ID NO: 655695 - protein, 14 aa, Homo sapiens
  CDR3 for alpha chain variable domain of TCR clone 327848 (TRAV1-2, TRAJ16)
CAANRFSDGQKLLF

SEQ ID NO: 655696 - protein, 13 aa, Homo sapiens
  CDR3 for beta chain variable domain of TCR clone 327848 (TRBV19, TRBJ1-2)
CASSVPGQDGYTF

SEQ ID NO: 655697 - protein, 13 aa, Homo sapiens
  CDR3 for alpha chain variable domain of TCR clone 327849 (TRAV12-2, TRAJ18)
CAVRGSTLGRLYF

SEQ ID NO: 655698 - protein, 13 aa, Homo sapiens
  CDR3 for beta chain variable domain of TCR clone 327849 (TRBV7-8, TRBJ2-2)
PGRLSISPGSCFF

SEQ ID NO: 655699 - protein, 14 aa, Homo sapiens
  CDR3 for alpha chain variable domain of TCR clone 327850 (TRAV13-1, TRAJ44)
CAAKATGTASKLTF

SEQ ID NO: 655700 - protein, 14 aa, Homo sapiens
  CDR3 for beta chain variable domain of TCR clone 327850 (TRBV15, TRBJ2-5)
CATSGDRGQETQYF

SEQ ID NO: 655701 - protein, 14 aa, Homo sapiens
  CDR3 for alpha chain variable domain of TCR clone 327851 (TRAV12-2, TRAJ13)
CAVQKTGGYQKVTF

SEQ ID NO: 655702 - protein, 12 aa, Homo sapiens
  CDR3 for beta chain variable domain of TCR clone 327851 (TRBV12-4, TRBJ2-7)
CASSLGGYEQYF

SEQ ID NO: 655703 - protein, 13 aa, Homo sapiens
  CDR3 for alpha chain variable domain of TCR clone 327852 (TRAV12-3, TRAJ40)
CAMSDSGTYKYIF

SEQ ID NO: 655704 - protein, 12 aa, Homo sapiens
  CDR3 for beta chain variable domain of TCR clone 327852 (TRBV7-8, TRBJ2-7)
CASSLGDREQYF

SEQ ID NO: 655705 - protein, 13 aa, Homo sapiens
  CDR3 for alpha chain variable domain of TCR clone 327853 (TRAV12-2, TRAJ7)
CAVNLYGNNRLAF

SEQ ID NO: 655706 - protein, 14 aa, Homo sapiens
  CDR3 for beta chain variable domain of TCR clone 327853 (TRBV25-1, TRBJ1-2)
CASREATGPYGYTF

SEQ ID NO: 655707 - protein, 14 aa, Homo sapiens
  CDR3 for alpha chain variable domain of TCR clone 327854 (TRAV26-1, TRAJ38)
CIADNAGNNSTLIW

SEQ ID NO: 655708 - protein, 13 aa, Homo sapiens
  CDR3 for beta chain variable domain of TCR clone 327854 (TRBV20-1, TRBJ1-1)
CSARGGGNTEAFF

SEQ ID NO: 655709 - protein, 12 aa, Homo sapiens
  CDR3 for alpha chain variable domain of TCR clone 327855 (TRAV26-1, TRAJ13)
CIVSRGYQKVTF

SEQ ID NO: 655710 - protein, 13 aa, Homo sapiens
  CDR3 for beta chain variable domain of TCR clone 327855 (TRBV11-3, TRBJ1-1)
CASSRQPNTEAFF

SEQ ID NO: 655711 - protein, 12 aa, Homo sapiens
  CDR3 for alpha chain variable domain of TCR clone 327856 (TRAV13-1, TRAJ27)
CAAHTTAGKSTF

SEQ ID NO: 655712 - protein, 15 aa, Homo sapiens
  CDR3 for beta chain variable domain of TCR clone 327856 (TRBV20-1, TRBJ2-5)
CSAPPRTGFGETQYF

SEQ ID NO: 655713 - protein, 12 aa, Homo sapiens
  CDR3 for alpha chain variable domain of TCR clone 327857 (TRAV12-3, TRAJ20)
CAMVRGDYKLSF

SEQ ID NO: 655714 - protein, 15 aa, Homo sapiens
  CDR3 for beta chain variable domain of TCR clone 327857 (TRBV20-1, TRBJ2-7)
CSARDRVSGMDEQYV

SEQ ID NO: 655715 - protein, 15 aa, Homo sapiens
  CDR3 for alpha chain variable domain of TCR clone 327858 (TRAV8-3, TRAJ45)
CASSYSGGGADGLTF

SEQ ID NO: 655716 - protein, 20 aa, Homo sapiens
  CDR3 for beta chain variable domain of TCR clone 327858 (TRBV7-8, TRBJ2-2)
CASSHLFPGPTIHITGELLF

SEQ ID NO: 655717 - protein, 14 aa, Homo sapiens
  CDR3 for alpha chain variable domain of TCR clone 327859 (TRAV1-2, TRAJ8)
CAVREDTGFQKLVF

SEQ ID NO: 655718 - protein, 16 aa, Homo sapiens
  CDR3 for beta chain variable domain of TCR clone 327859 (TRBV19, TRBJ2-1)
CASSKAGPSSYNDQFF

SEQ ID NO: 655719 - protein, 18 aa, Homo sapiens
  CDR3 for alpha chain variable domain of TCR clone 327860 (TRAV29/DV5, TRAJ26)
CSVLLFSKRKPEGPNFVF

SEQ ID NO: 655720 - protein, 17 aa, Homo sapiens
  CDR3 for beta chain variable domain of TCR clone 327860 (TRBV20-1, TRBJ2-2)
CSASGSGQGGLTGELFF

SEQ ID NO: 655721 - protein, 18 aa, Homo sapiens
  CDR3 for alpha chain variable domain of TCR clone 327861 (TRAV13-1, TRAJ52)
CAAKNPHAGGTSYGKLTF

SEQ ID NO: 655722 - protein, 15 aa, Homo sapiens
  CDR3 for beta chain variable domain of TCR clone 327861 (TRBV28, TRBJ2-1)
CASSIIAGGRSEQFF

SEQ ID NO: 655723 - protein, 16 aa, Homo sapiens
  CDR3 for alpha chain variable domain of TCR clone 327862 (TRAV30, TRAJ24)
CGTEIVDADSWGKFQF

SEQ ID NO: 655724 - protein, 19 aa, Homo sapiens
  CDR3 for beta chain variable domain of TCR clone 327862 (TRBV25-1, TRBJ2-2)
CAILVYRVDRGRKTGELLF

SEQ ID NO: 655725 - protein, 16 aa, Homo sapiens
  CDR3 for alpha chain variable domain of TCR clone 327863 (TRAV3, TRAJ23)
CAVKIGIYNQGGKLIF

SEQ ID NO: 655726 - protein, 14 aa, Homo sapiens
  CDR3 for beta chain variable domain of TCR clone 327863 (TRBV12-4, TRBJ2-1)
CASSLGQGASEQFF

SEQ ID NO: 655727 - protein, 18 aa, Homo sapiens
  CDR3 for alpha chain variable domain of TCR clone 327864 (TRAV3, TRAJ32)
CAVRDIRGYVGATNKLIF

SEQ ID NO: 655728 - protein, 15 aa, Homo sapiens
  CDR3 for beta chain variable domain of TCR clone 327864 (TRBV12-4, TRBJ2-2)
CASSLGVRHTGELFF

SEQ ID NO: 655729 - protein, 12 aa, Homo sapiens
  CDR3 for alpha chain variable domain of TCR clone 327865 (TRAV21, TRAJ33)
CAKMDSNYQLIW

SEQ ID NO: 655730 - protein, 15 aa, Homo sapiens
  CDR3 for beta chain variable domain of TCR clone 327865 (TRBV7-8, TRBJ2-7)
CASSLERAGSYEQYV

SEQ ID NO: 655731 - protein, 16 aa, Homo sapiens
  CDR3 for alpha chain variable domain of TCR clone 327866 (TRAV21, TRAJ52)
CTVTNAGGTSYGKLTF

SEQ ID NO: 655732 - protein, 17 aa, Homo sapiens
  CDR3 for beta chain variable domain of TCR clone 327866 (TRBV28, TRBJ2-5)
CASSRQGGLAGAETQYF

SEQ ID NO: 655733 - protein, 16 aa, Homo sapiens
  CDR3 for alpha chain variable domain of TCR clone 327867 (TRAV3, TRAJ37)
CAVRVRGSGNPGQLIF

SEQ ID NO: 655734 - protein, 11 aa, Homo sapiens
  CDR3 for beta chain variable domain of TCR clone 327867 (TRBV11-2, TRBJ2-2)
CASSLPGELFL

SEQ ID NO: 655735 - protein, 12 aa, Homo sapiens
  CDR3 for alpha chain variable domain of TCR clone 327868 (TRAV12-3, TRAJ17)
CAMTLTGNKLTF

SEQ ID NO: 655736 - protein, 16 aa, Homo sapiens
  CDR3 for beta chain variable domain of TCR clone 327868 (TRBV4-1, TRBJ2-3)
CASSQRAGGLTDTQYF

SEQ ID NO: 655737 - protein, 11 aa, Homo sapiens
  CDR3 for alpha chain variable domain of TCR clone 327869 (TRAV1-2, TRAJ20)
CAVANDYKLSF

SEQ ID NO: 655738 - protein, 16 aa, Homo sapiens
  CDR3 for beta chain variable domain of TCR clone 327869 (TRBV24-1, TRBJ2-3)
CATSDPGTGATDTQYF

SEQ ID NO: 655739 - protein, 14 aa, Homo sapiens
  CDR3 for alpha chain variable domain of TCR clone 327870 (TRAV1-2, TRAJ16)
CAVNRFSDGQKLLC

SEQ ID NO: 655740 - protein, 13 aa, Homo sapiens
  CDR3 for beta chain variable domain of TCR clone 327870 (TRBV20-1, TRBJ1-1)
CSARGGGNTEAFF

SEQ ID NO: 655741 - protein, 11 aa, Homo sapiens
  CDR3 for alpha chain variable domain of TCR clone 327871 (TRAV38-2/DV8, TRAJ43)
CAYRTLNDMRF

SEQ ID NO: 655742 - protein, 13 aa, Homo sapiens
  CDR3 for beta chain variable domain of TCR clone 327871 (TRBV10-3, TRBJ2-7)
CASKLAVNYEQYF

SEQ ID NO: 655743 - protein, 14 aa, Homo sapiens
  CDR3 for alpha chain variable domain of TCR clone 327872 (TRAV8-1, TRAJ24)
CAVNAADSWGKLQF

SEQ ID NO: 655744 - protein, 16 aa, Homo sapiens
  CDR3 for beta chain variable domain of TCR clone 327872 (TRBV4-3, TRBJ2-1)
CASSPALDRGVSEQFF

SEQ ID NO: 655745 - protein, 13 aa, Homo sapiens
  CDR3 for alpha chain variable domain of TCR clone 327873 (TRAV8-3, TRAJ36)
CAVGATGANNLFF

SEQ ID NO: 655746 - protein, 15 aa, Homo sapiens
  CDR3 for beta chain variable domain of TCR clone 327873 (TRBV7-3, TRBJ2-1)
CASSLSSGSFDEQFF

SEQ ID NO: 655747 - protein, 17 aa, Homo sapiens
  CDR3 for alpha chain variable domain of TCR clone 327874 (TRAV26-2, TRAJ42)
CILRDVGYGGSQGNLIF
